United States Patent Application Publication US 2015/0052636 A1 - sequence listing, part 11

SEQ ID NO: 35856 - DNA, 687 bp, Sorghum bicolor
  Intron number 2 from transcript Sb04g032920.1 (locus Sb04g 032920) derived from phytozome v7.0 (chr-ID chromosome_4; pos 62884698 to 62885384)
ttgaatcataggattgtctgtgtaccttttggcacccgtgttgtagggactactatagaacattagatccacctaattacatcaactttatatgattagtagcagctcaatgaaggattataattggttatgctaatttcccattgtttattttcttgtaactttttccaaccctatggattacttgctcactctggctcattcttgccaggtgatccccaagactagctttgttgtactaacataatttgtatttgtctttttataacccccccccccctctcctctcctcttccccaaaaagaaaccagagcgattggcctgagaaaatcaaagatttgttcttgtttgctttataattagaacaaacataaactaattattagatagaaaaggttctatggattagactccctttgtttccagggtttgtattatgcaacatcttgttgtgaccatattgcaatgtgtgtaccatcatttgataaaccgataaaaatgtttttttctatgttcaagtttgtagctgaaaacaaacctttttttctttaaaaatctacagcaaacctttgctcattaacttgtaccaaagagttaaatctcatgcattgctgttctttgcttcatttaatcgagttatcgtttccttcagggtatttgagaatcctcttggagacacaactgaca

SEQ ID NO: 35857 - DNA, 970 bp, Sorghum bicolor
  Intron number 1 from transcript Sb10g029310.1 (locus Sb10g 029310) derived from phytozome v7.0 (chr-ID chromosome_10; pos 59152040 to 59153009 reverse strand)
aagatcttggcaaacagccaaagccaacaggtgcagggactgagatgtcttcttggattttttttcctcgaaagtgtaatctgtttggtgtatatggaaaatctttcaactttgaatcttgtgtgagaaaacatgtatcatggtttgacagtgatggtctggtggatgagaattgggaaataccaactcactacatctaaattacattctccttaggtggattggggaatttttgtgcttagtactgatcagttttgattattgaagtttaacgagttgaatatgataacaacttatggtgacaataattgatttttaattcaacaacttgttaaaaactgtgaggaagcccttcctcacagataacccatagtttttgtttcagtctgaatgttcattgaatggtgagacagtcttttttttaatctgaagtatggccttctggcatcagtgtagaaatttaaagttgcccttgtatgctaaacgtggcggttacaatctgtccttcaaatcttcagtagagaatgtgagttgtaccaaaatctactgtttacctagatgatattaacaagtggtgcttagatagccatattctagttttcattttatttttatgaccctaagcaaactgttctgaagttcctgtacactcgctcatctgattttgagtaggtgacaacggcgtcaaagtgttttggaccaggttgagatgacactctgcttcacaaaaaccatctccactgtttctctgcactggggagctcactgcagactgatggaaatcagagagatgattgctgcttggacgcttccctcttcaccaacttgacaatcccacaaatttgtatggtgatctcactcctgcaagttgcacataccagcgaggaagaacagagccccaagcatcactactgtttccgctggatccatcagtgttcagtgaggctgtttgtggtgatggcagtgtggg

SEQ ID NO: 35858 - DNA, 914 bp, Sorghum bicolor
  Intron number 1 from transcript Sb06g004280.1 (locus Sb06g 004280) derived from phytozome v7.0 (chr-ID chromosome_6; pos 9670246 to 9671159)
cagtcaaggtgagctggttcgctgctaaacaccgttgttgaattccgggctgcaaaacttaaatatgtactagtactattgtagtcccaaaaggggtgaatccttgcggagtgataatgatcacggcaatcagttggacgcaagtcctaactcctaactcttcccatcgttcagttttttcttaaatcaataccccatccgtcccttaaaaagagtcaaacttcagaaaaattaaaaagactcactagtcactactggagtcgtggtagtcaaattttataagtttaactaagtttgtagaaaatattagtattatttgtatgtgcaaataagtttgtaataaaataatatgcaaagatctatttagtaatattagttatatatactataaatattaatattttttatatatatttggggagtgaaagttaaacatatttgctttcttgggaagcgagagtgacacttttcatgggatgaagggtcgagggagtataagggaataagttcatttggacatgaatttcacaagaatcgtatagggtaatcacttcaatttcacaaaaagaaaaagtaggaacagttatatttttctcctaggttccaaacatacccttaaccttaaggtttcttagaaaggtttgaggaaagtttgtgaaccgggggtagatggtagagatttatattatggatttagagcttgtgaattaaagtaaaatgttctgaaaagcaaaagggctcataactcaaagcttttcacagtagtactgatccaccaacattgtactctgtttcatatcctgttttgctatgttctttcaaagcatgtgtgctcatttctctgtgactatccctctttgtctcgcatgatcataccctgattttgatatttacaaccatgtttattgtcgcag

SEQ ID NO: 35859 - DNA, 538 bp, Sorghum bicolor
  Intron number 2 from transcript Sb07g015480.4 (locus Sb07g 015480) derived from phytozome v7.0 (chr-ID chromosome_7; pos 38708083 to 38708620)
ttaattctaccgtgctagaagcaggtaattcttcacacaaggtggtctgctttatatggagaatgccgtgctacattcaagttttacttaggctttatttatttgctattctggacttaattttcctatgtgatcagttgcttgactttctatgttccgcttgtttatcacaagtatctaagtgaatgaaaaatctgaatgctttccattgcagctttgaaatttatcttgtaacgtagtcatattgtgcctctgttgcaaactattgtgcgtattttattattattggtaccatacttttttttatcatcattggtaccatacattagttgcttcagtatatgcaagttgcacagttgtcagtttgaactggacacaaattgaattatattgatggaataacaaactacatttgatagtcaatctactaattagttaccagtagtattttgatgtgtctccagtacatattctgaaggtaattttttttttttttggttttctcttccagttgaggtgagaagtggatcagaaggat

SEQ ID NO: 35860 - DNA, 852 bp, Sorghum bicolor
  Intron number 2 from transcript Sb02g039610.2 (locus Sb02g 039610) derived from phytozome v7.0 (chr-ID chromosome_2; pos 73662900 to 73663751 reverse strand)
aaggtacggatcaaatcggttaagtgttttggtagagtttcatctcatgattttttgagttttaattttcgattttcttcgatatagaatgattctgataggagagaagagttgtgagaagtgaatctagggtaatttggtgactaaagacttcagactaagagagctatggtcaacgggtgtttttagcttttcgctcgtaacctaagtagagatataatttttttttatgaaattagggtggtttgcaccctacaggaaatttattaaaagccaaaaagctaaaacagttacaattaaaaaaaaaagttatagagacagagatacagagaaaaggtagagatgtggtttgtcagttctctactaaaaccaatattgtttgtttagctgataagctatgatagaaaataatgttgactggtttcttgtataaaaatactattgaatgaatgttagattcggctaataaagtcaaaagaacaggtctactagttgcatttaaacctttttgtatatatagctccaatgaatctgctccaagcatcagatttagccactgacccttccaaagcatcaacttttgtttatcttattgcgaaacgacgtgagttgcgtgctgagtgtgccagaaaatattcggcgtgcgatgtgaaaaacaaaaacatataatttggatatactatgaatatgcatcatctaagatgtttgaaaaacttctaaatagtttttttttggcttctctctttttcatcaaagagacgttttcagcaccgaattatttattttctataaattcacgtatttccgtaaatatatatacaatttttattcttttttcaggattttccggcc

SEQ ID NO: 35861 - DNA, 892 bp, Sorghum bicolor
  Intron number 2 from transcript Sb01g037000.1 (locus Sb01g 037000) derived from phytozome v7.0 (chr-ID chromosome_1; pos 60537862 to 60538753)
aggagaaagttcagaagcgcagattggttgaacaggtcagtatctgtcaattcctttctgagaccatgcactgactagtttcttgttatccattttctatcaatatcatgatgcatggatcaaacttcagttaattagaaatattgaggttaaaagtcttatgctccctataccctatctaagccgtgtatgactttcgaagatggtaagaagttcagtttgccatacagccaatcatatcatcgttcctatcatcgttcagtttggcatagaatcattaccatgtggtttccttttgtcaaaattcactgccatcacttacatctttctatcaaaaggaacaacgtggagaatgaattttcttccttggatgttgccgtgtcagcatgggagcataggaagatgtaactccaattaagaaatgattctatgcctgcatatttgcatgacatcgagatatatccacatggtggtctaccagttcaagtcatactaccaactcagtatgttctcctagtgccttgtgctgtttccagttgcagtctgaactttgtgcaaattgaatacttcagtattcctgactgtttccagttggcttcagcttgcacagttcagtatatattttcatcagtgccctattagacgtccatttcctcagttacactttagttgacttcactattccttttacttctaaagtataaccatatagttctaaaaaaatgtcatttgcccaacaaaatcatgacgtaagcatacatgtattgtctaatatactcctcaggagtgccttttgctgtatgcatcttttaaacagattgatactgcgtacttgatatctcatgctgataccatcctaaattcaatgcagattaagcgtgaaatttgtacc

SEQ ID NO: 35862 - DNA, 539 bp, Sorghum bicolor
  Intron number 1 from transcript Sb07g027750.1 (locus Sb07g 027750) derived from phytozome v7.0 (chr-ID chromosome_7; pos 62698339 to 62698877 reverse strand)
gggcagaggaggaagaggaggtgatcactgaagaggtagtcaattttactcttttttcttgttttatgttggtctcattgtttaggatcacaggcccaatgtgattgtgcattgtgctatgcattatgatttacaaaactcaaacttagtgaagtgggattacggggaatgtaaagtggagttaacaaaaaaactgatcatggtattaaatcaggtatatgactgttcagccattttgacaccattgtcgtcaactcgtcaaaaccatgttttggatgcacaaaaacataattcgaccttgttttttctttttctgtttttggcttcaaaaagaccaagcataaatgcttatgggtgcctgataatagtatgcctgctttttcgtacccatgtcatatgaaggcagtgaggagtagcatggatatggattgcaaattctgaactgtactaactgtgctggttgccaaagaggaagatattaacatgccatgttttttaatgcaggatttgcagaacatactgtctaagttgcgtggcca

SEQ ID NO: 35863 - DNA, 977 bp, Sorghum bicolor
  Intron number 2 from transcript Sb03g037070.1 (locus Sb03g 037070) derived from phytozome v7.0 (chr-ID chromosome_3; pos 65073839 to 65074815 reverse strand)
agtgagccttcctttctctcctccgcgctctatccctccgatctcgtccggtctcgtggagctcctttcgttatctacgatatgcttctggcctgctcgcggtgcctgtctcgtgcaccccgcccgccgcttcctcgtatcctgagtcccgacccgccggtgggtttggtcctcgatgagctatccgtttcagtcatggttgcttagttcgtgtgatcaggtcgcctctgtgcaaacgcaccgattgccaagctgacatggatgatgcatcatatgcgttcgagctaggcaggcatgcgatggtctactatatgatatgcatgcttccggcatgatgcaggccatcgccgagatggagattgccggcctgctgatgacttggcactgtctttgttttgtgcatttgtactgttgtgcttgaaccactgcattcatctgaaattctgaactgctctatctgccgtggctattgctgtacgttggaagagttgtcagttccgactgtaatgcacatacgttttcccgtcagcattgcatatgctttagaaattcatgagatgaaatattctacagcttggcttcagtcgcaagtccaatttccgtattcttttatctcaggtatatgagtcatgtatctatgtcagactgtaactgtaagcaattctttaatgggactatttcagtactgatacccgtggatagttgaatacttaagtatgctcaaatattcagtttattagttaaatatcgactttcacttctgcctactttatgtgatctttatgtagtgtcatgaaatagcaatatcttttcggtttcaaaataaaaaatacatacagatgctacacttatttatatttacctgcatttcactgcactacatatagattgaagatcattattcaggctcatggagtttgaaatatttgatgttttacatgatttgaagcttatgtgaactgctttctctcaggttt

SEQ ID NO: 35864 - DNA, 673 bp, Sorghum bicolor
  Intron number 1 from transcript Sb03g004050.1 (locus Sb03g 004050) derived from phytozome v7.0 (chr-ID chromosome_3; pos 4319221 to 4319893 reverse strand)
tgtgggaggcagacaagatgtgagtttgccttttcttctcaatctgtaccctagttgatctccttgatcggactgctttgatcagtgaacaagctgtttttttcttcccaccttcactctttggtatgctttgggtcgtttttcacggcccttgaaatccctcaccccgctttcagcatttttcttgatggttttcttttacagttaggtttcttgatcgttattcctttttttctgattctttaatggttattgcctggtagcacttgtgataagcttcagatgcttaataattactttattttcttggaatttccgcttttccacactgcattttttgcctgtttcgcagaagctatgcttttttttttcgattctttttcgctcttttcttcatccggtaagcttcgttttgtgcttgacggtgctgacttattacgctacttgtttatttgtctgtcttctcgtccgggttttctctgcttctccattagaggcagtagtcgcgcagttttcctgctatcttgactacctatctgcctatttcttaagacgttttttttggctggttctgtctgactcttgtgtgcatactaatagcgcagttttcctgctatcttgactaacgcttgctatgctcgttgtttgagaagcaggttggattcctacattt

SEQ ID NO: 35865 - DNA, 617 bp, Sorghum bicolor
  Intron number 2 from transcript Sb04g009880.1 (locus Sb04g 009880) derived from phytozome v7.0 (chr-ID chromosome_4; pos 12583345 to 12583961 reverse strand)
actcggttagtagtgtcttgttctgcttcaattttctaaggctagagacatgtagcagactcatcatctctttgtaggtttccttaggattgcatgcagtaatctaatctaagcattagtgctgctgctgctgacaagtataagctttaatggacataagcgaaataagagttatttatgccacttgttcatgcttgttcatctcagtggtttcaattcaattttgtttccaactccctaagaatacttttttgacattgtgtggtccttgaaattattgatgcttaatatagactgcagtgtgccatcctttatatagttgcgcactaggtagccacctattcgggcttgcataatgtatgagatattcacaaactacagttgtcttggcttcctgaattgaaatatgtgttctcccttttcgactttcatatattgcatacacaagtgatttcaacatagttgcttctgcaaactgtatagatccaagaatgctgtcttctttttgctgccatgcactctgtttttatttctcgtcttcttttgaaacgtgagttaactacattgtaaaaaatgttgcagccatctgtccggaagcaacacaacgctggatacaa

SEQ ID NO: 35866 - DNA, 958 bp, Sorghum bicolor
  Intron number 2 from transcript Sb07g009300.3 (locus Sb07g 009300) derived from phytozome v7.0 (chr-ID chromosome_7; pos 15938448 to 15939405 reverse strand)
gatcgctatcttgaggcccgccgagatccgaagatgtaagttgtctcgcctgcactatggatttggatttccccctttttttgtgtgcatgcttgcagttgattatgttaaaaaaaaaagctatgtagccacattcttgaatggcttaggtcacagaagataatcacagttaattaaaaaaaactatggccaaactaagttaatcttagattgaaaaatatcagcatatatttcttagtcttagaattcctcttttggaaccaccaaaagttaatgagagcattttgtaactttatttgacagttgttgaaatagtgcagaagatcgaacttccactttgtttaaaaattgacagagcacagatagatgctatagtactagtgtaccatataccacttgttcttttgcacttagtaattaaccttcaaccagctaaagaacagtgctaccatacaacaatgttttctcatgtacgaaacaaagtggttataggcaaacaatatgttctgttaacaggtcaaaatagtgtgatcacagcgcacttagttggccatctgaaaattgaagtgggatacattttttctttaaaagaaggtatattgcacttgagaatttgtaggcatatttgcatacgaacaaccttgtatcattttgctgtcggttgttatttactaccatgatccatgtgaggtagatcctagtcaacaacctcctttgcgaactagtgaacctagtactccctttgtccccaaaagaatgtcattctagccttgtcctaagtcaaacaattttaagttggatcattttgtatggaatagtactgtttttttggacagggagggagtacttggtattgctttgtgttctccacttttgagaaagtgcaatctactgatgagatagaatgttctcatctaaattaggtgtgaaaagcaagataagggtataagaggacacc

SEQ ID NO: 35867 - DNA, 779 bp, Sorghum bicolor
  Intron number 1 from transcript Sb01g002260.1 (locus Sb01g 002260) derived from phytozome v7.0 (chr-ID chromosome_1; pos 1885963 to 1886741 reverse strand)
cgacgccctccgtgaccgcgcagtacttgcccaaggtattctcgggatttctctttgctgcttcagtggactgctgtgttgtggtctgacttcttagatgtatctgctctggttgataggaaggcgatccgatggatagaattgtagtctctgtcccatttttgtactgcatttgcatagtcaagcagatgagtctgtagaaacactgcagttaagactagagaatgaatcgtgacttggaatttagtttgaagcaattctttagctctggttgatagtcatgtattcaaagccacgatcactctttgtgatatcaaaagaagataaccaaattgccgataaaaacttgaaatgggctgatttgcaaaaaaaagttcaccactgctggtttgtatggaacttgaggtctatgcttataattcacatgttttttgtgaccataatgatggggtggtataggcatgccttccagtttctgaattgctgcacttgctcgcttgttacaacttcactgcagttccgtgtaatgtgtgtatgtgtatgcatatccattgctatatatgaattttgcagttgtgtgaagtcaactctgataagtaaatacactgcaatttggacgatgctgtttatttctatatcatgtataatgtttgtactatattcttgatccatggcaatcttcagttctctggttgaaataccactcatttaaggaattgtctcgcttttctgccgctgactagctccaattttatttcccactgcagacaaccctaagg

SEQ ID NO: 35868 - DNA, 830 bp, Sorghum bicolor
  Intron number 1 from transcript Sb06g025140.1 (locus Sb06g 025140) derived from phytozome v7.0 (chr-ID chromosome_6; pos 54142881 to 54143710 reverse strand)
gcgcggtgccatcctcgcgcctcctttcccgtcaagtgagtttactttgctcaagatcatcagtttttggctgcacgcggccgccccaatgtcatctgctcgcccgcttgttctgacgccacaacgttaatcatgcagatttggagccgatcggcatactgcactgtctcctccacctcatcaagccctgttgctagaaggagccggttctccactctgatggcgactgcatacaagtatgattcgacatttctggttttgttattgtgtaccttttgctttgggataatgcactaggcctaatattaactagcaaaaagtactgaatgatttcgttcaaaataagaaggactgaataatattttagttttgcattggtgatacaattggaaatttgccgctgaaaacgtttgcccccctggttatgagttatgactgctacagtgccactgagtgaatggcatgctggttatgggtccagtggtaaatttgagaatgccaacatttacggttgcaatggggggaggggatccattcatgatgtatcagtactacgctaaattacataaggtaaaaactaggtggatccattttctatgatgaggtgcacaaatcgacagcatagatcataagcatgttggcaaggaaagaaatgaagaatcaactttgtgactagaagttgttatagtactcagtactcgcagactcagttacaaacagctgcaatactaatcatcccgttgatgttttagcttcattatgggtccatatgttcatgtgagttttgtgtttcagcacagggaccccggacctagctgacttcaattggg

SEQ ID NO: 35869 - DNA, 932 bp, Sorghum bicolor
  Intron number 1 from transcript Sb01g046600.1 (locus Sb01g 046600) derived from phytozome v7.0 (chr-ID chromosome_1; pos 69773666 to 69774597 reverse strand)
tccatcgccaaccgcgtgctccggcagtgttcactgtgcgtgcgctgttcgtcttctccatctttattcgtttgctatcgtagtggaccacgtcaatcacaagttcagaacctttagtcttttttcagttgcgccaagcaaagtccttaatttgtgtatagtttgtctgaatgtcaattgggtgcaattatttgtatgcccaccccaaaatgggcacacagggagggtaaacactcagtataggtatagtacttaggaccaaatttccatgctctggtccgaactcaaatctggttgttctaggtttaatttggaatatatatactttggacatttggtgatctgaacttcccaagctttatgatgtgtcagtactcatacttgtctgttgcaggttcagttcaggtgcagtattttgatttaggaaagttcggatgcagtatgatttgtggagagtggaaacagacatgaatgaaatatagggacccatgccatgactatactatatgcatcttgtattgacagcttaataatgcctaagccaaaaacttgtaatccaattctcatttccatcagtttagaaggtgttgtacctgtcacgtccttcaaaattgactgggtatatttttcagcttggcctttttgcttgctttatttattagtactaattgtccagcaaatgtacagtgtcacatgtgcaaatctagtcgagcttccaatctgatcttctcgtgtagcatcctgaaccatataatttattgacatgttttatctgggtttgtctctctctagacatccttttggctattagcgtggagtaactgacatattcttttcttaagtgaaaaaaaaacttaaaatgctctttacttacttcaaaatcttggcaactaatatgttaatgccacacaggacattggacaggagtgtcg

SEQ ID NO: 35870 - DNA, 248 bp, Sorghum bicolor
  Intron number 1 from transcript Sb07g006380.1 (locus Sb07g 006380) derived from phytozome v7.0 (chr-ID chromosome_7; pos 9247983 to 9248230)
gaagagaggtatggaagaatttgattattttattctgtgaaacacactatctttgtcccaaaaatcctgtccatattagaagtactgtagcaactgattgaattgatatggtctcgtatgcatttaagtatattttcataatgatctcaacttttcaggattcattagctgaaaaatgaaccatattgactgtgtttatatttttcctatttctaggttgactcttgttagtggcctgaagtgggttg

SEQ ID NO: 35871 - DNA, 903 bp, Sorghum bicolor
  Intron number 1 from transcript Sb02g034920.1 (locus Sb02g 034920) derived from phytozome v7.0 (chr-ID chromosome_2; pos 69381776 to 69382678 reverse strand)
tcggtgagttcgtccttcactaccttgcctctgatccccatcagtcatcatttccatgcgcgctagattggctcagaattgaagtaatgctgtagctgctaggctatctcagatgttgcgttgtgctaccttaggtgtttctgtgctagttttagagatcctgatcagttttaacagtgggttgtgttagtttgttacttggttaatgttacttgtttgaaaagaccttggatgcagtaaatttcagcaaccaaatccaactatttgattgttctgatgttgctcatgtgaattatgattgctatggttgccccagggtgatgtatagtcacctggttgtatgagaaatgggaacgattgcttcctgtatctgtttgataaacattccctgattaatttacagaaatgtgtattatctatgtattcaccaaacaaaaatttaatggcaatgtgacattctttgcagttaggacctgtatcttttttgcgaattagccttaacgttgtacctaggatggtgaaatggcattaggatctttttgggtgatctatatcatgctgagtatgcttatacctgattggctacggaaaattttgaactacctactaagtataaagtatgttaacaagctgatcaccttttcacttttaataaaatatatatctgatctgtaagaagtgaatcatatgggagttgggacaccagtttctgattgtattctttattctttttaaaaagatcagcagtcaactgaattgaacttggtcgaaatggactaccccaccccccaccccaccccaccccaaaaaaaagtgagcattctcaatttgaatgagatgatttagtccatcgttataccattttttttaattcattcatggcagtgccaagacattaaagaa

SEQ ID NO: 35872 - DNA, 732 bp, Sorghum bicolor
  Intron number 3 from transcript Sb06g029700.1 (locus Sb06g 029700) derived from phytozome v7.0 (chr-ID chromosome_6; pos 58277490 to 58278221)
gcgaggaagctcgaccagggcatcctgattataaggtttattttcttctgaaaacattacaaggatgtgatgttagattatgtacaccagggatccagagccaagcatattgatttaaaatcaattaacacaaaacattacacattaacatatataattgcaaattctctgaaccccacaggctccacagggatccgccacgacctctctgtgtatgtccatgtgtttgcttgtttgtatgattttggggtggggtttgatggtgggacattgggggggaagggtgctgtaaataacaaatagagaggtagaggactgacatgtatggatgaacacttatgccaacaagttcaggaaggttcttcctaatcctttcctattaataagtattaacttgtcgtttttttattgcctttcgaagcattaaacatccttgaacaacagttggcagattgatcctactcttatgtgccttttccttaaatttgatgcaattcactcagattgcctgtggctgaaaggcagggtaccactgaatggtgtatcacatttaccaaagatatgcttattgaatttttgaaagtggctgatagatgaagtaaacatatgcacgtcactgttgattttgcttatttgcatgggattagatatttcttttgcaaaaccattattctagttttttttttcatccattggcttattatacacttgaaatgatcttgcagatttgag

SEQ ID NO: 35873 - DNA, 621 bp, Sorghum bicolor
  Intron number 2 from transcript Sb09g022620.1 (locus Sb09g 022620) derived from phytozome v7.0 (chr-ID chromosome_9; pos 52262138 to 52262758 reverse strand)
ctttgcgtgaaggaaaggtaggtgaatgactacattaaggatatttcacacctcaacgcttttcatcactacaatttgtatctttactatactatcatcatagtttaggtttaaacttgggcatggagccagtactctttatcatattcattgtttcagcctgtacttttcatccctgcagtttgttccattcatgtgcatggaacatgcatgatcagtctagattgattgtcctacttgaagaccatattccatatgtactgtgtaatacatgaattcttacaaatatagtagtagctcccaatcaagcacgattcactgaattcagcagcttaactagatggatttccttcccagtattttggatatataaataccacaattactaatgtgcgtgcacttttctattgctccaaccttttgacttttatttaaaaattataagactcaagtgaaaacaatgagacacttacatctacatgtagtaagtcctttgcttcaaaactcaggacaggacctaaatgcagaatgtgatacctacattagcattgtttctgtagtacagttgaatttagctacaaagttaactattcattcttctccagtttgttattgctgtag

SEQ ID NO: 35874 - DNA, 956 bp, Sorghum bicolor
  Intron number 1 from transcript Sb01g020140.1 (locus Sb01g 020140) derived from phytozome v7.0 (chr-ID chromosome_1; pos 22293275 to 22294230 reverse strand)
aacaagcttcagcatctgtggaaggcactgaggtgtgtgaatcctataaactatttcgatatctatcgttgtctacttaagttttgtgaagttctgttggtagacagtgggctgagatccaaaccaaacccacaccaatccaaaacatatatatgtgaaagtcaaatccaaaccaaattagaccatgacttcaatcatccacaccaaatcataccacttatgcgctagacccattaaaatacatttccaacccaccatttcaccggcacctcatgctattgtttatatttagccataaacaaaagcaaaaaataaatagatagaataaaaaatcattgtaaactctattatttacagccaagccagttcagcccactttaatagggcccaaaccaaactggcccaacagccttttcagcctgtttcaatccaaaccaatacagcccaaaagtaaaaccaaaccaaaaacccggttttaacccaaaccattgtcaggtttagttggtattaataaatcatatattttcattgaaggtaacaatattattatgtaccataggcacccatagagaaagtatggcaacttggtgtggaattttgggaacttttattgatggccatctttatttattttattgttgattgacatgatgttctatataatttacgctacatccgtttgttctgtatctaaacataccatatatctaggtgcctagcaaaatctatgtgtacctagaaaagccaaaacaatctataatttgggacggagtacctttttgtgttatttacacttaaatattaactacattgtagtttcttcttagaagtttaaaatcttgatgggcagaaatttagtagtttctatttaaaatttaaatagtatttgacaaatttttttttaatttgattgtctaacaggtacctcttactgaggaagaagttgaagaattggt

SEQ ID NO: 35875 - DNA, 476 bp, Sorghum bicolor
  Intron number 1 from transcript Sb04g003620.1 (locus Sb04g 003620) derived from phytozome v7.0 (chr-ID chromosome_4; pos 3449722 to 3450197 reverse strand)
aaggtcaataccaaggtcaagctggaggtacgtatatgtacttcgccattcatcatggttaaaaaaagatttttttttattaattctctctatactatatgtttgtttatgttattattatatataattttgattcataatggcacgagggcatcatcgtcatcagaactaaaaagatacatagaagaattttcatttatctttaatattgttattatattatatataatataaactagatatatataagtttatatatatatatagatatagatatgtagatgtatagagccagagatattatgaaggaaaatagtatcttggaaactaagtcaaaagttatgagatgaagtcttgatttgctacatatatctcttataggttattgcaaccgtatataatgaattctccaacgacagcacggatctcttataaatcatcattatacaatttgtttgcagcccccaaagcaggcc

SEQ ID NO: 35876 - DNA, 722 bp, Sorghum bicolor
  Intron number 1 from transcript Sb03g044340.1 (locus Sb03g 044340) derived from phytozome v7.0 (chr-ID chromosome_3; pos 71693645 to 71694366)
ccgcgcccggtacccgtgcctcgccctcccttctccccctttgttttacccatatatatatactcccttcgtacaaaaaaaaataacataactcgcttttcgagaagtaattaacagttttaagtttgagtatatctataaaaacatactaatatttatgataccgaataagtatcaattagattaaccatggaatatattttcatagtaaacctatttatttagagacataaatgttgaactattttctataaactcaatcaaacttgagcaaatttgacttggttcagatttagaattgcattctttttgggacggagggagggagtattatcataaccgttgtattccatcagtttgagcccttttctcggccaagattatgcaaaatattcttctcgtggtacttagactatgctcatccgtagagttataactaaaaaataattgctatgtcaataatgtttccagcgcttccaaattattagtttcattggtgctagaagctggagttgcttcatacttgtacttgccaattgggttctgcaattatgttgttctattgcattggtgctgggaccaggattagcatgtggctatttgccttgcttcctgggattcttttttttccacaagtactatccactgagcgcccccaagacgcaagtttgtgataccgggtggcacttatctagtatgccattcaatccatgcaggtaatc

SEQ ID NO: 35877 - DNA, 896 bp, Sorghum bicolor
  Intron number 2 from transcript Sb02g031600.1 (locus Sb02g 031600) derived from phytozome v7.0 (chr-ID chromosome_2; pos 66528872 to 66529767)
ctcagcgcccggctttcgcggtgcgggccgtgcaggtgatgatttttcgaatgcaattttgaacgggacttagctagttaaagtagacgaagtcaaacacatgttttcctcgtttattatttattcgcaatatggttttaccgactgtggattttagttggttggttcatttggttgtcactcattcctgcaatggagaattccagttgtctgatcttttccttactgtacttatgtcatctgtgtgaaggctggactgcttgactttgtctactttaactagttaagtgcactttttacctgataacatcttccactgagatgagctcattgctatgttgtgcattcgtgctccttttgatcggaaaatccaatagatccttctgagctcttcagtgccaaaagcatgaaagtaatgtcatggtgttgcattcatgccttgctgtttaggttcagtagtcagggtactggctgggctagcgggaaatttcattatgttctaagctgaagcttgtaaggatttcattctacttcaccatctcaaatttgggttctcttgagtgttgaccacgtggtattgtttgtattgaactatcgatgcaaacattttgcgtttatgcatttctctgaaaatttgatcatgccaatagttcaatgtctatgcatgttgtgttacaaagaagtagagtttaagctttccacaagtgtcagtgcccttgttttaatcggtagtatgttactgttcctgaatttcaacgcttaattttgtacatagagtcgttcttttctttttttagctagttgctaaattagcaattatgatatataaaggccttcaactattgttggtcattgtccttattgaatcttgattcattaggtatctccaattcttg

SEQ ID NO: 35878 - DNA, 918 bp, Sorghum bicolor
  Intron number 1 from transcript Sb09g025230.1 (locus Sb09g 025230) derived from phytozome v7.0 (chr-ID chromosome_9; pos 54706343 to 54707260 reverse strand)
tgcaagttggtactgttatttactcactccgacttcatctgttaagtttgatgcttaatcttgcagtgcatttacatgggaccatatatagacggaaacaaaaatatatgcgtaaattgatagatcagctcagtttgttgagttttatttcgatccttagtattcataacttgatatatcagctcagtagtttgtttgagtttcattttgaaccttagtattcataacttgatagatcagctcagtggtttgtttgagtttcattttgaaccttagtattcactaattcaatacatgaatcataaaaacgctttcaaagattgctcaagccttttttgtggcaacctgtgcaaatcttattttttctgcttaatccttatttatagttggaaagagaattaggtaaggcctatagttactttctttttccagtgtgaaaggtgccttcacagtattaagactcggagtttagctatttttcttgaatttaacttaatgtgttctaagatgtgcataaatgggaaacattttgaaaagaagaatgacatttttgagctaacacctaatgtaaaataattctttgaaaaaagcgtacagtaactgcatattttgcattgtaagagaaaacaaagcacatggaaagtggatgcaacttaaggcaaatgtggacagcagttcaaaaacaaaaggaatttgaactataagatcttttctaaggctcaaccaagtggcatagctaagctaagagttgaaataactcacgtgcatcaacagtatgatgttaataccaggcatagtttcagaaattgaatatgctgatgatttcaagataattttcagatgatctgtaacctcgtataacatactaaagctccatctaatatcttgattattgtttgttcttactacttcagtcct

SEQ ID NO: 35879 - DNA, 480 bp, Sorghum bicolor
  Intron number 1 from transcript Sb01g015190.1 (locus Sb01g 015190) derived from phytozome v7.0 (chr-ID chromosome_1; pos 14688589 to 14689068)
ccttcgacggcgccgaggccttcgccagggaacaggtttccaactcctattcacttccactgctccatccaatacagttgatgtttgtataataatccaatgcagaaatcgaccttccacaaaaagaaactacagaaatcagagtcggtgcctaatcctgttttccgcttcgtttcgtttcgtttcatttctgttctgtcaaacattaggtgtccttgttgtggcatgaattcaggacccagagaaagaacagtaaaaatgaggagaaaagattagacttttgatatcagatttaccaataccgctgatacctctatcttctaacgacagatgatgacgacatgtcatctagtatattcctgataaggagagattggagagctctactacttgtttacagattatacacgcttctgatctgattggtttagtggtcacttgtcagggagtggagactaaggatccaagccacttcatcac

SEQ ID NO: 35880 - DNA, 489 bp, Sorghum bicolor
  Intron number 2 from transcript Sb01g015190.1 (locus Sb01g 015190) derived from phytozome v7.0 (chr-ID chromosome_1; pos 14689086 to 14689574)
ggctgagacaggcgaaagaggccaacagggtgcaggtaacgtcagagatttttctgtccccttgttcagttttggcgtggcacattcaggatcttgcatgattcgatatcctgttaacccccgttgcaagcgaatgagggggctcgcatagttttatttttggcgaaataattgattcacatctcatcttgaacatgactgtatttgcaaatcacggacaaacctatggcccatacattgtgtgtttgcagcaaagacaagcatacatatgtagcttcagtttttttgtcaccactggcactgtaaaagatacacataggtattactgtcgatttactctgactggctgacatagttcatcctcaagaatctgtagtatggtttgagtataatttgatttattcatcacacttcaaggattggttttatgcggctggacttttcttcttgtcagatcgactacacccagccagcagcaggccaaaaatc

SEQ ID NO: 35881 - DNA, 828 bp, Sorghum bicolor
  Intron number 2 from transcript Sb01g022230.1 (locus Sb01g 022230) derived from phytozome v7.0 (chr-ID chromosome_1; pos 27318252 to 27319079 reverse strand)
ttcaggtacggcagatctctcacacaattactcagcttgactttttgtttttggtgctacaatgtttgtctcttcactgcctatcataacatcaatggttttggggcctaaggttggttggagaatataatgaatgcatgctctacttagtttgggtaacatcatcctcagtgataatctatttgtaattggcatgttattttagtatttatgttatgtatagagggagctgacatcatatgccggaagaattgaaacttttgtgcccttttttcttgggcgtcccatgaaagaagttgacctttttggagtttatagtttaataccttattaagggtactggtaccttccacctgtggaatatacagtcaacactctatgtgctggttggcatgcaaaagtgacttaatgacaaacgacagggaaagtatgggtgcctcgctattggctaggtaatcccaagtttgtgcatgccctttcaagctaataatgatgtatttattatttgcatgtttgttcaagttttttctggtaagttttgaccccttatgacttatgagtgctgtgtgtatagctacaaccaaaaggatgatctgatgtgtttacacttctttattccatttgattaactgttagtttctggtgtgaagtttgatgcgccaagtagaattttatctgtggccacagccaaagaatgcatgctttatgtacatttgacatgcatgcaactatgctgttttatgttccagcagaagttgttttaacttggcctttttgtgctatatatgtacagccagttaaaagccctgtgacaatttgtggtgatat

SEQ ID NO: 35882 - DNA, 903 bp, Sorghum bicolor
  Intron number 1 from transcript Sb01g000696.1 (locus Sb01g 000696) derived from phytozome v7.0 (chr-ID chromosome_1; pos 678869 to 679771 reverse strand)
aagaggttaattgactggaaagctaagctagtgctctctatatttcgtggcttgatttctttaatttttggatcttctttaactgttgtctccttcttcttcttttctcgatcgatgcatccttttcaactaactcctaagatctcgcatgattgattttccatgcccctctctaacaatctatctatctatctatcccttggcttttttactgttatttcgtgataattcatggctgttttgctctctgatttgcgctactcattgctgcagtttatccactgcacgatgaccctttctcagctgccgtttacttctgtggatgcgtatttagttacctgtaggctatcagtcaaaacatgctttgcattgggatgatgtgactcaaagctgattgcctgatttcaattcgactgttcagttttgacaaaacggcgcacagttgtattaacccctttgtctctgcataggcatatatatatagacacaatatttctttgggagggatttggtcattcagagtacaaataagctagttgactttaaaattcattcttcgtcatttgatgctggttggaatatttttttcatctgcaaaaattctattccttcctcattattgcttcttccggcctagtatttcttttttttttttcttttgagagaggtgctccggcgagctagcaggcacttagatatcctctccgtgtggtttgtcaggttatttcgtgttgatctctaataaactaagtttgccaaattaatcagatcgagcgtttatttccttttgtctcttaattagcttgtgcatcatatatagttccaaattatactcttggaacttcatacatgactctaaaattaaataaatgcagaacattttgcgtatttgcagcagaaaaa

SEQ ID NO: 35883 - DNA, 333 bp, Sorghum bicolor
  Intron number 2 from transcript Sb01g042030.1 (locus Sb01g 042030) derived from phytozome v7.0 (chr-ID chromosome_1; pos 65355604 to 65355936)
caggtggaggtgtggttccaaaacagacgagcaaggttagtactgcccgtattacgcgatacgcacgcccatcacaaagatttttcgtttttgattgaacaaaaaaatgtcccgtcccgaagacggtttcggttgcgcccatgccatgcatgcacgcaaaccagcgagcccacagaagataaataaataaataaatatacaaataatattatatagagtatacatatgcttgggtttaggactaagctctcttctgacgtatggttgatgaattaacgtggtttagccgcgcgcgcaggacgaagctgaagcagacggaggtggactgcgagc

SEQ ID NO: 35884 - DNA, 976 bp, Sorghum bicolor
  Intron number 3 from transcript Sb09g002170.1 (locus Sb09g 002170) derived from phytozome v7.0 (chr-ID chromosome_9; pos 2283944 to 2284919)
cggcgttcctcatccccctattcctcgtagggaaggtaatccataataataataataaataccgccatcctgttctgttctgttctgttccctcagctggctctggctgctcatctcgccaacatatgtatgccttaatcttttactgttcaagcaaggtcgcaggatatgtatcattttccttaattcttcagagtataaggtgcacatgtgatttgtctgtaagccacaccagtgaagggacaatgctcgtggtaacattttcataataacataccaaccaactaccattaggtgagaatgtgagatggaaaggaataacaagtagttggcagacaattaaaatgcagagaagacttgttgtaaataataataataataatgcagagcacactggtacggggagggggcaagatacaggatgatctgttgctggaagatcattagatttaagcccactccactatgggccctctttggtgtctgtttttttttccctctgtcctgagacattgcatttgtcagtcagcggccctgtggcatgcctgtgttgatgctgccgatcacgtgctcttcttttcacctctgatagcacctgttatttttaatcatgtatcaaaacaggttcatttttgtgatttgcgaccttatgggtgatttgtacaattcataccaggtcatgttcaatatgtcctccttgctaccctgaatagtgtccttggttctgttgtaccagtactttgcttccagggctatcattttggagattaaaataaattggtttttgactttctttggttcccttcatgatattgctgttcattttttaattgaaaatgcagtcattttcttcatattatttaatgtgaacttttcttcttaaatacctaaagtgaatctatatgttcagaaactaatttaacagtaacttcacttttcaggcagatagtgttagaaatttcaaagatcgatactg

SEQ ID NO: 35885 - DNA, 799 bp, Sorghum bicolor
  Intron number 1 from transcript Sb06g002915.1 (locus Sb06g 002915) derived from phytozome v7.0 (chr-ID chromosome_6; pos 5867395 to 5868193)
tttgaagtgcacgggcggcgaatacgagattttaggtactccagtttctgaccttgtagctttcagcaattaaagtagaatcaaatgcagcttaaatcagaagacatacaacatccattttctccagcatgtgtcattagatatgcaccatctgatttatatagtcatcaactttgttccactagagcattagcattggtacatcactcttttcgatagaccaaaaaatatgatatgtattaccaggctcagaacagtaaacatagtatgtattaccaggctcagaacagtacacatctcttatgtatttggaaaaaaaatgatatgcctgcagctatctctagccgttaaattggcaaccataaaatgatctttttttcttttctgtttttccacttttaatgcaggaaacagaaacgtggcatttgatttttgtgtgtacattgattacaatttacaagtgataaaatcgtgcaatgtgctggtacttgcccaaatgatgcctatgcttggcgcatttagaatgagacgtaagagaacatgattagctttggtatttgaggaatgacagtaactaaaaagctaatgattatatacaatttatgatttcggacttgagactgagtgtaactgtgaaatttaacgtagcaagactagaaatgaagcatttagactttctgctttatgcattctgcagtttattttaagttaaacattatcatcaccatattgtgatgcacatggccttcatttctgttttgcaggccaaagtggccctcatcatcatttgcatcttcag

SEQ ID NO: 35886 - DNA, 779 bp, Sorghum bicolor
  Intron number 1 from transcript Sb10g002700.1 (locus Sb10g 002700) derived from phytozome v7.0 (chr-ID chromosome_10; pos 2328184 to 2328962 reverse strand)
cgtcatcctcggcgccgattccaggaccagcactggtaacgccctttggctcctatcgatctgtatatgccgcaggagatcctgccgctggtaggggtagatttggcgccgggatggcgttgcgggcctaggttttcgcttggatcgttggaaattgaggggcctggctggcgatgtcggcggccgtgatgtgtgctgcctttctactttgactattaggttcattgttagtttacactggcgagatttgtctatttgtttcactgctagtcacttagttgttgcgacttgcgagattagctgaatttgggtactagcagcaccctatgttaaggggaagttggctctcctctgcagtctgtttaattcttcaaatcattgatggatgtgtttcggcctttatttctgaagaaaaagttataggatagtccaactctgagctgtgcactgtattgcatatgattaaacaaaaactaacatccattgttacagttattattattttttgccatgttaactgtgatcacagttcttatggaaatgttaaatgtataatggctcggatgggattatgtgctccctttggttcaaggatttaatccttttgatttgattaaaacctgcctccttaagttcgtgaagagtcctacttgtactagtctagaaaaatgattttgctcctatttccaccaaagagatttcattattaagctgatatattctttactttttatttggccaagtgctaatatttctttgttgcctgctccaactcagga

SEQ ID NO: 35887 - DNA, 474 bp, Sorghum bicolor
  Intron number 1 from transcript Sb01g016710.1 (locus Sb01g 016710) derived from phytozome v7.0 (chr-ID chromosome_1; pos 16836869 to 16837342)
cgaccacatcaaacgtacaaagcttcgcctgctcggtacctctaatcacaaagctagcctagtccatatcctattcgatttcctttttgaaacaattgtcatgtctatcttatccaatgttgtttattactccctccatcctaaattgtaagccattccaagaatcttgaagaggtaaagcatagtttgaccaaaattatagaaaaaaaattacaaagttttgtgccatcaaatagatatactatcaaaatataagtaataaagaacctaatgatacttagttgatattataaatgttattatcctaccaaataaatttggtcaaacttgagatgctttgactctgcaagattcttggaatgacttataatttaggatggaggaagtacctaagacaagaaactgaatgaatgaatgaatgaatgaatgatgaaattgtggtcactccatttgcagtaggggagtcgacggagc

SEQ ID NO: 35888 - DNA, 608 bp, Sorghum bicolor
  Intron number 2 from transcript Sb10g028240.1 (locus Sb10g 028240) derived from phytozome v7.0 (chr-ID chromosome_10; pos 58096775 to 58097382)
cacatttcagtcaaagaaagccatcatcacatcaggttttattttgcttattaaatgtagttgactcaaagtcaacaaattgattcctggcatatcaagtttcaaatctatgtcatgcctttgaagaaattggcaacatgaaaatgaaaccatgtggatggaaaaatagataattatcgatcatagttggtcgagattaattttgattgattttagatcatagagttcatgctagaattctgttttggggcttatgtagtagatcaatcaacttgaatcaactatgacttttttagatagacccaactatgaattttctgtactcgttaaactgtgactttgttttactttaattttttcttgtttcaaaaataaaactaatgccttgttcatatggccacctactccccttgttaattggtgccaatctctagacatatgtaatcatgccatcagttttttctgttttacacatcatttttttttgttttttacaatcatatgttttgaaatttgcatttttttttaaaaaaaagatgttcaaatcattgatggttttggcataatgattagatttcgaagaagtgttgaggacttcaccagaatac

SEQ ID NO: 35889 - DNA, 992 bp, Sorghum bicolor
  Intron number 3 from transcript Sb02g028510.1 (locus Sb02g 028510) derived from phytozome v7.0 (chr-ID chromosome_2; pos 63664941 to 63665932 reverse strand)
gctaagaggcctcattttgggttgttgttctgctggtaactaaatgtactcatacacattttttttacatcaagaaataattattaaacttcaaattttagataaacttagtgcagaaccttcaaatgtttattgctatgtcagatagactatatggatgtctatttgctctagattttggtgctttgtgaaggagaaattattctcatggctttagttcatatttcaagggaatggctctagtttaggttggctgtgcagagcaaaacttacttcagacatatacattctttacccactttattcctttgaaaatcttatagacttcaactttaagcaagtcagaatgataccagtaaatagtcaagcaaggaaacaagaatcaagtacaagtgaaaaacgacagctgaaaaatctagtttcgttgtcaaaaaaaaaaaaaaaaaaaaaaaaaacttatgcattgctgttagatacaggcttccgaacactacttagtagtaaccaaatcaaaagcaacaaccaccaaaatatttttcatttatcttacaaaacgcactgtcttcatagtttatacattgcggcagtggccaaccactagtggaagccttgatagccaaaaaactggtgcaagtttagtttcacaaatagtatagtgcacatgtccccttcgttactagaatctagaagccaaaacgacctagtttgttacctgttcagcaattctaactttctaagcccctttctctcgtgctcaaaaatcctctttctctgaatatttatcttctcctatctatttaatattgtaatgctatgttgttattaagatatttgaccctgattagacatagcaatcgactggtcattaaccgcgaaataggatggatttagtacaacccatactttgttcttttcttatctttcaaaaattgttgccaacttgctggttgaatgcaggcaatttgggcaacatttttcttatcatcattcca

SEQ ID NO: 35890 - DNA, 575 bp, Sorghum bicolor
  Intron number 2 from transcript Sb09g019080.1 (locus Sb09g 019080) derived from phytozome v7.0 (chr-ID chromosome_9; pos 47641959 to 47642533)
agttctaccacgccatttacgatcttatcgagtaagtttttttttgatatatatatatatatatacgtcctgggctcttaatggacagaaattgtgaattttggttgctccctttgtggccttgtttgtgcacggaatgcagttctattacattttagctatatgtatagtatatgtgcgtggttagatgaatggtttgagtaaccctaattcccataatgattcttaagcatgccctgaatgttcattttagttataagcagttatggatcattcgtagaagatgatagcacatggagtcgttcaatgtatgggtcatcgagtgctaaaaaaatggcgcaatcaaatactattacactcctttcgttttaaattataagtcgttttgatttgtttggttaattgattttgctacatatctagatttacctagaaaaaccgatgaaccaaaaatcaaagcggctttataatttagaatgaagtgagtatacctaaacaagattttgctcttacgcattctctctctcttgcactctttagaaaattttgcgagcagcgtgggcagttgcagtaca

SEQ ID NO: 35891 - DNA, 611 bp, Sorghum bicolor
  Intron number 3 from transcript Sb09g019080.1 (locus Sb09g 019080) derived from phytozome v7.0 (chr-ID chromosome_9; pos 47642537 to 47643147)
taccatcaaaagacgacctcaagaaaaagtaccaggtgaggggtgatttttttgtgccgatgtgaaatctctttaggtttcttctgtacaagtacaagtatctctcttttttgactgctccaataccaagaagtagtacttgacttccaacatgagttcgtgcctattctctctattctattctaatttataagatattttgttctttttaattaatatatatatatatatatattatataacaaataatgtatgtagaaaagacaaaatggcatataatttagaattttgttttgttttgcggcatccttttcagtcgaaacccacgaaactcgttgccgacattttcgtgttgttgaaataacgacaccctacctaagaatgggggtggctctccaaatggatacccgcagttcttctctagtgtaactaaataaactatatttaattcatttaaatatagtttatttagttacactagaaaaaaaccacaagtatccatttagaacaccgtctcatccttaaccctaccgtagagtggacttttcatgcagttcctgtttccctcaagcacaggatttccacagggcaagggggaacgtgaccgcaga

SEQ ID NO: 35892 - DNA, 890 bp, Sorghum bicolor
  Intron number 1 from transcript Sb04g010020.1 (locus Sb04g 010020) derived from phytozome v7.0 (chr-ID chromosome_4; pos 13091817 to 13092706 reverse strand)
accggagtcgcggcatcaacaaagcatatcaccaggtgggacggtcctatatctcattcttgcctctcaaccaaaccaaggccttgtttacttccactcaaaaatccaaaatttttcaagattctccatcacatcgaatctttagacgcatgcatggagtattaaatatagacgaaaataaaaactaattgcacagtttggtcaaaattgacgagacgaattttttgagcctagttagtccatagttagacaataattaccacaaacaaacgaaaatgctaccgtgtcgcgaaattttttcgaactaaacaagtcccaaaccaaacagcacaaaagagatcaccccgttcccatcccacgaaccaaacactgctaaaatggtactttgagtaaatttcgaagtattcaaacatctctagttagataatttaattctaatgttgccagaatatacttatcggaactcatttaatttgataaaagtattgtaattcaattcaatgctgcttcattgtacattttgatcagttttatatttctttttcaattaattcaaacgactctaaatgaaattccatgtctagctttccatttactacttaatgtaatgtcttctgcccatatgcattgatgtatgacaagtagatcaccttttatgaactactccatggatctagtcacagttgtttcttgattgcaatatatttttcttctctggcctatgatcattatacagcagaaaagatgaaacagttacttgcaaattctgctcttacacacatgcaactctctgagttctgaaagtctgatttccagtagagtttgttggctacactcactgtttttattctacagaacaaaggaggaaaaacaaacagatccttcaaagc

SEQ ID NO: 35893 - DNA, 953 bp, Sorghum bicolor
  Intron number 1 from transcript Sb01g005750.1 (locus Sb01g 005750) derived from phytozome v7.0 (chr-ID chromosome_1; pos 4723409 to 4724361)
catcgattttggcctgtccatcttcttcaagccaggtatatatggcatcgattccttgactagcaatgcagttttatctgattgcgaagttattttagtatagaaatgtgagcctgctcagtggagctgatatttggttagcaactgaggccttgtttagttcaccccaaaaaccaaaaacttttcaagattctccatcatattgaatcttgtggcacatgtatggagcattaaatatagacgaaaataaaaactaattgcaaaatttacctgtaattcacgagatgaatcttttgagcttagttagtccatgattggacaatatttgtcaaataaaaacgaaaatgctacagtattcaaaaccaaaagaacttcggaactaaacaaggcctgaggtgacaattgccaaacggttgttacagaatggaggatttttcgtatgtagagataccagtcctcgtgcatgcaagaggccaccatgtagtcataacaaattgtagatcgacaactgttacatgcatagtggcgcgtgtgtgtgtgtacttcacacgatggttacatcacttttactaatcaacatgttgagatcacttatgctgctgaactacattgagcaagtagtcagcactggttttattttcttcaatctcattataatatcactacaacctgctgcagttgataagcatcacattcaaggcttaaaaagttataataaacccatttgcacattgatttttggtaggtgatttaacaccaggcttctatgttcagcacaaatcgtacatataaaaatatgcagtagattatgtctgttttttttaaggaaatatgagttggtagaaaccaaccatatgaatgttatcaaattctttataccacatgcagtcctaattcctaaatagcattcttctgatgccatttggtctaagataattgtttgtgcaggcgag

SEQ ID NO: 35894 - DNA, 940 bp, Sorghum bicolor
  Intron number 3 from transcript Sb08g004780.1 (locus Sb08g 004780) derived from phytozome v7.0 (chr-ID chromosome_8; pos 5936261 to 5937200)
accaccgcactcgccatcgcctaccagctctacgggtatagcctcgtgctggaccctttcttttagtgtaggatttcttaatttggttgtgctagtatgagtagtgtgctatgtaatcttggattgcctgagacttgccagttgctactgtaacggagcaattgatggcgagtgcagcttgctttaggatattactgatgattatataacctccaatgacaaacaagatactcttttttttcttctaaaatggtcaaaagaacagcaacagttgtggagatccctaatttacttgcattttcagcccattctaaggatccataggcattttttagcttgaatggtaaaatttgttggaggtcttgttagagactctacatatgtgtgattttttaaaagttgattatttccatcaaggttcaaggatggaccatcaaaatattcgaatttataatgttgttttttggggcgaagattggcatttctgtttgtcccatgtatatgttcgtgcttatcattgagtcgaattgagtcgaatgatacatagtcaggtaaccttttttatgcaacagaacagcagcaaaattaaactatatgtgtttaaaaaagccatttaataggaactctgactaatacagaagtagcagaatatgattttctcttcaactcacatttttttaacttattgagaatgactgtcagacaatcagtgttgcctctgttatgtggtttatgcatgtggtgattaatttctcaaatttgttcatgaaatttgtatacccatgttagtgctagtaattcagaaatgacgttgaaactgttttgttttttaaaaacacgtcactactctcggatggtttgaggagtcagttttcttcaattcttctcctatttggataatgcagtccagagctgtataagtcaagagttttggagctca

SEQ ID NO: 35895 - DNA, 942 bp, Sorghum bicolor
  Intron number 1 from transcript Sb01g002910.1 (locus Sb01g 002910) derived from phytozome v7.0 (chr-ID chromosome_1; pos 2378512 to 2379453 reverse strand)
gccctcatcgtctacctcatcttcaagcacctcccgtaagcaccgcccagctccgctttctcctgtccggcgctgatctgtttctctccgttgcgccttttgctgctacggttgcgtcgagatcttctgtggtgaacgctgtcggattcgatttcaatagattagatatcattcggttgcgtgcgtaaacttgatcgattagattagtaatctacttaacaagaatcaacctgatctgaatatgtgaatggaactgagatccaactgcaggcaccaatcataaagtagaatcacttgttactccattatgcgtccaaatagatgacataggttatttatgtggacattaaccaggcctcccttgagctctgcttgcacatctttgcagagttccaatgatgccagtactgttgaagcgatcactgtgcacttgtgttttttttccctgagaagaagaaatgaaacaattttctagtgctattttaccaacatttgagctagaatttgcttcttcatcaaagtcttgaactgtcatagtggcaaccagttttcttcttttacttgtgtattttgggccatagaggtcatagatacctttcattctagtgctgccctgctgggcgtgcctaattcactctatcaggaaaaaaaaacttgaaaaacttgtatgagttcgtcggctatgtgaaatgggtcatgatgagctctcctgcttggatatcaaatgcactattaggtattacaacttgcaactgttggctttgttgcgtgtcccttttcttagaatgtcaccatgtgttactttgccattatttaacttccattttttgctggaagcttgctactgtgatggaaaggaaaaattgttacattcatatagatacgttgccatgttcttacatattacataacctgatttgacttcttttttttacctcaggg

SEQ ID NO: 35896 - DNA, 414 bp, Sorghum bicolor
  Intron number 3 from transcript Sb04g030170.1 (locus Sb04g 030170) derived from phytozome v7.0 (chr-ID chromosome_4; pos 60194727 to 60195140 reverse strand)
ttggagttgtacagagaggcaggtttaatagtaaggtattgctgagcatatgttgttcacattgaatgctaactatgcattttcttcctgtatgctattttgttctagtactggcacagaaactgtaattcttgctggtgggcttaggtttaagtttcttggttaaggaatatgattaccaggattctcggtctttctatacttgattcgatgagtacattctgatctccgcaccttgtggacattcatttattagtaccataatttgtcaatagcaaaatcctactggtgattagctacaaattgattgatgcctttctgttttcgttttaaagacgacagcattagttttgtttactaagtcaaaatttcacattttgttacagctatatacttcttcctcaaagttgagtg

SEQ ID NO: 35897 - DNA, 847 bp, Sorghum bicolor
  Intron number 1 from transcript Sb08g020070.1 (locus Sb08g 020070) derived from phytozome v7.0 (chr-ID chromosome_8; pos 51127331 to 51128177 reverse strand)
ccctcgccgctcttcctctggcggtttaaggtgcctctcagtctttgaaatattcccaactccttttcttttctgcctggcctttgacatgctctgaagaagtagtttaagttcagtccctgttcacatggttacatgatttcaagttaagtgctcgctgctttgatgaggtttggctatatgcattgagttgctgttagtatcaggttctgtcaatgtcgacttgaaaccatgttagtataccctgcatcatattcctaagaaataatatctgttgaagttacgtttgtaactaacccaatttcattggagttcgtaaggggctgttcttgtaatcaaaagtcatgttgtagtggaaacaaacaataacttggggactgttgagttaacggtcccctttctgtgctgcgaaatgacaagagtgtaacaactgttcaaacttatggagagttagtttaggagaaattaccagtcagactaaacatttctgaacatttacttcacacctgatctcctgtgtaatggtctgtaactttgacatggatgacaaaattacgttatgagcttatgttttgtgttctcctgtcacttagtgttgaattacctatgttagcatgtcattttataatgctactactaccaacaatgctgaacagcaatttctttatttttttctttgcttcaacattattgtgtgtaaaactaactgcatgcagtatctgtaatgttctgtacctaagctgctaagcatcatctcatcattacacaaatgtatgatttgagccatactttaaattgctggccctcctgttccttttcaggttgtgttgtttcttctctggggctt

SEQ ID NO: 35898 - DNA, 449 bp, Sorghum bicolor
  Intron number 2 from transcript Sb07g003520.1 (locus Sb07g 003520) derived from phytozome v7.0 (chr-ID chromosome_7; pos 4285148 to 4285596)
cttagcaattgttacccttcctggcggaattattggtgagtgaagtcttcaatttctaactttgttatgttatcaacaatgttagacaaagaaagcaaaaccagtaactatgccttgtatgaagcatactgaagctatttaaccaaacatcatttattggacacctaaaaataattggccaaaaaagtatctttcaagtttgaatacagcagcaggcaagcagcaaattgaaaaagaaataagcatgcaaataaaaaaatcatttggtggtaagaaagaggaatacatagtaatgtcattccctatgtaactacttgtccatacatgcagcaagaacacagcatcatggtaagaaatgatctgaaatcccgtaagttatttttccaatgaattctctaatcttttcgtcacaaactcactatggccctgctatagaaactgcaagttgg

SEQ ID NO: 35899 - DNA, 906 bp, Sorghum bicolor
  Intron number 1 from transcript Sb02g032135.1 (locus Sb02g 032135) derived from phytozome v7.0 (chr-ID chromosome_2; pos 66907926 to 66908831 reverse strand)
gctctgcgtaggctgtgcacttcatttggcttcaggtgatgaccagttgaccgctcatgtaaaaccaagtacttagtacttactgtgtggtctcacactctcatcagctcctcatctgaccaaatgaatggatgcataagaccacatgttttcattgattatggaagctttcgattacatctcctagttttttgctcctagtaatcttgtagagagacattactactttttatgtcactgtaacgtttgaattgtaaactttcttgactgaagaaggcaaaactagtctctgcgaacattaaaaaaaaactagtctctgcctctctggggggggggggggggggggcaaaggggagtcacagttcaggaggcaaagaaagatcatgcataatacttgtatatgctatcatctttcttcatgtcactgtaagctttgttgactgaatgagcaaactattctctaaagtctaataatcgcgcggaacaagttaaaatagcctggttctcatgtgagaacagtgaatggattatggatccattgatcgattgtctaatttatgttcgacgtctacattactacctgtatctgagtactgccgaattcggcaatgatccacagtgtatatgataaattcttttgtttctttgaatgccgtcgtaagcagtcttgactgaaacggatggaacagtctctgaagcgttgagcaggttttatgttatcgttttctatgtaatcgtttctttacatggtgctattttgatcccaaaattgtgaaacctctatcgatgctaaatgtagtttatgacaggaggaggatgtcttaataatttatttgaacagcctggagcaccacctgccatcaccatgcagaccgtgtttaccgcatactgtccgacagaggaagc

SEQ ID NO: 35900 - DNA, 711 bp, Sorghum bicolor
  Intron number 3 from transcript Sb01g004040.1 (locus Sb01g 004040) derived from phytozome v7.0 (chr-ID chromosome_1; pos 3289357 to 3290067 reverse strand)
gctaccttccgtccatcaatttgaaacaggtatggtcttgtctgcccaatattatcccctgcagtagcttgcaggattgtttctactgccctgctcctgttcaaatgctttgaaatcttaagcatgagtcatgaaatcatgaaatacattggagttccaatccatgtggaaaaggcaaagtatacacgaaggatgaatgcatgaacttgtaatgctaagctgattatgcaagtttaactaatgtttcgatgcttgaatctgcttttacctttttctgataataggtttccaaataagaatagaaaacttccgatgtgggcctaagtagtttggcacaggaaaccctgtgcactgtagaagatgtgctggtcctagatatttgtaccttttacattttcttgattcttgaatggttactttttgcctattatttttcctggctcgggttgctattgaaaatctgggcttatttatgtgtactgatgaggaagttttactgggttgatctttttgttagatttccacatctgacacaagtatatgcatttgatttggattggttatcatttttgagtcagaaagtgcttctggagttctgtttgatgttattgttgtgaagattgcatagctttctacatctaacctttgaaaaggaccattaagttctggcataatcgattgcattttcaggtcatagcaacaatagctgaa

SEQ ID NO: 35901 - DNA, 860 bp, Sorghum bicolor
  Intron number 2 from transcript Sb03g036470.1 (locus Sb03g 036470) derived from phytozome v7.0 (chr-ID chromosome_3; pos 64520348 to 64521207 reverse strand)
aaggtgaacacccttcccccctactcgttccgtgcatgcatgatacgtttgcctgtttgcttccatgatgttgtgtggcactattgctcaaggatttcttctctttggcttctcagcagaatctttatgaacacataactgtcaacctacaacagaaaattcaactcttgggtattataagttatatccattacattaattttaattgtgaaaaatatacattaaatctctgtcaaactgttattctctggagtatgttacaagcattcttagaacccatgaagttatctgtagaaaaaagttcactctctgtaaaaattgttatacttttttcttgagtatgctataatcattcttaaaatctatgaaatttcttaaaaagttcacattcagcaaatgcatgggttatcaattcttgctttaaaatgaaaaatgttcttcactgttttagtcatctaataataatattttttagggaatgtaattataatttgagttaatgaaaaggatcatatttttctttcaaagtgaactaaacgagttagtaccggtgttgtacaagtgtaccgtctctgtgtggtccaatagaccagtatatacttgcattcccaaaatgtctcattatttggtactgatcaaaacaactatgtagaggaaactaagaggataggaccacatatacttgaagtttatgtaacatgaaacataactgccactgtacctattaagatttcaatcccctagctactttgtagtccttgaaatgtctcttctctgtttcttatgtactgcaacgtattttggccaaggttcactctaatatttgactcctgagcccggacatgccgtccttgcagttt

SEQ ID NO: 35902 - DNA, 876 bp, Sorghum bicolor
  Intron number 4 from transcript Sb04g025600.1 (locus Sb04g 025600) derived from phytozome v7.0 (chr-ID chromosome_4; pos 55380052 to 55380927 reverse strand)
gtgagcttttgctctgtacctgtcctgttaataaggtaagaaataatacaatatttaaatattaattgtgagtcgaggcgggagcgcgccacctaggagaattagtccgcaagtaatcgccatgtgtaatcaggctagggaggctgccttttgtatactttatcatccctagcgcgcccgtgtgcgttgtaaaaacatcttcttcttaaatacaaagacatgcaaatctttgcatattcgagaaaaaaattaattgtgagtaaaagagatgtgaatatgaatgaatattcattataggaattaaagaaaggctgcatgtcaaattagttttgcaagctggtaaggcaccatatatagtttgctgaatattttagttactcttgaatggttacaaggcttgtgaaagaacatataacttcaattagaagtcatactctttttattatggtgcgcatatcgtgtaaccttagttactcattatagatcatgatgatataaatttaacctcttcttttatgcactaatcattccaatgatttctgaaattcaaatgcttcatgggagatgttttcaataatttgaaacggtatatgcatatcctgccaatattcaggatgatgtgaagacttacattagtattatttttgggtttgtcgtattgtaccagatttttatcggggggctagtcgtagactttgaaagaagaatcattggcatcactttttttggcaaggacaccactcatatcgtgccaaccgagattatggcaagatgtgtgaaacacttcaaggagttcaggtgctatttattctctttgggccttggttatgtcatatacattgtattgtttagctttgtgtgtgtacccttgcacag

SEQ ID NO: 35903 - DNA, 681 bp, Sorghum bicolor
  Intron number 1 from transcript Sb03g037960.1 (locus Sb03g 037960) derived from phytozome v7.0 (chr-ID chromosome_3; pos 65880498 to 65881178)
ccggccaagtttcagtcagacgaactcccaaggtaagccttgatgttttgcatttgatcaggatataggaagcatgctgccatctttgtaggatagaattatccacagagtgccctgttgacctgaaaaaatgttcagctagattagttctaccaggatgataatctgagaatgttttgattacaatgaacattagttaccagcagataaaaaacatttaacctcattcagttacatcaaagtttgttcattttaaatttggctgtcttcaattttttagaattatttctattcaacaaaacaagaagattttttcggcataagtcagtttgtgttacctttgaattaatgtttttgcatcagttcattagtcaacgtcatgcagaactgtaatgtaatcaaatccacaagaccaaatggatcacatttagaaagtcgtggttatgtatgaagtatgttctcatgataaaacataaagcttaacactgaacagtgtttttttcttgctattttctttcttaggcttaactctctttgacttccttgaaatggtacttgcatatattctctcacatgaatttacgatcctaagaactaatcagctactagagttattaatgcagaaatgagcaactgatgttggcttaatgattttctacagttgctgcacttaaggctttg

SEQ ID NO: 35904 - DNA, 1064 bp, Sorghum bicolor
  Intron number 1 from transcript Sb08g008280.1 (locus Sb08g 008280) derived from phytozome v7.0 (chr-ID chromosome_8; pos 15754463 to 15755526)
cccttctgtttgtcgacggatcccatcaagaccaggtactagtatactcggagctcctcttgctgaattctagatttgtgcgcgcaattcatacttctccggttgttatagtgcacaagctaatgttctccgggggttgattaagctttgcatcggttagattcaatcagtaaggcaaggatatacaatttgagcttgagctgatttgtgggctgtagttgaacgaattcagcctgatcggctgcacttattcggcagctgcagctagtgtttgagcacatttgctggctctgagtttagtgcactactcaggttttatctcatggtgtatgtgcataccagactatcttcacaaattcagagtttagaggccctatgttagcagttctgacttgtgcaagcttatctgattacttttcatgcctagtttaccctctcaagtcttcattttcttacaaggatccagtgcctgttttcaatttcaaaactggttagcttatctgaattttactaacaacaaaagtatgagattggttatcttgcaatcactggtccagatatttcagcaaattatacttagggtgcttttggtagggattctgaaaacagtctctctccagaactagcagaatccctaccaaatggaagctgttattctttagaaacataattagtttctcttcatacatgtttctctgagaaaccgaatccctgccaaacactccctattcgtgcaactgggattcattgcttgaaactaaatacttatgatactgctacgaaatgtcagaaaatcactgctgtgtcccagatcacttgcctttctattgccacatgagcaattattgttttgttttatggtgatacaggaattaagaacgataatggttacaatggcctcttcctagaaaaacattgtgttatacaactcatatgcacttttttagtgttgccttttctccactgttatctttgatgtactcgtacttattctggctaatgcagaaactgttcttttttatgctttaggaattccgtgaagctgttggatccaggtactgtat

SEQ ID NO: 35905 - DNA, 301 bp, Sorghum bicolor
  Intron number 2 from transcript Sb01g034550.1 (locus Sb01g 034550) derived from phytozome v7.0 (chr-ID chromosome_1; pos 58021107 to 58021407)
aaatcgaggagtctatatctgttggtttcttcatattcttttgccaatttattgggtttacctttccccttgacatatatatttaatatcatgtcttataaagtattatacatttcctgaaaaaaggtactccacctagcctagtttaatgtgtatgcatgtttcctaaattcagtatttttttttggtcaagaaacttccagcaacctgctgaggtggtgctcctttttcattttgatatttgattggggtgtaacgttttgtaggtggagatcctcgcggttcagctctccaaaagaga

SEQ ID NO: 35906 - DNA, 793 bp, Sorghum bicolor
  Intron number 3 from transcript Sb01g034550.1 (locus Sb01g 034550) derived from phytozome v7.0 (chr-ID chromosome_1; pos 58021431 to 58022223)
aagaagtcacaaaattagcaaaatcattaaagcaggtgtgttttacattgttgtataacttatgtaaatgtgtgctaataatttgaggaatgagaatctatttacttgaaatattccaaagttcttaccgtcatgattcagtcatcttgcactgtttatagttccccaccaacttgtttagctcaaaggttgctgtttggttgctatgttttcagaggaagttgacttaactgttgaatctcaatgtcttctagaaaatacctcaaccaggaatcttaaagttcccaattgatatgtggatttgaattgccatgaccatagagtcttgtgttcgatgtgaggaacacacccgctcatcataaacatacatggccaaagcaccccacttggcgctaaggcacttaattcaaaactataatagatatggaactacacagcaccttgtagtttatactaatactcattgctgttgaaggcatgcctaaaaaatgaatcttgttgtaatggtatggtagtccttcatttcacctgactttctgtaattcaaaaatcactcacaaatagtgtagctacttatgtgagcatagcatatcattaccttactttggatttgattttcttattgtaaacattatgctctggcattaatttctctcagaaaaaaagacagcactatgggtttagccatctagtctctgcattgacattgttatttgtttacaagtttggggtttgctcctttctaatcttatttgtaggcttctgaagacgcaaagagaattgttgaagaaga

SEQ ID NO: 35907 - DNA, 923 bp, Sorghum bicolor
  Intron number 2 from transcript Sb10g006070.1 (locus Sb10g 006070) derived from phytozome v7.0 (chr-ID chromosome_10; pos 5484892 to 5485814)
cgcagttctacaaactctgggacgagctccgcaaggtgcgtcggctgctctgtgcttttgtgctgctgcttacacaatgcgggatactggtggttgtatatatcggcatggaatggttgtgcttatgctctggtttatactattccaagacaatgtttacccctgattgaatgattcattgttgcacatgtcaaaattttcctccttttaaaaggattatttgtaatgatggtctacattagaaatttaatgtgatttttaattctactacattaatatggatgtgatatttgattggatgtgctaagcagaactttttttttctctgcaacatccaaacttaattcaatgggaacatctttgtctctatcaacctatatgattattgccccacatctatcatagacagacaactctattattttacttcgtaatggtttatacattctggagatgttgggagtggagtggggagaagagctttacctgtgtttgccaaacaataacgcgaaatgagggtattcaaatcagaatggagatgtagtgaggacactggactatatttgggggaaagttgtggcaattggcaaggtctttggaatggagttttacttctgttgaaatccttacaaaaaacaaatgcaaatcctgttatgtttcaggaccacggtttgtatcactaaatcgattttaactctgtatttagtgacgtgtaagtttgaggtagcgaaatctgtaaatttttttattgtacttgagtgagctttgctgtatatttgtaccttatatttgaccaagcacatctagttctgtcatttgtaattttctttgtgtcagttttgtgctgttgaatgcaatttcagttttgaacatgtgctgccatatttttaataacgatcctatttatgataaatctttcagga

SEQ ID NO: 35908 - DNA, 861 bp, Sorghum bicolor
  Intron number 1 from transcript Sb09g002225.1 (locus Sb09g 002225) derived from phytozome v7.0 (chr-ID chromosome_9; pos 2362826 to 2363686)
tattgtgaattgtgccgactgaaccgggcagacccgtatgttctgctacaatctgtttggctttctttgtttcactatatattttttcaagagtggcttttgtcatgtcctgctatagctaaaatgttgtgaatgaactgtgctatggttttcctttcctgtatggtttaccttttttagagtgtgaccttttttttttcagtcacccagggtttattagaacccccccttttgttctaccaattcctacacttgattgatctggtaaattgatccgataatatctggtttaacagcccatgcttcttgcttagttgtctgattgaatgtttgttgcaagtttgatatgtttttatgtcagtacttggtacacctatggatgctattgaacttgaactgcggtatgcgctgaaccttttgaatgtatttatgtgctggatacttgtatgatcactctgtaggttaaacgacactcttcgttgtctttgcctgagttaatagtgtgcctttaaggcctaagctctttctgctctttgcttggctagaacatgctgatggtttatttccttttgcaacaaatataacgtgtaaagatagcttacttattgaagaccaaaatgcttgatgtttctagttttctatgcaattgaagttactatgccttttggttagatcctcgaatatattatgaacaaaagccgctgatgagacataaatctgtgtaggcgctctgaagttggcattgcacttgaacaaccttgtttagaatttcttattgtctgcaatccttgttctcattgcttaattccgcccttcgaatttgcaggttttgggtgactacaggaaatccattactacctg

SEQ ID NO: 35909 - DNA, 813 bp, Sorghum bicolor
  Intron number 1 from transcript Sb02g001830.1 (locus Sb02g 001830) derived from phytozome v7.0 (chr-ID chromosome_2; pos 1797238 to 1798050 reverse strand)
agtttctacacaccaggtatggttctagccctttgatcctgcatgcatggtacaactagcctatatacactgtcctgatactgatttgtaaatttagttgaaaggaaacaaatgatacatatgcttgagacaagtgaagatgtgacagttctatgtcactaattttttatcaggttcaacctgttggtagcgtccattcttggtattggcaggatttgttcatgccagaaaacccaacctttttagcttgcacattactttcctatctgttttttttagtaatgaacaagtcctactggttaatcttaaaaatatgtattatatattgatcaatggtcctaggaacaaatttaacttttaggcagaatcttcagattgtactagcagcaaattgcaattgccagcagaggacattatttccttgtaaaaatttagttgttttgatatgtacacatataggttctggaagtaaatgatacttttgttttaaaaaaatgagaatgtgacattgcaatatcatctaatctaatttcttggcctgttcaacctgttatgaacactccttgatattggcaaaggtgtgcttaggaagtagttgacttttaatcaagcacaagctgctgaacgattttttttgtttgtatgttcttccaataacatctcttataaagattgaactttaggcatcgcacatcgctactgtttgatcttacaaagatacatatataaaactatgaaaataatataacttgtacgcttggtacttttcacttttcagattgtgcttgtgggaaattgccattaccagcagag

SEQ ID NO: 35910 - DNA, 343 bp, Sorghum bicolor
  Intron number 1 from transcript Sb02g006990.2 (locus Sb02g 006990) derived from phytozome v7.0 (chr-ID chromosome_2; pos 8944947 to 8945289 reverse strand)
tcacaagtttagagttgactggttttgaagcagaggtatgtcttcttgacgagcttcccttcgttctcctttgcattccttatccctgaaagatggccatttgaacaataatattacacatatgtgatcactgctgctggctgctcttatatgagatttgccatttgtttccggcggataaattttatgcagtctttgtttcatctagggtagcatgtttttcatctactggatagttactcacatgcatggctcaaaaagaacagattattatctcacactttctgcgtatggctgatgcatttacttaatcctggtttggtttttgtcttcatttcaggtg

SEQ ID NO: 35911 - DNA, 649 bp, Sorghum bicolor
  Intron number 2 from transcript Sb07g006900.2 (locus Sb07g 006900) derived from phytozome v7.0 (chr-ID chromosome_7; pos 10173094 to 10173742)
tgaaggttactggggtaagtgactgatcactttgttgtaatgtactaatgctattcagttattctttgtaaacacttctgctgttatcttatatatttgtatgcttatgttagaatttatcctcagagtacactgtttctaggtagctttgcacaaataaattcttcataatctgatgagtctggtagcctttccatttctggctggttctgttgcaccatgcttctaaactgcctgtgaactacatttcgatgtaatttcactgcctgtttcaacactaactattttgatataggtgtaaggtaatttatgtacactgtacaggtattacacttcaggtaggtttcaattttttaaaaagataatttggatgcagagaacacagaaaatttacttcacccaaacaggttttatgtctgtcagtaagaaataaaccttatttttttgtacctaaatatcgtttcccatacaaggactagcaaatgatgtagcatcatgttatgagtttacccatgcagtgatttttctacttatagttaaagacagattggctttaagcaccagcatttttctgtatcattaacaacagcctgtcctcacctagtattttgcaggttgtcacttgtggaaatttgccccttgagtcctc

SEQ ID NO: 35912 - DNA, 592 bp, Sorghum bicolor
  Intron number 2 from transcript Sb05g020900.1 (locus Sb05g 020900) derived from phytozome v7.0 (chr-ID chromosome_5; pos 51308608 to 51309199 reverse strand)
agctcggggtaggatcctcggttacacatacgctggtactgattcttgcccatcttatttcgtatgtttgcttccacattgtctattagcagaactttggcatggatactcctagctgagggaagaaaaaccttggctaagtattaacatttaactgggagacaaatgggagcaatcgtgtttcctatttaccatatgactaatcatgcatttcagtaaaaagtatattttgtattaccttgaggacacggatacccttggaagtagaccatattattttactggcacttttcagaatcaggtttagtcatttacatcagtcgctagatacgtcaggcttaagaagcaaagcaggtattactggtcattcacaacatttattgacatgttatttctgtataagtataacttcaattagctttggttttcctatctgtgctttgaatgaatttgatgttttttctatataatctacgaaccctgtgaatctgattattccacatactgtgtccttcctttgtctacagtatataatttattttttccttttcatgcaggagcctgttgaagtttctggatttcacgagagagt

SEQ ID NO: 35913 - DNA, 607 bp, Sorghum bicolor
  Intron number 5 from transcript Sb08g006710.1 (locus Sb08g 006710) derived from phytozome v7.0 (chr-ID chromosome_8; pos 10775404 to 10776010)
aaagaattaggacagctctccaagcttatatttttgtaaggagatcaaaactgataccttgtctatgactttgatcttttttttttgacgggcgcctttgatcttttagctaccataaacaaggatgtatttttgggattgtatcttctgttcaataaaaaacttttaccatatccaactgtcacttggggatcaactttagtttgtcttctaccaactcgttctaaatgttactttgttcatttcaaacacacaaaattagtggattctctagaagtgactgcaaacaaatgtctgtttgatgatagaaatagaattgccatcatattacattccaactgagcaatccagtcctcaaccttcagctgtgttgtgtgttcatctaccaagtattggacctaatcactgatcctcacagcatttgtgcatttgaaaggtgcaccattttccatcgcgttccaaaaaaaacagcatttgtgcatttaggctcagtataatatgattttttttcattgccactatgatggggaaacaaaaagaaagtgttgatgcaaaaaaaacggtgtcaacagaaagattggtcattgtattccatgcctgcagatct

SEQ ID NO: 35914 - DNA, 359 bp, Sorghum bicolor
  Intron number 3 from transcript Sb06g003215.1 (locus Sb06g 003215) derived from phytozome v7.0 (chr-ID chromosome_6; pos 6730686 to 6731044)
tcttcaaaggtatggaaaatagaatccaaatttcaatttcagtttcagttttcagtttcacttttggaagccctgaaatattctgccagttttcagttttttgaatgtttttcacaacacaaatgtcattgtgttaggcaaaaatagtgttaggcattaagcaataatattgttataaattagcaaaaacagtgcggctgataaagcattaatagtaagacaatcagaaatgatagctcaggcgtgagaagaaaaggatgcaaatagttctaaaatttaggatgatcaaggttagctgtaaagcattaattgttgtaaacattttttgcatttgaactgtttaaaatacattctaggag

SEQ ID NO: 35915 - DNA, 723 bp, Sorghum bicolor
  Intron number 1 from transcript Sb02g004580.1 (locus Sb02g 004580) derived from phytozome v7.0 (chr-ID chromosome_2; pos 5249976 to 5250698)
ccggcaccttcgccgagctcagggagcaggggaaggtacactccctcgacaaaatccttcacttttccttttgagagagagagagagagagagagagagagagagagagggaggagaaaaaaacaaacaaacaaacaaatcagtgcgccgtgtgatgcgcgtatccgcgtttatcgtggtccgtatatactctgatcctacagagtagacacggttttgcgctgaggtaaggttctgtgggttggcattaggataggaggcgtcacggattctatgcgctgactgactggtaactggttaccggattgtgtcgtgttgaagatcgggagaaccagggctgtccatttctgcctcggtcatgttagtgttacattctggcgcgtaattctcaatgctgccgatagatttcatttcctaatgtcacaaaacatatgtattgttcttagtagttggtactaccatatagtgcggaggaaagaaacatggcagttgatagaggaaagaaacatggcaattgatgaatccatccagcactggttattttgtagtacagtagttctcaaactactgagattatgggacatttatagttctagatcagcattgaaattttgcactacattatttccccccttttatattgtttactttgagctcactactattagtactgtttgaaaatcttcagactgccttcgtccccttcatcactgctggtgaccc

SEQ ID NO: 35916 - DNA, 407 bp, Sorghum bicolor
  Intron number 1 from transcript Sb09g004650.1 (locus Sb09g 004650) derived from phytozome v7.0 (chr-ID chromosome_9; pos 5614594 to 5615000 reverse strand)
actgcttcgtcagagtaagcacgtgattattcatattcatcaaaaaaaaacaaaagtaagcacatgtacaacgatgtagtatcgtctgcagcgtactatatagctagatactgatcagcatgtcctaaattgcaacctccattgcattttcttttcttttttctctacatagactttagtaaggtttcatgtaaagaagttcttgaaaagataacagtatagaagtattttgcaagactttaggtatctagactagatacatatgattatttccattccatgttagaagtctagaacacgacgtctattcaaaagcagagcaaagagcaagaactctatacctgagtgacgcttcaaatgaactccttgcagggctgcgacggctcggtgctgatcgactccacggc

SEQ ID NO: 35917 - DNA, 710 bp, Sorghum bicolor
  Intron number 1 from transcript Sb02g042290.1 (locus Sb02g 042290) derived from phytozome v7.0 (chr-ID chromosome_2; pos 75976933 to 75977642 reverse strand)
gtcagtcgacctgcacaagcaaaaacaggccaaacgtatgtaatccttttattccgtccaaatcgcactaatattatttttcggttttcacatatataatggaattaaacgacgttatcaaactacttgttttctaaatgtagaaagatgacctgaaaatacagatatattttcctaaaaggattacagacatataagtggctttcatgagaaactctactgaccaaatcatgtctgtcctatccatgacaaaatatatttatattgtgtaaattagcaaataaacaaaacatgtcaaaacttgactacaagactctagatatgatatatttattttgagaacagtagaatacacagaggccaaagagatcaagccttttgctctctctttttcaaacctgagcacaccatttcacagttgatttgaattctaatcccggatttattttaacgcagcgagcaaggtttggctctggaccaccatagccgttgtttctttactgttgctgtctgctagttttcttctccatagatggatcaaaatacggcgaaagcgaggtataattctttttctcacgcttatatacactcacaaaagaaacttaaaaaaaaatcctcattttcctttgtctgaacctggaccattaacttttgaccaacctgtgttgtgttcagaaattgctcggttggaattacgaaggttgtctatt

SEQ ID NO: 35918 - DNA, 749 bp, Sorghum bicolor
  Intron number 2 from transcript Sb02g006500.2 (locus Sb02g 006500) derived from phytozome v7.0 (chr-ID chromosome_2; pos 8151772 to 8152520 reverse strand)
ctccaggagcgataccaggtccgtttttctcccccctctgcttctgcatcggtcggttttgtttaagatatatatgcatgcttcagttgagttggtggaattccatgttttgaagcgtcgccagatgtggttgtgaaattaggagtttatttatgtgccattagaaagcctgaaactgatttgctcatacggtgaatcgatcttctgggccaggtgatttacttttgccacatgtggttacatataattaccatatggtgatttagttctagttctgcgctattttgtgaggaatcatgaatttgtggaatgctgacttttgctcccacattatggatcagataagtagattgccagatgtgtttcatttggtagtatgcataattcagtatgttttagatatctagtgtaggtatcctaaaatctagacgtgtgtagttcttcctagtattatagttggttcccttgtatcttttaggcaatgtgcttgctaattgacgctagttcaggtcttatgttcttttaactcttcagtaagggacaattcagagtcgagttttctcttcaggataaaagggcactgtgcaggaagcacaatgcataataactaagatcaaaattcagatgaaacgttgaagctgtgccctttattgttatataggctgttctgtgctaaatgctaataaactgaccaatccttgtttaacaatgcagattggtcctgaccagattgaagctctgtatcagta

SEQ ID NO: 35919 - DNA, 653 bp, Sorghum bicolor
  Intron number 1 from transcript Sb09g025080.1 (locus Sb09g 025080) derived from phytozome v7.0 (chr-ID chromosome_9; pos 54569613 to 54570265 reverse strand)
cccccgaggatcgccccgaagagccaacgctccaggtaataagtaaccccccacaatcctctccaccccgctggtcccttccccgtgcttcggctgtagattctagaatctcctcgattgaactgatggcaattgtggaaattcctgtgtttgcttaattggctgccacactgaaggcgtatgctcgaacaaattgtgtacctgctgtcctgtttgagttactccaagggtttgtaaggaatgtgcacagggatggggatgagagtcttaaaatttgtttctagattgcaggactggttttgagtataatgggtggactctatatgtggcatgaaaacaagctggtagagactcattggacctcagtaagaacaagaggaagaatccacttttattgtggacaaactaaattgatattcaaccaaagcatgtgttcatattccagttgattgcatagttgctatggtctacatacgctacataccacacatcggtcttgttgaaagggattgtaaatcgttaggtgactaattttaagagcagatgcgctaatcggattccttggtgttaatgctgctcattgtgggtttgtttcatgtatatcttttggtgcctatcattcttacatcatgctattgcaatgacagttcaag

SEQ ID NO: 35920 - DNA, 838 bp, Sorghum bicolor
  Intron number 3 from transcript Sb04g004570.1 (locus Sb04g 004570) derived from phytozome v7.0 (chr-ID chromosome_4; pos 4402618 to 4403455)
gagttgacgaggagcttcggagagaggtaccaaccacaaccagtgttctcatgtgtttgtaactagctgtgtaaaattgtatttgagtaattgagtttagtccttactggaatgtttatgatttttttttgaaactgtaattagattgtgctacagttaaattgccactgtcaccagtgtaaattagtagaaatgtagtcctgtaatctttcttttacttttttgacatgcatattgaaacacagatcaaaacactatttttagtataatcccatcgtcttaagacatgcatatagtagggcatgctccacttgaggtgattgtctcatggtcttagcattcaaatgaccggatatttaaatatgctaatttttccatgtgtgcctccacatatgttcacagtcaactaaatttcaacttataaagaaaagaatgtcgaggcattgtgaaaatataataagttttgacgtgttttttgcatatcaatacatatttccttttgagaatacctgttccaatatatatgtgaggtagtacctgatatctaattgtattgttatcttaagatgatttttgtctactggttgtgacttgtgaacttgtggcttatgattttataggcaaaatacctttaaatgtttatcaaagaaaaactttatttatgtgtatataggtcaatatgcataattcctattttctttcagcttttgcaattcttttgtattttgattgaaggctcatgaaaactacttcatatatacactacatgataatcactgatctcattaaaatgcgcttttatggaattccatgacaaccaggccaattatctcaagtc

SEQ ID NO: 35921 - DNA, 959 bp, Sorghum bicolor
  Intron number 1 from transcript Sb04g028131.3 (locus Sb04g 028131) derived from phytozome v7.0 (chr-ID chromosome_4; pos 58096439 to 58097397 reverse strand)
ggtgctgacaataatttttacactgttcagaccatgttagtgctctagatttatttgctaagtttgtattttaggttcatcgtttggtttttcagtttgtcagataatgcattattattggtttctgatttcataaaactcattattgtaatgaggtgctttagtcatcattatacacaaaactcatggttaaccaattatctcattgtctgccaacgatatccatggatttgattgttaataatgtcagaaaagaagaccattctccttgcttgagtgtcatgtatatcccaaaatcattgaacgtttaatgttatgccaaatattttagcaaggtctaaatgacaatccatcggcatatgttatgatatattatcgctctgttatgttttttttattctcattttcaagtcacccgttcaccagcaaagcaaagaatgtttgcacagttgcatttggactgatgcggatgcttaatcatatacttgaactatagctttgtaaatgaaagaaaaagcaacatagcatgtggagtccttggcagtggtgactagcactgtgctatagactacaattctagcaggtggaacataggcaaacctttttatatgaatttcccttgccatgtttggattctacaagactaatagctagaattcaactgtatcatactgcatgtatggttgtttttctcaaagctatgccctatgtgtcagctgccaactacatacatgcctacaggttgcaggtcttaaaactctacactaagcaaagttcaccatccaagctcgttaacacttcacaataatgatccattgtcaaagcttgttctgctcgttttttcagaatgattagagttatgcttacgcctaccagatgttaaatatgtgcctggccataacttccaatattgtgttttcccagggaattttggaacatcctgaagacgatatagttag

SEQ ID NO: 35922 - DNA, 608 bp, Sorghum bicolor
  Intron number 2 from transcript Sb02g023790.1 (locus Sb02g 023790) derived from phytozome v7.0 (chr-ID chromosome_2; pos 57702645 to 57703252 reverse strand)
gctcccgccgccgtcgcactccgtctccacccaaggtccgtctccggccatctctgtctgaacgcgcctttcagcttccttcctccccaattcttgtctgaacatgacctgggactagggatgagagtgactgggggacaatggagtggacaacacgccacgcgagctgctatatatgatagcccatgttttcccattatctttatctggtcatcatactgattcaaccgtattatgaccaatagtcaaagaaattacatggaatacaatatacatgcgtcacgtagtaatactagccagcagattggtgccagatcagaaattccaaaaacatacttgatgctgtactcgtacaatctgcatcatgttcacagcaagatttgttaaacgaaaatatgatcatatcagcttgttcgcagtgaagaaaaataagcagtataggtcaacatcagttagctggtgcacatgtaccgaacaacaagtgaatggtcggatacatatattcgattttttgtactgtacaacacagtactaattaatatacatacgtgtatatccatttatatacgtgcaagtatttatattatttagagttgggtgcaggttac

SEQ ID NO: 35923 - DNA, 805 bp, Sorghum bicolor
  Intron number 1 from transcript Sb04g006700.1 (locus Sb04g 006700) derived from phytozome v7.0 (chr-ID chromosome_4; pos 6716599 to 6717403 reverse strand)
ccacagagactactggctcaaggacacccgcgagagtaagcgtctctctgtttactactattttttttttgctagttgtttcaaacaattcatactccatccatttattctaattcttaacgttttagtttttcaagattttttttcctactatgcacttatagatggaaaaaagtaacaatttggaaaagagagagtagtaatttgaaagcacatctagcaatccaatttaacgcatcgatgcttgatctaatcgattttaatttttttttcttctcactctgcgtctacatatacatactaattttcttagttagctcaacaaactaatgattctagtcaacatttagcaacccaatttatgctaccttattgcatgatgatgcaatggaatattaatatccttgtcaccctgttttatatcttttgagttgtctagttgtttgcgtttacttgagtagtttccattgcacagctgtaaggtcaattttcccttaattaaaaactaaggtaatctttttctattgaaaaaaacagcaaagttcttatagttcgctcagccaattattcattttaaagaacagttagcgatcccatttaccacctgtatgctactccctctgttccgaattataagtcgctttgacttttttagtataccaattttgcaaaatctatgcaccaaaaaagtgacttataaattgaaacgaaaaggagtaccttatagtattcttttcatcctgctacaaacatgcatactaattgccactctgttggatccatgcatgaaccaatcacagctccc

SEQ ID NO: 35924 - DNA, 279 bp, Sorghum bicolor
  Intron number 2 from transcript Sb07g028390.1 (locus Sb07g 028390) derived from phytozome v7.0 (chr-ID chromosome_7; pos 63372542 to 63372820 reverse strand)
tgtttacttggaggtgagagattagatttgtctggtacgaatatgatattcttcctcacttagaaacatagctattttgtatattaaaaaatttgtttgctttcattgtcttttgatttccaagcatacatagaatcaaataagattaaccattgtcttagaataattttatggagcttttagaaaaaattcagttaatttggttgcttgctctaagcagtctttttttcaacattcaatacagactctttgggtgaagttccctctgctagatccacg

SEQ ID NO: 35925 - DNA, 975 bp, Sorghum bicolor
  Intron number 2 from transcript Sb07g001430.1 (locus Sb07g 001430) derived from phytozome v7.0 (chr-ID chromosome_7; pos 1453478 to 1454452 reverse strand)
ccgggtgccatttctggtgtcatctctgacaaaatgtaaggtttggtgaatgcttttgctctgtttgtcagttatgtgagcacgagtgttcaattggagtttagagtacaagtttatgttaggtggtgtaacattttgcatagcctgttaaaatcccctcgtattgtttggtgtcatatagcggtgcatttcaaattagtctttgatctgggatctgattctggtgtttaaacggagtaactgactaataaggtgctgttaatgagcctcagtttcagggctgaaggctcgaagccacttcatgaatagtagtacttggtacatgatacctttttctgtttataaaaatgtctgtttgaactagatcagatgctaattggtggaccatagcctagacatgtcttcaaggtcttgtactggagtaggcttagcattgtcattttgcgatgggaagtgattgaggaccaacatctgcacccgtgtttctttatccagcaatggtgtaaatttccggttcttataccccttaccacctaatttactagctattaaattttcatgtcatatgatcttcatgcccccatggcaactatggtgaccaaaaagtgtgtatctgggtacaacataaagatcctgaatattagttcagctaatgtgttgatactttgtagccatatgcattacttattacttgttagttgttaaccgaggccagtgcctcatgatgaagtttgatatactaggcaagtaggaattgcagagtacaatctacaccttggtatgatttaagttttctcttctcttcacgtgtgtagttttttgttccataagctacatgtatcctttgcactggtactattatttgatacagatgtgagcagtctatgtgtttttatccttccagtagtagctataacaattttttcactgatgattatagagggccacgaagggcttgcatattgtactgggtac

SEQ ID NO: 35926 - DNA, 932 bp, Sorghum bicolor
  Intron number 1 from transcript Sb01g009560.1 (locus Sb01g 009560) derived from phytozome v7.0 (chr-ID chromosome_1; pos 8309807 to 8310738 reverse strand)
gcattcaggtaacgatccgtccatttcttcttccgtagttcctttatcgcgctgttgacgtagatctgttagcggtatggtagtttcatcgctgatgtgtgctggatcttgcgggattgaatcgggagaggaaatagcatttcatatcggtagatctgtacgtatctggctgtatatgatggtggttgcccagatccgctttcgctaagtctgatccgtagatctggtgaaatggtgtctgatccaggtcgctattatttgttttctttaattttggatagaatatttgaatagggattactcgatgttgcacattattttccatgatccagtaaatttagtaattatatagcgtatttgttgctgattttgcctatacgtgtggtagacctgagtgctctgaaagtttaaatgcactgttactttgaatctgtaaatataaatattcataggccaagtttgtattgcctgtttatatgtagacccttgatgaacagatgcagactacagtatgttaatttgatgtacaaccattggtattgttattagatctgcaataaatcagtacccatcaggcttaggcaccttaacccaattgcctttagctgtttagatctgttagaaatgggatacagactggcattctgtgttatgtagtcctagttgtcattagtagggctaaaagctgtttacacgtttgaaatgtttgtaatctgtaatttaatcatggttcccttggacattggaatcgtgtgtatagtttgaaacaacggtcattcaggcacatgataccttgaagattatgcatctgtctgatgtactacagtactagtgtaggcacatgatacattttaatcgactgcatttgaattatatggtctccttttgcaatttgcataaataacactgctgtttgtattctattcaggctg

SEQ ID NO: 35927 - DNA, 656 bp, Sorghum bicolor
  Intron number 1 from transcript Sb08g007130.1 (locus Sb08g 007130) derived from phytozome v7.0 (chr-ID chromosome_8; pos 11923127 to 11923782 reverse strand)
ttgctcctccccccatccgccccgccgcggacgaggtgagcagcgctcgcgatcctaccgaatctgctgctgctgcgcgcgtgcatgggggttgggattcggcgtggggttgtttgtgcaaatgaaatcctcggggggcacggccggagaatgctggatcccgtgcgggcgtggatccaggccccgccgccgccgccctgcttgtgctaagcaaccgcgttggctcgccggatttgttttgttgttttgttttgccttgttcctcctaaagctcgaccaacgattccggtgcaatcggaggctggatttccggtgaaatcagaggaaagaattgatttccgtgtgggaggttgaggctggattttgttcctgttttgaggcgtgatcggggagaagaatgcgatgaagcggaggggcttgctttccatttaaacatgccttcctttcgtctccagatcaggagaaatcgtcgagccccggcccccgtggttgcgtggggtaccgccgcacgcattttgcagctctagtctaggatgctggcacttttgtttgccagcgccggtgcgatattattcttgctaacgagctggcgactcacgggccattttttctttgctgcaggctctgcttctcagcgtgacaagcctggcgaacaa

SEQ ID NO: 35928 - DNA, 1042 bp, Sorghum bicolor
  Intron number 1 from transcript Sb09g003500.1 (locus Sb09g 003500) derived from phytozome v7.0 (chr-ID chromosome_9; pos 4033540 to 4034581 reverse strand)
tgctttccgagacaagaggttaggatgttttgatctggagcaaattatacatctggatgggagttattcttgtgcctcgtgtggaaagatttctggaatactagggtaatgtacaatttctacttaactcaagtctcattatttctgctgtattttgctttgcttcttttccctgttcgatcataatattcttgtttggaatctttaaacataatggacttgcattagataaaatatagatgtgttcttaataaattattatgttttatgaaacatggcgcaagtttagttcttgtgcatggaaagtgaccagctccacctcagtataacaaaattaatgtgaacaaagtcataaaccattttacaactgtgtggtattttctttaccttcgacaaaagtttcattcatattggcggtagataaattattttgtcaaaccattttagaacatgcaacattcaagttaatcaggttactaggacccggttgatcttttaagtggatagtttagttgtgcttgtcagctcgtgtagtcctccaacgtatataacattgtttagatgcaagggtcctttgttggtaaaagttgtaaatgtatatatatgacatttaggacaggctaattagtttcatttttttacgtaattagattatcctaacgaagagattcttaggttaataaacctaaaaggctgaaattttcttttcgaatttttagttctttggagcatgaagttgtttgagtagcctgatacaggtactgtgtacaacataacagcacctcaaaattttggtctagcagttttttttagttaagtgcctggtcttaaattgttgtaataatttgcatatagatacagtatttacttgcgacattattggaacaccttctgtggcttggtcattcttggtagacttgtatttacttcgacattattggaacacctgctgtagctttggtcattcttggtagacttgtttaattgacatgtattaatctttgtagcagatattggaaaaggcaattagttattggaaaag

SEQ ID NO: 35929 - DNA, 806 bp, Sorghum bicolor
  Intron number 1 from transcript Sb10g029640.1 (locus Sb10g 029640) derived from phytozome v7.0 (chr-ID chromosome_10; pos 59399103 to 59399908)
ctcaacaggtcagtctaactactaaacttggtttaatcaattttacctcatggcatgatagttttttccaccatattgaaactgaatatagttgcaaatgcctttgattacatcctaacattgtatgtaagcatgttgcagtaatgctgtaaaccttgaaaaaagatttacagtttgttatttgagagaataagatacaccatttctggctttggaaatattttcttctgttctttttagaatatatgatataccatttctaggtttggaaacatgatattttggacactggatccatgacatccgtaaataatttagctggatctcggacatctttgtttatctggtcagtgctcagtacaacacctgatgttgacgaagttgataggcattgctctgagaaataaaatagcagtatcatgagtcatgacaagcagtgctgcatttatctagacaggagttatatgacattgtgactaagctgatgtactttcccccatctgtttcagcactgtagctggaccaggattctttaggatatagtgcatttgagaaccgacattcagttttttgttaagtacaattaataagcttggcccactgcagtaggtcaatggcaatacaaccttcaactattttctgcatttgccttttccttaggggagagagggttaatatgtcagtagaacatcgatatctgcctgtccttgtgcacatgtttcaacccacgtgaatcatgttggctgcttactcaaggagtcaaggtgttacctttctctttcaggggttgtgtgaacaaactgtca

SEQ ID NO: 35930 - DNA, 850 bp, Sorghum bicolor
  Intron number 1 from transcript Sb03g008640.1 (locus Sb03g 008640) derived from phytozome v7.0 (chr-ID chromosome_3; pos 9245692 to 9246541)
gcggagcagtctcccagctccgcgccgcagggtcagactcttttcctttctcatcagttgtgtaaaacaccttcaggtcttttctccgtgcgattcttgcgccgggctgtgtggcctttccttgcgtggcgactctggtgccgggttgatttacccctggttaaattcatcggtaacactttggcgcgaattatacggagatcctcgtcgagtattatcggcggcgaggctttgttgcctgtgccgttgatggggggtcctgcgggtgcccgctggaaggagtaggagactagggattcgtcaattcgtcgaattggtgtacagagaagtggatttctgagctattcaaggatatatcttcgtgcttatttgtcctgtgagagttcttcgctagtaattagggctcgttacttggttaatgaatgattgatgccgcttatttggctcataagtttcaagagtaagctacaaaatggatgctatagcttattgcaccgggcgattgatgcaaggcgcacccttttgtggacacagcgtaatggctgcagattattggcacttgacaaggctggaaattagattgcaaggcgtcaaaccaaactggaactattgcgtttcttggtcttgaacaaaattcaatagatttaagtggtaggtgggacaaaacttaattcatgtttgaaatttgtaaagcagctttctgcaaatgaaatgttgtggacaaaaaatgacagttctgagggtgtcttgttctcttattattagtgacttactgtgcttatgcttcccctgatctctaaacaaaatggtacattctgattttctgactctgcaggtggttctggtggga

SEQ ID NO: 35931 - DNA, 430 bp, Sorghum bicolor
  Intron number 2 from transcript Sb01g034620.1 (locus Sb01g 034620) derived from phytozome v7.0 (chr-ID chromosome_1; pos 58086717 to 58087146)
gaattgtgagcgacattgggctgtccaactccgaggttggttggcacttgacattgcagtatatacatatagtacaaattgttcttgtagtgcatgggtactaattatcttatctcttttggctgtggatcaaattaacttttgtgccaactaatggtaggtggtagcaggctagatgtagagcagcaaaaaaaaacattttatttgatcaaagcagaatatgaattaactgtgactgttttgcaaagtttagttggtcaagtagataactagatactatgatccaaaatgtaactaagctactgatttcaccctttgatcttattttttctctctcgacattcaattcttcgtttacaaaatttaatgttgtacagaaggcccctgttggtttcgacaagaaatcttttttgactcatgtccttgtagt

SEQ ID NO: 35932 - DNA, 537 bp, Sorghum bicolor
  Intron number 3 from transcript Sb01g033760.1 (locus Sb01g 033760) derived from phytozome v7.0 (chr-ID chromosome_1; pos 57061838 to 57062374 reverse strand)
tatttcactttggacaagatgtaagaggtagtgagatgtagtagtcagtatagttggtgccttggtggtgaattgagaacatcagatttgattaccaaagcttatgcttggtggattaaattgattcggttgcacagacgatgctttccccacttcattgttcagttgttttgagctccagttgaagagcttgtgcagagcatttctttctctgatgctctggtactattcttctcaatctcaagtagtctaggtgccttggttgttatttcttacaggctgggtcatagagttgagaggcatcaggggagactggttgtgtgttgcttacattcttttttgttttttgttttgtataccagctgttttcatataaaatagtttggttgtttgtccatctccagctcaaaacttacctgcttatgacagtatgggatctatggctcctggatggtttccctatgaaaatattttgatattacgatgcttattctgaaattttcttcttatgctatcatgcaggaaagggctcttaat

SEQ ID NO: 35933 - DNA, 768 bp, Sorghum bicolor
  Intron number 2 from transcript Sb01g034850.1 (locus Sb01g 034850) derived from phytozome v7.0 (chr-ID chromosome_1; pos 58286342 to 58287109)
gttcctgaggaaggatttggaggtcagattttctatatatgccacatcatgatgataacagactaaaaccagtccatgaacctctaaatcttttggctctgtgctagtaactgttgcattattattgggaacaatggtctcatgtctcgtgaatgagcaaacctgctagacaaacacccaaaatgttgcaatgtcagagtaactttggatatcatacattatgtttatgttttcggatatccaggaataatcagtatttgtttgaggggatagtagaatatgtggatccatacattaaaatgttccatggatgtgtggcggcaatgtagatattttattattgatgtctaaatgaaagttttctgtttgtttattccattaatgggttgactgtgcttttaattggttatgtgttttgattcatggaaagtgatttctagtttgtttgactttagagcgttgatatgcagcaattgattttttggacatatgctaccaatggttggaggatgggatatttacatgaaagttgcattctttattttattagctatttaacttcctcataacatctgttcttagttgctgttttgctgtgatactgtaatcttacactggaactgacctgcacccttttgttattttgttagatggcttatatattacaaaataacgaacagaaagattaataccgactgggataaacttgggttcttcttcaattagattctttgattaaatgttctctgtattttttccaggtaaaaa

SEQ ID NO: 35934 - DNA, 718 bp, Sorghum bicolor
  Intron number 1 from transcript Sb04g021100.1 (locus Sb04g 021100) derived from phytozome v7.0 (chr-ID chromosome_4; pos 49597181 to 49597898 reverse strand)
ccctctccgcctcaaggctctcctctcggaggtacgtgcgcgctccctccctcctttttccctcacctccctcctcctccatccctagctgcgtttgcgcgcccctccgtattcttggtacattggcatcagtcatggccgctttcgtgttcgtcgttcttggtgctctgttctatgcacacgttctaaggtagggtattggtaacatcattgctaatcatcaggtatcgattatctccttaaaacgtaccaattatgaattatctagtctcaactgcccacagagagaaaagttaccctgaaaattaatgtttttaatcttaccacttggcagtgaatcgatcagattatgtccggtgttttatcaccacattttgtttttgcgcatatatcaccacattgaaatattcagcacattgttcttgaaaattgatcatgtgtggcgacataccatttgattggtgcaatggcgatgatgtttttaaagtttttatttagacttttctctctcgaatgtgcacaaacgctgcgtatcattgtataaaggagattgaagagttcatcatacaagtttttattcagaattatccaagtataagtgaatgaattgtccactttttttttccattagcttaatctttccggttaacctggtcaatgtgtggaactcaatatggcctcttctttcttttatcaggtccgatagggcaaaccaata

SEQ ID NO: 35935 - DNA, 741 bp, Sorghum bicolor
  Intron number 1 from transcript Sb10g022420.1 (locus Sb10g 022420) derived from phytozome v7.0 (chr-ID chromosome_10; pos 50097824 to 50098564)
catctctccaactccaagccttaggttttgtccaggttagtcttttaaacattgctatctgactatccgagtgttttagcatcttgaataaaggtactgtactggccgtgcttgaaaaattgctatccgaggcgtcttgaataaaggtacttgctgtgcttgaaaaatgattttggaccttcaagcggtacttcatgtctgtgactgtccatgctttgaagtatgtacactcttcagatccaaaaattagtcggctcgtactctaaagagagtaagatttagttggctctgattgtataggcctgctagtttctttcagcaccgttcttttctttctagatcaaagcaccaaattattcaatgcgtacaaacacatttcagattcatgccaaatttagtgcagcagagtaccgcacttcaaaatttccccttaattaggtgtccatttaattaccagatgacggatttgttttctcagcgatacttgagaggtgtctacttggagcttagtacatatacaactgaagtcgcgtagcttcatgttggggtatttgtacacacaaaagatggtagtgattttatagaggagatgcaattcctagcctttatactcttcgtgtaactatttatcgggacgagtgcaatagacctaacaatttgtctttgtgtacgatcgagtattttgacacaacttatttcgtactctattatacagattcttggattggttacagaagtttc

SEQ ID NO: 35936 - DNA, 1026 bp, Sorghum bicolor
  Intron number 2 from transcript Sb04g037200.1 (locus Sb04g 037200) derived from phytozome v7.0 (chr-ID chromosome_4; pos 66861126 to 66862151)
gtccgcaagggcaccggagggaggtcttctgtgaggtgaacactcggctccgtttccttccattgattgctcctgaattaaacggccataggtgttgccgcggcttgtatctggttttggacttttggccctctggatgagattgagctagtgttgtgaatttgtgatctatttcaactgctaaacatagatgaagtccctagtcagcctagtcatgacctttcggatgctcagaacgtcagatcatgtagttcatacgattacacttggcaatgtatgtatcatattgagttagctgattgattgttgtggtagctattgttggaaatgtttgtacaactgtaccattaattaacttttcctgatatgaaatatagtgaggaccctaaaattctgtagcctggaattttctgagttacggttccactcacggttgccgttgccaaagtgtgtggtgatatatgaaaaccttcagtaatcttattactagtgttgctggtaaactctttttggttgatgttttctttgcaattgttaggttgctaacaatttatgacttaagttgttggactatgtcatcgggcaaagttgttgccgcattttgattaccggctgctttcgtacctttgtgtcttacaggcaggtggacactcatgttgatttgtaaacccatattggtttgcttatgttaatcagtttaaccatgcgggtgcctaaccatgtagatgatgcattaatccatgtttgcctttgaaggtgtgaaaaattttagtggatggcattgcttggtttggttttgcacggaatctgcacagttgcaatgtagcctgatctgctttttgtattttgcaatgctacagcatgatagctccatcattacatctcccatatctgcatgcaaacactagaaatttcataattttctagttgtcttgatcgtgtaccttaccctggtttataatgagcatattttttttttttgccttattagtggaattgtagccacggtgtttggagctactggtt

SEQ ID NO: 35937 - DNA, 911 bp, Sorghum bicolor
  Intron number 1 from transcript Sb10g026250.1 (locus Sb10g 026250) derived from phytozome v7.0 (chr-ID chromosome_10; pos 55649280 to 55650190)
cacgacgttgtcatcttctccaagtcatactgcccgtacgacccctctcacctttaatcccttctcgtatttttccttgcgtaagccgggattctgggtacgattgctgtgatatccaatcttaagcgtagctatagaaaatctggcatatagctgttagttgtcactgattccatcctttcgcttgctcaaaattgtctgttgttgtgttttttagcgcacaaattgttagtctgaccctaattactagtggagctgaggggttgcttcgcccttttttttggcatgcccaactgtagaattccagtttaacttggatcctataccaaattaggaaaagcccagcacagttctgtcctagcaaagtggcaaccatgagttactgccctttatgccgtgaccaaattgttgtctgctttgcatttcttggcacattgtgcttgtttgatgtaaaaaggattcactgcttgttctgtttagcaattttatttactctgatgtcactgtgtaagtgtaagagaaatgttcttggcagaaattacaacaattctcctgaggtggtggctcttgtgtccacctgattagctcactaggtctcttgcggtgcagttcaaaaagctaaactcaaatgtttatcaagtttaacacgcactcgtggggagtacataccattaagaaaatgcactgataagtgctatagtcagataatcaggtgacttgagcaggcgaatgcacaatgataacgtttgaacaatgaatgtatggagatgacactttgtggttgtagctcctgtactaaagtacgtacacttatcagcattttacatgtctggtgtaagaagctcttttatcttatgagagcactaaattttacaggtactgcaaaagagcaaaggccgtgtttaaggagc

SEQ ID NO: 35938 - DNA, 877 bp, Sorghum bicolor
  Intron number 2 from transcript Sb10g002260.1 (locus Sb10g 002260) derived from phytozome v7.0 (chr-ID chromosome_10; pos 1957093 to 1957969 reverse strand)
tgttgatccgggcgaaccaggggcacacagtaacagtacgttctctgcccgagatttcctgcactgatactgaagttgtttccacaaagcagcatgtatttcccatgattgttcacttttcctttaacttcatgtaagatggaaatgtttttcacagtagtagtctaacatcaactgatataatggttagcggtcctatttcctcctatcgcatactgcttaggaactgagaatgtgattattggaatgctggattcaattttctggactaataaaaggaaggttccattcacattatttttatgcataacacttatgctggattcaattttctggactaatagaaggaaggttccattcacattatttttatgcataacacttatattctgataatttcttttatatgccatactcaaattttaccataccacttagatttttatgctggaaaaatcttatctcaccgatgctagcttttagcttttgtacgttatcaatgtaacttgtgtttctaattaatataagattcattagcaaatgtaaatcagcaagccttgtttgaactcagataatgtagacaatcatgttaccttcaggcttcagtaagcatatctcctttgggtgtttattccagtattctcggttagggtatgctgtgctatttccatgtttctcatgaagacatcaagtgaattttgttgactgactaccccttaaaccagcttagcaaaaagagactttagagcatctatggtcttaggcttcgtggctagatcaacatacattgcagctcaattgaccattctagtttttttactaatcctgcaatcctcttgcagactgttacttcagagagcctgctgaaacccatttt

SEQ ID NO: 35939 - DNA, 928 bp, Sorghum bicolor
  Intron number 2 from transcript Sb03g039140.1 (locus Sb03g 039140) derived from phytozome v7.0 (chr-ID chromosome_3; pos 66916029 to 66916956 reverse strand)
cgcgctgcacgtcgctgccagagaagggcgtcgtgagtgtctatcctttagcgctctctcttacaattgttgtatctatttagcataacacttggagaattgagcttgcaactgcgagtttatcagtaagaaatttctcggataacttatgctacaattggcaaatcagttgacaagtaaatagcctcttctaagtttgaaccaaatagtagtagttgcacagtgcatgataacatctcacatctggttactttgatcggagtgctatgcacatactagcagctagcacacagtactggtgagaaaatgatattgtttaatgttttctttgcttctaggcaacaaatactatgatacaaaacatagagcatgtgggcatatggccagacacaaccacatacttctcattattttatagataattctgttatgattatctgttcatgtatccattaacgaagggataaaaaactaacccttttgttaacctatgaactcagtgcctcaatatgtgtgcactttcaagccaaaccattactcttcaaagacccatgtactttagaattcagatagtaaccactctgaaaaacagttggctcttttggagacagattgctatgaagtagtttttcttataagttttgtgtgtaagcgacttggaattgggacttttgggatggtaggaaatgtttttagttccataggaacatcaaactgtggcccttggccattggagcaaatttgtgcatggtaattatgaagctaatataacctatattttcttatatccaggaaaattaggattgtatattccctatatgttgacatactctaaaaagtatcttcatgtcacctgtttggtgtattaacattggagcaaattgtcctaacaagtaggcgtgcttgtttgtcagctgttgtgcaggaa

SEQ ID NO: 35940 - DNA, 412 bp, Sorghum bicolor
  Intron number 3 from transcript Sb03g004800.1 (locus Sb03g 004800) derived from phytozome v7.0 (chr-ID chromosome_3; pos 5085581 to 5085992 reverse strand)
gggttttcgtgcaggtaagaaactgcactgacgtgcttttatagtttcttctagaaagcagtagtggcagctcttctagaaatctagcagtggtaacctatcagatcagtggatgatctgttactcttgtaattttataatgcatagcttaaacactgcacctgcattgtcccggttctcttatatatactaaaggaaatgaaacacactgtttgattgtgaaagttgtggaacttctccttaggaaaaagtgtagagatatgcgctggaaccaatcaattgtaaagatggtaaattatgcaagaaaatgttgcatcgcctcggctgaagatcactggttctggctttaatgctcaacaacacagacattgagatgaatttattgttattatttcttttgcaataggaacac

SEQ ID NO: 35941 - DNA, 743 bp, Sorghum bicolor
  Intron number 2 from transcript Sb06g020190.1 (locus Sb06g 020190) derived from phytozome v7.0 (chr-ID chromosome_6; pos 49710380 to 49711122)
gtgcgaaagttgagacgctgcaggtactatttaaggtccaaaaaactgtctgaggattttttccccatgattgttgtttttttagtagatttcgggtttaggactatgaagtgctgtagaatgtggaatatgcagtgccaaaagctacagctcagatcaaagcaactcatactgtctcaggcataggttcatggacgtttcaaacatgcttgagaaacactgcaaacttgtgaaggttattttgaactgatttatccatttttgttaaaacaggtagcatagtgtacgctccaagaaaatgaaagagggggtaaatgataactgtggtgctactgtatattattaggcttagggatgctatgtaaatgtctaatccctaggttctaagatcggaatatttgaaacctacaattttgatttgctaacgatggagaattcatttattagtatattttgtaaataatagttgccatggaagatgaaaaaagaagtatatatttttttttctgtggactagctgacaacgtgatttggtagaatgataaaatgcacactcaatctgctcactcagctctagtggatatttgtcgtattgcaaagtggctcttttcaataagctgtgttttcagctgcgcattgactgagtggtacattttgttcttattatgggtacatcaagcagtgatgaaaattgggaaatatttgatctgtattcattaacatttcccactttcactttcagg

SEQ ID NO: 35942 - DNA, 915 bp, Sorghum bicolor
  Intron number 4 from transcript Sb09g004540.1 (locus Sb09g 004540) derived from phytozome v7.0 (chr-ID chromosome_9; pos 5525287 to 5526201)
attcgtggctcttctggtggactctttacttgactgtgagtgatgttgtctcttataaagaatgtcatggtgtagatgatagactattcattggataggtgtcaagatgtctgagattactcaattacaagttgctgtttgtgatcatctttttattaaccaataagttaggaattattcaattaggagaggggattgctataatccttacatgtttatgctacatgtacaaatgtacctggctgtttcaattttccttgttccttagctgtgcatgtccattatctatagttatgtttaagatggtcctatttcccagtggttttcattcagttacatgattgacaaaatacctaaatccaactattgtttaagtctggttatcaacttaatataggtgcaacattttatggtttatggctgtattattctctacttctcatcaatttattgatgtattctttcacatttttcttgggctaaacacttgagccttggtaagtggtgcatcctgcatgaataaaaatgacttgtagtggattctagctaatcacttaaagcacaatctctgcatctcacttactgcttttctcaagggaaaaatggcctcttatgactgttccttctcccccatggttccaatataccaggacatgcacttaggggttctgttttgatagtatctttacctctcaacaaaagctggctgatccatctcttctcttgagagggttgaagtcttattttaagtcttaacattgtaaatgataccagagaagggtctcgtatccatacttgagggcgatccattaaaatgccttttattgtctattctatgtttaccatactgtgataactaatatgtattataatatatataaacaaaacaaatctctccatgtttcaggctgctgc

SEQ ID NO: 35943 - DNA, 901 bp, Sorghum bicolor
  Intron number 1 from transcript Sb06g030290.1 (locus Sb06g 030290) derived from phytozome v7.0 (chr-ID chromosome_6; pos 58739328 to 58740228)
ctttcgcttcgccgcctccggggttctccgcgccggtactgaactccgcctctcacttctctctctttctctcttgctatgaaaaacgcaagctctcaccttctctcaggttttaattgttgcttcttggaggagaattccacttcccttctcgtggcgttcgtgtggcagaccttttattagtatactacttagcagtaggacttgtttgccctgtgcttttctttatgaccccaatgaatgatttctttcgagcaaaacttggcaaattgtagcagttgctgtggctcttgtttgttttagtggaaatttggtgaactcatatctctgtagataaattagtatgcttatcttctctaaagttagaaaaatcaaggtacatgctgtgacattgcttgtcaatttctgctgcatgtttctacctttcgaatacaaggaggttggctttgtaatagcatagcagatagcacctaagcaattgtcttcgccttaagggtagcacacaactttttgttttcttttgcgtatccgttttatggtttttagattttataacttataacatgagctcaaggaatttgttcaaacaaaagaaatcattatctttgggaatttgcaacttcttatatcgaactagagttcagacgaagatgttctgtctgttgctgtagatttcctgctggttggaaagttcacagttctttccctcttcgttgtttaatctcctttctctttagttgcaacttgcaagttttgggcattcaaggctttcctttgggtgcagttcttgtgacagtcatttcaggactaattgttttgtgctggaattattggatgcatgaaagttaagatactgccttaaatgattgtctttctctatggtttcagtgcattgattttg

SEQ ID NO: 35944 - DNA, 386 bp, Sorghum bicolor
  Intron number 1 from transcript Sb04g028350.1 (locus Sb04g 028350) derived from phytozome v7.0 (chr-ID chromosome_4; pos 58442642 to 58443027 reverse strand)
gcactcaagtaagtattattgtctgcaatgctcttggatttcggtacctcgcgcgctcctattttattttgctcagaggggaggactgtgttcaaattctttttgtagattagttcgcattttgtgcttattttgttccaagtatgagtagctgtatatcgtttgcttatattgaataaattcctcttcttttggaaccacatgaagaccagtattagctagcttctgaatcgtgcattatgttggaacaaaaaacaaggctctgtcttgcaaagagaaaaaaaattaaggctcagtttagactgtttagctgtttgagtatttatatatctggtaataattgtcctgcaggtaccatccagataagaattcagacgaccctgttg

SEQ ID NO: 35945 - DNA, 296 bp, Sorghum bicolor
  Intron number 1 from transcript Sb09g017830.1 (locus Sb09g 017830) derived from phytozome v7.0 (chr-ID chromosome_9; pos 44465270 to 44465565 reverse strand)
gccactgccaaggtgagataaatgtttgctaaagttttgaaggcaaatcaatagcactaaattctgatgctattacattctttctggaaatccatatcaaaataaataaagaactaatctgaaaccctatatccattagatcgccttcaatttttcaattggtttttaatctgtattatgtatacatattatttcaatgccttcgtaaatagtaatcttcatttatactcgaaatacatatatattaactagcttgtgtgtgtgttttttaaacttgtgtttggcagacaaatacc

SEQ ID NO: 35946 - DNA, 991 bp, Sorghum bicolor
  Intron number 3 from transcript Sb04g004920.2 (locus Sb04g 004920) derived from phytozome v7.0 (chr-ID chromosome_4; pos 4708485 to 4709475)
ctattgcttctgctcacagtacattctattgtaagtctaatgtttcagtgcattcgattttgatgccttactaccaggattaaattatgttccagaataaaactgttgctgtcaaagtgttgtaagattctaacaggacagctacttaaacacagtaaattaatgtgcggctatttctgaagataatgtccaggctttgtgctgaacggtgtgaatagtattagcctctctttcatttcagttcttgcttctactgtaactcagataagtatggccttgtaagaaaataaagtgttcctggtgtcgtatgtggcccaagtttccgaacttaacaatgtctatatcttgtttatatctcggaaattcttagatgttctattgctgtaaaataccttaactaatggtaacttcatacctagaactagcatataagcaaactgcaactgaatatctattgtaaagtcttcttttgattcaaacgcttgttttattttggaaaaaacccactaaaaactggaaaatggggacagggatgccctataatatatcccaattttaagatgcaacttaaaccagtaggaaaattaaaaagtccataccacaagtaaaatctagatacagtaaggttaaagctaggaagtttctcggcctgtatctggatcacttttgattagtttttatgtaccttttaggactcgtaaccacattttcccatgaaagaataggtctgcatgaagtcagttctttgcaattgccatttgcctttatggatactcttgtactaaagcaagagtaattcatatgtaaaattcagtcctttgcaatttctatttccctctatggatactcttataccaaagcaagagtaattcatatgtacatttggtttttttattgtagttgcattttatttgtaactttcctctttgtatgttctaatcctttccttctcgtagcttggagtaaactcactgcaggtgagaggagcaag

SEQ ID NO: 35947 - DNA, 827 bp, Sorghum bicolor
  Intron number 1 from transcript Sb07g024270.1 (locus Sb07g 024270) derived from phytozome v7.0 (chr-ID chromosome_7; pos 59295474 to 59296300)
agtccattccacctgctgacgctgtcttactcaaggtatcattaatatgtacagtacatcgtatgtatggtctactcatcatcgctaatcgaactgatgttgtttgtcgcattgaatttgaggaaacaacacaataaaacaattaatttccaccattgaatgaatgaacaaaaattctgatacgagcatgcatgccaaataaaaaggaaaattataggtgtaccaactaccaacccccggcgcatttcagtaagactggttttgctatatatgtgcatgcttttacaatatattgttggatcgcttacactttgtgacaaagattaataaaaaacataataagcctctcggtttcatatggttaggataaactcaattggaatgcaatatttcttacgttaataattaattggagttagaatgtattataagacatatatataagaagaaaatctctcgcaacagaaattgaaacgtgatgtggtatttcccactcgtatgtttattcaactactggagcaacaaaaattaacagaaaggtcgatcgcttgtatattgtgaaagaaccaattttaagtaaatttcatcgacctacgaattgaaacttgatcatatggaatattttagtctcaaaatatttaattgggtaaatcaaacagatcataatatttcattaaatcagacaaattgacttaaggtcattgattgcatgctgaaatacactattgaacttatagagaaataggtcattcaattattttgcttgtgcttttttttttccttcaaattaattgttttagatttctacctgttacagaacattttac

SEQ ID NO: 35948 - DNA, 896 bp, Sorghum bicolor
  Intron number 2 from transcript Sb09g001700.1 (locus Sb09g 001700) derived from phytozome v7.0 (chr-ID chromosome_9; pos 1645866 to 1646761 reverse strand)
gtcaagctcgtcgacctcggcaacaagcccgagtccgtccgtctctctctctctctctctctccctctcttcccttttccccccgcttgttgtttattagtatattttgcacatgaccattcttctcgtggtgtctcccgacacattggcaaagttgctgtgccgctcaggccgtgtcttttttttttttaaaaaaaaatagcaatcttctctgatgctttgacttcatttccagaggtttggtcacctcactggggtagactaagaacagtattcgatatgataacgaaacagcatcagccgcaaaaaccattagccaaatagggctgtctccttgtttgcttcggagagtctagaactctagaacataatttagtgcattcgctggatgtggtagtaactggcactggaaaaatccacacagcttagtcatgaattctgtaatatacggccccccatgtgtcctgctgaactgatctctccggtgattgtttttttcttcttctttctagtttcaaggaacgagctgtagcttaatgctgcctcctatttttcatatgtgatgctggttagtagcttacctgggaattcttatacatcccattcacccccctcctcctcctctatttctgaaaacttaaagctgtctggtccatctgcatatgtcttcctgatgaattagagttctatagtgtacttggattacagccagtttatgcgcactagagaaggcttgaggttttttgcagtgtaatttgaagattgaagaggattttgcagctgctattttttttttcagtgagccaagggtgtaatctatttgtaatctttacatccaacctactgtaatggctctttcaggtttctggagattaacccagagggtaaggtgcctg

SEQ ID NO: 35949 - DNA, 880 bp, Sorghum bicolor
  Intron number 1 from transcript Sb09g002120.1 (locus Sb09g 002120) derived from phytozome v7.0 (chr-ID chromosome_9; pos 2256259 to 2257138)
tcctcgccgtcgactgcatcgaactcgccgaggaggttggttgcttttttttttctgctgcgcactcttgttcgtctctctccttttttttcttttccccctcctagtgacgtgccgtgccgtcgtactaaaaccccattaatccaataaagctgcataaacctaaagaccctaataaacctcccaccactgttttttcttaaaccctgtctgcttgtctcgatcgtaataaggctgctcctaattaaggttgctcgtctagattagtcgtaccgatccattaatactgagtgtcgcgggctgtgattaatctgttgccgggcggattgttaatttgttattgcaaataaaatctggttagtttccatctacgtactatgtgccgtgtagtcacgccggctaaccagctctgagcctctctttgttcatacgtggactgcaattaatattgacaggatttgttccgcgatcatataatctagtagtcgttgtgcagtggtcaagttttaaattaaaattgtgggcggtggttgggtaggtggtttgcacacactccagttcactaaagccatagtaaagttgctactgtatccagggggcataaaactgcagttgggtcttgggtgcgacctgatgaaaaacgggatggtatgtactaagtttgggttcctttattctcttttgcacaagtgcaggtgcatatatttgtttataagtccgtttatatatttgattaaactcaactccttgtgttgtaataagtgtccttctaccttcgcttgctgttcttattttgacaagttggtgctaaaagacatctccatctctctttgctatcactttgacagtgcttgcgagctctggacgccatatctttgga

SEQ ID NO: 35950 - DNA, 949 bp, Sorghum bicolor
  Intron number 3 from transcript Sb04g006590.1 (locus Sb04g 006590) derived from phytozome v7.0 (chr-ID chromosome_4; pos 6598993 to 6599941 reverse strand)
gtaccaggagcgtggcctaactgggttggtaggtaatccaaatttgtgtttctctgtcacgtagttgcttgtgctagctcctatgatgcctcatgcctgtaccacacagaaacaaagatgaaactgaaatagttggtacatatacggagcaggaaactaaggtagttaggacagagagaagggaagagtgggaaaccagacatgcctagtgtgcgcggatgtttacatacaaaataggaaacaaaggtaaaacgatcgaatagttgaatgaatttcgacatatacacaaaaagtttgaggtgaaggaggataagaatgtggatgatcctgattagggatttcctgaatccgttattgatgaaaccctgcaaacaattagaatactccagtcgagagaggtggaggagaagattgaggatcaacctggttttgggatatcctgaattcagtatgcgtcatactttgcaaacaaatcagaatactccggtgaagatcacaggcattaggggaagacggatgcaatgggagcgctgcctcctgcttcatactggatgttgaggagttgagtggttggagtggcagtagtgggaagttatggggttggtttggtgcaaggccacccgactgttgcttttgtttgcgtcgagcttgaggattagtggactgaaaaatgatatagatggcatggaacaacatggttgagagaaacaggagttttccataggaagaggagaaggtaggtggcattggtagtcctgaggtgtgggagatgatacatgttcgggcagatgtgattgcgacctcatgatcaaattgtatatatcttaacaatgtcaaatatgtgggcactgagcatgcagtataggagttgttggttattcattgtttatagagatacattgataaatgacaaatcacaatgattccttggactggatacaggtttcat

SEQ ID NO: 35951 - DNA, 1038 bp, Sorghum bicolor
  Intron number 1 from transcript Sb02g002600.1 (locus Sb02g 002600) derived from phytozome v7.0 (chr-ID chromosome_2; pos 2725728 to 2726765)
cgtcgacacccctccgccgccccagatcgccagaggtaaccgctccgcccccttctcgatcctcacgaaaccctagctcaggcccgcttctcgggctggtctcgattcggttctcgttgagcccttcgatccgcgccgtaggtttggggtttgcgggggttttcggtgggtgttggatggcgccgccccccttgggtttttcgtgctgttgttgcaggtgctgggttcgtgtctgggccattgatgcttggtggcgccaggtgtttagattagatgcgtcaagggggtggtgctaggatagtgaagggagttcactttgatttgggtggactggatgcagtggtcaggttgccttctgtatcgattttgggggcgctgatttgactgattggattagtttcagtcagttatagttctgatttttgttgttgatgccggcagagatccctcttattatgtttgtttgatatctatgttttgtgtagatttgttgttgtgggtgtatggctcactgcaatcagttcgatgtggtgatgttgatgcacccgatgatattcttatgttgcacaatgtagctgaaaaccaatgtctcagtcctgtttcttaaaacatgccgttagctttatgttgtggtactacatctacggcagatttagttaatgcttattcatttgatatgtctacagatactagatcactcttttttttttaaattactttcacgatttatggcattctcatggtaaaagaagaatctgcttgaactttagaacacattgcaaatctcctctatgcaaatatatacatctatcagttatatgtgaaggtttactacatctttctcttgtctgatgaatcgataaagtatcgattatcaacttagaacagatgaaggttgcatcagcaataataatttgtttatagatcttcctcattgttaatgctattttgatactatggtacatctctcctgtcatattgaagtagcttttggttggtgcagagaagcaaggccttgatactgaaatacccctttct

SEQ ID NO: 35952 - DNA, 431 bp, Sorghum bicolor
  Intron number 3 from transcript Sb08g015590.1 (locus Sb08g 015590) derived from phytozome v7.0 (chr-ID chromosome_8; pos 41713154 to 41713584 reverse strand)
tacttgaaactgctgccttaaaggctggttagtccagttgcatctttttccctcagcattgaacatcttgacttcttgtagttaaagttaatactatagatgatggaataatgggcatcccagaatgtacatcttaaaatgtatgcagccatagttaaaaattagttagaggtcacaagcacagctaattccacaaaaatgcttagggctactattggcttgtcatgttatcctgagttgctgactggtctgcatcttctctgagtagacttttgattattatttggccattcttcagtcatggatcatagaaacaacaatactgtgactgtaaatttgtgttaacctgtctgattttgagatacttgaggatctccatgttaagtgggcataatagctaaagaatctgtattttgttacaggagtctcta

SEQ ID NO: 35953 - DNA, 1003 bp, Sorghum bicolor
  Intron number 1 from transcript Sb08g015590.1 (locus Sb08g 015590) derived from phytozome v7.0 (chr-ID chromosome_8; pos 41714250 to 41715252 reverse strand)
ccggacctgattgatttcttcgttttgttctgctggtacggaagtccttcggcgacctttcttggataaatcgttcgtcctttcttccgcaataatacattcccttgttcgctgtgagggcttaaattcgaatcttgagttctttcttatctggttcccaatcggcgtacggctcatcatagatgcggttgattgcgtgatacgaattgggggcactactagtactagtaccaccagctcatttccccaaataatcttggggattaatgttaaagccaccccctttgagagttaggttttgtgacatgaaagatatgggctttgatttctttttggaacaatttctctttatcaacttgatctagttagatgttgcatgggcaagtaaactttagctgtgtggcgatggtattcccctctgcattgtcctctcagactcttggaaacgaaaagaatagaaacttttcatgaagaaaacattgtcgtgacaacaacacctgtaattctgggtatgggagtttttttccttgccataaaaggaatcatggcctgttttcacgttttgattctagttcatgttggtttcgcaaccgtgcaatcttaatttgttagttttttcgttttaagtttcgacatgaccaagtagtttgttgggataagataatgtattagtgtggcagaaggaatttgtcaaagtgttcatgtgatttttatgctctaagataatttattgttttctgacttgtgttctcttgccttcagatggtttagtttaacctctgcatttgagagtaacagtgtcttgtgagcttgccaaaaaactgatttttatgttagccttgcatttgcgtttgtttatctcacagtgttgcacaattcctaatgtagctccgtagtctaatttagttgcccagcctgcaactccttttcacattattcctgtctttatccctcggtgcacatatccataaaatcaccatcttattaacaaattcaggtttac

SEQ ID NO: 35954 - DNA, 508 bp, Sorghum bicolor
  Intron number 3 from transcript Sb01g015150.1 (locus Sb01g 015150) derived from phytozome v7.0 (chr-ID chromosome_1; pos 14622705 to 14623212)
ggagcgacgaggaaggtacattattattgtctctctggttggaatacaatcctccccagttctagatcatgcgagattgtctactgtatatgtgaatccacattatgtttggtacgagcacttcttttctgttacacaattataacatcactgttaactggatgccagactgcagtgtgatcttctgatttcacattgttctccctattcttgtttgggctcactttctgttagtactgagagtagaacataagttattttgatgtggatgtataaatctcgcgttagtactcttgacgcttcaataactagttattgtagttatccctttgcattgcgaaaaacatttgctggatttattatgccattttgagctttttacctcaatgccagagagaataagaatggtgataatattacagcattataaataattgtaacacatatcagttcatgttatgtttatgtgttgttcattgtcctttcaatctttatacttccaggtaaa

SEQ ID NO: 35955 - DNA, 619 bp, Sorghum bicolor
  Intron number 1 from transcript Sb01g012020.1 (locus Sb01g 012020) derived from phytozome v7.0 (chr-ID chromosome_1; pos 10950314 to 10950932 reverse strand)
tggtgaagttcctcttcactgtgctgcaaaatgtacccctctgcatattctgtatcccattaatggatttgctgttgtgtataaaagaagtcaaatatatataataatggaatgattcactgtctgttaggatagcatttgtttctttcctgtggtcacttctcactttaaagaagatgctacattcttcacatctaacactatggtagcctgaatttgctggcaactttatgaagacaagaaaagttgtgacttttactattttttgctgattctttttgtcctttagtgttgttcgatcctataactcatttccttttgggcaggccttgactgaaatggtaaacatccctactttgtggcttcgtgtaacatagaacacttgtgtctttactggtagagcataatgtactatctgcatttaaatagtcttgtcagttgtcactaacatcatcgctagtatgcaggaaaacaataatatgaatagctcatgtttattttatcattgtgttgtttacccaattccttgttgtattcatatttgtctaattataatgatttgacattttagggaaatgatagacattaacttggccttttcattctttttgtctagggc

SEQ ID NO: 35956 - DNA, 684 bp, Sorghum bicolor
  Intron number 2 from transcript Sb03g001270.1 (locus Sb03g 001270) derived from phytozome v7.0 (chr-ID chromosome_3; pos 1094854 to 1095537)
ttgagctcattggtaattactctagaactgtccgtgccactctactaatagtaccatacgcacacagaggaattgcgacttttttctcatgccttgcttatactttataacattctgccatgtaaaggtaggggcatcatgccttaccaactatgttaggttgtgctgacaacaatttgtaaagcaaactatcgttctgctcaaggtaagtttgaagcatttgaaattaaattcatatgcagcaagctagtgcatgtaaattagtttgccatccattttttcaaacctagattgggtgagtcaagcagcttgttctggagtctttttgtttaagtagctgtaaactaaagaaatgaatgttgcatcagtgcatctttttcctcatactatcaggttttgaagggctccgacttgttcatgcaattctttttcaaccttctatgctgttgaagtggcatcagaattgctgttccttctcattttggaggaaagaggataaggatgtttttttgtttgatttcagtttatgtgattttgttcttcttcaatttatctgtactttttccctgtattgttccatctttcataaacacttgtgtctcaaggatctagagatgtacaattgctcactcgatgcttccttttttaggtgcccctacatttaagggacgaaagcaaatcgag

SEQ ID NO: 35957 - DNA, 650 bp, Sorghum bicolor
  Intron number 1 from transcript Sb02g034960.1 (locus Sb02g 034960) derived from phytozome v7.0 (chr-ID chromosome_2; pos 69458324 to 69458973)
caccaattgcagtggctttgttggcaccatagaaggtctgaacctccttcttttgcattgtatctgtaatctggtcttggctttgtctttcctttgctaattattagtatagcatatatcagtattctgttaatcttctgttgccctggttactaattagacacagaatattcattttggaaacaaattggtgacagaataactagtggtgcatattatatgcactagcaactttgcattttttagttctcattgcagataaaacaacatgaactcatacctgtagtaggaactgcagtagaaagactgtattcgtgtccgtctgcaagtttgttgttcctttatatcagcaaccaagtaaaagtcagatactaaaaaaatgaatattcaactaaatttggaaattcaaagtcatgtgtcttgacatggaaaatatgacacttgtcctagtaaattcatatttgtgtgccaagcatacttactacttagtaagttgagcttgcctaccttttatatataggcaacatagggctttccctttgtctatcctcattacattgaacttactatacattgtaacatgctgcattggaggcctgaagtgtttaacgacagttcttcttgtccagcattgcagcttctggctaaag

SEQ ID NO: 35958 - DNA, 687 bp, Sorghum bicolor
  Intron number 4 from transcript Sb02g009730.2 (locus Sb02g 009730) derived from phytozome v7.0 (chr-ID chromosome_2; pos 13933571 to 13934257 reverse strand)
gtggtagatgtaagatctctcttcctgtatgtgcacaatactatgcagtggccactgatattatattttatttagtaactaatgcatttcagtggtggtggctttagggcttttagatgtttgagagcatttgctttctgttagatttgtctggacaccaatagtttggtttacttgtctttatctaccttctgaattggttttacttgatttttttactatgatgtagctgctcctgctatgcctttctcaatatttaaaattcattcatttctgtattttgatactacatttttgtgctagtgatttgtgctattccgctctgacctagttccatgagcagctaagtgaaataatactatttctaattgtatcttttgtcttgtggggttgtgtttcgcttggtattgctaccctgctacaatcctagctatgtaggtggtctttgtttcatgattattattgccggtttgatgaactattgtctgttgtagatgcaatcttcttcctagatttagcaaatttcttcaagcaattttgttaacctacttcagcttgctttcaactaaaaggctttgttgttgtctatataaccttttcaatggtttgtcccttgtgttacgtatttttaattgtctgttctattgtgcaggtctccaagcaatttttccctcatctagctgttgg

SEQ ID NO: 35959 - DNA, 844 bp, Sorghum bicolor
  Intron number 1 from transcript Sb08g005140.1 (locus Sb08g 005140) derived from phytozome v7.0 (chr-ID chromosome_8; pos 6588232 to 6589075)
aggccacccgtgccaagctccgcattttgggtgagcatttttgttttttttggtctgtggttttcagggcattgtggtttgtttgatgagtaaatttgttggtagcctctggattggatgagtcacgatgctataattttgttgatggcatggagcagagaagataacctagatagtgtacgacaaacacagatgcaactctaagtttatatacaagcaatgtactcgttgcacattgtattttgcagcagcattgtgatttgagtagattgctttgtctgtggttaattcaaggaactagtgtgtagtggggctttcatgtcttttttagtgatataataaaaaaaggggaacattgagtcgggatttagaggtcatattcatcgtggtctagaaatctgtttgcctaaagtgctatctctgaaacaaccattagttgaagctatcctaaacaagtaattggagtgtacttgctaatttttctgcttctagtttcttgtttatcatagatcaaactacataattttaatcttgtgaatacttttgatggtgccactacaatattttaatggctttataccactcacatcagttattttagtactccgtatctttttgtttgtctgcatctatgtttcttattgattttgcaattctatgcattccatatagagcagtttgggtttcatcttttgggccagctctaggtctttatgtgcattgttagctgctagatgttttacgtttctaatttgttgtaattctggtgttcacaagctcatggccttcatagcctataattgattatgtgaaatgaaatttacagctggggaagaaagaacac

SEQ ID NO: 35960 - DNA, 810 bp, Sorghum bicolor
  Intron number 1 from transcript Sb04g003440.1 (locus Sb04g 003440) derived from phytozome v7.0 (chr-ID chromosome_4; pos 3294479 to 3295288)
atcctgactggctccgcgcgtttcaggtaccatcaggcttcatctccctcctctaccccatctccatttgaggccaaggctctggctaaatcgtggcatctgccggggtaagctagttttcttattcctcttggagcaaatcttctcttccggatgcaggatgcgacctcttgccttggatttccaccccacttgtacaatcctgctcctcgtgaaactctagcgaaatacagtaggtcagcccgcactaactaaaccccggtgagtgacagactgacagtctagttaatctgtgtcgtctaatttaaaactcgcaagtaaatgaaacggagacaaacgatgtcgtactagcagttgatctgtgtctttgtgccaatgagctcattctgtgccataaattggttaatgccctactcaagaaagttcctgctctttctgaccccgtaggtttgagctctttctgttcgttcacttgtgtataaccaagattgtagctactagctatgcttatgctttttgtgaaacagtggtcgtccaccttgataccaccaagtaatgttaataatggtactagcatctaaagttttaagttggtgccagtgactgacagagctagcaccttgttcttgcagtacttattggctactattacttttgtctttacacaatcagcttctgccttagctttccagattttttttctttccaaaatcaatactttagataagtctattatgtagcagttactaccacatggattcaaacattttttttttctggggggcataggcaccaagtgtggcaccagtg

SEQ ID NO: 35961 - DNA, 434 bp, Sorghum bicolor
  Intron number 2 from transcript Sb02g009480.1 (locus Sb02g 009480) derived from phytozome v7.0 (chr-ID chromosome_2; pos 13562442 to 13562875)
tatatcctattgatacaataaagactaggcttcaggtaagctcaatatacatttgaatgcagtgcccgtttgtctagcttatcatgcaatgatcattctgcaaattgctcattctcagatgcatggtaatatgcgtatatttaataatatactcattaattcacggaccttactgatgccattcttagtaaatttagaccgctgtgtctctacaatctctttcgctaccaattcttctggatgtgcttgtggcgcctataagactctcttttttttttctgaagtggcacagcctgtatcagttttatttacttacccattggccattgctgaggaaccaaattcttgaagtaacacagaagttcataggtcaactttatgagatttgtttttcttatttttatataggctgcacaaggcggaagtaaaattca

SEQ ID NO: 35962 - DNA, 930 bp, Sorghum bicolor
  Intron number 1 from transcript Sb03g025850.1 (locus Sb03g 025850) derived from phytozome v7.0 (chr-ID chromosome_3; pos 52000409 to 52001338)
ccgccgcgggagcgccccggcaccatctccacacggtccgtgtcctttctccctcgttccccaatcagattgaaatttctctccttcctcccgcccgcgcctggcgcctatctatcctgccgcaggtctccctggacgccgccggcgcgagggtggagatccgcccggaactttctctgattcctggttctgttgtctaggatgccctagcttgcttgcttgttttttttttcctgcggaaacttctccgcgctgtgaaccctgaaatccaaatctcccttcctgggatgacgatggatcgctcggcttgttgcagatttgcttgtgcgctttggagtaaccaaaaaaaatagtagtttccttccccaagaccatattctcgaggggttcagctgagcccccatgccctcgtggtaacccgccgctgatagtgtaccctgtgcgatctctagtaataattgcagtattcagccgtagatgacctaggagaagcgtagttagcgcggacatccatcaatttgcacactttgtacagtaacattgctgctctcctggttctacccccatttaatgctcctgatctctaccggaattctgaggcatgggccgcaaaacatagatcaatcgagttggtttttatacggtgtacacaagaatctgccaataattgtttggttctgcagtatgaaaagcgcctgattattcagcagtacagcttgatggcatagtccttaaaaagtccaatatatttcttcttgtgctgatgttattcactaaggcctcacgctaatctaccattttcaattttgttttgggggaaatgctggaaggcgaatgcggcaatcatattgcttctactttggtttttttcctttttgattttggatgtgatggtttatgactcgttcatttgaatcctgcagagcagaa

SEQ ID NO: 35963 - DNA, 449 bp, Sorghum bicolor
  Intron number 4 from transcript Sb03g025850.1 (locus Sb03g 025850) derived from phytozome v7.0 (chr-ID chromosome_3; pos 52001839 to 52002287)
gaagagagaggggagaggtaataaaactagcatatctccaatttggatgtggtttggttttgacatgtgctactagtgtcacagagaccatatgcttcattctacttgttcttaagacctcttttttcttaataaaactgaaacaaagtttttttcgacatccccaagcatcttgtgcatcctgaaccttgctgtggcatctttgtatagtggagcttgttgtattgatttaagattattaaattattacggatttcaagtgtacaaaggactctcttgttcagtaagcctcataatgtgatgcctgctgtttcctcatctcatcttgtaataagctgaactttgctgaaactggttcttctcaaaattacattttgtgttatggagctaatactccacaatatcctgaattcctgatgcataattcatacacatgatgatatttcagg

SEQ ID NO: 35964 - DNA, 493 bp, Sorghum bicolor
  Intron number 1 from transcript Sb06g020103.1 (locus Sb06g 020103) derived from phytozome v7.0 (chr-ID chromosome_6; pos 49623249 to 49623741 reverse strand)
gtaccaactgcgactgcgacattgacattagtaatgtaagttcagttaactacttagttatgagtttatgactgctctatgtatttttttgctctgttgtttgattggccctcattgaatttcgaaaatgttcttctagacatcatttccattaagcactctgatccaacgcaagcggctgagttgtttctagatttattgcacagcgaaatgacatggatgtaatagtttcatcatgtcatcatgattaatatgcatcttgtagtaagatgttctgttcgaagtatagagctcaccattctttttaatagaattgattcattgtcatgcctgcactttcttagccatatgactgtcattgaccctatttaattgccatcaaaggctggatttcaattaacattgactgacatgtttcatattctggacgtcctggaacctcataccattgtttgcaggtttctttggtgtggccagcacttcctgctggtgt

SEQ ID NO: 35965 - DNA, 622 bp, Sorghum bicolor
  Intron number 1 from transcript Sb03g013780.1 (locus Sb03g 013780) derived from phytozome v7.0 (chr-ID chromosome_3; pos 18035298 to 18035919 reverse strand)
tgcacctcgtctggctctgccactgcttccaccatgtcagccttctttaatttcttgccaccttttcggttctttcttcgtttatattgcctcagagcgtcttgactcggaaaccttaaaactctattcattcggatgcctccgttactaattgtggttttgaattccttgtggtattgacttttgagaatttacattttcaaatctacagcgcacggacagatttgtgaaaagaaggctaagcacagtgattatgcccacaacaatcagtttcatgttagttgtcaacaaaaaaaaaatcagtttcatgttcatattatgtagtagtagccatatctttctctgtaacctcgggccatgctgatcaaaagtctttgctttcttctttgcaatgatacactcctaccagcagtatatataaattactggtgcttacttttttctggaagtaattaacttcaaatgaaccccttgttcgacttaacattccacaaggaacccacttccgccgaactcagctgctttggccccttcaacacttctcaccgtgctccatctgaaatttgtttggctctggcgctctgcaggagaactactccgcatactgcacgtcgaggtttgg

SEQ ID NO: 35966 - DNA, 801 bp, Sorghum bicolor
  Intron number 1 from transcript Sb01g027670.1 (locus Sb01g 027670) derived from phytozome v7.0 (chr-ID chromosome_1; pos 48158802 to 48159602)
cgtcgcctgctcttcgcttccgcttcgaatcggaggtgagacttctctttttttcctcctgggcttcccgtctgctagggttactggatcgttaggaattaggatgcacatgtggacggatcgctcctctctcgggggaggattcgatgcaagagggatgcttgcaattaaggaattcgttaggacccttcacgaaggattcgactcatgcctccaagtattttgcattctaattgcaattatagggccgatctccgatctgatcgaatcatgagtattatctcctcctgattttgtagccaattttttctttgtctacgtcgtcggcagcggcgcggcgatcacagccttctttcaaatattttgataacaaacaatcggtctgggaggtaaatttgggtgcttttgcacaattgcaaagcaggtcaggtcggcctgcgcctcatgtgctaaccaactgctctagtgctgttaggtaggcagccaggtcaacaattgacatggggacatgggctaccaagttgtttgctggaatacaactaatactcaactggttcacacttgaaatggagccacaaaacaaaaggctgtcacgattaggcttgcctgtctgcattcggcttcagagttcacaccatcttttctattcgagcataccattaatctagtctagagttgactttacacatgatgataggagacagttggttctatgatttgttatgacacatataatttctttgctcaaattgctatctcaacatttccacacttgcaggtcaactagccggtggtctccat

SEQ ID NO: 35967 - DNA, 771 bp, Sorghum bicolor
  Intron number 3 from transcript Sb04g005950.2 (locus Sb04g 005950) derived from phytozome v7.0 (chr-ID chromosome_4; pos 5777439 to 5778209 reverse strand)
gtcgtcgaccagaagtgagtttcttgaaactgaaaactaatcatcaggttcattcagcgttatcttgcctgcagtgttctagctagagataatttcttgttttttttttttaaaaaaagttggtctgaagtctgaactaagcaagaaatagttgagcttcagtttgaacttttgtggaagtggatggtgatgtccaatccttctagaaaaggtggaggggagagtatatgggtatgggaaaaaatttatcattgagagagtccatcatcgtccagctgcaagtcagcgtatggatgccttgtggtgaccaggcaagagtgtgatgtgaaaagtacgacgtggtgtgctttactggctcatctttgtcaagttgaaccataaccacagaagccgaatcctcacctactactcactactcatgtctgaagattggtcatccaaaccatcactggttgttgggagaaatggggataactttctccatcgtttgattccaaacttgcctgcgactttagtgtactgtctttttcagtcagtgggcaaatcacactacctaatccaacaactctttgagatagcgattgcttgtttttttttaaaaaaaaaatgggatatatgtgtgaattatgatagaacagtaactcctgaagctattttatttggtgctagttaaatactatccaacaactctttgagatagcgattgcttgttgataattaatgcattttgtttcaggtttgtggtgaagatcccggcgggtctggcgccgg

SEQ ID NO: 35968 - DNA, 731 bp, Sorghum bicolor
  Intron number 1 from transcript Sb08g005120.1 (locus Sb08g 005120) derived from phytozome v7.0 (chr-ID chromosome_8; pos 6534885 to 6535615 reverse strand)
ttcgactccaggaagtacgcacccctttttgtttcccaaacctcgaacacttcgattgcttcgtcggtctatgtatagctggtgatttggtttccatggatgggatggaagcgtggggtatttttagctgaatgcatgttcaggtttttctctttaggaacgggttgacctgcagaagaagtagagaagcttttcagtcctttgagacctagtgtttactgcttcccaaattgtctggtactgattagtctaggcatgattcaagactcaatcggggttatacggttcgtgaaatgtaattgggatgactaagaactgttttttttttagcttagattatatgcttttcactactactgcgatttgaatttgtgttgcttatttaggcacagcagaaatttgacctatataaacgttaggatcttcagtcgacattggggggcgtttgggtaatgatgagtgtttttttatcaaggatatacatcattgtgtttatcagcactaaaaaaaagcggtggtatttcagcatttctggttttggatattgtcagatctcaacatgcaagcatacaactagtaactgtcaataccatgcatataatttttgaatcatgttcgatatgggaactaagttaagtgtataggattttatgagatcatactcaggtgcactgaagttcctgccttttttatttcttcaggtgtgtgagagttattcagttacttcagtc

SEQ ID NO: 35969 - DNA, 786 bp, Sorghum bicolor
  Intron number 2 from transcript Sb02g031030.1 (locus Sb02g 031030) derived from phytozome v7.0 (chr-ID chromosome_2; pos 66051283 to 66052068 reverse strand)
ctttgcagttcttcgtcggaggcaactggaagtgcgtaagtgctcgttctgcttctccagctttacgcgcctttgggatgtcagtactgatgatcctggagacgctgtgtaactgtatgatttttttggctgttgccgcattgggcattccaacgggaccgggacgagatttttgtcgtcatccatacatacatcgtgatttacttcgttcatggccacttctagagtcctagaaatagaatcgcttgtctgctctgctgcccagctttggcctgccagccaaagccgttttgttcggtatataatttttttttctctgaaagggaggtatataaaagttgatgttgcatctttcaccttttagaaaacttttagctgagagaagccacgggggaatgccaccagttcttgcctcctgaggatagagagttttggtgctttcttgattctgtttgctaagctttgagaggcctggacggaggagagacaatgtaaattggtgcatgctgtgaacttttgagttgtggttctttattagtaatggatctgcaagtttcatcggcccaaaatcaagcttcaaatttgtaaattcatttttgggcttcaacttcggattaacgaacatgggttatttgttttgaagaaaaaaaaatcttacttcatatacgaagcctcttcacttcatgagcttttgctagcaacatgaagttatattcctttgtgtatttagttactcatcttagaatttgtggtgttgatgtctgtttcttttccctcttcttcaga

SEQ ID NO: 35970 - DNA, 533 bp, Sorghum bicolor
  Intron number 3 from transcript Sb01g038380.1 (locus Sb01g 038380) derived from phytozome v7.0 (chr-ID chromosome_1; pos 61905336 to 61905868 reverse strand)
gggtgctcaggaaaaatttgaagaaataaacagtaagaacctctatttttcttcaatatctattttgattaagaatttgtatatgctgatgatgtgtatgagatagtcttttatttggcattgtccattgcaatggccatggcatcatcatatctgcacatgtccggagtcctttgaattgatctggttgcttttaacagtgtgtttggtctgggccttttgggactatcagggatggatggtcctgtctcttcttttagtggtggagtcaactctaaattccttgctattacctatttttaacattccatgttgtctccctgggtttgtttaggtgcaaaacgtcttgtaatagtacatgctctttgtttaacccattctgcttctcttaattctgaattatcaggcaaataagggtcatgtaactatattccataaactagtttcgttccagattatctgctaatgctagattagagtagcagtgcctttttctgtaatactgaaggaacattgttccgcctttgcagcat

SEQ ID NO: 35971 - DNA, 692 bp, Sorghum bicolor
  Intron number 4 from transcript Sb07g001583.1 (locus Sb07g 001583) derived from phytozome v7.0 (chr-ID chromosome_7; pos 1855708 to 1856399 reverse strand)
cattgagcttgcaaaattttctagaagagttacaggtcagcctgcacacccattttccttacaggccttttgaatttatcattgattagtgataggggattaggactgggatatgtcagtggcggcagttctgaccgtcaactgaaaaaaacacgaagggttaggattaaccttccttcttatcctaactcttgagccatctctatatcctcaatcgaagtacccttttgttggtttaataaatctcagaggtttatctttataatttacttcactgttagctcaacaacttcagttgtgtcttctagtggtgactttataggttttgtgttatcaccatattttattttgattatatttgttttaccacgtgccttttctattctattgaatacaaagcatcactgaactggtagcttagacaaagcctcacaagttttcatgtcatatgtgtaagatgtgtttaccaaagaaacttcataaacaaagatttgaagatttcccatgataaactctatgtgatcacttgctaacatgtttcttgtacttgaatgtatcataatgtaacataattgctgcaagtttcatctcatgtgtgttcagaagtgttatgcagtttacactaatcatgatcttccctattcttttgacttctagataaccaaacgggacagtcgtttttgtcctacata

SEQ ID NO: 35972 - DNA, 916 bp, Sorghum bicolor
  Intron number 2 from transcript Sb03g035020.1 (locus Sb03g 035020) derived from phytozome v7.0 (chr-ID chromosome_3; pos 63190486 to 63191401 reverse strand)
cgttcagctgggaccaggacaacgagaagatcaaggtacgttgttacttgtttttattagttttgtcctgtcagttggtttgtataagctggcattgcatctttaccaatcgtttagtctcctagggcattagtcaattgcggatgacagtgctaagttctgaaaattatccagtcgccactatgtttggcaagtaacgttttcatttaggccttgtttaattccccaccaaaaaagaaaacttttcactcatcccatcgaatctttggacatagacgaaaacaaaaactaattgcacagtaaatcgtgagacaaatcttttaagcctaattagtctatgattggacaccaattgccaaataaaacgaaaatgctacagcagtagctaaatccaatagcttttcggaactaaacaatgcctaatgaaagaagatgaactgtgaattagtttaaggctatgttggagctatgtgaataaattgccagccttttctggcgtcagccatggattggatattatgatcttcatcttttgcaccaaaagttcgtatttcaagaaagaaatttgtttgtcttgctcactattagtatatctccagtagtccggtagttttaagaattatgtgcaactggagttagaaaccactgctgagatcatggttgtcatgaagctatggccacataatatttcttgttgcatcatcaatgattaagatgaattcatatggtacgttgcaaattccaaatctatttattttccagctcagttagtgcttatagttcatatatggctttcattctgttagttagttcaccaagccaacattctgttagttcaccatgctcacatatagtgcttaatcattttgataatattttgctcttgattgactttactatatccatgtctagatat

SEQ ID NO: 35973 - DNA, 820 bp, Sorghum bicolor
  Intron number 2 from transcript Sb09g023100.1 (locus Sb09g 023100) derived from phytozome v7.0 (chr-ID chromosome_9; pos 52725322 to 52726141 reverse strand)
ggcctgtaagttgttctcttttgcatagcaaaagataataagtacacaagaaaactcatttgtgcatatattagtgaactatataaatcaatctgtgatgttggggttggggaccataagttagtgcttgtttggctgcactggtatccacctcaattcacgtgtgttgggtggattgaagtctcaatccacgtgtgtgttcgggtggattggagtggaaaccccaacacatgtggattgagttgaatacgagtgcatccagacaagcccttagttccgcatccctcaaactggaactagttcttgtaatgtcaaaaagagcaaccttcaattcacctgtttaaatggcatgttatggttatgtagagggaataacgaagactgtcatttcctgtgccaatctgtttttggatgggcaatttaatgatcatcctgataataaggaccctttataagtccatttgtcatttttttttgggggcaaagttttgttgatcctccacttgctttcaaggagtataatattggatcggcatcatattaagcttaactgttatttcaagaatttggtatcattttgagtgatgcatgcttggttctgctgtaacattatgtctgcacatgctgttaggattgtacataattcttacgtgttcctgttttctatagttaaagtagcagtgattattttatttctcaattagagcataacactgtgtgtctacttctgattgatcatgcctattctgatgtgttcccctaaatttgagtatgcaattatgcaggagcttagcaaatcttggtctaaagggtgttttat

SEQ ID NO: 35974 - DNA, 851 bp, Sorghum bicolor
  Intron number 1 from transcript Sb07g007860.1 (locus Sb07g 007860) derived from phytozome v7.0 (chr-ID chromosome_7; pos 12895032 to 12895882 reverse strand)
cgccgtccagcttccacgtcgaggtgaggcgacgatgttcggctgctcataaagattgggtttttagggtttctataagatacaattcctgtgctaaggtagtgtcaagcccggaaaagattcagtttccctttccatctgatctggcgttccgtgttgagccgacgatgcgaaatgctcacagattttagagttgtatgaaatagcttgcatttcagtatgcagtccaccacaatagaaggttgcctaactatgtgatatgggaattaaatttaagttctaactgttacattatttgtaattttttttatgttggataaattacttagtaagggtgttaagaaaatcatgcaaagaatggaactttgcaacttatttattatttattgtttgactttgcaaaacatgtttcattgagaaggggttttttttacaaggattaagaaggttgattagtgttatataatggaactactttgcctcatgcttctcttttgtatgaaactaggaggattcccgcgcgttgccatgggtatgaagaaggaatataaataggttagaatgtgtattgcctagttggacaacttgcatgttcatagaaataggtgacttaccaatgtggatattacaattgaatgagctagtggattttaattgcgtgtgatagtggattggctagttggatagcttgcatgttgagagaaataggtagtggggttttgctttataagagtacaagataggtgtcttcactggtagcagtgtggttcttttatttatataatatgcttaccattcctttttacctttcggtggctgcagtttcgacagagtggggctaggacaccaca

SEQ ID NO: 35975 - DNA, 1002 bp, Sorghum bicolor
  Intron number 1 from transcript Sb05g008540.1 (locus Sb05g 008540) derived from phytozome v7.0 (chr-ID chromosome_5; pos 16293620 to 16294621 reverse strand)
cggcccgggtgcctcgtctccgtaagctcctgctttctcgccttttgtccctcagctcttgttccttcgacttaggactgtttgtttctgcaaattgttagtgtggaccagcttcggtacagctagaatcgttgctcactcaaatttgtactatttcttttgtgcgagggaagttgaattaatccatcgcacaagggcactaatgatcaatccagtcttatgaggtccaatttgaatgattcagtaatcggtagaaagtcaaggtggcttgagcctatcagcgtctgcatgcagagttgatgttctgaaccgaaatgtgcacattttgtttttcttttcaatcaggagggaggggagcgcgcccaccttaatatattgctcgggccataagaggtacatagttcagagagttaagtcattggaaacgaagaagattacaactttggctttgaacatccctatctgcgacagggaattgatgcttctagatatgagctgtttccttgcaagcagaactaagacggaggctgtccattgaacaaaacctcatttctgtgcttcagagcatcaggcaaagccagctaagtagctgaacaaaagcatcagagtccaacgtgggtcctcaggcctaggcagcagccatagttcacccatcttgaactggcactgcttcaaatgccaatggtgaagggcagctcaagatcgggtcacagtggtcttctgagctgctgcatagactgggcatatgtcatcttcaaggactcctttcttcttgagattgtaccagcatttgattctctcttgtagttttgtaccatcagccaccataagaattggactttacgttatgctattctgattgtgaaaccaacttcaatgttccaccaaagcacaaacttaccagtttacttccatgtatgtttttttttttcaataactaagctgacgtgtgtttccttgttcgtaggtctcactaatttggtcaagcagtgatcagttaga

SEQ ID NO: 35976 - DNA, 814 bp, Sorghum bicolor
  Intron number 1 from transcript Sb02g027760.1 (locus Sb02g 027760) derived from phytozome v7.0 (chr-ID chromosome_2; pos 63038206 to 63039019)
atcaagtatgtgcgctatcttgttgttttctcttttgcagttaactattttttagatcctgtgttcataaactcaattttttgtcttttatcatgatttttggagttgattagtattcctttgactatatctttatctgaagagttatgctttttttttgtttagtacacctatagcctcaactgacattggatagaaggtagaacctcaatcaaattgttccagtttcaatttccatcttaaccaccacttgtcattgctaaaaatcttgttcttagatgaacttcaagttcttaaggttgcactaagaatataaaacatcttacatatgccttcaagaataagttgcagatatcatatttcacttctatggttcatgagcaagagaatgtttatatgcttcaaatcttccaagaataagctgagaacaaacattgttggtttcatgaactgttgcattgcacatgggatttatttgcagcacttcatgggttttatttccttctcaatgtacactagaaaattgttcctgtaatctgtcaatagaagtttctacacatgattaatgaaaaaagatggacaagtctatccagatgtttttttttgaaagaatcagatggtttattttgttatgacagttgcttttagaatacaacaagaacctatccaaaatttatcgtgtcttcatttagcagctttatgttccttatctgaattcttattgtttttctcgaataatacaactaaatgattattgaccagttgctatgaccttttagcttgcacaaggaactggtgagggaatttttctgca

SEQ ID NO: 35977 - DNA, 1020 bp, Sorghum bicolor
  Intron number 1 from transcript Sb09g022040.1 (locus Sb09g 022040) derived from phytozome v7.0 (chr-ID chromosome_9; pos 51684528 to 51685547)
gactccgcctcgttgcgcgctcctgcaggtactcgtactcctcgattctcttgctcttgttagctccgatctgggtggtgggtgctaagatcgaattggggttactgagatggtgacaatgagggggcgtagctactgtctagttgttgattccccgaaacggtggagccatagcacccatcactttctgcaagtagaaacttgtgctaccttggggagagtttttaccaaaaagcaggctcgagatctagcgcctaaaattgggtggactgccctcaaatgattagggatcctaactcctaagcatagaagatccgcagaagttttatgagtgcatcttcaaacctgtatgattacagttcgtggtttctgatgtagatttctcccaaaaagagagtctaattgatggtgttaattgtgaataatttgattatgcgatgccttattcgatatatattatatataaagaaaagttgagtcatcgagcaaaccactgggaacatggaatcaaataagggaactattgaaggttggtctgtgttttgtctttggatagatcttccagaaaaggagtctttaaatgaccccaaatttacgtgtagcagaaaaggagtctttaaatgactccaaatttacgtgtagcatggattgttgggaatatttaatgcaactccagttaaagcacagataaactctactggtttgagttgaccttgagtgattctcctggttctgaagttctaacaaaatgcgcaagcgaattgtgaacagtgaggtctatcgttttctgtattctgctaggagcccttgtgtttcgtgatcacccccgtgacatacagttttaggtgtcaggacagggattgatatcggttgacccctaaaaaggggttacatttatttgcctgttggttgtagtgcatccttttgttatttggtcttcctctttcatactgtgatgaaatcatcacactaacttgtgctaaatttcatcagatcactgagaactttgtttctggaaga

SEQ ID NO: 35978 - DNA, 759 bp, Sorghum bicolor
  Intron number 1 from transcript Sb05g007150.1 (locus Sb05g 007150) derived from phytozome v7.0 (chr-ID chromosome_5; pos 12612886 to 12613644 reverse strand)
cagattctcagctggtaattgatgaatctttgccatcacgtcaaaattttttgattcattatatatctttaggcaatttttcaccactttagtttacactgatttctcttcatatatggtggtacatggtacatacctcagtttgccagcattatattgatttaggaataaagaataattcggagttcgttccatttcaagtttttagaagatataataatatctatataaactagaacagaaaaaaaagttcaatataaacataggaataaaaacttgtattccattctatgcccgtttaggggtagtactctatatgtcatactattctgtgtgggagattctcttttatgtcattttttttgcaaaatattttgtgcaattaattaataatttaggaatatatatatatgtacacacctatatatagatttttcgatctaaaaagaaatttctgtttaaataaattattgttgtgaggtaaatcatgatcaaattaatattcaaatatcaaatattataaaacaaataaagaaatgctagctagatatctcactctcactgcctctgatcgaagcatagctccactagaacctatatataaaatctgatctgttttgagtttaatttgacccagtaaaagaccgacgttacagttacacactcaaacactgaaaacatacaaaagctttgttattaaatcattgtccacttcatctcacaggcattctacggtgtgttcgacggccacggtggccg

SEQ ID NO: 35979 - DNA, 855 bp, Sorghum bicolor
  Intron number 1 from transcript Sb06g025650.1 (locus Sb06g 025650) derived from phytozome v7.0 (chr-ID chromosome_6; pos 54646197 to 54647051)
gcggccgtctggcgcttccatccccaagaccctcggtgagccgtgtgaattgcgattacttgctgaccgggtgtgttactgtatttcgtgccgatgcatgtacgtatagctaggtgatggttttttctggacggttaaggctggttgaaattttgggagctctacatgcctgtgttcttcccgtttgcctgcttgtcgcacattaatctgcctataggctacagcaggtccctgtttcagtgtttctgtctctcctgagagaccatgagagatgttgcagggacgaaggacaagatgttcctgtgtctgcgtgtgttctttctgtccgaagtttgcttcgaaatccgttttcttttttcatatcattctcagggaaatataggttaatcgagagtttgatttgaagggtttgctcgtgcgactgcaattgctattctcaatgcatttaggaagggactaaaccctttgttttttcgaacttcagtttgtcgagagtgatactagctagatgcggctgcaggaagctgccccctttcctcaacttttttagctagcaaaacactgtgatcccatcaaaattgacagcagggtgtgtcgcctccttttggatgcctcttttccctcccgacatgatgcatcgtgtcattcactgtccagcttttgcttttttattcctatatatatatatattttttcttttgtttcgttgcttcattggtggggtgtgtgtgtgtgtgtactgtatgcagtgcaattaacgaagtactactacatgcgcctctatgtccagaatactgactggtgttaccccattcgatgccaggttgctcacattgggggactgctactctgaag

SEQ ID NO: 35980 - DNA, 429 bp, Sorghum bicolor
  Intron number 2 from transcript Sb01g021890.1 (locus Sb01g 021890) derived from phytozome v7.0 (chr-ID chromosome_1; pos 26435359 to 26435787 reverse strand)
gtgtgaagaggtatgccacttcattttctcactgtctggtaaatgctatggtctcatccataaataaatcataacatccatccaatatagttgatgttgtttgattattgttttcaattaaccaggctactacatataaacaatgtttactgtgcatgttagtctttgtgaagcagagcatactgtttgggctgctggattttccattactattcaatccagatctgtatgtagtcaagttgatactgacattaacctaactgaaccttaaggaaaacaagcaggtcactctggtgattttaaaactgtttctgttttctgtaaccatctgtcttccttagtgtggtatctcaactatgcatgatctatttatattcacatatattttatatcattttggtctggcaggttcttctacgcttcaagtgc

SEQ ID NO: 35981 - DNA, 973 bp, Sorghum bicolor
  Intron number 1 from transcript Sb10g007830.1 (locus Sb10g 007830) derived from phytozome v7.0 (chr-ID chromosome_10; pos 7768392 to 7769364 reverse strand)
cgcctcggccctggccgtgacaccttcatctacatgtgcgtaagcaagcctctgctttttccttgctcggatttgcatatgtaggctctgccaatgtttctgctgttggtcgaatctttcagcctgtcgatctgctgcttgttctttccctctccaagattgctgcagcgcaactgctttctgatgatcctggcatagggggtcgtattgatcttggtgcgtcttggacgcaagatatttttggatgatctggcttccttttagttttagagaaactatatatagtcatatctctggctctctgctctctgtttctctgaaaaaagaacgagatacaaaatttgatctcatttcattgccccctgactctggaatattctgcgagattatcgcgttagattctctatttctttgctgttgcaaatgcttggtgatgcatggcgatgattctatactcactcatgctcggtttgaacggggtgaagtggacagaacgaaaatgaaaggaacaagttgattgtttgaggagaaaacaagagccagctgccctttgggttgctggagaatcacagatgcacttttgtaataacaatatctcttgtccattgctttcctcctctttatatgtgtgaaagagaattccttttgtgctgagatacatacagaaatgaaaaacacgctaatgtttccctttccgagtggttcagctcctgagcaagtggcgttgtttagttgtgttcatgggatgtgaatgggtctccaacatagttcctgtccaacactcaagatctgcctcctgttttgtcagcacaaagattgttattaactgctacttagttagttagcaaaatacaagtgcctctcgtccagctcagacacaaacttcttgtgtaaccaaccatcattttggattaaactttctgtgtttgcgcatgcaggggtgaggtggccttctgcagtcaggagtgtaggc

SEQ ID NO: 35982 - DNA, 737 bp, Sorghum bicolor
  Intron number 2 from transcript Sb05g022890.1 (locus Sb05g 022890) derived from phytozome v7.0 (chr-ID chromosome_5; pos 55224028 to 55224764 reverse strand)
cttgaggctgctagaattaacggtgtcaagaggtaatttctcgcccgaaggtagccctttgtttaccatgcttttacccctgatgaactaatcttattgtctcaatgctgaaattgttcaatgagtagatcttgaaatgcaaataaactgcaaagataatacttttgtacatggattttttcgctggttttctacatctgaagaattaaacagtccgcattaattactatattatgtaaagttattacagttgatatgtttgtacgtgcaccagcacttaagaaaattcctttttgggtttgaattggcccacaagggggaagtattcattggtgtcttaggctcatttgattgatggcactaagcgacaacataggaaagtatcatgttaagatttattgtccggttcccatgttgcacatagcatattcatgtgtagacataaatagctcattgtgaaatatgcattggcgggtttttccacttgttgagttggtgatgccggacaagtatatatgtgcctttgtctcttggttgtgacgtggaggtactcagcttgtccatttcttttgcgcagataaggttcctctcataactttcttgtcgcgtttgtttgaaggctttaaaacaaactactttatgagagcattactgtcgaatgcaactgaggttcatttagtgctaatctcttgacacaaagttttaagtttctgtttgtttccgtgacaggttctttt

SEQ ID NO: 35983 - DNA, 929 bp, Sorghum bicolor
  Intron number 1 from transcript Sb05g022350.1 (locus Sb05g 022350) derived from phytozome v7.0 (chr-ID chromosome_5; pos 54189875 to 54190803)
cttcaggaagtggaagtaagtgacataacatacaattcctctcacacgcacatttgatgtcttgtgagaaaattaattcatttaacaaagatatagttatatatacattatctgaaaagtatccaatttttagtaagagcaactaaaaaagaacagataatgaaataaccgagagttttgttgtcaaaacaaccatcaaaataggttcaccgtgatttcaactgattttggagctttttctcatgtaagtatatccggttgcgtttctttccatcatctgtaaggaaaaaacatctagtgttattgggaagcaggaaagtcagacttgcatatatagttccattattgttaagtgaaaaagtatgacaagaattaatttggagtgtactcttgctgaaacctttttcctttttttctgaaacacaagttgatttatgaaaaaggttataataattatgtcaacctttattaatactccaaccaccttatataagatatccaagcatttaaattttttccttaattataattgattcaagttaaaagtaacaccgaactcaaatatggtaataacgatatacccatatgtttatctatgattaatgtctgcccaaatatggtaatgacaacatattaaaggacaattacatgtgtcattttctatgccccataatatgttatagaattcctagtacaccctgtaatgcaggatatagagagtaatctctaactacttatcgtaatgtagactttccattatatgctgcatgagcatattcttacagattatttagtgggcacagctaaatatgaagaccataccattatatcattatataagaaaacaagtttttgttgttaggaagagtacatgtttgttgtgctgtttgtgatgaccatgcatttggtacacagaaatactttgcgaa

SEQ ID NO: 35984 - DNA, 974 bp, Sorghum bicolor
  Intron number 2 from transcript Sb06g014400.1 (locus Sb06g 014400) derived from phytozome v7.0 (chr-ID chromosome_6; pos 39868010 to 39868983)
aaccccaccaacaccgtcttcggtacgtgcttcgctcctccccttggctttgcccttgttactgttattactgctacatcgtttctctctgaatgctaattgctatttaatgtaatctttgaattgggatgcgtttttattagtagtacgctgtttactgcgctatttaatctttgaattgggatgcatttctctctgaagaatgctaattgctacttaatctttttaatcagcgatagaccattcacataatcatgattcgatttccgatcattattatatatatatctaataactactggtagcaatgattggattcaacgattatatctatctaataataactagtaacaatctggctgtaactgtaatggaccttagaatttggcagacattttgttcagaaatataaaaatttgatacttagcagcgtgttcaccatctggtgcttgctatgctggagtatatgccatttagattcagaaattttctgttaaatttctgtgtgtggattatatttagtaatattgaggaatactgctatagtttgttgatctgttacagttcagtagtagatatggttggaactttgtgtgacaaatttggataattattacttctacttgttgtagtctcccattgcacttctcatctgctgttaatgcctgctgaaatctattgactgacaacagttgcgctgctcatttgttgtggcaaaatatagtacttgttgtaactactactctgcatgtctttaatcctgacgtacagatgaactgatagttatattgtaattcttgttgtgacttgtgagttgtgacatattgttcctctgttctgcctttgttcctctgttctgctttttgttaacatttaggaataaactgaaccaagtggaattgatttgctttatgcctttcccctaataataagatcggcaactcataattttgttcgttttctttgtaatgcag

SEQ ID NO: 35985 - DNA, 300 bp, Sorghum bicolor
  Intron number 2 from transcript Sb08g016750.1 (locus Sb08g 016750) derived from phytozome v7.0 (chr-ID chromosome_8; pos 44845305 to 44845604)
ctttgtccaagtatgtttttttcttcctccccaatattgatttctattaaagttatcattcagagctctgtttgctgcttgaattcatataagctgtgcattaccagggtgccactgtatgctctcactgatcagactcttgaaaagtttaagtaatctgtctaatctttgaaaaaacaaactgttcagtttcaaataaatataaaatgatcatcgatgttagagattcaaaatttgtaaggaactgttggactgatgagattggttgatcatgttataatttcagaacaaggcaggttg

SEQ ID NO: 35986 - DNA, 341 bp, Sorghum bicolor
  Intron number 1 from transcript Sb06g001450.1 (locus Sb06g 001450) derived from phytozome v7.0 (chr-ID chromosome_6; pos 2203019 to 2203359 reverse strand)
gacggcttcgtgcgcagggatcagtcgtagtatactctggtcttgtttagtttcaaaaatttttacgaaaacgatattatagcactttcgtctttatttaacaaacattttctaattatgaagtaattagatttaaaagattcgtcttacgatgtaattaatttttattttcatctatatttaatgctttatgtatatgccgcaaaattcaatgtgacagaaaattttgaaaagtttttttgtttttggggtcaactaaacaaggcttgaacgaacaattgcatgagcatggtggaattctacttttacctcgacctttcttcttgtgattttcagccggt

SEQ ID NO: 35987 - DNA, 932 bp, Sorghum bicolor
  Intron number 2 from transcript Sb03g033340.1 (locus Sb03g 033340) derived from phytozome v7.0 (chr-ID chromosome_3; pos 61688290 to 61689221)
aggtgcgtcgcgtgtcgtgtactatgcttgagtgtgttaacccaggagaaaggttgcatggccggtgtcttgtttcacgttaggtagcatgaagtcctttatgcatatattagtaatgcttctcctcgaagctgggaactgcatttgtttgttaattagtatatgtgctgtggttgtacactttataagacaaaaaacgtgggtatgataaacatgagcatggagttgtttgaagatcaagcttgcctggaaaattgactaaatcttgcaacaagagaggagaaccaatattcatgaggcagtagcagacactagaattattatcagctatttgaaacaatagaaattattaacaattaacaatgctccgcatattcttgatttgacacccttgttctagccttaattttatgtggaaaaagtgctgcaaacaatcaaaaggttataactaaccatcataccatgcacttgcaggacaattctgccactttgtgaaagtcagacatgtcatttatcctatactgtttcggttttgatactgtccatagttcatgtttatttcaaatcttcaatagaaaaatgtggctgtattgcaactgatggaagtgccagcacactttttgttttaggagttcctcagtggatctttatctttggctagagacttctgtttggacaatagaccattgctggattttggttgaggttaacattttttttcttcattgccttcttgctacctcaattgctagttggtcatatgcttgcccttaacgtaattattttagaaaattaaataaagatatgtatcttcatattatctttgtgttatccaatgaggttgtgccacattgaccttctcctcattcttcttttttgtttctttttgtttgacagtgaggtgttgcagagtgagttccttaatcagtcaa

SEQ ID NO: 35988 - DNA, 352 bp, Sorghum bicolor
  Intron number 1 from transcript Sb03g014450.1 (locus Sb03g 014450) derived from phytozome v7.0 (chr-ID chromosome_3; pos 19438490 to 19438841 reverse strand)
cacaggtgagtttattcctttgtgcacaatttatcttcagttcattcatacttactcaaatgttgaatccaacaataacaataaaaattatttgaaatctggtattgagtattgactgtaaagcattcctctccctgtggcttactctattctttgcctgtcatgccatgatttgttgacaaaaccatgtctcttttgtagcccatgtttaatttttttaactagactttctaatagatacaaccatatagcattgcagctcaagtcatttagttgctatttgttaataaatatgtcattaacgaatcagccattgggcccaagtaatttttcttttttgtttttaccacag

SEQ ID NO: 35989 - DNA, 814 bp, Sorghum bicolor
  Intron number 2 from transcript Sb08g001580.1 (locus Sb08g 001580) derived from phytozome v7.0 (chr-ID chromosome_8; pos 1535677 to 1536490)
ggttcagttttggtatgtgtctgtgcttgtgcttacctgagggtttatttatcacatatgttactctcacctttgattgtatttgtggctatacaatggtaataatcatgtgctgtatcttgttatgcatttgtcagacaacgaactgaatattgtagtcaattcatatttcagtttcaataacaaatcgatgttatttttttggacaaaacaatgatgatggtggttctggttcatacttgattgtagaattcatgtgcattttccttagaaagattatatttgaagaactgacagacatcttgtaaacttcgactctttgactagttttaacagtgctaatgcaaatttcctacctaacttttgtttaaaggaaagggttcctgcctaaattcgaattatattgcattctgtggataaaattttgattgtaaatactagataccaatgtattaccaaattatttgccacgtttcctttattaacaatcagagaataaatgttacacaaacttataaagtgctaaaaaactgtggtatctgctgaacctgaaatgaaccctcttcaagacttccttagcataatttgctaatgtgtctgttcaaccttaatggtgttaatacaaacaatagagacatgttagcatcttgtaatttcttactgtatgtttggtagctagttgcaggaatgccatatttctgcaccctgtcaacaaactgtacatagatggagcttggatatgtctcgtgccctgtcattaattaccttttgttttgcagcaacaacattaaccgggcttcattttgcgactacc

SEQ ID NO: 35990 - DNA, 802 bp, Sorghum bicolor
  Intron number 1 from transcript Sb08g007660.1 (locus Sb08g 007660) derived from phytozome v7.0 (chr-ID chromosome_8; pos 14079474 to 14080275)
gaagtcgtcctggtacgtgcctagtactgcattgcatgcaagtcaaatgtcagcatgcatgtgcgcacatttcttccatcaacagttttctgaatttaaaattcgcgtaaataatcggttagctgatcgaaatcatagttgtgcgagacaaaagcaacgtagtgtaattgtataaaataccaatccgtgcattcatcagaattttactaatttttagaaaagtccgaatgcattgcatgcatatttccatctttccaactaaaatcggcaaagcttagaacatctctaatagttaaacaaaaaaaaacatgtgttaaatcaatgagttttccaagtagctaaaaaaagagcacatttgttgaggaaaatctacctcagtacaatattaatatataaaacaaattttcatcatgaacctgaaactatttctaaatcactgtaaccactttaatgctttctttctatgttatatacatttgcattggaaacctaccctaaccctactcattattgtttcgtgcatgctttcaccttcatattgattgcgataggtgcacatatatttcttcttaattgggtccatttttctaagggcagaaagattgagagttgggagcttttgcagggcagtttttttaatcttgcaaaaaaaaaaaagattgggagtgcgtttgtgaactcttggagatgctattacatttgacatatatgtcatgtcatgcaaacaaattcctgcaaacaacaagcaaatttccgcaaaaaaaaatttaaacctttttacacatgcagcattgccacaagc

SEQ ID NO: 35991 - DNA, 848 bp, Sorghum bicolor
  Intron number 3 from transcript Sb09g001930.1 (locus Sb09g 001930) derived from phytozome v7.0 (chr-ID chromosome_9; pos 1981186 to 1982033)
acaccatcagggtaagcgttcccccatctcatgttcttgtttgtatttatgtgtcatcgttttggaccaacactttagtaataaaatgttatgaatagctgtaattcaggcattgctactaaaactagctgtgctggtcatcttctattattgtgaatccttcacttttgttgttgaattcttattgctagaatagccgtttacatgttgggagacacattatgctgaattgtgcatgattctggatgatgaagaaaaatcaattggattgattttataatatgattcaacaaccagctacttctgacaaaatcatgcacatcagaacatacttgcctatttggtctgagacaatcgaatgcttctgctgatgtttgtgccattgtagttgattatttgatacatacttttgttatgatgatataacattttcagatcataatgtatacatgattctgtatggagttaaattgtctctttgcttctaaaattttcagatcataatgaattattcgtttatattgtgatgtgcctgtgatgtgatcaaaatatttgctactcttgatgggtgttcccatttgatgatcttaaccaccaagatctctgaggcccatattgtggctgctgctgctgcaagctgctgtggcttcgttttactctctgcagtttctgtagcagcagccacaacaagctctcctactgtcactgaagtgcttgcatgaactgagtgtttcttctgttctttttacatttgaatttatcgtactgtgtgtccttgtatctgactgactgccctttgttttgccctttcaggaacttgaggagaagaggaaagagaaggccaaggt

SEQ ID NO: 35992 - DNA, 902 bp, Sorghum bicolor
  Intron number 1 from transcript Sb01g007560.1 (locus Sb01g 007560) derived from phytozome v7.0 (chr-ID chromosome_1; pos 6509340 to 6510241)
tcgggacgtgcagggccccgtctcgcccgcggaaggtacgtgggtgcgtccccctgctggtcccggcgccttcggtggggtttggatagcaatgcggttcgtagcgctgttgaatgatgccatgcgggcgtgtgatccttgtgccgtgcggtgcgtgcgctggtgggcagcgtgttgtggaacgctcgtgaattgcggatgcggccatgcgggtggtttaactgggacagtggcggtgttgtatgcgagcattgcccatcttagttttttttaatacgtttgccgaatttgcaaataaactcaaaattatttttctcagaattcagtaaaactggggctgttctaacggccttgcacagaacagtccaacaccatgtgtataatgcaagttcaaagaattgtttctgtggtgaattgagaactctaatttgtttgtggaattgtggaatatgataaattggtaactagcagaattgtatccatatatttaggctattaggcttcctttcttctgaaggtatttgagacactgatgtggttctaggactagtgaatcagaccataagaaaaggatcaaccagttggtgcagaatattctgtgatactctgtagatataactagctggtgtagctgcaaataaagcacgagacaccttgcccttaaatttcaactatacatatattgctgcaggtaatagaaatgtatgtgccataaacagtataaaagaaatgtctgtgccatatgcaggtggctgcgcaatgattttcatgcaattataactgcttcgatggcctttagttgagaatgtaaattacataccatgtaggtaaaaatttaagatcctaaaattatgtcttgcaatacagggcttccaagtgtgctaaactccattggctcatct

SEQ ID NO: 35993 - DNA, 659 bp, Sorghum bicolor
  Intron number 3 from transcript Sb10g003000.1 (locus Sb10g 003000) derived from phytozome v7.0 (chr-ID chromosome_10; pos 2609119 to 2609777)
gcgaggtattgtttctattgcattagcatttctgcgcctgttgtatttgtttcgcattaaattaagcagcaaaagaacaactgcagttcacgtgttcaaccataagtttctgaattatatcatcaagtttctgctgcattgtttccacttaaatggtactatgataaacttgtgtaatataagcaaagatcatcttttgatattggcacctgctatgtaccaagagcagtgcttctagaaagaatcagatatagttgtaaaaaactgaaggcgggacaatagttggttcctatgtatgtatcctagtctacaatcagaaaagaaccgatgtttgaaacatgtactgaaggatatactgaaatgtgcaatcttcaaagcaaaattggtgtttccctggaatccgccattcctgtcctagcttttacttctttggaacacaacgatgtccacacttatgaactaactgcttagccatgtggatctatctgtgaaaaaaaatcttttcatgcctatactaacattgatttgcccatgtttatagctgtaaaatatttatgcttctttacgatgtaattaaaaaaaacctggttacagttctttccagtgtccatgtctttaatctaatgccctacactttcaggagtttgcccctggctcaa

SEQ ID NO: 35994 - DNA, 817 bp, Sorghum bicolor
  Intron number 1 from transcript Sb02g007890.1 (locus Sb02g 007890) derived from phytozome v7.0 (chr-ID chromosome_2; pos 9903879 to 9904695)
ccgtagggagcgaggtccccgctgcgccgcctaaggtaaaggacgcgtcagtccgtcaggttcagtgcactcatacgttcgttcgtaccagcatcactggtagtttttcaatccgcacacacattgcctagtgccgtggctggccagcgttcagcaaaactgggaccttttcacgtgcgccccgtgtgtttgtggaaatacctacgagcaatgcacatagtgtctggatttcgattgcagggtttttttctaatctgttcttgttatgctttgtgcaagtaattaattttggtttccgtctgtgtcatttacgtactgtggaggtggacgtcttgccattagcccattacgctttcgtccatcctcaacttaaactggaactttgttttcgtctgattgtccaggttgtcttttcagattgtactgattgctcacttatcttttgggccttttcttttttattactgttccagtgtcagtcaaagttcttggctttttggtgtgacagcgactcacttccttgtgttgcaaactaaatataataattctgaattgtaatctttctgcactggttacatggtcttcgtaagacaacagagacctcaaaagtcttacagaattttttgttgcttgtgtgcgtgtgtttgttctgttctgttcttcttttcttctactactactgaaatgatacattgctctcctgtgggttagataaaaaatgtactaccctttgtcttttaggttgcctcaagcttttgattagcggtcaataagtatacatgctaattccatgttgctgtgtaacacagggcccagc

SEQ ID NO: 35995 - DNA, 636 bp, Sorghum bicolor
  Intron number 1 from transcript Sb08g022480.1 (locus Sb08g 022480) derived from phytozome v7.0 (chr-ID chromosome_8; pos 54434073 to 54434708)
ctcacacgtaaatctaatacagtcacctcatcttttgacttatagcttcagaatcttttgtaactttagaacatgtttgatacagctcataacagttttatgagctcttttttttgccaaacatttatttccaaaacagctttatcggtaaagttgttttttctctcctctcatagagacatgagttagaatgaaactaaaaaaagtagcttattgcagctttctcctacatttctctcttaactatgcatgaagtagttggtgaagctattttacctatcactttttgtaaaacaactcagcatcatctagaaagttggtcataaaactatttttaaaaaaacagctttactagtgaagttgagctgtgccaaacaagcccttagtttttccttctttttcttctttttgtcctttctttctctttttgcttttcgttaaacctttgtaagaacctttttgtgcctgtaggggcttttagcgcctccagtaatttcatcaaagaaaaaatctaatacagtcttgctgcaacgcatcgtcgttgtttctcatgttgttttgcttggcgtgaccgtgatcattgtctatcgatcggctgcagaggaggacagggaccctgggcgggtgccgacgcgg

SEQ ID NO: 35996 - DNA, 579 bp, Sorghum bicolor
  Intron number 2 from transcript Sb04g031100.1 (locus Sb04g 031100) derived from phytozome v7.0 (chr-ID chromosome_4; pos 61085799 to 61086377)
cttcttacggtataggtttttgcattagtttccacagtctttgctatgaattatttatgatgatgatcatcttcatacactttacctatgaaataagtgcctgcaaatttaatattatatccactaattttgttgattttttttttcgaacggcggcaaaaagcatttgctggatttttattagacgaggaaaaagagaaaaaacaaggaaaacaaacactttacaaactgcgaggctaagctcaaactccactaattttgttgaatgaaagcaatgatttactactaatacactttttcaagatttgactcctgaactgaatatgaatatacagtttgcatatatggtttcttccatgaaactgccatgtatgtctgtatgatgtgttcttgttattggtctctaagtactatattttccatcttatatttgattttcttgtcttttacctaacaaaatatcttgtcctttgtatttttttttaggaaattttcctttgtattaaaaataacctttctacacttatgagctctattactcaaatccatgctttaatgcagggagcgactattgaacat

SEQ ID NO: 35997 - DNA, 788 bp, Sorghum bicolor
  Intron number 1 from transcript Sb06g021550.1 (locus Sb06g 021550) derived from phytozome v7.0 (chr-ID chromosome_6; pos 50788448 to 50789235 reverse strand)
actgcttcgtcgaggtatggaatgcactgtctgaatccttgcatttggttgttaaataaacactccatcgttgcagactgaggactttttttttgttgtgctccccaacaattagtgaaatggatgtgcctgatctagatgatcatgcagagatattttcgtgattagcttttttgcatgcaaaaagaaaggatctagtttacattcaggggctgccaggtgcaattcctatctcatgttgctttgctcaacgattttttacccccgttgttcagagtgctgagcagaaaatatgcaatagttgtgcagacccaaagaaatgaacaagtacaaattgtagcagcaagttaaccgttaccactttaccagttacctggaacaagaccaagaaaactgttttgaattgcatcctctgataacgccactgctcaaatctttgcatttatctatcctgcttccatttgtcttgatcctaaattcctaatcacgtgcatggattagttttggatgtgccaacatactcaaaagtgcgagaatggtagcctatctggtagactggtaaccaaacacaaacagtttagtcagaccaagatctcttcaaacatcattaatgcctagttgaatactgggtaccaaacatcagtgtagtctttgaaagctttgcatgtgtgtgactgaaggcagcagcttatcatattgcacccctgcacactctttatgaaacttcagcgtccacactgacataatacgattcaggttaatgagtgtttgttttcttgatcttaggg

SEQ ID NO: 35998 - DNA, 845 bp, Sorghum bicolor
  Intron number 1 from transcript Sb06g028083.1 (locus Sb06g 028083) derived from phytozome v7.0 (chr-ID chromosome_6; pos 56940292 to 56941136)
caattactcccagcagattggcgcagccttctgaggtattactatgcaccgtatgttcccccagtgtttctgctgcactgcattgttacgccactaagtgcctaagagagctctgacatgaacaactgaccaatgtattccatttttatagaagttgatgtatctagtgacactaatctgatggtgtatctagtgacttatagatgaacaactgaagtagattatgacaatatatttcatggtgcatctagtgacactaatttgttgtcgtaaatattggtgctctttcctataaatttggtcagacttcaaataatttgacttagtacaactctagaagttgatttattttggaaccgaaggagtatatttataagaagtagggggcaacccctcctgatccataaaatatttttaaataaggtcacataaaatttgggtttctgaaatcatcgttgttctggaatatgttgttgggcatttgtaataactttgtccactgtatattactatttttcttttttttttcttttcacaagcatacagatacaattggtcgcaatataagtgccatttttcattactttccaagtccaaagcttttacaattcatcttttaccatcaatatttattgctgtattttttccccaaacctacaaactgttaagatcacaaaagtattttttgtgtagcctggccaagacaggcaagagttggctgcacacctcatagacgcttgttttatgatcaaagggacatctgtatatgctatatctcatggttcatttttcctctctatgtcatctttgctaggtgtgtcctgggccttcaagtcaattaactc

SEQ ID NO: 35999 - DNA, 703 bp, Sorghum bicolor
  Intron number 1 from transcript Sb07g002990.1 (locus Sb07g 002990) derived from phytozome v7.0 (chr-ID chromosome_7; pos 3159379 to 3160081 reverse strand)
cactccatcacaggtaaggtacacgcaaaccggccgccattattgttcccttcctgtcgttttagagacacacatgttcgtctttgttcctttggcaaaaagtactggattttgggctttctggaaccaggctctgagtggatgcaagctatatgttacctagttaatgatgtcgttaaatggatattaatgtattttaaagagctacaataaggccagcttgtttaattggtaaaaatttttgagtttggctactgtagcactttcgtttgtatttgacaattattttcaatcatgaactaattaggctcaaaagattcgtctcgcaaattacaggcaaatttgtgcaattagttatttttttatctatatttaatactccatacatgtgtctaaagattcatgtgacagataatcttgaaaaattttggaaaatttttgggaactaaacagggcctaaggaaaatagtggttttcatggcaaactttttcttttgtttcttcccacatatactttgagtagaacttcaaatttcaaagcatggtatacaacaaaccatgcatatattgactccaaactaatttttcaaacacaaatatgttgattcaatgaagttttgttgcccacatgtgaatcaaatggtgcatgcttgtggctggatatttccctttatcaatttattatccattgcagctcttctca

SEQ ID NO: 36000 - DNA, 646 bp, Sorghum bicolor
  Intron number 3 from transcript Sb09g026460.1 (locus Sb09g 026460) derived from phytozome v7.0 (chr-ID chromosome_9; pos 55732314 to 55732959 reverse strand)
cagagctgttcgttttgtggactcaggaaaaggtaatgccttattgccttttgttatcgagttctcttatactaggtgaattctccatgcgttgccgcgggaatataaaagtaattttaattgagttaagaaataggatgtagaagaatcagacgtgatttacatacaatggcttgtaaattttctgcaataaactgtgggcaggggtataattgaagacaaaaaaaatctatatgaacttcaattgaatgctggaccgtgggcatatatttgtatcatgattactaattgatttaaatatgtttacaaaaattgatacattaaaggagttgcgtcagtagtccaacgtgaatgaactaaaggaaaggcatcatgctaatctttgatctttaacttcataaagaaaacacggatcgctaacttgaggaggagaaaatactactgtggatcgctaaaatgcatatacatgtggatcgctaacttcgtaaaagaatattaaaagttaatgtacataagaaaaattctgagcatgtagtaagaacaaattgggtataagaaagtactactaccggttgatgatccatcgtacctttggtgcttgtctttcttagattttttggaggaagaggaactatcacgttcttag

SEQ ID NO: 36001 - DNA, 489 bp, Sorghum bicolor
  Intron number 2 from transcript Sb08g023270.1 (locus Sb08g 023270) derived from phytozome v7.0 (chr-ID chromosome_8; pos 55391520 to 55392008)
tgtcggaccgcgcgcgcgagaaggccgtacaggatgtcagtaatcctcaccccgcttcttactgctatgctagctacctctgcgtgccactcttcaacaaccagctagctgtcctgcgtcccgcctcctgtctgtcggcaccgaccatcagctgccgcctagagcaccaccatattgtcactcactagtgatcctcattttcagcttcaaactgaaatctgcctccgctgtgtacaaaataagtcctccactctagctacttatgcttacatagcagggggtcggtacaaaatcaaatcttttgactgatttcgcctgtgacctacatttctggttatatatcattattattattattatcatcatcatctcagtcccactaaggaacaatcacatcagttgattttttttcgtacttattttgcaacaaacaattctgactttgcctcctgcatcaatgtaagcttaccgaagaattggcaaaggtgg

SEQ ID NO: 36002 - DNA, 824 bp, Sorghum bicolor
  Intron number 1 from transcript Sb02g034210.1 (locus Sb02g 034210) derived from phytozome v7.0 (chr-ID chromosome_2; pos 68698568 to 68699391 reverse strand)
ttagagaatacctacaacacaagaggtacttctatattattctctaatgatatcttgatcttgcgctaccaattcagcctgaacaagtgaattcaaaaaaaaacatgaccaagatagaagattctcttctaccgcattgagaaaaagttatctaggacatgccaatcacagtgaggatcacactatgaactatcagtgggccatgtatttcatggaaaaatagcacaacaaacagggttgaactcctaacctacaggtcacacttcagaatccctaccacactatgctaccacgttctctctgtttgggacaacataactaagggggtgtttggttgaaggtgttaaagtttattagtacacatttgtagtgtccaatcatggactaattaggcttaaaaaatcatctcgcaaattattctctagctgtgtttttagttttataaatagtctatatttaatactccatgcatgtgtccaaacatttgatggtataggtgttaaaaaaaaacagcccaaaccaaacaggacctaattcgtcaaagactcttcatagatgcatgatgacgatattttgttgttctttctaaacaagcataagaagtttgttcttcttcctaccaattgtcccttggtaaacatccgtttccttaatcgagtggtcctgtagtcatactcctaatattcatggagttggttcaaatccaatattgtttccttaaatgcttatcttctgaagtgagtattctttcaaatggaaaattgcaactatcctaatcaacacatgatttgttcaaaaatttcacaggtacttcgtagtaattg

SEQ ID NO: 36003 - DNA, 939 bp, Sorghum bicolor
  Intron number 1 from transcript Sb03g003130.1 (locus Sb03g 003130) derived from phytozome v7.0 (chr-ID chromosome_3; pos 3229196 to 3230134)
gcgatcgccagcgaggacagggtatactactgctccctctcccctctcccctctcactggtcggatccgcccgcggatgattttgggtggcatccgtgcgtagcggtggattcgtggggttcggcgagcgattggcttgccggtagccttggcatgcttgattatagtcgtgtgcgtcgtcaaattgttgcgggtttactcccccttctgtcgaatttgggggattttcctccgtctcttttgccccctttttgtgcggacgcgacagggtcaaacagacgtttcttatttttcgtgcgtgtgacattaataatatatcgttgcttgattagctgtgcgcagtctgttttctcaatatcctttgcttgcttggttacacgttgcgacagtgaagtgtagtatggggtttacgagatcctttgcttaggattttaactctccatttgttcctggtctggttattcctgaacttcgctccatttgagtgttttttcctgcgtttagaggcttagtaaacgagggttcatggctgattaagcttctaatgatgatttgtggcttcagggtactgtgtggcagtgcttgcgagtttggtacgttggctgcagtccattttctctatatccttttgcggagtgttgactagggtttgacctctatgtctggttacacattatgcccgtgtaccttgccccatgaactcgtattgggtttacgagatcattcccttgggattttaactcagcattctgttcctggtctgaactttgcttcatttgattgttcttccttggtttagagggttagtaaacgaggattcatggctgattagtttgtggcttcagggtactgtggtagtgtttgcgagcttcgtagcttggctgcagtgtgatagaaacataacaatgcattttgttttcactttgcaggcttcagcac

SEQ ID NO: 36004 - DNA, 476 bp, Sorghum bicolor
  Intron number 1 from transcript Sb10g006280.1 (locus Sb10g 006280) derived from phytozome v7.0 (chr-ID chromosome_10; pos 5730896 to 5731371)
tccggagttctctcaccatacacgtttaaccgcaggtggcttcccctctcctgagtcctgatttggtgaaaagttgcatcattttttatcactctgaatactgtcttcttgctttgctagacgcctagaccaatttctttgggatatttatggattgtttccatgcctttttatgtatgttatgtttggttttcagtgtttttcatacctgttttcaattgagagtatgtagcgtggaacaagtggtgcagctatttctgctcgttgtctgtcaaacaaaatcatggcattgatgcttactgcggggcattgggtgaacatttcaggtctggtgggaaggattgcagaaatttgagtgcaaatagcaacatgcttgtctttttctttttcagctggtttattggtttcattttcataacgtcttcttatgagagctactatatgtgtaataattttcagagcagtgcaaagcagcg

SEQ ID NO: 36005 - DNA, 1014 bp, Sorghum bicolor
  Intron number 2 from transcript Sb10g004470.1 (locus Sb10g 004470) derived from phytozome v7.0 (chr-ID chromosome_10; pos 3947488 to 3948501 reverse strand)
gccggtgacatacccgacattctgagaaaggtaatgctgttgctctcacctttgtatcagtcctttttctttttgagaatggtacctgattgatgtttgtatacttggttaaaatagtggtctagcagttatggtaaattggtaatttttttgcgctgagaagctaatagtatgacctgatttcttctaggatgagtgtttgaatgaattagtaaagcatttttcataatatcaatgcagcatagaagaggaacatttatctgatgtatgcaagcgtttctagctttcagtagaagatagctatttttcccgtctaaaagcagactgtattgatgtaacgttagtagtgttttaatgaatgcatggtaaggtaggttttaatagttcagactaggctttttttttgcagaacataaataacataatttaccaacaaatctgctacatgcacatagagattctaatattcaacaaaacaacatctacatagccttttgtcccaagcaggttagggcacggtatgaagattctaacatttcaagtgaaattaaattacaatggctgggcatgctcttcgcatcctatccctatgttttagcaacccttgtttgatctactttttgctttactttggcagttaccacactatttagtaccttctgttccattgatttctctctcagggtgccatctggccatccttgattttctagtgccatcttccaacatagcatgttatgtgagttgttgaccaaatgtctagtaggatcagtggtggagctggtgaatcttgacgcctagggctgctgtctatgcacctaaacaacctaagctcaacacatgcactgataattcacaaaatcaaaggaaaacatgtatgatttagtagatataataccaattccaccctgaatagtgaatacaacaaacttggtaaaaccataacatggtgcaaaataagtacccaattgttctttgatgttgatctgatatctaccattgttggccaggtat

SEQ ID NO: 36006 - DNA, 626 bp, Sorghum bicolor
  Intron number 1 from transcript Sb08g016310.1 (locus Sb08g 016310) derived from phytozome v7.0 (chr-ID chromosome_8; pos 43320055 to 43320680)
caccccaagaactacgggcccggatcccgcgtctggtacgtgcgcgcgcgcgctcgctcgctttgtcggcacatgttccacacacgatcctgatacgtagagttgggggtttggatcggcttcctcgcgcatgggtggctttgaatgaatctgaggtgtataggtaggtttctcggcggggatttaggttcctccggcgatgggtagtaaggtttcttcgccggctatcggtgctaggatcgatgtgatttgagcttgtgtagcgttttcgagggttcgttagttgttcgtttatgtatcgtttgcctagggtacagtcagtgtaaataaggattacgtatggcacgtaagtatttgttctaataattcagctaaaacaggagtattaagtattaatctgcactaatttgcttgttattgtgtgttgtaaacaggagtatttgtattagtctgcactaatttgttgtgttgtaaacatgagtaataatattagtctgcactaatttgtttgttattgtggcacttgttttggtaattgctaatgttcttatccgaacttgttgaccgtgtattggtctgcactaatttgcttgttcacttttgcagccgggtctgtgcgaaccctc

SEQ ID NO: 36007 - DNA, 580 bp, Sorghum bicolor
  Intron number 4 from transcript Sb02g033750.1 (locus Sb02g 033750) derived from phytozome v7.0 (chr-ID chromosome_2; pos 68280664 to 68281243)
gaaagcatagggagcagcttggtaaagtaacaaattactcacattgagaattgattatatctgatggaaataactgatgcattactcacattgactcaaaattttcctagttacgttgtcagatataacttgtaaactttttattctttttttctgagaattgattaagttttatactcatcggcccaaattgtcatttgaaactgccaactatatcttaccatctttaatgcttgattttttttataaaaccttctattttgtttcatgtctccattcccaaatggtcatttgaaactgccaactacatcttaccatctttaatgcttgatttttttatttttttttataaaaccttcaatttggtttcatttctccattttgtttttctctggaaacaatgcatgatttgaagagacatgtgtccacttagtttttctctggaaacaatgtgttttcttctagtttgaagccatatcttgtggtggtgattaaataactttctctgaagaaaatatgtatgcttggatttttttattgtgcagttaaccacagcttccagactgcaagtacgacatct

SEQ ID NO: 36008 - DNA, 952 bp, Sorghum bicolor
  Intron number 1 from transcript Sb03g002180.1 (locus Sb03g 002180) derived from phytozome v7.0 (chr-ID chromosome_3; pos 2022041 to 2022992)
ccttttacgtcgggtttgggaaccagcaccgcagggtataattcctgaccctgattttggtctacacttggttcttcatcggagagcggggcgtttggatcggcgctgtggctgggtttgtgtgtaggattcgattgcttttctcgccagttgtttggtaaagtttgggttttttcctttcttcttctctttgtgttgaattgcgttaccggttgatcgtttccgtagtgcggtggttggcgttactcgttggggaaaggtttgcgctccttcttttgatgtaaaggtttgatctcgacgaggtgccactccgttagtgggactgatgatgcactatctaagcaatcctgttcttttaggttgatctgtgtttttatgtgtgcttgataggacagtgattgtatttttaatctggtgccgattcatttgatttgattaatattgtggtggtgtcaaatcttactgatttaatttttagttgaaatcacctgtttttgggaatgttttctctatttccgcagatgtttgctttatcagaattttatcctacaaggtccgtttgcactcaatagtagcaatcgtacgcaggtgtgggcatttggaaggaaccgatatatttttaactatagaaccataaacatttttccatactatatttgtcatggtcatgggagtacctcattgacccattcactgtcctgcaattatgtcattcaatacccatactgaacctttagacaaaatgttatggcactaaacttttccagtctttgatcaatgtggtatttagtttttcaactatgttatactttccccaggattgcttctttgtttggttatttaattgccttggacggtattagatgatcagatgtttgcaagtgctaatattggacgagatgaccccgttgaaaagtatgatgcaagtgtttttttcatcttcagaggggga

SEQ ID NO: 36009 - DNA, 626 bp, Sorghum bicolor
  Intron number 1 from transcript Sb05g026540.1 (locus Sb05g 026540) derived from phytozome v7.0 (chr-ID chromosome_5; pos 60475540 to 60476165 reverse strand)
tgcgctccgcgctgctgagctggggcttcttcttggtcagcattctagtcttgttcttcagcttccaaccaactattaaatctgttccaaatcatagttctttagacttttttctgacctcatatttgaccactcgtgttatccaagaatttatactaaatataacttcttttgctgtggcttgctttattaacaaaagttttttaaaacaatgacttaaatttaactatatttacataaatttttttgaataaggcctgtttagctcacccccaaaaccaaaacttttttaagatttcccgtcacatcgaatcttgcggtacatgcatggagtattaaatataggtgaaaacaaaaactaattgcacagttagcctgtaaatcacgagacaaatcttttaagcctagttacttcataattggacaatgtttgttaaataaaattgaaagtgctatagtgtcaaaattcaaaaaaaaattggatctaaacatagcctaagacgaatgattaaacatagggtcaaaaagataaaacgaaatataatttggaatggatggagtaagtagttacaatgataataataatgtaaaaaagtaaactttgtcttttcggtaggttaccaacc

SEQ ID NO: 36010 - DNA, 503 bp, Sorghum bicolor
  Intron number 2 from transcript Sb01g040090.1 (locus Sb01g 040090) derived from phytozome v7.0 (chr-ID chromosome_1; pos 63473770 to 63474272 reverse strand)
ttgagtgtatgcctttatactatcttggtgtacatcaaagttatagtatgaaaaatgtatttctaatcatactttttgccacttattaaaaaacttgaatatttcacagggactgcttaatcgaaccaaagttacttgctcgcatttcttgctttcttttctcaaaccaaactcatgatctattttcttattctcttgttgggaattggtttcctcttgggtttttttgaagcagtataataagaatgtatattcctggcaagtcctgcataagaaaatcaaatatacgatcaaatttatgaaataccttagttgaaataaatcggaacatctttgttttgagcaataagaatttcagtgtcatgatgaaagtctcagcaagacagtttctaggccaatttaaaacaattaatgttttagtcctttcccttttaattctttattgaatcatgtcgctttgttcctcattgttcttaattatggatgctggtcctttgaagttc

SEQ ID NO: 36011 - DNA, 1013 bp, Sorghum bicolor
  Intron number 1 from transcript Sb01g005180.1 (locus Sb01g 005180) derived from phytozome v7.0 (chr-ID chromosome_1; pos 4285243 to 4286255 reverse strand)
gcgggggatcccgatccggacgagctcgagcgcgcgtaagtgtcttcgctctgctccgcgtatccgtatggctggtcggtgctgtggcgccattcccgttgccccgttgcttgcgttggggcgtccaactgagtttcgcgttggattgcgcgaatgtcgcgttgcgtctgtggcgggcattgctcttgctcgtgcgtgcgttgactggtggaagcatgcgccgtccgcgccgtgcatgccacgcgatgatgaggtgttgtagcgtaaaggagctaaagtgctctgcttgactgcttacccaaatatctatacatcggttgcagtttcggacaattattgtttatataatttcttatctcccaatcccgccatctcgtgtgacataagtttctcatgttgcactggtgggaaggtagtagaacaagttaggtgagatgtcgaggaataattggtacttcatgcccttgtaaatggagaaggcaaagaggactggtgtttttttagcatgttggtagtgaattacttatgtcatgggcgcaattgtttcagctttcaaacagtgttgaaattgggactactttggctgctcgcctggtctatggcagatcgtgtgcagtattgttttgcaaatgttcctgttcttttacagaaaccagtaatttgaatagattcaaagtttcaaacattgctaggtcccgagcctttaattaaatgaacgcccatttgtcatatataagtcatgagtacactgtccaaagtacatgcttgttttgtgctccatccgttccaaattataagacattccaaaaatcttggagagtcaaagaatctcaagtttgatcaaaattataaagaaaattatgaagatttatgacatcaaataagtatcctatgaaaatatagttaatgaggaatttaatgatacttagttgacatcaaataagtctaccatcaactattcactgtatgtacctacaggtttccaatagtggagccagatcacggacacacta

SEQ ID NO: 36012 - DNA, 767 bp, Sorghum bicolor
  Intron number 1 from transcript Sb04g006710.1 (locus Sb04g 006710) derived from phytozome v7.0 (chr-ID chromosome_4; pos 6723901 to 6724667 reverse strand)
tcgcaggtacgcttctcttctgtagccagacgccagtgataatattgtcctgtttccgctacgaacattacgattattcagttctgttaatccacttttgtttagataaaatgtccccctcgccttatttataggaactataaaacaaacagttctcacgctcttacatataagcatattcgagggcgcccgccaaaaccaaaattgcccaaaatcaacctcaaagtcacaggtacttagtacttactactagggatagtgtcctgaactcaagtctcgccacaagatcagcatcctagttgcttccaaggatattactctcttcagcctcctaattgctttgggcaacaccacattaacatctgtcagactcagacacctgggccttgtttagatgcgaaaagattttggatttcgctactgtagcactttcgtttgtttgtgacaaatattatccaattatggactaactaggatcaaaagattcatctcgcgatttatagttaaactgtgtaattagtttttattttcatctatatatctaatgcttcatgcatgtgtcgaaagattcgatgtgatagggaatcttgaaaactttttggtttttggggtgaactaaacaaggccctgttcctgaaaacacatagaattcctagtttcctatagtccatagaacattagaaatcaggagtcagagtttcataaacgtgcgagttctccttttatgtacagggacactactttgagggtcaggtattggggactcc

SEQ ID NO: 36013 - DNA, 464 bp, Sorghum bicolor
  Intron number 1 from transcript Sb06g001550.1 (locus Sb06g 001550) derived from phytozome v7.0 (chr-ID chromosome_6; pos 2447512 to 2447975 reverse strand)
tctcctgattcttcttcagcttcttctcttcacaggtgcggtgggattcttgcttgttttttttccccacatgtttttgctctttggtgctttttttttttctttgacatgatttgatccatccagcattgttgtggagaaatttaccagatttcatcatcagttctgttctggtctgtgcgtgaaatttgattcacatcaagcttttgtttcctataaccttgagttcttaaccgagtgttcttcaaccttttttttatctttaattagtagtacatttaattcttgcatgatttgattttttgcattattatacaaatccttccatgatttctctctgcatgcttgcatatatgcaaatataatgtacagctagttagtattttgtattataaaataaaatttgtctttcgaattgaatgtgcatagcgctaagcgtggacggagcggcatcgttcagcttc

SEQ ID NO: 36014 - DNA, 786 bp, Sorghum bicolor
  Intron number 1 from transcript Sb09g027350.1 (locus Sb09g 027350) derived from phytozome v7.0 (chr-ID chromosome_9; pos 56422854 to 56423639 reverse strand)
gccttcgccaacttcgtcaacctcctctccatctggtgcgttccccctctcctagatctaaatctaacgcgcgggggcgatcgatacttgggtcgttggttccatcgcgattgctcccgtgcccctgtcggtcgcgtttgtaggtggtggtggttgcgacttgcgatcggggttggggtttggtccgggaaagtttatttttgttttctctcgctctcctgcggaaggcttggattgagggtttcctctcgtgtcgtgtgatgtgttgtcgaagcaaggatttgagctttactttcacgaagcttgatttcgagctcgaggatgaacgctgacatttgttgtgaggatgtggagaagactgccatctgtatagcacgtcagtaacctcatgggttgtggcagtgactctggtttgttaggaatcattcttctcattatgagagattgcgagcatgacactggggcaaggctgacagacatattgcacgagagtgttacttcctgtttctggccacacagcatttcaacatgagttttgattgccctaatggcttgaaagtctgattgtactgttttgtcttgcgaaattgcaaactgaacctcctagatatgtttttaacactaactatatctgaatgagactatgtggcattaacgcaaggctgattggatatagctggatgttcagagctattgagtttttaagctagaagagtttgcggtgctgttccagtaatccgtaatttgttcttcctagacatcgcaggctaaaagagaagaggtggg

SEQ ID NO: 36015 - DNA, 1041 bp, Sorghum bicolor
  Intron number 1 from transcript Sb07g021600.1 (locus Sb07g 021600) derived from phytozome v7.0 (chr-ID chromosome_7; pos 55727746 to 55728786)
cgcagctcttccccgtctacccttgtggcctacccgtaaggacctctctctcactcgtcgtccacatgaaacattaacaattggcaaggtggtttttgctatttggttgggcgatgtgtggtgcataaacctattatttgcaggctaagcttgaggaatttcgtcaaacaacctttgtatccataaatgggtgctgctgcttttcagattgtagtatgaaatgtgaatgttgtaacattgacattttctgaagtttattgttctgtactccctccattccaaattacaagtcgttttgactttttgggtacatagaaatcactatgttttctagataagcagatataacgtatgtctagatatgtagcaaattctatggacccaaaaagtcaaggcgacttataatttagaacgaagggagtagcaattaaggattactctctggtcacaaaaacacgtcgtttaggacaagatttcggcaaaacttaaaaactacaaacatcaataactattaaattttagttttgaaacctttaggttaaatgagtaaattcatactcaaaatacttgcaaaatctcttagaatttcaaggattttaaaacattttcttaaagaacttagtagtcaaagatacgcatcaaaggctgtgcaaagtcaaatgtgtcaagtatttttgactggaggtagtacatccatgttatgtctgaagaggtttagccagaattgctatgtgagaaactgtatgcatgggagttgacttgagaccactagattttgtgttctttgcttcttcttcttctttgtacaatcatattttccatgtttgctgagaacagtttccaggattttttttttttggtatatgttcatttggtttcgtatggtttgatgaatacatgatcaatccactttttttcacttgataacgttgctgtatgtttttttacttcagccttatcatttttattttatcatcactgatgctgagtgcctgtgggtgctttggttatacaggtacaattttcatttatttcctagag

SEQ ID NO: 36016 - DNA, 590 bp, Sorghum bicolor
  Intron number 1 from transcript Sb03g011190.1 (locus Sb03g 011190) derived from phytozome v7.0 (chr-ID chromosome_3; pos 12374134 to 12374723)
cggcgaggcttccttatcaatctgggattcgccaggtatgccaaactggcgtcgaaatcgaaaatcttcgtccattatttccgccttgcaaaaaggggcttccgggaatgtccaatactccaatggttagtttcttgcaacatttgcaagaggggttcgtctgtagctttgcttagttttgttgtccttttgatgagtgccagctcgggctgtttactaaacaaacaagatggttgaccagttcctgatctagagagaccagaaattcagaatggagccaaatatggaaatgcggcttactatggttgcaggctattggttccattgatgttcggtcagatgaaatgcagagtttggcatttcataagaaaactggagaaagactgttactgtggtcaagtttcagcaaacacatgttgggtgttgcaaactagtgttgttcactgtagtgttttttgatttctagtattataggcatggtgatcttagattcttataagtattttaaatctgatactcctattgataactagcggcttaattgataactatgtattgcagtgtattgctatctggggcagcttttcttg

SEQ ID NO: 36017 - DNA, 732 bp, Sorghum bicolor
  Intron number 2 from transcript Sb06g033210.2 (locus Sb06g 033210) derived from phytozome v7.0 (chr-ID chromosome_6; pos 61224667 to 61225398)
actcctctgaggctggccagctcgcgccattcaacgtaattcacgcttctctgaactcacctgcagttactagtttggaatcatagtgattgctgcttctatcttgtttgtgtctgtgacagtgagacaggctgcaattttgtatgatctcgtgtgttctgtgttcaatggatgaaattgagtgtagaaaacctcttgtatcctcatttgcatgtgttgctttacttctgtggtagcacctaaaaaatcataaaccgtcagatcaaatattgttggtttggctgacaaatgtgcctgcaagcgccttttaaactcttttaccttcgaagcatgttagttagtatgtgctatctagatttggaagaaaatcttatgggaccaggtttaatcctccatcaagttaaaccctatccatacgtatgaatttagataaaaaaatcactacatgtttcattaattcataatcatattttttaccatgtgtttttaatatggatgtaaacaatcatgtgttgtgaaatcttcagaatgaaactaagtcagctgcaatattgttgacattatatagtgcaaaaaaaaccctaaaaaggttgaaatttttatattactcttccattatcagaagcaatgtgactttggtagctgcagttccttttagtttttttcgttcctaatattcagtctccgaaatgtgcagactgacgtgtttgatcaggtgattagagagtgcaa

SEQ ID NO: 36018 - DNA, 955 bp, Sorghum bicolor
  Intron number 2 from transcript Sb03g029590.1 (locus Sb03g 029590) derived from phytozome v7.0 (chr-ID chromosome_3; pos 57818186 to 57819140)
tctgcttgagctcctctgccgcagcggccgctccggtatggttgttcccttttacctcctctgagtccatcttctctgccttcgacctcacctttgcaattccactgctatttggggagagaagaaatttctagtggtataaggtggggaggaaagtagcaaaggattttaaaaaaaagttcgataaataaggtgtggtgtacagtgtttggcgatggaaccggaaaggtgcgcgtgcgatgcaaaggtgttgatagggaatgtttgaattgtcgaaagttatccttccaaatataaagagaagaaatagacgagtgaatggtgatataggcaaaataattcatcattgatggtagcagcaacaaattggagattatggatggtatcagtccaatgctaaccggacgtccatatcagtcattgtccaaaacctgaactgaaacttcagtccatatcatcagaagacgtgactcaacattcttctgcttcagtttttcttttggcgcctcaaattaccataacactgttccctgaaggtaactcatggttagaaatgggacattttgttacataaactaattttgtctctggaggcattgggctgcaacacaaccagcaagaaactgcttcttattttgtttggaatacagtcacaatcatcaattgcaaaattactgtcaaatagcggaatgcccttcaaccaaatgcatttacattcactcgacatagcttgctgtgcacaagcaatgcactgctctgctaagggatctattagcctattactatgataaatctgacttttaacacgataaaaaaaatcaatataacagtaacttgctgggactatcaatgcttaactactactacaaatgctgtaattctgtcagttctgccagccttttttatattttacatgctaattctgaactctgtttattgaacaggttgctcagac

SEQ ID NO: 36019 - DNA, 816 bp, Sorghum bicolor
  Intron number 1 from transcript Sb01g050570.1 (locus Sb01g 050570) derived from phytozome v7.0 (chr-ID chromosome_1; pos 73677380 to 73678195)
tgcccctcgacacctcacgcatcaaggtttcttctcttatttgtaatcttgcttgctgatacatttctttgctttctttcccacaaaacaaaaatcaaatcaaatcaagatacagtaggcagattaactaggtcttgcagggcggctcggaccacccttcagtgcagtctaccaaacaaatcccctccctcactcgcttcgatactgcttgatattcaaggaaattcgttgttcctatccctgtctaggattaaccaggagtatcttccggctattaaggccagtcttgtgggaagtttcgtagcgtttttaagactgttatgtcacgtgaaatgaaatgaaaacatcctctctcaatggagagtttcattctatgatttcatagacatttaattactcatagagagttggtaatcgtgctaaaaaagtttcacgtagatgaaacacatttcttctctctcttcttaaatacacttctacatcataaaaaatgcctatgtgacaacccatttaatatgaatgaaactcacatgaaactcctagtgagaccagtcttaattcgttgtcactgaaattgctcacgacaatgcaatacctgctggattgggattacactatttaacaaactaaaactagttgcccttctactataatatttcttagactgatccactttatggcctgtaaccatttgataaattgtattgggctggaattgttcccggccgttctaggccaggaacacttaaccgaacgggcctttgttttgcctgcattctgaatcttcgtattccatctaccaggtgtctatcgagt

SEQ ID NO: 36020 - DNA, 792 bp, Sorghum bicolor
  Intron number 2 from transcript Sb03g041740.2 (locus Sb03g 041740) derived from phytozome v7.0 (chr-ID chromosome_3; pos 69237856 to 69238647)
acgctgctcaactgcctcctatcagcttggtaactaactgctctcagagacacacgacctttcgatgagcagttcacatcatttctgttttcttcagtaaattaactcgcagattaaatagagggtctagaaattctttagcaggttcaagttagtatacactatacttttgtagtattgtattcttgtgacatgatacatcatgcagtgcctgtaaaccagcagtaaaaatggcgtgtagacacgtagtttttacatttcagaaatgctgcatggtttgctggcctggatgaagcaaacacttggctcttagcgtcctatagatagagtgatagaatggtcgagggctactcatggacccactcgccagcactgtgacaacgactgcaatgaaagggaaaaggttttattgcactgcaccacacggctcgtgggagcagcctgtcggcaatgccaggatggagatgacatgtgggcctcccggcccttgtacgtgttcgcacatgtagcttcacgttcaagtgtttgtattatttgtggctacaaacaaaaaaggtcttcatgctttttggttatgatgatgatagatgattttggttatgatgatggatgatttggttgcttgggcaagaaaattagaagtgtcccgtttgattttcacgcacccttttgcatgcatgtggtgcagagatcgatgtgctagctcatcaagcatgtggtgaattttgtgtgaaatttatatgcatgcaatatacaggtacggcctgccgttcgtgtccccgaacaacatcc

SEQ ID NO: 36021 - DNA, 776 bp, Sorghum bicolor
  Intron number 3 from transcript Sb01g018390.1 (locus Sb01g 018390) derived from phytozome v7.0 (chr-ID chromosome_1; pos 19120970 to 19121745 reverse strand)
tcgtgctgggtgtcgtggggctcttgcttctagaggtttgccttctgctgatgctgagttcaaacttttcatatgcagtagcggtagacatgttagcaattttgagactgaatattgattatagtgacaaaagtttaattgttcatactatattttctccatcttcaagtgcatattttcaacatttgaagacaaaaattcatgcatatatatatgctctttattttgcaatattttggaccacaccttaactgatttggtgtttaaaacaattgtcttctgcaaacgttctacattcttctccactgtttctatgtcagtatatatatttacatcacatatcatctgtaaaatgttcaaaatgttttagggtcattttcaactctatggaattcagatcatgaattccaagtaaagcccctttttacaaataatttgcttgtatttatggattatgccttgcactatactcaatccatcccaaattataagatgtttgactttttttaacaccaaatttgaccactcgtcttatttaaaaatttgtgcaaaatatcttttttttgtcgtggcttgatttattaataaaagtgcttcaagaatgacttaaatttgactatgtttgcataaattttttgaataagacaagtggtcaaacttagggtaaaaaaagtcaaacgtcttataatttgggatggagctgattttttgtctcccgtttcattgattttttttttttaaatttcactaggttccagcactgtcaattgaaggaa

SEQ ID NO: 36022 - DNA, 478 bp, Sorghum bicolor
  Intron number 2 from transcript Sb03g032900.2 (locus Sb03g 032900) derived from phytozome v7.0 (chr-ID chromosome_3; pos 61317258 to 61317735 reverse strand)
aatcggtaagtacttccataaatttgaatttactctttgctttagtttcccccgaggatttgcagttcatttgtgcaatccttgtttagattaccccatgtacgcactgaagctagcttttggaattctacttagtgtttacttctcagaagtagttactatttttgtgcaattcttgtcggtagctgtttttctatggtcaaactttgaggttaatgccacttgtccataacctgaatgcacacaagggcatccggtttatattttcagttgcagaggttgaaattcccgttactagttactgtttcttactggatgactctaaaaacgtgcaaactgacgcatgtccttgtgttttccttttttttctcctttatccatattgtatattttgtttcttccttcccctttccctgacctttgaaccatattttttttagaaggctgataacaacagatattcaactggggaggaccg

SEQ ID NO: 36023 - DNA, 673 bp, Sorghum bicolor
  Intron number 2 from transcript Sb08g000760.1 (locus Sb08g 000760) derived from phytozome v7.0 (chr-ID chromosome_8; pos 646992 to 647664 reverse strand)
gatccacggacgaggaagaccctggtcagtttctttctcatttatcttcatactagtaatgccatgatgtgagaaaggataaggtagatacagtattagaaactcaatgacaaaatgttactctttgcaaacaacaaatattgaacacatataccttgtataccttgcccacattttgacattgcttgtagtatcaattttgaaaagaaaaacttttatttcttgcctttgcaaaggattcaataaatagtaagagtacaactatccttgaaaggcaatggttgtaagatacttccgtttcttgcatgaataataccacaaattattcataaggtgattgtgttgttaccatctggaatgctcctaaagtcagtcatttagatatctttgaatctttgaggtccacatgctacagcttgtcaaccatgtttttagcatctggaatgcccctaattcagtaatttatgtatctttgaactccacatgctacaacttgtaaaatgcaaaggttcctatttctgtaaatgctgcttttgtgttatatacttatataggcttattgggttgtcgatctatggatgtccccattcaactcaaatgctctacccactaataacttaagtttgatgatggatgccatcttttgttttcttctttcctttctacagttctc

SEQ ID NO: 36024 - DNA, 995 bp, Sorghum bicolor
  Intron number 2 from transcript Sb05g002510.1 (locus Sb05g 002510) derived from phytozome v7.0 (chr-ID chromosome_5; pos 2666599 to 2667593)
agtcagccaatcagcttggtgtgcatacacaggtatgggatatggatatatgattgacgcgttgccggggcgttttcttttgggttttatctttttccccttctttaatcattctacccatttgcttctacatgcataaatcaattatatagatatcttccatctggacgacctttgttttagaataatttagcttcaaaacttatgcgagatcgcatccatgattttttttcttttcagaataagttgtgatctgatctatagtttttttttcctatacagatcttgacctttgtacatgaagtgttgttcaatgaattgttcccctaaatttcattattcatcgagttgttgcggaaacttatttcaaaaaatgttaattttttggacacgttattcaacaaaaaattaatcctactacgtgtataaggtatccgcaaaattaagtttccagaatattaactatcgctaaaatatgttgaacagagaacatacaaacttgtgtcttagtttttttttttttgaaaaatactctcatcgagtacaagtttatatttatcaaaagaagttcgcaagtcaatgtttctcatgaacgtacgtatgctgaaaagtctatgctcaaaacttatcccaaataggttttgcctgcagaagaaattctgcatatatatactagtaatgtgcacacataataagcttataaaattccaaaacatgaaaagtggcggaaacaaaaaaaattctaagaaaaacaagagtagctagcagcagtctggtcgaaaatcgctcatgtgtttggtttgttgcacaagggcgcaaactaaccggttcagcacactctcacaactctgggacaaattcattatctatattttgattcatcctacaattttgtttattttagtttgctatattaattgtttctggcggtggtgtctgtctgaatgaaccggacctaagttttaaatccaaactgcagctacggttcctccatc

SEQ ID NO: 36025 - DNA, 724 bp, Sorghum bicolor
  Intron number 1 from transcript Sb10g009710.1 (locus Sb10g 009710) derived from phytozome v7.0 (chr-ID chromosome_10; pos 11375338 to 11376061)
ctctctcaggtacctcctccgccgccgcgcgccccgtcccctcctccgaacggctccatcgtcactaggtctcaccagcacagcgtagtacggccaacgaaccctagatccactgctggatcatccgggaggcagctgcgctgcttggttgcttcttctctaagcgatttgattagttgcattctgatcccctgtggtgatgcttggttagtggtttcctggatttgcctgtggatgatctagaagttagtatgttggtgtggagttaaaattgattggttgtgttacatccttgatgaatgatgcttgattggtgctcttctggatttgctgtggagatgtactatagttacgctgttgagtataatatattacttttgagtgagtagtatagattataagccatgtagtgcaatataatagcaaaacattttgggatggggactaagtggtctgcaactgtgtcaagatgctggtctttagttcctttccaccttttgtttcagatctgttttcatgacgttgaactaggttgtttgatcatgaccgtgcacttttgttgctatgtgggcttgttcttttaatcttatggtatttattgcagcaagtttcttgagtcagtatatgtagttgtaccacatttttgtatgatcagttctatttagctcagatatagtgcatttcgtgctgtgctgatcaaagtctctttcatttgtttttagca

SEQ ID NO: 36026 - DNA, 636 bp, Sorghum bicolor
  Intron number 1 from transcript Sb09g003580.1 (locus Sb09g 003580) derived from phytozome v7.0 (chr-ID chromosome_9; pos 4099597 to 4100232)
aattttacccgttgtcagtgcaagcagtgcccaaggtattcgtaggtccctttcttgttactgaatttcgtgcttgtattctgcacaagcgatttaattatttcattggtgcttgtttgcggtttgattgccaaatttctcgtagatatcctgttgatcagttgtgatttgtgtttatgcttatatataagtgcaaagatgactattatatggttttctgaatgtctttgccattttcttatatggttttctgaatgtctttgccattttattttggtgcggaagtctgaaatgatttgtggatgtagctctaaaactctacatgtagctgattccttcttattttggaagatagaatattgacatgtgaaattttagcttccggcttttatacttcctatatttctccaaaagtagaggaatcgtagccatgtgcacatctttcttctatttaggctctaggcagatcattcaaataattctgtggcctgaattatgttaaatttttcatgcatttcttgtacattggcagatcttgaattttttttatcgtatttatagctgtatctatatgacaatggtgattttttttttctgttttggttcattccagacagaaagaaattcatcacacta

SEQ ID NO: 36027 - DNA, 683 bp, Sorghum bicolor
  Intron number 2 from transcript Sb08g000730.1 (locus Sb08g 000730) derived from phytozome v7.0 (chr-ID chromosome_8; pos 638478 to 639160 reverse strand)
aggaagaccctggttagtttcatttctcgtttagcttcggtaatagtaatgtcatggtgtgaaaaaaaaaaggataaggtagatacagtatgtacaagctcgatgacaaaatgttaactctttgcaaaagacaagtgctgaaacacagatttcttgtgtatgacatattttgatatggcttccagcatcaaatttgcaaaggaaaaaaacagcattctttatttcttatccttgcaaaggattcgctagataagaattaaaactatccttcaaaggaaatatttgaaacatactttttcttcaacacatctggcatgaacaaccccacaaaatattttaaggtgactgttattagcatctggaattgctcctaaagccagtctttggacacctttgaggtccacatgctacagcctacagcttgtcaaccttgtgttgttagcatctggaatgcccctaaagtcagtaaattatttatagatatattgaactccacattatacaaggctgcaacttgtcaactgtaaagattcctgtgttcacagtttctgtaaatgttgcatttgtgttctatacttatataggccttttgggttgtgcatttgtggatgcacattcaactcatattaaagttcgatgatgcaagccatcttttgtgtttgaatttcatttctacagtcctt

SEQ ID NO: 36028 - DNA, 575 bp, Sorghum bicolor
  Intron number 1 from transcript Sb03g005190.1 (locus Sb03g 005190) derived from phytozome v7.0 (chr-ID chromosome_3; pos 5416200 to 5416774)
acgccgtccaggagaagggcgagcgcgccagggtaagagtgccgtctctctgatccgtgcggtttctttgttaggttaggtttatagttgtttcgttctgcggcgcttccccagcttgtgtgatggcgtgatctgtgggaattatcaaacacaagaaaccttagtggcgctggcgcctagtcttcctagggtattttggttgctgttctcttcggtagctttgctggcgcaagtgcttcagtactcttgtgcggttagtttcagctggtgttctgtaaatgggtgtagttccgtgcttgcctgccactcatttgggaacttttgactagttttttttttgaattattggaagatctctctctctctctcttcttttttttactgaaaagaaatttaagtgagcggcaaaggaatacactgatgtagtttacactttagctcgtaaaatgaatagaaggtgtgtgggggagcgtccacagcgaatgacactttgatctgtggaccttctgattcatctgaacggagaggctgtatttgctaacaccatgtccttgcaggcatcgtttattggggcc

SEQ ID NO: 36029 - DNA, 782 bp, Sorghum bicolor
  Intron number 1 from transcript Sb07g001090.1 (locus Sb07g 001090) derived from phytozome v7.0 (chr-ID chromosome_7; pos 1026133 to 1026914 reverse strand)
gcagacagatcccaagccaggtattgcctttgcttttgctgatacattgttccccctccttttttgctgctacattcgtacaatacaatcaatccatcatttcattgttcaaaaaaaataataaactggtagtgataattcatccattcccctgttttgttgtcaccatggcatgaatcatcactaacaagcaagttgtagcacattgcaatccatcagcagtttgggaatttgcatcgcattattgttgcctttgtgcaaaagaagaagaagaaaaaaaatctggttgagtggcagatagctggtgccttggtggccgcttgtcatgctagttggtggctgccatgtgcccaacttgattgggatgcgttgtgtgcaaatgcctgaggatttgccctagtaggggagatgagaatatgcttgcttgcttgtcccaatgctaggttggtaaactacttaattcgttcaactactagtggtgttcacgaattccagataagtgatgatgagattcttgcttgacagatgttctgcttcaattatttttactaaaaataatagtaaccggtcaacaagttcgggctgacctgcaatcatgatttatcactttcccctattctttttgtgctaaagtagtgcttttccagtttcactgtaatgtgtgcattccttctttgtctcacagcactactctccttatcatgcacttgcagtttatgcccattatcgatggatacctttgttcttccacgttctaatatttcatttctttcaaatgcagg

SEQ ID NO: 36030 - DNA, 960 bp, Sorghum bicolor
  Intron number 1 from transcript Sb02g040470.1 (locus Sb02g 040470) derived from phytozome v7.0 (chr-ID chromosome_2; pos 74406780 to 74407739)
caccctcatccagtcggcggcggccaagggagcgggtaataattcctctctcgttccaggtccagcagcggaattgtgccattctttaatctgtagtatatgttttgttccaaagattagttttttactagcagacacgcgcccacgcgagttcttgggttcagtcgctgggtcgagactcgagagtgtgttctttggttgggtcattgagttgtgtgaagcatgttccgacagtgttgaccgtggttggtcagcgcatctattcaatagattggattgtgatttcccggttcgtttctctctctcatatcccttttttttgtttagtagtaggtgccatgttgattgagtgatcatgcagggccatccgtcatttgtttggtcctagcactgatcctgacaactgtatgggcgtggatctagccatgccactgccaccgttggtggttgccatgatgaattattgttttctttaactttcgtgatgaattattattacctgattggggcaaaaggaactcaataccatcaattgcatgtggtttatatacgcttttagtatgtgtctaggtgattgccaactgattattgtaaatacaaaacaattcgtttttttttgacctatttcagataatatttttgtgtgaacttactaaaagatcagaatttaaaagatctatgcacatcaaagttaatcgaagtgttgggtgttaatttcttcagatttttgaaagtaatagctagattccctagcaagtgtgatgtaccaaaactttatacgctttctacaaaagcagggtatcctttcaaaaaaaaaaaactgtattgaagtagttcacgagtaatcagctctattctggccagtgttccagtgtgctggaaatttaatctagcttgaagcagggcagtgctgataagagttgatgcttacttcctgtgataaccatacagtgtgcttgg

SEQ ID NO: 36031 - DNA, 735 bp, Sorghum bicolor
  Intron number 3 from transcript Sb05g009990.2 (locus Sb05g 009990) derived from phytozome v7.0 (chr-ID chromosome_5; pos 20098044 to 20098778)
ggttgtgtggattactggagctagccgcgggattggtcagcgtgcctcatcagctctttaatttgtcaactttagtaccgactgttggggtttagttatgagttgttaagttgttggtatcatgtggagttgtaggtctatagcttctaccgtggaatcatggaatttgattgagctggtgttcattacttcatttaactaggccgactgctaatgatttggctaaattgtcgaaaaagcatgtcctttgaaagaaggataattaactaatcaaactgctctactttgcagtactattgccatgccaactgcacattcaggagtttagttagacaaataatttgaataatttttcaaaaaaaaatgaataaaatgggttttctttcgtacaacttcagctacacatttatgcttatctttaagcaggtgaggaggtgataaattccctcactgtagttttgtttttttagtgagccttatacctctgttagttcattgtggaatggtatagtgacaattttatgcctggttatatacttcatgcaccacaatattgtatatgcaccttcttcaagcttgatgtaccacaaagttttcataggatcactgtcaatttttatgagttaacatgactgttttctcgacagatgtggctttttacatcaatttcagcatagtactgcaccataacaagttattaatgcttttttttaaatttcaggggaggttcttgca

SEQ ID NO: 36032 - DNA, 692 bp, Sorghum bicolor
  Intron number 2 from transcript Sb02g003900.1 (locus Sb02g 003900) derived from phytozome v7.0 (chr-ID chromosome_2; pos 4337439 to 4338130 reverse strand)
gtcaccgacggtgaaacggtaagttgtcagaatctataatacctgttgactacttgaccgttgttaagaaactgtacatgcacgcgtgatggtccattcaatctgtcagtaggggttataaaattctcagaatttctcctcagagcacaccatttgcacgtttcagttgttatttgttttgttttgagggactatttacagtttttatttcgtaattctatcagggctggtagacttttagttatattgtaagtgcatttcgttctgtcaaaacatcagaatctgcatgcttgtcacttccacactatttaggctgtaatgatttgccactgttatgatttatatgctctacatgtgcatggcaatcaaatttgatctgacttgcccatgggtcatgattcttcttctgttcttcctgttggataccataagtccataacatgaatggctttctaggggacagcgtattgcctattgcaagcacaattttggccttttaccaaattcaactcaaggctgctgttcagattttgtttctctcatcactgttgtccagtttaatggatgatgatagaagcatcttgaatgcaattaattttgttatttcaatttcaggacctttttatgtctaactgtaacttcaaactgtgctggcagattctctactgttctgtctgtctggcggatactcc

SEQ ID NO: 36033 - DNA, 1013 bp, Sorghum bicolor
  Intron number 1 from transcript Sb07g020830.1 (locus Sb07g 020830) derived from phytozome v7.0 (chr-ID chromosome_7; pos 53917578 to 53918590)
atcggcctctgcgaggggatcgtcactttcacgaggttgccttcgctctcacgcatttctattgtctagttcgtcgcaatttgaagctcttgatttgctcgtggtccttctcatcaacagcagcagcagcagcatcttcagcgtttaggaaaagaattgcattcagctttctggagtcctacaacagcacctaggcttctagcatcacttcagtatatcaaatcagtaggatgcttgagtatgcaagtttgggtggtaacctaaggccgtgtttacttccgagaacgaaaaaatttcgtgagactgtagcactttggtttgtttgtgttaattattgtccaattatagactaactaggctcaaaagattcgtctcgtaaatttcgaccaaactgtgcaattagtttttattttcgtctatatttaatactccatgcatgtgtctaaagattcgatgtgatgggaatcttgaaaatttttgggtttttgggtggaagaaaacaaggcctaagggtcaaagggtcaatcgattttgtcgcatgtgatccagcttaggttttatcaagcaagaacaattctggacttagtaaaaagattagtatttttttgggcaacgggccaatggctttggttcctaagttcacctatccacagtggcggatctagaaacacctactctattactaggaataacatttgtatactggttcatttcatatagtgttcaaagttaacatattcctgtagatctctagacaacttgcaaatacttatgaattactcaaactgacatgggggttaacatcagtatatcggaacccttcataagcaacatttcttttgtgggcacattatgtcttccatttgctctccccgaattgccatccaaacatttcctgactatatacttttgatattcatttattgcctaatattgctgggttccatcatcttatttctcaatgttagttatatgcagaatattttccccggaagaggattgtgaggttatag

SEQ ID NO: 36034 - DNA, 907 bp, Sorghum bicolor
  Intron number 3 from transcript Sb07g024950.1 (locus Sb07g 024950) derived from phytozome v7.0 (chr-ID chromosome_7; pos 59919935 to 59920841 reverse strand)
gggttcatacacaggtgacattttctatctaattcaggccttgtttagatgcgaaaagattttggattttgtttcgctactgtagcactttcgtttgtttatggtaaatattgtctaattatgtattaactaggatcaaaagatttgtcttccgatttacagttctgtgcaattagtttttattttcgtttatatttaatgcttcatgtgtgccgaaagattcaatgtgacggggaatcttgaaaacattttggttttcggggtgaactaaacaaggcgtcaaggcgtcagttcatgaacaggacgaatcaaatcatgagcaggacgaatcagattatgtacctttggatagttttataaagaaatcctaagattattagtggtaataacacaaacacatgattattagtggtgataatacaaacacatgaactgtttaagctagtgaaatatcttaccacatcatttcttgagctcaatatggtggtagtacatcataatcttgagtcattagtctgaatttccttcttactggtaagaaatactccattccaaattgtaagttgttttggcttttctatgtacatagcttttgttacatctagatatacattgtgtctagatataaagtaaaaactatttatctagaaaagccagaacaacttacaatttggaatagtgggagtagaattttgtttgaatttactaaaaacattttaattgggagtgacaattttcatgttactgttgatgattggctgtggagaagcaatcatataactgcttattgaaaacaatttcttttatttggaaatggttcttattttcttgatatattgattgaaaaatctccttggaataaagctggtatctgacacttaattgttatgttattttgaactttagg

SEQ ID NO: 36035 - DNA, 579 bp, Sorghum bicolor
  Intron number 2 from transcript Sb01g010310.1 (locus Sb01g 010310) derived from phytozome v7.0 (chr-ID chromosome_1; pos 9150899 to 9151477 reverse strand)
aaggagaggtaacctacaagaaaatatgcattgaagatttctcttggtgcactgcatttttacattttaattttattttaaatattctgacggtaaactcatgattttgtgtaggatgtacacatcaatactgaattatagacacaaaaaagaatagtaaaccagtttatgcacaagcaaaagctttattaatcttgtgtatggtaatacaatacaattgtgtgtgatcttaacatgtttgcttataaattgcatgtttcacgtttgaactctttgagtgcaaacatgaggtgtgaaggaatagaactgttcgcctatttgacttcattaacaacctttctttcactaaatccacttcacactggtgaactggctagtagaaaatatgtgcaatatggtttttcctttcttgggaactagaagatatttgcttactgtgcagtataatttccgaaacctgttggatcctcgatctttatatcgtaaatattaatttcgtttatgcttgaaagtttggtttctttaaatctaggacattaatttatgtagtatcagcttatgctaacaggtttgcagcca

SEQ ID NO: 36036 - DNA, 510 bp, Sorghum bicolor
  Intron number 2 from transcript Sb03g015010.1 (locus Sb03g 015010) derived from phytozome v7.0 (chr-ID chromosome_3; pos 20901881 to 20902390)
accaggaggttttgaacgactacatcactgccacggtacgttctctctagcttctttggtctcaatttgatttttttttttggcggggggcattgtttgtttatttctcgccgtgcattcagattacatcacttagcagatctgtgattatatatataaataaaattatggatggctagttggtttttctgtaataataactgtaagctcaagtttagttcggccaagtagttttcgcctatttgtggttttaattaaaaatgtattcttatccatatttagtggttatatatgaaattcagatcggtttagtacagttctgtattttttgttgaaaaaaagtcgatagtgcaagccaagtcgtcttatagattaattgttcccgtcgtctgtgcttgtgtgaaaccttctttgtggcattgattaattattttttcttttatgatcgagcatgtaggtgctgccgtccttgcaggacaagcacggcgagttcctgctgaaggaactggt

SEQ ID NO: 36037 - DNA, 704 bp, Sorghum bicolor
  Intron number 1 from transcript Sb08g018220.1 (locus Sb08g 018220) derived from phytozome v7.0 (chr-ID chromosome_8; pos 48211420 to 48212123 reverse strand)
aggcccgctacctcccacggcgtcgcggcgctcaggtgagtgtgtctctatctgcttgctgctgccggctctcgccagcaaaacgcggcgggtccttttggggtgtgctttgattgaaccgcgaggagctgataacgggttcctttctttcgggtattggagctcgcgaggtggacgaggcgtagtttgctagctttggggatttgaactggggatgaatcgtgtgcaagattgcttgttgagattagggaaggttgcttgacactggtaggttaggctcttcttcccaatggggtgcttgatgtgagaattaggagttgaaatgtgtcattaagcatgtttcttatatggttatttttttgttgtggatgctcggcttctggctcctttgtagcttttgctactttttccattgtgtggccggtgtatccagatggtcatggaaatgaaagctaaattttgttgtcctgcatgtgtttataagttttcctgtcggtatagccagcattgaatccggtggggcaagagaggttaaatgactagaaacactgtaatagcattcggtgtccagctggttgagctcatgatgctgtttttctagtattagattttacttttgaaatttccatcgatttaagtagatcactaacatattgtatgtgttgccagggtacaaagttttgtcccgaagtgttacgttacaa

SEQ ID NO: 36038 - DNA, 842 bp, Sorghum bicolor
  Intron number 2 from transcript Sb03g007820.1 (locus Sb03g 007820) derived from phytozome v7.0 (chr-ID chromosome_3; pos 8234648 to 8235489 reverse strand)
actggtactattcttcaagctattgtattggtagcatctaaaattgtttgtggcataaacaataacctagagtggcagccttttttgcctggatgatgagtgctctgcttcattgtcatttatataacaaaactggtttgaccttttcttatatgaacgatcaggagcattactttagtaaagaatgtaaagacgactcgagcaaccttgggttggacaaactttctacatttgccatgccattagcgtttggcattgtggtttttgaaagcaccttttctttagatcctataatgtcgcatttggcttgaagcatctttttagatccataccagaaaaaagaactggagccagtaaattttcccgtaaaagactgtattccacagctgcgatgtagcacatcacaacattttgcaaccacaaactggccaaagacctcgcgctgcaaggaacttatttcaggatgggaataataaaccgtcttttatccatgtgtaactttaccatctctgcttttagttttccaggaaatatgatgatcattatcttttattttaggcttggctgttataaattatgttcatcagccgttggtgaaataggagatcaaaatatgctgagtagtttttcttttcacttgtatcggattactgatttgggttttggggaaacagctgtttgcagcaattttccctttcaagaggagatgtaaataccgataacagaaaaagaagtgatgcaaattcaattgtgtgccccccccccctttcgttttatgcatttgatgcttatatttttgttggccaaaacctgtgtgggtttgcaggtttggcactgagatc

SEQ ID NO: 36039 - DNA, 898 bp, Sorghum bicolor
  Intron number 1 from transcript Sb01g021020.1 (locus Sb01g 021020) derived from phytozome v7.0 (chr-ID chromosome_1; pos 24400708 to 24401605 reverse strand)
cgcagcgagcgacacctctttcgcggtgacgtcaggtacgaattcgtgaactctcctgtataaatgctattgggacacagtctgatgcaattcaaattaatggccttgttacgagtccgttgtaactgtcaattggtaaaggttatgtgattcatagaggctaagtttctagttccaaaccctttgtagggtcagctaccaaaaccaacattttgtcatcttggtgcttgttcttgtaagcgtctgtacaagctttaagtctttaagagagtagagctgggggttggatttgcttgattgagtgcacatgatgattctctgttgctgtagagattttgtatagctatgtgttgtagtgtgcaacttatatgtagtagcttaatgactttctttgggcacatacatgtcaaacacagtgagtttgcattagtaccaatcaccagtgtttatagggcattagtaccaatcaccagtgtttgtagggctgctaacatatgactgtagtttactgttatattatcatctagggttgttaagtttgaatattgaatattaatatgggaactcgcagatatgatacgatagagccgtcttcagatggtatctgcaattgggcctgactcaagatatcaggtcaccattcttttttttatcaaatccttgtggagtacttgcaagttaacaacatggattgggctggcacagttgggggacatggattgggctggcacagttagggttcttggacacatttggttatttgtgcttatcagggattaatattattaataaacgatcatataataatagtcacaattctattttttagtgcttcatgcattgtttatgctgcttcgttaaatatgttttcttttgtcgttgtgaaggcgtaggaaag

SEQ ID NO: 36040 - DNA, 715 bp, Sorghum bicolor
  Intron number 1 from transcript Sb04g021360.1 (locus Sb04g 021360) derived from phytozome v7.0 (chr-ID chromosome_4; pos 50369738 to 50370452 reverse strand)
tcttccgccgccgccgtcgtcgtcttcgtccgtaggtagcctctccaccctcctccctctctgctgtcctagctttaatcttatctactaggataggagtactcctgatgagatgagatgagatgagatgctaagaaatcttgctaaggccttgtttacttcctagaaaattttgcaaaatttttcacattccctatcacatcaaatctttagacgcatgcatggagtattaaatatagacgaaaataaaaactaattgcacagtttggtcgaaattgacgagacgaatcttttgaacctagttagtccatgattggacaatatttatcaaatacaaacaaaaatgctactgtgtctatttcccaaaatttttcggaactaaacaaggcctaatatgtaacatcacttgcttatattatcttactcctgaaagtgaatcttgtgcaagtgcaactgtaagaactggaacgtcactgaccgaacggaacggtgcctgggttcgtccactgatgaatcctgaaattttcgctgtgctgttgttcgctgcgttacgcataaggatttgctcctggatttctatttagtagtgttttttttgtcgcatttatttttgcggttttccttgtggatgttgctcgctgactgatggccggccttacgctctttctttctcttggcatctgcagatcagagagggaggaagaagaaccgatcg

SEQ ID NO: 36041 - DNA, 1005 bp, Sorghum bicolor
  Intron number 1 from transcript Sb01g028395.2 (locus Sb01g 028395) derived from phytozome v7.0 (chr-ID chromosome_1; pos 49532232 to 49533236)
ctccccgcccagtgtccccaggctcctttataaaggtgcgtcttcattggttattgccattgaacttgctcaccgttatgagattctgtcgatctgatgatgatgatgattatgatgttaagtatgactatactagatttcactgcctagttggcaatttaaagactagcatgagaagtgtcatgaaatgtgtgttgagttggttattccaatagcagttgctagcgtgctaatatgtaaacagactatattttgtatcactggattgaattctatggtcttatcaccctcagcttgaaaatttcaccttttattagtttttaaggagtgttaaagcttctttatggaattttgctaaggatcatgggcaggtaccgtccaatcaatatgtgtattgtactattgtaacagattacttaggccccatttgcacagctcctccactagcttcagaagctgttgagagctgttttgtgccaaacgcgataaaatagaacaactccgccagatgaggatctccttaaaatgtgttctcataaagggtggatggagctgaaaatagtagcttctcccagctcctactcgctctggtgggccttgcatgggattccatgagagcaggttttaaggagctccacatgtagagctgttttgccaaacggttcaccaaaacagcttcattgcctctggtagagctgtttgtagagctcaagcaaaacaataatgacttcactagtgaagtggagctctgccaaactcatataatgcttgtgctggtcttcattgtaattagtaattacatgttttactattgttttttcattccttgtttgattacaaatataattcacacagggaggttgtaattgttcaattcctacaccaaaataacaagaccacattgtaacatactaacatgaaggatgttttgtgctccttgaacaaacaataagtactgtttaattttcaggacgggcgtgagattcaagttggcgattgtgctct

SEQ ID NO: 36042 - DNA, 1063 bp, Sorghum bicolor
  Intron number 4 from transcript Sb03g010320.1 (locus Sb03g 010320) derived from phytozome v7.0 (chr-ID chromosome_3; pos 11181345 to 11182407 reverse strand)
gcagaactgttcttgtattgaggcctggtttagaggttagtttagatactggagattaaacttctggaaataatttttttgtgaacatctttctcgaaataattgagttgacatcttcagattattgagatttttgtcgtcttgcagagttctgcattagatatacctgtcatctaatatgcttggagattagatttaatcatatgatctagttggaacatttggaaataaccataggcatgttatcttgcaaagtgctaaccctgccgatatgagtatattgaacaaaagaatgtgaaacacatgatcaattgacctttatgatctgaatttttaaactcaaactattaggagaaacaaaaaggtgaatttcaagctatgcattaaatacctttagtaccttctctcttttttcccttagttaccgtgacaatcttttgttgaaaatattttgcgtttcctaattccaaattactacggtctgcgcttccaggaggtatgtccattgcctggactgccatttgcaggagtcctgaaagcaagaaagtcaagttaacatttagggataactatcatcagagtagataatgacaaatcaatcaaaataactgaggcttacttttcagttgaaacgtcttcaaccacgacactgaactcatttttaacttgaggaagagcaccaattgtgaacaggctcttgtcaccatcatatgcaaaatctttatttgcatgttcagcagcataagtttgctgcagtttttttatcacttttcttcctgaccctttgcgatcaaccggtgtatcatcttcatacttcaaattgacctgcaacaaattaccaatgcagtatgaactactgaatttgtatggtgttagtttacttcgaggattattacatatgtagggtgttcaatattgatttgatgaaccaatatcattgtgcagtctaggcttcaaaagcttgttgatcaaatgtgaaacatctattttttaaaacttgtatgtttggtctttttgaaatgtggcagaacactacctcagcaacaggacagatcaaatatct

SEQ ID NO: 36043 - DNA, 465 bp, Sorghum bicolor
  Intron number 3 from transcript Sb03g010320.1 (locus Sb03g 010320) derived from phytozome v7.0 (chr-ID chromosome_3; pos 11182471 to 11182935 reverse strand)
ggcggcttgcattcaaacctgaaaacatctgttgggtatgttggttttaattaaagataacataattaattaattataggcagtacatagatcaatacattcaaactttagtgaggagtagccaagcagggggtccttgtagctcagttcatagatcctctggttcctttaaaggtacagcattagttgtcaaaaagaaaaggtacagcattcccctctgctaggaaaaaaagctatgtcttctcccccaccgccccgccccccgaatgctctgacctacagtctatctgaaagttcagtataggaggaataagcaggatgctaatttaaggatattgttttaattgattgggggtgaacaagctgtagcttaaaagctgcttgtatttgtttttacagaatatctcatattttgcagttacacaacatataataagcttgtttcattctttctcctccttcagg

SEQ ID NO: 36044 - DNA, 849 bp, Sorghum bicolor
  Intron number 4 from transcript Sb05g002590.2 (locus Sb05g 002590) derived from phytozome v7.0 (chr-ID chromosome_5; pos 2752969 to 2753817)
tcgtctgagaacatcccttcaaggatcaataggtgagcactcttatggatctagatataatttgtttcagatcatctcctgatatttttcaagtaaaaaaaaaatcgaagttcagtgtagaaagataaagagcagtgagaagctaagtagaattacagcatgagaacaactcttgccatttattgtgttcctggcttcctgcatgactgacagcatgctcttgctgaggaattacttgacaattagtagaaaacttttagagagctaagaaagttcctttttttccttctatatggagactgaaatgaataggcttggaccaaattggatatggaaatctctccgaatccttaatgatttggtgccacgtgttgtagtataatagaggaaccgccccacccataccacagctcacaccggcttagtataatctcaagacatatttgctgtctaataatgaacaaaaaataagaagaaaagatatggaataatgagcacatcgatcttgtagatcttccttccatattgccgtatccatgaaacaggcttcttgatgcagacagctcactagcaagcaccactcgtctttgtcccggtttattctatggctacttgcacggtgcacagactgaggaaagttttattaaacacacagagacggcaggaaagaagtcaaataaagaatcaaaatacatgatgtttgtgaatggacaagtgtgataaagataaaaacacaaaaaagtagaaaaaaaagaagatatattcttaattgcatcagatcagatttagtcatttaggtaaaaaagtatagaaatcactgactcacttctcaattacattttgaatcag

SEQ ID NO: 36045 - DNA, 829 bp, Sorghum bicolor
  Intron number 1 from transcript Sb08g018650.1 (locus Sb08g 018650) derived from phytozome v7.0 (chr-ID chromosome_8; pos 49001587 to 49002415)
gtgatcagccacaaccctgacaacggcacctcgaggtctgaatacgatcaccgccccctcctttctctgtttcattcatttgtatgattagattttcatttattcgtatgatgagatctgatgtagtcgtgcgagtaattgcatcactgaatctgatatgttatggatcctttgtagcattattcaaaaatgatttggctctatttttgtggtttgcttatgcgcacaagatttagttttctataataataaaatggtccgatttatggattattatggtacatatcatctgcctgttgttatttttgttgtaacgtgattcagttttactttgtaaaaggtctagttgacttatggccttgtattgaggtagattttagtttgactgtagccatttgtagctgattggttctttgattgcaatgtgctgcagataatcaaataaacaccttaggttggtaggttctgcaatggctacattgtatattttgtgattataattgttctactttacgcatctccaatacatatgctgatgacattgtaagctgtttcgcatcttgttatgtcagccttaaaattatattttactgctgaagataatttcagttgcagtgtttttaccctgtagatatcctaatctggcctgcctactctaatgtcttgttgatgtcctaatctagttgcctactagaatgtcttttgctttgtcagtgtagtcaagtgattttctgatatttgtctgcatacttaattacacagcaagataggctaattctgctcttttcttacaggattaagctaccctctggtgccaagaagattgtcc

SEQ ID NO: 36046 - DNA, 662 bp, Sorghum bicolor
  Intron number 2 from transcript Sb05g027660.1 (locus Sb05g 027660) derived from phytozome v7.0 (chr-ID chromosome_5; pos 62092593 to 62093254)
cctgacggtgagagaccccacccttttgtgctgcccttgctttggtgctaatatactaatgctcttgtgaaattggctctgtttgtggtattagcattggagaccaatatgtgttggttcccgttattattataatactactccagcttgcctaattaaattgttgcttcccttgatgaagatcaattttctctttagttgcttttgatttggcactccgttaaccatctattgtcctcatctgaactgctcatatgtttctttggaatggaaataatctttttaattaacatagcattagcatctctggcagtcttcgaaatagtattttcagagatgatgatactttgatgtatggggagctaatgcttgaccacccgatactcgaggtgcaacggtactgtaaatgctgaatttgatattgaaatgcaatgctacagacaggggtgatccctggaatggaattctaaaagatcgtgtgcaaattagatattaaaccctgctaattatattttgtatataaatttttcccctgtttctgttggtcgaactggttcttgatactcaccctgtttttagcatactagtgcggtgggatttatattatttcaatatttggattgatcgattctgatattgaattttaaaaaatgcaggtggta

SEQ ID NO: 36047 - DNA, 477 bp, Sorghum bicolor
  Intron number 1 from transcript Sb01g008400.3 (locus Sb01g 008400) derived from phytozome v7.0 (chr-ID chromosome_1; pos 7225703 to 7226179 reverse strand)
cagccatcttccggccgctgcccccccaccgggaggtgagtgaggcctgctccccttgcagttcgttgctcgcgttcggattgtttcagctgagtacctggtgatgggatctggacatctggtacccgtaggcaggttgcttgtttgggctagtattcatgagccgggatcttcagttttatttcattgtgttgtttgaatggggaatatgccttttttttttcgatactgatttgttttcttcttcctatggaccatggcttgcttctttatgaaatataaacccgcaggtatttagtgttacatcggtattcaaatgagtgttaactgacatcaagtattctgggtggaatgatgctagtagagagctttgtggggtgtttctttttttttcatttctttttgttttttaatgtgtcttaaggcaattgtattatgtgaagagacgtaaatgtctgttttgaaacttaagcaggc

SEQ ID NO: 36048 - DNA, 673 bp, Sorghum bicolor
  Intron number 2 from transcript Sb05g024100.1 (locus Sb05g 024100) derived from phytozome v7.0 (chr-ID chromosome_5; pos 57001695 to 57002367 reverse strand)
aattggtcgctgggcctacttcaaatactgttcaggtatgtacatacttattgggataatatattagacatttccaatatgtacgtacaatagtaacataggcctttgttgcaataaatacaaattatcactgcgaggacctcccccacagttttttttttgcgtcaaaaaatagcaacataggcctattttgtgtgaaccgtttaaattccacattatacatttttatgtatggaacagtaaccttatttcatacatctttgcatatttatccatcataaaaaattaagatagaagagaaaaaatccataatgcactaactaaacagctataaccacacctgattggtataattgcagttttatttttcgtttaatcaatgaaatatatataactggtaggcttaattattcatttattggtttgggcatgcccacatagtgccataattgtaggcaatgtgttctactaaaggatgcatcaaatgatatgtttagttaattatttgtaggactgagagaataaataatatactaatatggattaattaactttccataatataaatgcatttgatcttatatttctatggcagtgtcaattaatcttattcagcttacagatttttaatcttaattggtatgccacagcttgagcttgccaaatttgggcc

SEQ ID NO: 36049 - DNA, 682 bp, Sorghum bicolor
  Intron number 1 from transcript Sb01g040010.1 (locus Sb01g 040010) derived from phytozome v7.0 (chr-ID chromosome_1; pos 63422522 to 63423203 reverse strand)
ccgcggcgcttcctgctggcgtcggcgcggcgcaggtaccctgccctcgcgccggatctgcctctgtttctgctgatttgcgctggctttggtgtgtggccgtggtaaatgcggacgcgttaggctgccgcccccccaaattgctgcgcttagtttgtgcgtcggtggcgtcgcctgtagatgggctgtgcttgcacactgcagtggctttgactctggatgcatgctcgtgtctggtagtgcctactgttagctagggtgtttttccctgcttctttggaagttactaatactaaaggagaggaggcatcgatttgctgggagctggaactaagtggccgtggatttaagcggggtagtgacaagcgcattagccctctacgtacgtgctcctcttcgagttcgaactagaggcttgttgtatatctgaatcaattatccaaaggcaaattagggaagtttgcatcacatagaaaaaataaaacatttctaatttcccactgtatggccgttgatatgtgctacatttgatctgctgtgtgtttttttttggtgatcatatcatggtttattactttatttgctgaagtgcttctggttatgcttttctcttgttaactttatttttatgactgttcctgttccagggttggaaatctatttgaccactcagtgagtggcc

SEQ ID NO: 36050 - DNA, 626 bp, Sorghum bicolor
  Intron number 3 from transcript Sb09g030625.1 (locus Sb09g 030625) derived from phytozome v7.0 (chr-ID chromosome_9; pos 59172342 to 59172967 reverse strand)
aactcaattttccaggtaaactagtaatgtttgcttattcaaattgtgtcttatattagttgcaagcaacagaaagtgaacctagctcaactggttgggtgcaggttcaagtcctcttctactcgaatttgggtatcttatttctttttgttaataatgaaaaaccgcctagttcctcctaggttggtcacattttcatttttgttagttgcaagcaaccagttggagatctgttgcacaaacaatatgctttcatgttatagactaatcatattagatgtggtgtcatggtgttcatttgtctccaaataggctaataacataaggtccatctgttagtatttctttgaattcccttgatgttgtacacagggcttcaagtagaacagtgacacacacatatggtgtcagtgtggatttcattagaaacttagccatttaactgtttgcatatgatcgatcaatatgttagtgcatgcactcaaataaatggaatgtaaagtaactaatcgagtgcatagttgatatggagaatattggtaattctgttttctagttcttatcgacaacttccaaacttgttagacagcccattgtctaaacggctcatagagaagatttccaac

SEQ ID NO: 36051 - DNA, 520 bp, Sorghum bicolor
  Intron number 1 from transcript Sb03g029410.1 (locus Sb03g 029410) derived from phytozome v7.0 (chr-ID chromosome_3; pos 57556311 to 57556830 reverse strand)
ccccccccccattctctgccttcttcgtccacgaggtacggttgattgctcgtggtccagctcctcaatttaatggcttattcgttgcattttggttgcactctttctgtcttcccccgattgcaattgtagtcgggtcttcgatttggctggctttacttgtgattcagtggttgcatcggatcggatggagcgaagcaagtactgtttcttcacactttttttctttttgtttttggggtcatttttggtaccgtcgtctggttgtttcgagttcatccaaggtcactggtggttagacgttggtacagggggagccagtcaaaactcggatcgtgcatttggcagcttgttgaatttttttttccgcctctggtctggtcttttctaatctgttcttgtagtcgttttctgtcgtaaattcagtgaaccgaacgcctctgtgcaagaacaccatttcaatctattttccattaaatatgcagatcgaggctactttgaagaagaagcctctggtctt

SEQ ID NO: 36052 - DNA, 1036 bp, Sorghum bicolor
  Intron number 3 from transcript Sb04g003030.1 (locus Sb04g 003030) derived from phytozome v7.0 (chr-ID chromosome_4; pos 2841763 to 2842798)
gaccctaaggtcagtgttactttgctcgtcttttctggtctaatcttcattctactcctatgataatgtgtgttcaaagagtatttcttcctgcaatactgaggtgttttttaaaagttttagggccaaccccagtcttttacctgaagtcaaatgacggtttaaaccactgcagcacaggggattagcctaccaatctgaaagttaagcacaaatccatctcaaaactcaaaaccgaccaaacacatgcttaagcagcaaccgaaactgtagagacttcagatattgatgccctctgcaacagctgacatcgccacatcggagccaggagctctcatcgtgagggtcttctccatcttgtagctgcgaaatgtctgcgccgtcacttgactccaggaacagtcccattgatgcatcagttctgaagccacaacactaaatctgccagattcttgatatcctttatcttcttcaacagcgaatctttttcctctgcctggcacaaaattagccaattctgtaccatagccactaccttcaagaagagcaaatccaaatccatacctttccacctagttctctggaagcataaatcatttctaagtttccagatacaccaaagtgctgcagaagttaccatgttaagaaccccatgctttttattgctaaaccagaactttcctatattttcaagtttgctccctacctatacttttagaacttgagataatatatgccaaagctgttgcgccactacgcagtcaaagaaaagatgttgaacatactctgtgtatcatttttgtcgaattaatcaatttagaactttatatgctacacttccaatgtccgtggttcaattttaaaactgattttacaacaaagaatgatcgtgtcaattcatgtttttagtcactaaacagttgctatgtccaaaaggttcagatcaactttggtcttgtcttcaagttgtatcactcttacctatacatgaaattatacaggcaactttaagagcagaggacattttgaattcttg

SEQ ID NO: 36053 - DNA, 889 bp, Sorghum bicolor
  Intron number 1 from transcript Sb04g028880.1 (locus Sb04g 028880) derived from phytozome v7.0 (chr-ID chromosome_4; pos 58952354 to 58953242 reverse strand)
cgcagcggtggcccacgctgccacgcaccaacgaggtaaattcgtccgtatctagatttaacccccatccccccacgtgcattgcattattgtttgttcccatgagacgtgaacgcagtaagatttgcacgctgcgacagagaaacgtgatttgggatccggtcgatctcttcgtattagtccttgttaaaattacgattggaattgtagaacgcccacttgttttaagatcgccttgcccattgttttagaacaatagcattggttcttctaatctagtgtgaacgcgcgctagaacggacgaggttacatggcatctttgcattttagatgcagtttccttgtcgttgcagagaacatgcagcctgttctcacgtctcagtggggcactaataagctagcttgtgtaaaaaagtggacgcgaaactgctgttctccgctcattgcggggagcaacgaacacacaagtgcgctgggtgcaggaacatgatagacttctcgagtggcatctggagaagtttttgacaaaagtagtatacaatcagtgttattctaaacggccacttaaacaggcaaaacggctgtttaaatgaaaaacggtgtaccgctgtagcgtttaaacgttctgtaaaacgactgtttaggcgaacagtgaatacaattgtacaacgaaaacagagttgctttgtcatgtttgtgctacaatagctgaatatcttgagtttggagtaataatctaaatgaagttgatggttattacgcctgcctgcaaatgacgctgccttgtatagtatatagttgactactatttttttcccctcattgctaattcaggttcaattttgatgtttcagaaaaaggcacggttcgtggagttgccggacgagct

SEQ ID NO: 36054 - DNA, 816 bp, Sorghum bicolor
  Intron number 1 from transcript Sb08g023030.1 (locus Sb08g 023030) derived from phytozome v7.0 (chr-ID chromosome_8; pos 55163350 to 55164165)
acgccgtcagcctcgtccaggccctcaccacgcaggtgctcatcctgattcactgtggtgcggcatcgtggcatattttgtcagcaccatcggaaattgtctaataatagaaattgagaacagggatcacttcactagtatatataaagtagaaactgaattgaatgatatttctgactttgcggtttcagttttttcatgttaactgattgtttgttgaaatgaatacaactttgcaagcgagctatggtaatagagaacaattggaaacacaaaacgcaactttgcatctcctaaacaaccagacatgacagtagtttcagagacatattctattactgaacctcaaggctctaggcaaagatgtccatcatcgtggcattgcacatcgctgtagacatctcgtatttgtccttgtactaatctttattcatggtgcattcttcatttcttcttgaaacccatcaattcagaaaagggaagaaaaacatatacatggagtctgtacagggaaatatatgctcacaaaacattgatgggtcaggggtgtttcttggtgcccattctatgctctgatcaaattatgcctatggcttcttcatccaggactttgaattttgttctgaaattaacacttacgtggtcaataccaaagtttaaatttttagccttatggatgacattcttaatttctacggtcagacatacttcatgccattggacattagctactgttgtttcacatacctctattttctgatattcttgctccataattcagctcttcttttccaatcagtacaacagtaaagacct

SEQ ID NO: 36055 - DNA, 968 bp, Sorghum bicolor
  Intron number 1 from transcript Sb02g013160.1 (locus Sb02g 013160) derived from phytozome v7.0 (chr-ID chromosome_2; pos 23743912 to 23744879)
cgaagttgctggacaagaaagagggcgatcccaaggtgctattgtaactactctttgtattattgtagctcctctctgtatctagctcctctcgtaagtaagagttacgagctcgtgcagtgcggtttgggaatctagctcggaatatagcaaatctatgtttcttcaggaatatcaaatctatgtgttgggcacgtttccattgctgtttctttgggaatagaaaatatatgtgttaggcatgtttcaattgctctctgactgatggttctgtgtgggaaagggaatagcaaatctatgtgcacgtgactgatggttgtgcatatgggattgtgtgggaaatgagatgatcggtcctcgtgaaattgtgtgggaaatggccagaaatgggtatcgtgtgccgtttgagttccaactgagaggttgtgagcttggtggtacttgctggtgtttgttaggtgagggggttaaagtttgcttttgtatgtggttgtatggattcaccttcaccatgtgtctggttctcgtgcagctgtttctagagctattctgtagaatgccaccacccacttttaccaccggtttgactcaacacccatgttagtctgtacagttctgtattctcatcaaattgtgcttcggtgcatgccaatatcagtttttgtgccattggccaatgtttccctctccatgtatgtcatgacactggtgaggtcacttgttcgttgaagctgtttaatctgggtgccttatgctataaattcaaaacataacctatctgaaaacagcaaggtaatcagttgctttagaatggtggatggtacggttttccattgtctttgtatagaacaactgttagattaaatcaatatggttttttcttttgcttttggaagaaatggttcttctatcagaattgctttccttgcatctgatgtcacaattttgaaattcaggtccaccataac

SEQ ID NO: 36056 - DNA, 729 bp, Sorghum bicolor
  Intron number 2 from transcript Sb05g021380.1 (locus Sb05g 021380) derived from phytozome v7.0 (chr-ID chromosome_5; pos 52237857 to 52238585)
gataccgggtatgcggcacccttgtctttctggatgtacaactcgaatttcagttttgttgccccatgtttgatgtacaactcgaatttcagttttgttgccccatgtttgtattgggtttattagtacctgattggtcaggataccatgaaaacgccctctgcgatagtctgtggggtgggttttatagaggtttattacaatgtttgtttgaccattatagggtctgtgttgattgccgtctggtttgctgaatcaggtgtatgggtagtgtgtttcaacatttataattatatctagaaaatccagtagaaaaataataaagcactcatagaaaaataataaagcactcatcggttccaacttccagctaaaagcattatctcgtgaagtagcagccatcttgctagtgccattttgtttcacaataaatcatttgcagcaagagcaattgtagattaattttgctatttgtgctgataggcaagaaatggacttgaatagataaaaagaataaacatatgttattacagatttgcagaaatttgcttttaggctggctagctcttctttggagcagcctttcagctttcctttattgtggatggaaaagattatatgttcagttcctaacaacaggcaaatcatctatatggttcaagccgaatcttctgtttgactgttccctgctttgattattatgtcaggcagtccacgttgcatctcagt

SEQ ID NO: 36057 - DNA, 802 bp, Sorghum bicolor
  Intron number 5 from transcript Sb09g003260.1 (locus Sb09g 003260) derived from phytozome v7.0 (chr-ID chromosome_9; pos 3655483 to 3656284)
atcctaaaattttctcctcgaagtgttgctttgaggtaagtgattaattttattattagtgtgagatacattaccagtatgacctcatgtaagaaagtttatgtaaatatgtttagctcatgctccaataattaagttctatcaaatattcaaataataatgcaaatttatttcgtacatttttgtttgttatataactagaatttaataggatggtcaatatttgtgtaaggccttgtttagttcccaaaaaattttgtaaaatttttcagattccccgtcacattaaatctttagacgcatgcatggagtattaaatatagacgaaaataaaaactaattgcacagtttggtcgaaattgacgagacgaatactttgagcctagttagtccatgattggacaatatttgtcaaatacaaacgaaagtgctacagtgtcgatttcccaaaaaattttggaactaaacaaggcctaagtatcgttatatgctctgtgcatcatgatttgatccagtatttgtgaacatgtgttaaaattatgtatcctcatgaaactaatttcttattcctttcataatttatagtagtatagactacatgatatctctggccagctacctaagacacttgtttatgtgcaaaattacctaaatatttttctttgcacaaatagttaggtggtgggtgttttctgtttttctttgcacttgaggaatattctcagaatttgttgtggttattgctctaacgtttgcatgacaagcagctaggttccggtgtaggtttggtgggcatttgtct

SEQ ID NO: 36058 - DNA, 752 bp, Sorghum bicolor
  Intron number 2 from transcript Sb01g026550.1 (locus Sb01g 026550) derived from phytozome v7.0 (chr-ID chromosome_1; pos 45051064 to 45051815)
acgtgcagctcagcatcgaccattgcctcttcaaggtcaaccgctcccccctgttttgcctatctgcttagaatccagatgaagatgccatttttgtctggtgttccagaaatgttgttcattcttctttttatcggttcttcatacttactagtgacgtgcgagaataggattgtttaggcaagataatacaagtactgtttttatgcgcttgagctctgtcggtcattcaacgatatttttatgtcaaacaaatcagggaagtcatgacttttcaaacagactcaatggtcttgttcgcttgagcttatccgctgaatctaccggtcattcaagagtgtttctctcaacaaatcagcaaatgatactttcagacatggctagttcagcgaatagagtaacaagctgcaataggaacctgtgtttggaataaaaggtttcgtttttatgaatcaaaaacttctggcctttcatctaaaagatgtctgggcaaagcatgtgttaccaattggttggaggtgtgggtatgagtactactgtacattattattttttggctcttaaatctccagtgcaatggttttgtagaatataaataaactctccaataataccttttttcactcatctcgcttcaaatgatggcatagaaaacacgctttatgatttctcatgctatggatgatctctctcacttgcattcggattatgatgcagggacaatatagtggcatcggaacaaaggaggtact

SEQ ID NO: 36059 - DNA, 942 bp, Sorghum bicolor
  Intron number 1 from transcript Sb04g008850.1 (locus Sb04g 008850) derived from phytozome v7.0 (chr-ID chromosome_4; pos 10445946 to 10446887)
ctcatcctcggtgcgtatgcctactagtatgtctctgctttcgttctaaccgccggccggcgcgccgtgattctgattccttgccgtccgcaccatgagaatgagatccgagccgcccggcacagccgccgtcaacgcttcactagctagtactcttctgctcataaacaaaaagttcatgtttgtcggtttcgaaaacccgaaaggtcatcaaataggggttaagtgaaaccatggacgttattggataatatacagtgtcagtgagcacaagctccattagcgtccgacaaatacctgctctgttcttcatgaaaaaaaaaacgtagtcatatagccttgtttactttcaaaaaaacccaaaaatttttaagattcctcgtcacatcgaatctttagacgtagacgaaaataaaaactaattgcacagtttggtcggaattgacgagacgaatcttttgagcctagttagtctatagttagacaataattatcacaaacaaacgaaagtgctaccgtgtcgcgaattttttttcgtttggcaagtaaacaaggccatatgataatagcaacgagatgagccgagcatgcaacagtgttcactgtttaatacgcttctttgaaagttcagtatggtcatggcctgtttactactactagtacacttcttttgaaagttcagtatggtcaaggtttgtgtgtacttatcactatagtacgcatctttgaggtgtgttataacatgaaaattcactcaactctaggaagcgatcgatcggttacctttttttttcatctgattttagtgcctacaaacactgttcatctgtttctccacaacaattgtacatcgacttgatctcattgtacatgcagatccttgacctgttgtttttatatgtttcagtctctgggctctccggcactaaagaggttgcgcaa

SEQ ID NO: 36060 - DNA, 957 bp, Sorghum bicolor
  Intron number 1 from transcript Sb01g034390.1 (locus Sb01g 034390) derived from phytozome v7.0 (chr-ID chromosome_1; pos 57828630 to 57829586 reverse strand)
ccttcggcctctccaccaagcccgccatcctcaaggttgttcccgtttcttgcccttctattacttctctgtgatgaattcggtgcttgggcgggcggttagtttgattcctcctgcgctcaatttgttgcggggggggcggtttccttgctcgtctcttccgcttgattgaaatttgggggttcgggcacgttttgcttcggtttagttagcgtcgtctgcacatcttagtttttgggaacgaaggccgtttcgtttttcgcgagtaatatggcacttgtttatgtcctaggatgtccacagtattataatagttattttatgatacagtaatctgcatttagattttttttataatatattaataatgtgcctgttccattttatatctgctgccggttcttaccttatcggggaagaataacatggacgatgacagctattattgtggacatggtcccgttcctagatattctatcggttgtcctgaattaccttttgcaactttttgagcctgacatatttgtgaactactcctataaaggattgtattagttccggttaacatggtagttgtcatgtcatttcgatctctccatttcactaaaatacaccatcaaatcattcatttcaattccaaccagctttttttgaaaattaagtgtcactttagctcttgtagctgcaccatagttgtatcctagtataatcaggaacttcggggcatccttacctcccaaatttcggacatttcgcttcgagaatcagatttatctaatcctattggcttctcaaacatttcgcttcgagaatcagaagcacagagacttgcatgttgcaagttttctaaagtggaattcacagagttgaacaagctagcaaattcttgcatgtgaaagcatccatttacgggactaatttttggtctatttgcctctgctaaggtgagagattggt

SEQ ID NO: 36061 - DNA, 760 bp, Sorghum bicolor
  Intron number 2 from transcript Sb09g005440.1 (locus Sb09g 005440) derived from phytozome v7.0 (chr-ID chromosome_9; pos 6988971 to 6989730)
aggtacacggtacttttcccacctttgtttaattgcttgttcatgtttttgtgccctcaaacttgtaagtaaataacaacatattttttgttattattataatactctttcatcactttatgggacttccatatgattatttgtcgacttgatataagaatgttccactgtaattgccatgtgacttgtattgaattgaaagtagattgattaaggatgatatacataggaaaaatatatataaaggaacatttacttatgatttgtgctattttgccttttttataactaggaagatactccacgcgctgctgcagggattacgaaagaatttggaatggaattgagtagagatgatttatgtggatagcttgtaattaagaggttggaaagttattaggatgacatggctattagtggaatatgatgtggataattagtggggtatgatgttgttgcttgcatgttgagataagacttgtggtcaggattagctttataagagtagcagattgttttctttccattttttttgtttggtttgtgtaattcttgttgggttgcatctctagcatgttattattgcgactacttactttgttattattgttgagtatttgtctatgtcactttggcataaactatgtggaatggttgagtctccatgtaatgttatgtgctacaagaagtgttgagtatgaatcagagctgaaccatttgcaaattttttttgtggtgcaggagttctcccctggatcta

SEQ ID NO: 36062 - DNA, 914 bp, Sorghum bicolor
  Intron number 1 from transcript Sb08g015270.1 (locus Sb08g 015270) derived from phytozome v7.0 (chr-ID chromosome_8; pos 40179372 to 40180285)
gtgcacgtgagcttctaccgcaactgtaagcccgcgccgatgatcccctctcccaccctgttcgttgcgcttcgttcccttttcattttcgttgctgtggcgccgtgatctggttccgaacggcgggcgcctaggcctagtgcgtcgagttcttggctagtcggctgtacctgacctttgtagtgcttgttgaaggttgccgtttcgagcgcctaaggttttgtcgcggtttgagtccccacctgcgccgtagttgcgaggcgaggtgaatggttttgacggcgcgacatggagcttggtggatttagcgtgtccactgctcttggtgtcagtcgatctgatctgaggtttgtagagcaacgcgctgctctggatctgattcatgggaagtgattataagtggaggttagctttggtatgagatgggctttgaggccaattcttctgtttgcttatgtggagtaaaaatgttattgtttaactgtttggtttgtgtgcatcgccaggtagtaaatagaccttgtaccctcttgcaaggccccctggtaggcttgcgtcaacccataaaaaatttctattattgttccaggtggtgtttgttcatatttgaatgtcaaaattaagcattctatgttagttcatcatggaacttgatatttgttcaatataatgttccgttttgtaattgaaatttcatatatggtagcttgtttggtcaaatggttacttgatgctctttaatctgttcattgtggctgaaaaggatatctggcaactagctgtccatttagtttctagttttttgcccttaagctttttcaaatgtttcatgaatatccctagttatgtttggtgaagtcaatgttttatgaatatccctagttatgtttatggtgagagacttctttatgcag

SEQ ID NO: 36063 - DNA, 901 bp, Sorghum bicolor
  Intron number 2 from transcript Sb09g026360.1 (locus Sb09g 026360) derived from phytozome v7.0 (chr-ID chromosome_9; pos 55650327 to 55651227 reverse strand)
actgggtaaagggtcttgcgaaattaatctttcctcgcctcttgattactgtctagcatttagcaatggaactgtaataggggaattcctagtagctaattctaggttctatttccatgggtttcatgtatagcctggttgtcggcgttgtgtacaatggtccacagcttagtagccagtagccacttaataaaaagtcaaatttcttggtgcagtgctctatggttgttgtgctaacatccattcccctttacacattgggaagtcatgtaggcaggtgatgcaatgctatcaacagggttatctaactgtagttactaggaacagtaggatgcttgcttatttggttcttggtgcttttcctttcagtaataataataataataaaaagataaccttctataaatcctgagaaatatcagaaggttcatgggcttatggttggaatggaggatttacatgttgccacttgactgatagcccctttgtgataacccaaacattcaaatacagccatatggaacacgaatttggattttagaagaaatactccacaatgttccaacagtaggattaccataaagttctaatcacaaggaatttccttaagtcctttttattcagttaatttcacgcccatatgtcgagcctctagtttaagcattagaaaaatactgttgtttctcctcattcctgaagtgatactctgggatgtatatgaaccatgataagagataactgtgactttacatgcatcatttctatgcaatttgcaatgatgctacttgaatttatctttccatgtgcctgccacatatactaagatgtttttttctgttatgattttatttgccggtattctccagtgtaattctcttccccatagcaataacattctaca

SEQ ID NO: 36064 - DNA, 705 bp, Sorghum bicolor
  Intron number 1 from transcript Sb09g026360.1 (locus Sb09g 026360) derived from phytozome v7.0 (chr-ID chromosome_9; pos 55651241 to 55651945 reverse strand)
ccgcctccgccgcgctctcctcctctggccgcgaggtacgcccccgctcccgcccccctgaggccctgaccccgcctccctactcgattgcatagttgtttgttttttctcttgccccccttttattcaagggtctgttcggttagtttacgatttatgttattttcgttgttttaaattcagctaaatcttcttgacactgatgtttgttaacggcatgaaccgaggagcagtttatgtactaggaaatgcttcaatgtcccatttgggcaaatgatattagtaatggatggtgcatagcttcgatgtagcttatttcattatttgatttgcttaaaaatagaaaactgagaagactgtgacccacttgtatttctgcgttggcacaccttcatattaccagttcaacaaaatgatattcaaaatatttatttggttttcaatttctagtggaatctctaaaccgcctagagcgcttagcattttgagctgcaatttggaatgacaaatacttgacagcaactgaaacacattatcttgctcctactcttgcagtcttgcttttcctgtctgatacttgccttgttcaaactgagaaagcatgttctgagttcaagctagaacagctcgtgttttaattccgacccccttttcttttcttgaaatgcaggctttccataaggtcgtccgtagttgggcttcaaa

SEQ ID NO: 36065 - DNA, 465 bp, Sorghum bicolor
  Intron number 2 from transcript Sb09g020600.1 (locus Sb09g 020600) derived from phytozome v7.0 (chr-ID chromosome_9; pos 50006313 to 50006777 reverse strand)
ggctgaggcaagtgcgctttcagtgactcagtctgatatatgatatctgacatttgaacatactccctccgtcagccaaagaatgcaattaaaggaagcgtgcaagtttacagtaaatagtagtaatatttatatctccaaatcaatttattatgaaaatatattctataactaatctaacggtatttattttgtatcatgtatgttagtacttttttatataaattcaatcaaacttaaaatgctttgacttccgaaaagcgagaattgcattctttcatggacggagggaataaacatactatctgactgacatttgaactgagttgctcgtgacgtttgtttaagaaaatctggattgatgatcttctttttgacaagatggattgatgatttgaaaaaacaatggtgtatgccttgtctcaagcagttgatattggatttcttggaggaggtggtcaggag

SEQ ID NO: 36066 - DNA, 381 bp, Sorghum bicolor
  Intron number 1 from transcript Sb04g022460.1 (locus Sb04g 022460) derived from phytozome v7.0 (chr-ID chromosome_4; pos 52024981 to 52025361 reverse strand)
caagaacgttgtcgtccagtacgtcatcaggcttggtacgctaagtttcttttcatgttgctcgattctgttcctcttctgttcgttgttcttaggacttgtttagtttccaaaaattttcaagatttcctgtcacattgaacctttagacatatgtataaagcattaaatatagataaaataaataactaattatacagtttgcctgtaattttcgagacgaatcttttgagcctatttagtctataattggacaataattgtcaaatacaaacggaagtgctacagtaaccaaaaccaaaactaaacaaggccttactatgggatcacgtgcgtgcattcccagcgaaggagtgctcttctaccggtgacctcgtgagc

SEQ ID NO: 36067 - DNA, 1044 bp, Sorghum bicolor
  Intron number 2 from transcript Sb09g002700.1 (locus Sb09g 002700) derived from phytozome v7.0 (chr-ID chromosome_9; pos 2921650 to 2922693)
ccaccttcaaggaggaggtgatgtgctcctccacagttagttcttgtaggatgtggtttttttttgtggtagatgcaacattattgagacatgcttgtagtcacggaacgatgtaagtttctgagctgggtgccagttgctagctgtgctcgagttacgccttgctgtttcgagtaaatgaagtttaaccgatatcatgtttggacatctttaaatatattttttgtttggaccttcttttttttgaattgagggaaccccatttccattcacagaatggaaatacgagagtcaacagggaaattacagcaggattagagaaagaaagggggtgctagaccacctgtgcaccgggaagcagctaccaaacagaaccaaccacacctgttttaatgcaccagaacaacactaagatagcgctgcacccgaaagacgacagaacatccaggagggaaactaaacaagaaactaactaccatactactagcttcagcagcacaccagacaactccgtcacagatttcttcatcagtagaaaagtccagcagactgaagatccatcactttttgcattgaccatcatcttcatcaccatcattaccctcctctgagctcgccatcagcttgcttttcttggacgccaccttttcctttaattattaagcaactactagcttttaagttttaactgaatcagacaatcagtggtgattaagtgttcattttagttttggagaaccaatgtatctaatgtcctagtgccaagccagagtgacctaaatggattatttttattccaaatgtgacgcttctaagatttcggattgctatttaacaccactgaagctgagatttttttttcctggttagtgaatatttcgaactagctagaaggctaggctattaaattgcaaacagaaagacattatagtttaaccagaatagggttattttggtgcattgattctgttttgttaaagtcagaatactgacattttgctcaccataggagggtgaaccgagttcttcatctggtaaactaag

SEQ ID NO: 36068 - DNA, 829 bp, Sorghum bicolor
  Intron number 2 from transcript Sb09g015250.1 (locus Sb09g 015250) derived from phytozome v7.0 (chr-ID chromosome_9; pos 38370200 to 38371028 reverse strand)
acgtcattgttggcatcacatattaccaggtatcatcctactctcatgccgttccagctacaagaaattttagcaacaatgtattttctagttctccctttgttctggataaatccattttcttgtgagatctcaattcagactacgttttagcgctatacaagaaggcagtactccactatggaaatcaagtttgtatgttttggtgctatacaggagattatgtagtttgtgatatggtaatcttgacttttgtttatctctgattaaattgagtagagttcatcatcataaaataactagtgtgtattcttgccagcaaaagtgcaaagcttcatttattatttttttagagttccagaagaagaaacccccagtgcgttcgcatttttcttgaacatagtggcccgttttgcattaagaggaaacaggaacatgatttacaacagtggttccaaaggatcaaaatattcaacatttacagcatccaagctttagcttctctgccaatacctcacagatagcttactgtgacataggccataacttaatacacaaataacggaaaggtgtcagaaatagaaactgaagccacaagctttagcttcatttattacttagtgggaacatatttgctgcatcagtgagatgcagttctataaatgaacccgtagacacataaagggatttggtattctaattaaaaataaattgggttgcatgcatttgtagaaccacttatatttgtaatcagtgacaatactcattatagtgtagtagttgaacatgtacttcttataatcagttgagacttgcttcttgcaggtgg

SEQ ID NO: 36069 - DNA, 788 bp, Sorghum bicolor
  Intron number 1 from transcript Sb04g007690.1 (locus Sb04g 007690) derived from phytozome v7.0 (chr-ID chromosome_4; pos 8062376 to 8063163 reverse strand)
cctcccggtactcgtctccccgcctacccacccatccacccacccaatctctatgtttctatctctaggtttctttgtgtcagagcttagattgaattctttctgtttttctgttttatatgcttatagatgttcgatgtattaccccagctagtttgcctcagcggatcttcacggaggtcctgttgtgcaaacatgaatcacttatcgatgattaccctcccatcttacagtagtgtgttcggtcggacatcaggtgctctctgcattgttattttcctgatctcagatttgcttgcttggaaggtgtcctataggattttttaatgaaaatgtttctttttttccttgtgaaatgttgtcaatgggatagataaaacaaacagaacatgagggctgatctggtttcaaagaaaaacatctgaagtcagatagtactaaaacatagcggtactaaatcacatcaaaattatgaaaatggtcaagcctctcctaatgataccctttttcctgttggagagtatactatgtccacccctctacttgtagtactccctctgttccaaattataagatgttttggcatttctacatacataacttctgctgtgcacttagatataaactatgttgtatatagaaaagctaaaacattttataatttgaaaagaagggagtagttaattatatcagttaaccttataagcttttctgctgccgtattttcctgttttaaagttcaatttttaacttatccttaggcgaaaaactcggtctccttctccact

SEQ ID NO: 36070 - DNA, 812 bp, Sorghum bicolor
  Intron number 1 from transcript Sb03g032330.1 (locus Sb03g 032330) derived from phytozome v7.0 (chr-ID chromosome_3; pos 60774050 to 60774861)
gtcgcttcggctccttctctcactcctgtttcaaggcaattcctctcctcccctccttatacccctaagaaaattccctttaaaatgttgcttgtctagtactactagtataatactccctcgatcccaaattgtaagtcattccaagaatcttagagagttcaacttttcaaagttggaccaaatttatatgataaaataataattattatgataccaactaaatatcattagattctttcttaattatattttcatagtatactcactttaggttacaaatcttagtattttactctgtaattttggtcaaacatgaaaatgttttgactctccaagattcttggaacgacttacaatttggaatggagggagtattttgtttggtagggttttgtttgcttgattgtcccaatccctcctccctgtacacatgatctagccggatggaagactcgaatctctcttggtaacggtggccatgtgccaatgggtttgtcatgaaagttcagagagggataacattcagagtttgctttaagaagttcggcagtaacttggtgtctttttaatcatagaaggataggtacccatattcgcgtcaaggacttaacttggctggcccaggctgagaattccctttacatgcctccagtcacaagtgcctatctatactccatatactcagtgtagttctgcgcgatattagctcttctagatgcttaaaattgtttgattttgttatattgactagtgcactggcatcgcttatatatctcagtttgcgaggccatttccagttcagagagtca

SEQ ID NO: 36071 - DNA, 884 bp, Sorghum bicolor
  Intron number 2 from transcript Sb10g027240.1 (locus Sb10g 027240) derived from phytozome v7.0 (chr-ID chromosome_10; pos 56957315 to 56958198 reverse strand)
gggcttcaagagctcaggtacttgaggccttatctttgtaatcattcgttttgggctgctcattaagcgtgaaatgatcactttgtggctttttctttcttttgattttgataaaagggttagggtaggtcataataattaacaaataaagtatgaaatgatggtcgacgtataaatgcagaatgcagaacgtaagtcactgggctgtcacattattcagttgactgcggcttgttactattacatctcttgtctgtagctctgtgggtatcctttttctaatgcactgtcactcgatggcttctcatcgttagcctatcttggatgctacctctgcacattagtatcatatgaacatgcttcgataaagattgtcatggacccaatatgctccctttttgaagaaatgttgctcctccatctccagatcaacaaaaaggataaaatgtctgtcagttgttaatatgcagccaggtactaggatactgttcctagtttgactaaactaatacgacaaacaacacagtatgctctgtagatcatctgaaacttgaacagtgcaaattgatttccttttcatcatgtaaactgtcttatttgatgtttccagggaccaagtctcttgcctttggcaatttaccatcatgttgcatggacttaaaagaaagacaataatgctttgatgttgttttgaaatgaatcaaagattatcttatcttaacctgttctgaatatattcctcagtttttttattttgtttgaaatgtgaaagctagtgaaggacaatataatgtatttgttatttcttgattgtaagatagtctgaagtgtattagttttctcgtgttctcaggaacagcaagatccatttgaattggtcgccg

SEQ ID NO: 36072 - DNA, 391 bp, Sorghum bicolor
  Intron number 2 from transcript Sb02g036700.1 (locus Sb02g 036700) derived from phytozome v7.0 (chr-ID chromosome_2; pos 71092418 to 71092808 reverse strand)
gaggtgtgttgacttttcttttcctctactttttcctactgaatcaaaccactgaaaaccgatgtgtaggatcagttcgataactacaggcctatacatattctaatgtctttatttttttttaatgatgcttagggcaatgcagttcatcagcattgctgctgtatttgttccattgtatagccttttaaaccatgcttctctgcttttcgaaagacctagcatgagtatgattgttcttatttattttgtagagtgtagttttttttcaccttttccgctaagaagcccctgaatttcatctagcagctcattgcatcgatgtaattccatcagctctctcaagtgactgaccgcaatatatggtttctgcaggtctttaagatcttca

SEQ ID NO: 36073 - DNA, 430 bp, Sorghum bicolor
  Intron number 1 from transcript Sb04g001396.1 (locus Sb04g 001396) derived from phytozome v7.0 (chr-ID chromosome_4; pos 1188916 to 1189345)
gttggggagaaagctatttatcatctcaagatcaggtaaattcagtgatgtcagtttcattaaaataacagcacttaagagcattatatatggatgtactggctgtttgattatgtttatcattccaataatttccatcatctgtgttctacagtcaagatttttcaggcaacctagctggttttgtattcataataatgtaccaagcccagagaaaatctacctattagagcacatcattttacatgaagagttcaggatgactgtataagtagatagcagtttaaatgctaagcttggtgctaatgagcaaaatagtggtcttaattacttatatacatatagcctcttcttggaattgttggaatgacctttgcattgaccatcttttgatgcactcaatcaggtttacaccaacctcagcaagtaa

SEQ ID NO: 36074 - DNA, 552 bp, Sorghum bicolor
  Intron number 1 from transcript Sb02g031060.2 (locus Sb02g 031060) derived from phytozome v7.0 (chr-ID chromosome_2; pos 66078134 to 66078685)
ccggcctcctccagttcggctccagcacctccgaggtaatcgccgtcacggccgcgcgcttcgcgttcctcccctcctgtccgtctgcctaccacatccttaatcctgtcgatgcaccaagctacgagcaagggaaagagacactgactcacctgtctccacagtcgttcaggattcgtgtattttctcttgtaatcccctgtaatttttgctggatagttagctctacttttgatttagcaaaatcaacacgagatttgtgttctgtttagtttaccctgtacggttcagtattcactttcgagtagcttttccacacatagcttttgttgctgaattgatcaattgatatggtttcttttgttttgatgtcgtgtatgtcttttacttctacaccatgtatacgcctcttctctcgtttagaaattatttgaatttctgtaagtaggctgttactgtaggtcgtgtatatacccttaaattttgctaatgtaatgttaattgctgttgcgttcagattcttgagactgcatttaagaaggaaacagttgg

SEQ ID NO: 36075 - DNA, 715 bp, Sorghum bicolor
  Intron number 4 from transcript Sb04g037440.1 (locus Sb04g 037440) derived from phytozome v7.0 (chr-ID chromosome_4; pos 67084423 to 67085137 reverse strand)
gtcccagttcccgtgagtctactgatcctttgaagttaggttaagaaatttgtgttgtctagcttcattcgcctaacatttggatgtgcttcgtcagctgccagaataatgaaagtttcacttctaaggaagcctacctagatcatcagcaaaaattcctgtatatgtctgttgtatagccaaaatctcattggaagaggaaaaaaacaacatggatatcactttcagttggaccactaaccttaaatgccaaatgactttaagaaatgatgttgacatcaaattcctctagaagtctttaattaactgaattgctaattaactttgcatattcttggtcttaatgcgtgtcttcgaaaagttatcttatgcagatgcgaaaattatgtctacctacttttattgatagacctttgtcaacaaagcattaggtattaacttttcttatacactgtatgatttgctgtgctactcgtagtttcactgccctcagatagtatccgtattagttattgctttttaaattttagaatgatactacccaataatcttgacaacagtgtggcaaccccctggcccgtccccctatttatccttgttgctatgaaggaaatgaacctgttgcggatgctatgctgtatctgttttttttttctctgtgcctctgactccatttccaactgtggtccaataatctgtgtctgccttgtccagc

SEQ ID NO: 36076 - DNA, 732 bp, Sorghum bicolor
  Intron number 1 from transcript Sb01g010760.2 (locus Sb01g 010760) derived from phytozome v7.0 (chr-ID chromosome_1; pos 9660980 to 9661711 reverse strand)
ggggccgcacctcctccgtatccttacccgctaaggttagtgccgtcttctcctatccccccttctgccctcccctcgcgaccatttgcttgtgcatactttgcactttggtttcttgtttttctaaccctgtactcgggatgagagggactagtaaatggcgcatatgtgtgcaattgtatggtcgtgtctggggcgttggaaggatggtcttctgtgaactgtgaattcttaccacaacagtaggaaatggcatgtatgttgactcatgcatatgaattttctagcgcattgtcaataatgctagtgtttcgtggtacagtagtagtagatatgtctgattctggtaggctggtagctaacaaaaggatggttcttttagagcctgtttggttcctctgactaaattttagctactgattggttgtttggaagttctactaaagtgactaaagtttagtttagttggctaaaatttagcaagcggaaccaaataggcccttagttgaaatagtggatctgaatctgattataggagctgttatttattatctttgttgcattgtgcgcacagcctgaatacgagcacacaaggatgaaaactttgacatattattaatttacattattccatcggaatgacccttcatacccaggctcatgttggtgttttattttgtggttttgattgtgctgtatgttgggggctctgacagaagggaggaatcggtc

SEQ ID NO: 36077 - DNA, 733 bp, Sorghum bicolor
  Intron number 2 from transcript Sb03g035130.2 (locus Sb03g 035130) derived from phytozome v7.0 (chr-ID chromosome_3; pos 63303364 to 63304096 reverse strand)
tgaagaggcgcttgagagagtccgtgcactgttaggtgagtcaaatttgtttatcttctggaataattggtatcttttaatattgcctagttgtgtttttcatagtgaccatgatgtcatattttttctggtgaaacaagacaactcatgatcttgtcttttatatgttacttcataaacagtgttgtttgcctgttctagatcagtagctttcagttactggcattggtcaattggtttaattaatttgtttgttggtgggtcagactatgaatttcatggtgatgttccaactcgctgcgaataattgataacacaactgaacttcaattgagtactgccagctttaggtatggggaattgggttcatagttttgaatctgtctctccaaacacaactgagtttttgcaaaaaaaaattgatgctggtgttaatcttttgatgggtttatttatctcttccagtgtaaataaatctgtatactcaatcctttatgtttatttgctactgtatatgatggcaacagattcactacagctgaatccctccaaaaggaaacaacatcttggtttattgatttcattaaggcgtttggcttgcatatatgatataaaattgtgttctggcactgctgctctatactttatttcagttctaacattgagttctgatccgttctgttagataagagcattggcagacttaaaatatgacccctgctcctatttgcag

SEQ ID NO: 36078 - DNA, 662 bp, Sorghum bicolor
  Intron number 1 from transcript Sb01g006030.1 (locus Sb01g 006030) derived from phytozome v7.0 (chr-ID chromosome_1; pos 5039241 to 5039902 reverse strand)
gacgaggcgcgccttcccgccggcaagatcgggaggtgagtcactctctgattaggtttccacgctcatgagcggtgtggtctgtgggagatagtagcctcagatgctagggttagtagctcttggctgagcttgcataaacgcagaattcgagcgtgaaattgcagttcgcgctgttgatttgcttttacgagttacggaggttactagctttggtggggtttgtctctctagccattacaattacaatccatttatccgaacagtattcatttgtcgaggctttctaacaataaatgaactttagctaataatcatggtgggcataaagttagtcaccatctggactcgcgatctgtatcatcatttttcagaatcacgtggaacacaacactgatgcaactacaggcagattttgttgtattaacttgtgtttccttgactagcaactactgaatctggacataagaagattatatggtcgatttcttttacaaactttgagaattcagattatatgtattttccatttattgttgtgttgcagtgctgttctagtttagtacaccatagagttgaccatgttgctggtccagtttttttaaaaaaagtttgtttgttttgcagttttctataggttcacccagcagaatctcccagct

SEQ ID NO: 36079 - DNA, 843 bp, Sorghum bicolor
  Intron number 2 from transcript Sb10g022390.1 (locus Sb10g 022390) derived from phytozome v7.0 (chr-ID chromosome_10; pos 50007124 to 50007966)
tggttgtctcacaggtactacgtttctaactctcttctcaaaacacagagcaaaagaatacatattccagttgcacgatgaagtgatgatacttgctcaatgcctgactttcagaaggcatgttacatttgttactagagagtgataatacggcatgcatgtgatgttgtggactctaaactttctgcctgtgattacctaggacatttcgagtagtgaaatcctatcaagcctattcgtttagtcaaatttgacaagttatgtgatatttttgagttttcacaaaaaatggtcaaatttcgtgaaaatttagatttcttcagaataccttaggtaaaattgcatgataaacagtgttatcaatcctactgtctgatcatcaagcgttgctatttttttttttaaagaatatgtagcatgaacaatcgacgacccaaaagacaatcaggatttataacaccaagcaatgttcagttacgtggtctggcctattgctcatctaataatggtaataaatcaatcgatgttgccaagaatattatgaaagtatgaaactgcattcattcatgcacttaaggtgttctaacttcttgcccccaagtactatactgtatcagtaaatactatgaaatcacttcatgcatgtattcatcttgtactaactactaaatgcaggtgtccagctattccttcttagctgatttctttaggtttcttgtaactagtatggcgactggagatatgatatgtggtaccttgctttagatccgtaaaatggtgaataaccatatgctattttctctactagattcttgagcttgggattgtatcacactcggtgat

SEQ ID NO: 36080 - DNA, 796 bp, Sorghum bicolor
  Intron number 1 from transcript Sb03g033250.1 (locus Sb03g 033250) derived from phytozome v7.0 (chr-ID chromosome_3; pos 61594491 to 61595286)
gaccgtctccgtcgccaggtgagcgtgcgtgcgtgcatgtgcgtcgcctgattcgttcccggggtaaccagccgcggtgactgggctctgggccccgttgtttctccgccggtgacagacgtgccctcgtgtgcgtgttttgaaacgagaaatccctgcgaccaaccttcatgccgtgttatttcggccatgtttggttccaccaactaaattttaattttagctagctaaaattattttagctactcttgggtgactaatggaactaaactattttagctctttttagtcaatgcgtttggaactttagctactaaaatgactaaagcttagctagctaaaatttagttggtggaaccaaacagggccttcggagatcattttcttcttcctgttgttttgttcctatcctggtttgagcaaatactttgcagtgattgatgcatatcctcattcattttgaagaagtggagttcaggttatgaacttatagttacgatgcttcaagtttgatcagatcaaaccatgttacttttcccattttgttatcccaggggctaggtgttcaccgaattaacttggtgtctcctttgcttgctcataggggggttatggtaggattgattcatctaaatagaatgcgtgatcacctgtcagaaaggacaaattagcactactatataggtgtttcgacaaaagcaacttcgttttgtttggcagtataatttgacatgtgatttttttttgtcggtgtgtcgtagcggttacaatttgctgagggatccccgttacaaca

SEQ ID NO: 36081 - DNA, 513 bp, Sorghum bicolor
  Intron number 1 from transcript Sb02g025140.1 (locus Sb02g 025140) derived from phytozome v7.0 (chr-ID chromosome_2; pos 59867751 to 59868263 reverse strand)
acgtgattcgcctctattgctcacagtgaatccaggtaagaggaagaatcttggtcttctccctcataagtttattttgccctagattcaaaaaaaaagtttattttgcccttgaggacatatgccatcactctcccacccattgattcgctttgagaagtgtaacaatttgttgggagactatgcgaaactgctttgagatgtgtgtttgcacacttctcaaaacgaatcccttctcccagcaaagttcttgatgtatttcagcagatactattatcattagtctaatgcttctcctaattttgcattacatagcatcaaatttattgtgcaagcatatatataacagtgattttttttctgttacaagcatagaattggaaataaagttggtgttcatcttctaatggacagatagatatgctgtaggaagatatgcatttttgtgtaaatgtcaataattcgtcgatgtattttacatatgtcaggtgtgcttaacatagcagtcagcac

SEQ ID NO: 36082 - DNA, 375 bp, Sorghum bicolor
  Intron number 4 from transcript Sb01g042450.1 (locus Sb01g 042450) derived from phytozome v7.0 (chr-ID chromosome_1; pos 65721451 to 65721825)
tcaaggacccgttcaggaagggcgacaacatccttgtaagcctttgcgtaccttctcgttttacatttctcttacaattcataaaagcggtcaaaaagttttttttttaaaaaaaaataaagaagatgaggaaggaaaagagggaccaaaaggccaaccttgctctgggatcatatgatttttttttctatgtttgtttttctactacttactctgggatttctttaaaaaaagaaggataataaaaagactgtttgagtaaaggtagtagtaaattatttgaaccatgtgagtagaagtttttttttttggcaagcaagctatgttggtgggtttgttatgcttcttattcagactactctatctgtataggtg

SEQ ID NO: 36083 - DNA, 1065 bp, Sorghum bicolor
  Intron number 1 from transcript Sb01g027920.2 (locus Sb01g 027920) derived from phytozome v7.0 (chr-ID chromosome_1; pos 48618699 to 48619763)
gtcgcccctgctaacgctcccgctactaaccctaggtaagcatcgtcgatcggcggatctgctttttctgactgtctgattgctcggcgaagtattttcgatctggaaacattttttgggtatctgtagtcctctcatgttggatatgtgtcaattatatgtgctatatgaaggtgtgaattgttggggctaaagcagatttagatcacaagttgattcttctatgtattgttgacttttcaaaattacattttttttattcctgtggctgcagttttgtttaattacttgttaaattatctaaaatccttgcgtgtgatacgtgtggatcactttccatgaggacagtgagtggattttgtcgtaattccgctgaattttaccctgtgcaccttattctgatgtttacttttattactttgagtggtttactgccctgccatgtgctatgggatggatatggtcgaagatacaagttttcttgctccatgttcagttaaattcatgattaactactaataatttgtgcatgaaagagaatatttggtgctttaattcatcactcaatagattatttcataaccatgttatctgtaggtttgtacaagtatcatgttccctctccagccgcagaccgtcatgagtgatgactaataatgccatttaagaagtaaaagcttctctacctatctatatgtttgcagcacaacctaggcatagttggcaattggttgacttactttgcatggaaagacattattgcgccacgacaaaagaaatgtgcacttctataatctgtttggccatgcttaatatgacagctggtgacagcattaagattggtttctctaggttctcacggcaaaatcaataccatagttaatccttttctgagtgtcctccttttctgagtgtcctgctgtaatccatttttttttacaagagctgcaatccaatattattctgttgtatatattcaaagtgcagcaacaatatatcttactgatttctgttgattttccctttacaggatcattctgtcatttctcgtttcttatccgactc

SEQ ID NO: 36084 - DNA, 719 bp, Sorghum bicolor
  Intron number 1 from transcript Sb02g018530.2 (locus Sb02g 018530) derived from phytozome v7.0 (chr-ID chromosome_2; pos 45001678 to 45002396)
cctcagcctcggatctcatctcagtaccaacctaggtaacggtcgcttacttcttcttctttttttttggggacgagctggatgtcactgttacggacctacagggattggatcatttggcggcgcctctaaggctactaaatgtcgtaatgcgaattgcaaaatgctggtccatagtagaaatgggtcttgcgcggataccgctgccgggtcttgttatttgtcatatttggatgcgaggtttgaatcttggatttagtttagtggtgcccgagccggcttaatttcttacctcggttcaacatgaatgtggctgtgctgtacgaggtgtagagttgaaatcttatatgttgttgtgctcgcgctatgtgtttgtttccgaattatgacttaccaaaggcggacttgattttgccgctgtggtggtaaaactgagatcttatcacgtattgtattcaccaagatgtgcgcataaacagatctaataatttaacacatggatccttgtacatcaatctgtgcgtttcttggaaaaccctgggttagttttggatttatttatttatagtgtttgcctgagcttgactgtaacagtgaaaccatttcaatcaatatacatcctgattcctgatacagtgatatttctttaagtgtagtccacgatactgtttccaacacattcttcttgcagtcctactcctttttgtacataaaggaag

SEQ ID NO: 36085 - DNA, 639 bp, Sorghum bicolor
  Intron number 1 from transcript Sb09g006630.1 (locus Sb09g 006630) derived from phytozome v7.0 (chr-ID chromosome_9; pos 10754665 to 10755303 reverse strand)
aataatcgcctctgccaacaccaaccagcaaggtaagttcctttttctgtaattcgttgaattttggttgtgcgatccaaagagtagagatacgttgatgggtttttgcctgttcttttatgtaattatatgtccaactactgtttattggtagaagaaactttctctaaacaacagatttttggttgtctatagttcgtacttggttatgcgactttattaatttccagttgaactaaataatggaaatcataagtacatccgttttgctgattaaactatttgggtggattttgtaatttgtttggatgagacgcttgtggaaatggcaacaaaacaatgcaaaaacttccttgctcgttttctgaaaatgttcttggtgtcatttattcagtcagttaataatttcacctcttaattattttgtgttcatttgtattatgaaactctgcatcaatacatatgctcacaccttgtttgatgtgattcttccagtttctggatgatagaagataaaaccttttgatggttcaatcctttttttattttttattattgaaatatattaatgagatcattaaatcgaatgtccaaaagttcattgacaagttgttttcaccattctctctcttgcagcgg

SEQ ID NO: 36086 - DNA, 875 bp, Sorghum bicolor
  Intron number 3 from transcript Sb06g031390.1 (locus Sb06g 031390) derived from phytozome v7.0 (chr-ID chromosome_6; pos 59785114 to 59785988 reverse strand)
acagtgcagattcatttggttgcaggataaagttggtaagcacattaatgtaaaaggaacttggccgatattcttgtattaaggtatcaaatttgaacagtcaataacttgatatataagggcttctttcgatttgcattggtcaatttgcagccttttacttttgctcttgcacttggtgcagtaattattggatgtgcttctataaggctgtctccaacaccacacccatttgggaacccaaacctaaaatgggtctccaacacaatacccatagcctccaacagagtacccatacagaagacccactttgggtatcaggagagccataactcaaatttaggtatcctctctcttcgagacccatttgcagagagtgttgccttttaggtcttgtggttggagaagactaaaaataggtatgaaaccttttaactgtagcgctacccaaaagacaaatgagtcttgtattttgggtgacgattgttggagatagtcaagaaaggttttaaatgggagtggctgagaaatgttgtaaatgggagtggttagcatgaggacaccattctcaaaaaaataatataagacaaccaaatcattagactggatatgttttagtcaaaagatacttaaacaatgtgagggcagcctgcagatgaaacgttagtgactataatgcatatataaaaggaagatttttctgctaaactcacctttaataatgtttctgaatttggagagtgaactgttgcatagtacatacacacaccttaattcttcaggaacatggatatctctggtgtgcttaacatatttcttgatcttcttcccaggtacacataccaaagtctaaagaactgtttgttgtttgcagc

SEQ ID NO: 36087 - DNA, 761 bp, Sorghum bicolor
  Intron number 1 from transcript Sb01g014310.1 (locus Sb01g 014310) derived from phytozome v7.0 (chr-ID chromosome_1; pos 13555852 to 13556612 reverse strand)
ggacctcccaagtaagagatagctgcaccatgtccatgagatgtgagattgatgagcagcacaaacgctgagggatctatcaaatccttcttacacttctagatggctcttttgtttgtcgtcccacattaataactttgtggcatccagaacggaacaatttggttctattattctgaattttcttatttctagtcgagggctcgaggcatgcatgcatggatcagtatggaacacactagatgtctgaaggattttttttttcttaactgattagttaggaattttgtagcaaaatctagccaagaacttcctaactaactgcgtgtttatgtttttttgcaatatacttacttatatatcgcgctagcttctctccaatttaaagatttggtgagaatttcaatgccttaaccagtttactagttgcatccataaaccaaaaggtcgttatctactcctatatatatatgtgtacttctttctagccactgcacactgcagaagtgcagactacagtgactgcacttgactcagtctctggccatacagatcgacttgcacacacactcgtagtacttcagtgaacgatcaagaaaaattcaaagaatactagtatcagttaactatattggtagtatatataggacaaacaatgcacagttatgtaagtaatacattgttcgtctaagagcgtgctgctaatgtaaagtatatatgtaactttattatatactaatgtgcatgcaggcaaagctagc

SEQ ID NO: 36088 - DNA, 759 bp, Sorghum bicolor
  Intron number 2 from transcript Sb05g003700.1 (locus Sb05g 003700) derived from phytozome v7.0 (chr-ID chromosome_5; pos 4288050 to 4288808 reverse strand)
ctctctccattcccaaggtaatactgatttttgttagaatcgcagtggcaagttcttgggtttggtcttggttgcggaaatttttggtgggtagttgttggctcagtacttcggtgcgacttgttactgttagcctatctgatatgaattatgatactgcgattggcaatgatgggtggacaggaaccatgtaagaatgttctgacatggctatttattttgaaagatttcgaatgaatttctcaaacgatatgcaaggggaaaaaaataaaaaaatatatcgtggatgaagtaggttcttaaggaaaagtactgtcaagtttgtgcaattgtaggggcatgtttaccatcagaaagttacagcatgtagaatcccttcaccactgttttccatctcatgtgacgatatgatttgtcaggaaaacatacttagtgtgtatattcagattgaagaaaataaagaggaacattttcaatccaacctcttggcagttttattttattcaaaataatgtgggaaatggaagacaaaaaaagatagaaattcatttgtatttcttagagaaaccttcatgggagttctattgtccaacagactaagctttgcctattttgtttatctgccaagcttctattaagtcgttagttcagttgaatcaaataatttccaatcacagtataatttctcaagaaaagaatcttaccttgtgactttgtgagtcgtgccaggctttccttgtggcgaaggatttcggagcc

SEQ ID NO: 36089 - DNA, 623 bp, Sorghum bicolor
  Intron number 2 from transcript Sb06g001380.1 (locus Sb06g 001380) derived from phytozome v7.0 (chr-ID chromosome_6; pos 1928267 to 1928889)
ggagaaaagggcaatacatctcttagtggaggaaggtgataatattactgttattcttgcttccttaccatattgaaggttatgtttgtttcatttggactgtcttgtcgcgcagcatttgtatgcaataccacctcaataggcttcccctgtactaacccttatcctgtatgtggtgcctcatgcatccccatcctatatatatacttcatgatcttcatccattgaagtatgttctttacactacgctcctggcctccctccacttatcatttgctgttgccttgcctgcaccttgagaaaattcagagcttaagcacaaagtgttgcattgtatccatgatcccacatgtatccaagattgaataatgccttgtatcctgtctaagccgttctgtctatggtatcttgcaaccacaaacggtacttgtatttatagacatccatgtttacacttcatctgtcacctaaataaataaataaacaaacgattaaccgttatgattttggtagtttggtttgacatctttgcaatatactgacaatttactttagcacaacctagttcatgttttcattatgaaaacagtatatttgattttgtagggaaagagctgcagcga

SEQ ID NO: 36090 - DNA, 822 bp, Sorghum bicolor
  Intron number 2 from transcript Sb01g031730.1 (locus Sb01g 031730) derived from phytozome v7.0 (chr-ID chromosome_1; pos 54420744 to 54421565)
agttccgtatccgctggttcactccggttcgtgaggtgatttgtttccgtcgcaaatcttccactttcttgtcttagagaacctgctaacattggaatcacggtgagccgtatcacgagccacaaagaactaatatggcaggcatttcgcttaggcacagagttctagttaatcgcaacactacgccatatttatgttgtccgattagtttatgatgctactcattgtgcaacactgaattgttgatggttcactttagtgtcgtgtgccaaatttcaatgtagcatatttaggaaatataatccattctttttgcaaagggcggccttcataagatgttatggatgcgcatatgtttatttgcttctttcaaagaagaactttgttgatttctgactgatatacggtatggtattttagtgttataaataagtaggtgtactgttgcaacttttatcatgccattatgtttccatgcaacttctgatatccctttagttgcttgtaactactgaagagattttctcactatggtcatttatccccttcagataacaggaagtgaggctttcttttcttggcacttgaataatttaaaattcgagaccacttacacaataatgctgtagttcctggtgccatctaaagttgcatcaagcatccaccataatcctgtacaccagtgttcttttcatgaaacagaatttccttctggtacttctgtagaagcagtcttgttgttattattatatactcttgatctgacgctattggagaaatcgtatttgactttattaattgtgcagagtgaactttgtggcc

SEQ ID NO: 36091 - DNA, 244 bp, Sorghum bicolor
  Intron number 3 from transcript Sb03g047310.1 (locus Sb03g 047310) derived from phytozome v7.0 (chr-ID chromosome_3; pos 74195098 to 74195341 reverse strand)
gaacgttattgccgaccctgacttggagagtgcaggtaattaatcaaagcgtctcgcccagctattctgatgatttggagggtacatgctagtcgtagactacagtttcataaagagcaacgagcatgcatgagtaaacatgtcttgtcattatcatcaaaataaacttacagcataaagctgcttgcacattgtcaaataaattttatcgaataaaaccttttcttttccttcgcagtcaaag

SEQ ID NO: 36092 - DNA, 1008 bp, Sorghum bicolor
  Intron number 3 from transcript Sb10g030840.1 (locus Sb10g 030840) derived from phytozome v7.0 (chr-ID chromosome_10; pos 60510746 to 60511753)
gaacaacaactccgcccttaccgtcggacagcgaggtcagactctgctctgctgcctccattactcctttcctttttaccttacacgatcctgtagcatatatgttcttgatttgtgtgagattcattcgatacgtgatctgtgctagccttgccatgtggaattagtcgttcttttggttgctagctgctctgatccctctaccagtagtattgcactgtggaagcttggctgtagctgttgacctgaggatttggcttccaattcgttcaaagcttgcggcttgatgtgcttttggttgatttccagtgaataattttgctgctctatatatacggattgattcacctgtcatataatttcgtcgatgaatttgagacttgcttattcttcctgtgctgcccaaaggtcttattccttggatcagctgtaaggtgaaacttttgtcctgatattttcgtcagtcgctgtcgtaccattaagttgcttaagggaaagggaaagaaagcacctttccaatacgaaatgccatcatggagttatagtgataatcttaggtgaggggcaattgcagggtggtaaagtcaaggcagggtaatcacagttgattattactggtgcgcagtgtggtatatttacttttgacagttacctgggctagtgctgaatcactaccagaaagcataacctttggattttctctcctcagcatgtatggcaaaactttgaaagtgattgcaagtccagtttggttcttctgaatgtcattgtcgcaaaaagtgtccatcaattacaggaacaggatacagcacacctatctgtaaccaatatgtttctttcggtgatgtcagaaaaataataagccttttgttttaggagtttgctttattgtctacctgcttcactttctgttttggtgtttagctaacaatttctgatttattgtttcacacgatgtgttcttctttggcaggacccatcctccttgaggattatcatctaatcgaa

SEQ ID NO: 36093 - DNA, 1011 bp, Sorghum bicolor
  Intron number 1 from transcript Sb01g012610.1 (locus Sb01g 012610) derived from phytozome v7.0 (chr-ID chromosome_1; pos 11619860 to 11620870)
tagagatcttcaacagaggtgtgcctcttgctcctttattactgtacatggtatatgcaatttgtttttgacatggttgtgtagcttcagtgtggttgaagtttatgtttgtagcttcatttgacttgggttagtggtttgggtgggggatgaggatagggatttgtgcatgctccaagtgatggtgatggtggcgctccagttagggttagggatcagggtgagggttcaggtgggggatgaggaatagtgatttgttattgccaggcctagactgaaggttcgggaggttgccagtttggcgatggcttgcagcagtcaggacagtgaggtggtgggtgcaccacctgctgcagtagcagaggttggatagaagggttggctgctggggaggctcaccggtgtggttaggagaggttgggtaataggggtggtggtgcgtacgtgcggtgatggcacctagggtaccgtctgtgtggtggttgggggtgtcagacaatggacatgtgtagtcatgtagacggcgagcatctggtgttgggcatgcttgtgttcgtggcagcaagtgaggagagtgagggaggcggaggatggatgagacgggcgaggttcgttgatcttagataggttttgcattagcattattatctggagagtgctttctgcctagatgtttttttgatcttttagtcacagctactaggcattaccaaacgccctacttctgaaggggtctaattctatttatatttagtactggagaaatgctgtaacaactgtaagttcagatactaggcattaccaaacgccctactttatatttacttgttatatgcttatatcactacttgaaatgtaccatcatttttctagacatgattaacttggtaattaaatggtgtcttgagtgcaaagaaggaaatcactagattgttcttattctcatgcagacaatgtaggatactatttgtgtagtctaacatcttgaaactttgacagttattggtttct

SEQ ID NO: 36094 - DNA, 730 bp, Sorghum bicolor
  Intron number 2 from transcript Sb10g000580.1 (locus Sb10g 000580) derived from phytozome v7.0 (chr-ID chromosome_10; pos 376639 to 377368 reverse strand)
ttggtggtgcaatacctgctcattgctcttggagggtacgtaattaagtaacatccatccataccgatgccagtgccatgcattatttccttccttttatttatattactcttgagaattcatcatacatatatatatatatatatatatatcatcatcatctcgtggattcatcacaagtaagtctatgaaatcaggcaggtcgtcagatgattcagtgtaacaaacaggcttagctacctcatgcatgccgcacgtaccaaggataaggaatgctgcttctacgacgtctctgtcgccatctgcacctactcttcttcttacctctacctctagtagtagagtacgtagcagtagtagttgagtcagtgacgatgccaacttttacccgaaaccctcaaattggcaaccggacaactcaaaattctacgcacaatctgtacgcatacgcaattcagtcagtaagcaaacaaccactattattgatattgattgggatcgatgacaaagggatggaggaagttatttgctgtttgataattaatcacatcatagtgggtttatttttttgattgattgattgggcgtgtggggaaaatggtggtcttcagttcagagccaaaatttcctgcaattacttattgaccaacagcaacagattggttggttgattcattgtgtattcatttcattcaattcatcaatcaggacaactgcgttccaagagctg

SEQ ID NO: 36095 - DNA, 934 bp, Sorghum bicolor
  Intron number 1 from transcript Sb04g010410.1 (locus Sb04g 010410) derived from phytozome v7.0 (chr-ID chromosome_4; pos 14277876 to 14278809)
ttgctattctgcttaggaaggtactaatctttttgaacttgagtgacttgtttgcaggactcatagtagcagggttattttttgtcattctcttgttggattagtcagatttgcgatattgttatgtgttcctttctgtgttttgttgcaacttttcaaccattgctttgaagcaaagtaagaattacaacttggatatcgaaatttcttagttttcacgctattcagtataagctccccattcctttgccttgaataactgagttaacctttcttcttgctggacaaagaactgttattaactgcactatttttagtcattctgtaacttaatttatcatgcctgatactgtcgtatgtttgcttctgagatttcagcgcatcaacagatggtggcttgttagaaattggaatgatgtagctattgaattcttggttttgtcaattggaatatgttttggcgtaattttctttaaaaaacattccttataattttactggatttcagaattgcccttaaatcttaaaatttctagaatactgaagaatacaacaagcatctcatcgcattttaggcgggggtactgaatccatcacaaacaatgtctcaaagaactttggattcctaatatttgaagcgtccgttgactcctgtttagcaaaacattagtgcttagattttgagattctttttgcaactaaagttttggcaactaggttgaaacttgaaagttcctgtgctagttttaccagatgttaagctctatatgtgcttctttttcttcctctgctatatatgtgtgtatatatttaaatgtacggcaaccaggaaaaaagagacattcagcagtaatgctaatttgacatcatcacttttactggtgatattttctatcagacagtaataatgttacatttttgcagctcattcgtg

SEQ ID NO: 36096 - DNA, 998 bp, Sorghum bicolor
  Intron number 1 from transcript Sb06g027725.1 (locus Sb06g 027725) derived from phytozome v7.0 (chr-ID chromosome_6; pos 56540489 to 56541486)
agtatctaactgcgtctccaacgctgcgtggctcggtaagggcagctttgatctcctctcttgttttcttcctcctctgcgagtatgatgacctgttgatgctaccgacgcctacgattcagtgatgtttatgtgatagtgataccggtttgctactgattagttcaaatgaatcatctgttctggcctgtttcgaattgtactgcatcctttccatgaactagtgcaagtaaaatattggaaatgtttttctttacagcatatgttttttttttcgaagggtgcccctttgtttgtgaatgggcatactgagctgcctgtattttttataggccacctaaacttactcaaaattgtgtggcatcaacatccaacttatggaattgaatgaattgtaaacttgttggcccacatttatctgagactctgagtggtgttacaattcgactagcttattcttgatattttgcatatattgtttatttcattattgggagagccttgtatatgtattatatacaactagtttttgtgcacccaaatccttggattcaactatggctcattatttttcatgagcactccctgtagaatttatatggccctaattattttatctattgcacttatgttcagagtgccgtagttgttcgtcttcacggcatgctcttgtacatatgcttatttatgcttttgtttttgcggggatgttttttatatttatcggttgcattatttgctcttccttccatgactagtctgcatcgtgtttatttgtagtttagcacacatggcttgtagatgaagaggatttctaggcagagaaaataattatttatttcctgtattcttagatgaagaaggaattacaggaaaatttggtttaccttcagtagctgtgttccaagtttcttttggttttctacttcaatgcctgattagttcgctattaaattggtgtaggttctgccttcaaaacttaatttaaagagagtgtc

SEQ ID NO: 36097 - DNA, 730 bp, Sorghum bicolor
  Intron number 1 from transcript Sb02g016400.1 (locus Sb02g 016400) derived from phytozome v7.0 (chr-ID chromosome_2; pos 37453058 to 37453787 reverse strand)
ataggtaacacctcttggcttcctatttttggattcaacatctcgggtttagggttctagatatttaatcttgaaaacattataggaaagatgtagcctaagagcatcgatgctgtagggacatgtcggaagcagtgcgccacggggataatgtagatcgaatgcatgggattaatgatatgtagggattaatgagttgggtctctgtccatacacatagtatacatacatgttggtttcgtttaatttcagtcatggggataatgtagatcgaaagcatgggattactgatatgtagggatatgattttgctctatgtccttacacatagggctataagtttagtgattaggatattgcgtttcagagcttaggatattactcaaatcctaatatcccattttcctagcctcatgttgtttaagatttgatatctattttgatatctatgagttgatatgcaagtagataaatcttagtttttctctaataatctgttgtcttattccgcctagtcatatctagccatcttctatgtgctctaaatgagtaagtgccaaagtactgacataattctaatttggaatgggactgtaagcattttctatcaattactttctctgtctgtacacatactatatgtacactggtttccttttaagtatattgttgtatcatcactagtgcttaagttcgatactattgtaatatttggcagctcggatcaaac

SEQ ID NO: 36098 - DNA, 895 bp, Sorghum bicolor
  Intron number 1 from transcript Sb02g035660.1 (locus Sb02g 035660) derived from phytozome v7.0 (chr-ID chromosome_2; pos 70024763 to 70025657 reverse strand)
tgacaccgccccttgtcaaagaagtagacgatctggtaagcttatttctgtctattttattgaattgaacttttataggttcctatattttagttctactcactagagtggcgtatttctgttacaaatgaaaattcagagcaaggcatgcatcagataccctgttggtaggaatgtagaggtcgtcaaggctgctcaaagctcaatggaacctaatgttttatggagtatataggatgagcttagtattagttcgtcacagaggtgtatgtgtgcaatttccttatctagggacatgcatgttgcctgaaagagaagctatcagatcactgaagtttgatgggtattttcaaacttgtccatgattttgctgattcttgtttcatattgcccttggacacctgcagcaccttgattttaactgtcaataagatgaagtttcaataaaaagaactgtaacgtttactttttgcgctactgtgctaatattgtgcatcactgcattggttcagcagaatgcttcttcagtatttttgtttcataatgctatatatattttgtgactgctgtttcttagcaaaactgtgattattataagtaattattgtactaatgtttgattaacttataaatgttccctccatttcataatctagggtggttttcttttttaaaataaactttgatcatctattagtaaaatacatgtatgtttagtgcacgaaagatacatccttagattcatatttcacatggttttgtagtaatttttttgaaggaagttttgtagtaattgagaatgattccaagataaattaatggtgaaagcattccttgaaagactttccttgcatatactgacatagtgacattttactttgcgtacaggtggatc

SEQ ID NO: 36099 - DNA, 904 bp, Sorghum bicolor
  Intron number 1 from transcript Sb01g017460.1 (locus Sb01g 017460) derived from phytozome v7.0 (chr-ID chromosome_1; pos 17992357 to 17993260 reverse strand)
tttcctgcctcggcttgcgccttcaacctttgctggtaagttccatcgcttttactcgacagaagctttttcccgtcttgattttggttttaggtggtgttagtctgaatcgttcggtcgcgtttatcctggatttggacgccgagacaaggctgtatgaggaattattttgaatttattgcggatgatggggggtggttgtcggttggggagggttttaccgttcagatctagtaaaattgcagtggtggaagggatgagaggagtggggcagttaggtttctgggtccacgtttgttttatttttggtgaggatggtttctggttcacctacatcgttgaaagggatgcgtgctgacttgtcaaggtcctttttgtttttgtttgtgtctgcgagattctatgtatctacttggataattttaaaatcgtccaaggtttcaatgccagctgtatcatccgcgactcagatttgggtttggtaccacgaacttttacagagttgaccaaactgcatgaaattcagtggattgtcatgttttacagatgagtgaacttttgtcaggcgcctgagtgaactttttacagattcatgacgtgggcaattgggtaaagttggcgcgaaatcattgtgctatagtttatttgtaattatatatgctagattaccgcactgttggttaatccgttcttatcataacaattgccaatgcacagtggtctacctttcttccacatattactcagatgagttggctcagcagtagcataaagaaatagcacattgtggtcatttcactagctcccaaacagaactctgaagcaaatttttgttttgggttgcagaaaattctgtcctcagaaagtgaaaggggcctgtgaagagttttcttgcggcagtgca

SEQ ID NO: 36100 - DNA, 1056 bp, Sorghum bicolor
  Intron number 2 from transcript Sb09g004130.1 (locus Sb09g 004130) derived from phytozome v7.0 (chr-ID chromosome_9; pos 4622972 to 4624027 reverse strand)
cctacatcgagaacgtcgtcaacaacgtctggaaggtacggttaatttgaaagtgtttgctgatttgttgtgaaagaaaaacactactgaataatagcagctaactgctttaagctttaagtggttaattatttggaaatcatacagaatttttaattaatttgagaagcaagataggtaaatttaaaatcaatgttttgttttggaatataataaaagtaaagaaaatcacattttttgcatagtaaataaatctttttgggatctcaaaattaaagataacatgattctttcatgggacgacaacgacaaacgagtttccaacgtcgttcagtttcctgttcctggacagctcgactgctggtaaactggacttataatttataaaaaaaaaaaagttgggtgcggaccattctcacggaacgtacgccgtgcggacatggagctaaagtgtggctcatgaaacacatgatttaccatgcatgcatacagttaaaatgatgctatggcccacgtaccagatgaacatttacttttctttaacttgatgcatgagtcctgatgagaataataagctatgtcaagttgacaattatatgcgtgccgacggcaacactagtgcagagttgtaaggggggacaccaatcattttgggacaagtagacaacttccatgcgtcaatcaaatcctgttggacgctagctagtgtttgcaatctgcagtttcttcgatcaagatctgtgcatacgtacgtacctgctgcccaatataaaaacgtccacaagtcactgctgactgtcactatctcactgactccataaccacgtgcatataactaatccgtcataaacaatgcatagacgacgccaattgccacgcactgtctaatccggacacattaattagttatacagtgtcaagaaattactggctgtatatgatctacttttgtagtatttgttaacaacaatctaatgggatcttggttccatctctcctgtctgtcttaattaatttgcagttccacttcgtggggttctacaactgctggaacag

SEQ ID NO: 36101 - DNA, 416 bp, Sorghum bicolor
  Intron number 1 from transcript Sb10g023780.1 (locus Sb10g 023780) derived from phytozome v7.0 (chr-ID chromosome_10; pos 52537603 to 52538018)
ccgcggtatcatcgcagttgcgcggtttctcaaccttcttctgctctcccttccatttttcgccatattatccacaacacaaatcaaagaataatttctcgtcgcaaccttgcctaattgaacatgtttcctggccaatatatattcttgatgcacgaaaagagttacgctcttcaggaatgtagagcatagtaaaaaaaataagtactgcaattaccgtgttcttattatgatctatagatacatagaatagtacatctacatcattctgcttaccgttggtcatacataatgtatgtttttttaccccttggtttaccaccagttatatagttttgacactgacattagttatgttgttttgtttgtgtactaatgcaggagaagtttgtctgcacgtatcattgtccacaaga

SEQ ID NO: 36102 - DNA, 513 bp, Sorghum bicolor
  Intron number 1 from transcript Sb04g008250.1 (locus Sb04g 008250) derived from phytozome v7.0 (chr-ID chromosome_4; pos 9228148 to 9228660 reverse strand)
aggtcagaaataatctgacacttgtttttcttttttaattttggttagttctgtttggttggcctgatcactgaggcgtttcttggatgatgagaatcgcaaacaaaatttgtcggcgctggaacttcccgcgaaatgtgattttagtgaaacttgaaggcatcatcaccatttaccatgacttgtcaattgtcatgtaatttcctactcaaaatccatacaccaattacacgatatgaatgccttcagaaactctccttactatccttactcaaggtgataactgacatgtacaatatgctaaagataattaaaaaaattatcattgctttcatgcaattttgtattatatgtttgatttagtactaggtgtacgtgctctctaacctatgaagattcttcagtgtatcccagcttttgtacttgatgtttctttggttcctgaggctgagtttatccaaatgtatattgataataggaggcaagagctctccttggaagattggaatttca

SEQ ID NO: 36103 - DNA, 617 bp, Sorghum bicolor
  Intron number 2 from transcript Sb01g008500.1 (locus Sb01g 008500) derived from phytozome v7.0 (chr-ID chromosome_1; pos 7349166 to 7349782)
agcagcatataaaggcgatcatcacttccgacgaggtgaattttagtgcttattatttcctcctttcgattgtttagctgctaggagctttcaagtcgttttccccataatctagagtaatcgcagatctctgcggtttatatacgcaacttcacttatgcaaacctggatgattagttatctatataaaattttgaagagaatgataatttctttttccgaatacatagcttcattctgccctcgaatccctgattttaaataggagctcactatctatgttacacggatactccaaggagggtgacgtatccgtatccgatactcgtcggatacgcggatacggatactcggatacaccattttagtgaattttcttttgagaaagtgtgtatccgcgtatccgatacgtattgtatccaatactcgtacccgtactcgtgtaacgtagctcactatactagttctcaggtcatgctgctataaaataatcgcaaagccacagtttatttgattgaattgaggatcttagatatcccattcttagctgtcgcaaatgtggttactcacaaatattgtatttggattggctcaggttttgcttagggatccttctg

SEQ ID NO: 36104 - DNA, 950 bp, Sorghum bicolor
  Intron number 1 from transcript Sb05g024840.1 (locus Sb05g 024840) derived from phytozome v7.0 (chr-ID chromosome_5; pos 58017000 to 58017949 reverse strand)
accccggcagcagcgacgcctccaaaaccgtcgtggtgagtggtgagttggtggctgggctggggttttcggtccgtactggtacttgttatgctgccgccgtgattggatttgtgctcaattggttgatgctcttggcgctgtaaagatcccaatttggtcgttgggggcataatgcactgacgctagaggaggggggctttaaattcaagtgcttggcatagtattgtcgacagtagcttttgattagtgattatttgttatttgttgtgcttctctgcgtcgaggttgcttggtttgcttgtgagcattttttttttttgggtgaaactgagcattgttgatttaaagaagtttcaacagttattttttgaagacaggtttagtacttgctactacattttacttgcttggaattgagatgcataggagacgtgtgtttttggtaattggtacctacttgatactctaggcaccaaagttagggaggatgtttgaaccactggtggtgttgattcagtatgagatatggtgttatttatcctataattagttactactaatacaattagattctcgatgaattagaactatgtgctggtaaaaccttgcattgtgctaccatcagtaggtattgatgttaagttttgtaaagtatcgagttgtgtttgaacttatagatatcaatagcaccaaatttggcttatttaggtttgcttttcatagactgtcaacatgatgttcgtgtctttaattcagggatttggttatgttcacatttgttactgatttgttgggttccacgtgtaatgttggggcctgatgagttctatgctttcttgacttttgtgttcttttatttatatatcccttgtcattattttgtttcaaaattgtaaggtcactcatgcccttaacttgggcgactgtattataggtaccacaaggtc

SEQ ID NO: 36105 - DNA, 631 bp, Sorghum bicolor
  Intron number 3 from transcript Sb04g004110.1 (locus Sb04g 004110) derived from phytozome v7.0 (chr-ID chromosome_4; pos 3910108 to 3910738)
cagaaagagaggtaaatgtcagttgtcacccttcaagtgatgcactgttttcatcgtgtgaatatctgtcttagtgctgcttacacatgtgctctgcatgtgtttgtgttcttgctaggaagaaaaagggaaacatcataatccatccaattttagttgcagtagctctgatttctagtatgctgtagcttgatatatataatttgattttcttatttggagataattgcttcagtgcatagcttgatagatataacttgattttcttgtttatttgtgctcaaggcatgccatactcttgttgtcatgcatatgtcccatttaagattgaaaattctttcagtcaaggtagctaatcactgacttttgattttttttgtggtttagcaatttgcatagtatcccaagattgtacaagatttggttattcctacatacaccagatcctccttttgcattttgcttactatagtcatgtgtactgccattgttctctcagcccaaaaatgccactattcacatttagggatatgccgatgatagatatttcttactttggttgtttctactttctagttgtatcaattcaattaatattacaaactgaatctgtgatgttccttaacagtga

SEQ ID NO: 36106 - DNA, 944 bp, Sorghum bicolor
  Intron number 1 from transcript Sb02g029730.1 (locus Sb02g 029730) derived from phytozome v7.0 (chr-ID chromosome_2; pos 64822543 to 64823486)
acctctcgccgcgccccgccgtcgacccgcctcaggtgagccctgcctctactctctctgtctctgtcttctctcccatcgtctcgcgcgcggcggggttgttccgggccgcggggcatgttccggctggctgtggtgttgtgcggtgccgataggtcttggcgcttgggcgccgtgccggtgcccgcttggggtggtggtggtggcggcggcggcctgacgggtggaagccggtgcggcggggttgaaggtgttctccgatgcgatgttcgagggtttggatgactcaattacggcccgatgcagtttttttcgcgttgcttaggctcgccgttcgcggcctgggtacgggaccgggacggggacggggacggggctgccgtgcttggcgcgcgcgggtgtttgttggtgaaaacgtcgggtgcggtgactctgtttgttgcgatttgcgttgccttgttgcttctgtcgatgacatagataggggagtatgttgtcagcactctggatttataaaataccggccgtacaatacatataatatgattgtacatgtgtatctatctaccttagttaattatccttgtacatgaatctgtttatttgtttggacatggagtatagttttggcagctggtcatagttatgtgatcaccgtatataacttacaaggaaaccaatggtagatggttttgatagtagttcactgaaaggaacggttggcacttggcagaaccagatgctgccagcctagagctcttttgttttggtcagtggaagtaaaattttccttatgaggcttgggaatgctgttttcttagtttgaatgttaccatgtaactgaagtgacacttttagtggaaattgttgtactgtggctaacttgttctcttttgtttgcattgatgacatagaggcaaagataagtcaaaggagaggtcggt

SEQ ID NO: 36107 - DNA, 787 bp, Sorghum bicolor
  Intron number 1 from transcript Sb09g022290.1 (locus Sb09g 022290) derived from phytozome v7.0 (chr-ID chromosome_9; pos 51990720 to 51991506 reverse strand)
ttaaacgcgtcatcatcaaggtgattgaatcgtacgattggcgacggccgccgacctgttagatctgaatcgcgcgatttgtttggtgctatttgcattgcgttgttcctttttttttttcatattcttgtgtgttttcgactcgtgtttttttatagcgcgaataattattgagtaaccgtgttcgattctgggttttcttcgtctaggtaagtgtaagtggcgaggcagcagggttttgtttgggttttatattttgcttctatcccttatagtcgagttgacgggttgatggtgaaagttgatacgctgactcctatgtttggaattttggtgtcgtaatcttagtttgctatatggtttttatcagattttgtcagatgtgaaatgcgagtgcgtagagaagccatcctgtctgatttttttttcgtatgcgaatcaactcgttcgaattgccggattctttctcctctgtttttgccggattgtttcttctctgttttttttattcgaattgccgggttgtttctcctctgttattttgggaatatcgggagctagattagtctatctactatgaaattgcttgcccggaaaaaaaaagttggttttgcgggggtcggggttgtgcaaggtcagtaccagtgtgccgtcccaccccaccacaaagttggcaacttttgggaattacctatccgagtatatccgtctggatcttctggttttgattacagctgattctaacccttttcacaacaacaggtgggcactgcagttgtcacgaggc

SEQ ID NO: 36108 - DNA, 722 bp, Sorghum bicolor
  Intron number 1 from transcript Sb08g015560.2 (locus Sb08g 015560) derived from phytozome v7.0 (chr-ID chromosome_8; pos 41695193 to 41695914 reverse strand)
gagctgaaggccagaactgtggaaatttccttacggtcagtatccattgacacttgtgaacatttgattatgctattttggagcaccaattgagtgctgtgcaggtggagcaaaaagggtttctatttgctcttgttcatagcatatgatccagaagtacttgtttaggttttgctgcaagaagcacccttcataatatgattatgttgctatgttctacatttacatttataagaccctgatatttgacattatagcaagaatggtcattaatcctagtacaccattaatacctgccagaataatctctgttgtctgttggtatgtgttgacaagagttcaacttgtgggtttacttatgccttgcagtaatcaaaactttcaaatttctgcaccagtaaatttcaatgtcacgcgctgatgcaatttacattaatatatctacttggttatttgtccttagaatatccacttggatagtcccttcgattctttttattctttgcttatgcacttctactctcatagtgaacagtttgctaaattcctggtatatgacaacggaatcttcatgactgtttgttaacgttcttagtttgtggctgaaaatgcacaaagggcagttgcaaaatctctacatgaaatatttgtgcatttgctgacattagctgttgtgcaatgctgcaggaccggccatcaaccaaggtacaagctgctccagg

SEQ ID NO: 36109 - DNA, 442 bp, Sorghum bicolor
  Intron number 1 from transcript Sb10g027690.1 (locus Sb10g 027690) derived from phytozome v7.0 (chr-ID chromosome_10; pos 57499038 to 57499479 reverse strand)
gtctccaccgcagcacttctgttcgcggcggccaggtgcgggttcttcctccgacgctttccaccagaaatctgcccgattttgctcttctccttcttcgtcttcttttttattggttttgtcgcgtgatttactgttcgttttcctgtttacccgtttttttcccatccctttgtgttgttttcctattcgacaatcgtggtcaactgcgaatatcatgttcttggcctttggccatacgtatactgtacttttggaaagggaaaggccacccttttattaatccataatccactccttcggtttgctccgaaaatttcactttgattagtctggaatctgaacctagtgtcggggtcgtatttgggctgcatttgcaagctaaatgattcgctgccgctttgcagtggcggcggccttgtggcttacgcggattccgctg

SEQ ID NO: 36110 - DNA, 640 bp, Sorghum bicolor
  Intron number 2 from transcript Sb04g021000.1 (locus Sb04g 021000) derived from phytozome v7.0 (chr-ID chromosome_4; pos 49145545 to 49146184 reverse strand)
gtgtttctttcgccactgtaagtaactcgatcggtctctgctttcatttgtttgccttttaacctacggtgaattttttttcatatctaatgtaatttatatccagtagtatattactgaaatcaatatttatattccgtataaacggaaaagtccaaaaatactaccctcaggaacatcgcacgcatgcgtatctcactgaatctatacatgggctgtcaccatcgtccatactccctactcttctagaatttttttttcatacctgaagacaacatagctaggaaactattctcgcattaatcaggagtccaatggagagagaacaaaaaaagtctagcacgtcactctaatgagttgcgaggcagtgtcactgttcggtaggtgtgttgtacatgctgctattattgagcaacaaacacttgcaatctaatcaaatggtaaaactaatactaactactagtattagtcagcagttaatcatggctgaaggattattgatagaccgcagaaaactgactactgagacgagacataatatatgaccggccgagagattaattactgatctgatccgtggttggttattttgcatgcattcgcaggccgacgttctaccgcgtgtaccgcaagaagtcga

SEQ ID NO: 36111 - DNA, 837 bp, Sorghum bicolor
  Intron number 1 from transcript Sb04g021000.1 (locus Sb04g 021000) derived from phytozome v7.0 (chr-ID chromosome_4; pos 49146188 to 49147024 reverse strand)
gcagcagacctgggccttcacctttggtatcctaggtacactacagtactacactacatattactcctactgagtaataactgcatcgtcaacccatcgacggccggccgggctgcgcgcgcgcattcagatcgatgtggcgccttcctctcctgatcatcagtttctgcattgtttccttctcccatatccttttttgatgagatgcatacatacataaataccatcttcagtccttcattccaggctccaccaaaccacaatcgccaaaataaagcttccgtaccttagtatagtagagagctaatataagcttttggttctcgaacttttcaacaaatataagcgtttggttgattatatatctaggagtagtagttaatcagtttcatcaccgcctttgagatgcgtactgcagggacaactcaacaacatgtcctcgtcaatctagcagctacatcttcctttccgagccacaccacagaagtagccatctgaaaaaaaaaatggaaccgccaaaaccaaacttttaggacctaaatggggtggttagcccaaacaaagaaacccaagccgtcatacatgttacatgtaccttcacgagaaccgtaccgtgcaacggcgcccctctctgtgtgtgtgccgcgcgtcgtacatgactaggagtttgtttcatttcttctgcctgcagccaaccccagcccggatgtctttctccttctcgcatgcttttttttttctttgccccctatcaatcaaagcaatttaactgactacgtccctcctgctccgacgatcttgcctttgctttgctttgcaggtaacataatctcactg

SEQ ID NO: 36112 - DNA, 701 bp, Sorghum bicolor
  Intron number 1 from transcript Sb09g026150.1 (locus Sb09g 026150) derived from phytozome v7.0 (chr-ID chromosome_9; pos 55489383 to 55490083)
tcccgcacttcaccgactacctccccgacatcccggtgagcgccggaaaccgatccccgcccgcctcccgccgccctgtctctgtagaggcgaatttttgggttggggtgctgcgcgcctgcgcgttagtacggaggtcgcgtcccggtctgtcgatagtctttgtgcagcacgcttctgtagcttaacgatttttttgtgtcgagtaggagtaactgattttggggttattgcttgccatgttttggcatttggtcaattggaatttctgttacggagatccattttggagactaggatggtgcagcaattgagcgtgattggagccgtttaacaatcagttgagattgaggcgggccaaatttagcaaatgaatccttatactactttctataagatgtgggtatcatgtgaatcattgcccgattcgttagctggagatatcatttgtgtatagtatatgtttttgtgcgggaagcaaaggtatcactgttttctggttcgtgcttcctgccaaaactgttaccactcaaccaaaatggaagtttgtagcaaaaggtggagtactctattggtggcatttgtctacttttgttgacgtatgctgaatattaatggaaactatgatggtcgatttgatgatttgctgtttcttcttgttggcagacttaccctaatccactacaagatcatccagccta

SEQ ID NO: 36113 - DNA, 537 bp, Sorghum bicolor
  Intron number 2 from transcript Sb07g024320.1 (locus Sb07g 024320) derived from phytozome v7.0 (chr-ID chromosome_7; pos 59433744 to 59434280 reverse strand)
acccgggcgagctcgccatcatctccaaggaaccggtacgtatacgtatccagtatcctcatcattcctccacccgttccaaattaaatccaatttgctctctgtttcatttacccatctaccataccctagttaccccccatcttttttttttcttatttatttctccaaaattctctgatccagttagctatacttagactctgaatttccgtacactgattcttcgctctcccgcctgaaattcggtgacataccaaattggactctgaaataggatcatatatgaacgtttcttcaacccataatcaaaatccttaggatcttttgtttttggggatcattgccgctggcaaatcagggacattttcgtttcagacaaactcaacaagcagataaacacgaatatcgaatcggataccctatcctttaccgaaatgatgctacttttttttatcgttacaactgttctgcagctggttattttatggcgatgcctctgcttaatttgatcgttcatctttcaggtggccccat

SEQ ID NO: 36114 - DNA, 1007 bp, Sorghum bicolor
  Intron number 1 from transcript Sb10g023705.1 (locus Sb10g 023705) derived from phytozome v7.0 (chr-ID chromosome_10; pos 52433127 to 52434133)
ccacgcgaccgcgccgcctccggtgattcccctcactgccctcgttgtcttgcttgtctgctgacggctggtgcccgttttcggaagaggatcaaatggggaaactatgcgacgttttacctattctgttagcgagtttgtcgccattggtggatgagttcactgtagctcgcgttttgtttcagatcagcgccagtctatctagggtttagggttaagcgcctgtgcagctcatgccattttactctttgcattgcatcaatctccaacctagggtttgatgtgaagttatctggtgcctggttttctgaatccactagtggattcatgatcaagcgtggcaaaagtctaccaactgatgggatttagttaagctacttcctgacaattactattgttttggacttcggattgctgtggtttgcgatcgtttagttattggttatgctctttggaatgggcctactagttgatgtctagtgaactttgaggtcaagtttgggtttcccgatccttttgttgttagtgtaagggtctgtttggaactaacaactagtcccatcagctcctatatgtggactaatagactaacactagtccatgactaggagaacaattattctgtctatttggatcgttagggactaaaaattagtcaactagttgttagtcctatggacccaaacagggcctactgatgtccaactggtattataggatcataggagtaacaagagtagtattagtgataaactgttatatactctttaatttatatatgacctcattatttatttcagttctttgctctaggggaatagtttcttagcagcactcccatatatattgttgttatattttttgacgcatctattaaattatggtcatgtgatgtatttgttggttatcatgtagatcgatcatacttgacgagtttacatatagcctccaatcatgcagagtcttcaatgtggattacttaatggtgttttgaatgtatgcagata

SEQ ID NO: 36115 - DNA, 516 bp, Sorghum bicolor
  Intron number 2 from transcript Sb09g006310.2 (locus Sb09g 006310) derived from phytozome v7.0 (chr-ID chromosome_9; pos 9655663 to 9656178 reverse strand)
ttagccgtgaggtatgtgaactttgagctactttagaaattgatgctttcagaattcagatagagcaattctttctgtgatacaagtatacttatcaagttgacgtaactgaaatctgcttcgttgaactttttgtttttgttttgttgaatcagcacttggaagtgtgctgtcctagtgctcaactgcttatactttccactgtttgcgtttgcctttttttctcactggtggaaactcatttggttgtcatttgtatgtgatgtgtcgaaacaataatatgtgatttttacctgatgccagatagagtttcctattatagatttttgcaacttcagggtttcacatgtccccgtctctttatatggaacaggcccattatgtaaccatctttatattgatattgtgtaaccattcagtgaaatgaagatattatacatgcaagtctataagcatctgactttgctttgaattctcttaggtccaagtttttgagcctttcagtattcttggact

SEQ ID NO: 36116 - DNA, 1060 bp, Sorghum bicolor
  Intron number 1 from transcript Sb02g035420.1 (locus Sb02g 035420) derived from phytozome v7.0 (chr-ID chromosome_2; pos 69853782 to 69854841)
aacgccaacggtgccgacgaacggaggagcacgaggtgagagagttggggggattggattaaaggtgccatcttttgcatccatgcgcatggttcactatctgcaacagtggaagttagcaacaagactaatgttttatttgcctatatggaacgaatttgcctcgattccagtagtaaaataaataaccgacgagtgtcaagatcactgaaccctgaagggctgtttgtcgtttgttttctttccattagtttgcacaacactttacattaaaaaaatcgaggaatcaagtattcaagtaagagaggaacaaatcccattagtctgctagtttcctttgttcctttctctgatcttgacattacaatgcagtcccgtagctatcagttgcctcactagtcaccgcgaacatgggactatggaagttcacacatgagtgcatgacccattgacctgactcctgagttctgaccagttcaacatcttggctgaatcgaaagttctagtcaggagccatgtgtaagaagcaagggaaaagtgatagaagaaactcctttatcaattggtctgaccatctgaggttaattagcattgaccatatacacgtgcattttctggactggtcagttcaggcaagcttgtatgaccgtgcaccgtaaagcaaaatcggaaataccattgtctgtcatctactcctagatgaaattcagattaaggggtataagctaagctgcttcctagagttctttctttgacctgaaacatagtgtacggacaggtatcagttactttaatttgctagtcgctttatatggcaagttaagcctagttactctttaattatgataatgcagcaataaataaaagctgtagcactatgaacatcaaacagttttctcaataatgttttcttctggttgctgctaatacatgtatatgacgtgccggacgcattaacttttttggattcctgttatattactttaacattgatcaaattattaattgatgctttccatttacaggaacaacaggaaaaaaaactggtagagttttagcc

SEQ ID NO: 36117 - DNA, 982 bp, Sorghum bicolor
  Intron number 1 from transcript Sb02g029870.1 (locus Sb02g 029870) derived from phytozome v7.0 (chr-ID chromosome_2; pos 64956681 to 64957662 reverse strand)
gagcttgctcttgttgacccaaagagggctaaaaggtctgttttctcacagattgtatgtttgttcttgtgaaatttcatctattatgcattttcttttgggtacttggttcagttggccaggtttatttttagaacagatttggcgatgatgatttggaattggctgcattatttgttgatcattttcatatcaaatgattgcatcagtaaatctgcctttgctatattcttagcttttttttttttgagaaattgctatattcgtagctaaagggaggttagtgcattatttattgaacatttttacagaacaggttgcgtgagaggcaaggtggatcagtaagatggtagttgagactgaagcagaattacatagtgaacttcaactaagaatctgattcttaggttcaaagagccaaagactgtattgagggatgctttgcacaagtagtattgagggtgaaaatgtctgattcccagagcttcatgtttgttcttgtgaaatttcttctacatatagtccttttacatacaaatcagttcggttggccagtcttactttgaatgactacattatctgttggtcatttcacatcagacaattgcatctggaaatctttctctgagatattttgctaagggaaaattactagtttggaactttgaatgaatggaaatggtataagcaatcaaggtttgcttcatagagtgggcaggttataagaaatattggtcatattacaagaaagataggtcatgggcaggcaagatgaataagaaatatcacattcagacggccaaacaatcaaagagtgcaaatgcgctttgttccctcagttttagagtccttccattgcctcctttcagaatgatcatccttcaagataaattgaattttatgctgtgaataatcatgcttatactgatatctgtatcatttaacaggatttgggctaatagacaatctgctgcaagatcga

SEQ ID NO: 36118 - DNA, 601 bp, Sorghum bicolor
  Intron number 1 from transcript Sb03g038780.1 (locus Sb03g 038780) derived from phytozome v7.0 (chr-ID chromosome_3; pos 66586596 to 66587196 reverse strand)
gcgtgatccttgtcaccatcggcgacattgcccaggtacttaattacaagtgcaaatctctcagatatctcatgaacattagtgactgaaatttgcaatagcatcttccaaaaagaaaagcacagattacataaccaccgtaaatcgtaattattcttatcgtctttgtctggtcaaaatttagagaccatttatttagtgctctagtacacgctagaggtggtagtgccactgcaacagaaccagcggcagagatggcgagcatccgttttgtttatgcagcggccagcggcatcaaattctaaagtaggttgcgcatcagcaattcagcatcaccactcagtttttatttttgacccagttaggcaatcaggtcccatgtcagcatcagctggtgtatcactcactgatgcgcccagttcggaacacgtaaagacacaaaaacagaagagtcaaacatctctgcttttcaaacacacacacaaagaaaaaaaaccattgtgtcgtctgagctgttcttcactcttcagacaacagcagcaacaggactcatcttttgttgccatgattcctttttggctcgcgtgctaggtgtggagca

SEQ ID NO: 36119 - DNA, 921 bp, Sorghum bicolor
  Intron number 3 from transcript Sb08g021310.2 (locus Sb08g 021310) derived from phytozome v7.0 (chr-ID chromosome_8; pos 52908524 to 52909444 reverse strand)
ttgcttctttcccaggttttgtaacttcaagagttgcacaattttgtgaattctcaaagcaatgttttaatccatgatttctttgcaccagtgggataattttgcctggaagggccatttggactatgatgttactgcttgccaacttaaggttatcaaagtttttctttccatttcttccattgttgagagtttagcgaactccttaaatggtgtgtatttgttcatatcagtttgcagtatgcaacattgagttgctctctaacatgtgttgatagttaacactttctgcatgtacaacatcttcatcaccccagcaccaaccccagatgcagagtagcagtgttctggctagtggtcacatcaacatagtggcatggaagcagcctaatatctctgcaactctgccagacattcactcccctatatgttggaattatctttccaccaacacaccctttccccaccctatctgcccgcaagctttacaattgctcaaattgccagtactaaacattacttatggcggtggctcttaagatagattatccacaattgttcacatatttctgcaagcaataagggacacatattggcatcgaaggccaaaatcttgactagatggcctatttgagaatcctataatctaccaaacctagaattggctatggtcgtaaggcagcagttgagtttgtgggcggatagggtggggaaagggtatgttggcggtcaggggtttgtgatatactattatcattgataattatgaaatttaaattgtactaatatatttccctgtcaaaaaatatgacttctccgtcgaccctatttatgatgtggtggccctaagtttgtttggaatcatcaaatttgtactgctgtacaggtcattggaggtggaagaaattttgtgggtcagct

SEQ ID NO: 36120 - DNA, 552 bp, Sorghum bicolor
  Intron number 1 from transcript Sb02g024930.1 (locus Sb02g 024930) derived from phytozome v7.0 (chr-ID chromosome_2; pos 59615268 to 59615819 reverse strand)
aggtgagcagcttaacatgatgttttcctttctatctgatctcgtatgaggactctgttctgcttatgcgtttgtgacatgtggagtatctgtttactcttttctactagatttgtaaagtatatgatgattttcctagaaagtttaccgtctaattttccacactttcacatctaatgctgtaatcaagctgcctagagaaagaacctagtagtaagtcatgaaaaatgaagcactcaaacaagaagaatccaatagggtgtgcagctcgccatgttgttcctcatccggtattaatactatatctgttttgtttataaaatttgtgtatatgaagattatacaatcaagttatctgtctagtttttcacactttcacatctattgcgtcatcaaactgcttagagaaatgatttggtactagcaaatctgtttgtcctgatttcaccattgattcgattcagtcgatacaatcaatgctctcagcatctaaccaaactgaatgtaaaatgaacagactacgttgcacaagaagacggcgccttcttcagt

SEQ ID NO: 36121 - DNA, 891 bp, Sorghum bicolor
  Intron number 1 from transcript Sb03g043790.1 (locus Sb03g 043790) derived from phytozome v7.0 (chr-ID chromosome_3; pos 71052340 to 71053230)
cacggccacctcgccgcgcggctcgagccgcacaggtaacatgacatcaatgctcgttcctgctgccgtctggatcaccgcgctcttttttcccctgttcctgcttgcgcgtctgtgggagcgcggggggctctggctatggaaaatttttttacagtgattgcagtgtgattagcctgagatctgcctgcggccgagcaggcatgaccggtcgctgccgagcggggccccacgctgtggcattccgcattcgtcggatttgtcggtggtggtgggcgagctgttgctggagctcatgattagccctaatgtggctgattgggaaagggaattgcttctcgaccgtggggtttctgttgggtagttagcagtagcaatagttgatgtaatgatggtggcatgagttatatgggtgcttactagctgggcactgtaaatggtgccttttggttgtgggaatcggcgttggtagtttggagggttgcgtagatctttcttgttttttttcccctgaatgcagtactggcctaaagtttcttttttcccctttccttgcaaaggcttttatgagttatgacacccacaggcaataagtggttcatgatgaaagaagcagcaatcctgggtaaaagttcaaagtgccctggttttcccattttatgtcatctcagatgaactttgctgctcagtcagaaaattatctgaaaagtagtagcacattgtgattgctatatttatattatatactgttattgtttttgtttttttactttgaaaatgaattcttcagcctttgatatttgttgattctgaatccagtgttacggtctctctgaaatgattgttttttgtgcagatttttcatcaccagctcgattcttgatcttacaa

SEQ ID NO: 36122 - DNA, 1039 bp, Sorghum bicolor
  Intron number 2 from transcript Sb03g035890.1 (locus Sb03g 035890) derived from phytozome v7.0 (chr-ID chromosome_3; pos 63891932 to 63892970 reverse strand)
cgacccggtgccgtgcgaaaggtgtgctgggagtatttgcagtctctcctccattgcattcttttttctctggccgggtgaactgaatggattataagtctagaaattagcctgctggtatgcactgctgtatggttgttccaaagcctgaaactatagcaaatcgtacgtgtcttgtctggtgctaatgggtgctaactcatctggaatgcgagcaaaacaaagggatggatgctattgtggtacatgactgatccataatgtatgttaacatatgtgtcttaagttccttttgcccaatcttctaattggggagttcgtcgttacctagctgtttgagacacgcccgtacttatatactacaatagcatccagacacctgcagttttgaatgactcaagttgtgagttattctgtttagtctgctactctgctatcacaatgtctagatgattatatagttccattggtggttttcttggtagtttcaatgccccctagattttgatggaaattatcaacaggtacatgtagttcttttatatacattgaaatatttatggatggtaaaatggccctggaaatagttaattttgtgtgatgctgaatcattgtaagagtggggctaatgtctgggttaattgtgtttccttgatgacatcagcggagagctacattaccctatctatataggcatgcctgtgcatatttacaacattagccctttacctcccagctgtgtgccacacttgctcctcattgaactgtttgatcatgcaacacttttgtttaatacaaagaaggaaaataggaaatgcatttcaactgatgggcaggaaagacatgttttattgtttcaacaaatatagaccgtttaagagagaagaaacacataaagatgttacttagacaaatgacgactttgcgttaaatatagcacattgacaccaatatctagctacatgcttataacgttttgtacatgcatgatgccttgacacttgctaactagggggaacgaagtgtgtgttctgcaacg

SEQ ID NO: 36123 - DNA, 1036 bp, Sorghum bicolor
  Intron number 2 from transcript Sb05g026090.1 (locus Sb05g 026090) derived from phytozome v7.0 (chr-ID chromosome_5; pos 59715162 to 59716197)
ctgtggaaggtggcgccagcccttacaggtacgatgtaactgctagcctgctatgtctttttttcccccttactcctgcatgtggtttattcaacagaatcagaatcagtgtgttttttaggcaatattttcctaaacgctaaatggtaaacagtcggtcactaaacagtccattaaacgggctaaacaatcaactaaacagactaaacagatgattaaatggaaacggtgtaccactgtgtagcgtttacccagcgtttaaacggtctaaacggccgtttaggcgaacagtgtttttaggagagggaaatatgtaatgatcttcctatgtttgtaattactagttactttagtcatcaagtttggcttcagcatatctaagccttcgtttcaatattgttgttcggatttgctggttattgtctctcggcgctttagtacatttatctgtggtaacttgtacagtaatcggtacaggagctgtaagtttgcttaatggatctttgggaaactgtaagtgtaggtgccctgcgcatcatgtaaaccatttttgggagtcatgttcacatttaacaaacaccagccaatggaatgattttggcacatacttcattcactggccatgtattttcacttgtgcatggtaaagtcttccacaatttatcaatgttaatgtcacctgctgtcagtgcactttgagaaatcttattttgacttcaaatatgttctctgaggaaaaaaagcatggacagcgcctgcttactcaacttttgatatattttttatgcagatagtcagctgaagacctatcctttctgttttcatgttctagtttttttttctaattcttctatatgtctatatcaattttccattaatataagctgcagtggtatggcaagtctcagtgactttatgtgcaaagctgcactgttgtttttaacagcagatacctatccatgaatgatttccaattatatctcccaatgtgtttgttgcagagatttcaagcagcattcaaggggaaatcctcaat

SEQ ID NO: 36124 - DNA, 867 bp, Sorghum bicolor
  Intron number 2 from transcript Sb02g020320.1 (locus Sb02g 020320) derived from phytozome v7.0 (chr-ID chromosome_2; pos 49273873 to 49274739)
gagaccggggccgcgacgtgagtgctcctcggtctcttctcgtcttgtcattttcttttgtgatcgggtccagtcaggtctgggatcgtaccgtggaactaactaattgagtttttgtgatggttggagtgaaaaatgttgtatggaatcctagaattaattaatcaaatttccactgctcttggggctgtgaagccgtgggattctagcattatttatgatgatttttagaattttattatttatgatgattatttggttctccgttctaatatttcttttcactagtgatccattgtttccccaccagagcaaccctcattttggaaattaagtacctgagtgagatcaatttcttttcgatcctcaaaccaagatatgttactagaagaattgagagtatctaatctgcaggcaagatgctataatactgtgggtttacaagaaagtgtatgggtttgtattttctgcaagaaggttaatgctatgagacggtttgtaaacccacggtatctgttataatactcagaaaactgaaattctatgaatttaaaaggatctactcgtaagaatatatgtaggtatttaagttatattgctaaatcaaatttgttgctagctagtggtggacaatttgatatgaaccggtagtaaatcagggcataatgctatttaacactttatccttcacatcacaaattttacaatctttttgagatgtatgtgttcaagctgactttagatgatatcgccactggggatgacagacagaatggccttagttttcaaattggatgatctgttcttgtgacattcaagcatgttgtgggttctatatttgattggttgttctactattggcaggtc

SEQ ID NO: 36125 - DNA, 335 bp, Sorghum bicolor
  Intron number 4 from transcript Sb07g003280.1 (locus Sb07g 003280) derived from phytozome v7.0 (chr-ID chromosome_7; pos 3866016 to 3866350 reverse strand)
tttttcctccggacaagaaaccggcccgcctacctgtaagtacaccaacaaatttacaatggcaggcaaaactgaatcatgatagccaggtttaggactgctgagttgctagtcaatgcagtatcttacattcttctcaaaatgtacaaaagatcagcttgttcatgttagtttatttggcctttattacgatctgcttcagtaattagaatgttgaatcaaacttttaaggaagcgttttcatatagtctgttgctcacttcatcaattagaatttagagctgtacaaacaggctcacagtcttaatctttttcttgtggtagggtttccatac

SEQ ID NO: 36126 - DNA, 481 bp, Sorghum bicolor
  Intron number 2 from transcript Sb03g030450.2 (locus Sb03g 030450) derived from phytozome v7.0 (chr-ID chromosome_3; pos 58696083 to 58696563)
ctccgtgcactgaaatacattcatactggtatgcttttttttctttcgcaaattgatgtcttagttagagtacagtttttttatctttatgattgtcatacctcatactacaatttacctgtcttggaatcatttctcttgaataatagtggggacaagtactatttgcatggaggatcagagtagcgtgttcacacattaatatcactttagcattaatctattaactataaaactgttgttgttgattgtttctgttcttctattttgatttttattataaatatatttggacactcatctgatacatagactacttgtatccactcactatactttcaaagctattgtaattactaggtgccatccatttttagtggttgagccatatcaactacattggtttctatctgcatgctcattagctatatcttccagaaaaaaacagaactgatacatgcgttttatgtgattgcagcta

SEQ ID NO: 36127 - DNA, 541 bp, Sorghum bicolor
  Intron number 1 from transcript Sb02g001430.1 (locus Sb02g 001430) derived from phytozome v7.0 (chr-ID chromosome_2; pos 1259069 to 1259609 reverse strand)
aacttttacactccaggtatagctttgcttagtttttggtttttacaatattcagaacgagcggtatttgaaatgctaacatgcaattttggatgatatgctcaagaataactagtgtacaaaagtcgaatatcacaatctgttatctaccaaactggttttatcctagttcctacccttttttttaatgttggatcatctatggaacttgttcaatatgcctaggattctcttcatctattaataatcttgttttgttctgatggtacaacccttacaacgacttagcctaagctctccatctgtcaactgacttaacaaaatccaaatagttggtgatttcggttttaaattaaggggcatatttagcttaaacctgagtccattgtcttctgttgagttgttggaagtgtatttgttaacttatgtttagtttgtgagaagcaattattcatcaaggggatagttgattccttaatcatctaatgttttttttctcaaaatttgtaaattcctacagctttgggagcatcctgtacaa

SEQ ID NO: 36128 - DNA, 586 bp, Sorghum bicolor
  Intron number 3 from transcript Sb01g038790.1 (locus Sb01g 038790) derived from phytozome v7.0 (chr-ID chromosome_1; pos 62291887 to 62292472 reverse strand)
gccgaaagagggcggaccttctagccgcaaagcaggttccatggctgatttctcgtgctgttcttctgtagtatcaaaatttgccagttgccagtgtgcagtaacaaaatttgaaatactttccactttgcttattgcatcaaggtgctttaacaagttttccttctaaaccttctagttgtaccttgcctagtggtagtttggcagagggcgattttttgcatgatatatcttctaatgttgtcaaaggtgggggagttccttaatgcccacctgatattaaattgatctctcaaaaacaggccttaggtgcgaggaggaaggatacagataatgacttgaaatcaaagttggtttaagaattccttttccagttttgctatgtgtgaatcttctcattttcttagtttagtaatgttgtttttcctagaaacaactttagcaaattaacacaatggttacagggtgtgacatatatatacgagaggaaagattaagccaccttagaacaggcaggcttctctttgttgatccctccataatctgaattctgaacttatttcttggcttgccactaatgtgcagg

SEQ ID NO: 36129 - DNA, 844 bp, Sorghum bicolor
  Intron number 2 from transcript Sb06g022770.1 (locus Sb06g 022770) derived from phytozome v7.0 (chr-ID chromosome_6; pos 51993610 to 51994453 reverse strand)
agaatgtaagttccttccttaagtgctatttatttaaagatgcaggcttcttgtttggatttgctgttatgctttttgaagcagagattagcctggggaatcccattgtttaggttataatttcagtttaagatacactggaggcctttagctttgattttggatcttgttttcctaaccctaggactaggctagctagttagttctgaggtagaaacctttgaatttttttggtcacaaccttttgaattgtctaatctcaactattatatttgatgaaagaacttagtcaattgttaactgttactttcaatttttgaagcaaggtgttatttctacgcacttagaattatttttatctgccacttaggcatgtatatttttttttgcaagagaaacactaattgtttaaaccaacaagtaaggagagactggtttacaacaatttagtagcaaacaaggacttaagattatttgctgcatcagtcagttaaatagtcaagatgctattgtcatgcttgcagatgcaaatatattctgtaccctgtaaatgatccaaaacttttggctctggctatgatccagaattccggattgctctttctctttgaccagctttcaagagctggtgtgagtatctgaccaaaatttctaacgttgtcttcatgtgcatagatgtaatgatgagaagttagagaaatcccctttttggtagaatcattggattgcataatctgtgtctgtttcatatctgacctctgtcgatacatagagatggctaactctgtctcttttcaaactatttacagcaggctggaaagaaagaggaggaggaatttagcac

SEQ ID NO: 36130 - DNA, 1055 bp, Sorghum bicolor
  Intron number 1 from transcript Sb03g002580.1 (locus Sb03g 002580) derived from phytozome v7.0 (chr-ID chromosome_3; pos 2480967 to 2482021)
ctctgcgtaccagctagttcttgccttcttgggcggtgagtgggtttgatcgattttttcctctcaaaaggcaagttctttagacgaggattcatcgttccttcgcgatcttgttgttgcttggctgtcctggtttccacctttgtgctccggattggtttccttggggtaaacgcgtttacactcctcgcttttcgatgccattgatgcgcaactccattcgaggtttgcatttgcgtttggttcgtgctttcgatcggcgcaagtagtattatttttcctcttttcgatggattgattgaaatattctcgatttttcctcttttcgatggattggttgaaatattctcgatttttcctcttttcgatggattggttgaaatattctcgatttgcctgtcgattttacattgaggtgagacatgtctcaggcttttaaagaagccgcaatctttttcacttttttgttcttatggaaagaataaaagtcttgatctctgaactgaatgctacttttgtagtataagaagatgttcttcgtttgtgcatttatattcttctcaagcatttactgctaaaattgctcattgtttgatatggcgtcccatgaaaagtcacggatagacttgacaacgatagacgatagatctatgtacgcagtctggcgattggtcaattgcaggctaattcaacagtgttggacgtcgtcgtgcttggtccggtcatcctcatactgttgcagtttctcatggttcaacgcgtatttttgtaaaaaaaaaaacgtgcgcctgcaccccgtttcacacctgattttcgggacccccaattgacattagaaagagtcaaaagcccgtaattttgaaattattggtgtctattatttgaatcttgtattggatacttgctatggttgaacaagccccttttttctagtgcaatcattgctaatataatagtgggcagtggccattgctcaactagttctgtttacaattttgtttccctgttgctgtattttaggattcttgggaggtcctgtgtgtgactactggatc

SEQ ID NO: 36131 - DNA, 737 bp, Sorghum bicolor
  Intron number 2 from transcript Sb01g012040.1 (locus Sb01g 012040) derived from phytozome v7.0 (chr-ID chromosome_1; pos 10965104 to 10965840 reverse strand)
agccaaggcggattgcgacgcgagcaacgtcgtgggtgagatcggcatcccacctcttcctctcccccttccccccaaaacggcactggcttcttgttgaagttgtgggtttttgttttgatctgtggcatagtcgaatcgtgagcgccttcccccccaaaacggcactggtttcttgttgaagttgtggtttttttttttgttttgatctatggcatagtcgaatcgtgagcgctcgtggggtgagcgtgtccatatttgttcacgtatatggtggtgtggggaggagtggtgcaattggcagtctcatgttcatgtcatcatgtgcggtgtcaatcatggttgggtacttgtttcagagttcagacacaaccacaaaatggtttcctttttctctacttcttaatttaagatttttatgcatgtacgatgagtgatactactggtaataattgagatgagattgagatgagatttttgtgcatgtctgttggttcgcactaatgttttcatgctctgctgcttttaaatatgacattcttataggctatgtatattgcttgacattgttatgttctgaactgtgattttgggaagggtgcgcatttcccttgttccgtgaggctttggtcctatgttatgcagttctctcttatgaacatatgggttatccttttgacaagtttctcacttacctgtttcctgtctgtttgggacttgcagaggtgcttgaaaga

SEQ ID NO: 36132 - DNA, 1029 bp, Sorghum bicolor
  Intron number 3 from transcript Sb03g035010.1 (locus Sb03g 035010) derived from phytozome v7.0 (chr-ID chromosome_3; pos 63184296 to 63185324)
tgatgtgagcactcttgcttgcctttacttttcagcattgcgtttcttatgctgcactgcatgtgatgcggggttgcggaacagatcttgagcagttgccagtaggatcgggcaatggatggatgtaggttgctgggaaagaaagggggttcacctagtgtatcactgactttctcgggatgcttttggtggggatacagatagagagatctatgatttagtcgacatcctgatatagatagcgagtggggtgccaactcaatccgattttggctgcttcattcactgaatgcatgaatgcaccacgcagtcccttgtataccatgtgacaaacatagctcaaacgggaatcaaagatcgtggtcccttgccttgttgcggtacgcccttgttgccgtacgcccgtactaccgtccatcccggaaaggatgtttcagtctaggtactatcttaggttaattagttttatataaaaaattactgtcaacatttatgactttaaattaaataggtagagtgatgaaaaatattagtatatatttttaataacttttgtcatacctgagagatgattggacttagcattattctagaattgcatccttttttggggatgcaaattacctgtagaacacacacttgtttggtggcatatagcagttttccaagaaccttttcgatttaaatttttaagggatatcttccagcagaagtttgtgctgaaataaaaatacattagtcaatgaccaattctttcctgttgaacaatgcacgatttatttcttcgaaaggacagaattatgatgatgcttagtaagcagaactcaactaactattctggaagtgcttattttttactctcttaacttttactcaggtgatcatgtgggattccaatattgttatttgatgatattttctcatgtataactttaagttgttccaaaacattctatcttcttgaacatcacacttttgaatgtgacttttgtagccagaagccccttctaccttcatttgagtcagctg

SEQ ID NO: 36133 - DNA, 782 bp, Sorghum bicolor
  Intron number 1 from transcript Sb01g034150.1 (locus Sb01g 034150) derived from phytozome v7.0 (chr-ID chromosome_1; pos 57604691 to 57605472)
cagctgggggaacggattcttcgccgacgctgcaggtgcgtggtggatctccaaccaactcctgtcgtccctgttctgttctaccactagtaacttgcaaatcgtctcctcccatcctgtccacgtgatctgcaatcctgaattccaaccaatcctgatcgcgtcgtatatatgacacatgaataatcggcgttggcgggtttattttagtcaaaatgatatacttacgaatgctagcatcgtccaccgctttatttatgccaagtatattttttttgaggcatagctggattgtctggccaattggccaataaactacaaggggccacaattgtagtagtactagtctacggtatagctaacaaacaaagatatttctgtcaaggctaagtcctggttcagttcatgaaaaactttggttttagctattttcgtttgtataactaattaggcttaaaagatttgtcttgtaaattacagataaattatttaattagattttatttttatctatatttaatgtttcatgaatatgtccaaatattcgatgtgacggaaatcttaaaaaaaaaattaggaaatttttcgcaaactaaacaagatctaaaagaggcctcaggctaaaaatagggaaaagctaacaaacaccgaccatgtttgtttgtgtcaagctgaaaccatgcatagaacagaatctggtgattcctgtcatttatttgtacaaccatgcacttggctcttctgtcacctcactcgcctgccgcaacgttaccaacgcaggc

SEQ ID NO: 36134 - DNA, 658 bp, Sorghum bicolor
  Intron number 1 from transcript Sb01g048990.1 (locus Sb01g 048990) derived from phytozome v7.0 (chr-ID chromosome_1; pos 71965270 to 71965927 reverse strand)
gcaacttccgcggccttgccttcatctgcttcgaggtccatactccgtacccaccacacttccttctctaggcatcacattacattacttcttgcagtactgctttcttcttgatgctgaagtggtgattcggtggtgatagagtaagaatttgttcaagttgccatagaaacgagaaatggtgtaatgcttgctggatgttgctgaattgctatgctgccatgatcgactaggatgctgctctgctcttatcggggataccttatacatggcgtgcttgattgtttcgattaattcaatgattgtaacctttgacactaaaatttatacctgcgtcatatttggttttgttgagtccctgatccagtgatcctctattgcattccttgagtttctgtgcagcatagatctatgcatgtgatgcctgaattggaacaatgcaaagcttttaatttcagaacctctgttatcatattttccaactgtgctgctacttacttttgtctgtttattactggtcgaatttggttagtatctataaataaataaaactcaaaactgaagaaacttgaatagttggatccttcaatgtctgctatttcttgttatctttgacaaatctgattttgttccattctatcattgcagacgaacgaag

SEQ ID NO: 36135 - DNA, 560 bp, Sorghum bicolor
  Intron number 2 from transcript Sb03g026700.1 (locus Sb03g 026700) derived from phytozome v7.0 (chr-ID chromosome_3; pos 53578721 to 53579280)
aactctgtgaggcgagaacagctggtgagacaaaggtgagaatgagatgatgattgattaatcactaaggcctggcttgcccttttgttttgcttggattgttggattctctgactgatgatgcccatgtggattgactcttactcctctcctgatgctttgttcactgaattaatatgtactagagtattgcttacaagcgaaggaatctattataaacaaaaaaaaaatgagagagaagatgctgtactgtactacactcgagttcattaaaccttcagtccctctgttgattgtgtagtattaactgctgttgcttgtgaaatgattttttatcgatgtggaaaaaaatgattcatttaattctattttgacctggtgaagatcttgttctgaaactgatagtatgagttaacttgtctccagaactgtggttgttcaaactagtagtggtaaataagtcaaactttatcaagttgttagtcttaaaaaggtgatgctacatatctaagttattaactccaaatcaatgcagtgtgaaggaagcgagaggcgaccaa

SEQ ID NO: 36136 - DNA, 987 bp, Sorghum bicolor
  Intron number 2 from transcript Sb01g013180.1 (locus Sb01g 013180) derived from phytozome v7.0 (chr-ID chromosome_1; pos 12198383 to 12199369 reverse strand)
gacttcgagcccaagattcggcaggtcgtggattggtaggtttttgctacctattctcttctgtttgcgcaggtggataatccaagggtcggtttgtagtgcttgcagattgcagctcatgaaaattctgcgacacggtggagcctctctactaagaatgttctgccgtgggtttagataattccgtagtctgggtgttttaaattggggaaccaatgaacacatgccgtagtgcattgccaatttcagactggaaatactgaagcaatgctagtgccttttgcagagtgtaaatatatcattctcacaacttaagttaaggattcaagtcacactatgatccctctaaagtcagcgattcaagtccctctcacttaagttaagaggggagactcatccctaaagtcatccaaatatacacattgttctcacaacttcaccatgaagacaacatagctgccaattgttgtagaagatgttgagtagtagaaaactcattaaaggttgaaagcggtgggagatcaaccagatcaccatcctcagtcaacacccatgcaccaatgaaggcacctttctaggatgaatgggacactgtttttaaaagatgaatatggcagcgtcaatttttctagggaacaatgcaatatgaacatcttaaagatcacatttagtttcctgtggcagaacaccacaaatgtcacaagctccgtcacaattaatttaatgggtatgttttagatttgatcttgtagttttcaagctaaaattgatattaggctgattttgtgtagctatgtgattcttaaacacaaaatgggaagaccatgaatttttcacactatgggggtgttgggttttgatttctatttgtatgcactggtgataaaatcaaagcttgactggttattttggggtagaacttagctgctcttcgtttctattttctttacaggtttgggcaacttcaggcagtagatcttgagtcca

SEQ ID NO: 36137 - DNA, 1038 bp, Sorghum bicolor
  Intron number 1 from transcript Sb01g048040.1 (locus Sb01g 048040) derived from phytozome v7.0 (chr-ID chromosome_1; pos 71110150 to 71111187)
ggtggccgtcaaggcggaggccaagtctgaagtgagtatgcttcgggacctcgattggagtattggttggaatggatcgcagcttgcgcttctgtttgcgccacgcatataatgaattaataaagctacgtttgttttgggtggttgtcaattgtcatcagcttttggttttgagcatcttatttaaggacctgtttgactatattctctttagtttctggtggcaacacgccagtatactactattagtaacttaaactatttgattttcactgtaaccagctcttgtagttcttggatttgatggaaccgttatctccttttgcgcagagtacgcaagtccacatcttttttccttctttacttcaacggtagagtggattggccacgataatctattggctaagcttagttgatgtgacaaaaggaactgcctttaaaactattggtagttctgatttgtttgtgtgtgtgtgtgtttgtaatagtttcagcttagccaaggcaatcaagagggcaaaaatggattcgatttcaaactatgtgttttttttctaactgtatatgtgcatatgccattgcgtttataactttatatgttgcgcaggcaaccctagtaaaaaggaaacgttgctggcaactcaattttgatgatgctgtgatctgtttctaccaaaatgtcatgtgaagatgcatatctcttgcatttattatgtagggaagctaggtattactcagttaagcttaaaaagcagtaacacaatccagttcaatgcaactaacattaagcataactacagtctacggaagagctttatgtctacctaataactgaaataacaaatcttgtaaaaaatggaaaaacaccattttgatgttttttttttcactcatactattctaacgttatgctctcacatctttatgcaaggtcatgtttgtcatgattttactgttgtattggttacctgatggctgaccgtgcgatgcttatattctacaggcagaaaaggaacctattttaagtagcttcttgta

SEQ ID NO: 36138 - DNA, 978 bp, Sorghum bicolor
  Intron number 1 from transcript Sb06g017620.1 (locus Sb06g 017620) derived from phytozome v7.0 (chr-ID chromosome_6; pos 47018620 to 47019597 reverse strand)
gcttcctcggctgctcaatctcgcaaattcgcttggtaaattacctcccaacttcctttttttttctctgatgaaaatacctcccaacttcttttgctcttccgaagcaattttgatgcatcgctattatttattaaactgatgacctaggattcagtttgttagcattattagttgaagttcgtcgaatcgtacggttagggattctattcttcggactgtatgatcgttcggttctgctaaggaattgggtgggcgggggggtagattgtgtgccttatactggaactttgttgttagttgtacagtaattttcgagaattttgcttctatatgtggtcaagacccttaggtactttatagataataatgcagtaggtttacctctctgaatagttcagctgatcctgcatcaatctggatagtttttgcttgttggagtcttcgcgatcgtcttgtctttttccctgtcgtgttggtgttatctatgtaattaggtagtgggcaatgatcaccctaatcataacgcaatggttggtggatctggagaggagttccattcatagaagtcacccaaattttcaaagggaaagtgagacagagttttgttagacaattcaaaagggagttgtaaacttgtaataggcttgtgacgctgaacacgtccaatgtttggtgaacagagccatgtcaaagataagcatgaagtagtagattggaagcttcatttgctattgttgcccatttgaagtctgccgttgacaagtattatgtttcatctactgttgcaaataaatagctgtgttgctagcacctacttttgtatgtgttccatctgttgataaatgtcttgctccctttcccttgcaggtttcctttcttagtgttttggtttggtttctaggatgtgagaacagcctatgtgttgataataaaagtgagaatgcttggtggtctggagttgtggtgctttatgta

SEQ ID NO: 36139 - DNA, 920 bp, Sorghum bicolor
  Intron number 2 from transcript Sb03g031190.1 (locus Sb03g 031190) derived from phytozome v7.0 (chr-ID chromosome_3; pos 59536733 to 59537652)
gagcccaagggcgagttggcccagaagcgtatcctttccttctcatttctcttcgctccccgtacggcttatttttttctctttctgtggatccggtggatggattcgtggagctcatgcgattgctattcttgttgttgcgagttttttttggttggatcaatagaatttcagtagctgttttaatctgaaaaggtactggagctattcaactccgtttttatccgttactttggaaaacgaaaacagtctttgaatctggattgcccttggatcacagtttgccagaacttatcgcagaattgtctatgcagtttttttcttcttttttcatgtgctggctgtgtagaattctgatcaaaattttgacccattttaaatttaatcctgacagttgccattattgagcctttccattcaatcatgttagggttgctattagcaatccagtaatatacgctattatagatgcccttcattattggggtttcagagatggtgagagctgagccaactcccatttatttgacaggtacaccaatatatggtgccctcgctgaaggattcctgtatattggttaggttggcgtcgcatgtctcagtccctcaaatctacttcagctagagctccttgaccacccttgcatttgtgaaacagaaatgaaattttatgtactttaataaaataataatctattttttttagatctatccctatgatccattgatgaaggacaaatattagctgcacaatatcagccgatgttatgtctgttcatcactgtggttgtggttggcttattttattggccactccccactcgtggacaatgacccttacaagtatatattctgtttgcaaaccttgacttttctatcatccagctatcgaagaagcaatcgacggcttgaagattgat

SEQ ID NO: 36140 - DNA, 916 bp, Sorghum bicolor
  Intron number 2 from transcript Sb04g006670.1 (locus Sb04g 006670) derived from phytozome v7.0 (chr-ID chromosome_4; pos 6677373 to 6678288)
tttgagaaactgcaggactatctttcagcaatttggtgagctttaccctctatctaaaccagcattgtggtaccatgttatttaaaggtcaaaacttgacataaaactggatgtacagttcaaatatgtaaatttaatcagaggcagccccctgaataagttattaactttgggtagtctttattctacaatattatttttgaattatagtgacgctcagagttatttttacttcatctaatgtataactacaggacaaaactagcatgaacaaattgttttgagtcgatctgaatgaaatggtgtcccacctattttaatcaaatgaaaatgaaaagatttttttttcaaagagtagtgctccacgtagaacatattcttccaattctagtgcaaccacaccatgcatgggcacggcggactgggtttataggaacaaagtctcctgctgcctttggtctagtgagttcagataaatgttgcgtgcacatggcagttccgtttctccaaatttaccatgggatcctgtccattgcaatgcattatgccaaggagtgaattcaggcgaaatccaccagatgaaaccttttttttctgaaagaaatccagcagatgaaacttaacacatctcttcttggttatggctctttttggcatagttagggaaaatgcacctgcaaatttgaaccaattaaaattgaaatatttgagtcccattttacttgctttcaagcctcgacatgctttggcaccaatatgatgtgaggaatttgttgtcatctgcttgaactggcccagaatccagacttgccctgtctaatgaaatgtgaagactgaccacaattgtctttcattcaggtgtttcatcaaacctttttttttatgttctgacaaatgttgttttgtatttatgcag

SEQ ID NO: 36141 - DNA, 845 bp, Sorghum bicolor
  Intron number 1 from transcript Sb04g028250.1 (locus Sb04g 028250) derived from phytozome v7.0 (chr-ID chromosome_4; pos 58343148 to 58343992 reverse strand)
gtcgccgagcctttctcgaaggatcaagcaaacaggtgaggcgcgtctttcttgtttcacttatttcggtttcctagctcgctttcgagaaactgcgggcagtctcaataccctggctatcagtgtagtgttggtgtatgggtgtgcttagcacgtttttggatttcgcatgaagttttaatgagaactatattgctcggatttatagagaccagacaaaattggaagcagtgtggtggtagtggggctatgaggttgggatggatgtagatttgcgttgtgaaacatgctttcaactacctggtgtatccaaaaggaaaaaaaaaacgatggattcttttgatatatcaccagaatgcggaacatacattagtgaggtgtcgcgatgtactgtatatgcagcaaaaattgtattgcagtttgttttatttggggttctgttagagtttgtgggaattcacaacctcagctttgtataattgcaaaagggaagatattacataagtcagatttgatgaattgctgacacataatatgtctgttgatatttagtaatgtaatgtggaatttgctatgtttagtatgagtaattaattcctatgttcaatcaataccagaaaccaagtagaatgaatttcctacaaacatagttcacaagttgtccttccagattagaagctgaagcgagtcttgatttgacgtgcattttgttagtttttagttctaagcaacaacaaaaaagcttttctaatgatgactgaaatgccatgttttttcttactatcttttcccctttccttgaccactcttgatttttttggctttcagaaagtgagattgttcgg

SEQ ID NO: 36142 - DNA, 469 bp, Sorghum bicolor
  Intron number 1 from transcript Sb05g017710.1 (locus Sb05g 017710) derived from phytozome v7.0 (chr-ID chromosome_5; pos 43398922 to 43399390)
cccagaagaggtgcgcagccgccaaaggcctcgcctcgcatttgccctttcttgtttgttttgttcccccagtcctgcttcttttctctcggttttactgctattttttttctctatttttcttcaatctttatttattcggagcatggcgtcggttattgtcgccaaagttgccatcttttgcgtcggttattgtaccatttttttgatttttgattattataatataaaaaaattatagatagattatggatccaaagcttgcattttgctgtgaaaaaaccctgattgctgctgctgtttcacaagtttttgctggacctcccccaatttatttcccaagccgttttcgtcatgcatcccatctttctgagctaactgttactacatctgtgtttcctgagctaactgttactacatctgtgtttcctggaacagactaagtaagtcgcacgtgcttgtgtgcggc

SEQ ID NO: 36143 - DNA, 959 bp, Sorghum bicolor
  Intron number 1 from transcript Sb07g021330.1 (locus Sb07g 021330) derived from phytozome v7.0 (chr-ID chromosome_7; pos 55323515 to 55324473 reverse strand)
actgcagccccgacaacgccttcaacccatcaaaggtgcgattcttccccttcttcttcttcttctcttttctcgccccgcatgtgtttgatgccgcggccggcatggcatgcatgttcttgggtttcgcgtgccaacaagggccaagagacaacttttgtttggcctcacgttatggtttatgttgttggcgcttttgctgtttgtttgacgaggtctttcgtccgtcctgcgctattggcaaatctctgaggcatccttgtttaagcttttgttgtttcaacgtctccggtgtcgacgatgatcctacacctcaaaaatcatctttttctttttttggttcggtttggattggaacacaaaccacacattagaggtgatgtgagatgaaggacaggtatcgttctttgttggcttcactccaaaccacccattggattgttgccgtctccataagccacacttgtggcctaaacattctttcttcctcataactactgtcgccatgttctgctgtgttctgtcaaggcgtaattcggagaattgatatgggtggaatttaatttactatcatctcgcagtagtaaaaactttctttgcaaagctgcattgcccattcttggaacattcgttgccagacaaagattttgccacgctgacatgtcacgtcaggctttgtttagttccgaaattttttattttgaggtattataacacttttgtttttatttagtaattattgtccagaataattaacattaaaagattcatctcgtgatttataagtaaattatacaattagttttaatttttatctatatttaatattttatacatgtgtcgtaagattcgatgtgacggagaatcttaaaaagtttttgtttttttataaactaaacaaggcctcataacaacccgttgcaggtgagcgacctgctgagcagcctccgcgccaagtg

SEQ ID NO: 36144 - DNA, 744 bp, Sorghum bicolor
  Intron number 1 from transcript Sb05g004010.1 (locus Sb05g 004010) derived from phytozome v7.0 (chr-ID chromosome_5; pos 4751220 to 4751963 reverse strand)
acttgtgtttgggtttctcttccattcttattagctaaatcaggtagatatgaagtagtattttttttctctcacgataatataacatcagccaaattaaaaaccagccaaacttgatctattggattgggattttctttgctcaatagaggaatagttagtcccatatttatattttcaatttaaattgacaacttcaaattctacaacttacttatcttaacgtcaatgcaaaaaaaaaaaactaaacattgctgtcctatagttatttattattggtagtacttttatgttgctcagtttggcagtgtggtgaaggcaataggaaaaactgcgacgcaatgcgttttaatcttgagtagatttatggaaattgcagcctataatatatacgcatcgtgaatctattgttggaaattttgccgtatattcggttcgtgtcggactctcccttcgacgactcgcaggcgccgcgcgtggacgcatttgatctcaaaagcacaacgacacgaagcaacttttcccgatatcctaacggccgccgccgacgtcgatcgatcaatctgcgccctgccgcaccctcccgatcccagtcctagctagctccgacgaccaccagcccatgtcccgaacctcggcggcgcatcagcagcagcagcatcagtggcggcggcggcggcggcagcatggccaagtgttcgtccggcaggttaccgcggcaaacctcgtccacgagctgtccac

SEQ ID NO: 36145 - DNA, 949 bp, Sorghum bicolor
  Intron number 2 from transcript Sb04g035600.1 (locus Sb04g 035600) derived from phytozome v7.0 (chr-ID chromosome_4; pos 65507422 to 65508370 reverse strand)
tgggaggttccttttccgccgtttggaaaagggtgagtgcaatatgttcgccccttagcttatatatactcatatctatatatctttagttgcaattaatcgatttagcacataggaactaaagcaaagtgccaataacacagtgtaccaatctagaaaaaattataagttcgtgtacatcaaaagtaagtttgtgggcagatcagttgaattgaatgggtgattgaaaaaaaaaggttcatatgcttccttgtggaatcactgacagcttctaaattccgcaatgctgctaccgtttctggtaccacatgaggcctaatgtgtttttgttagttcctcaatttacttctgtgtgtgtttagtttatgctagcagatcagatcagatgaactaaaattttgcacttccttgccaaagtcgcattgtagtcttggtgttgtgtcacccaagtggccaaatccgcacgagcttgtctcgatacattgtaagaactgaatctgttttctccttaattcaaagaggcgcaattctgctgcatttttcaataaaaaaatatctcaaatttgtccttgatccaccttagaatgttttccattcttacatatgcagttgtgctttggaagaaaaatttaggagcccttaaaaacaatctgaccctcttcagccagtgctttgggggaaatgcaaaatatttaaggtgaaatggacaagctcgtatgctttaaccatgctatgtgttgctgataaaatatctcataatgtaggctaagcactctataatgttaggtttctggccttcacgtccaaaaagaagcttgctaattggcatcttggtgctggctagaaaagtggaatgtctgtgttagacattgttcagtttgtcagttctgtttcaatattcttaatggattgtgtatatcaacattcaggtttgacactgtctatctgg

SEQ ID NO: 36146 - DNA, 571 bp, Sorghum bicolor
  Intron number 1 from transcript Sb06g031750.4 (locus Sb06g 031750) derived from phytozome v7.0 (chr-ID chromosome_6; pos 60045933 to 60046503 reverse strand)
gttggtcttttcgccggcgacgagcaaccccccaggtacttccaccccttctctttccttcccttcatgctgtgtgaagctgagcaccgaaaccctaacctaaagctagttagctatttgatttgacaagccttctagcttccctttactggatctgcctctggcgggtgatctcctcgtgatgcaatggcgcgtgcaatcttttttcgtgatagttggttcacatcacaaaaaaaaaaacagcggcttagttttaaattgctgtagttttgcggcggaccgcattcaggccacccactggttcagtttaggtacccttccattttcagtgtttaatggaatttattaggcttctagtacttcattattttttttgcttctgctctggttaacgttctagttcttctctatgaggtcagaggtactatcatggtgtgtgagcctgattcggaatttagtcaaatgtgcatgatcattctgttgcattcatttctgttgatgtgctctatgtttgtgtcttttctactaaacttgtgaacgctttcatagtagatgttgtcaaatacacagg

SEQ ID NO: 36147 - DNA, 885 bp, Sorghum bicolor
  Intron number 1 from transcript Sb01g025810.1 (locus Sb01g 025810) derived from phytozome v7.0 (chr-ID chromosome_1; pos 42336536 to 42337420 reverse strand)
ccaccccctcccctcccctgcgcaccaccgagaaggtcccccaccctcccctacgcagcacgggcacagaatccctcccctgcgggggttgaagaagaccctgacgtgtggggcccacacgtcagtgaccatgtgatttgtttttggaatgatatttggaaaatcatagtaaatgctagaaaaatcgtaaaatagcaaatatagactttttggaatccttgtaaaattgtctatccagtagatctataatatgtcatgttttagtttgaaattttagctttaaaaatagatttaggcagttaggttttaattgcttattgtatttgtctttttcataactgtagtagtagtgctcaaataaatatgaaattattgtgatatgcttttcatatgatattggaggcctagtaattgtttcatgaatttaggaataatagattaagagatataaaaataactaatgccctatgttgctttgctcttattcttagtagatttgcatgtttatattgtttgactcagttaagatgtgttgttttgctcttattcttagtagatttgcatgtttatattgtttgactcagttaagatgtgaatcttgccttaaggtaaatatatgagttgtagtacttttcataagctttcccaaaagctaaacaacacaatttttggttaagcacatgtgtagttatagtattttaaagtaatgtttagaacaaagttcacaatttagtaagctttctagaaaagatgtagcaaatattcacttttaattatttataagtcaactatttattagtcaacgattgacttagagtattatcttcagtgttcatactatactatataacatttctgataacatatatgctttagaatcttgca

SEQ ID NO: 36148 - DNA, 622 bp, Sorghum bicolor
  Intron number 3 from transcript Sb06g007950.1 (locus Sb06g 007950) derived from phytozome v7.0 (chr-ID chromosome_6; pos 19212586 to 19213207)
agctctttgccaaacacttgaaagtggagcagcaggtctgtattttctccgaagttgaaaattggcatggttttcattaactgttccattttaatctatttgtgcattgatcaaaattgcagctgataatctgtatattgcaatttttgaattgttaattttatcacttcaacgttcaaccactacaaatgtcttactcgtgtagagtactggattgtttgctttaatgcgctgctgcatctataagtgactaaattcataactctactggtacaacaaatattgtcttggtaaggacatatttgtttttgtctactgactatctgcagatatcactcacaaaatctagtggtagaccagtacatttggtgaaaatcagacaattttccattaatactattgtcttgtttgatttctttgggtccagcatttcactaaaagaacattaatatgctttgtccatgcaaaatgcaggatttcgattcttgaaaagaagtgcaaatgtaaatgataataccagactctattctgtgttacgccacctgtattttttgctgttgttttagcttcctactgttttggctttagttttttaaactataaaattttcatgcaggtgggg

SEQ ID NO: 36149 - DNA, 1013 bp, Sorghum bicolor
  Intron number 2 from transcript Sb09g002100.1 (locus Sb09g 002100) derived from phytozome v7.0 (chr-ID chromosome_9; pos 2244563 to 2245575)
ccgctggccgcttcgacgagcgcacggccgccactgtaagaaccccccaccccctccccgtttccctttttgcttcactgttattttcccggttgtgtgattgtgtctgcgcttggactgccgttcctcctactattgttgactgaagttatgttaatctgaaccataatagtcgaggcaaagtcttatgtgactgcaattgtgtgatactttttaggggaaatacagtgaggagtgagccctctactattacttgattaaaacaaaacaggatgaaaaagacagaggagagagagagggaaagggaaagggagagaaacagagagggaaagcgaaagggaaagggagagaaacacctgtacaaactaagtttcagagaactaggctgctattattttcactcaagtcatgaatggtagcaaggaagtcttgagtagtggcccaacttgattttacttgaatcagatatcattaaaaagacgttcactctgtggaatggatacaagttaaagttacagctcattaaaaagacgttgaaaataatttgatatttgaaaaaatttagtgccattttataagcttccagaatgatatttgtattttatggatctttgcagtatcttattgcagtattaagtactctttagaaactccaatgcatttccaagaaatacaaggcaaaggatcaatccaattttacaagttaagctgaaccaattttttgtatggactggtacccatgtgccgcacatacagtgcactctgcagtttatgactttattcccctaaacccatacatatatacacgaaacaatgtgtgaattcatggcatctatgttagcatgacactgtctgtctcaacttttggtgtttgccataatggccaagaacatgtgctggcattgccataccacgctctagaccatgatatacatatgcagctttcattctgaatttctgatttgccattcttttgttagattgtgatgccaacgaatcttatgtgttttagt

SEQ ID NO: 36150 - DNA, 562 bp, Sorghum bicolor
  Intron number 1 from transcript Sb10g030340.1 (locus Sb10g 030340) derived from phytozome v7.0 (chr-ID chromosome_10; pos 60028361 to 60028922 reverse strand)
tgcaggcctccacggttcatcactattctttcctcgtaagtagcactagttcatctagggtatatttctgtttgtgtcaaatttcaatgaccattcagtcctccatctgctctgttcagtcctcctcgatccatgattttgttttttttgttttcttgaaaaaaataatcgtagtacgagtagttagtactagtagttgttacaagatatccttcttcatggtttgttggtgggtaagatcttagttgtagctttgaattaacagttgtattttggtgaccatgttgatgtcgaaaatgttgctcttttgttcatgactctggtgtccttctatttctccaatgcaaatctcttcttgccatgaaaatctctgaatttcatcatgaaaatcctgcactaataagaacagaaaatgcaatctggaaaaaaatggtttcttgttctagagagatgtaccactgttactactacgagctgcctctagctagcatgatcgcccgcatggtttgtgtgtgtttggttggcaggtaaagagggttagcctcaccaggctctgccggca

SEQ ID NO: 36151 - DNA, 728 bp, Sorghum bicolor
  Intron number 1 from transcript Sb09g024840.1 (locus Sb09g 024840) derived from phytozome v7.0 (chr-ID chromosome_9; pos 54323360 to 54324087 reverse strand)
gcgcgtccgcgggcagcatacgcgccgtctccgcggtgagtatgtgtctcttggtttcgagctttcgacgggagagattcctgttcggggcgccgccatttctacgggatcatgggttccttttttttaagggaattaattaaggagtagggatgctttgctgaaaatgatagtactatgaaatctgaaatgtgatttggacaattggacatgcggtcctgggcgttttttttttcgagtttacttttgcgttatttacgactcatttgagttgatgctggtgcctgctggtgaatatgtccattccgttaaaatgtccagtggtggtggtgttagatactgtacttagattgagtgtatcttgatttttgttgcgccattcactatatattaattaaggaggcaaaattgtttagattagttgtactttcccgtattgccattttatactagaatggcttcgaagttcgaacgaagtgaggtaaagctttgacttttgtcttcagtgggaaatgttctgtttcgaaacattgataaactttccccaaaataaaactgcctttgcattacattagcctataccccctggaatgtcggttaaaacttagaaccttgtttagagtatgcaatgccaatttagtttatttactggaaaatgtatgcagttgcagtcatggaattttctgacaattcgaactgtaaatcatgcctgcagcctgcgaagaagg

SEQ ID NO: 36152 - DNA, 442 bp, Sorghum bicolor
  Intron number 2 from transcript Sb07g028660.1 (locus Sb07g 028660) derived from phytozome v7.0 (chr-ID chromosome_7; pos 63668376 to 63668817 reverse strand)
tgctccaaggtgcgtcacttttattttattttgttttgacatttttgttttgttttgttggctcgacgtttaggaattataactgctgtatgtacagtactttggagcttgctgaaaagactcttcgtctgatagattttcttttttgtgttgttagttttatctggagtgaagttatatatgttgatcatgtaagctgatccccagtatccgcaatgatcgtctagagcttactgtagatcattgctacttcgtttattctttgaattgttctagttggtaactgacaggttgcagatatacagcactagatttaatatgtctgatcctgaacgctggttttctttttctcctttgtgaggcctagtgctgcattttgttgactgtttttccttcatggtttgcagttcgtggcaaggaaacacactatctactctcagga

SEQ ID NO: 36153 - DNA, 1022 bp, Sorghum bicolor
  Intron number 2 from transcript Sb04g005460.1 (locus Sb04g 005460) derived from phytozome v7.0 (chr-ID chromosome_4; pos 5291569 to 5292590)
agccatcgaaagtaagtaattgactaatcatcttattttcagtattattgtgaaggttccgttcctaataatagctcgaactaagaaaaactttctaatttcatttttttgtggataattcattaggcatatatttatgtgagaactgaagaagtccattttttgccactcaactacagcttagtatgattttgtccattcaactctgaacaagaaatctttggccgttgaacaatgaaaatcgttcatgtttggtcattgagctggtttcattggtgtttttgctgacgtcgatgacatgtggcaataggcgcactcatcaaacctctcttctctctctctctctctctctctcccctccccatgccatctatttcaccgtctctccccccatgcgcgccatgggagcctcctcatcacgtctctctccctcctccactagggtactgccaccgcctccccgaatgtgcagcacatgtcctagcccaggtccacatccatgcctgtgagggagggagggctgacaagtgggtcccattgcgtgtagtccacgtcagcgaaaaccaccaccaaaatgatttagatgtccaaatgtaaacggtttcaatagttggttggtcgaagatttctggtttttgaatttcacggtggaaatcaaacttgagtgatagtttgatggcgaaaaaatggacttgtccctatatttatgacacaaataaagaacagcatgcaaagaattttagggaaatgagcttttatgagcagataacacctaatctttatgccgcgaggcatgcaacccaaaatctcaagctttttctttgtttggatagttgagtagtgattgttcatgcgaaaaataactctgctcatacataattctctttgtaagacagttacttttgaagattgccaaactgattccggtcatttagtttattactcatttcgtagttggcattttgtttataacgatcttgaagccctcttcttaataactttaggcaggaatttttggaaat

SEQ ID NO: 36154 - DNA, 633 bp, Sorghum bicolor
  Intron number 1 from transcript Sb08g020780.1 (locus Sb08g 020780) derived from phytozome v7.0 (chr-ID chromosome_8; pos 52096988 to 52097620 reverse strand)
gctccaggagaatctcactggtaaactttgttggttcactatggtgatttcattcagtctagaaattggagtgattctagtcgataccacaaattagcaacatgtacatgccactatgtacttgagtgtcaacattatgtttctgttctagtttcggagtcatcatgtcgcaaaatttgaggaaaaagagcttctgcattacctattgtagcgtctattcagcctgaggttatcttagcaccgtcttgtgtattttcaagaatttaactgcaataacataaacgtttaatgcgcaaatacagatctagttggatgaccttgattctgattattgttcaattaaacttcttgtggaaaagtcagcagatttgttggggacaagttcataaatagcttgtggcataaatctgtaccagtcatgggttgcagctattctataatgattggaccactaactctgttgaaacaaattcaaatcatggatactatgagagctaactttcctacattaaaagcaataatatttggtggctgggtgttcttgtgcacttatctggtggtttacttcttcttttgctggatttattaaaccctgtactgaatcagtgtttgttaatgtgtggtcacacagat

SEQ ID NO: 36155 - DNA, 887 bp, Sorghum bicolor
  Intron number 3 from transcript Sb02g029920.1 (locus Sb02g 029920) derived from phytozome v7.0 (chr-ID chromosome_2; pos 64999148 to 65000034 reverse strand)
gcattgatcacttgtggcgcagagaagcgtttcaggtgatcatattgatccaatactttttgatgatttcagttgttttattaactgtatatagcttttgagggagtttcatttctagcttatttatcaatctgagaattcttggagactgtaatttgtttaaccgccatgttctatcttcccttgaggggacatacaacgagagatcaagttggtcatgttttgggcgaaactattaactggttgtggtgcttttttttttattgcactgaagtcagatcctttgtaaaggattactccctccgttccaaattgtaagacgttttggcttttctagatacaattgcttttactatgtatctatacatagtctatatctaagtgcatagcaaaagctacgtatctagaaaaaacaaaatgtcttagaatttgaatggagggagtacttgatagtgcatacatgttaaaataaagtaggttcaagggaaaactttttatgaatgaaacttcttagagagagattttatttccggacaatttgggcgttgggattcatcattagagataggacaatacggttttggatctagcagttccaagcataggctgtaaaggagaggaaacaaggggcaactgcccccaggattgtttgaatgttatggaaatggtgatgattgcagtagggtaacgtgtaaatgacggatacacatgctatcctgaaactgttccgtggaaaaagcaatgatggaaggtggacaggggaaacaacttcaaataaccatcctttaatataacataatattaacatctttgataaacttatagatatatgtcacactgctaatgctcaactagtctaatctatttttttaacaccttacagttct

SEQ ID NO: 36156 - DNA, 879 bp, Sorghum bicolor
  Intron number 1 from transcript Sb05g004790.1 (locus Sb05g 004790) derived from phytozome v7.0 (chr-ID chromosome_5; pos 6181768 to 6182646)
gccagctagatctaacatcagtataccacaaaaatgtgagttcctattctgataatcatttcttctctagtagattgcaataagttatataccccaaagttttttatttaatggattgtataactgtataaaggccttccttgcatgggccttgacccttgcatcctaatccatttaacaaggaagtggtgccatgattaggaaatgcaggccctgtttggttgcatttgttaaagtttaccgcccgtcacatcgaatgtttggacacatgcatggagtactaaatatagactatttacgaaactaaaaacacaattagagagtaatttgcaagacgaatcttttgagcctagttagttcatgattggacattaattgtcaaataaaacaaaatgctacagtacttattaaactttaacaaccccaaccgaacaccccctaatgctttgtattgttcttggctgtatttttttttgccttttattattcttgacctgatgaatatacttgaccttagttggctaactatatttaattatttatttttcttcataaagctgcacaaatggtacgaggaatattctcatttgcccctcagaaattttgaacttagcaattcccatgggtttgatcgcatgttttcccaatcgaagttcaatgatactaatcatgcatgaattgtatgagaaatattctcatttgcccctcagaaatgtctaagttggcaaccaacactggaagttcaattgcacgttttccctaccaaactctatgataatatttatgtgccttgaattctgactttgctggtgccaaactaagttcgaacaaattgtattcataggtttggggtgtgataaagcattttgtggggcttat

SEQ ID NO: 36157 - DNA, 828 bp, Sorghum bicolor
  Intron number 1 from transcript Sb06g016870.1 (locus Sb06g 016870) derived from phytozome v7.0 (chr-ID chromosome_6; pos 45970486 to 45971313 reverse strand)
ggcactgagggtgacctgcgcctactcccccggcggtaagggcctagctgccgctgatttatccccgtgccgtgaagctttatttctcacgccctctttactgctcgcttaacactcctcggaaagtgcaatagcatgcttcaagcttctattgtagtttccgcttgccattattttgtagcgaacatgcttacgggcatctagtgctctctccgtggtgaaaggcaactttatagaagctagatgtaacggatggaatggacattgtagatcatcctttgatttgaagccgtggttggctagaatgattgaaagttgagtcttaatacatgttgaaaacttgaaataatcttctggcagctctggctatgaaattgaactttcctggaacttctttgaaatattctaatagctgtttgccgttaacaatagaacttcatgagtaaatacaactaaactatcgaatatttttataccataaagatagacaggcactacgcatctatgcatattatgttatcttactgccatacagctttcagctttgtccattcatagtttgattgagtagatttcattctctgttttattcatcttcttcgtgtgatagatagcccatcaactttgggcatctttgtgattgacctaaataaagactttcagattccctgtgtacttcttgttttttttttcaacttttctaactccgttatatgagcagaactactgctttgaatttgacatggattttatctgtgaagcttatgtagaaatatttagaaaaattctaatgatattgtctacttctacagctgaaagaatcactgc

SEQ ID NO: 36158 - DNA, 603 bp, Sorghum bicolor
  Intron number 1 from transcript Sb07g025843.1 (locus Sb07g 025843) derived from phytozome v7.0 (chr-ID chromosome_7; pos 60959943 to 60960545 reverse strand)
gcagccgccgcccgtgctcggccacggccagcaaggtacgcacgtgttagcgcacgggcccacgtgcagtgctctccgtttttgttttcttttgtttttaatctttgagattttggcgtctctgctagttgttctttctgtagatgaactgattttttttctcaatgaataggagtatgtcattcagctagctttgcactctgcccatgtttgcaaatgaataataaaaaaaagagagagtccaatttacagccttttttttctaattggtcgtcggtgagtactacagtagtttgcaaagtttattcacaatcgatcaacagtactatgaatgaattactctactgttgtaccactgtacgtaagtcacaattcacaaacgtatatatatagtagtaataaataacagtaaaaacgaggatcttcttcccggagggttctgaaaaaaaaaaatcacagcgcgtgcgcctgcgcctagccgacgtggcaatccgatcggcatgcttctgactctgcccgggtgggcccacgctaaacggtggcactccctgttgcatttctgacacgctccctctgtctgctgtgtgtggattgattccagtg

SEQ ID NO: 36159 - DNA, 698 bp, Sorghum bicolor
  Intron number 2 from transcript Sb06g017100.1 (locus Sb06g 017100) derived from phytozome v7.0 (chr-ID chromosome_6; pos 46263803 to 46264500)
gccgagatctgctcctccttcccggtacgcgtccatatagtggtgcactctgtctgtctgggccttgcatgatcagattgatgctagttgtagttgccttgcatggtcagatttccgtgttgatacagattatgccacccatattcggctcaaatggtaccatagaaattacttatgttttcttgggcaaaggattaaatgccctgtcatcagtcatcacttgcgtgttcttttactgttgccatatgttaagcaaggttattatatcttctgtgagtctgtcattactctgcacatagtgaacctttgttttttttcttgaaacatttttgcttactgatcccaaaagaagactgataaatgtcgcacaccaaatcatacagctacttcaatttgtatttgtacacaggccggtggttaacccatcgcttctcttttaaaaaaaaatcatacaagctaatttgtattgctaattttcttcaatctgcgcaaccatcctagcgaagttgcaacatggaattttactgtcctgactttgcaatggcatggttgtaagttgtaactgcaatgcgcattcttccgaggaaggcgtgtttgtctgattgtttctaatcacatatatttgtaactgaatactgacgcggttttcttttttgtgagcagaccactggttctctgtatttctgggctgctcattt

SEQ ID NO: 36160 - DNA, 466 bp, Sorghum bicolor
  Intron number 3 from transcript Sb08g016450.1 (locus Sb08g 016450) derived from phytozome v7.0 (chr-ID chromosome_8; pos 43974365 to 43974830)
aggtatgcaacaacttaggattcatgttatgcagaagagaatttttctttttttttctctcagtacctacaaagctgcattttcacttcagtgccgagtagcacaggaaaagaaatgcattcaatcattgatgcacaaacaactcctaaagcatgatgtgagatgcatggattttgaatatccccatctgttagagaggaagagactgagataaatagccactcaaaacttaagtgtgatgcttggatcagaacagagtaaatctagtccaataaaaagatcagatatttatcagatcacaagaaaattattgataaaacctttgatcttcatgaggcagatgactagatcagtgttgtattgttttaatgcttcatatcatccagttggcactattcatcttttattctttatttatcaacaactggcactagatgatgctcatcatgatagcataattggcaga

SEQ ID NO: 36161 - DNA, 1025 bp, Sorghum bicolor
  Intron number 1 from transcript Sb08g020840.1 (locus Sb08g 020840) derived from phytozome v7.0 (chr-ID chromosome_8; pos 52304517 to 52305541 reverse strand)
tcactgcgaccttcgccgcgacgagtctgctcccggtacgcacccatccttccccctaccgctccctttcctccctgcgcgctgtgcgaaatcgagcagcccccccaaaccctaatctgagctgtgcgtatgcggatctgacacaatttttacatgtatgtgctaaagctaaacccaatagattcgatcttctttgccaaaggcgaaagagctacgcatgtcctgtactggatctgccccttgtaggcgtttgctcgtgttgttacaaatagtatggcttgcttgcagtttcagtgtcatggtgacctgcgattgttaaaactgataataaccaggtagtgtgcgttgcgcctgtggggaaaggaaaggactcgatatgccagtaatcgattacgtagtgtcctttgtatgtgtgctcctgtggggggtaaggcaagggatttgatatgtctgttctgtattcaggggtgaatccaaggtcacgctaggacccgggctgaggtatatgaaagtgccacaactagactattagagttataatctttcattatttatatgatttaccattggtttgtttggtcaaggacccaggttgcagcacagggcagcccggggcctgtccaccactgtctgtattccagtagctaattcctcaaaaactgttcgttacgtgtcaatttctttcttgatgacttggcagtaacaatgaaaaccaagatgatgtgattcatggttccttgatcagctgaaagttttacctattttctttggtgtgcgtagaatttttgtcattctacgtccaatatctagagaatgatgatttggacaaatcaaatataaggaaaaaaacaagtgataatgtaatggctttttttttttaacatcagatggtcagtacgtatggattccataattatcagcatttgtactatgtaataattttatactcccctcatattgaccaggctctcttcattatttctaatatatcattgtgttcatctctcttgcagtgggaagtcacc

SEQ ID NO: 36162 - DNA, 454 bp, Sorghum bicolor
  Intron number 1 from transcript Sb08g000930.1 (locus Sb08g 000930) derived from phytozome v7.0 (chr-ID chromosome_8; pos 868504 to 868957 reverse strand)
cgctatcctggcggcatccacgactccgatttccggtaaattgatatcatcttttgttcttctcgctctcccgttcatgttctggtcgagattgttcgatcccatctcctgatgtgattcggctccacgattaccatctcgcgtcagtaaggtcggctgcttctgttctggcaagaattcgcagcttcctttatccatagtaacctattaatcttagcagtacgggcttatcccttggaggggttttttttttctctgtatatcttgtagcaagaaagaaaaaaaaaaagaaattagtttctggtgtcatgtcaaggcacctgcttgaagtgtctatccctttggtggtgattggagtctggagatgctttgattcctttccttcttgatgataagaataacctcctttttgttacttgtgcagttgtgcttccttttgctctaaaaggacctc

SEQ ID NO: 36163 - DNA, 890 bp, Sorghum bicolor
  Intron number 2 from transcript Sb01g044490.1 (locus Sb01g 044490) derived from phytozome v7.0 (chr-ID chromosome_1; pos 67591403 to 67592292)
gacgagtacatcgccgccgtctggggacgtaagaggtcagtttacgggaccatcacagttgattttttttcctaattagggactgcgaatttgcttgatgtggagatgattggcgattgcttctgtgatggttcgagcaaaccatgtgtgttgcctttggagtaggtgggaactaggtgcatttagttacctgtcaagtgatgtgtttgaatgaacatgtctagaagatgagaagcaacagaaaatagatcctgcgacttgtgttacttttctttaaatattagtaactatgagagctggtgcgttggtgaggatcaattgaatttcgatagaaattgttgtttcttctcgggtactgggaagtgcatgcatgattgctgactgtggtgagaattgatctcagttctgcaaacaatccttcctgtggaagcaattttgctcattagtgatccaagatgctagttttgattggacaagtgctgcatcactgtgttgtttactaagattagttgaaccaagaacttgtgaaattttttattatagtaaaggacttctgcaacctgttgttattcagtgctattgttgtgagaagctcagtagttagtattgatcagacctgcatgctagtggactagtgatcttttgattttattgatgtatgagatatctttcatgggtcttttgctgaacccagatatgatcaagatgctatgtggcagtccctatgttgccgtttttgtagttgtttctcattgaccacctcagaatcttgttccattacagtttccacatctctttgaagcactataccgattttgttggataatgtatagctgagtactcttgttgcttcagaacagcaaggtggagatcattattagctgggttga

SEQ ID NO: 36164 - DNA, 812 bp, Sorghum bicolor
  Intron number 1 from transcript Sb06g032430.1 (locus Sb06g 032430) derived from phytozome v7.0 (chr-ID chromosome_6; pos 60565810 to 60566621 reverse strand)
acgccctggccacccctggccccttctcgaagaaggtataaatctcagcctcagtgaattacctggtcctgagataggttgggttgatggatccggtgcgtcatgttctagttcgcttgtaagctccaacctccaagcaatcatgttgcgtacttgcgtgtgccatggatcattgttgctctactaaccccctgctgtatcattcttcattcattggatcgtcgccgctcgtcaccactgaaactagggtctctacgattgcacttgcctgcgttctgctagcattgcatatcgacaaaccgtggtagtgcatagctaggaagcaccacagctcacgaagctgctgactgtgtctgttttccatgaaacattgctttccgtacttcacctgtagaatgatctcgttaaaaaaaatgtttgggtcaatttcacaacccatcagaagcttgtaaagtctataagtagctccacataggttgtttgttgtttaaataaaaaccctgtgtaaggatgaagctaatcatttggcctctgattgtaggctgtagtttagttgtagttagaccataaccttgttgatgcaattccacatagaccattagaacctcctgttgtgcctcctcttctttgatcactttgtacttttgtagttctgtttcattcattgtgctaggtgtgtttgtttcttttccagctcgctgagattgtcaatcggggaaactagtgtctaatgagatcaacataaatttgttgtcaattttcttgatggtattgtttgtatttttttttccagcttgctgagatcgtgaatc

SEQ ID NO: 36165 - DNA, 940 bp, Sorghum bicolor
  Intron number 1 from transcript Sb08g018150.1 (locus Sb08g 018150) derived from phytozome v7.0 (chr-ID chromosome_8; pos 48157771 to 48158710)
aagatcatcgcccagctcaaggccaacgtgcgtgccctcctattcctttgagcccttttcttttgctcctacttgctgtattactgttatgttagaaattgtttgttgtatgatgagactgcattatatttaagaaatcacttccagcataagttggtggacctgctttggagatatgctcatagtatgaaactctggggcggtctgaattcatgatctgctatccaggttgtgacgctgtgtgcgcttttctgtaatcgatggaatcaggaagctctgtgactaaatcaataaaattaagttagagttcagtagattatttaaaatgctgttgcagttctcaggtgattgtgcatgtcccagtagacccttaaacagggaattggtttgcatgataattaggttatttagttgtcctttgctgtcacgtggcactcgttttgtcgtccgttttaatctgtatttcccttatatcaacatgacggtttgggattttttattttttgcacgagaatttgggtatttagttgccctttgatgtcacaggctgtttcctcattggttctgttctacttttccccatatcaacgtgatttatcgggaattggatcgcacaagaatttgggtatttacttgtcctttggcgtcacttggcacatgttgtttcctcagtggtgtcattctgttttcccctcgaatcagcattacgtttcgggaaactgtgtttttactttccttatttattagcataaagttttatgtgtgcgtatggcaggatattcttgtcgatgtagaataaagtcatttctgcattgtcttatgctacatgtacccttcttcatgctcttggcatcacttttatgtcggactcacctgaccaatggagtactgaggagtggaaacttggtgatgaactttcttactttgatttcaggaagat

SEQ ID NO: 36166 - DNA, 577 bp, Sorghum bicolor
  Intron number 2 from transcript Sb08g022960.1 (locus Sb08g 022960) derived from phytozome v7.0 (chr-ID chromosome_8; pos 55088166 to 55088742 reverse strand)
gtgaagcatctttgaggactcagtgattaaacaaggtactgcatagaaatgagcagtactctttcaagagtctgttttccaaactcgaacaaactattcgttcagttctcctttccatgagactatagtttatatccagccgtgtttctaaataatactggcccaattatttgattttggtttcttgcgacgtgtgattgtctatcttggtataaaaaatggaattcacaagcatatattcttgtttatcatgataacggaggcagtgctctctatccaatctaaaagtgaaagaggaccacctgtgcctccagcctgccaatcggctcatcgaattttcagtccatatgttttcacttctacagcaaattttgtattaaacccttttgcgtacaaagtttctgttgaatccgtttccggttcactgaactgctttgcaaagaacttggtgtatcatttatactgcagagaagataaaccttatcaatcttgaattttattaaagcttcctatctgacccactttgcttcactcaattgcaggaaagctgtaagcgaaaggtttctgtcggctgctg

SEQ ID NO: 36167 - DNA, 756 bp, Sorghum bicolor
  Intron number 1 from transcript Sb10g004200.1 (locus Sb10g 004200) derived from phytozome v7.0 (chr-ID chromosome_10; pos 3688968 to 3689723 reverse strand)
ggccggcgcctcctacccttcctgctccgactacggtgagttcattgtcccttctcctggcactcctctcgttcgttgattcggacggaacatgattctctcagcctgtagattccatcagtatatggcttacttgaagtaacgatcctgattgtttccttttgttttccttttcgtaaattctgtctaagaactgctgaatcgtggctactgcatggagcaatccttacatttagcatggccgaattctgcatttgtaattgaattcttgctcctctgcgttcggttcgctttagggatcagccaatttacccaagatttattctctgttttatagtatgatcggtttatgaaattctgtctgtcattcgttaatctgcaaaggatcaagttgtgtagagaccatggattcttagttattaagcaaactcttgcgtttgtatacttggatgatttgagttatcaatcaaggtctaaacattttgttctcgccacgatgtgtattcagatacctgtgtgaatgtgtcttctgtaacaatcagtaacgatcctggttgtttcttttttgtttttcttttcgtaaattctatctaagaactgctgaatcttggctactgcatggtgcaatccttactacatttagcctggccgaatcctgcatttgttattgaattcttgcacctgtgtgtattcagacacctgtgtcttctgtttgccacaggacctgggaggccgcactggcctgttgcagcggcg

SEQ ID NO: 36168 - DNA, 529 bp, Sorghum bicolor
  Intron number 3 from transcript Sb01g002210.2 (locus Sb01g 002210) derived from phytozome v7.0 (chr-ID chromosome_1; pos 1853469 to 1853997 reverse strand)
gtcactgctgtaaaggagccacgggtctttgtgaggtcgggtattcttctgtttttcctgtgatctttagcattttatttagtatatatgtgcaatttgtcgtatcttggagaacaggccatgcacctcaatttataggttcctatttgttctcatcatctgttgtcatctgcccaactgctaatactagagatctcccagtatcaaagtgtggcagaatatcaaatgtcccctcatatatttgatagtttatgcccaacctacagtgatagcttactcttactgagatttgtggccctgtttatcagtattaattatcatcctcctttcttactttcccacctgagatgtatttgtttgtgggtgttaaaatgtaatggccacattcggtcattcgcataagtccataactgccttttgtgatgtttccttttgttggggcttcatgcttttgcgtagaactcaatgttaaatggcattcactatgtcatgcttcaattaatatatgtatctgacttcaggccgattt

SEQ ID NO: 36169 - DNA, 493 bp, Sorghum bicolor
  Intron number 1 from transcript Sb03g040355.1 (locus Sb03g 040355) derived from phytozome v7.0 (chr-ID chromosome_3; pos 67994560 to 67995052 reverse strand)
agttcaaggtttgtccccaaattttttttttgaacaaccgcgaatatgtggttttgtcttcatgcgactgtagtttcctttctatgctcatttgaaattgaaggagtatacatattttaatgtgagcgtgacctcttaggaatttctattcactgtatttgcaattcgtttaacaagtatggttgaagcatttcgcacatttgattctgggtctatcataggtgttttggcttgatgtgagtatatcattgccatattcgtttgaaattgaagcggaaaacgtgacttactgaggtgatacttgtacttcgtgaaacaagtttcatatactgaagcattctgcacatttcattttgggtctttcatgggttgtaagttccatgtagttagattcagggactgtttctcttgatagaactttacacagaacattaagatttgtataacatgttctctcatttgtctgtgtagagtgctgtggtagtagttgggg

SEQ ID NO: 36170 - DNA, 871 bp, Sorghum bicolor
  Intron number 1 from transcript Sb02g007720.1 (locus Sb02g 007720) derived from phytozome v7.0 (chr-ID chromosome_2; pos 9685202 to 9686072)
gacgcgctgcccgttcaggttagcgttgaactactcgcttgctacggttgctactgcgctctcttttggctcttcatttgaacatcaggtaatgatcagagttgtcaagtgttcaatgcttcgttgcagtaaaagttaatttgttttcactgaactgatgaagattcatgcgttaatttattcaagtatggagatcctcagatctgtaaacataattgaggatcgaatgcgaatgtgatggttgctatataatagtacggaaacttgtgaagttttttaggcacgatgatgaatgttggttcggcgtatgatgacgtatatgtcgcaatccattgcataattgtcattatctgggagatatgtcattgctaccaactgctcctattttttgtccgatagagaactcctgaaaggtagggagacaactacagggaggcctactgatgagtcatgagtgatgaatcccaactcccaactcccaacatgcattagagacctactgtgtgatattagtcatcattgtgtatttgcttgcattctttaacgcccagtttaagtagtcaaaatgacgccacacatgatgtaaatactaagaatgaaaaagacatggaacaacaaacacatctgatgagtcattttttggccacatcttgcacggcattaaagtgtcagacaaatcaaatatatggcgtacattatacgaacgaaaacgatagtaaaatttacgctttgggtagaagttaacaatgtttactgaaagcaccatactatgtcagtgattgcaccacaagggttctaataacaggttgcatgctgctattgtgtgtctgttttcttgaaaatggtagataatgtcgtccttcggcaggaa

SEQ ID NO: 36171 - DNA, 951 bp, Sorghum bicolor
  Intron number 2 from transcript Sb04g022760.1 (locus Sb04g 022760) derived from phytozome v7.0 (chr-ID chromosome_4; pos 52345390 to 52346340)
ttattgataccccaggtaagacttccattttcaatgttatttctatctgttcaatctgttggcctttttggtgttataaatttgtgatgcctatatctgatcttgtgccacatttcatccttatctgtctttttttctctggtttgttacttctatcctttattatagaagtgtcattgatattatgatgtttgacccatggtttgttactttatttatctattcaaagtttcaaactgagtggagaagccatctgttaccctcacgtttagcatgatagtgtatagtgcaatacatgatgtagtttactcactgaagttactttttatattgataaacttgatgcttgctattaccatataagaagtgccactgttatgaacggattttcattctttggaggtctttttcatcttggcaaaatatgtttactatataatatgaaaagtctaggtccaggtcgcttttcggttgtttttgtgtattaaaaagtaaaaactgttgaactctgccacctgagccacttctggattcgggtgcatgactttgctcttctttaacgaaatatgtgccagttgtgtccgcgaaaaatatgaaaagtcccatacttaaaatacttaatgaatgagaaggttccacatgtgtttcccagttgcgtggtgaagcatactagttatcctttgttttatgatctattcacactgcattttttttgttcaagaggtaaaagtaactttatgcattatagagagttgtgaaatatgaaaattgtgtataacatgacacctttttaaaagcctagaatacttagaaaatgctcctgctgatggtccctgattatatatttatatttaaaaggtattcacagccactggttcttttcttgcgatgttgttcaagtttgtattttgggctagttactaacttaaacttcctatagggttatttgat

SEQ ID NO: 36172 - DNA, 631 bp, Sorghum bicolor
  Intron number 3 from transcript Sb03g039690.1 (locus Sb03g 039690) derived from phytozome v7.0 (chr-ID chromosome_3; pos 67362050 to 67362680 reverse strand)
gcactagggatagttgccaaatcataactcaagaggtacatgccatgcaatttctttttttcttcgtccattttctttgttttgctagatgtttagctcgcttcagtatgcatttttctacttttaatttaacgcttttataatggctgattgatgttctacttataatggtttatgttattattatttgcgtttgtcttcgtgaacaacaatattaaatgttactacccctctttcatcaaattataagatattttagccttttaaaattcatagcttttgatatgcaattaaatatacactgtcatagtaaaagcaatgtaaaaagccaaaacatcttataatttggaattgaacatcttataatttggaattgagggagtactgtgtaacatgcaagtttggcctttctatggtcaagtaggccaaatttgcattttcattcatattggattgactaccgtcctcattaataatagatttcttatattgtccttcctcattgcttatgtagccttgttccttgctctttttttttggaaaaaacctgacatcacaactagtaataatctattgataaatggtgatgcttgcaggatcccattttgcagttgacaggcccctctcgtgc

SEQ ID NO: 36173 - DNA, 616 bp, Sorghum bicolor
  Intron number 1 from transcript Sb06g019730.1 (locus Sb06g 019730) derived from phytozome v7.0 (chr-ID chromosome_6; pos 49301949 to 49302564)
cgcgcagaaggcctcgtcttggaagacattgagcggtaaatcctttcatgctcctcctctttccttccagggttgaaactttagtacgccggtagcctagtccagtttttcttcgcaggaccctcccccttcttttgagcagaactgcttcgcttatggcacacgatagctccgttcgtttctcgtccatccaacactcagctgcggattttggattttcggtcgggggattgtttaggccgaccaagatgtttgccccattctttctggccgattagccttttcaactgatcttcatgtccctgctatcggcttttatccttttcggatgaaggaaaaaaattcgcgatattgtagcatttttcgtttgattgtggtaattattgtccaaccatacgctagctgggctcagattcatctcgtaaatttcgaacaaactgtgcaattagtttttattttcgtctatatttaatactccatgcatgcgtctaaagattcgatgtgacaaaatcttgaaaaaatttgggttttgggatggaagtaaacaaggcaaatacgcccaatacatttttttttttcaggcaaggctccagcaatcgtagccaagggtggattt

SEQ ID NO: 36174 - DNA, 610 bp, Sorghum bicolor
  Intron number 1 from transcript Sb01g010390.1 (locus Sb01g 010390) derived from phytozome v7.0 (chr-ID chromosome_1; pos 9206574 to 9207183 reverse strand)
cttccacgccacccagcccctcttcgtctccggaggtaatttgctagatccttcctcgtctcgcccgtctagtgcgcgcttcgcatgtttagctcaatttctctctcgcggattggtggtgttcccgcgagttacgtggtggatgtttgatggttctgcgattcgttgattgtgtaatcgtgggcgcttggactagactggtttacaagttcgttgatgagatcgcctttggtgggaggtgcggtggttaaggatatatatataatagtttggtacgatgggctggtcgaactcggatctggtgcttgcttcatctgtgcatacaatgatctgtatggtatggtaaataattccttagtgtttgatttttcctttgcctgtagtcagtggattctatatgatctttgaaacatgagacagaataccttggtcacaaatcacaaaggcattctcattagcgtgcaccaagacaaaaaccaatgctgtaatcgtgctatcaataattgaattcaggctaatgaaactaagacatccttcgacacattactattgttacttgtaaaacttattagtcttctaatattctggttactgtgatacgatgcaggtg

SEQ ID NO: 36175 - DNA, 681 bp, Sorghum bicolor
  Intron number 1 from transcript Sb10g004493.1 (locus Sb10g 004493) derived from phytozome v7.0 (chr-ID chromosome_10; pos 3980073 to 3980753)
cgctatcgctgccgccgccgccgccgctcgcagtgagtggctctctgtccctcctcattctgatgataatttatcacgtccggaagtgtctggggtgcatgcggtgtggcgtgaacggtacctgttcgttgtattgcccgtgagtcacagacaaagcctcgttcctttttctttcaaaaaaaagtggctttgcgaaacagcaaggttctgtggggagctatgccatggcgcatatcaatatattattattccctggttacagagaaagacatcctttgccattgcactaacaatgtgcatttctgatttgcatggaataaaacagataccatcaaccaccattgcgtcaatcaccttatttttcttttgtttcatctacttctccttgaagaagtattcaactaagaacgtttattgaatttgggggtttaggttaaaatgaagcgcctatttttgcgtttgatggggaatgcatatgaacataataatggcttttgccctttgcgtttttgttatttttttcatgtgatcatgagaatgggagggaatgatttttttttttcacgattctacctgttataatttggtatatatttcatttgagttgtgcttgtttttatgtgttgtctatttgtttcctttacagcttcaattcgaggtgtttcagagatattcttccgc

SEQ ID NO: 36176 - DNA, 977 bp, Sorghum bicolor
  Intron number 1 from transcript Sb03g030620.1 (locus Sb03g 030620) derived from phytozome v7.0 (chr-ID chromosome_3; pos 58825806 to 58826782 reverse strand)
tcgccgacgtcgccgaccccgacaagcccgccgtggtgagtccatccagcgcttcatagtttgggtgggattggttcagagcttcaggctattttggctcctggaactggactggcattgttggcttgggtagttaattttggtgggaagggatttgctatgcagattgatcgcatggccagtattgggtttcatgtgcctgcactcggtaaactgaactgttactattttgcgtcgagttcaaaccataaccgttgtagcatcggaatgtagatgcagtgggtgcaaaacactgaaccaatctgcagcaggattaactgatttgcttgtcatctgcgcaactgctactactccctgtttgtaattcgtggccgaatttgatctttggtgatccttttacctctcaatctctcatgagtatgttgcaatcagtgagcgtttgtaattcatcaattcagaatctgcaatttcagtttgttcaattgggttgcatcgattcagtaattttgtagtagttgggtgttcaaactgcttatcctacatccatggttgatttcagtactttgtttcaacgattcatgtttgtatctgactagtgttaacggttcccatattagaacttgaagccatgctttaaatcgtttggaatttcaggattatattagctgaagcaaactaagggagatttttttttcttcccttttccttttatcatatattacattggaatttcctgaggtgcatgttagtttatctgacaaacactgtgaaccaaaatttcaagacttgccataggatacgccacataagtaattaactattaaataaagcagaagcaattattgactaagttttgagctacaataatgttatccatataaaaaatatacatttggtcaatgccatgatcccatctgatcttttttttttctgtgtgatcagctgattgaccctgtcgacagaacagttgacagaga

SEQ ID NO: 36177 - DNA, 881 bp, Sorghum bicolor
  Intron number 2 from transcript Sb06g020460.1 (locus Sb06g 020460) derived from phytozome v7.0 (chr-ID chromosome_6; pos 49901647 to 49902527 reverse strand)
gggtatatacgctcttctttgcttccctttccccatcttttgcttcccaaaataaaaggatcgtcgccattgcccattgatacatacatagggtgtaagtagttagaaggctagaaacttatcttgaccgatagcgctgctgtataatccgcttggaatgtgttcctatcagtctgctcacagttaggaataattcagtgcaacatgctaccaacgatctattcttcgtttggcaaatgacagtcctttagctatttttgatatgactactacctagtacatgctaatttggctcaggattggctaccatagtgctcaagatttgccatctcagggcacctgaaactgtgatatgccaaaagtgtcagaataaaaggggtgtcagagctagtgatgaagtatgttggactggcttatgagcttgattgcctgtcccttttggtagatgtagttcattgtatatcagttggtaacttattgcctatgtatagttagaaattaaagactctttcaccttttgtgttggattggatgggggctacaagttggcagtgtagattgctatgctattgttcgttcctgggacactgctttgatgaacacttgggtatttggattttggacagcgtaaagttaccgaggaatgtatgggtgtcctacttgcaacacatcagctaatctcatggttcacgtggatatggcaccctttttttctcagttcgtaataactatgtgcttatgtgtttgtcaaaaaaacactgaattctttaatgctttgattcatttttaatctagtactctattttcctagtcgactactaatggcagaataggcttaattttgcaatgattgtgtccaggtaaaagtttgctgcaatcac

SEQ ID NO: 36178 - DNA, 694 bp, Sorghum bicolor
  Intron number 3 from transcript Sb04g031020.2 (locus Sb04g 031020) derived from phytozome v7.0 (chr-ID chromosome_4; pos 60992340 to 60993033 reverse strand)
aggaaacatacaaggtttgcaaacacgggccttaattctgtttaccattgcttcaaccaaaacaattgcacaacttgtgtcttgttccagttaactcatactaccatactgcagtggtttattttcttctactagttcatgccaaaagataaaagtggaatagtttttgttgttccatgatgcaatcatagggaaaaagtctgatttagtagcgacatgcttaagtaaggctgctttagtgcaatcactgagctatttatgtttcacatagttttatgcttttgtacttaatagtttacttacatttttatggttatattcctgtgcaaccaaccgcgctcaccaagtacttataatgagcgccttaggcagcacttgtatcattcctatagttctggatttattatccataataatttactggttgttttgaaacatgatattttatggaaatacattatgtcttgttgattattttagacatccacacgatatcaaatcaatgtcttggcacattactttcttctgatcaatggaagtgcttgtaatatcatatcttattgtaaaatataatggggtagtgctgcagaagatcaatatgatttatccttgcacagaatgtttttgcactttgtaaccaaggtcatttccatgtatagagcttgaaatcaagaggagtgcggtttcctggacg

SEQ ID NO: 36179 - DNA, 924 bp, Sorghum bicolor
  Intron number 2 from transcript Sb01g008120.1 (locus Sb01g 008120) derived from phytozome v7.0 (chr-ID chromosome_1; pos 7014860 to 7015783 reverse strand)
cgaccgggctccatcacccgctgcacgcggacacggtacctcacctgcatctgtcattgaataaactgcctcgagtaaaagctcaatttttcttcaagaatcaagaaccaggcattagtttttatggactgtcgtttttaggagaagctaaatcactttcggttgttttaagcactttagctcacttttgagttctaaaactctataatgaggtgagcttaagttaagagctaattttaggtcgtctgtctacagcttgagctctaaagttacagcttgagctctaaagtttagaggagaggattcaaaacaagcccttagtcactgttggatgtttgtttcagttgcagttcagcgcagtgatactgtggacaacatatctggttgtggttatcatcatggcatggactatctggatagctagaaatgaaatgattttccacaacaatcagatgagtttacaagaatgcaaaatcttcttccaacagcagattaggcttgtctccctacggggctggctgctattttcttcgtttcgttctttgtctcctgatttgactagttcttctttgtgttagggtgtgctttgttgtattttgcttcctgttctgtctttttccttctttgttcgttgtaaacttgttttcatttaaataaattctctgtaggggcttgtggcccctccagttccatacaaaaaaatggtgtccacatcaatcaattagagatcgcaacaccataccaatcttggctggttcgctttttctctccaattcattttggttgttttggccggctccaaaccagttatttgtcagcctccaaacaaacgaatccagactaaataatccttttttttcgagtaatcattttgtgtggattgtcaattgcagaaacagggtgacagacagctatccaaagaag

SEQ ID NO: 36180 - DNA, 745 bp, Sorghum bicolor
  Intron number 1 from transcript Sb06g018840.1 (locus Sb06g 018840) derived from phytozome v7.0 (chr-ID chromosome_6; pos 48464317 to 48465061)
agtgttaactcgtcgagttgaagatctccagcgaggtaagagtaagactcacatcacatctgtgcaccgtgctacacaacacaagattgtcatctgtacttatttctctaatcaatgccatcatatatcatactactttttttttgcgatgtttattaatgcagttctctgtagatcaactcttcatcctgtagattagtttcaatactgtttttttgttgttgcagtttgattcagctgcctcatttaatatataggaagacgtagtatagcaacctattaaatatgaaaaaaatgcagatagtcaactggaattcctttgcttctataaaacaagaaattatgccctctgacatatctaagtactcctagaatgaggtcttaggagcacacactgagattaattgcttaacttatttttattactgagaaatttaagagttacttggtcatgcatgccgtatgatgcaatttctgaaaaagcctgaaagagctgcccaagtccttggttcattccattatatctgtttccaaattccaatacgtataagtatgaaattttgagaaaactgttgatcttttggatagtgtgttctctcatttttcctggattgacttacatttatttctggagacaatagttgttgaagagcttttttgtttaatgattttatcatcgtatattatgtatatatattcttgtggcacagggtgtgatgatagatacttttgcttgcagagcgtg

SEQ ID NO: 36181 - DNA, 561 bp, Sorghum bicolor
  Intron number 2 from transcript Sb07g020380.1 (locus Sb07g 020380) derived from phytozome v7.0 (chr-ID chromosome_7; pos 52908027 to 52908587 reverse strand)
ctgccatcgcaataaggtggagacagttgccgctggtgatgctcaaacagtcatcagttacctcacggaatgcaaatgtagggatcctgatttctttttccaatacaagactgatggggaagggcacctgaagggactactctggtgtgactgtcaatgtcggtttgattatgcagcatttggtgatgtcgtcgtatttgatagcacgtacaaaactaatcgatacaacctgccccttgttccttttgttggggtgaatcaccatggcagcactgttctctttgcatctagaattattgcacaggagactattgagtcatatgtgtggatgctaaggacattctctgatgccatggctcggaagcatccggtttctgtgatcactgatggagatcttgctatgcagagagcaatcaggctggtgtggccgaattcatcgcacaggctatgcatatggcatattgagcagaacattgtgcgtaatctgcacgaagatggcgtcaaggatgatttcagacattttctttatgactgttggtccatagaagaggttgggaggaa

SEQ ID NO: 36182 - DNA, 807 bp, Sorghum bicolor
  Intron number 1 from transcript Sb05g000250.1 (locus Sb05g 000250) derived from phytozome v7.0 (chr-ID chromosome_5; pos 71939 to 72745)
ccctcgagaagaagggtgtcctcgccaagattagggttcgtacttcccacttcttcatttccccaatccctccattgatccggtgccttcaccacgccccacggatctaggttttcctccccctcgggtttggggatctacacctccgcttctgcaatttccttcccaaatcagcgcatttttttttttcaatttttaatgtgcacattctgagcgccttggcgctgttgggtaagttcttgcttaggaatatgaaagaatgctcatgcattgctcaagaaaagttttttccccaccacgtccagtttgttgttctagttgccattaccaattcgtgtgctcattttggtgaaactcgtttggagcatatgaggttgctcgcacattgctgaagaaaagactaaccttgtattattttgttggtctggctgtcattaccaattggtgtgcttattcttggcgcagtcattagttggaaacgcgtctgtgttactggaaatcttcttttttgtgctgtgttgtgactattggacctacacgtcttgctacttttgagtttcgactctaatggtatgatgtcagggaatcttactgtaagcaacaacagtttctctagagttttttggggaacaaaagaatctgttctgtgtaacatagataaatacagttatcatgggtttctatcttttttatttgttgaaccatgctatgctccattgaatgcacatacttccaccacgttttctgataatgtttctggcttcatgactaggctgagctaagagcaagcgtgtttgaagccattga

SEQ ID NO: 36183 - DNA, 554 bp, Sorghum bicolor
  Intron number 4 from transcript Sb03g032690.2 (locus Sb03g 032690) derived from phytozome v7.0 (chr-ID chromosome_3; pos 61127632 to 61128185)
agacaccatctgggaaaaatctttttctagatagagtaagtgccaaagcttgctgtctcaaatagaaatgaaaagaaataaagaaaaataaaatgactaagatgaaaatatctgcacaaacctcttggttcaatgttctttgacctttttggctgctcaaatatgacatgacatgttctttttctggatctatctcaaatgctgtactatagaatcttccaaaggagctgggattttgctgcttgaaaagatgccattcatgacttgcttcccaatttcatctttttttaagcaaaattaagcttcatgcagtatgggtggaaccacattgcataaacttgtgaagttatgctgatgttgagacatcacaaactaaccgtatcattacctgttaggttgccccatgctataatgccaaaatcccaagaaaaacagaaaaaaaaaatactgtaagataccttagtattagactctgaaattttcctgcattccaagtaggtccactaatttgagtctttcctttctcctgttcctctaggtttttgatctttttg

SEQ ID NO: 36184 - DNA, 486 bp, Sorghum bicolor
  Intron number 3 from transcript Sb06g016800.1 (locus Sb06g 016800) derived from phytozome v7.0 (chr-ID chromosome_6; pos 45903111 to 45903596)
ttcggctctggccctcctggtgaccgcccaccaaggtaaaaccttaattctcgaggcgctttggcattcatgttaatgtgtatacttaacaaacgtgtctagtgatgatttcacatgtttgcttctcatgtctggtgatgatttcagatggaaaagtacaatcaagtcataagtagctttttgagtacatgtttattaaagaataggggctttgttgtacttatttatactgagttattggtttgataagtctgctctaggatgacacattttgctgtgtaaggatatccttgtaaagcagacaaactaaatttaagcagatcatatttggatgcttttaacagtgtgttttattgaggagcagattaaagctaacctattaggtacaaattgttagttttgaatttttgatgctgttatttaatcttctctttgcttgtaatgtatgtaggggcccaggtcgttttgaaggcgacaggccaaggt

SEQ ID NO: 36185 - DNA, 599 bp, Sorghum bicolor
  Intron number 2 from transcript Sb02g005950.2 (locus Sb02g 005950) derived from phytozome v7.0 (chr-ID chromosome_2; pos 7155879 to 7156477 reverse strand)
gtggtgcaccaataactaaccaggtatctgttttgttgatgatgtgtttctattgttattgcttgtatattaattgctgcatatctcttcacatttttttgtttggtagttattgtggctccttccagtttaaattatcgatgttttttttttcagtttggattttttaacaatatcaattgctgtaaactttgtttttttacattcttttctactgtaagaatgaaatggtacatggcaattgatgtaaaatattgtagttgtattgtactgcaaggaagaaaaaggtgccatgactctcatattgctattggagaatcaacattggttgttctagtgtaacaaaagtagattcaaagtattcttttgctagttgccatgccacatcaagtatatggatatctggatatgaaagcaaacatgtcttgaatcactagttgcatcattattttttcttatgtatcagaatgttgtggtgtcattgggttattgatttttggtctacactactaatgaaatgtgaaaatcatctttgtttataatgtatttcttgaaatattgcagctgagggacttagagagaggtgtggaaatccttgt

SEQ ID NO: 36186 - DNA, 736 bp, Sorghum bicolor
  Intron number 2 from transcript Sb03g029720.1 (locus Sb03g 029720) derived from phytozome v7.0 (chr-ID chromosome_3; pos 57925199 to 57925934)
tcaaacagatcggcgtaatcggctggggctcgcaggttaaaaggcctgcaaactctgttttgtctgatggaactgttcttgtctctaccggcgtttacttctgtcggatgtattgggttattctatttgagtatagatagaagtcgttgtaagtgcccaaatgatggcgtgctcttgggaacgatatcttcggcaccaactgcagatttagattatacatttttgctcgagcactctttgtcggatgaatatggtagggtcaatttgcatgatggtgaagaacaaaaacattatatgctagtatcaatcacttgaaactattaatgttgagcaaacatgtcactgctattgggcttgagtgttaccgtgctaatgttactctttatgaggtatatatagtttggtttagtaggaattgatatcgatgttgctatgtttgttgcttgttggtgttggatgcagtgaataccttccctaatggcagtatcaattgaattatctagagtcgatgtaaatgcacaatctgtattttcttatatttcattgtttattaagttatagttgtttacccatcaatatttttcctatttacttttggacatgaattttctgtttctataagttgtgtagaagaaaggaggtatctacacattgataaaaaccatgtgcagatactgagatagtcatcattaattttgcagggtcctgcacaagctcagaacttgagagactcact

SEQ ID NO: 36187 - DNA, 862 bp, Sorghum bicolor
  Intron number 1 from transcript Sb03g031520.1 (locus Sb03g 031520) derived from phytozome v7.0 (chr-ID chromosome_3; pos 59891279 to 59892140)
atctcaagcctgaggtatcgtctaccaaagatcaggttagtcttccgaccatcatttcacttttttttatgttgctattgataattgtaattgtaatcatgtagagatgttcatgtgtcattgattgatttctgattgttgccactatatggtatatgttcatattttattggtcataactcagtcttataggtcttagctataatgatgttgcctgcattacagcattaggatgatgaatatgtgtagttttatatgaactgaatatattgtatcatgctggtttaccaactgcagttttgatgttttatctagttgtgctgtactggcagtacattgaactgaattgcaatttaaaggattgtttgttttatgagatttgtgtatgctctgaattattgtctggttgagctgctactcaatagttcagttatatataagaacatatagtatctatatgtatatatgcagcttaaattgtaaatgcaggtcgctccttgtgtggactttatgctgtgaagccacataactgttatccatccattacattaagcaagatacattaaacttgttattagattgcttgcggtatctgtattagaagaaagattgtgttccctgcccttgttgacactttgtgttcaatctcaaccgtctcaatttatttgtcatgtttgaagaaggtgttaaaaaaccccaaccattttatattattgggtgaaaacttgctgttattcttaagacttgttataagcatgttactacattgttattttctatctcatgatttatggtattataaaagccactttggtgaagttgtacttttgaaacttacatactatttggtgtaacaatgcag

SEQ ID NO: 36188 - DNA, 995 bp, Sorghum bicolor
  Intron number 2 from transcript Sb03g041260.1 (locus Sb03g 041260) derived from phytozome v7.0 (chr-ID chromosome_3; pos 68795075 to 68796069)
gcactatcatcagcgcctccctcctctacatcctggtatgctctagtactgctctgtcgcggtgtcgtctcttcagcctcttcgattcctaacgaacatcagcaattataggcttcccgtacgactcaaacgaggaagaaaagctaccgactgttgacagtttcctcatgtagtcatatctcaactataccagtaggcactacgcgtttgtactagcatgcactgattactggagtgacccattacccatgtgtaccctggaatttgtttcagaattcaggaatgcttaggcctggtttagttcccaaaaaaattatggacgaaaacaaaaactaattgcacagtttggctgtaatttgcgagacgaattttttgagcctagttagtccatgattggacaataattgtcaaatataaacgaaagtgctacagtagtcaaagccaaaatttttcgtgaactaaacactaatattgctaagaatggttcctctgcggttaacccctgatccttcatggagtttatgctgttccataactcattgatcttgtcattttatccacgacctgctccatgtaacttttaccattttaattgactgcgtgttcagataagagcacctgttgcttccagtcctttagtttccactaagcaacaataggactccactaaccactatcaacagttaattatgtccaattgcctgaatcttgaatggactgtcaatactgaacttcactggataaaatttgccctgagccaaatcatttggaccgaattactgaattttgtgctgtttcgaagaatcaaaacgtgtagaacattaccacagaggcacagagaaattgataatttgtttaatcagtgcttgatgtaatcattgatagagcctgggattaggaaagattacccattgacatgacatatatcattatatttagtttgctggattttatgcaaatttcactgaattgtgtcaacctttcagggactgggt

SEQ ID NO: 36189 - DNA, 531 bp, Sorghum bicolor
  Intron number 1 from transcript Sb07g023900.1 (locus Sb07g 023900) derived from phytozome v7.0 (chr-ID chromosome_7; pos 58926557 to 58927087)
gcctcgagggcgacgacgctgcggggataccgcaggtattcaatcattcaatctatctatccccgtcccccttctttgcttgcgagttactcacacacttcacaagtccgtttcatcatcatttatcgaattgtactattgtagtgtgtttcattgtactattgtagtgtgtttcctatatatgttggtcataatacttttgattagtgcaatcttcttctgttaataagaaaacaaaattgcgtcccacgtggtatctgactacatgatagataggttcggtgggaaatgagttagattgatgttatgaccatacctgatgattactcaatgaaaatggatcctttcctgattccagtgaaaaatggacatgtgctgattgtaatgcgaatttgtaaccaaagggctaagtttacttctttggacaccactgattgtactcatacaaatgcactgtacttagtactgacactgatttctgaacttgtacgtacaggactcatttgtggtgtgccggatcttccagaaagc

SEQ ID NO: 36190 - DNA, 911 bp, Sorghum bicolor
  Intron number 1 from transcript Sb09g016860.1 (locus Sb09g 016860) derived from phytozome v7.0 (chr-ID chromosome_9; pos 42465939 to 42466849)
gacggcgaccacgagctcttcatccgtggcaatcagtgcgcctctccccctttctctctctctcaatatctctcgatgaagcattgcagcggaaatgagaactccgaagtagcaagagctaaaatgttactgcagtagtattgttaaacattgagttttgaatttccctgctcaacttcagtcactagctagttcgcatctgactcttttgcccgcataccttgtaagtggctgttacggtgatttacagtgtcaatcgcgtgtttgctcttttgcaatgcttgaatggtcacctctataatttctattttgctcaattttgtctatttactctatgacggagtcatggtatatggaattggttatttagtcttgctgtgcaagaataatatccagccactttttatcctacggcagtttttaactagtatctctaactcgaagccaaatgccaacagcccaacagtagcgcttaaagagttcacaggtgtgggcaccactcatataaggtgtagcccttaaatttggatcctggaattgtatgacaaaatagtgcgattggctagatgtgtgctgttgatgccgtgtcagaaagcgtggcatgatccttttgtatttagagactgccacctcttttttttttgttgggttggggggtgggggtgagggcatcagttcactttctcatgccaaacggattttgcttacattaccaaagaattggatgaaggcccacaaaaaatactagtataactgaattgagttcaatattagttattgataccaaattttgtgctatatttcctttatttttgcactttagttgattcttgcattttatttttttgcatttgttgaattcttgaccattaatatcatctgtttctgttttctcttccttctaggataat

SEQ ID NO: 36191 - DNA, 865 bp, Sorghum bicolor
  Intron number 3 from transcript Sb01g042570.1 (locus Sb01g 042570) derived from phytozome v7.0 (chr-ID chromosome_1; pos 65825167 to 65826031)
aattggctgaggaaggtcgtattgaatccgaacaggtacaactttcttatcagtgtccattcgtataataagattagaaattcctatagtacttgtcttgtagtttcacatcaactctcacctcctctggcttgtcaattatcattactaaaggatagttgaaatatgctggatcaatcccacaaaaaatgtgtttgatcaccagtgctggaaaaatgtgtttgatttactaacatttttgtctctgccttgtttgtggcgttcattattttcgtacaataatttggttaggcaaatgatacagcaaaaaaaaaaaaaggtttttgaagtttttcagaaattatggtaaaaaaatgtatttctattttagtattaccgttgaatgacagatctggactgcaccattcacatcctatgaaaagctggacttcatagaaaagagagaattatgcttacgcaagtcatttactcatttatttatatgttacaacccttgcaatgatacttttgttgaaaggagtaaatcagagttgttgctgcttctgtttgaacctagattaaaacattgaccatggtatctggaggtattcatttatagagattgatctgttttgcactgttaatctgcttctcctattactttgtcatgtagttcctttgcagtttccttattttctcttataacctattgtctatcttctttttcttcttgtgttattcttccaatttcactgtagttattctcaagtccatattagttagttgtttcatgttagtagacatgctatttcctgaagcttcttatgagttagttttttaaggtttcacactgaatggatgattgtctttggagaacctttgcagt

SEQ ID NO: 36192 - DNA, 751 bp, Sorghum bicolor
  Intron number 2 from transcript Sb04g001360.1 (locus Sb04g 001360) derived from phytozome v7.0 (chr-ID chromosome_4; pos 1164068 to 1164818)
gcaggtaaaatctagcctcctttttccccccttctatatattctactgtattaaacagcaaagatgataatcttggaatagaggatgccaagttgatgagcattagttagtataagataagatcgtgacaattgggctttgacttgtttttgtttgctctgatgatggtacatggtaccagtacaagcaaaacaatcaccttgttgttatctacagatgcagttcagtttctagtgacacagcactaatggagctagagagattaaaagaagcacaacaattttgaagatttgcctgctcactggatgctttatggttctttatgctttgtttaactgttgatgatctgtcagtcagtttagtacatgtgtgatggctgattgtttaattcagctgcgtctctcggtagtaccaatggtccaatgctgaagagaaacatattgttggaagtgttataaaatattacaactagccacatgtttatcacaatgcagttagtttttgtttggtgcctcgcgtttgagaagaaaaaaaaaactttttgtttggtgaactatgtcattttcagaaaactcaacaatttcatcaacgtgccaaatttgcaaattgtggccacaattgacttactcagttctcttagtttagtctaataaatgtcattgttttgctaaatgttgactagcatagctaatggaaacttctcaatgtacctgcagtcggagataaattttctaggaaggctctcccatcc

SEQ ID NO: 36193 - DNA, 532 bp, Sorghum bicolor
  Intron number 1 from transcript Sb02g037195.1 (locus Sb02g 037195) derived from phytozome v7.0 (chr-ID chromosome_2; pos 71561368 to 71561899)
aaggcaaaggaagaagtttccttaaaccctaagaggtgattaatacatccccttgcatttttcttcttggtaccaaagcattcattgtgcattaggaaactctagcatgtctgcaatgtatattcactggtgtaggaatgaatttgattatggaatattagcagttgctagttgtaaatggcaaaaaaataaaaacaaatagaacactgactttttaatagcttagctcttataacttaacttatatagtagctacgcacttagttatattatggaccttgctcttaggtttcatgtcagtgtacactgttgctaagggtatttgaaactggaaacctgtattaatacctggaataataaaaaaaccccggcgtgagcaattgtcagtcttttgatcctaacaccacgaaagatttgactgctttttaccagcctaaaactatgaatgaaatttgttgttcattcctcatctaaactactcaaggtaaccatactcaaggttgcctgcgcttcgagtgcagggcaccggagt

SEQ ID NO: 36194 - DNA, 885 bp, Sorghum bicolor
  Intron number 1 from transcript Sb06g024410.1 (locus Sb06g 024410) derived from phytozome v7.0 (chr-ID chromosome_6; pos 53544651 to 53545535)
gttcggcctcggcatcttccactccggaatcgaaggtgcttatgtttccacttcgtgttgcctcggattgccggaattggatttcgttgactgtgtactgttgaagttgtacatatattctcgtgttcgtacaatacctgtttggaggggccgtcgtagtctatgattgaagaggggaaagcgattgtttgtagttgaagagaagggggcggaatatcgcgataggtttgttttgaatttccaggatgttacgagcttctgctgctgttcgtaagcaagaaaaggaattcgattagtatgttctgggctcggaggaaaactgctaaatcgggggtcaatttttacattcctgtttctgacaggtagatggttacgcagctgttgttgttgtcttgtttaagcttcaaaggcagtaatgtgctcaaatatgccaagtgaactgtggcatagggatggagacacttaacaagtttcgagtagtaagggtgaatattgtctctaaaataggtgtatcatgttatgcattgtcaatggctggaataatagttcgcaggggttggtagaggtgtgtagcttatttgatgttctaaaactggagaatctgtccttcacttttctgtggtacacttgtttgtagtgctgtactttacactatttatctgtaaggttgtaccattagttcccagtcaaaaaaaagttataccagctgttgtcattaccttttaaggttgtaccattagttcccggtcaaaaaagaaaagttgtaccactagcacttgtcattacctcttggcttgcatttggtagcttgcattgtgctagctaactgatttttatgagcttaaactcaaacactggtgtatgttttactcaaataaacagttc

SEQ ID NO: 36195 - DNA, 771 bp, Sorghum bicolor
  Intron number 2 from transcript Sb06g024830.1 (locus Sb06g 024830) derived from phytozome v7.0 (chr-ID chromosome_6; pos 53861155 to 53861925 reverse strand)
cctgtattggcttcccttttatatcagccacacaggtttgtcaagttttatttttgcacttgccacttgctacaggctctttttttttggcttttatgaaatgaaccattattgcccactgataatcagaaagcatgttttggtgtttagagttacaaaccttataacatgatgcccgtcactagttagaataagtgcttgagatattatatatagtgtcgaagcaaaatagcaattgaaattgtaagccctttgtgatgtgcaaatcaaactttctgacccgttatatatgtggacaagcactccctagaattggagctgacttttctaaaaatcatagcattccagtttgtggtaggcatggtgctctaaaatgcagtctgcaaccatggtgctctttgtcttactggttggcatgcatgtttctgatttctcactctgcttaggtattttgatttaaacaaaccaagaaagaaagcggcatatgatgtgaatgctactagcaagtttgtggcaatatgctgctgcgataataatttgacttatgtgtttcaatgcgcttagttgtattttcggctatgaaagatgagaatgtattgagtaattctgaaataattcagtgtcatgccatacatgcatggaccatacaaaagttaaaaggttttacctttttatcactacattgaattgctaagaactatttacactgacatcagcactctgttcctgttttcagctatcggtggacaatacttgtcagactcggaagcc

SEQ ID NO: 36196 - DNA, 1038 bp, Sorghum bicolor
  Intron number 1 from transcript Sb06g024830.1 (locus Sb06g 024830) derived from phytozome v7.0 (chr-ID chromosome_6; pos 53862922 to 53863959 reverse strand)
cggcggctggcaccacttctcctaatagcttcaaggtgggtacgacgactgcaatcttctaatcccgtgtgtgcttgctcttcctccgttccattaattacacctgagcatgctctcggttacgtaccgtccggatagatgagcgccagtaactaacggatcgccggctttctttaatttccctcgctagtttggcagcagcaacctgatttgttttcctttgtatcccaacctttctttcttcctaatcttttctttcttccctgctgaagcgatcctttggtgtccgtacaccttccctctcgcctttgatgctttcttttcctcccttgagttgcatatctgaaggagtattccttgccttttctgcccattgagttcagccaactggctattcgtttaatccattgtgaagaagagcatgttcgtcctttcccttttgtttggcgattggttgtacggagcaaaccggattaaattaaatcgcagttatgttgcctttgatgttcatgtactccgtagatgtttgacataagttttgcccccttgtttgacatcctctccccgatttggctatttacattaagtttctgttgtctatcaaaaggaattcaatactaccaagttatttacagataagtataagtatttagatatatatcgcaaaactcttggttgttttatatacttattatctggtgggagtatgtctattttgttggagattaattttaggtgtatgcgtatgcttatgctgatgtcaaggcctgttgaattaactaaactgataatttacaactgttctgcaataatagtttagaactcattatcgatgccatagcaacgcacctaaattgaagtatttatgctattgtttggtgagaaaatgtatccagcttatcgtccttattgtcacgggattacttagagtattacaaaacgaaattgttagctatatggtcttgtggatggttctgatatcggctctatttgaccttttcaggcagcaccgcgacacggctaaggcaatttcataac

SEQ ID NO: 36197 - DNA, 1006 bp, Sorghum bicolor
  Intron number 2 from transcript Sb08g019950.1 (locus Sb08g 019950) derived from phytozome v7.0 (chr-ID chromosome_8; pos 50981591 to 50982596 reverse strand)
acctctccgattcgggccatcattattgaaaaaatgtaagtttggaaaccaccagcatcaatactagttttgactttgcaaatttgttgttgctgttagtatatgcggctgtgcgcttgttgcgagtaagaaatcatgtcactactgatacatgctgcagttaactcagctacttcactgcattttagttattggaatgttgatcttcatgcttgctaataaattgatgttcatatttgtctacataggcttgcgttgttctatggttccatgaatgtaaatgcagtgagttcatttattcacatgaatgtgttgttggctgtatgattaaaatttggcaatcctatcccccacttgaaatacacgaccaatattctcaatttgtacctacctattatcagaatcatccattctttatgtagctccagaagatcgtatggtgcgttttctcatgtgggcacacaacaattctgcaaaaaataaaaaataaaaaatgtatgaaaatatctgatagttacaactaagactttgtttctgtgtattcccctgtgttcatctaggtagcctgctccattacttgtctataatgcttatattttgaattgttacatcttacaaggctgaattcttcattctatttgtattttgctgatacagcatagttagttttatacctcagtatatggtgttgcactgtattcatgagcatctaggtgcagattttacttgtttttattcaattttatttgattcccagcccagataaagattttttttagttatatatatacttcccattttgagtactagtttatttttatttttatctatctttagtgtacaccttttactgcataagcgagtggtttgaatttttttcatcaggaatactaaagagtggtttaaatggagagagtggattcattcttttctttccttttgccttcgtttcctttttcacattgtatattctgatgtttcttttctcctatctatccagtgaagc

SEQ ID NO: 36198 - DNA, 700 bp, Sorghum bicolor
  Intron number 1 from transcript Sb06g024600.2 (locus Sb06g 024600) derived from phytozome v7.0 (chr-ID chromosome_6; pos 53694035 to 53694734 reverse strand)
gcggaccgggacggtggaggttgcgccgacggcaggtgagcgtttagtggttgaatttattttacatagtgactggcggggtcggccggggaccagggaggcggaaatgcagcgcctgcgcctgtcactcttttcaattgtctctcttgcggagtaggtgtctttcagtttggaattgaatggaatgatcttgcgcttcattaagaaggggcggccctgtccctgtgttggaggccgtttaggagatttgatattttttccctcatgaaagtcactctctttcagctgacttgatgaactgacacatgtagatagagttggatttgtattttgaattggtgacatatagcgatgttggaaacttgtggcttcgctgatagatagctttgtcaggtccgtgaaaacttgctatttatgtctgcactatataggtttttgatcattggttagtttcgttcgctttgcaccaggataggatttggaacacaaacttacctgctgctggggatccatcgtggctgtggtttatttcatcctcgtttgcttgtttcagtatgtgttcttgcaagtagaacagaaccacacaacttgttcttgtcgacataagaaagcaccacaatttcctatattctttctgcagtgaaaacttagttcaatttttaatattttctgatcagcaggacaaattttgagggcgagc

SEQ ID NO: 36199 - DNA, 861 bp, Sorghum bicolor
  Intron number 5 from transcript Sb01g036410.1 (locus Sb01g 036410) derived from phytozome v7.0 (chr-ID chromosome_1; pos 60015443 to 60016303)
ttactagtggtgctttaacaggtatactttcatataagcatctggttcttccattgttgcttgttatttgaagaccttcacaagttcacaatcttttgatgtataatggatatgcatgcattatagcctgtccgccttgtttattgtccctttgatccacttcagttgctttaggtttattttgccatctatgtgtcacgtagatcgtgggcttcgacttatgttttgcaatgtgattatactattagttgatctttacattggtgaatcatatcgcttgctggttgatagtttattatagacaatcagtcccacaaattgtgcccttgatttgtttgcttattaccaaagaaatagttgtcagttgtatcttctgggaataatccttccttccaacagatgcttttgacttcagttgataatccaatgtagtactcatctacatgtccatgggtataattaatgcttttctcatgtgtttcatactggcaaaactattctcagggtattattttttttttaaaaaaagacgatgccttatgctctgaaggtagaactgttgaagttcaccaaatattttttcaatgctcacttgagcttccatacttcacaaatatgtgtatatatgcaaatgcagacaaaaccatgaaatatgtaaacataaaactgctagaggggctgtttttaatgcttatgtggtatttattccttgcaatatccaaacatgaaagcctgttcacatttcatgtgatattaaccttactgaatctcgttcaaccttataatggtggagccctcagtttaatatgatgttctttttcttcaggaggtttgtttggtactggtgccatagcacagcag

SEQ ID NO: 36200 - DNA, 1052 bp, Sorghum bicolor
  Intron number 1 from transcript Sb08g004223.1 (locus Sb08g 004223) derived from phytozome v7.0 (chr-ID chromosome_8; pos 4947513 to 4948564 reverse strand)
ctgacctcgccgccgggctcgcaggcgcgctctcggtacggccgcacccaaaaacccttgcttttcttgggcctttttacttaaaaaattttgcaaaatgacaccgtaacactttcgtccgtatttgtatattacagctaaactatataattagttatttcttttaatctatatttatgcttcgtgtgctgtaagatttggtgtgaccaggaacgtgaaagattttgcaaaattttctgggccttgctcttgctcttgccgattgcagaaaactttagatttccttacctttatatagatgaaacatagaaaaaggtactgtttttcataaaacaaacaaaacccaagccagattcagttttttttgttttttccccttacatgaagtcatcagtaatggtgtgttgattttagtttgtaggcacagtccagtctacccgaaaaactacttaggccttgtttagatacatccaaaaacccaaaactttacaaaattccccatgacatcgaatcttgcggcacatgcatggaatattaaatatagataaaaaaagataactaattgcacagtttatctgtaaatcacgagacgaatcttttaagcctagttgctccatgattggataatgtttgtcaaacaaaaacgaaaatgctacagtgtcaaaattcaaaaagtttttggatctaaacaaggcctaaaaagatggtgcgggtagtagcttagcaacctgaaggatgcatttttccttttctttctcgttttatttatcaacatgtgctctgctattcctggtaccatgtgcaatgaccatcatgctaataatgaagtggccaatttgtcaaagtttgcttgtctattcaggattcacacgtgacaatcccaccctgaagacagaccaaaacgttgctaaaaatagaaaccgccagagcaaagagtgaaatgagcaaagtgctttttattcttatatttctgttgattttgggtttggttgcttgtttttgcagttgcaggggcttgctgctgctgctgctgagagtgtggttggtttggt

SEQ ID NO: 36201 - DNA, 862 bp, Sorghum bicolor
  Intron number 2 from transcript Sb06g021600.1 (locus Sb06g 021600) derived from phytozome v7.0 (chr-ID chromosome_6; pos 50815194 to 50816055 reverse strand)
gttacacaagagatcaacttcttgagctgcgtgaggtacttaatatctgatgcttcatacaaagccagtttctggatttgaagattgctacagatgtcttcgtagacatgtcatttgtggttttaaagaatagtgcctataatgtagcttgtcatatctgaagattgcggaaattcgctttgagtattcttgcatatctgggcagtgtcaaaaaagagcatacatgcattgagaaaatgatacctcctcttgcaagtgtatgctactgtcaagtgtatgtgcagtaaaatggcaactttggccaataatgattacagcagtttctagattgcttgcaagaatttggttttaatgactattctgtcagtagcactttcatattgtattttttttgttaagcaaacactttgacagttgtacttctttgtgaaatttatatcttgtagtcagtgctgtatccagagtggtgtacttttctgaactgaggagaactcaggatggaggtagaggcattcacagtagatgagggtgaagtcgcacatgtagatgttaaacaaaatggcaggaagctcatagctgattggatatctctcttgtcggtagccattttaggttgcttcattttatttcacaatttataagctcacacttgtacccaaatatgaatagtgctaatttgaagagggtggcaactgacttggttatcactttttcgagggaatatttcatgtggctatgtatgttagatgacttcatgacttgtaattgggaggctgacattcaacgcagcatgtggtatgtatacagtttatcaaatttgcatacactgattatggttcttccacttcttggcagattgttg

SEQ ID NO: 36202 - DNA, 843 bp, Sorghum bicolor
  Intron number 2 from transcript Sb02g003660.2 (locus Sb02g 003660) derived from phytozome v7.0 (chr-ID chromosome_2; pos 4098337 to 4099179 reverse strand)
gaaggtctggttggccatctcctctagcgattattagttcagtgggctcatgtcattatgcgtctgtcagctagttagttgatgttgtcagctagttagttgatgttctgtgacttgtggtgtgtagatactcagaccagctgcctagataggccgcattttgctgtctcctatttgctatgatattttatcagcctgctgttcatctgcggtgtcgctgctgattattttttaatcttttgcgcaaatggcgccattgtaagtgctgtggccagagttattgctgtataacacacatcatgattgtttatttgcttgttatatgatttggtattgctatcctgtatggagctataatttcttatgtagtctgttcattttgttatgcattcatttatagcttagactagatattgtatatttgggtgtttctagattattgttatactattcccgaggtgttaagttgggttaaagctggatagagtgtgtgggcccacacatttgatgtctttatgttgatggaagttcttttaattgtcatacagtaattgtaggattgaccatagttgtgttttcatatgcaaaaccacattgacatgagaagttctctaagtgtggtgggtgcattttttgttactatttgcagtaggttagagatgcaaaacgattttgagcctttatgcaccatagacatggactcttttgttgttttctttgctgcttttgttatgtgacctagcatttgagtttatcagctatttatgatttcttcttgtcatcgtgctagttgtgcctgctgagccagctgctactgtggaaaaccaacagatagaggaccca

SEQ ID NO: 36203 - DNA, 806 bp, Sorghum bicolor
  Intron number 1 from transcript Sb09g007890.2 (locus Sb09g 007890) derived from phytozome v7.0 (chr-ID chromosome_9; pos 14341753 to 14342558)
aagaaggttgcagcgacgccgcagccggccgcaaagtaggtggagtgtggaagtggatcttggggtttttctgcctcaaacgtaaaagggaaagctttgggctttgcgagcgcgttcatctggcgtttctccatggttcttggcactgtggccactagtggtttggaaattgtgattgttgcccccttttttgctgtttgggaaatcttgctgagtttttggagttcatgacatttgcaggttctgtaacagaaaattatctttaggaattctgtgctttcagggaaacaaaagggtaggcggaattgaaaaggggctgaattgtatgttaggggatctctcttggcttggtattttcgatttgtttttactcttctttgagtgggaatttcggtttgtcttgatgcctagaggagggaaactaaagttgcagctttgtgatgttcttttaaattcccacttttcctccaaattttctactttccaaaatgcgcccttcaatttatcttcagcttgcctttttttcacttttcttgcttgctcaagcccttctctcatcttttctctgctttcctttttttgagacaatcttttctctgctctccctgctttgttttcgttgtattttgttcataacattttgatttggcattaccttgcttaaattctgtgacttccatcccgaaattcgccaaaattcgtttctttattttgtcactggtagagcatctcctgatctacctctttgttccatggttgtaaagattattgagctcaggtgtgttgtgcagagctcaggtggtggg

SEQ ID NO: 36204 - DNA, 857 bp, Sorghum bicolor
  Intron number 1 from transcript Sb01g014140.1 (locus Sb01g 014140) derived from phytozome v7.0 (chr-ID chromosome_1; pos 13332893 to 13333749 reverse strand)
gccctcgtcgccgacgcctgggtcttcaccctacgatatccttttattgatggtctcgtaacctatcgtctgcacagtttattctgagatctctgtctcacgagcctgcctggcgctttgatctggtctggtaacttgagtttgaatcctgggtctacggaattccccgttgttgttttgatttaggcggcatatttcaacatttatagccttggtaattgttactggaactgattgatctgttttatgccatttagttgcactggaaaagccttgaatgatgaatcaacttagaaatgaaccatgattctcctgccatctctttaaaaaaagaaccatagtcctttcattgactaaggccttgtttagttcgcaaaatttttggtttttggctactgtaacacttcgtttttatttgacaaatattgttcaatcacggagtaactagtctcaaaagattcatctcactgtgcaattagtttttattttcgtctatatttaatgctccatgcatgcgaccaaagattcgatgtgacggggaatcttgaaaaattttgtgaactaaacaaggcctaatgatctgtttccttatcatatatttgcacattagtgttatactgctatttattaatctaatgttgtgctcatcagctgttaggctttgtactgggttcaccacagtgtgaccgttgggtattgtggcctaaaaatctagttatttcaaaataacaacattgcttcgggtttgagaacagctgaatcctgtgcagatttgataatatcatgtattgtccttcctaaaggtttttatctttcttttctcatgttttatccttaacgaatatccactgaccaca

SEQ ID NO: 36205 - DNA, 727 bp, Sorghum bicolor
  Intron number 1 from transcript Sb10g000910.1 (locus Sb10g 000910) derived from phytozome v7.0 (chr-ID chromosome_10; pos 590153 to 590879)
cgtactaagatcttcactcatctatcatcgcttcattcttaagttgcatgtgtatataattatggatttctaacttgcatgtatttgatttatttcctgctttcttgttcctgctcggatattctttctagcacgtactccagtaggtataatgaatcattttatctgtttcctctcctccctttttcattttatatagtactgtatcacaaaagatgcaattaagtttgttctaaagatcatatcctaaatatatataaaaagggggaaaaataaatagcagaaagaaaagacatttctagatggactacaccacctcaccttgcgtacgtggcacttggaagaagcctctagctactagtagtacagagtacagacaccacgcgtcgtcagcgtcaatttctttctctgtttcttttagtttttttttttcatttatgaaaagagaagaaatgcaaattttgaacctgccagctcctgaagcctcgtactcatatactagaaagattggacgattgtgctggtttgtccaataaaatcaaacaaagctgcttataataattcttggttacttccaatgtgcaccttgtctgaataccttcctctgtttattttattttattttattttattttatcttatttattgttcactcactcacatatcacaacatcttctggaatctggaacaggtttaatttcgcattcagtcgatttcagtaattga

SEQ ID NO: 36206 - DNA, 539 bp, Sorghum bicolor
  Intron number 3 from transcript Sb03g033040.1 (locus Sb03g 033040) derived from phytozome v7.0 (chr-ID chromosome_3; pos 61451791 to 61452329 reverse strand)
aaactaaggtaccgattttagagttttcattgcagcagagaagtttttagaatactgagttatgacatcttgtgtccagttgttctctttgtttcattgaggtgccagtaatcatttttcttcatgagatttaacttgatgccatttgtattggtgtgtaatcttagcaatagtgaaaattctgaaaacaaaattgtcatacatgatatggtaaatttttattatgatagtaggtagcttagctcttggtttctgttctagatactgttggtacttttgtagactagtagtttgatgctgctaacatttcatccacacctgtcagaacttgtaactctgtccaaaatctatagtaagttatcttatttgacatgtttttgtttatatattgcatatgttgtcttcccttgaacatctttacattctattgtacgcatgagtgtgcccattattatttttgaacttatgggcccatcttaaatattggaaatttaaaatgtatgtacttctattaacagaattccattaaaattgataaa

SEQ ID NO: 36207 - DNA, 862 bp, Sorghum bicolor
  Intron number 2 from transcript Sb03g010400.2 (locus Sb03g 010400) derived from phytozome v7.0 (chr-ID chromosome_3; pos 11245674 to 11246535 reverse strand)
agttcgccaagcacgccgagtacctcaacgccctggtacggcgcccgttgatgtgttgctcctccgctttttttccagcgtgatgcgctcaaagagtaggggttattgtatatcgtataggtttgtaggatggttcgggaaattagctaccagggtctaacgtgcgctaggtgtttggaggaattactacgaagccagattttgtattaggcatgccacttaactgatattgacagggtcacattggagttcaggttgttaaatgttgttgaatgagaatatttcgagaggcagttcgtttgcgttgggctaacctgaagtcaatcccccatttaggcttatagcacctttgtgagaactatggttcaccggatgcaattattcatataaagttgacaccgaattgctcccaagatatactgtattctgcaggcaatgtcagccatgatgtctcctgattgaaatcaaactttgtttagcatgttgttttcacacacagacgagtcatagtataggtgatttatagttatatatacttgtactcgatcatgcttatggctgcaaaatatattgcgacattgcaacttctgcaaatgtcctcttatccgagttaactgcatttaatctatatgagaccaagtctttaactcttcaaagccacttcaaccatatgctacaaatttgtttagctttcgtttaaatttgattaatgtgtttcgagcagctggtattgtcacactagtcttatggtcatcaaagcctttccttcttttacaatctgaaatcattatcacatagtatgtttgacaatattgtgtaaactatcaatgtttttttatattttctctctgtttactgtaga

SEQ ID NO: 36208 - DNA, 920 bp, Sorghum bicolor
  Intron number 1 from transcript Sb03g008500.1 (locus Sb03g 008500) derived from phytozome v7.0 (chr-ID chromosome_3; pos 9066739 to 9067658 reverse strand)
ggtcggtctattcgccggcgacgagcatccaccaggtattcccatcccatctcttgctcttcccttcctgctgtgcggagccgagcatcccccaaaccctaacctaaggctatttggctatttgatccctcctaacttcgaaccttttggaaagaattgtcggatgtacatgtgtacacccatgtccctttggtaggtccgcccccgcgggatatggtagcgagtaattttgtttgcatgtgtttttttttgggcgggtttggtcaccaatgtctgttcttttgtttgaaggtgtttggagcatggaacaggtggtgcttccaaacttagatttcattttagtagccaagagtccatttctggtttggttggggtttgtgtaagacccttgagaacatctcttctcagattgagggtgcctgagcttctggggccacagacgttattgtgtgcatgcgtagctgaatatatgggtgttagtagctgattgcaacaatgtccatgtatattttgatgactaaggattgctttttctgctgttgtgtatgtttcgcctttcatgcagacagaaacaagtctttctagtcattaatcaatacctaaagtcctctccatatatatcaaatgagtgaaagctcatgtttttaaccctcctctcttgccacaacagacttagttgcataaataaataaaaaagattttactaagagctacatatctttggcccaaaagggcaaaaaattggctatattttcaatatcaatttttagtagtgaatctgatgtttacatcatgctgtctatctaaaattgttttgtatttcttttattgtagaaagactttgttatgatatatagcatattgaaatttgaatgtgtattgatgatcacttttatgcaggcaagcttctgctgctctgc

SEQ ID NO: 36209 - DNA, 606 bp, Sorghum bicolor
  Intron number 1 from transcript Sb07g005930.1 (locus Sb07g 005930) derived from phytozome v7.0 (chr-ID chromosome_7; pos 8399584 to 8400189 reverse strand)
aaggcctccgcagatccagtgccgcctcctcccaggtgatgacctctcgatcatggtcgtggataatggagataggcggctgtgtcctcaaccatgtttggtttttcaggcccagcgccagcggtgcgcacgaactaaaaaaaaaaaaaaagctgttttctgtatttttacgaaaaaaatcgtttggggtcagaaatgggacgtagataaggtttttagttaggttaatggcagagaaaaaaaaggatttcttgttttttttttcttggccgagcagctgatgcctgatagagcagagttaagcagcttatgtggactcaaatcttttgtgttgatgcaattggttccattcttgatattattgttataacctctccttgcgtgaactgaaactgtaatggcttggttcaagatcattacttcctttcggacagttttgacgctcgacctcgagtagttcagaacagagaacactgcaaatagtttttgtttcagtctgtgtccttttaagctgttatatctgatcccctctcatttttctttgatcacttttcctcacgccgccatgcaggttagcaggctggtgaaatacattgctagtgctgg

SEQ ID NO: 36210 - DNA, 604 bp, Sorghum bicolor
  Intron number 3 from transcript Sb01g039540.1 (locus Sb01g 039540) derived from phytozome v7.0 (chr-ID chromosome_1; pos 62943780 to 62944383 reverse strand)
ctcctccggtgcccaagtgtgagaccagggtatgcttttgtctatatgctgagtgtcctaggtgtgcctgatatcatatttgtacagttttctctaattagactttgtgattgggtttctgaggtagctgaattatgctgtagtgcaagtgcccaactggatggtgtgttatgtatttgttgtaaagaattgcatcttgttgaaagtagcttccgaaatctgcttgtagcgcatgatatcttctgagcacatgatatttagtgcattaccggtcaactttgatagttgcttctgctgcaaaagcatgcatggtttgagtatttccagatattttaatgttttgacttttgagatgataatcatgcatccaactgtgtgaaggcattgccacacttctttctgctgagatctcatggaccttaatcattcttcaaccgcacaaattctggcttaataatgcattggattatggctttctccattttggggcatatcataacattgttctacccttttactattttattttattttgtacctgattattattatatatgctctgtttacaggctgagaaaaaggctaggattcgcaataataagct

SEQ ID NO: 36211 - DNA, 875 bp, Sorghum bicolor
  Intron number 1 from transcript Sb09g002720.1 (locus Sb09g 002720) derived from phytozome v7.0 (chr-ID chromosome_9; pos 2960281 to 2961155)
tcgaggtcgaggtcgccgtggaggtgcctctcgtgagttcctcaagctcagcctactggtgaaaaaaaaaatctatctctgactggaaacattttagccgaaatttcttgcttgtaagtttgcaaatcaaatttcatgttaggtgttgttactaccgattaattactactactgttgtgctactgttcttcaagtgtgtaggacaagctcagggagtccctcttttcatcttcctttttctcgatttggggggaaaaaagatctgctcgtggatgcaaaaggctgatacacttgcttgccaaaaagtagtagctcctttcttgaggggaggagctctagtgtggtggttgcacagttgtaggcctcatcagggttcagaaaagtgggtggtgaattattggacccatacatacatgtctctagtagtgtttggtggtggttgagtttagttttatgcgtgcttttgcactagttcagattacccagttgagtttggcttagtggttcttaatctggtcatttatatactgcttgcctgttaatgcaataaaagatttgctgttctactttcttaacctgattcatcagcatgtagtgggctattagtgggtgaaccatatgtgcagtatgtggcatgttctcacctgtttaggtgcgtaatttgtcaactgcgtagacgaaggaactttttggaaactgagatagtttggccttgacacacggtgtttattttgtgaattaggaggcaacaatgggctgttcttcttactaattaggatgcaacaatggactgttcttcttactgctttctaccattcaacgattaaggcactaattgttttttttgtgtgtgatataggggttggagcagcctg

SEQ ID NO: 36212 - DNA, 918 bp, Sorghum bicolor
  Intron number 2 from transcript Sb04g028820.1 (locus Sb04g 028820) derived from phytozome v7.0 (chr-ID chromosome_4; pos 58905601 to 58906518 reverse strand)
cagcttcagactcgggttagtcctattcttgctagctctgcgttctgtttgctcgataatcatgctaaggcccctcatgctaatctccggaactgccataagcaaatcgagggtgctgccagaatccaggccctgaaatatgctcgagcactgagcaaatcaagggaagttctttgaatacttctgcggctgtcagaactattagcgactagtgggcggcaaactgtttgtggctttgtgccatatatgtcaggtttacatgacgatttcaaacagcaagttggcatgaatttagtttcattctgttgcctgaaacatcatgtaaaagtaactggaggttggagctccccagtgtattgatgaataagctaacctcattacgcaggtaatcatagtactttggtttggtggttattgaaaattcaatatatgttgatgtatgcttgttcatcctggaactttatcagttacccaacccctttttttctgctaatatgcaggacagtcgcatatcgtttcattaagaagaaaggaatgagtacaaatgaaccccaaaatgaacaaaaaaaaaaaagacacgcactcgaacagcaggcacaaaaacaaaccacaagagcagtcgaacacacatgctgtaacactagatgccaaacccctttgtatctcatcataggttaactagagcaagcagtgcaatctatattggagagcccaatgatttattttgggtgaaatttgtcaaaaatgtttctgaggatgtattgattaagtaatagagtggtgatggggatgagaccaagccaccttgattcttcatttctttactaaagttggttgaatgccagtcttgctagtctcgttctgatttacttatgaatttactcacactccttttttttggcagagtacttactttaa

SEQ ID NO: 36213 - DNA, 780 bp, Sorghum bicolor
  Intron number 2 from transcript Sb08g020415.1 (locus Sb08g 020415) derived from phytozome v7.0 (chr-ID chromosome_8; pos 51438706 to 51439485 reverse strand)
tggaattactccactccacattgcggcaacgcaaggttttttctgcccttgcatatgtttgttatgcagtaatttttagttgttctttgatttatttgtttttttgtttagtttttaacgcggcttatctatgttattttcacacagtgggttcattctttatgtatctttttagatagtattacagatgccccatgtgcttaaaccaaacattttgtttttcgtttgaatcagatacgtaagcagaattgaacaatactcagtactcacactttgtcatggctgaaaaaggtgtaatcccattttgattggatcaactgtcattacgtgaatctagacactaagctagctttggtagagaaacaaagtctggatcctgcattgaagcccagtgcttgggaggttggttggagtacggccagtgaaataaccttgtgcttgttacttagtaaaaaaaaatgattattcgaccaccttctgattagtcacctacctgtattatttaggctgaatgttgcaaaaaggagcttgtgtagaaggtcaaaaggacacctgctgtgtattaaacatcccagggcttatactgcaatgcaaaactgcctctgttcttcatatcattttaaatttagcttataggtctttgaaaatgctaaaacgatccattcttaaaatattgagctcttggtgttgactatcctttggttatgaaacacatgttattaataggtcctaaaagtcaatttgatgtcatttttccatatattttttttccaggctact

SEQ ID NO: 36214 - DNA, 766 bp, Sorghum bicolor
  Intron number 2 from transcript Sb04g023510.1 (locus Sb04g 023510) derived from phytozome v7.0 (chr-ID chromosome_4; pos 53196207 to 53196972 reverse strand)
attcgtcaaaaccgataaagatttccagactaaaggtgggtgatatacaaaaactaacgcagcattgactaatatttatgtgttgtatgtctcggtgaacttgtctagctgtccgggttcttttccttgtctgttatcttgtggacaagataaagaagactgcgatgtcaaaccataattttttcagctgttattgtgcccatcaccattgtcatacatacacaacatatctgggataacaccactggcggagctaaggccaggccaacctgggccttggcaccccccttgccagagccaaagtagtagttttaggttaataatcaatatttagttgctacttttctttatattttcatactaatctgcagagttattctctatatagcttatataattactacaagtgactataaaaatggtaatttgtatcaaatagagttcacttaatactatttgttacgtatttgaggtcttaattagcctaaaatttatagttaatgactacttgatctagtatttgcgttcacatttagcttcataagacaaattggcccctcctaacaattgctgctagctccgccactggataacacatctctaaatcttactgacatcaaaaggaagtagatttcctactactagattatactgccatatgttttaccatggagtcgtatgattggaatcgtctttactcattactatatctatttggttgtctgttacagcacgttcttcagggacaactgtgacatttgtcata

SEQ ID NO: 36215 - DNA, 983 bp, Sorghum bicolor
  Intron number 1 from transcript Sb01g037160.1 (locus Sb01g 037160) derived from phytozome v7.0 (chr-ID chromosome_1; pos 60723367 to 60724349)
gagccctcgacctccgtcacgcccggccaggtgagccgagccctaactcgcgcctcctcgatccgttccgccgggctctggaccggaaattgctgctctccgcagtgcggcaccccctgggaattcccgtcgtttcgagactattggagccaggttgctgagatgggtggctcgatttgggggcacgggaagcgggcagcgggggaatgggacgggcgccggctgggtgggttcgtacgcggttgcggtgctgaatcgcgcgctggcttatgagcttttggtgatcgcggagaagcgctggagatgcgacgcgtctggaatttctcgcgcgggttgagcgattggatcatatgctgcgggcttggcacagtagttgccaaatttgaggggtgctgtgatcgttgaatgttgttgggtgcacgtgtcccgttggtcggttggtgcaacttactgccaatgcaagtgtgaagttcgtgtatgctaaggtcttgttttgatgcactcgtatcgtatccacctcaatccatgtaggttggagtggactcgggtggaacttagtttaatttcgattccaatccactcctacacacgtggattgagttggatatgagtgcatccaaacaagttctaatgtggattgtttgtttgtggctagtttcttctttcttgtgttgtggtcttgtggtggatcaaatagggctggtcaggttgatgtcagctttgctgttattgcaccaaatataaggtggcggttcctctcagcagtgctgcttgaaaattggtatattctgggttttagggtttaaaggttggagaatttgcaaattgcttctgtatgcagtttgtggatctggagatctcgggccttaaggctgccattaagttctagcaatataatgtttattttatttgggaccccatctctggaactaagtgatctttgttttgcttttcgtgcaggtttctgctattctgggctttct

SEQ ID NO: 36216 - DNA, 922 bp, Sorghum bicolor
  Intron number 2 from transcript Sb09g020560.1 (locus Sb09g 020560) derived from phytozome v7.0 (chr-ID chromosome_9; pos 49917785 to 49918706 reverse strand)
aggcgctgctcaaggtcaaagaaggtgcctcaattatatttctcctcctccttgtttttcgcttctgagataattgatatgacatggtatatatagatgaaaagagaagataaaagttttgcaggataaaataagttttatagggatgaaactcacatacaaacagtcttccccattatggtttgattactaagaatatcttccacattattagcattatggtttgactactaagaatatcggggactgatgttcctttggagaagctgaccgaggtggattgcgctatttaaaaatgcatctatgaaaaaacttttgtgatttatataacagcaatgcaatgaccccggtgcgaaatcttagagcatctccaagagtgttttcttaaatccactctctaaatcatcctttggatagctatttgattaaaacttgttttctatattatttcatcctctaatagcttttctatatcttatgccactcaagagagccaaacttgctctctatatttgactaacgagatcaaaatcctagaacagaaaatgacaatatttagagatctaaataaaaagatgttggagcgtacttttttcatcagaatcttaattcttagcaaaaacgaagaatatagaaaggctcttggaagtcttcctttccttttctatgattccgggtaagataaagatttttttcgctatagcggatcaaggcccatatttgattaagaagagaaggcaggaattttgtgtatacaactgtgagtgccagaacggatcgttccgtcgcaagacgcaattgaacggcaaccatccaaacggcctctcacccgtcgatgttacagaagtactatacggctaggggataagataaagatatgatgtttacggcacaaacctttgtgtgatgttatgcagagttg

SEQ ID NO: 36217 - DNA, 702 bp, Sorghum bicolor
  Intron number 5 from transcript Sb07g019760.4 (locus Sb07g 019760) derived from phytozome v7.0 (chr-ID chromosome_7; pos 50915590 to 50916291)
caggcaagttccacatatttcttgttcatagttgaaacagaaacatcaacatgtggatttctttgtaagaaccacccatgttcaattttataacttgatatttgtgtaatgctatgcattccaactaaatacatatactttatctggaaaagggaaaatgggatggattttgtgcctcagtggcatggcaaaaatggttcagcttcttgagacttatcatcaaagatgtcacctaatgttttcaagtgcagtattattcccatcaatattatgttcattgatcatgaaaaaaacatggacaacaaaattatctcccataggccatatttcttgttttcttatacctgttaatgttgtcacaaactcacgatatttagaaagtaattttttattttctgaaatcatctgcacttactttaatttgtttgttgatgaacagacttggatgtgttcccactgactacaaattaagtaaatttctttttgaagaaagcaatttttttttgaatttttttttttgaaaagaaagcaatttaagtaacctcccatctgtttaacttaagtacgttttggaagttaggttgtaccgcattatcgcttcacgaaacattgagtacaatgtatctttccagtatttctgaactgttcctgtcgattattgaaacagctgctaggctgaggttggctgccaccgagaaagct

SEQ ID NO: 36218 - DNA, 687 bp, Sorghum bicolor
  Intron number 2 from transcript Sb10g006810.1 (locus Sb10g 006810) derived from phytozome v7.0 (chr-ID chromosome_10; pos 6439068 to 6439754)
aggtacggattaaacaaacaaaacaactgcatcgaaaagaataagagactctgctatcaactttgcaatcttgacggcacaatagccaataggtagagtatcacgtagtacctaataatatactatatataataagaaaaacaaaaggaaagcatgatactcctagctagctaggttctttgtgttctcgtccatacttttgatctccccctcctctgttgtactactgtttcatagtgtgcgatgcaatgccagcttgcttgacccatgagagagggagggagggagggacgccatggatccaattattttagtgcaccacctcccctcccagtccccccctgcagtcagtgtcagacaaaacactcctgtaggcacgtcctcttccccatgaggccatatgatcccatctccgcggcgcatgattcctgtgttcccttgcccatgccgcccgccgtcctctcttggttttcgttgcttcacactttgcgggtgctacttgtcgatcacacagggaagggaagcctagcgccatcttgctatgcacattgcgattgcatgcgttgccttgccaccaccgtaactatttatactagtaataatcacttacctgagtttcttttatgtgggtggcgttgagatcacggtacggatggcatgtttgcacttgcagattcagcgcggcga

SEQ ID NO: 36219 - DNA, 929 bp, Sorghum bicolor
  Intron number 2 from transcript Sb06g034210.1 (locus Sb06g 034210) derived from phytozome v7.0 (chr-ID chromosome_6; pos 62110556 to 62111484 reverse strand)
aggacgaggaactagctgcttctggtgttaaactggtatggcccctttatgtgtttgatgtactttcagtattaactttattaaatgcaccattttgcagactaccatccttctttaggcagattactctgatttggctgtatgcagtttttttaatagaagtttggaattggacgaaaccattgaaattctgaaaaattgctgaggtgatttaaatatttggaggaaaaaaaacttttcttttgctccttcaattgttagatttttctttcttgaaaacacagaacggtgctttattatattaagaagaaagaaagggggaagagaccctgtacaacacacaccaccccactccactttaacaaaaacacatacgcacctgtgaagacatggaggcgaccaaagctagactaactcaggctacagaactacgcgggggtgtgggggttccaggcaaagcccacaaccggcgctcctccaagacaaaactgtgaaagcaccaggcaagctgggagcagctccattgaaaacacaactgttgtggtgattccatatggtccaaggtcctaggatcacaagagagttgaaccccttctttgttaacccagcagtagcattgcttgatctttcccaccactaatcaaagaacttcaattgatggattaggttccctcccgctggctgccactgccagccagaacagaaagttcgtaatggggaatgttgtggtttatttagtattttggttgagcagagtgcatatctctggatcatgtgccaacctccatgattgcacattaagtagagaacagaatcacacaaacatttgtacaagagttggctcatttgatattagctccttgctcaattagagagttaccagtggcatgctttgctgtataatttgtttctcacctcctccttgcagg

SEQ ID NO: 36220 - DNA, 649 bp, Sorghum bicolor
  Intron number 1 from transcript Sb05g027210.1 (locus Sb05g 027210) derived from phytozome v7.0 (chr-ID chromosome_5; pos 61418085 to 61418733 reverse strand)
aggccaaattcaacaacagcaaccaagttaccaaggtgagctccatataaatccctgatgccagtacagccaggcgtgtgcatacgcacgtcctttgcaagaatatcactttgttaattactcctaccacatcttatctagaagctgtaataattcctttatttagcaaaatgaatcacttgcccattaatatgttttaaatatatatttggtaagttaaaaatatttgacttctcggaaagtgagaatgacactttctgtgggataaaggaaatactgtatatactattaaaaagtatccatgcattgttacacatgcgtttaacaaagcactttagtattatagggagtcaagagaccacactaaaaacaaagaagaaaatatatatgttagcttgcattgcatataccaaaatgtatataacggatattatttgtattgacttatacaatactttgtgcagtagtatttgatgatgactctttgtttgacttcttttttttggcattgagaaagacacttgtttgacagttgaagtgatttgctcaatgctcatcaccactctcactctaatgggatctggtataatgtattggaatcctaatgtatttgctgtgagtgcagtttctccaagggctgattccacaa

SEQ ID NO: 36221 - DNA, 967 bp, Sorghum bicolor
  Intron number 1 from transcript Sb02g028966.1 (locus Sb02g 028966) derived from phytozome v7.0 (chr-ID chromosome_2; pos 64153784 to 64154750 reverse strand)
aattgcaattcgtcaaagagagaaacttaatccaggtaagaatgacttctatgttagattcgttttgaacttttgtacaaagtgaattacataaagataccattagtcacaaacccatcaataattgaggcttcctcacagaactacaacattttgcttcactccatttcatgtctacctggtaccacatgtcatagggacaccaaaaggcaacccattttggctgccaagcagggtgtatgctgcattaacataattgttttttaaaattttgtgagaaaataatctagtatatgatgatgaggataacaatgaagagttctcctggacccagttgaggtggcaagcggaaatatgttccgttttctttttcctcccgctgatccaggtggataggaaaaagcaagtggcaaaatttgcagttttattatgggaagaaagccagattagtggcgtatgtaggattttgggtatgacttgatgtaaattgtttaagtactgcaaattgtaacgtgccaatatacaataggagtacagaatttattactaaaagcacgttaagtaagataggttaaaaaggtgtcttgcaaacatcttaaaatcaacagtttagtatgaaatttgatttaaaagaagcttacatggctacagtagttggaagaagattacaataccagatttcccacctcacatgagttcttttttcccatacctgggctttgggccaaggagtttttgggtggaccgtggaccaccatctctccatggccccaggtattgttgggtttgtgaaatagcaacagaaagtattccattggtttgtgactattattaggccaaatattggtgtgttggttaagtttactctttcctaaataaaactggaaaaagatccattttccatggaattgtctttgcctggatacattaatctcacgtttccacataattgtttattcttagttgc

SEQ ID NO: 36222 - DNA, 589 bp, Sorghum bicolor
  Intron number 1 from transcript Sb10g005970.1 (locus Sb10g 005970) derived from phytozome v7.0 (chr-ID chromosome_10; pos 5404097 to 5404685)
gcgctcacgaggcagaggactgtgaggtgaccacaacgcaaggattaccgtgctgttttgctgtttctcagaatgttttggggggcttggggaagtggttggtggcctgccggtgatcggaagcctgggtaaagccgcaattttgcagcgaattctcttggttttggaggagatgggcggaagaactcttggtttgggtctcgtaagttggttcttcttcccgtgctcttggtctctcggacttgtttgtagctcgttagtcgtagtccctgtgtgaagcttggaacttagtgtttgattttagttccttgattcggatataaaattagttcggtactaagactatagcgagttccgtgattttgatagctaattggagttatagtttagtttctggtgagtagaaacagataggggattagcagtatgtggatggatgggataacaagatataccatttctaggtgtgctgatggtgacgagctgatttagctgataagagcaaacaatcactgaagtgtccaatgttgctatttttggtgttacctatatagggcaatcctaatgctatttttcattcacagattcc

SEQ ID NO: 36223 - DNA, 468 bp, Sorghum bicolor
  Intron number 2 from transcript Sb02g004270.1 (locus Sb02g 004270) derived from phytozome v7.0 (chr-ID chromosome_2; pos 4853962 to 4854429)
agaccaaccggtgccgccgatcagcacaccaggaggtatgctcatactttctgtccaattatgaccttcagtgtcataatctgaaattggttactgaaagaaaaagagagagagagagagagaactatgtaattagagttttttcaaaaaaaaaaagaactatgtaattagctccttctctgaaaaggaaaaggtacaaattttgatgctggattggacctagtaccttcttgtagtattcttcatcgtttagcaacacaccttgtggtccaatttctgatgaagaatttgaatttgaacacaaatgattataaattttgcaaaagggagagaaattgagctctccaaggggacaaacgcatttgtttccttgtagtgcatgcatgactgctagataggaaacagattttgttgcattgtcatgatcttgtgctaacacatgtgaaagcttgttgaatgttcatacag

SEQ ID NO: 36224 - DNA, 688 bp, Sorghum bicolor
  Intron number 1 from transcript Sb03g028630.1 (locus Sb03g 028630) derived from phytozome v7.0 (chr-ID chromosome_3; pos 56581827 to 56582514)
ccgcatctcttcagcactatcaaggagcacggtacgtccgaggtctttgtcgtgtttctctacgtccatcgagaattcgttgaatgtttgtttctgaaccgacgtgaacactgaggttgacgtcgcttgactagtgttgtgaattattggccacccgacagacatgtatgttgacatatggcaagtttgaattcttcccttgggctccccagtcgtcggacctatgatatatatttaatttgtttcatgctataattaaattcgtcacatttgtgaaacaatattcttctgctaatatgatttcagttatctgttttttttaaagtcctatgatatatttttgtctgtttcatttgcaagtttattgtcccacttatacaaactcggttatagtaggtgaagatattttttttacatcagtgtgtataacgttctaatgaatttgtgttaataataattgtccataatttataacattctttacgtacctgccaagccctttgtttaagtaaacgatttcagtcttcagatagtccctgtcatgctcagttccctaaatttctccattgctacaaaattgaaagttccctaaatatcaaagatcgaactgaaaattttgtggctttatcgtgggcacaaacgctgaactgcagggaacatttgtgtcacctggttcggaccaattccc

SEQ ID NO: 36225 - DNA, 779 bp, Sorghum bicolor
  Intron number 2 from transcript Sb1676s002010.1 (locus Sb1 676s002010) derived from phytozome v7.0 (chr-ID super_1676 ; pos 546 to 1324)
cagattttagtgcccaaggaagaggtccggcaaacgtgcggacaccagtggtattgagtttgcctccatctctagaatcttacacctgattcatgtttgcttttgaatctgttttgtcgttgtatggtttctcatattatgggcttattatgggcgtaagatagaccattacttaagattattgacgtatcatgttgtctgtatgccacatattggtgttcccccacaatctataaagagtttttttttatagttatcggcaacagagcaaacacgaatttataccattaacaaccatccatctatgtgttgttttcctgtttaactactagtacacgggtttgatcctacaaaatcaatacatattccatagcgttttcttcgcttggaggcttggacacgtgcgggtgttaatgtttggtcctcggagtatttttcttgtagttttggatgcatgctgtttatttttcttcaatcttcattattctgtgccaacatatttgcattatgtagtgatgtgagtttgctttttcagatgacagggagacctatacaagttgaaactaattatacagaccggtttccatctgttgattcacgcccacatcgaatgcgtgaatcagattctgttattgaggtaaaatgttttcatgatcagatccatgttttatctgttccgtgtggaaacatgttatgctgtttggattccatgttagttaatcatcaggcactcttaacatttccttgccttttagattgtgtgccagggccgtgattca

SEQ ID NO: 36226 - DNA, 825 bp, Sorghum bicolor
  Intron number 4 from transcript Sb05g002420.1 (locus Sb05g 002420) derived from phytozome v7.0 (chr-ID chromosome_5; pos 2586231 to 2587055)
tactactgctggcatatatccaggagttagcagtaattagtgtatttgctttctattagactttagaactcaatttcccttgagttttcttgttcttttgatgaattctgcaatcacatcttttctcacacaataatcttgataaatcatatgatactccacaatagttttcaaatggatgcacaagatgcgaaggtaagctagcatcaagagttgaaacaaggaaatttgtgtgatgaccaaatacgtcaatgccatgtatagtatgcccaaagctaaaacacataaaagaaatataatctacaaaaaaaagaacttctattgacaaacaaaatactccgtctgtacttgagtacataacaatgaaatagcagagtcttgaagaaacatcgtgtactgctgtttctatcacattatgttagtaaaatctacaggaagtataatattagtatgactttcactctgtcgagcaaaatacatttgctcatattagtggtcaagttaagaacatttgactacacattttcaaaaaggctcacatttatgcagaggattggagtattgtttaattgccttaactttaaatagttctatccttgtcaaactgtagaaggaacttaattgcataggccttcttttccaggacagaatctgatgcaaatcaaactgaaccacaacatttggtgcacaattgatttattagtgatatttctgcatagatggtggtgttttagttaagtataatagatggggctatctagaagagatgaatatcttgatctttgagtgcttattagtatattgtattcttctctggtgacagtg

SEQ ID NO: 36227 - DNA, 711 bp, Sorghum bicolor
  Intron number 2 from transcript Sb04g030020.1 (locus Sb04g 030020) derived from phytozome v7.0 (chr-ID chromosome_4; pos 60052796 to 60053506 reverse strand)
ttcgttgggtcgagcccagcatcccgtgcctcctggtaatggtaaaatatccttatactttctaccgatttgcagtgtacttgtttcttgtaatcacatttcgaaatactatgtcaaaagtatttaatgccgagttaaagataaagttcaatacactggattattggtgtaaacatgtggcttccgaactgagttaattaactgcatcatggtgcagttacatactgtggagtgtggaattgtattgtccattaatcacatcaattataagaagataactagcgaagctttcttaccttggttacttttttgaatcaactggcagcagcttttcctttcaatcaagaagaatgagttcctaccttattattgataatcaaagtgttgttttcttaccttggttatcatcaccatattattgatcaaacagaaaacactactgagcaagcatttatgttaacagaagtgcctatatgttaattgtgattgatacccgtggactgtgctgttcatgtatttacttactgctattactactactagctacaacgtgccttttctcttagttatatgatgagcttaattatttcgttctggttgtataagcactcactcttctggaaattaccatgtttatatgtgtttcaacattggcaataacagtatgcatttttagggcggccaagatcagctgggtcctactttggtgtc

SEQ ID NO: 36228 - DNA, 1025 bp, Sorghum bicolor
  Intron number 3 from transcript Sb03g037100.1 (locus Sb03g 037100) derived from phytozome v7.0 (chr-ID chromosome_3; pos 65140437 to 65141461)
atctagcggacgctttggctgaggtacatcgccgtttccccggattatgctacctggagtcgtgctgagtctcttgaaagtgaatttactatactttctgtcagtgaatattgtggattgcttactggcatcatcatccagcttgaccactggcaaaatattttatgtattctaggtgcaatgtaatggtccactgaaattaaactaaaaatgctacctcatagtctaatgttgtaggtgtatataaataataatctggagcagaaagcttaagtattccctttcactgtgtcatgcaagccatgttgtctttctttccacatatcattttgaatgatagtgcaaagtcaaaagataacatgagatagtttgctataaaactctgcctccatttttataattttgctccatggatgagctataccctatctattttatctccctattttttccttaaaatttagttaatcatatcaaatttgtattgtggatagaatcaactgcttaatagatgatacattatgatatctgctcccaccctgaaatatatttttgaacaaactagcatgtgacagtgccaatttcatcaatagagaagagttacaccccccccccccccacccaggctaaacaaaactgaggaaagaattatacaaggcccaccctgaaataaatcacagaaaaaaaacaagatgctgcttgtttttagctgcaaataacagattcatatggaaacagtagccatattgttacaaagtttgttgtcttggttctcaagagaggcataatgatactagatttgtagagcccaaatttttaaaaataaagtactgatacatttttcaccttcatacttactgctaacgtgccaatgtgacacttcgcatgaattgcacctgtgttagctgctaattggtcagatcacataatgatgacaatgtaattccttgcaaataccttgagtcactaatgccctgcttgcatatataggttaacgaaggaaggattccagagaatcgtgttgc

SEQ ID NO: 36229 - DNA, 634 bp, Sorghum bicolor
  Intron number 3 from transcript Sb01g001140.1 (locus Sb01g 001140) derived from phytozome v7.0 (chr-ID chromosome_1; pos 1019863 to 1020496 reverse strand)
agctcgggttagataggtcgattgtttcaggtatgttgttgtttcctccactctgctctcggttctattcctcttgctctatcaggaatgcttttgttagccatacaaagggacctcgttctgtttgatgtgcaaaagttttctccgcggactctgaataataattcctggtggaagttgaatggacatcacatgatttcttttgctatgtatggtggtgaaaggccttgcggtcactgtcagcactacaaaccattttccgcatgcaccttgccaccagccaacattctactgtgtgcacaaaagggacactttgtttaaatatttgccttctcggtttaaatatttgctagtcctcgcactcaaagtaagttattgctatgctaccagtctatatacctgttactttagccagcatagcagaaatgacagagtggatgctaagctgtaataccactgtgaactgtgacaacttatgctttagtggtttaactggtgtccattattgttttagtttttctttggctaattctccttgaagcacttatttatcttccaatcaaagtatctttcagtttcagaagcactactcaaacattgcctctgtcaatgtttatttcgacaggtttattgg

SEQ ID NO: 36230 - DNA, 713 bp, Sorghum bicolor
  Intron number 1 from transcript Sb09g020930.1 (locus Sb09g 020930) derived from phytozome v7.0 (chr-ID chromosome_9; pos 50355022 to 50355734 reverse strand)
gtggattcttcacaaggcttcccttgggttccggggtacataccacggccgatcctctgtttttctttctggctgctactcgatcaccgtgtcctttgttcttcgccttctgattttcgattttggtttgaggtgtttgttatgagtccagaggcctctgctctgagtagttggctctctcgagagagaggaaggcgtctgctatgctccattgctggcacaaagcattcgcttgatcctctcaccttttcctgtcacttgttaattactctcttttttttttgcgaattcacagtagaattcgctttgtttattgtttttcttttgttgaggttcccgatgctggacttgggcaggcctgtgtcagagccatgtctgcgttgggtctccaactctggggttcccttgctttttcttcccttcacgctggcagagggcaccgcttcttcttcctccttcccctgcccccgcgttctgcgtgttcatggtgtgccgcgcgcgttaatgctcctcccacttccttttctttcccttggagtagtaggagtatttttcttctccaagaaataatgctcgcatcaattctttgctatggctaaagccactagcgcggttgtgttggttccgttggcctgcatgttttacatgacatttcgcctttttttttctttctttcaggtgcgaagcggcgcggcggcggcggtggccgaggc

SEQ ID NO: 36231 - DNA, 594 bp, Sorghum bicolor
  Intron number 2 from transcript Sb04g037640.1 (locus Sb04g 037640) derived from phytozome v7.0 (chr-ID chromosome_4; pos 67230060 to 67230653)
agtctgtctacgcagagaagcgtgtctctgttcaggttcgcgactgcttattcaagtcccctttgtattttctccttttattattagatagatatagctcgtgtgcactacgaatgagatgacctgttttagacagtcgcttgttgcgttttgaatatcaaggtcttgatattgttactcttctgttttcgtgttatttgtgttatttgttcatccaagtacattatgtagccttatttagaagctgaaacttgtctgttgagtttccgtccacaacaatttggttataactaattgttggacacttcatttaagctcagttatcctgtgacaacattctgggcttaggtgctgtaaatgatgatcttactcggattccccttcaggacatctaaatggatgatgcaaattcgagtttctgatgcccttatgcccaattatatgtagatcatttagtttctctttccatttctagtgtacgataaagaacaggtctgaattataccgtagtttcttgaactcatccattgggatttcggattctggttgtaggactgatttgtttctactgtttgattgtttgggcattgtaga

SEQ ID NO: 36232 - DNA, 682 bp, Sorghum bicolor
  Intron number 1 from transcript Sb09g001220.1 (locus Sb09g 001220) derived from phytozome v7.0 (chr-ID chromosome_9; pos 1074007 to 1074688)
cgcgagttcacctgcagcaccatccagagccgcaggtgaggatcgattattagttattaaataaatccttttattattattgtatactgtatgtatgaataattaacatatatgctatcgatgatccttagtatttaatttgtaaggcagtgcttacatatctcggcaatcttccattccatgtatatatatatgttgacacccatatcaaatcagtgaaaaacatgtcacagcacatgagcacatgctgttgtcatcagtcagcattctaatgagtcgtaccagtagcttttctaatctaaaatttaaacaagtctaaaccttgtgtatatgcgcaagcacaattatagaattctattaaagtgtcgtaacaatacaacacgatcatactggtaggatgaattattccaagatctcaagtggggtcactgttatttcctgattatttgcgagaatcgatgtttgccaaacttctttggttaattcatcaaaatacctctagatttctagtagagctgattaggcatatctatcttttacttttaaaaggagaggagtactattactatttgaacatttgtttgttttatataccttttcatggctttacttatcagttgagctcaccattgttgtcttttattcagggtcattgtcgttctccaacacgatattctgcagc

SEQ ID NO: 36233 - DNA, 878 bp, Sorghum bicolor
  Intron number 3 from transcript Sb01g043340.1 (locus Sb01g 043340) derived from phytozome v7.0 (chr-ID chromosome_1; pos 66544819 to 66545696)
cttcttggcccagattttctggaattctttccctggtttgtctcccattctcttgccattgcaaacaatgcctccattcagacagtcaaccttcagaacagaaaatgtgtgaagaaggcatgtttttctgcagcttatgcgaagcagaggtattgtgatggagtcattttcctattccttgtagtgcactcatgtactctatatttcccttgggggctattcaatacaaacaaatgctattgataacatggtatcagattagtttttttctttttgtcgagggttctatctcctagctgttgcttatattcatgcgttgcacttgaatactcatacctgaacatactgtcctgttgttcaagctatactgatctgcaagcttagtttttaaggtcacctaaaaactatgcagacaatttagtaaaaacttgcacagtgagttttacatctttcagcattttatgctttagcttggcatgtgcttatgtagttcatgtttgtacttcaaaattttgctaatattcagtttgctgatcagtaatcaatagagctttgacagactaactaatctgtggatgtatgaacttatgagggcaacccatgaaattcagggctactgtagcaaactatactgaattcagataagcaggatggctagtggtttgaatcaaataaagtcattcaggcatttttctaattatgctccaaatttctgattgaacggttatagctgaatggaaagtcactcttctgatacttttgtgatcttgattagtgtcttcattgtttctaacatcttatgaaaaactagcataattcttcgccttttgatttggatctcactcccaggttctgaagaacagtaagcattgtagagt

SEQ ID NO: 36234 - DNA, 832 bp, Sorghum bicolor
  Intron number 3 from transcript Sb09g026860.1 (locus Sb09g 026860) derived from phytozome v7.0 (chr-ID chromosome_9; pos 56038266 to 56039097 reverse strand)
tcaagatcgattggtatgtatattggttcctcagctagatcttggtagaatgactctatgcctatgctgttgctgcatgttgtaaagtatcttagttagactttgtggaagttctaagatcaaatataagaaaccagttgctgtaagaattagtttttttgtggtattattatcgctatctatacgatctagagaatcatcttcaatctatctaatcgaataactgacctaggcaatttttcactagatgccatgcttccatttaggaagataagaccatgttgtagttgttctatattaaagaaagtgtctactgtatcagcgatttggtttaaacagcttgtttctatccgagataggaagcacgatagacttaaaactctactgacatcattttctggaatttgactgtcagaatattggctctaatcctgtcagtgaagttgtaaaatgagcttaagtatatttctatggtatagaacacagaatgcagatgtgattaggaaaagaagttcgctgcagtagaaaagccatccttatgtcatgattcctgcaagtgacacttgcagcttggaccatggctaaccatcaatagatcttgtttggaaatgttaacattcatcgccatcttaaaatcagatgcaccattgtgtaaaactctcggacattattgttcctccaattcaaaagaaaatttagttgggccaacagttcagctgatttctctgtgggttggatagcatttgtccaatgttcttcaccttttcctaacttgaacttggaaacacttgttgtaggggaccggtatttaaaaccattcgtcattccaaaa

SEQ ID NO: 36235 - DNA, 782 bp, Sorghum bicolor
  Intron number 2 from transcript Sb10g024620.3 (locus Sb10g 024620) derived from phytozome v7.0 (chr-ID chromosome_10; pos 53737630 to 53738411 reverse strand)
gagtatcgtttcgcagccggttgagcgggtccaaggttcgttctcatctatctatgctttggatcgacggctcgagtgaattaccatcatattattaggaatcgggatggattgagtgcgataagaaagtgctttagtaccttacttccatggctggctagcttttcttcgcttgcttgctaataactgtgtgtgggcgtatcatcagctcagaacaataaatgcacggattggaaattcaaccttttttaatatgtcctcgtcagtactacattaagtagtaccaccgggcttctttcttgtcttagaaaaaattaaggttccacatctctggatttttatcaaaggagcaatcacagttgtttttgaatatgtggtaggctaattgttgaattaacttcaaagtttgaacctagtgagaggtcttgtccagtagtactgagtatcattgtaacaagcatcattttgccaggatagttttccatatcgcatctatcttgatgctgcagctcaatcatgtttgctttgctgtattggtagcgttattttgtttctgggctgtcatatgtttattccgatgatactcccatactatttattagaaagatgagtgttttagttagaaaagaaggaaaccccaaggttacattgcgtcgcaaagtataatatgatctcatgtccatgccatctttgtgtccttttaaaggtcatgtaggatgtggacagccttttgctgaatcaattccttgataattttcaggtcaggcctagccatatattgc

SEQ ID NO: 36236 - DNA, 873 bp, Sorghum bicolor
  Intron number 1 from transcript Sb04g024440.1 (locus Sb04g 024440) derived from phytozome v7.0 (chr-ID chromosome_4; pos 54189313 to 54190185)
gaagaccctcagcggtaagctcgatttgctccgctctcacttcgtttcttgaaaaagttggtgtgtatgtgatctgatctggtcgctcttcgcttaaagatcagcctttttttgcctgtaaactgcgaatttggtttttgtcctacagcttggcctggatcttcaggatgaacgtgaactggctgcgcatttagttctttttttttgggggggggggggggggggctcaagtttctgtttttccgcagcaaaatagttttctttttatgttaaaataaaaatagttttttagggcttctgcagtaaaatagttttgttagtctttagcactgtttgggggactagatttctgattggaagcttggggccagctatgatgcttaccttttagcatttcgtcaaaaaaaaaagaagcacggtagcctttccagcttagtggcatttggttgtgattcagtagccgcatcttttgtgttcattttactgtttacatcaccctgccctaagtacaagcctatgcataatcactttcttagtgagaaatactcgtaaatcattagctgctgacgcctactgttcatggcctgcttatgggcccatgaggattgcttgttttgagaatggggtgggagtggatcagttcgatggatattaattcgggtggtgctttgacttataacggtgataatggccgataatttcacatggtcatgcgtgtttaccagttttatgtccgtccggtaattttggttttttagtttctgctgtagcgcttaggattgttccagtacttttcgccatcatgaccctaacagtaacactcatctcattgttccaggcaaggctccagtaatcgttgctaagggcgggttc

SEQ ID NO: 36237 - DNA, 1001 bp, Sorghum bicolor
  Intron number 2 from transcript Sb06g027970.1 (locus Sb06g 027970) derived from phytozome v7.0 (chr-ID chromosome_6; pos 56826445 to 56827445 reverse strand)
gcaccgtaagttgaacactctgacattgctggtgctacgtattaaaattagaagtcacatcatatattgtacagtagtgttaataaatagtaaaaaaagtatgggtcaaatgattccacttatatttttttatactggacttttatgattttattaagttgtttgcaggttgctcgtatgattcttatccaggaattatttttatgcatagccttgctactttttttttggctttatttacctgttgagctgcatcggcacagaaagaatgtaaattgatgctttgtctttgaatatttagtagaagcttttatcccagaatagatgtggatttattacattgttatctcaagatgtgttaagacaaatggaaaactgaattacatattcctcttttgttggtaaaaataattactgaccattgaaaagaaaagaattgctcttaaagcaccatctgctgtaaagtttatagaaacggtttttttttcgcaccagtgttaattaaaataattagtagttttgcaccagtgttttaaaacagttgttgcatagtacttactgtaggttgttttacttctaagtgaaactactctagctttggcaagttcgtagaagaatatattcatccactaatccacactaccaaatcaatgcacttcaaagacatttcatggtgggttttaatgaaaccaatttgatgtcataggtgttggtacatttttctataaactgggtcaaaattagataggtttgacttaggaaaaaactaaaacggcttacatttgcaatggtgggagtagtaacatatgttgtgtctttctttaatttacttttgtaatggttgattatgatgcttttggtggactgtataggggtccaccagctcattggccgaacgtttttcttgtttgaacctaagttattcatgcatacacatttgataaagttataaaagaaggattgaagatgtttacatatatgttttttaatcttgcagagag

SEQ ID NO: 36238 - DNA, 786 bp, Sorghum bicolor
  Intron number 1 from transcript Sb03g000930.1 (locus Sb03g 000930) derived from phytozome v7.0 (chr-ID chromosome_3; pos 775125 to 775910 reverse strand)
tttgcacaggtggcaaaaggttctaaaccctgaattggtcaaagggccatggtccaaagaagtaagcatcctattggcttttctattttggttttatttcttattaatattgagcctaccccaacttgcttgggataaaatggctttgtctttgttgattcggcatcttatgatcacttattcaacacaacatattaatatcaacctgttctctttctgtttataggaagatgaaatcatagttcagatggtaaacaaatatgggccaaagaagtggtcggccattgctcaagctttgcctggacgcataggaaagcaatgtcgagaacggtatgccacagcaaatttcttgtctgctttaagtttcatcaagcttgcatgtaagaaaaaacattttccccctttgcaatcgtagtccatactttgtgttcaataaagaaatggcaaatgttagctcatgagtgctgctttgacctctgatatcttttcacaggattgttggcactagctgttttgcaagccaataacagcgacgccatagtagaagcattactaaacactaaccttttaaactgtgtataaaaatacaatcttatttaaccatctcagcttttgatattacaaatatgtcttgttaacacactgtgctctaggcatcataaagtatgcctttgtaaattcactcaattatgggtactataaatatgttaactgtagctgctctaaccatggactaacttatctgattcaggtggcacaatcatcttaacccagccataaacaagg

SEQ ID NO: 36239 - DNA, 589 bp, Sorghum bicolor
  Intron number 2 from transcript Sb04g000960.1 (locus Sb04g 000960) derived from phytozome v7.0 (chr-ID chromosome_4; pos 799787 to 800375)
agctccagaaaggttttttttttcttctcattattacactgaccaattttagactttagcatctgctgttcaatttatgcacaattggatgtgttgataagcattactatgtttgttagaggtggtacccatgaactgcttggttgtgtgcattcaacctttttgcaatttctcggtttccatgcactgaataaccaattagtttttttgttacataattgttgatgattacctctgtttaggtgccttctgtttgttatttgtccgtgccgtaacaaataggaagtacattactaatgcttctaacaaattttttttttgccgcatttctttctctctgtctatgcttgatgctcatctaatctgtatttggatacaccggtttgtagttttatacggccactgcatatatgtttgttttttgtattcatgctttgatatagggtcttggagtcattactgaggaatttgttatttagtttgtgctaataagtgttattagcttattacactcactaaatatctaatccagtggttattcacttattcttcaggcagaaactctgatttaccaactgatcccaacaat

SEQ ID NO: 36240 - DNA, 581 bp, Sorghum bicolor
  Intron number 3 from transcript Sb10g023860.1 (locus Sb10g 023860) derived from phytozome v7.0 (chr-ID chromosome_10; pos 52595904 to 52596484 reverse strand)
gacaggttagcagatgacatttctcttttttttcactttattagatgcatacttgtgcttctctatgtctactgtgctgcaactggtactcattacactctaagctaccagactatatttcttaatttgcctggttttggggggcaaaccttcttttcagatctagttgcctttgcctatatgaaaaaacttgtggtttactattattgaagaaatcggtttacctgtactgccagtgacatgctaacttctcttctattgtttaaaggaaaccatgttagggaaatgactttttcaaaagaaaaggataagctaacaatcagtactgtctcactgtagaaaggatgcctcaacaaaactcatgttgctttgatctgataattgttgcttttatttgttgttcaatcatagcacttttcagtttaaacatgaaaaaaaaacaattgtagaatcatactgctcttcagtttaaacatgcaaaaaaaaaaagctccatgttggatctaatacttctcggttttcatttaacttacaaaaaaattctacgttaggtaaaatttccttcaatcgtcgctgcctgc

SEQ ID NO: 36241 - DNA, 1005 bp, Sorghum bicolor
  Intron number 1 from transcript Sb06g020840.1 (locus Sb06g 020840) derived from phytozome v7.0 (chr-ID chromosome_6; pos 50259135 to 50260139 reverse strand)
cagcggcagagcagcagagggcgtctgggtattcggtattcctcccctcttcctttccttggtgtgcctttaaattttgcgattaactgactaggaatctgaacattttgaattagactattggacgagactctagagaagctgaatcatttgtatgaaatatgtaggccttgtttagttccgaaaaatgaaaagttttcggtactgtagcactttcgtttgtttgtgacaaatattatctaattatggactaactaggattaaaagattcgtctcgtgatttacatcgaaactgtgtaattagtttttgttttcgtctatatttaatgtttaatgcatgtgtcataagattcgatgtgacggggaatcttgaaaactttttggttttcaaggtgaactaaacaaggccgtagttttaagcacttccaaagtatgagaaaatgtcatttggctggcgctctaaatttctgtaggtactatgtaatgtttcagccatgtaagagtgtttgatggtttgatttgtgaatgcctctattgcaattggcataatttcgaacttatgaaacattgaaacctatgaactgtaacggttggtaaatgactgcgttgtaggtaacaggaaaacttgtgtgttgccatccatagattgtgcacagctagtggcggagccaacagtgtgagacaaaattttcataattttctctaatggggtttatattttaaaaaatattttagagaaatcattgtgtcacaatgttatgtaattgagccctaaagatactagtatggtccttaacatatattattctatatagatattatttatataggtgctaatttgtcaaaaaatgttacaaagaaaaaagaaatagaagttgctaaaaaagaaatgaaaaagaaaagagaaaaaaaattgtatggatttttatttagtggcccatcaaacccacgcaccgccggctccttgcagcgcagcgccgacattccatctccttggagcgccgc

SEQ ID NO: 36242 - DNA, 695 bp, Sorghum bicolor
  Intron number 4 from transcript Sb03g032750.1 (locus Sb03g 032750) derived from phytozome v7.0 (chr-ID chromosome_3; pos 61198236 to 61198930)
atattattaagattggtggtcttgtgagaaataaggtaggacaccttttcattgcttaagtttgatttcagatctcttttttgaagattagacttcaatttactcaacatcatgaggtgcttctttacgtgctatgatatatttcttggtgcaaagaccattcttgtaatttgcataattcgataggtaaaataatggacctcaaaaccttgtgccattatttgttattttccaagacgtttttcaaatttgaagtgatatttttttttttcatttcattttgtgatagtactaagttggtacatcttgattatcctttctcctgactgctgagagtcatgtttggttataccatagttctatattttccctgtttgttaggcccagggttctttatcccatcgtcagctggattttctagttctacataaacattgttatctgcacgatactctgttggctgttgcctaaatatgtctgtagacattgatttggcaacctacatcctatgtttttttgttggtattagtattatatataacaggagtgaccaactgaccatacgaaaatatgctaaatctaattagagatttagtgcccttcctcactgtttgaactttatttactcatcctccagtctatttataatgctatctgcaggaacggtttgttaaaaggagggaacggcttttagg

SEQ ID NO: 36243 - DNA, 987 bp, Sorghum bicolor
  Intron number 1 from transcript Sb04g009250.1 (locus Sb04g 009250) derived from phytozome v7.0 (chr-ID chromosome_4; pos 11304873 to 11305859 reverse strand)
tgaggtcaggctgatcagcctcttttcttatccccttgttgtgcacggcattgaatttgttgcgagaattgcactgacaaagttcagtatgcatccagactcaagaatatattagtgacttggtatcttagttttgaaagaaaaacatcagttcagtggaaatgtacggtgccagattcattatgtggtgtacagaaagttcacatatcctaagatcccctttgatggggctctccgaagagcatctgctctagctctggttctgccaagagctaccaaacactggtgaacaaaacaactccggccagggagccagcagaagccgctggaaaaaaaaaatgaactagacacatggagctggaaattatggcttccaaaatatgtaccaattttgaatccgttttgaaactttgaaccacattgtttccctgcttcacaaattatggcttccaaaatatgaactacatcgttaccctgcttcacatggcaccaattttgaaatttgaaagggattttcttccaaaatacgtactgattttaaatccattttgaccatgacgttgtttgcacttaatgcaataaaacaagatcaggcatgaatatattttgaatttttgaaaaaaaaacaacattctctacttcataattagaacattggattttttcttcttttgctcaggacatttttctttgttcccataacaccttttgtctaagactttctcgcaaatatggtgcaaaatagcaggatatcatagacattatacaccttagattcattctaggaaatacaagagaagccgttctagcaaacgttttccaaaagagcttcagctccaccagagaagggacttctctgaaggagctagagctggagctgttttgggaggaattggagccctgccaaacgagccctaagtacaattttttctgttgtttttgtcatgcacaggtttcaggactggaaatcagagcaatctgtttctg

SEQ ID NO: 36244 - DNA, 673 bp, Sorghum bicolor
  Intron number 2 from transcript Sb02g000810.1 (locus Sb02g 000810) derived from phytozome v7.0 (chr-ID chromosome_2; pos 661655 to 662327)
cgaccccgccctgcttcaggcctacgttctcaaaggttcgcttcgcctataactgctcccctcccctgttcaactcagtcttctgctcctctgcggcttggcttagttcgccaggggttgggctggcttggcttggttgtgggggaattatgtctgcctcgtttagtttctgtttggctgtcgactagtctgctgcatatctacttttaagagtaacaaataaattcaaattctgtattgttagctcaggaacaccgttttgagtggcttcaatgcttaggatcactctttccagatagtgtgtagatacacagtgaatgacatgagtacccctttcttttccactccaaaccaggcactccccatctgcatattactcaaactaacatgtttggcttggaactcccttgggaaaacactgagtgtttcaggaactgggatccttctcgatagaaatatgaaactgcgtttccaacttaacacaaagatgcgactgtcccactgcattttctttgaactcctttttttttgtgtaatacgacatgttatacctggatagcgatctatccctgtactgaggacattagtctgaagcaagtttcacctgtaagtttaacgctgttgttttctattaccaggcaaggcactgtcttcattagataaaaaagaggat

SEQ ID NO: 36245 - DNA, 365 bp, Sorghum bicolor
  Intron number 1 from transcript Sb10g012970.1 (locus Sb10g 012970) derived from phytozome v7.0 (chr-ID chromosome_10; pos 19765756 to 19766120)
gtgggatcgccccgagaccggcgacgaggtcgaaggtacgtacgtgtttgcggatttgcgcacaagcctaactcttcttccgatagtttgttcagtcgcgtacaggttgctcgctcgccggacggaattggccggcgtaagaacagagtaggaaaatggaatcagtacagtagccatgataatgataattttttaaagcgcatcaattctcgtggttttcgggaccgaatcacccaaatgatgacaaagagcgattgtttcaattgacatgtttgatcagttcagtctatacagaagtaataattttttgaatctgttctctcgctgcagtgcattacactggcactcttttggacggaacaaag

SEQ ID NO: 36246 - DNA, 701 bp, Sorghum bicolor
  Intron number 1 from transcript Sb09g002610.1 (locus Sb09g 002610) derived from phytozome v7.0 (chr-ID chromosome_9; pos 2793076 to 2793776)
ttttcaaggtaaaatgaatctgagcttagatgtgataactagttccataatccattaccatcttctatttatttggtttcttgtacttgaactcactcgctcttcattcctaagaaaacctgctgatttcctttggaacaatgatgcttctactatttcttttttgtgcttatccaactgtctgtttgccttcaataactaagtgagactttgtttatcagtcttaagtttacacaaaagattgctttcaaaaaaaaaaaaagtttacacaaaagatatatttactaagtagatatattgaacgtgttagcatctctcaagtctcaaacctcaaattagaatgaacttgctcagcatttcagctgggtctgtaggagtgtcggctcattgaattttgttgtttcataagcttgggtacttatcttttccttcagtttgagattaagctagtaacaaatcatatgtagcaagcttacgtcttccccacctgatgaaataatggaataaatggcactctgattattgagacaaatagcacttgtgataaaagaccagtagcatctattatgaggacttttcgtgaccatgatttgatttggtgcttgttttgttgaaaaaatacagaaaacaaggactcgttataacttcttcagcaacttagtgtacctctgtttacttgtggttcaggattgacgagaaag

SEQ ID NO: 36247 - DNA, 797 bp, Sorghum bicolor
  Intron number 1 from transcript Sb02g029540.1 (locus Sb02g 029540) derived from phytozome v7.0 (chr-ID chromosome_2; pos 64642768 to 64643564 reverse strand)
ttcaggaagcaggtgagggggcgacccggatcttggttcatgctgtctgtggatcctgcgtagcggttggcatggtgatctcggcctctcgggccggcgggagagagaaatgtttcagctttgtctgcaatgctcggctccggtggctcccggattgggctgcgggtggttgcatggatctgcgcttgtttttgggttgtgctcatggggaatgagtggagactcctgactcctgttggttcaacttcgtctccaatcaattttgaactaataatgcatgggctacaggtttatgacttccttttaaccgttctgtggcctgtctgacgttttcacaggtgcactttgtgttgttagagtatactgatacaaacacgtgtcaaactttggccctttgccttgtttcttcctttgccaattttctatgatctagtattttggttgctattttcttctgacaatttattgttttttcaatgcaaaactggtagcatagcttgcctgtcaatgtgtaaatttggtatacattgtgatagtctggtatacattttggaaatgtttgattcatttgtgggttgcagaatgtatgctttagtttttattcatgcttaatggcttgttcgatttctgtgtgaaacatagtatacacctggtgtggctaacctaacctttgtatcacgtttggcgatattgcattaacactgcttaacttgtattccttgcgtcggtagattcagccaaagaacttgcttcctttgattcatgaatactgcttaacttgttccttgcattaatag

SEQ ID NO: 36248 - DNA, 925 bp, Sorghum bicolor
  Intron number 2 from transcript Sb0019s004400.1 (locus Sb0 019s004400) derived from phytozome v7.0 (chr-ID super_19; pos 487582 to 488506 reverse strand)
gagggggaggacctcttcaacgacaactacctcgagtaagccaactcgaatctgacccggggctggagatttccgggatcttctgtgggttttcgggcggctgggtaattgggactaggggatctggtagatgccgtgggttgattggcagatgcgaagttttttttggcctgtggtttggtcagatgtctgcggttctaggatttgttgtcgttatttacctcgtaatgtaggcaattgtggcatttagagaagaagaaatgatcgatttattgattaatttttctaaatttttgttgaaaagataactaattacattatcctaaacgtcatatgtttgaaaggagggactacataaatcgggaaaatttttttgtagttgagtagataattgtatactagagtaactaactgataggcttaactaatatttattggattgatggaattgcacttaaatcttctatgttttattgaaaacaaccaactttagttcttggccatgcatctaaatttgttaattttattggtctgacggaaataatctcggaattcgctaaattgaagtgctttgcgtgactctctatgcccataggggcagatgcccagtctccccagcttttatgataggtttgttaagtggctctgctgacttgatgcgaatttgtgtttgttatcaaactaaagttactgtatgtttcctaaattgggaatttggacttgcacagtttgctgtggggtcacttttggttttatagatggattataacaaaggcatgcatttttttacatgatccaaatgaataatccaatatatctagccaacacaaaccattctgtatagctgctgactgtcatttttgaattgttttgtttccatattcagtccttttccttttttcatgattgcagtgattaccgaagg

SEQ ID NO: 36249 - DNA, 685 bp, Sorghum bicolor
  Intron number 1 from transcript Sb08g002296.1 (locus Sb08g 002296) derived from phytozome v7.0 (chr-ID chromosome_8; pos 2435985 to 2436669)
agactggtttgtacgcttctcgtgacaacaggtgccacatgcttgtatcttgatgacaaatatggtattatacatactctatgagaaaaacatgtagtcactattgttgttggatcaacattaaatgttatgttttctagtcttatgagatgggttacagcattagttttcggtatattacaggaaagcatacagatgtttctattttctactaagaaatatttctagttcctttgttgatctacttatttcctgttcctttattttgccaaactatttatttctagttcctttacccattacagagttgtagtgtagtcgagactcgagaattgtcagggtaccagctgagggtgcctaatgttttcttatgatttgtagcatttcaaaatataagcattgctcctgcctgattcgtttgggaaaaaaacaaaaacaaaaaagctaagcattgtgaccatcagaatagcagagtaagctcttttctgtgcttacgatttatttatttaattttttttgaaataattgtgcttacaatgaattagcagaactgtttttttcctcaaaacataatttttgtcttctcggtggcgttagatgaatggttcggataagttattcttttgtagtatctaccagcaatgatccctttctcttttcccctattaatcctttcaggttgcta

SEQ ID NO: 36250 - DNA, 657 bp, Sorghum bicolor
  Intron number 3 from transcript Sb04g038000.1 (locus Sb04g 038000) derived from phytozome v7.0 (chr-ID chromosome_4; pos 67516875 to 67517531)
ctggtaaactgatcttaaactggcacctactttattagtattttcattgttacatcttctgtacaactagtcatttggttactttagacactgagtgaaaagctatatgtgcatttgtatttctttttgaacaaaccatttgtgtataagaaatgtcccaaaagatacatgcatatagtagtgatattctatcatgctacctgtctttgattttttccaacatgtttttgacatatataaatatcagtgctcagactaaaatgggcacgaacgcacccaggtgcactcttactcggcattgcataacttatattttccagacattgaatatgctagcattcttcattagtttctacattttgtcttatgttaagattcattcagaatgataattaaatattctatattttcccaacattggaaccattagtgttaggttgttgaccttagaatgtttcttaatgtgatttctgcacaataatgtggataattctattgccacacttcactataattactacatccttatcccattttatgaagtgttagattacctgaaatgctatgatttatatactcagcatcaaaccattttacgatataactaaaccttgataaatctttctgattaccttattgcagctcccagtaagcata

SEQ ID NO: 36251 - DNA, 618 bp, Sorghum bicolor
  Intron number 4 from transcript Sb10g031070.1 (locus Sb10g 031070) derived from phytozome v7.0 (chr-ID chromosome_10; pos 60729892 to 60730509 reverse strand)
ttcgaggttggtgattttctgtgactagatcaaatgaaaataacgaacagtctgatacattacttattatcatcatatacccaatgtttggcactgtggtctggactctgactttattcaagctcttttacatcttctatggagctatgcatataggctttgctgaaattttatgtttgaatgctaatgatgtgatgttgaatacgaagaagcaacaaacttattgactgaaaaataaagaagtcaccgggatggatttgaagaagcatttctctaattgttttttctgataatagctattttatatcttattactagtggcctggcctttattatttacaggtgcttctgcagatatgttccttttctagatgtctcgtttgattccagctagtagaaaaacagtattttcctttgtgcaggttatcgattgcctggtaaaacaatgctactagagaggaatatatatagaaaggaaaactttattttgttccatttcagatttcattctatttgaaaattgaaaattctattgttttacttttgtatgcatatcttatttcctttatttggagttttctagggtagaggttctgaagaattgtctgctgagctctc

SEQ ID NO: 36252 - DNA, 707 bp, Sorghum bicolor
  Intron number 1 from transcript Sb08g001590.2 (locus Sb08g 001590) derived from phytozome v7.0 (chr-ID chromosome_8; pos 1541877 to 1542583 reverse strand)
gaagagtcagtgcacacctctctctctttccccgtccctagctgtgcctttgcacttgcatttctcggttagtcgacccatccgtgacgccgttagcttcaggacgatgaattatttgtttgctgttgatggctcctcttagggtcattctgtgaacaaatgactcttctacgagcagtcgtataggccccatttgattgctcatccgtggacaatggatctgtaattgtagtgatgcatgcagtaattaatgacatgaatttgtgctgaaacagctgtgctggttcctaacagttctctaaataaaaccctgagccctatggtattgcaagaaaattgcttatttgggactccaaacattgacactctgattatgttgccacttgtgtggatgacacatgagaccatctgtgtctatgaaatgtgggtccagtggcaaatctgcaaacaccccatatgttttggactccttgtgttatggtgtttcatttggttcagttgtgcgtcatttgtatatttcaataaaccaaagatggctggcgagtctatttatccttactaacttgtttaaaagtgtcatatcatttgtctgctgtaacattcctgttctttttcgtcacgctgctttctggtttatctggtttactgaaacatgtggcgcttgttcattagggcaccgccagtgacatttcctcgcccagagggga

SEQ ID NO: 36253 - DNA, 596 bp, Sorghum bicolor
  Intron number 4 from transcript Sb03g038230.2 (locus Sb03g 038230) derived from phytozome v7.0 (chr-ID chromosome_3; pos 66157096 to 66157691 reverse strand)
gactacattcaggtctaagatgaacctttcttttttattcatactgaaccatactatctgttgcccatatgaaatatgtgctcatcagtagaacgaaaggatcgaatgaatataaatcttcttgtcatggttccatgtgtagcctttagaatttcttttcaactcaagagttgaaaacaaggtccacattaactcttcgtgtccccggactgttcactgctgactattctatgatattattaatttttcatttcagagatgcttcctctcacttctggattcctcccaacaatatttgaagccaaaattagccattgtaatacattgaaagtgcaaaagtacagtgttgtctgccatgataatattcaaaatctacaaaatttgtagattatttctattaatatgccagcgattttgtactgacagaagtctcttgttgttgctttttttaacaaaagctactatttgtaattaaaaggattctcattgatgccatctttcattttcctctcttggagcattcactattgtttctcacgtcaatcttgctatctgatgcagaacactgttggttctggtacaactttgcaaaagat

SEQ ID NO: 36254 - DNA, 945 bp, Sorghum bicolor
  Intron number 1 from transcript Sb03g038230.2 (locus Sb03g 038230) derived from phytozome v7.0 (chr-ID chromosome_3; pos 66158500 to 66159444 reverse strand)
cttcggggccttcgccggtgataagcacccaacaagtacgcctaccccttctcttcccttccttatgtggttctgtgccaaaccgaggacccaaactctaacttaagccatttgcattcggatctgttctatacatgtactccgtagtattatgcctagtagctccgatttttctttttgcaaaaattatcgggtgcacatgtggacacccatgtcttttattggcctccgctcggctgtgattgctgcagcagccgtaggcagaggtcacagtaaaacactgtatcaaaggcttacgactccagcagccgcagctgcagcaacgggcaacgggtagcgatcaggcttagggcatttgaattctgttttgttgattaatcaggctagaattggatacttagctaagttgatagatgaggggtgtttagtaatttctaagatgacgtgtgagctaagcacccagttagttagctacagcgtttttggctactgtttgcaacacaacaagaacattataggcacatagagatgaaagttgagatgatgaattccagcttgtggatttgatttattacttgttgcttgctagttgttttgttaccagttcagctgtttaggcttaatggtagatgatataatgtttcgacctatccattgaaacagtgccttgatgcctgatttatctgctccataatacacacatttatgactcgcaatggttctatcatagttccatatattgtgttataattctgtgaacctgtaactttttgtttttcttgcttgttaattgttattgtctgcttgtttattcaactaaattttgcccatattttaaataataaactttatttgcacgggttggctattttggctggaagttgttactgatttcttttcttttctacagatcattttatccgatacaagcattgaagagagtaa

SEQ ID NO: 36255 - DNA, 920 bp, Sorghum bicolor
  Intron number 1 from transcript Sb02g020700.1 (locus Sb02g 020700) derived from phytozome v7.0 (chr-ID chromosome_2; pos 50012561 to 50013480)
cgcgtctctgcttggattgcgtccttctctcgccggtaagccagccaccctgcctcgctcatgttccacggattcccctgcatgttgtgccaggttaactggttggttttattagttcccgaccaaatccaaatcttcctatcttctctgtctcgattccgtttctgcgtggtcactggtaatctagtctatgctagcatccaaaacacggcccgattagcctagttccctattctccctttctcagcactagcaggagcgattggtcgatctcatttcacgccacaccataggacttggcatcggccccaaaattggggttaaagtttgatttccaatttaattaattatgtttttctttctaaaagaaaattgggccttcagctgaaggaatcatttagtgcccctctcttttttttaataacaatttcatgcccctctttagtattagcttacctctatctgaattcatgcccctctttagtattagcttacctctatgtgaatggagaatagtagcaattgacggtcactgctagagtgtctgactagtctactgttagacatctgctgtatctgtacacttatgtttttctccttttagggcaggattagtctcctctcgctccacgagaaagttgtatctccgttaatcttacttctgattgccatgtcttaatgaggagcatatgccatgcatgatacatctcttgaacctttcatctctctcacaagatggatacagaagcaatagttttgtgccatctcctctatgttttctttacttttgttgttgtgcataactttatagcacccagaaagaatcgttttttgtcaccataaatgaaaatgacccttttctttaaatattatcaaacatttggctcttcatgtctctgtttcttctccttgcagagggt

SEQ ID NO: 36256 - DNA, 987 bp, Sorghum bicolor
  Intron number 2 from transcript Sb02g020700.1 (locus Sb02g 020700) derived from phytozome v7.0 (chr-ID chromosome_2; pos 50013661 to 50014647)
tgttgaggctgttactcaacttggtggccctgatagtatgcgctcatactactgctcatctacatccatccagttctttaatttgattttactgaacatttaagcaggatttttttcttgtataattacactttttcctctctctctctctctagatgtcatgaaatcatattctatcaaacaaatattctttttcaatactcagcttttttacgcgtcgtattagtcctaagtcaaacatttgtaactttcatcattgatttcaaaagaatttatgtaggtttatgacagaagatttatgtttttagattccctatgagaaatactttcataatatgtaattcatatgttgtgaaactataaggatttttttttgaaatagatggtcaaagataataatgtttgacttaggacagctaatgcgacatgtaaaaaagaacagagggagtattatgaaaatatgattgctctgtgggggaataaaatgtacgcgattctggacttcaatacaaatgtggatgagttgcaaaagctaccaatctgagatgccttagcttggggattatgagttgcccactgagaacccactttgaagttagctacaagaagcatctgagccttcctattacttggtgttgaatttgtcatagttttcatagggacgcaatctgcttgaagttttggttcataaatttcaaatattctttttgggctctattcttgtcaaactcttagtggtaaaagctatttttcatgaatggaattagttgacctatccataaagaagcaaaatttgcaacttagtttggcaggaattttgatgccaaaggaaacctacagatttttatgtgtgttactgttctacttatctgggcttatggccctttgaattttacttgtactatgtggacatgtaattttctgcttctgctaacacttagtcgatcaaataaaacaggagcaactccaaaaggagttctaagaatt

SEQ ID NO: 36257 - DNA, 1043 bp, Sorghum bicolor
  Intron number 2 from transcript Sb09g004300.1 (locus Sb09g 004300) derived from phytozome v7.0 (chr-ID chromosome_9; pos 5073617 to 5074659 reverse strand)
aactggagcttgttgaagttgttgctgatcaggtagttatcaattcgatttctatcttcatgtgcattcatgtatgcattccatttatatctggtatcattgtctagtacactcccacattggtactagtgtgacttaccagcattaaggtttaaagaaacaaaaatccataggaagagaacattactacgagtggatcttaatttgggttcgccctctgtggaaaggacaaggattggagcttaagtttacatcttgaatcatttagttttggcaccaacatactttttcttaaaaattatttattttgtttcttaataagatgtttttcttttcaactgtaatttttatttcctgatgctctttaatagcctttcagcacttttcagtttgcggtcgagttttgaatattgatattgtaggacttcagttactaatttgctttaaccgacatttttttattgttattaaagaaatatttctggcataatcagctaactgctgtcataaactgtgttaacatggtaaactctatttggtgatataatgtctcctatttgttttatactccctcatccccccccccccccacagatgcaatagccgttttttgattagcattatgatgcatgctaagtatcattagattaatcatggatagatttcataataaacaaaacatattttgagatacaaatgttaatattgttttcaataaacctagtcaaacttaagaaaaaattgacttagaccaaacctaggattacattcttgtttggacggaggtagtagtatttaccttggtaggccatctagaaatagtcattctttttgttctcatttgtttgagtagtgtggcctctctctgtacttacaataagtaattcctactgatgctgagcttgtctgttagcacttagcatgatgagcctttatatgaagtatattttgcactgcttctgttgtcttatatcattaattcattataaatatcatagctaaatgagctcattttctcatttaggtggcagttgcactatccc

SEQ ID NO: 36258 - DNA, 821 bp, Sorghum bicolor
  Intron number 3 from transcript Sb05g002780.1 (locus Sb05g 002780) derived from phytozome v7.0 (chr-ID chromosome_5; pos 2986982 to 2987802)
agaaatcaaaggccttttcgcacctccaccgtggggtaaactccagtgctgctttagttttctataataatgcaattttactaacctagcctagcaatgaactttgctgtcggcttgttgtaaatgttttagattgtttcatgcagtggcggatataagcctagggccaatatggccatggccctaggcgtgggaaaaaaacactagagtattccctttgttttttccagctaaatatatattaccattatttttgtccattaacatgtgatccaatgttggtggttcatagtattggccctagtcgtgaaagttcaccagctctgccactggtttcatgtatacatgtgctagagaaactctgcagcgtttttacaggaaaatacaggctgtcttctcttaagcatgccaattttaaaacaaggatgtactgaaaattttcggactcaatatattctcgttgtactttcactatttgtcacaaaagtgttgcattgcttcatgtaatggtgtaccagaaaaatctgaaaattatgttagcatttgtcacaaacatagagattatcatctcttaagcatgttcattttgaacttacacacggactacaatactaaaaaaatgtttagtcgaaacatatatgcttgttgctcttctagtatggatcacatgttttcatttaaattcttgtgtggaatcactcttccaataatcatggcatcacatacatgatattttcatgtatatactttggaaaagctcatctttatattataatgattatgcaggtgaggaagtacccttgtcagcattctgcaggaca

SEQ ID NO: 36259 - DNA, 940 bp, Sorghum bicolor
  Intron number 1 from transcript Sb05g013830.1 (locus Sb05g 013830) derived from phytozome v7.0 (chr-ID chromosome_5; pos 28913937 to 28914876)
tggttagttttcatttccgcattctaagatacatttgcacttgcaaaaaatgataattacttaattggtgcatactttccattttggtcggtacactggtacttgacgcttgcttagacactttgagtggttataaggatgaaactggattggatattatggataccaaatatgggtagctgtatcttttttgggattcggagtcggattcagatagtgtcagatgcatcaaatattaatgtctattccatatatatatattggaaatccaactttgactattcagtttcggatatggtacggatattaaatgtctggattcttatatggattgcccatgtggtctttaaatcctttcgggacagatggaaatctggaatatccatcctgttttcatccctagtggttactctgttggttgcactggcactttagttataactacataaacataccttatgagtttgttttgttatattttcaaaatttgtggatccttttagtagctgtaacaattgaggcccataaaaatatatttgttgatggggttctctctctctctctctctctctctcaaattttattggacagtcccctgtggatcatctggtccatttttgtgggcatatcaacttttcaatttttgatctgaaacatgtacaatgtgtaatgcgcccatgattattttgttcgctcaaaacagttgcatgtgatcacccacattaaccatcatttcttaatttgcaaccaaatagagcctcttttgaatcatatggtttcccttccttggattttggtaaaaatcagtttaaaatttgtaggcactttaataatgtttcttccttatatctatagccttcatttctatggtgtttagtgatgaagttattatgctgttcttttaggtactgtccaaggtgcaaagagcaaagacaagcta

SEQ ID NO: 36260 - DNA, 746 bp, Sorghum bicolor
  Intron number 1 from transcript Sb06g014530.1 (locus Sb06g 014530) derived from phytozome v7.0 (chr-ID chromosome_6; pos 40210672 to 40211417)
acggcgaggtcgagatcccatccgcttgaaggtgaaattcgttcaacctctcttgttattactgctacggtttgctcttgccagggttgcagagagatgctactgttattgatttgtttgtttcatgtcatgggaagctaattgttagtatatatgtctagcttgtttgcttgtctgaaaactgtttgctgatttgttgtgagagaaagcactgcggaatggctgacagatttgttgtgtaggaacttcagcaggttctgctgtgctacaactcttttgttattgagaagaccatttcaatatcctgttgagtgagcactgtttgtttttgctaatagtttttcattgaggcctagatattaatttagttgatcaatccaatcattatggttcatttggtcaatcaatagtggaaataaatggttttgtgcttcagtttgaatgcggaaataaatcgttttgtcattcaatttgaatgtcgatggattatatagctgccaatttggccaagatttgttaatgttttttccttgtttagacatgatttcagtgtggcattgtaaatggttgtccaaatttcaccgccttctgttcaacaatgtatctacccttattgatctgcagaatgcctcagtcgaaccacattgcttatgttctatcatgagatccaacatgtaattgatgtcttacattcatttcttgtctacgcagactaggcatcgaaggagactaccattggtgctgct

SEQ ID NO: 36261 - DNA, 702 bp, Sorghum bicolor
  Intron number 4 from transcript Sb03g008890.2 (locus Sb03g 008890) derived from phytozome v7.0 (chr-ID chromosome_3; pos 9683063 to 9683764 reverse strand)
cttggggactgctggtatgtctgttcgcccttaactatttcccttgagaagttctttccacttaccgcagactaagaaaatactgtgatgagttaaactaggattagaaaaacaaaagacgtgtacaattttttttaacataccatatctctctaccaattagtttcttttgctaccccttctatatatagtgagtgtattggtctagggctctaggctctaaagagtgcattctggtataagggagcaaatatgtttcttttctgcagatgttacattgatattttaactgtatattgagcttggttcctgcatagttgtacttattcaaagagcaatccttgttagttctttcatgtatcagattgttctaagtttcaactacctgaaatcttttccatttaagaacagtgaagtcttactgttcctttttctttcatgtatctgaatctgattgctttgatgtatctgatatgtctctgaatctgtggtggccttattttgctacttatcattagtgaatgttcactccatcactgttatagtaccatgcctcattcagtcattttccatataattatcttgtacttcattcagtgttgatcaacataattttgcttattttgttaatcatttaatcatggaactcattccacactgcatccttatcattgtactgtgttttcagtcggaccttgggag

SEQ ID NO: 36262 - DNA, 567 bp, Sorghum bicolor
  Intron number 4 from transcript Sb10g023370.1 (locus Sb10g 023370) derived from phytozome v7.0 (chr-ID chromosome_10; pos 51953177 to 51953743)
gatactagtaagaaccttacatccaactagttcttcgcttcattcagatgttgcaacttgacacttagaagttgccatcctgatttttttagctagtaagttcagaggaaatgttttggacaattaatctgatgggccctatttacaactattagtcgaatgctaactacattacaatcttttgcttcacattgtgtggtcttatcaagaacaaaaatcaatgattatttgatagcatcggttgcgtactcacaatgtagatcaacatggagatcagcttgagtagcttgaaatggtagaaatcaatgcaataaatgtcatcaagtggtgtttttgagatttttttgatgttagcttctgagttacaatgaactctagatgatctggtgatccaatcctcagagtttaatattttctcatgcaagctaagttgctaactgatgtaagctaataaacaaagacatttaaacgaataagcaagctaataattcccggaggaaacaaatttgctcatatattcaagggttaatatttgctcatatgttctaatcaatcaatgcagcatca

SEQ ID NO: 36263 - DNA, 994 bp, Sorghum bicolor
  Intron number 1 from transcript Sb07g002070.1 (locus Sb07g 002070) derived from phytozome v7.0 (chr-ID chromosome_7; pos 2211112 to 2212105 reverse strand)
tacctcggccctgccgcgctgctccacgccaacaggtataccaccgccaccccctttgatactgtgatggatgactgctgagtgatgcatgctggatctgtttgatgattgctgaatgatgtgtgattgatcggttgttagtcatgctcttctgatcatgaagtaattccatttgaactgtttgataattgctgagtgatgtgtgattgatcggttgcaagtcatgctcttctggtcatgaagtaattcgagttgaagtgatgtgtgtagattgtttgatatagttgatagcttagctacggcctgaaaataattgtgatccaagtagattgccaattgaagtgatgtgtgtacactgatatagttgatagcttagctacacgagcctggaaacgggttgtgatccaggtagattggttatttggtctgatgtcttgatgaattgtttgttccttagatgtgatggatcctatgttgtttatattggtggcagtaacaccaatgagaattggtttcatgatcatgattgagtggctgctgtgactatgatcttatgattattagtatgactagtgaaggaaacatgttgaatgcacttctacagaagattgcttcggcagctttaaaggcattgtggtaccagtattcttctagcatttaccttatgagttgtaaacacgtcacaccgcccaacttaaattaacatatggtggatgttttggtgaatctaattcctctgataagttgttgggcagtggcgtgctaaactgctaacctctcttccagtatagagagtgcgagttcctcgcttcatcaccgttaaactacactgatgatcaaacatcttgtggatttgtctgcacttgtttcccttgaatgatagttgtctaatatgataaattttctttgctctaagttttaggatgttgctaagtccatgacacgttcaccctttttaggcttccgctgtgggggacgcttatcaaaccaaaac

SEQ ID NO: 36264 - DNA, 909 bp, Sorghum bicolor
  Intron number 3 from transcript Sb04g012910.1 (locus Sb04g 012910) derived from phytozome v7.0 (chr-ID chromosome_4; pos 20601323 to 20602231 reverse strand)
ccgccccgctctccgtcgtacgtatatatatgtacggctactattactggtagtaattagtttattagtatatagctgcagcatgtgactggtgtgctagctttcgccctgagtcaattaatcgatggttttttttttctttgatcgcactcctgtgtagagcgcgttgtgcttatattagattgctgtcggtgtcaggagattacgttttctgttctttactattacaatgagtgattataatataaattagtgcagctggaatgggaatcttgcatagaaacgaagtggagaattgttgttttagattcccatttcattgcgcacagagattttatttgttggatagaataaaacaaactaatagccacacacgtactccctccgtcccaaaataagtgtcgtttgcgcttcccaaaaaataactttaactaaatatataataaaaaatattaatatttatagtacataattagtatcattgaaaagatcttaaagtctagttttttaacaaatttatttagagacataaatattgcatatattttctacaaatcgagtcaaatttgtggcacgaaaacctaaaacgacactttttttgggacggagggagtacgtaggcataataactctgctgtcgtttctgtgactcttccgtatgccggcgcaacagcatatatgtagctagaagagtcttccttttgactcatgtgcaaaattaccactgcgcgccgtctgtctcttttattttgtattcatgcaacacatgccctgttgttgcaaaaggtattgatgctaaaggtcttcttttgcaaatctgattttgtctgagatatatttattatacacccacactgatgcagttattatttcttttgttacttgtatgtatgatgcatgtatcagaaa

SEQ ID NO: 36265 - DNA, 916 bp, Sorghum bicolor
  Intron number 1 from transcript Sb01g015090.1 (locus Sb01g 015090) derived from phytozome v7.0 (chr-ID chromosome_1; pos 14562329 to 14563244)
agaagtacatctacaccatcgacgacgactgcttcgtaagcccccgcctccttcttctctctcgtttcgtctcgttcgttcaattccgcgtggatccgaaggtcttgacgccggatctgggtcaaattcgatcgaattggcccagatccgcccggatcagatctggatctagccgcgcgcggtcaaacgcgttgatccgtaggagcttgggcgtagtctagcattacggatctggatccgtcgtagcagctggctgtgctcagtagctagctctagtgccttcgttccgacaggaaacaggggatgctgccagctagccatacctacgctcgggggttgctagatggttgccacctcgtactggtagttagtgccttgtcggttacaagggtccttttcatcttggccaggggtccttgtttatgtgatcccatcgcggatcacaaccttggcacattcagtttgtcatttacttaataaccaaaacgtgccagaatgctctaatgtcattggatctggactagatggttgcttcagatcagatccgagcagtgacaacttttgtaattcacattagttcagtttttatatcctccatgtaagatccacatcactacattcataattctgataatggaactagcagcatcatgattttggaagtagtatccagcagtccaatcaaattctgaattttgatcacctgagctagcagcactgtgatctgtcagaaacattagcagtaatatccagctatgtgatcaaattatgaattttaccttatgaattttaccatctaggcagcaggtgccacgatctgacatagagctacatcattgcacacctgctattttactgcactaacaaaatatctgtgtcatttaggttgccaaggacccaactggcaaggatatca

SEQ ID NO: 36266 - DNA, 638 bp, Sorghum bicolor
  Intron number 2 from transcript Sb10g031110.1 (locus Sb10g 031110) derived from phytozome v7.0 (chr-ID chromosome_10; pos 60753603 to 60754240 reverse strand)
atacaaaaacctgttgctgtttgtcccgagaacaggtaattgactgttgccacttgctttcattaccaacaatcactggtggactttgtgtatgtggtcagctgctgatgtgtataatatgtaataaaaaaaatgtaaatgaagtgaacaccttaattggatcataaaaatgaagagacagagggttggtcaacaggaaagatctagtcgatcttactgttgctggcatatgtaaaaaatgcttaagctacccatccacacaatcaaacctgccttgaagtttgctgccattgtttgacaattgtggaggttaaatcgtgatttgctaacaagtttcttgcacttagttgtgcaatagaaagataactaaaacacatttgtactgaatttttgtcactaaaaattccaatctaatatcacctaatcctttctgtatctcttgtttgttgccttattatacatgtcgattagtctaccactgttttcattatgtagcattttcacagtacaatgtcatcagccagcatagccagacaccttgaatctcatctgttcttccatttttcgggaaagctacttgtttaatgtgtttttgtgtggcagtgacacctcatcatcaatacttccgcttgggcacg

SEQ ID NO: 36267 - DNA, 909 bp, Sorghum bicolor
  Intron number 2 from transcript Sb01g044190.1 (locus Sb01g 044190) derived from phytozome v7.0 (chr-ID chromosome_1; pos 67343958 to 67344866 reverse strand)
gggagagttcgtgcccggcaacccgcacactgaaggttcgttcctctgttcagcccactagctccattagcttattaactttgatttttgttaattttgtaagggaaccctaaagttatgccttggttgctgccattatgatgttaaaaaatatataacttaaactcgtgctgacttgtatacatttgttcttcagttttgactttctgtagatcatataattaaaacttatatatgtctctaatcagcagagagcataacactaatgaacctaaggagtttctaactaaaaattatactctctccatacctataaaacaagtcgttttggacaatgacacggtctccaaagtctaactttgactccttgtttttataaaaatatttatcaaaaagtggtatagatatatttttatgaaagtattttccaagataaatctattcatatggttttcatattttcaaactcaacagattaaaagttattcatgatttatattcccaatgtttgactcaaaccttgtccaaaacgacttgttttatgggtatggagggagtacacatgttttgatatatgattttgcatggatgattgttcatctgctgattgaaatatctttcaaacacaatatggtggtgatcctgcttttctttttccttattacatgacagtctttatttcttttgtcccaatgagacaatatggtatgtgacatggagatcagtacacaatggtatccaagtagggtactctgaatctagtagaatgacaattgaaaatcgaagtttcttgtagctttggtttgttaagttcccttttcaacgtctaaatcttgtttgtacttagtactctggtttgattgccaataacttgcgtgtttactgatatctaccttgtccattgcagct

SEQ ID NO: 36268 - DNA, 575 bp, Sorghum bicolor
  Intron number 3 from transcript Sb01g048110.1 (locus Sb01g 048110) derived from phytozome v7.0 (chr-ID chromosome_1; pos 71165614 to 71166188 reverse strand)
gaaagagactgtatgtttttggcttttttacattcagttcagttgcctttacaacatgctttcagctttaaataattggtgcggggcttctgccttctgcatttaatcttacttttatttacttgatgtgcttgagtaggatttcaactttaagcacaatatacctttttattactattatgtgtctgtcagtatgacttttagtgtttgggtttcctttgattttcttgatgctaaattttgaacatttgtaacattaccttttgaatttaggtaattccatagtcatgaaaattattgaatcgctcgaaaactctagcatgcaagctttcatctgtcttcaacttcactgtactcaatccagcttagaggtttgagactgcaagaccccaaagctaaacactcaactccattgaaaattacaaaaatactggtctaagaaccattctttttcatcaaaggacctactgaagtttgcaagttcagcaatcttgttgtttagtttacttcaaatcttaacaacatcgttctgtgtggcagtggtgggagaaaagtgactggactggatataagga

SEQ ID NO: 36269 - DNA, 767 bp, Sorghum bicolor
  Intron number 1 from transcript Sb09g026850.1 (locus Sb09g 026850) derived from phytozome v7.0 (chr-ID chromosome_9; pos 56024480 to 56025246)
gttatcaggtgaagaatgctataactaatcctatatgtatgttatatgcctacattcttttcatttccatttattccaaaaaaaagtcagtcaagtaacacacgcaatgcttccttgttgagtacctacagcctatgaggtggcacataataaagatccatgagattttttttttctaaaaactgttttataccaccaacagattttgattcaaaacactgaaaaattcatctgttaactaattgttggaatataagtgaattgcccacctctccccatcagcttaagcttttgggttgaactggttggtacatgcaactcaatatggtatcaaagccagaggtctcgagttcgaatcctggttagcgcaattaaaataaaataattgctgctcgctcctattccacgtctgagacctgggagcctccacgtgaaggggagtgttggaatataagtgaattgcccacctctccccatcagcttaagcttttgggttgaactggttggtgcatgcaactcaatactaataaactactccatcagatgccattactcttttgttgattttcatttcttttgcttggcaacaatcacaatatgtgacacaactagtaacttcccctctgtggtttgttcttttacataattgcatggcagaggtgtctgcttgcagcatacccagagaaaatgaaaactttcttgtggtatttaagttattgatgtgcatgacagattggaagaacaaaggtgttcctgagagctggtca

SEQ ID NO: 36270 - DNA, 918 bp, Sorghum bicolor
  Intron number 1 from transcript Sb01g012960.3 (locus Sb01g 012960) derived from phytozome v7.0 (chr-ID chromosome_1; pos 11991690 to 11992607 reverse strand)
gtcgaggttgctgcaccacgctgtggggaattggtgggtttttggtcgggcaacggttggctgaattgttgagttgctcttttttttatgtacgtgcgcatatgtcgttgagatcgctgctgggttactacgggattatcccttttgattttcgaggaaatgtttcgtgtcataattatatggaacgcatcgtggtgtttttgatgtgatttgagtggactagcatgtcagatcccagaattttgttagcaccagaacacgctgttaatttttagatgtcgtttccgaatgacgggctcttcatatctattgttagatctgctgaaacatttagaatttctcgtattcattatgtatgatccgaaagtaggctggcagtttcactgaatggacggtgataattttataccgatgaatctgttttcagtaattgcagtttaatatagcatgcttcctgtagaactgttctctaatttattgtccgaactatagtttcttatggatgttatttgtagcatgatccctgcatgtccgagagggaccttgcttcccttcagaccgattttagctctcttgtacccacatcctggaaaagctaggttgcaacctaaatggaaggctgtagtgcatatatcatacctccatggtatggctaatccttcccggtttaaagaaacagccttgattgaccagaggtatttctttgcaccgaagcatttagatcttatgggaggaacacatgcagaatgaatttagagtttcacatgggaggagaagaattgagttcagtttatggttccgtgaaatatacataatatttttttagcttatttgcggctttgttgagacaaatattcagctagcttccctgttggtgtgaatcaaactgagtttaacctttttctgttatatagaaag

SEQ ID NO: 36271 - DNA, 526 bp, Sorghum bicolor
  Intron number 1 from transcript Sb0062s002010.1 (locus Sb0 062s002010) derived from phytozome v7.0 (chr-ID super_62; pos 7631 to 8156 reverse strand)
tcaggaatctcctttgccagtcattctgggaggtgatttcaatttgattagggaggcaaatgataagaattctgagaacattaatatgggtctcataaatatttttaatgagtttattggggagatgcaacttagggaactaaagagatctgggcaaagatatacttggacaaataaacaaaataatccaattttggtcaatctagatagagttctcttttctgtgaattgggaagatcactttcctttatctacttcatggggtttaactagggttggttctgatcatatgccaattttagttgataatggagaaagtttacctaccagacctagatatttcttttatgagcagcagtgggctaagatccctggctttgctcagttggttattgataagctagcgttggcagaatctagatgccctgaacagtgttactctttggataaatggcatgggagcattgctcttttaagatctttcctcaaagggtggaatatccagaggataggagatcaaaaaaag

SEQ ID NO: 36272 - DNA, 505 bp, Sorghum bicolor
  Intron number 2 from transcript Sb06g024990.1 (locus Sb06g 024990) derived from phytozome v7.0 (chr-ID chromosome_6; pos 53997717 to 53998221 reverse strand)
tcatcttcttcacaaatacctcaagccagggacaagtatgtttgatgcactgattctcagcagcattttctctctttctaatgatctctctttgagctcatgccattgagaaataataagacttcacgggagattacttgttcgcttttgaaatgtttcctattgtgcaagtaaagttttcatagcgtattgatcattatatatttgtgaaatgtatgccactggaagatttatttttctccattatatttgtttgtttttcaatgtggttgtgatgttgataaaccaattttctttaacataaaggccaatcagatttgatgaataagggaacttttcttttcttttgttttccagcaaaatagtttagcagcacttctacacattctgcagttgatatttcttctgcatttcatacctttctgttgttatagtgttcttcgatgtgtttgacttcttttccctgctagatttggctctttctttgggccatccaagccggtga

SEQ ID NO: 36273 - DNA, 776 bp, Sorghum bicolor
  Intron number 2 from transcript Sb04g031340.1 (locus Sb04g 031340) derived from phytozome v7.0 (chr-ID chromosome_4; pos 61340899 to 61341674)
acactattaaggagcacggcatcatcttcgtctaggcaagtttcagggtaggaatagtagggttcttgtgttttagtttcgacttctgtagcctggaaattgttaccttatcgatatcaaaacacctgcaaaaagtattaacactaaaggtcttagaccaatgttgctgacaattgctgttgtcagttccgaagtttgatgaaattgcaaaagtttgacaccaagctagcctaaagtaataagaaacaaaaactgtcaaatcaactgtagaaattgccagttgtgatgccaatgctaataaaacttaaaaatatgacagttcaatgaggtccactgagcctcaaatttgttatcttaaataactactgatcaaaatgttaagaaaaaaaaaccttgagacaaattaatccagttacaaataccattttctcaaaatcgaaagtaatcaactacacaaaatcatcatccttgactgcattagtgagataattgtaagttttattttgctatatttgttactgataggatttcaaacttagagagtataataaaataagaaatacatggtgttggtgttgctaggaagttgtaactaggcactcattagcttctgtcccttgtttatgtggtagctgatgaatgccctccaggagttgtattgttcatgctcttcaaataacaactgaatggttccaccagatgtagagagattcattgcacaataactttgtttatctgtaggatagctgaactcttctccctccccttgttcgtgg

SEQ ID NO: 36274 - DNA, 1048 bp, Sorghum bicolor
  Intron number 1 from transcript Sb01g040840.1 (locus Sb01g 040840) derived from phytozome v7.0 (chr-ID chromosome_1; pos 64157091 to 64158138)
gcctccgtgctccgcacaccggccggcgaccctgcgtacgcacctccctctcccctcccgcctccgctggaccgtcgacggcgcacggcccttgcggctgcgccgcgcgccgcgcgcgtccggcgggcagcgcgagccagcagccgctgctctaccaaaggcggtcgtgccgctttggaagcgcttatgccccatagcgaagcgctacccgtccgcttagcgcttcagcgcgctgaagcgtgcgcttagtgctgctttttggaaccctggctggctggatactgcataacaatttaaacattatgtatgcttatctagtttttagtttagctgctttaagtatatgttgacattgcaaatcacagtaaagtgttcggtggcttccatatgagctcctaggtcaacttagcatcttttagcctgtcataatattcatgaaccgtttcccactcttaccgcaaccaatacttcaaagagcgcttctatactgccatactgattcagtaaaccttccatgataatgtactgccattgcaacactgcatctattataactgtatgtgatactttgcatacattggatgcatttgatgaacttgccaaaggtaaaacaaatctctatgttgaattattcagaactgaagagtcaaaaggtgttgttcagtagtgaactggtgataattcgaatacatgattatgatattctgtgtgtaaccctcatcatgatccggtcgatgcaaactgctcagttttttcaattcataaaattgaaattccaagctgtctttaaggttctacttgtgttccatgttatgagcatgcatggctatgattacaaagaatggtttctcagctatctagtctcatcataatttcattgatttccaagcactcaacaattatccaacttttgtgtgcatttttgctcaatcttgaccgatattcttccgcactactttttccacgttaggatttgttaatgctgacatagttttctttgggaaaacatccagtttcgtctttgaaaaattcaaggtggtacgtgact

SEQ ID NO: 36275 - DNA, 816 bp, Sorghum bicolor
  Intron number 1 from transcript Sb04g025840.1 (locus Sb04g 025840) derived from phytozome v7.0 (chr-ID chromosome_4; pos 55637154 to 55637969 reverse strand)
ccgacgacgcggaggacctgctcaacctcctcatcgtgagcctgctctcctccttcaccgccttttctcctctcgttgattgttatgcatatgttaggactgcgcttctacgatgtgtcgtgtttgcgggcgcggttacggctcggtttgtatcgaatatgagtaggaaccgagtgaatgttgtgctcttacctgttcgcggtggttgtttgggtcgcggatgaaatgctactcggcctggtgatttgcttttaagttgtcttccgtgctatgcaattttgttctgacgagtgtgctccgtggtggactgttgttatacggaggtatctgatttccttggaatcagttcagtgtttatcattgtcttttgagacttgacttctccttgaacttgaattctatcactgtttttggggtttgaaacgtggagtaattatctattggacatgccagtcatgacgattttatttgtagttttgatggtgctgtttggtttgaaaggaaactggaaatgttggcctcttagtatcttattgatttgtttgaggtttttgacgaatataggattggagtttagcattagcctagtttattcactactgctccagatttcattttttacttgctgcacagagtcctttccatgatttagattactgggtatgatgtacttataccatttgagtaaatatgaagactttgatcttgctgactgacctacctaggtttgctcctcaaatcgtatgaagtcatcaagttggttgatggtttgttcatgcaggaaattgaggagtgtttacataaagtagagcagtc

SEQ ID NO: 36276 - DNA, 806 bp, Sorghum bicolor
  Intron number 1 from transcript Sb10g003320.3 (locus Sb10g 003320) derived from phytozome v7.0 (chr-ID chromosome_10; pos 2958385 to 2959190 reverse strand)
cgccaggcctttcgccggtgaagaacacccatcaggtgcgccctccccttctcttcccgtcctgatgatgcgcggaaccgagcagccaaaccctaaccaccctaagctatttgtctgtttgtatgtattcggatctgatctaattacaagtgcgtatacatgtttacgtattgttatgcttactcgcttcgattttatttttacaaaaaacaaacaaacatcgggtgtgtatacccatgccctttactgggtccgccctgaaacttcgtagaacgaactcaattcaactgtagccagtgcccagagtctatgatgtacaatcgcaaaagtactgtgtaagacccatttttcctcattttttttagtgtaagacttttttcaatgatggacattaatatgttagccgctggagactttgtttctagaggtatttgacatgatgaccgagtgagtgggtgagtgagtgacattggatatgtgattgctatatcaagctactaagtaacttttatgagtgttaagttttgagtaaattattaatttagttatctgtaagactacttttcaggcaatgctatacactgtgaatatgaatatatagtactctgatataattccatgccttaatgagacattattcatgttttttgtttatctttatcttttttttttgttcttaagttttgcaatgatgtttgttcttggattaaaactgattggcatgtttttttgttttcactggctaacttcttaactccatttgattggcagattcccgagttggttatcctaattatcttgcacct

SEQ ID NO: 36277 - DNA, 868 bp, Sorghum bicolor
  Intron number 2 from transcript Sb02g039010.1 (locus Sb02g 039010) derived from phytozome v7.0 (chr-ID chromosome_2; pos 73135507 to 73136374)
taggtaccagggttgctgttgcttaccagaacgaggtgagagctggttggctcttttgacatgcccttctagttacgccgtggcagttgtttcagttactggaacctatgctctatacgatttgtgcttatggatttttggtctgttaaatacgttttgggcacttttttttcaatgggtgattatgaatggtttatatcatttccatgggatgaattctccagagtatatggagcctatcagtttcgtatgctgggttataccatttggctgttgtattgggcgttgttagatgtgaatacttcatactctggtctagttgccactaatgtgaagtttgtcgaaaacctagttaaattgctttcagttctttcaatttgggtaaccattttgtagtggggtacctaacaatgtaaacatatggtaaattctggaatgcttttaactttattaattaaagaggtattataggtggcacaactagtctgcataacattgcaaacaactaatgttctcgaggtagaacggttgtcgctaatggtggtgtatctaatcttcatgcttaatgatgcaaatggggctgattcaataatttgtaaatgtcttttgaagtatatgtcacctttgtggagcacggtggttgttgcgatttataaaataactgcaaccgcaaggcccttttctgttgctttgaatgccatgttttttttttccatcccctatgatgtatgaatttgagtattatttttttcctccctagtatttgctatttgttcaatggggagtacataataaaatgtgggagtaacttacattgatttgatctttcacagataaaattgcttggtcagtccctttactacttgct

SEQ ID NO: 36278 - DNA, 605 bp, Sorghum bicolor
  Intron number 1 from transcript Sb04g008400.1 (locus Sb04g 008400) derived from phytozome v7.0 (chr-ID chromosome_4; pos 9690401 to 9691005 reverse strand)
ggaccgtcgaggccgacggcaccacctaccgcaaggtactcattactctttctcagctcgctgttccgatgatcgagctaattaatggtcgccgccggccggccccccgccgccgccgccgttgcctttccattgtttcgtttgcgctggttctcgttcttgtcgtcgcgcgtccggcttcgtttcgctctgccgagctgcgtgtgtagtgtagtatcgtcgacagttgcaaacttttccgcttcgtcgtcttttgtttgtagcaaaagtccaaaatttgttttgttttaatttcagttgctcgtcatctagctatacatcaactgttccattgcctttccaacaagattggatgagcttccttccttctcaaagctacctgcagattggcgtgtgtgcagctagctgcttcagtcggcctcgttagtcgtactgttacgtcgactgtaaacggaataacggatgcgcagggaaagaaaaactgtcgtcgattgcacattttttgcgtgcatgtgaatgcatgtctactctattgtcgttcgttgatgccctctcggctctaattcgatttgtgtttcttcagggacccaagcctccggcaggtg

SEQ ID NO: 36279 - DNA, 1050 bp, Sorghum bicolor
  Intron number 1 from transcript Sb01g011960.1 (locus Sb01g 011960) derived from phytozome v7.0 (chr-ID chromosome_1; pos 10896981 to 10898030)
tctctgcttctagaattgtggctcgtccgatttcggtgggtgcaaccaatccttttggttcccatgggtgctgttatgaccccaatgattggttggtctcctctcaattatatgctgcttgtgctagagcacagggttttcttgattcttgagggctctggggggatacctggtctctctgaattctgggaagtttcttggtgtccgcgggtttcttgagttggcttggggatctgtagctttgagagcttcatcgggaaattcctgcggtttggggttcttgcggttttgttgagttgcctttcctgtggaagtgcaggtatggagctcaggctgctgaattcgtggtcctcatttaccttccgacctcaaaattcttgagttttttttttctatgtgtgtgctcggagaaatcatccccctcttcttcacctgggctcagaattcttgcttaatttcttgaattctgcttgtctcggtggtgcttggcagcttgattattgtcgtttgatattgcacagttcagagtttctagttgcttcgtcagctaccgctagaggtttctttttgcgggtatgatagaattgagcttgattgcggtggagcccttttggatttgctgtggattcttgaatcttttcttttatctccttggatgcctgcaggaaagccatgctcttaaagcacagttccttttcttttcttccgatcattctcctcatttcttttctggaggtggctcttgtgttgtattactcccctaattactatgttatatactttatgtgatggaattatcagctcctttttttcttgttgtccgagttgaagtgctctcttattttcattgtctgtgaaaacaaagttttgcctaggacatttctccctgcctcacctctttcatatcattaaaaaaaaagtgaaaattacagctgcacacgaccagtgaagcatccccgtctcttctaggtagtttcgagctagagatctcatgctatttcatctcttctttcagagtgattctgcagaagtattcattctactggcgtg

SEQ ID NO: 36280 - DNA, 693 bp, Sorghum bicolor
  Intron number 2 from transcript Sb01g011960.1 (locus Sb01g 011960) derived from phytozome v7.0 (chr-ID chromosome_1; pos 10898063 to 10898755)
gtgcacttcggtcatcagccaagcgattgaaaaaggtattgatatcttacaagcatttcttgttcaaaaaactttccctcctcgaaatcaaattctgtcagcaatcttgcaatttgcctctgtgttatagaatggaatttctggttgagcgccttgaatggctgcattattttggtgaactgaaggaattctcaaccacattctcatcctctttgtaagggagagcaaaaagccaacaacttagctaatgtcatggatgaaggaccacctgtaccacatattggtcccaaaccagtgccttaccttgtcagttatatttttccatatgatgggtctgtttgttctccagaaatgttagagaaaagaacaagaagtgataactactgccaaaactgagggtctagccctgggtctcacactagtgactggcctttgtgtgcagtctttgtctctttgatgattttacctctgtaaaagtgacagaaccagtttatggtttagctctttcaccctaccttttcttggaggcctttccctattattttacattgcatgaaagttctgttttgtcatctgctatattgctctatatttacagaatagttccttaataatttattgaattttgtactaactgtttccatttcccaaagtgcaggcaagtcagaaaaaatattggttccgagggctctg

SEQ ID NO: 36281 - DNA, 733 bp, Sorghum bicolor
  Intron number 3 from transcript Sb01g011960.1 (locus Sb01g 011960) derived from phytozome v7.0 (chr-ID chromosome_1; pos 10899658 to 10900390)
ttagacgaggtgtgtgttttactgcacttgtaccttaccattaaaaaccaaatctacatattataatgtttgcttttgctagatttgtcactatcgagtgtagaggtaaatccacatgaagatcgatagacttgtttgcaaagattagtttcacctctaatcattttgatattctggtatgaattttgataaactaatactttatctagggacgactgcatattactttttctcatgtctgaagtcaactccattttctgccttctgttcttagaaaaataattgaggaatcccaaccccatcagttctgtttgagttgtggcctaaatactgagtcaaatagttggttcctgatccaaaggtcatttacaatggttcagctccatgggcttcacaagttgagttcttgaaaaagctgggaggactggtcaaaagttgttagtttaggtgagtctagcattgttttttaactaaagttcctccaaacaagcaatcggcatatttggaataggaacagctgtatccataaaactgttattcaggacaagatcaccaccaaatgcaggtcacgttaccccattgaaatttcagatgggtgcataaataatttttttcctcagcaatacaaaattggtcttaacatgggatcgatcagagtatgtctgaatttttaagatcaaattgaatttttctttcaggtggatcgaaagtacaaacactattatcatcagat

SEQ ID NO: 36282 - DNA, 884 bp, Sorghum bicolor
  Intron number 1 from transcript Sb07g015050.1 (locus Sb07g 015050) derived from phytozome v7.0 (chr-ID chromosome_7; pos 37678197 to 37679080 reverse strand)
ctccgcttgccgctaccacaccgcccacttcggaggtgagacaaacctccatgatccgagtaattccagtgcctgatttgagcagagtaatcatttgaattatgtgtgtaatttggggtccaatgttctgaattggcttcgctggggtgtcaaagaaaagcaattgaggaaacatgttaggtttttggtgggaagattattcagattcagttaacttttggttcgacgagttgcccaagggtgaatataggacaaggtgatcaactttttggttcaaaaaaaaaaagcaaaaagattggctcacttggtgtggtttgacaaactgttctgtgcaattgtgtgcacacgcactttaacagtgtttggttcgagcattggatacgcaaacgtaaaggtaatccaattacagctttaaagggatacaattacaactgaggacgggccggaccagatttgaatagctcggtatccattacaccgtaatgaaatacggccaggctgaaacaaacacctgtaaacgatatctctctcctctccataatgcagttactttacattatgtgaaccaaatgcttcgttatagttcgaggtcagggctttccaatttgaatagaaaaacaggtgattttacatgcagtgtactcctaggtcctagttccaaactctgaccacctcacacaattagaacacttagaatgaaactccttgattgtttttgcccgaatctatttatgtcctcatgagacggcttgacaacctgatcagcaagagatgtttgtcacagaaacatttgaactcgttaaattctctggtagttttatctgtatctaaatgaccagtttctgccatggcaggagaaacaaagagaaaatttgagagcgttt

SEQ ID NO: 36283 - DNA, 767 bp, Sorghum bicolor
  Intron number 2 from transcript Sb04g024500.1 (locus Sb04g 024500) derived from phytozome v7.0 (chr-ID chromosome_4; pos 54271646 to 54272412 reverse strand)
caagcagctcaagtccggcctgctcctcgtctctggtgagccacgcttgctccacttctccctttggtgtggtcctgcggtcggtcgcgccgctgctcctaatcaaagacaactaagccttggtgtcgatctatatctatccgtagttaaaaaatgtgtagtttattcttaatcagtgaaaaattagttgtaaatgtttctgctggttagctcaatctcggaattatattatcagtctgttgttgcatggtgtatatattagcaattggaataatatttgtcttgcagctggacattaacttaggtgaatttttaagtaatctgaatatacattacttgcatagttgaaccgagtttttaaggactccgcatccagtttggactatgtaacctgtatttgtgttctttgatggcactatcacatggttaaaaaatagactgttgtacttgtgcatatataagtttcctttctttgtcagggttcactatctgcattctcatgtctttaaccggctggaaacaattgaatcatatagtttaagtaatgtaaacgaagatttcttggaatgtttggatttataaaagttatttttagttaagttattaaatgattatgtttaccattacaaccctaccgtgcagcttgtatgcctcagttcatgcatgcaaaagagttgtatttttttcctatcctgttctacttgttattgatttcctgtcattagtttctcaacgtttttgttatctttcagggcctttcaagatca

SEQ ID NO: 36284 - DNA, 590 bp, Sorghum bicolor
  Intron number 2 from transcript Sb05g003960.1 (locus Sb05g 003960) derived from phytozome v7.0 (chr-ID chromosome_5; pos 4720117 to 4720706 reverse strand)
accgatttcgccggccagggtcacgcaatacgaaggtgcgaattcacctttcttattgacgcagagataaaaataataattcattcttcattctgttatgcgggaaatataatttgttgtgttgtactctatttggacctgttcctatcttaatgcaatgacatgcaatttcacctcttaattttgccatcataataatctctcctttggctaaatcctagcatacctagctagaatcagaagtttctcaagggaattatgatgaagtgattatttttacttgtatttatgtcatagtatagatgaaaagtgaaaattgtttaggacattgctataacaaactatgttgcactacattattgttcgataatattttacaatgctaaaaacatatatcgttatgtttacgttaactcttggtagtataaatctagaatatccaggaacagagtgaagttggattttttttgacatttttctatatttcttaaccatatgacttttgaattcaaatctttggctaataaataatgacatgctaggtggattatgcagctattgatattggtgtgaagagctcatcatttggc

SEQ ID NO: 36285 - DNA, 756 bp, Sorghum bicolor
  Intron number 1 from transcript Sb04g027790.1 (locus Sb04g 027790) derived from phytozome v7.0 (chr-ID chromosome_4; pos 57689609 to 57690364)
gaccctttaccggcgacgagcacccgctacgacaggtaagcccgcccctctcttcgctcccttctgagaaaaacggagttcccggaccctgatttaagctatttggctatctgtattcggatccgatctaatcagtgcaagtgtatgcatgtattatgccactaacttcgttttttttttggcaaaaattttcgggtgtacacccatgtcctttattgggtccgcccctgctcgtctagttaatctccattaatttgatttcttgaagcccagcgtatgactatttgaggtggaccattgaagtactgaatgactgaaatttgtattctgaaactgtggtcacttgacagataactgagggcattgagaacagaagtattgtattactttttcagactatgtttatcttagaactatttatattgtaatttatgcaggttttgaacttaatttgttgaattcagatattatgagacctgataaatatatatgtgtatcatgcttttgattaattatttgtatactggtttttttgtcaaatatggtatctatatataccgaaatgtgaatatggattatactgaattgcatatggtagtgctggctaggacgaacactaacctaggttaaatcctggttctgtcactaccattcttgaaccaagctaatctgctttagttttatctctttatcaagccagagttgttgtcaaccacttgcatggctaattcatatatcctctggcatagggcttgc

SEQ ID NO: 36286 - DNA, 873 bp, Sorghum bicolor
  Intron number 1 from transcript Sb01g014870.1 (locus Sb01g 014870) derived from phytozome v7.0 (chr-ID chromosome_1; pos 14200405 to 14201277)
ctctgggccggcgttgtcattaccgctttggattggtaaacatctttagttgtgtctttttggtatatggaatgttgtcaaatcttgatagtcatttcacgtatatgatgaatggtgagcgattttgatggtagatcttaagctgcttttagattggggtatttagatcccatcattaaaatgtttttttaagattggtggtcatcggctagataatcttcttgccttttaaattttcttagagagtagcacagtgtagtaaaacttatcgttttgaccctaggattgtcatagatgtgtcttgaaagaacataaccagttgtatttgaatatttatcatataaaatactaaaaatgtgataaatattctttgttttttctctagtcaactggtggattatgagtgatttgttgcatgtagttcaatcaaagtacttggatgcacatgagataaataaatgttgatggtattaacatggtgacctagaagaacttatcaataaactttatcatgtttagttattctatttacgttgtgcccaaagagctataacaacataagtgcattatattttttctctaatttttagcatagatactagtgcttttgttcaagattttttttatgtattaccactaaaacaatggttttagtttagtatggacatattgtgcgcatgttccattgtgtgtctaacaatatgagtagtataagagtgacatgtaaaacaaagcttatatttttatattaccttacaaagtttattgttaacatcatgactcatgagcacttattttgatctatttattgctcaaatggttggaggattatacttgcatcgtacttaccataatacggttttcatcagcttt

SEQ ID NO: 36287 - DNA, 447 bp, Sorghum bicolor
  Intron number 1 from transcript Sb0099s002120.1 (locus Sb0 099s002120) derived from phytozome v7.0 (chr-ID super_99; pos 50796 to 51242 reverse strand)
ctaataacctgcccaagggaaaattaaggtcagttactgatgcaatttcttttgattatagcaccttttctccccctaaataattttctatatgtattcctttggccaattcctaatgttaaatgatatgcaagaatggaagacaatatttttttaaatcattgtttgcttgtgtttttcttgtggccaattcctgatgttaactcagtacatataatggcacaagatcggaagatattttttatgctccatttaatatatactactgtaacatccctcatctatttcctttttgaattttgaaattgcatgaaaatgatacaagagaatggactaattgcttgctagtggctgaaagtactattatgcttgctgctgatatgaacaagatttggttgcaattattttttgtgcagcacgaagggagttggtcaaacagcacctgac

SEQ ID NO: 36288 - DNA, 919 bp, Sorghum bicolor
  Intron number 1 from transcript Sb03g006765.1 (locus Sb03g 006765) derived from phytozome v7.0 (chr-ID chromosome_3; pos 7010934 to 7011852 reverse strand)
tgcggtgagttcagcaaattaaaaacgcccagcaatttcgcctagtgttctttattggaaatagcattagtctgctaatctggaagtaggagtaaagttggcctaccatacaccaaattggaagagatgtcaaaacagtcaaacacacattatttcgagaatagggagaccaaaagatacatatagatcaagcaagagtaacaatggcttctgctttattgctcatcttatttgtgaactaccataattcttattagattatgtattgaaaactatgcaactggcgtatgcacccaaaaacccaaaattttacaagaaacgtgcatagaatattaaatatagattaaaaagataattaattgcacagtttatctgtaaatcacgagacgaatcttttaagtctggttactccatgatgggacaatgtttgtcaaataaaaatgaaagtgctatagtatcaaaatcaaaaaagtttttggatctaaacaagacctaaggtgtcacatacatccaaaaagttggctaatatagtgacatatagtcgctatcgataaaaatgtgtcacctttattacagttaagaagaatcaacttcgtcattattccggtcttctacctatccaaaccagccagcttattatatatcgcatacatccctattcgtttgacctttatgctgatgctaaaaagtacactgtataatggctgataagttcaagcatcctctggatacaacgatcaactttagacagtagcatatatagtacaagtcaacataaggtagttgcatgcttcaaatttcatatgcaaaatattgaatcctttaatatcattccttcctttacaaaagcaataatctttataccactacttatttcatttttaaattaatttccatgctattttaggtgtcaacggga

SEQ ID NO: 36289 - DNA, 843 bp, Sorghum bicolor
  Intron number 1 from transcript Sb06g015420.1 (locus Sb06g 015420) derived from phytozome v7.0 (chr-ID chromosome_6; pos 42743083 to 42743925)
gctggagaaagaccggatatcctacttctacgacggtacattcaccgcgctacctcttctcctggctgcaaaaccctagctctcgccacagtcgcaactcgatgttcttagttcttattactccacttcggacttcggtgttccatcgcctactgcgcgtggctttaagcctttaagcactgaagcggggattctacggggactgagtagtttctttttgtttcgctgatttcaagtggtcagacgtgatcaatgctcgtggggatcgccttttgctcagctgaattttgggctattttagcaaggggaaattgctggaggtattacttccaggacttgctcggtttgaattggggctgatttgaattggtgttcaccaatcacaagccctgatgctaggttctttatagtttagcttaggttcgttatagaatgatttgtgctttgtcccgagtcagataacataggtgcaaaatatctcttggatcaagatttgaatggaattcattgtgcgctaaatccctatttgagacgagtcaaggcaagctagtcttgtagatttgtagctacaaaattacatttggttctttccaggttatagaaaataagattcttgcaaaaaattcattgtctctgcgctctctgcatatagactgtctttatccacgttctagaaaatgaaaacattgatgtaaagttccacccagtttttttaatatgtaaactgttttattttatttgttcaaatttgtatagttccagagctcctgggtctttcaaaacaaatgtttgaatttgtgattgctggcttaataatttcttttgccaaacccattttaggag

SEQ ID NO: 36290 - DNA, 944 bp, Sorghum bicolor
  Intron number 1 from transcript Sb08g022273.1 (locus Sb08g 022273) derived from phytozome v7.0 (chr-ID chromosome_8; pos 54072295 to 54073238)
tccaagcatccctccggcatcgtccccacgctccagtaagtcagcaggaccttgctggattgggcgggcgccctccaccgaaagatttgattgggtggattggggatgaacgccggctgagatcttgctgcttttgagtgtttgcttgtgcttcagctggtcgtagttcgctgggcttggtgtatttgattggcggagtcagtggaatctggtgaagctatagttacagtgcttgttggggggtattggggactagatccagggtgctttcacacggaccaatcctcatgagcagtgaaaaagctcatgggacatgacgatattgctttgacctgccctacttccctggaaaagaaatcgactcagtcgtcatgatgattaaagctacatgaaaatttgaaatatcgaactggatttaatgttggaagtctgagattgatgctaatgggggtatatgcaggacctcctgaatcttactttgggtgttactagaagggagggtggatgtgtatatgtctgaatgtaaaaccttgtgcaaatttgtgttgctgctgatgcttggttgttagcagaaagctttctaagtgctctgtattttctgtatttgtgtggtactggtagatttcgctacgaaaatgaagaaggaattagcttttctatgaaaacgaagaaggaattagcttagtacttccttacgtgccctttatctctactgctttcataggctgttaaaatgaaccgaacatagctgcacgtatttgatttagctaggaactttactctgtttctattttgactttcgttgctctggggtgattctattctctgtttgtttcttcgtatatgctcaacacagagatgttgatgtccttgctgtgttctgctttatgctgtttggtctggtaacaggaatattgtgtcgacggtcaatttggactgtaaat

SEQ ID NO: 36291 - DNA, 882 bp, Sorghum bicolor
  Intron number 2 from transcript Sb03g046160.1 (locus Sb03g 046160) derived from phytozome v7.0 (chr-ID chromosome_3; pos 73319807 to 73320688)
acggccctcgtcaaggggtgcgaccacgcctactggtctgttgctaatttctccccaccccgtctcccctttctccagattattattactggtatatacgtacttagttgcgcggtggaattacgattaggttgtttgttattccccacctctaatatcaatctaaatccctagatttgggaggctatttcgcaccttccccccaaattagcatagctttccttcacactgtaattgcaattgcgattccttttctaggccgtttgctattcgtcttgctgacatgtaactctacaaacctaattcaacactttcaaaacttacaggggctggtctgacgccccgaccttgtgattcgcaagctgatttttcatttaataattgcctttacacatgtaatttgattctgtcatgttaaacctatggaatagatgcagcaccggcaccagtgagcctattctggaacactgtcgtttgttcccttgtagtaactaaacttcaacttattctttaccatagttgccatgtgcatctcaccctttgcccgaccaaccaccccgtgcatccaatggttgtttcacctacccttttggttttcagctctagattgaattatagagcttgactctgtgcctattatgtgtgaagtagcaagcagcaagtacctttgatgtatccattacagctgatgctaaaggactaacgtctggtgatacctcctgttttctgtctgctataatttactgtattcattgatcctacagtgttcttccttttatatcttacaatgatccttttactaaaagccgactgttcattatatttgaaatctgttttgtgaatgcagtgtaacctgtattttgaggtgggcatcctacaagc

SEQ ID NO: 36292 - DNA, 1066 bp, Sorghum bicolor
  Intron number 1 from transcript Sb02g042920.2 (locus Sb02g 042920) derived from phytozome v7.0 (chr-ID chromosome_2; pos 76647569 to 76648634 reverse strand)
ggctgccgtcttgagtcctcaccggatcggatctggtacgtaccatcttctactcctcgcttccttgcgccgtgctcctcgattctgttttttattagtaacttgcttagacttagattcataatctacgcttccgtacgtttgtttagattcatagtgaccgttttgaattttactaagtcgacttgcctcgatccatgctccacgcttctgaacgtttgtttagactcaggccttgtttacttcccaaaaaaatttgcaaaatttttcagattccccgtcacatcgaatctttagacgtatgcataaagtattaaatatagacaaaaataaaaactaattacacagtttggtcggaattgacgagacgaatcttttgagcctagttagtctatgattggacaatatttatcaaatacaaacgaaattagcactattcacgttttgcaaaatattttggaactaaacaaggcctcatataaaaaagacgttttttttaaaaaactaaaaagtcgaactgcgagtagtgtatgtgcataggaattcagaagaggagaacaacatgatggactcgagttgtttctttagaactgtatttaatttctttaatttttaatgctatgtccatgattatataaatataaatatctgatgagaaattgaattcgacgacgcagcggtactacaaatagatatagtttccctgcaagatttacattagataagattagattaaggatgccatgccatggctctcgtacggggcttttttttgggtctattctcaaatgttctagtcttgtgggagtgagaattttttagatcagaggtggaagaaattcgctttgctaagattagacaagctcttaaacatcagctgagctaacttgtgcatgcatgtccatgcaaaaaaatatctgttcctttgcttccaacttctaattgtacccgatttctgtttactaacaggtttttatatagttttgtgagcttatggctgatatatttgtttttctttcaccttttggcagtactgggttttcaacaaggaggaggaaacacctta

SEQ ID NO: 36293 - DNA, 775 bp, Sorghum bicolor
  Intron number 2 from transcript Sb02g027390.1 (locus Sb02g 027390) derived from phytozome v7.0 (chr-ID chromosome_2; pos 62647662 to 62648436 reverse strand)
cgagggaggtacgtagtacttctcttttctcaagctaatagcaatattagtagcacatcatattcttttgttaaagataaacagactgcaagatcaaggcaaagcttccatttccttgtgatactagcttggatgtttggtccaaatgccataaatgatgcaccatagataacagacgaggcactggttgagtgggtccgttatattcgacttgtccccagcttgggatttaaaggctttattcttgccgcttttgttgttgtcatgctgcccttttgaggaagggtatggctacaaatatttgcccgcgcactgatagcttgcagggaacttctgtgtatttttaaatgttcatttgtaagagaggtgaattgtaaagttagttgtaaattctgctgcgcaagtgtctcataaaattattaaacaaacataacgctggtttatggaaaaaataagcatactgcagtactgcacactgtattaccattcgaaatacaagatagacaggcttaatcacatgcttgtctacacatttaaaagattttgaccctttttaatgtgttactttgatgtgttgatggatattgaggtaagtttatcactaatttttcttcttttaacacaaattctgcgtgatcctgtggaatttaatttcttttatgtgtgctgtatgtttgacagcttaatgaatagtttagctccatgcagtctgcaagttcataatcttctttcctatataggcacttcactggctggctgttctcggggagaaaga

SEQ ID NO: 36294 - DNA, 981 bp, Sorghum bicolor
  Intron number 1 from transcript Sb07g028020.1 (locus Sb07g 028020) derived from phytozome v7.0 (chr-ID chromosome_7; pos 62994443 to 62995423 reverse strand)
gcgttgtgccgcccggtgagctacactgctcccaggtattctttgccttgctatctactagtagttgatttgctcattgatgacaagtagtttgttaattaatttctgaaatctaataattaggaagagtagagtcagctcagtttttgatataggagtatttaatgaaagtttgtttggtccagccctcattctggatatactgagcagtcgtatgaatatctatttgtgtataaagaagtcgaggaacagaaatagatcttagaatgaagtatgcatccaatttatatccaaaatagaacatcatgggagtatagcaccagtatatagattcttcttttggttatttggtttagtttgaatctgttcaattaatgctgtgcagttatctgatgattctaccatataacttatgcttattatttcagttacaatggaatgtgagttgattgcaatgtagcagtttcataataataataatagatagatatattttaagtactccctcaatcccaaattataaggcattccaagaattttggagagtcaaagcatcttaagtttgaccaaaattataagaaaaatttaaagatttgtgacatcaaataggtatcactatgaaaatataattaataaagaacctaatgatacatagttaacatcataaatgttattatctgatcatatgaatttggtcaaacttaaaatgctttgactctccaagattcttagaatacctcataatttgggatggagggagtatcattgaacaaaatatgtgcccttggttataccttttggacactcgaaagagtagctttgttaggttcttattggattagagttttttttattcaattttgaatcaatgttttcttcttacattcctttatctctggaattcagttgtcccttcttaactgtattatcacacctgttattgcagtgggttgaagaaccgacactgttggtcactcgttt

SEQ ID NO: 36295 - DNA, 482 bp, Sorghum bicolor
  Intron number 3 from transcript Sb01g038560.2 (locus Sb01g 038560) derived from phytozome v7.0 (chr-ID chromosome_1; pos 62098697 to 62099178 reverse strand)
aagctcgccgcatcttccaacaggtatttatcatttttcttgtctagttacttctagtgatatgcttctctgagtgacaataagtagttatcagagaactgttctatcttgttactttgcatcagtgaattttgatatttatggacattgcatccatattcctcatttatttatgttgtgtttaatgtgctctcattgagtatttggatagttttgccttgccttattttttgcttatgatgacgtgtcaccatgttgactcgcaagcatgatgtggtaattgctttgtcctagagtatcactttcgcatgtagttcagaattttgaatcatgatttaaacattacatctttccatggaggatgtgccagttaaaatattcctttttcttttatatttaaattccaggtttgtcttattagtttttttcttccgcattgaaatccagatcatatctggcgttgaatactgccatagaaacat

SEQ ID NO: 36296 - DNA, 890 bp, Sorghum bicolor
  Intron number 1 from transcript Sb03g031240.1 (locus Sb03g 031240) derived from phytozome v7.0 (chr-ID chromosome_3; pos 59610471 to 59611360 reverse strand)
gttctcaaacttttcggcatcaaggtgcgctagctgggtttcctttcctatctccatccggcgcccggtgccgtgactggaggagagaactgggcattcttgccgtatcagagtttgcgatcttgattcgtcgccgcatcctgattcctgacagagtgacagagtttgcagagcgagaatttgtttttgcaggcagcagctgcgctctgctacggcatgttcacgcacaccaccctgtccttctccaacatggtcgggccgacgggacaggtgctgttctgcggcaaccccatcgtctacattgctcccggcacctacgggcacccacacttaggccttgtttagttcgcaaaaattttcaagatttttcgtcacatcgaatctttggtcacatgcatggagcattaaataaaaataaaaataaaaactaattacacagtttacctgaaatttgtgagatgaatcttttgagcctagttactccgtgattgaacaatgtttgtcaaataaaaacgaaagtgctacggtagccaaaaaaccaaaattttgcctgacaaaatttttttcaagattccccgtcacatcgaatctttggtcgtatgcatggagcattaaatatagacgaaaataaaaactaattgcacaatttacctgtaatttgtgagatgaatcttttgagcctagttactccgtaattggacaatgtttgtcaaataaaaacgaaatgctacagtacccaaaaacaaaaaattttgccaactaaacaaggccttaagttcctcccggcatctgaatctgaagaacatgcagtgactgtggttataatcctgttgtgtggtgtggatgcatgtgtgtgcaggcgctgactgtgcactactagagtttattac

SEQ ID NO: 36297 - DNA, 913 bp, Sorghum bicolor
  Intron number 2 from transcript Sb03g041240.1 (locus Sb03g 041240) derived from phytozome v7.0 (chr-ID chromosome_3; pos 68786241 to 68787153)
gagcggtcctagccgccgccgtgctctatctgctggtcagtcttcgttcttcgaaacagattattatttgatttgctttctggtccagttgtactgtagaatcttgcaatttaggtcttgtttacttctaaaaaattttgcaaaatatgaatagtagcactttcgtttgtatttgacaaatattgtccaattatagactaactaggctcaaaagattcgtctcgtcaattccgaccaaactgtgcaattagtttttattttcatctacatttaatactccatgcatacgtttaaagattcgatgtgacgaagaatctgaaaaattttgcaaaatttttaggaaactaaacaaggcctacaatatttctagaagcgatgatttatccgccgaatctgctagccattcagccgtgtttttctctcacaataaatcagccaaccatacttatcaactaaaaaaacgtttgactgtgtactgtatactgtagagtatagcatagcagttgtttcgggccaagccacacttaaaactttcgctagcatcgatcttatcttagcttgattagattttgccgttaagtaacatccatttgttttcgtacctggatgcaatctgcgttgtctcttgccaaaacagacccaacattcctagaatcctagctagtgctgtctactctagactgactgacaaactgttcatgccgaactctgaaacagtatgtcacgccggtgccgtgctgtttttttttttaattttttttaaagatgtcacctgcaagtatcaatttcatcagaaattcagttcggcagacacccacgattacaatcctaaattagccgttgatctgcagcacttcattctgtactccacttgacatcggttaccaaactgcaacggtgacagagcttggga

SEQ ID NO: 36298 - DNA, 605 bp, Sorghum bicolor
  Intron number 1 from transcript Sb10g006540.1 (locus Sb10g 006540) derived from phytozome v7.0 (chr-ID chromosome_10; pos 5996492 to 5997096 reverse strand)
gctaaggtacctttttctctttgtgaatagtgaaatagtttcactttatacaaaaacaaaactgatgctagattattttgttcacatcgctggtgggttatgtgacaacctcttaacatgcatcgtgagagcgtgggactatagcaaaccgctctttgttgccccagctatgaacacattaatgtggaacaacccattcacaaagcgtcatcttcaaacggtcaaccaactgggcataatcttgatccccccagtggacgtactcttttatgcatctgtattgtctttacctgtgatgatgagtagaatattgagagttggggggaagcttgtagtgacagaggtagcttcctcccggcccagtaatgatagtgataacgagtctattgagtttgtaattgtcagtaagtattcttatgcagctgtataaacgctgcagcaaacttttctaccctctttgacacacctgttatatatgtacggttggaatgagtgtctcttgaccttgaccatttgaatgctttacttggatctgccattgatgtgatcctgtcgcttcttcattttcagattcttgcctatctatttactggtgtcgctgtccg

SEQ ID NO: 36299 - DNA, 924 bp, Sorghum bicolor
  Intron number 1 from transcript Sb01g013100.1 (locus Sb01g 013100) derived from phytozome v7.0 (chr-ID chromosome_1; pos 12135939 to 12136862)
caaggagctcaacgtgccggagctggtcgccatcggtgcggtttcttctcccttgtgattctgtgctgtgttccgctttcctgcgaattcgtggtatttcgtgttcatgaaaggtatgggctttggtggttttcgagtactaattgttttgcggggttttagcgaattctggtcagaacgccctctttgctgaggaatttgttaggctcgtggtaatttcattgatgttctgggtcaatggagcagctagaattatatgcattgattactaatacttatttagtgcggtttactgcatcactgcacgagttgtctctacttcagcttgcaagttttccttcgttcttcctttcaaaactggcgtactctgctctgtgctctctcccttcaagtaaaaaaatgttgatttgttactctcctgtactttggatggctgcattggtgtctgacataacgttcagacgcgcgtcacgcggatgcggatagcagacttgccttcgttgtgtatgtgtagtataactgctattattggtagttgtttacttggtttccttcgacttgttcagttttttataggttagtcaatgttggctgccagctgtggatggtggatttctcgatcgtccactccaactgtagcttttttccgttcgacttttgttcactccttgcaatgataaattactctagtaagtttgtgcaaatcaaaaattctaccaaggcacagtgatataggttacttccaagcttggcttgttgttcttgaaagtgaaaactttgatgggctgaatcagattcttatagtaattaagtttgtcagtcattctacttcatgatgaatctatacgtcagttgcttgatgttaacgaactactatattttctatcaggggttggttccacagttggagctggagtatacgtt

SEQ ID NO: 36300 - DNA, 498 bp, Sorghum bicolor
  Intron number 1 from transcript Sb10g019320.1 (locus Sb10g 019320) derived from phytozome v7.0 (chr-ID chromosome_10; pos 41089683 to 41090180)
ccaggtacttcttatctcatctcatctctggatctggctgtttgataatggagggagtgagacgtgcgccagaggtggccctggattgggaggcggagcgatggggctcccaaggccaccaaggcggacatttgactcctatttttggagtcagcatgctggagatgaaatgactgggcgctgggatgagtcggacatgcagctcctattttgggagtcagacatgcggctcctatttttggtttctcgatttacagtacaaatttccatcttttcttgtgttctgaactgtcaaacttgcatgtgtacactggccactagatggtcgacattttttccttgtttacttggggagttgcagaaacatgtcgtagataacccggggcagttcacaaacttgagttctttgacttgtgcttggatgttaggaaagaattatgttgtgtgtacactataggttgctaactaatttcatacctactcttttatgtgcagaac

SEQ ID NO: 36301 - DNA, 697 bp, Sorghum bicolor
  Intron number 2 from transcript Sb03g042750.3 (locus Sb03g 042750) derived from phytozome v7.0 (chr-ID chromosome_3; pos 70141152 to 70141848)
tcgtctccggcgattgcgtcctcgccggcctccaggtgaaggctgcttcccatctgcattttgttggttttgatcagtgcgttctgtgtcgaatcgccgagtgttgcataggactgttgaactttagctgataggtgcgattactgcatgagggggcgaattgagtagcaaggtgaaagtataatgccatgaatgtgtcggtagccaggtgaatttggctagctgtactgtagcacgctctcaatattgtctcgagcttcaggacctatgattgttctgggactgtgtttttactaggctgtgcggatgctgcagacggttatggccactgttttttttttcttttcggattttgttagaatacacacccaaatttggatgtgcctcctgcaatgctgtcagcactggtcttaattttatttgctactgctaggagaggatttgattatcatgatcaatacatgatatcatcaatcattaacagtgaatttattctagatttctagtccccattttctgagtaccatatgtctgagactctgagtattgggatggagtacttctgcagttctgcccttgtattttttgcaaaatgataagcatgttctttcatttgtctgtttgctatgttgtgctttttttccaaagttgcttgacactgttctacctcatttttttgtagcctatattagtgtac

SEQ ID NO: 36302 - DNA, 1001 bp, Sorghum bicolor
  Intron number 2 from transcript Sb01g034580.1 (locus Sb01g 034580) derived from phytozome v7.0 (chr-ID chromosome_1; pos 58067824 to 58068824 reverse strand)
gatactgctgcgaccgacccaacccgatactgcaggtacatgccactcgtcagtatttgagttcccaatgatggggtaacgtgtcttgaattatcattgttggggatgattgtttatgttgaaaggcgatgtttgtaatgaaagctaggtttcctgttttgagtcttggaatattgataccgtttgatgctaaatgtctgttagttgttgcttgggatagttgcattgatcaatagctacgggattgatggtgggttctcagttggtagctctaatgctcggttgactctgcaaatcaggagctttttcaaggaccggaatgtggatgatcaagtatgttagggcttagatttcttattttgttgcccttgcccacgattgtagttatcctacatggtaaacctgctgcgtttgtttccaaacagtaaacatgcaaccaaaagctgctgactgtgggagggatttatgttcttcagattctattaaattgctcaaggctttgtgcttgtgctaagtgaaaggaaggagggaagaaaacaggggaggggatgatatggatttggaaggtgagaaaagtgagaaatgactggaaggaagaccaactgggtatatggacctgtgtctcactggtctctggtgtgacttggcaattggcataattatatcatgcttggggatctgtgtttaaactctgcattgaatagagcagaacagctgtttgacattgtgaattaacgataacgatacacatgtagttcacataaacttgagttccttttactgataccattggcttcagtgatgaattctttcccttggacacatgagctcctggcatatgtcaaatcataaccaaacttacttaactatcatcaactaagagccgagggcttcttttcctgatatgttattcaaatgcataagatactagcatcagcttctggcctcctgctctaaatagtcattcatgactttttttccctctcaaccgcaggtatttt

SEQ ID NO: 36303 - DNA, 937 bp, Sorghum bicolor
  Intron number 1 from transcript Sb06g025930.1 (locus Sb06g 025930) derived from phytozome v7.0 (chr-ID chromosome_6; pos 54978157 to 54979093)
agcgcgccgcgacctccgaccccgccgcacccgatgtacgctctcgtccatttctcccccgtctgaatcgcgtttctccacggcgatgtgtaccgtttgtttgggggcacctagtgtagtgagaagatgtggatcttgcattcttgtggtgtggaaaagcttattctgtttattagctttcggctccggatactgattcaatctggttgattggtgaaaactgaaaagtaacatgtagctggcaaggttgggcagtgacgtagtgttttgatttgggggaacatcaaggtcatcgtggtggagctggtcaaaaatcatgtattcaaattcgtggttactgtgcacctagaagctttagggcgttttaatgctcttcgttggatttttttctgcagtatgtatggtattttgagtgatggaatttagaactagagccaagcattactttcagctggaaagaagatggaaagaaagtagcagcatatacaggacatgattgccccttaatcgctctaaactactcccttcaacccaaattataagttgttctagcttttttagatacacaaccttatctagaaaagccagaatgacttataatttggaagggagggggtagttcttaatcgtgagtatccttgaatgtttgataactcaaccctatgattaatctgacaaagtgaatgaccacagctctaaaacttttaattgaagcccgacaattgcatatcaatgctgacaaattatctacgtggctattctgatctagtcactggaagttcgcctgctagcgtcgattcataatatttttctattccctgtgattctcaaacatgcataaaggttaatttttctgttgctctatcttccagtagaatctacccctccattattcatttttgttattacaatgctgcagttaccaagtaagagagta

SEQ ID NO: 36304 - DNA, 453 bp, Sorghum bicolor
  Intron number 2 from transcript Sb06g025430.1 (locus Sb06g 025430) derived from phytozome v7.0 (chr-ID chromosome_6; pos 54373939 to 54374391)
agaccagaggacagctcccggtcaggtttctacaggtttgaccctgttagctttctgatcaattattttatatgatggcatgactatagagggataggcctaaattactgtacgatcatgctctgcatatgttgcaagaacacgaacgctgcttaaatctgtgccagtagccagtaggcaacctttggtgccaatctgtatgtgtagacaatatcatttgaaaagaaaaatgcagaggcatggctgtgtttaatgttagatcggttcgcagtcaagttccaacatttgtctttggtaatcaaagaaactagtctttgcctttgtaaaaccttttacatactgagtagcccattttgctgccttctatttcagctcatgtccccaccaccatagcttccttgtctgtctcaactcttaagaaaacctttactttattttgattgtagggcagtc

SEQ ID NO: 36305 - DNA, 822 bp, Sorghum bicolor
  Intron number 3 from transcript Sb06g025430.1 (locus Sb06g 025430) derived from phytozome v7.0 (chr-ID chromosome_6; pos 54374563 to 54375384)
ctgcaattgattccccttggccaaaggtaagagtgtaagacatgcaaggattttataaagatattgtgaatgctaggaatgttattatttttggaagttgtaatgcacttcaaaattgagattcaggctctttaaagaagctaatgccacaatacttgtctaggcatggctgtagtctcaacagcccaggtctatttgatgctccatcagtctattatggaaaattctcatcaattttgcaggtttcacttttcagtgaaacaccagaatgctcatgtatcttgcaatttgctgtgacatgctagctctgccttcttatgccattcttctatgatttctgttgctgattgttaagattatttcatcactaaatgctcttatgctattcattgatgttacaagtccatgattgtctgcagttcatatatggggaagtactacttcataatggaacttgtacagttatgttctaccctataataatgcctgaaatatctattgcagccaaatgacgggtctgtgtgtattatcttcactttctctgaaactgagcagataatttggtcaatttagttgcataggtttatttgctgcattggcttagtaatatgtaacactatgggcaatattctagtttcatcaagtgataacctggttttgtttgttttatatgtgctccctactattaagtattaatgtacaaataccattattttctgctcttttaagtaatttttggactaagtttcttccaataatttaaagtcaaacaattttttggacaagttttacttgttgcattcatttctctccctgcaggca

SEQ ID NO: 36306 - DNA, 716 bp, Sorghum bicolor
  Intron number 3 from transcript Sb06g033440.1 (locus Sb06g 033440) derived from phytozome v7.0 (chr-ID chromosome_6; pos 61387272 to 61387987)
gcgaaaaaggtactttatatacaccaattgcatagttgcatgtgtgcttctactaccctcaaagtatcaatggcaaataagcattgatatttcccataggtttcttgtagtttgaacaaatattgattcagttggtttggaggcttctgaagcagttacatgtaaattggttaaacattattccttgactgagctccacttttttataaggcttcattgagcatgttgatactagtgttgagactaaatgtcaatctgattgcattcgaagcagcaacagcatgctagtcagcatttggttatctttctcattttagagaagaatatatgttgtttccgctgcttgatcttgcaagctttctcaatttctttggcagttttaaataagtttaagttctggtgtcccttgtacttctgtccaatgttgcactgcatggatccttctgttttttcttcattcatgctattgtgtacactcgaatcaaaagatctggcatttagctataggtgtggatgccgctgctattgttttctatgttacaccatatcaattgttttttaaaaaaaaaacaaatttacaccatacctttgtttggctaaattggtctcagcagtcccctgccaataaccgaagcttttggccttctgctatcttcaacttccatttatctatcccgttttccgcacttgttaggatttgagatactggcgttccc

SEQ ID NO: 36307 - DNA, 725 bp, Sorghum bicolor
  Intron number 1 from transcript Sb04g008740.2 (locus Sb04g 008740) derived from phytozome v7.0 (chr-ID chromosome_4; pos 10276519 to 10277243 reverse strand)
acggcggcggcgccggacacccactgaatcgccgggtcggtgagctgtgaatcttcgttttttttcattacggttctaattctacgcgtctcgatttgggaggctttgttatatttgtttgaccttttcattcctgtgatcgctggatgatttgctgacttgcgtatcccgatcgtctgaattgatggtggtatcgggacatgttgttgatcactttcttcatataatttcatttctgtcgcctttcccttcttgttttgtcttttgaaaatcaagtcttaagcactgagggagggtttataattttgttctgttaaagaagtttttcttctgaatcatttgcagaatcatcatattgcaaaatgatataaagaacctccccccttctaaagatgacaacttcatcttgttcgtttattaagagaaatgatttgatgggtgctaaactgctaaccagatagtattgatgaaagatcggtgctcgtggtacgacaattgccttgccaagaacttgatacgtggatcgatgtgatagtgatgggctactgtgcttgatgtcaacaattcattttcgtgggcctccatttacctttttagaatttcagaacaaaacggtttgattctgtgttcatttattgattctggtggtaggacgacaaattgactttgccctcctgattgatatctcagagaaggaacagcttcaaccaggggaggcggagggt

SEQ ID NO: 36308 - DNA, 736 bp, Sorghum bicolor
  Intron number 2 from transcript Sb02g019310.1 (locus Sb02g 019310) derived from phytozome v7.0 (chr-ID chromosome_2; pos 46667503 to 46668238)
tcgcggcaaaagatcctgtcttagtaaaatcagaggtgtctgttctattcttgttatcgaaattctcaagtgtgtttgttagcatagcacaattgtttctaccatgagcatgaaataatctacaagttatgaggggttagcaacctaatcacctaagctggcattgtaaattagaaaaaattgacacccaagtcaagttgaagagaactcaaaccaaggtggcgggggtgtacacccacaatccacacctccaaccaactgtgttaggctcagtttttgattaactttgttttatggctagctgtgttatgtaaagttgtaaacattgttcttaactccttaatttgcaacaaaaaacacattcttgctctaagattgtaattctctggcatgtctgtgctctgctatcttctagctaccattataacccttagagatgcaatatttgataatctgggtttgtattgccattgattcgttgtttgcttcttgatgcttataatgttagatgacaatgacatgtaaaaggactgatctgcacgtgatgccacctacaaggcctttcttccttatcctgtctctataattagctaaagtgattggaacaacttgttattgtgcgtgattgctgttatttgtgagtcaaactgacctggtatgatgattatttgactgattttgctatgatgattatctgatagattttgcaagtatttgttgaaggaagatctagaaa

SEQ ID NO: 36309 - DNA, 734 bp, Sorghum bicolor
  Intron number 2 from transcript Sb03g016191.1 (locus Sb03g 016191) derived from phytozome v7.0 (chr-ID chromosome_3; pos 25918737 to 25919470)
ccaagatagatatgtttgttatctagtcttctagaaggatttgatatatatatatatatatatatatatatatatatatatatatatatatatatatatatatatatatatatatatatagtacatgctcatactgaaccatctaggttaccatctatgtcaagtatgcaagtatacatagagtatatggttatacttattttatatagtactgcagtggtatcttagtaatacattaaaaaatatgggttcttttgaaaaaaattcgcatactaagatttgaagtatcttataaaataagcatataaacatactcaaactgataaattagataaattagtacgtaatgtagtttattgaagatggaataactactctccagagaatatagaaaacacatcatagatggtttagtatgagcatgtactacatctacatacacttcatcgggccatctacgccctaaatttagagatatacacatggcagtaactactccctgggagtaggaaataatttatatatatacatttgacttgctaggaatgcgcatttgacttgatttgacttgctcttcattataaccataatataaagtatatatgcaatgttgatttctgctgttatacacttatctgcttaatgttgagtctgattttgttgttttcatgatgaccaaagtttattttaacatcgcagttggttgcgaccgcagccttgttcctggcggcaaa

SEQ ID NO: 36310 - DNA, 759 bp, Sorghum bicolor
  Intron number 1 from transcript Sb05g019850.1 (locus Sb05g 019850) derived from phytozome v7.0 (chr-ID chromosome_5; pos 48689100 to 48689858 reverse strand)
tgcaaaaaaagctagatcgtggcaaaaaaagccttgtgagcccaatatttgatttattagaagtgatttttaggatattcacggagatggacttctttttttctctcccagtaactttttatgagttggaaaaaaatgaagtttttaggaggaaaaatttatgaaactcttgagatctctaacgagtaatattattcgtctgcgttgcctctgtttttgcatgccttgatagatacaaatttgggatagggagtggttggagaatgatttttctccatcctaccaaaatatcaagattggaggtccaaactgttgccgatgctcaaaatccacaatagagtctttgagttaaagtagtcacaaacaggccaatagttaagcatttttatttctattctaaatggaaaaagtacaaagtgtcaaggttcttcattttgacatacaaacacttgatcttggtcgagctcagaagcggactcgacaagcccagctccagctcctttcctacttttataagcgaacttttgaataagttttttttttttttttgcgagcaatgttttgaataagttaagagcttagctctagagaagatggaagcaatctctgaacctagtgaaaattgcagtggaaccaggctatgtttcagaattgtgtttattctggctcgagtgaaaagctcagcagcaacaatggcatgaaattggaaatgcatttaccatatggtgtgtcgtgtttacatgtcatccaggtgagaag

SEQ ID NO: 36311 - DNA, 1008 bp, Sorghum bicolor
  Intron number 3 from transcript Sb09g002210.1 (locus Sb09g 002210) derived from phytozome v7.0 (chr-ID chromosome_9; pos 2343938 to 2344945)
cggtcaagatccagaccgccttccgaggttacctggtaatgtgaagtcacttccgaattcacctgttcggtgccatttggacctgtttttttcctgagatgtttagataagaacaattgtgacagttggaaattggtttatgtagatagatggtcgtattacatagcacatggaagtgtttgtttagctgctgattaggtctttgatatttgggggttaggaagaggtttgtttttttcctgatttcgtttccacatcgacatgactgagcatgcaagcaaatgtatgtttggtgttggtggctaccctgcttattttcttttttcgtgttctagcttttaggtgtcggcagctcgccaacttgcaagtgttagttggccagttgctgttactgtaatgtggagtgatacttcttagccgaataatcttagctatttacatgtcatgctttcattgtaactactttgtgtggtaaatgggtatttacggctaaagtagattttcttgctttagtcgaacctggaggaactgctaatttctagtttaattcctctccttcagttagctgtttactttttaggtttatctattgtttatgtcaatgtgcatttgtccaaagggcctacaaatcattcttgcaaagtgttagaaaaatgattcttgaacaactggcagttggtggcaaccacctttcatcactcattttgatgttcttttcaattattttttgatttgatactgatatcctgtctgtcgtgctattgaactatccatgagatagcaattagtggacgtaacttctgttctttgggaaatatgacttcatgaaaaattgacttatttcatagtaaagcagaatcttacttttacgcttcccaaaaaaatggaaagaaaaagaaaagaatcttacttttacaaacaacattgtactaagtgttgttatactgagtgctcggtcattgtgataatgtaggcaaggagggcactaagagcactgcgaggtcttgt

SEQ ID NO: 36312 - DNA, 999 bp, Sorghum bicolor
  Intron number 1 from transcript Sb10g022950.1 (locus Sb10g 022950) derived from phytozome v7.0 (chr-ID chromosome_10; pos 51278275 to 51279273 reverse strand)
aggtgatgaattactcatccataattaaatctttctaacttttatctccctcagtatatgtacaaaaatgatttatgtgtttaacttttaacatgaacaggaggtgttatctcagtttcatgagctgaaagagatcctatcccagaaagaattcacacatgaaggtgcacccgaaccgacgacggagacaaccaccgagaagactgatgataggaaaaggaaacgaggtgacagaggattgaatcagtttccaaaagtcacatttagaattacagatgtaagcccgacaggacaacccctagttcctccagaggccttacctacagatgcgaggagcagcacaacttcagaatcagagacaaacacgactccttagaaggtttggaccccgctgagtgtaagaagataatagatgaaagtcgactagattatgaatgtaaatacgacctctacatagccttggcactgctcaagtatcaagatcgagaatgtgttgttgccccatacaactttgggtaagtgtcaatttgtattcatcgtcgtattagtaatttcaatgggcacttgcatcataaattcgattctctcagggaccactggatctacctcctcattaatcctagtctaggacgtgtgctagtcctagactctgcagactatgatccttcaagttatgcaaaattcattacacacttggaacggtaagctgagtacattaaatattaatacctacttttataagagtttcagaataacttcaggattgtgtattcgatactatagggcctataggtattataagatcaaaggtggaaggtgtgattcatcagaaccggggtagccattgagattattttataaatggccggtacgtaccaaaatatcacaagctgtcttttataaatataatatgcatatgacgatgttgcaactaataaatatccacttttttgtcatacatcagtgccataagcaaccagtcggatcggtccactgtgg

SEQ ID NO: 36313 - DNA, 851 bp, Sorghum bicolor
  Intron number 1 from transcript Sb02g020870.1 (locus Sb02g 020870) derived from phytozome v7.0 (chr-ID chromosome_2; pos 51559131 to 51559981 reverse strand)
aggccacccgtgccaagctccgcattttgggtgagcatttttgttttttttttggtgtgtggtttccagggcattgtggtttgtttgatgagtaaatttgttggtagcctctggattggatgagtcacgatgctataattttgttgatggcatggagcagagaagataacctagatagtgtacgacaaacacagatgcaatgcaactctaagtttatatacaagcaatgtactcgttgcacattgtattttgcagcagcattgtgatttgagtagattgctctgtctgtggttaactcaaggaactagtgtgtagtggggctttcatgtcttttttagtgatataataaaaaaaggggaacattgagtcgggattttgaggtcatattcatcgtggtctagaaatctgtttgtctaaagtgttatctctgaaacaaccattagttgaagctatcctaaacaggtaattggagtgtacttgctaatttttctgcttctagtttcttgtttatcatagatcaaactacataattttaatcttttgaatacttttgatggtgccactacaatattttaatggctttataccactcacatcagttattttagtactccgtatctttctgtttgtctgcatctatgtttcttattgattttgcaattctatgcattctatatagagcagtttgggtttcatcttttgggccagctctaggtctttatgtgcattgttagctgctagatgttttacgtttctaatttgttgtaattctggtgttcacaaggtcatggccttcatagcctataattgattatatgaaatgaaatttacagctggggaagaaagaacac

SEQ ID NO: 36314 - DNA, 955 bp, Sorghum bicolor
  Intron number 1 from transcript Sb01g040740.1 (locus Sb01g 040740) derived from phytozome v7.0 (chr-ID chromosome_1; pos 64040180 to 64041134)
cctgtccgcactcagagcctggttgtcattccgtggtatgagacctaacttgcctcgatggatttttctcaaagtttcgttttccgggcaattaaatccaaacgtttgtttctccccatcggttcctcattgtttatttgatgcttagtggagcactgatctggcaattaatccatccgcggttctgttgggctcgattaacctattcagcacgcgctaggtccatctcagatgtgccccatagggttttgggtgcggtttaagtcccagataaggaaaaatgtgggttcaactgctcctgttcatttccaattagtatgaatctatggcttggttgttgcattgattgagatggtctagatattgtattgggtagtagctgtacattcaagagaaacaattgggccctttcatcccaaaaaattttgggtttgggtctttcattttgcataatggaactaaacaccatgcaaatattttggcaaaaaggtggctattctccattttagattttggcctcaagaggccaaaccccccaacagcaccaccaaaaaaagcctcaagaggccctcatggaactaaacagtaaacataaccctaaaaattttggcattttgcattccatcattccaaagtagttgccattttgtattttgcattttgtgggggaactaacaccccctgaatacaaaggtgcatattctcaaaaaaaatgtatgtgatcatgtgttttaagtccccattctccttagaatcaaagacaacagaggtgcatttgtttatgggtgctctaaggcatggacatttggccacagagaaatacaccgtagtccgtagatatgcattttttccccaagtggtgttgtccattttcctttcttgtctacttgttcttgatatactgttgttttgcttcgtagggagctcaacttgagtctaaaatattcagatattg

SEQ ID NO: 36315 - DNA, 991 bp, Sorghum bicolor
  Intron number 1 from transcript Sb02g004910.1 (locus Sb02g 004910) derived from phytozome v7.0 (chr-ID chromosome_2; pos 5664400 to 5665390)
cctgggcccgctcgcggtcgagtcgccgacgcgaggtgaattgctggtttaattagtttgggggggcttggtgcgccctgttccggccccgttggtccgggaggtgctcgtgccggtgcccgatcgggtggctgcttgctgtggagcctaggttttgtccggggacgaccgtagtgcgtagagcgggatttagcggcgttcgggtgtgggattacttcggtgttggtggtctggcatggttctgttgcagtcccgctctcggtcttcgttggctctagcttgaggcctggtcctagttagtggggacttctatctgttggtgttggagcaccgaactaaactgcagatgcttcatgccttaatcacacttgactctgttcattattattaagttaccggaatggtaagccgtatgttgcaggtgttgtatgtgcttgatgtagcctgtgttgccatggcggttagtgatttagatagcgatggagcattagaatgcggctttgattagcaatttttttttctttcatttggggcaagtttgcgcagtagagtattactaaaggttgattggagagctggtagtgcatggtgtatgccaatctttgacgaagttacttaaatgtatttgcataagtgcttgtcggtttatgacatgaagaatatgtccggttcacaaaaagaattggattagttcaataacccaatgaatgtgccatcaggcgtgttgtccgtggagtagtacctagttacctatgtttacggcttaggcattattagaagtaaagaattatagcagcagatttttttttctttcagtgaggatcgtgatagctttaacagtacagaatcaatgattagattttagtgagaattttagcctatgataatctttactgttcgaatacagactggtaactatatatctctgatggcccctgtaaaattcgagaagttttgattaaaatctgatgataaattatgcttttcaggc

SEQ ID NO: 36316 - DNA, 944 bp, Sorghum bicolor
  Intron number 1 from transcript Sb02g041860.1 (locus Sb02g 041860) derived from phytozome v7.0 (chr-ID chromosome_2; pos 75611570 to 75612513)
cacatcttcagcttccttagcccaatcccaggttcgattcgctcctaatcttatgcctacacgccacgccttcgtaggagaaccaatcggatgggaatctgtagccggtggggattccgactagctccgcagattgtttgagtactcggaacggagctaaagaagaatgggccaggattgggttgacctgtttttttgcgtgcaaaagaagatctgtttaattcggtactgccgtactggtttgatacttcctgggtgtgttagactgcggaagtcttctaggtgtgctgatgctgtatcatgtcttcagttggtggatgcagttatgcaattgtactcctgttttgggtaaagtaaatatagatgacaataactgttcacatggcttatattgggcctgtttgcttccccttcctgaattttagccaactaaactttagtcactttagtagctaaagttccaaacaaactgactaaaaaggagctaaaataatttagtctcactagtcatccaagagtagttaaaataattttagctggctaaaatttagcaagaggaaccaaatggggccgtgtgtatagcaatagatttggtgcttttgtatcatatatacttatatataactagagatcgagggatattcaatttgtattcctcttgccgttgccataggctgtcatactactgagttcatgtcaaatgtagcttttgtgtagattctctttcaaagcaatttacaatagctagtttactaatgtgggagttttctgtatgtctggaaatgtttccaaccgtggtaagagttgcttgaatgtaacatgtttgaactgtgtttgatgctatgcttgaacatgtactgctgatgtggtttaaaatgaactgtttttagcaatttcattgttgaacctgcagataggtataacaccgccctcgtttgccacag

SEQ ID NO: 36317 - DNA, 854 bp, Sorghum bicolor
  Intron number 2 from transcript Sb02g007850.1 (locus Sb02g 007850) derived from phytozome v7.0 (chr-ID chromosome_2; pos 9869771 to 9870624 reverse strand)
gacgggcagaagatctgtgagcagatcgttgtcaggtgagtttcaaaccttgaggactccgaatctcctcgcgattgtgcaaacaattgggctaatcgcgtaaatatttgttagtgtcaatgttttgttgcatgattgctgatgacttgcgattgcactgactactgcccgtgtgattacattcggcagtttttgttacgatttcacatattactggtgaaatattgcccatctgcagtccatgcaattgtgctaccttttaggcttcaatgcagttttggcaaaataagtaaagaacttgaaatttgaaaaaaaaaaaaactcgcgattttgtaatttgtagtgaatggaagggaaataatgcagtatttttgacagttgtgtagtcctgtgtatggagctttctgtttcttggattaatctttggttgttttgttgatgttgctgtgctcatagcttgtggtctgaatttcttcctaaagtaatattactcttgcaatgcagcaagagcctgttggatttctctgttatgaaattttctgttaattgtaggaaatcaagatacttttccttttatatcaaggcacatagtattatctttccacttcctatttgaaaaggcagcactccaaaattgtagataactgtttgagtgtttcacatgatatatagttgtagtgtcataattgtaagagtgagtttatccatgtgattggtcgaattttctctcctgagcaggctaaatgcatggtctgacgaaatctgaaagtcttgttccttcatctgtatcagtagagtagtagagtttgttgctaattgtcttaacctgtagtgtggcagcagatattcagact

SEQ ID NO: 36318 - DNA, 969 bp, Sorghum bicolor
  Intron number 3 from transcript Sb08g004690.1 (locus Sb08g 004690) derived from phytozome v7.0 (chr-ID chromosome_8; pos 5641660 to 5642628)
cactggattgcgttgtctcatagtccttggctccggtgagtaccatattgcggtctttccttcaaataccttacggacaagtcttggatacagttgcctggtatattaaacagtactcaaaggtgtaagggcatgtatgagtaccaagatgtggttatactgaataattgttggtaactgcaagttcatatgcgaatttattttcttctatggtaacgaaagcacaactcttggtcaccgtatatgagaattgacttttcactgacttgatcatgatagactgtcacaaaaagatcgtgggacaaaatcttgtttcttctagaaacattattgttctgctcccaatcaaccgtaacatttgtgctgcagcagttttgcttcctagagggcattgtcacaatttattgaaacatggtgtatgtttaaactcagtttctatatatgttgccatgtgcaaagttcataacacagatcgaactaaagatgtttgttattaactaataatatagcttatatacaatgtttagttacaacactaggaatcatcatgctccttgtgcaactctgatgaccctgaactgagataggagtcccctttttgtgcaactctgctagacatttttcagctccagcttctattcttagcagggcacattttttaatattctttttttgcactttggttgactcccttcagcagttgtcaatctgctagtgtcgcaatatcttgtcttagtctcttattcattgtcaccctatttagcatgtagtggcttctttaatagcggtattaaaactgtcaagatctcatcgctagcattattactattttactggactcttgttcacactcttgccagaacatttggtagtttctttgagttatcaagtgtctaagttgtaagatatgtagcttgatgaaacatgtattattttgtgttttggttgttaggagggcataccgcagaa

SEQ ID NO: 36319 - DNA, 911 bp, Sorghum bicolor
  Intron number 1 from transcript Sb01g002080.1 (locus Sb01g 002080) derived from phytozome v7.0 (chr-ID chromosome_1; pos 1789274 to 1790184 reverse strand)
gacgcgctccctctccaggtcttttttttttcctttgcacggatcagtcacttttgcaattcatgcattgcattctctgtttttctagcctcgatcgatcgatcgatcgtatgccgccgcgttgccgcatgccattcttgtcagtgtcgtcactacgtactagctatagttcacgtatcatgcgctctctcctttttatcatgcagtctcttttgtactaactggactgtgacggaccgagaccagcagcattattgtcatgtgttccgttccaactttccataatcgataggccttatttggcacagtttcttgttagaggaactagaatcttagcagacggaaacgtagaacatgggccatgtttcgccttttgagaacgacgacattcttgattcgggaacgcccacgttataaaataacattattcctcctgtcccttttcacgttttcatgtttcattataggagcatggctgctaaggctatagagcagatggaatagaaaatagcatggatcttctattttgttttattttaggagaaaagataaaaaaacacagctccttactatagcatgcatacggaagtgccagaatcaaaatcgatccgagctctgtcaaccggggtctacgacgtcaatataaaactgcccacgctggctgcgtgctttgcctgtcgcattcgtaacacagagaaaaccgaacggacatgatctttgccgacaactcaagcacgaaaatgagatattgcttcatctgcttactacgtgtactactatactttatggtgagcatggagtcctatatatgcggttggtcgaatatttcgatgaccagttttcccgattgctcctccatttgcatgcattttgcaggaattggtagagtgggagttcaagagcaaggagga

SEQ ID NO: 36320 - DNA, 835 bp, Sorghum bicolor
  Intron number 1 from transcript Sb06g027380.2 (locus Sb06g 027380) derived from phytozome v7.0 (chr-ID chromosome_6; pos 56265883 to 56266717)
ctcagtacaaataccaggacctcaaccccttcgaggcaagcagattctgaaactctaattcaaccatctggttatagtctgttttacattgttgtgtgtggtgacatttgatttgatcggatgctatcttagattattggataattgggcacaaagagttattttcagaagttaagaaaaattatggaattggaggtcaatatgcacgctaggctgagtaatataattactaactggtgtgagaatcctatactgcccagtcagttaaaaacttctcacccagttaaccatctgttttactgttccatatttcttaatctttcgtaacgcatttgcttgattgtacctgactacttgatgttttatcttcattgggaatgttccctgtgctcaaattttagagctatttttctgtagctattgtaataactgataatgttttaaaatgtatttataggccaaactggcttcagagattacacgaagatagtatagtcagtatttcaaaaattaagaaaattatgttggaattagaggtcaacatgcatttgttaggcagagtaattgatccgtgaatcctatgctgccctgtcagtttttgtaaactacccaatcctttaaaaatgtattgaattagtatcccctatttgactatttcttaatctttcctgccttctttgcttgattgtgtccggctacttgtgatttatcttgattgtcaatgttctctgtgctcaagtttgaagaattattctgtagctattggaataaccgattatatatttttaatgtgttcataggccagactggctccacttcttgcaagagctaacct

SEQ ID NO: 36321 - DNA, 1015 bp, Sorghum bicolor
  Intron number 1 from transcript Sb10g012730.1 (locus Sb10g 012730) derived from phytozome v7.0 (chr-ID chromosome_10; pos 19318974 to 19319988 reverse strand)
cagcaagaagcaacagccgcaggcggcagcgcctggtaatgttctgccgtccccttttcaactggagcgtagaagtagtgaaatgtgcaaggcggcattgatggctttgatcgtatttctgttcagagcttcagatacacgtatatatacttgtggtacttgggaatgggcaaaacgaccccagggattagcattcatttatttatcatttcattcattcttctttacttttggtttgctgtcatgccggcagcaatcaggggtggagttgtgggcggggaatggaatacttggtgataatgacctttatgcccttggccttctccatgctagagttttcattcaaaaaaactatttggcaagcgaggtttcttgagaaaaatacagagaggtttcttcaggattcttgttgctctaagtagaactgagtagggaaaggttgtgctgctggcaactcgagaatacttctttccgttactagttcgtggtagatgtgatttattagcttattgtggttcctgtggggatctggccttttttactcttaattgtgattaatatctgctgttggcttgcattggcatgtaatattatgttgtttcagttctagatttgaaatatttttactgtattagcgcactgtttgtgtttagtttactcagttggaatgtattgaactatttatccatggttatcttttgtttactaacttaagcggtgtttgacttttgttattggatcattgcaccttcaactttgagctcctaatccccccaataaaactttgagttcctatgcatttaatagttatagttattataaacatgccgttaataccatgtgttcagatccctccaaaagtatacctatggctatggatattttgcttggcatactagatatcgtgggactatcttgaggtttatacatattaattcaatgtgatggcactatgattatgagattatatataatgtttctgaaattttgttttagcaggaccaggctgggctgg

SEQ ID NO: 36322 - DNA, 1002 bp, Sorghum bicolor
  Intron number 3 from transcript Sb02g007770.1 (locus Sb02g 007770) derived from phytozome v7.0 (chr-ID chromosome_2; pos 9758276 to 9759277 reverse strand)
aatcgcaggaatacaggtattttgtcctgcattcttttggggttgtataatctgctgtctgaattctcttattgatcatgtgtaacctttggaaaaatttcacatgagaataactcagggcctgtttggatacaagggctaaccactagctagctaaaaattagcccaaattagctctagtgcatccaaacaggaaagctaattgatgggctagttttttagataagtcagttgtgagccaactaagctagccaaccctagctaatttgagctaatttttagcccaactagtaattagctatagcttatccaaacaggccctcagtcgtgtggcatacatgataatcggtatcaaactggcagtctgaaacttcaattaacatcttcgtgagctctgtttttctgtgaataatagttatctttggctaacatctctttgttcctgcccatcaaaaaatagtttagattttacacaattgatctaatgaagcccataaacttagttttcaggggaaaaccaaaaatatttctttgcataatttgatattgatgttgctaactccttccccttttgttaatacttaaaatctaataaactatatggtaacattcacactgaaatagttctccagctgagaaaggagcaggtaatggttttatttgtcaaattagtagatgataaattgaaactcttgtagttcactcattttctatactttgtccattgatacaaagccacaagacattcaccttcaaaatgttgataaatatttttgtattttataatattctataatatccaaatttgtattgttactttttaaacttgttggtgattgtatgtttagtttttattatttttctcaaatgagattggaaggagcttattatgtaaagtagtctgcttgtatcttcacattgccattaatgttttcttcatatttcgttcgcttccacttgttaacagataatctagttgaagatctcttgggagattttgag

SEQ ID NO: 36323 - DNA, 978 bp, Sorghum bicolor
  Intron number 1 from transcript Sb09g024350.1 (locus Sb09g 024350) derived from phytozome v7.0 (chr-ID chromosome_9; pos 53905127 to 53906104 reverse strand)
cgacctcaacctgatcaaaggtatgctgtgcgctcccttctgtttgctctgctctgaggccactgttcgtgtctgacggttaggttctagcctttcatacagcattccgatcgagtgtatggtaagatgaatttagtagctacagggtttgcatgggtcgcaaaatcgatcatgtaatgaacgactagataattttgtgggctcgctagacggtaagcctgacaagcccaggacacgattcagaaattcaaagagaaacctacgagataagctagttcagtatgtggagccatagtgatgtgttttttttaagtactaagaaatggagaatgctaactgaagccggaagcaaatagccagaaggatttgtttttgagcaacagttgtcgttaattaagaatgttaattttgttttggcccagtcttcagagtctcaaaagcaatattctgagttttgcctgttgtttttccataaaactataccatttccaagttccaaaattagtatagcttgaaagtattttcaaaatactcattgtagccgtacagttttcaaaagactttgaccttgcagcatcactgtagctatacagtttttatacactatacagatactaacaaaatgggtacacgctggtaaaaaaaatatttttaagtacaatacacctactagctattgcgtttttcccaggtgtaaatgtgatcttttaggctgtactatgctatcaattgtgcatccctatagccaaggtaggtttagttttggtgagttcaacaagctggccacgttagaatcagccgattcataaatcatagcccgcctaactctgtaatcctaatccgtgatcgtttcattcgacaacctgttcggttgatggtttttctagagctccctcgtcaaaggtcgtcctgatctgatctccatgcatatgctgcactgcagaccaagatttcacggagctcgtggccaaggtccct

SEQ ID NO: 36324 - DNA, 725 bp, Sorghum bicolor
  Intron number 2 from transcript Sb09g025110.2 (locus Sb09g 025110) derived from phytozome v7.0 (chr-ID chromosome_9; pos 54599386 to 54600110)
atattggagggcgcaaacaaatatagctgtgaaaggtatgctattctttatctaaaacaggacctatggttcccagaggaaggtctcatgtactgtcagaattttgaactgtttacttgttagggatgcaaaagcctttttagggtactttagggttgatcataatattttcagtggaatcaaaatcatgtaggaagtttcaccagccccttcttttgcaatctaattgtccctgtaggcaaatggtgcagtttccttagtctttaattccataggaatgtaaatgttagtctgaacctcttgaaattaccctacttggctacttttttagagaaggaaaagcttactattcctttcttgtgaaatttattatgtagtcattttcaccaaggcaaagataattctggtctctccagtttatgtctgcttattatggaacaaagttggtgtgacccaaccatggaccgtcgtgagttttccaaaactggtcaagacgccctataagctgtttcgaccctctttctgaattgaaattgtcaaaatgtaaagcagccaatgtaaacattagtatttgtttacagtatatgaaaaacttatttcgatatcgtctttgatgatgcgatgataacttcatgtgcttcttttcactcatccaaatgtgtttctcttgcattcccgatttttgtgttcgaatcaggctttgattatgattttggtaatggcag

SEQ ID NO: 36325 - DNA, 577 bp, Sorghum bicolor
  Intron number 3 from transcript Sb05g003900.1 (locus Sb05g 003900) derived from phytozome v7.0 (chr-ID chromosome_5; pos 4543432 to 4544008)
ccaagtctacagtctgtaccttagttttagctctggtaagttcattgctgtgtggactattggaagtttcgataaaagtctggtgtctgtatttagatgtattcagaacttaaaaactcaatagtgttctactgttctgtagaaagaatgcaagatgctatccatttctcccaaatttagttttttacccaaatattgatcatgctttatctgcaagcctttgtaggcattgagcatatcagcaatcatgaaacatgagaatttcttgatacaatggttttcttgttttgattcaaaattaatggtttttgtgttgcatatctttgtacatatgcacagacaagctttgtgttgagaaccacatcttctctcagcaaccttgataattcattcttagtttcttctgtatgtattcaccatgattttatagttgtcagagtaccaggctcagccttccatataaaaaaggagacagaaatacatgtttttcttgcttgtctacttgattaatattttattaccagcattgctatttgacatgttacattattcatctctacagctgtccctgccgaag

SEQ ID NO: 36326 - DNA, 749 bp, Sorghum bicolor
  Intron number 3 from transcript Sb09g023560.1 (locus Sb09g 023560) derived from phytozome v7.0 (chr-ID chromosome_9; pos 53195716 to 53196464 reverse strand)
atttcccgccggattaccccttcaaacctccaaaggttcgaactcatgagatttatcttgtttacaaattctctcttttattatccagctcagtgatggtgtattatgcgttcttccaagatttcttctgggtaaaaacttatgaacaaaatggttctctgattttcctccttatcctgctagtatcatcatgctgggggagacatcactcagcattatccattctgctatgtaatagcttcacctttctgttagtgcttttctctgtggtcaactgataatatggttgtagtttttcgttaactggcataaaaaacatcttttagtttttttcctggtaagtggtaatgcatcgaattctcgttgaagtatccctgttataccctttcaaagttgtagtttggaaatgtgttagtgatttgttacacctgaggctgtagtcttatgctccactcagattatctcaaaaaaaaagaacttttcatgttataacaatttttcaagaaaaacggtactattaagaatatcatgtactatatgtgtgtctgacatacccatcttcatggcctattaattatctgctttggcatattccatcattggctggacttctttatgtgccatcccagtctggaggttgctttacttatattatattgtttgaactttttcattttatttgatctttgttcattgttgccctgttccatttaggtttctttcaagacaaaggtcttccatcctaatat

SEQ ID NO: 36327 - DNA, 967 bp, Sorghum bicolor
  Intron number 3 from transcript Sb02g005750.1 (locus Sb02g 005750) derived from phytozome v7.0 (chr-ID chromosome_2; pos 6811236 to 6812202 reverse strand)
ttcctcaacaagcgccaggtaccccctcccgagtccccaatttctctccgttaattgtttctttaaaaaaacagttacacttacactgaaccagtcgatcttttttttttcttttgctcagtttagattttacatttcagtaatattcactcaaatcatcgtagcatgcacgatgaaatagcgtatatatgttcgtcaatcagtagccggtcggcccggcccggccaatgcagtgagacggatcctccaaaacttcaaactttaataaaactactcacttggtggctcaaaacctgcggccactgcaacacactgttccatggggcctcatcctcatcctctggaggcaacgatgatcactggatggagcagacgccatcttgctcatgacgtctcctgcgtgctgtggtccaagtgcaatcgagatcgcaaacctttccaggcgtttcaattcctctgatccccaatcccacagcacagacagagacagctattgcaaggtcaatgctagctcccagcagctgcattgcccccggccggcaaggcaacccgtaaacatccacgccggccggcgtcagtcgccggaccactggacctgaggcactgtgaccccgtacgtccccgcctctgtctccgtacgtgcagcagttactacaggttgcagggatcgatcagtattcagtagccatcgtggtccattgacgatggctgcagcctgcaggcagctgagctgatgcttcctggcacagcactcactactcgcacaatccgggaccagtttaggattttgcgtgctagtacaaattgctgagattgataatttcttgctgaattttgcaacgggtgacctgcatgcatgcatgcagatgcagatcaatttgtattgactgacagagtgacagtaatgtgttttctctcttcttgctttgcaggacccggtggtgagtaggattgaagagaggattgc

SEQ ID NO: 36328 - DNA, 769 bp, Sorghum bicolor
  Intron number 2 from transcript Sb06g022560.1 (locus Sb06g 022560) derived from phytozome v7.0 (chr-ID chromosome_6; pos 51763579 to 51764347 reverse strand)
gcgaggaggtggctgtcaaactggtatgccatgattctagtgcccactatccatgtctaggtgaacagttccgtgttaggagttaactctagttggagtaactggaatctgtagttagcctaatcgttgttactcaccttgcaaacattattgcatattaggagctgggcaattacagcacaagcattcctgtacagaaatgatgttatccagcgttgtctacgcctcttgcgacagaattgtcaacagtgggaccatttggatcctgaaataagcttcatccttgcgaaatgaatcatttgtagcacacaaatttattctggacaaaggtttgctcatttgagtcaatgagcctgtagcactcctctgaagtgagggtatcaatgctgaacagcagccactggaaactaaccacttgtttgttctgattggattattcttaaagttgggttttgcttcgttggagttacgttttctctttatacactaaactaaattagtgtgttagactgttagatgatggtgagtattgctccatggctgtaatgtcaacagtgacatatcaaaccatatttttggcactgatatgttcagtgcatcttcataattgctaggtggttgatcttttgtagaggaacctgatttgcggtcattgatattgtttgccttagttgctgttaggaatttaggtctgcttgctcacgttattttgtgtgtgtataacttcttattaggaatcggtcaaatcacgacatccacagcttcacta

SEQ ID NO: 36329 - DNA, 1010 bp, Sorghum bicolor
  Intron number 3 from transcript Sb03g029190.3 (locus Sb03g 029190) derived from phytozome v7.0 (chr-ID chromosome_3; pos 57331782 to 57332791)
tgttcgagccactcaaggcgcaccagtcacccaaggtatgacggatcgttcgtcggatcttcctcttggagctgcgaaatgctatttccctgtgattccgcgagttttgcgtcgaaatttttatttccaagccgtaccgcgtattctcggtgaatttggaattccgcggggattcgtcaacactccacaccttcttggtccacgtacgacagttcacatccgggccggccgggatcacgggtcccccgttgggatgttgccaataatgtgcttttttatgagaaaattaatgattgtagatatattgcatagatagatcatagatagatagagactactccctcgtttccaaaacaaaccaacctcccaaagtcaaactattttgaatttggtctaataatttatataaaaaaagtggaataatatttatgcctatttttttttatcaagagaatgatggtcaaagctaggaaaatatataacttagatatagaataacttaaatggacaaatgtatactcgcgatgacaggtacggtagcagcagcttctatctctcttgaatttcttccttgctcatgaagtaataaatactgattttgatatcgacgtatttaaggttggctgacgtttgccgttgaaaatggctagcgcgagctataatacacatacgtgccgatggcgcgaacacaaaaaagattccatacgttttccaagccatatgcgcgctgttttcaccctgtacgtcactcacccggcctgtagctttaccttttactagttcctactcccccagcttttttttttccctctctagagagcctgagagccgagaacaaaaggatcaaagagacacagctgttttttctccaaagtgtacaacagtagcagcttttttctttgattcttgtagtatcggaatcggaagagtacatacataccatactccaccggccaccagctagctgttgactgtttctctgaattattgggtgcatatgcatgcagtac

SEQ ID NO: 36330 - DNA, 676 bp, Sorghum bicolor
  Intron number 2 from transcript Sb02g040230.1 (locus Sb02g 040230) derived from phytozome v7.0 (chr-ID chromosome_2; pos 74236751 to 74237426 reverse strand)
cgttagagggtgcgcaagtttcagcagaggtacaggtacttgactatctagatgcaggagtccgtagtacagataaaaagccttaagaggtagcggcatatatatatatattttttgttcaaagtcggatcttttttcttcttcttttttgaacaaaatatggcctggagaaattatttgtgcctttgtatagtgtggctaagagcagaagttaacgacacatgcatggttcagggctagatgtctgaagctattacatgtgagtgcatagttgagttatatatctgaaagaaggtgatttgattcgaggtgatcatttgtgcattgatctttctgtcaaaactacaggttacgtactaaaaaaacagttaggtcaaacaatgatgtcatggtacaaagtaaaccattttctgagcatgattgaaagttgaaagagtaaaaccatgttcatgatttaggccctctttagagtcttactccaaacgttcagagaagcccgtgtgtgtgtgcgcttgtgtgagccatttcttagaccttgtttctctgttttttttaaaaaaaaaatctgtatagggttcctaatttctacagtacattacaaacgggccttgatgttacctgtcgtgcacaaaatattgcaggataactggagaagcaacgcggtggttgaagagat

SEQ ID NO: 36331 - DNA, 686 bp, Sorghum bicolor
  Intron number 1 from transcript Sb10g023360.1 (locus Sb10g 023360) derived from phytozome v7.0 (chr-ID chromosome_10; pos 51945141 to 51945826)
gccgtaaccgcgccactctgctgccgcccgacgaggtattctgccggacgcgctcgcgcgcgtgcttctcttccttcaattttcgctgcgctttgagcttgttcgtttgatgcgctttgagcttgttcgtttgatgcccagatctactgggtttgtcgtctatgtgtgatgcgctgagccgattcaagcactggatttcaaatcaagtgttgttttccgcctccgctacctttatttagtgtctatgtatgaacatggctgcagtttgcaactgatttgtcgagccataaattatataaccgttacgttgttctagactagatccagtttccgatctatgatattacgtggttgaggcacttcaattctgttttgtgtgtatgaactgagctgattcatgttctaaggtgctaatccaagttttccttccgccacctcatctacccgtagtatgtactccgtatataaacttgattgcagtttgcaactgattctcgtccatagattattacgttacgttgctaattagaaccagttttcgatctctgatattacgttggtagggtacatcccctttggattttctggggtttgtctaattactggtttattcccctatatttatttctaactgtttttatctgctattttttatgtaagcagcagcgtaacagtttcctgcagcc

SEQ ID NO: 36332 - DNA, 870 bp, Sorghum bicolor
  Intron number 1 from transcript Sb02g043680.1 (locus Sb02g 043680) derived from phytozome v7.0 (chr-ID chromosome_2; pos 77471682 to 77472551 reverse strand)
gtaccggggtaagtcctcacctccctgacccaccccatctccgctcaattcctagatccgccgcccgttcatgctccggatcacgaccgagtttctcgcgtactgccccagacacaatccgccgctgcttcggccactgattggggggaagccggttcgagagtcgatcgccggtgccggggcgggcgggaccggagtgcctggcacggctggacggaggctgggagccatgaaggactgaaaaaagcgagacacggttgtttgttggggcatcggtcgcggtagttaggcagcttaggggcgttagggcctgtttgcttggctgaaaagccatgactcaaagtactgttcgctgccgcaatcgtgaattgctattcacaaataatggcgtgctcggttgttttgacattgttcacaagacaaagcttaggttaaccccaagtacctgcaaactatattcaaaattgctggtgaaatctctagttgttgtgttgacagtgtgtttgtgttaagttcctttgtcttcattttttgttattttaaaaagcatatattgtttcatgcatttcagacctgttgtctgtacaactatgtaattgctagatatattgatgcacagaagaaaatgtcgattgagcctgagatttctagtacaagctaaattcccattatcctatattgccatgtacatgtgacatcctgctgaaattctggtggagctcaatctgttctcagttttcgccagtgccaaataatcatatgggaagatgcgaggcttgttgagtctccgataataatgatgaaatgacactgagccagattacaaagtggatcattcctttctctaatttgacaccttttgattgcagt

SEQ ID NO: 36333 - DNA, 733 bp, Sorghum bicolor
  Intron number 1 from transcript Sb04g022730.1 (locus Sb04g 022730) derived from phytozome v7.0 (chr-ID chromosome_4; pos 52321622 to 52322354)
aggccaagctacaccaggcgcatctccggaggcaggtgtgtttgtgttgtcccttctccctcacgtgacgtagaaattactgcttcattttgtcgctgttggatttgtcggtggattggttgagatgttgatgcgctttatttttttaaccgaaccccgatttgaatttcgtgttggttggtgtagttgggagcggggattttgtacatgtcttagtaatatcatgtagatcagaatgtgtcggtggatgctgaactctgcgttagcgtaggagtaattagcagtctaccacaccacacgtattagttgatcaaatccggagtagcatcatgcttgacttggagtgttacatttacctgccaattctatgaactctggaagctcacgcttggttaattaactactgcaagcccatttctatgttctcctagtttatagataaaactcaattaggtggattggtgaactcttcattagcttaggagcaaccagtcgtctaggacactgcacctgaccaccacattcaggagcagcatgacaattgacatgagaattgagatgtatctggaagcagctctatggacaaaggaagctcatgcttggctagttagctttctcagaatttaagttatgctggtacaaatgggttttcactatgtcctgtatcttactatcttatatgacttgctattctccagcaattccacgaagcattgtcctccaaagcaaggcg

SEQ ID NO: 36334 - DNA, 747 bp, Sorghum bicolor
  Intron number 1 from transcript Sb03g029270.1 (locus Sb03g 029270) derived from phytozome v7.0 (chr-ID chromosome_3; pos 57380792 to 57381538)
ggagcagcccggcgcccaagcatcaaaaggtgagtcaatctgaattctaacttctaagcaagttttcgcaaggcatcgttgagttcgcgaaaatttctggctttcactagcactttcgtttatatttaacaattattatttaattatagactaactaatcttaaaaaaattatctcgtaaattacagtcaaactgtataattatttttgtttttatctatatttaatgtttcataaatacatcaaagatttgatgtgatacggaattttgaaaaattttagaaactaaataaggccaaagggttgctcctcgaggctttcacagttagcacgataagacatttttttgtttgaaaaaaaaaactatgtagaaaaggatgcagataggaggcaggagcttattttaagacagaactttgtttgaaagatagaattaaataagataaagccaaaacacttaacctgtggccgtggcgctcgcatgtgtcgcttgcctttatgaaagaataaggtcttgtttcacctaaaaaaatccaaaactttacaaaattcgatgtgatgaaaaatttaaaaaaaaaattagtttttaagtgaactaaacaggaccaaaatcggggttggtactctcggtcttcaaccaaacacgcctctcgaaacaattgcggagtcgctttacctaccgtgcgttgtcttgccaacaatgacgtgtgccgcatgaatacaggtcaccctgtccggactcctgaac

SEQ ID NO: 36335 - DNA, 793 bp, Sorghum bicolor
  Intron number 2 from transcript Sb04g025090.1 (locus Sb04g 025090) derived from phytozome v7.0 (chr-ID chromosome_4; pos 54948048 to 54948840 reverse strand)
agaagtgagtggtttcttcttctgctcctgctgctcggagtggcttctttgccgtggctatatcgattatttatctggtaccgtatttgtgaacgcttttgtggtggtaatcatagctcaggttgtgcggttgtgccatgatcttttgcttgaaacgagtcaactttagtttgggtgctagacataggtggacggtggtataacttgcgacgggtcgcactggattgatgtgttatgggttatgatttagggcttctttggggtgagaataagttctattgaaaaaattcccccaattttttagagttgtctctaattgtgttcaacacttatgtccacactaatatatagttcatatctttgaggtggtttgcattccagagtatgccgttatcctccctgcatctacttttgcttattgtgtttctgttacatggtctagctagggttgaggaaggtagttagaggttctaaagaccaccacagttcagagttcatggttttgatgttcaatttaactaacatcagatgagtctatgcagtatgcactacatgaataaaactcagttaagtatagttcagtgtaaatgaggttagatttgacaacctgagtgtgaaggaagagcaagttaagataacaaactacactagaaattccaacaggacccctgaattttcatccttgcaaatatatttgtcttttcactgtgtataatgatgcaattttcaagtgagcttacaagtatgtgttttgttcttccaaaactgaactcctttttgtgaagaatcgctg

SEQ ID NO: 36336 - DNA, 1040 bp, Sorghum bicolor
  Intron number 1 from transcript Sb01g043540.1 (locus Sb01g 043540) derived from phytozome v7.0 (chr-ID chromosome_1; pos 66693011 to 66694050 reverse strand)
aagtcaggtgatccatcgcttcttttgcattcttttaccttgtttctttaatgctgcctttttgaatccgcatgtcgttcttagaatctgactgatttttatttatttatttatgtccattatagatgatctgagttatagcattgtccccatgaaatgcaatacagttataatattgtcattgagctttcagaacccataaaatgatatatttccctagtttatagtcttcagagtgttcatactatccaagatgttattatctatgtgttcttgttgaatccactcagatactctattattctaatacatacttgcatgatggatgtccaatatggtttccttcagccttggttacagaggaaactttacgcttttctaggttcatattaagatagatctgcatgacaccaaagagaaccatactttcaggaaaaaacctaatcataactacagaaagcaacaaatagaagacgaactcaaagcacggaactgattttaggatccttcatttagagtttcgtgtcaactttgtccatatactcgcttattcttgtaataaaggttctttttgcgttagcattctttatttatttattgctttgacaaatgcttggttggatacagcttttcagttcagaagcagtatagaatagcttcctcagtttagaaagccagatacttagcatcatatatactaacaaattactttaacaagaatgcaactcctttttcctttccctgaaattgtgtatagaatattaatgattgttttttcatatagcactgctgtactactgtatgtaccgtattttattttatcaatttaaccatgtctcttatggtgtacaatataaacaatcctaatgcacataggttctcaagaaaatcagattcgaatactaataatccaaagtctgtctttcaatctttaagcattgggtgttcttttgtattcctgttattctccactcctctactaatgagaactgcttatccttgcagtattgcggcatctgaattggtgagcgacatcactg

SEQ ID NO: 36337 - DNA, 975 bp, Sorghum bicolor
  Intron number 1 from transcript Sb01g041540.1 (locus Sb01g 041540) derived from phytozome v7.0 (chr-ID chromosome_1; pos 64845461 to 64846435 reverse strand)
agggggcgtgcaaccagtcccgggtcgccgagcaggtaatggtcatttcatctccctccggactcctcccatgtatgatctgttcctgttcgtcggagtagagaagatgtggaggcgggcgggatatgggggccaggactccaggaaatcagctggccgttttcctatggttgctgtccagtggatagcgcggttgcgtacgatgatagatcgccagttgtgacagttgtcgcgccagatttgtttatgcctcgacgccctgctcccgtggcgtgtgcgtgtgctcgtgattttttttatcctgtttgttgtggtgcgcatctgtggaaatggaccaaagaaaagaccctcccggcagttatctacgaatcacaggaacaggacatttgattttactcaatctgatgtgaagactgtaagctggtaaaagcagtagtaataggcagatttcgtgcagatgggaagggtcggggagaagctcgacatcgacttcgtcgtctccaccggggacaacttctacgacagccgtgtctaatacttctacgacaccgggctgcgtaagatcgacagccggtttatttgcatgagatcattcattgtgaacgcaggtgcgaattttttatatcttgttcaaaccagaaaaaaaaaagttaggtttctgatattctggctttctgagaatgaaggctaactctaacacgatcctttcagaaatcgcggatttcttttttatcgacaccaccccgtttcaactgaaatattggactcacccgaaagataatcattatgactggagaggagtagcacctcgagagaaatacattgccaacttgctgaaggtgcgtattatgaaaaattcatcaatgacaatgacagacagtgctaatatgtcatatagcaaaattaatgtattcctctttcacgaattatattcatctaggatttggataaggcgctgaagaaatcaactggaaa

SEQ ID NO: 36338 - DNA, 924 bp, Sorghum bicolor
  Intron number 2 from transcript Sb04g027500.1 (locus Sb04g 027500) derived from phytozome v7.0 (chr-ID chromosome_4; pos 57418797 to 57419720)
aggctggggtgagttattgccatctcttcagtttaacctatgctatttactagtaattacctatttgactttcaattctagtgaaggcatacccagaattactagtatagaactgaaccagtgacatttctgtcaacgaggtgccattctttggtacaaaatctaatgcttaaaagagtcacccactcttgctagtgctcttggtcagcaccctatgaatttgctggcttctgccacgattttctgcccactttgatttttttcaggattcaggacacctgtactttatagtggttccataaataagccttgtgatttccgttgagcatttcctttgggcttgatacttttccaagtattaaaatttctacttcactatttataatcataccatggtgcaattttaagcagatacttgttgttcagatattctatttatttgggaaacagtatttcattcataagttgtttccctgtctgatttatcagtttaagatgatccttttatatcatgattttttattcagcaacagttgtctgtcgtggtctttccacttggcagtaccttagaaatcttgcatgttgagtgggctggctggaaagtgccggtctatttctacttaatttgacttggaaactctacatgcccaatgtgctggaaagtgtatatcagagcttactactgtacttgcaaaagtatgttggcagcaggaccttaggatctccactatgatcctttatttagaacatatatattttttaaagatcatcatactacacacatttgggcatactatgtagatcactttatgctctgattggctagggtaagattttggataattgttatgtctgcagaaactcttcttgctgattgtgtttcttgctatgccattttcaggttaggacagtccttgacataga

SEQ ID NO: 36339 - DNA, 1014 bp, Sorghum bicolor
  Intron number 2 from transcript Sb01g032430.1 (locus Sb01g 032430) derived from phytozome v7.0 (chr-ID chromosome_1; pos 55323786 to 55324799)
gccagaacaccgggaacttccttacggtatgctagtttaccttctttcatttcacataagactttgttttacatatttgttgccatcatctgttgatatgcttagaaatgatgtcatagtttgtgagatgtttagatgaggtgtaatcatgttatgagaaagcagtatggtagtttgtgttgtgttgtcacataatgtatgtacttattctaacaacctgctagaattatgttgatggaaagacttccaatcacgtatattgctctttaaatcgtactgagtcttgattcttgtggggttgttgacctgttgtgctacatcctgaattcttgaatgtttggaccatcaatcatgagcaaggttttaaatagcgggctaaggtgtttagcagtctatgtctaaaacagctaatagcggagctaaatcgggctatagcgggatatagcggctaaattgtacataaacataaatagcggtaccctgcctcaaaaggctatagcggcagcaatagcgagagatttaaaactatgatcatgagccatgtaccattttatcgccaacactaaatgctaacaccttgttagtggcaaaaaatttaatgcccctaagaaaatagtcagaccatgtctttccataaaccattggctagaacctgctgaaccaaacattcccatagttgtgtcatgacacagaatctgattgggcaatacaagagtgcaaattaggaatcctcatcctcattccagggaatactgaattatgaatcctattgcagtttcattcaaaactacagattcatatatgaaacattgttgcaaactaaatatataacagagaaagcaggtgaacctggtttacctaatcactccccagaaaccaaaccttgtttcttcatttaccagttatgcaaatgcaaccgtgtcatactaattcttggacctggttaactgatagtgttgttatttgtgaatggttgcaggatcgtccttcgacgaaggtccacgctgctcctgg

SEQ ID NO: 36340 - DNA, 892 bp, Sorghum bicolor
  Intron number 1 from transcript Sb0067s002270.1 (locus Sb0 067s002270) derived from phytozome v7.0 (chr-ID super_67; pos 92349 to 93240 reverse strand)
cctcttgaggtaatgtctcttcttctgtaatgaaccctagttcattaggtgtaaacacttccgagaggatagccaggtgtagtcaactactaggggaggcattcaactataaattggaaagtcttaaattgattctttatcactttattgattccaaagggctggcaaggggccatatacaaaccttcactacctgactgtaactgtaagtctgtaacaacttgactagaaaactctagataagatgagagcctaacaaacaataggacatcctaactaatccgtcttaacctgactaatctcatgctgaagtaccgaggtactatttgtgtgccttaatagtaactctggcataccgttagcttgttataaacttagcactagggaaaaatacaaatttatgtattttttgatctgatcccacctgtgggctgcattttttttaaaaatattgagatttcttgttttattttcttattatcgagctatggaagtatggttttacatatttcaatttgatgactgttgtacggaatatcaaacacagtagtaaatgtggaggcacattataagggtgatgcatgtaagcttgaatatgatgcaaccacaggcatgaaacttgtattatatcgtgggtggtagttgaaccaaagtgtaaatacattagaatttatgtggatcatattactgatctcctaatctgactagttaattcaaatttaagtgttggttttctgatatttttcccatctcatcttacttttggtagttcaatttgtggtggttagtatgggaacatctaaactcgatttcaatcgacattagatcaatattgtttacatctattttatgggcagtgcactggagccagcttcgcttcggcaggctattt

SEQ ID NO: 36341 - DNA, 537 bp, Sorghum bicolor
  Intron number 2 from transcript Sb02g002780.1 (locus Sb02g 002780) derived from phytozome v7.0 (chr-ID chromosome_2; pos 2937144 to 2937680 reverse strand)
gcagcacggcctcatcaggaaccacgagcacggtggtaattagttatgctctgttcttaatttgttcccttcaaaaaataatcatgaggttgatgttggtgggactaattattggatttagtgggagtttcagttagtgcagttctatatttctacttgattttgtgagaaatataatgaaaatctgggtcaagtagaaagtaattggcgaaatcaaatgtgtttttagcagcatggttgccatgccctggaggggatcttcagtcaaccatgctgcacctgtccttgttcatgtttttatacataggattcccttcaatctaacatgaactgtggttggtgcacatgaattagcaaaaactgatagtatattatcattactaatgcacattaattcgcaggcctctgtgcccaattgtttgctgctattgctatccccaacctttgtatacaagcatctgtcacatgaatgacggatccaccttctgaaccttacctgtaggttttgcaagtaacttccctgttgattcagcaaga

SEQ ID NO: 36342 - DNA, 1049 bp, Sorghum bicolor
  Intron number 3 from transcript Sb09g028740.2 (locus Sb09g 028740) derived from phytozome v7.0 (chr-ID chromosome_9; pos 57582777 to 57583825)
caagtcagggcagtcaagcacttacaagaagaacggtttgactcttacttttttttttcttgttactgtatttttctcaattcagttattgtggactgagatctgccttgctctgtcatatgtttttctttcccaaatccgtgttctcgtccccatataacaccatatatgttgaaaatatacgtatataaatgtaaaaagctgaacttatatgtcggggagacggggatcataagttaaatgccttgtggacaaaaaagttccgagctaggagattaggtccaatccaccatacctagaacagacgcatggtcatgaattgaaatgctaaatttactctgtttgtggaaacacagattttcttttcagttctaatatcatgaatttccctttttatttttgctcatgtattgctaatagcttacaaatcctactttgtttatagtaggtctgctgcctgccctactttgttgttctagaatatttacgatgaaacagaaaatttataacaacatcaaaacaaaatctgtgttagcttggtataattgcaacatctatgaaaaggatgttaaaagcacctgatgtagatgtagtgcaaatttgtgtggatagcaatgtggaacacgattcaggaatgatgatgacagtttacagtatctgtcttttttgagcttgactcctcgaattcaatggaaacctagaagttggtatagtaataacttcagcgtgtgacactagcagaccttatgctggaaatagtcgccttatttttcttgtgctatggatattgaaaggtttgtctcttcttggaatgtatatggccttgttttatcatactgctcattttttttaaaaaaaaaaatcctttcagtcccaagaaaattgaggaattctggagatgaaacccaacatgagccactgagaatgtaaaattaaaaagaagataaaaagctcttcatattgggcatttatgtatgctatttgtttgcttctggacattgacatgttgtcttgcctcatctctccaggaaaacctgctgccattcaat

SEQ ID NO: 36343 - DNA, 783 bp, Sorghum bicolor
  Intron number 1 from transcript Sb01g015240.2 (locus Sb01g 015240) derived from phytozome v7.0 (chr-ID chromosome_1; pos 14742814 to 14743596)
cctcgcggccgcccccggctccgctcctccgctcggtaggtggggcttccttcgattctgccttagacttagagtagctcttgcgctcgccgtatctcgtgtggttgtcgctagaaccgtccctgattccattcccgtgatctggttttggtcatttgatggatttatatttgtttgttgcacctgtaggtgattattaggtgttatttgtgcgttttgatttaggtttcctttcccctgggacggatcagggcacatgtactgtggcgatgtagctgtttcaatagcgtagttgccaaacttttgtgtatgtgctatatgaacccgggaacccgctttgcagcagagatttgttccgtatttctgctgccagtagtcaccctacagctaaatcttttgatttctgaattctattggtcttttagatgtttctgacacccttttgaattgaaagcccatgcactctagccttcggcattgcatagttgcctatttcatttaggtgcgcgatgcactaggagtccaggatagaacccttgcagcaaacttttgcttgtgtttctgctgcttgtcaaatcctggtatttgtgtggctgtgaacttacctggtttcttctgcctatctaatcatgttattattgtgtccgcaaacttagccttgttgcttaatacattgtcacatatttatcaggttttgtcaaatgtacatatcatcaattctgattttctttctttggttcctgtaaaatatgcagttggtgaaggtttcttgaagttgagaag

SEQ ID NO: 36344 - DNA, 674 bp, Sorghum bicolor
  Intron number 1 from transcript Sb04g037140.1 (locus Sb04g 037140) derived from phytozome v7.0 (chr-ID chromosome_4; pos 66825934 to 66826607)
gaggtatcgcatcgcagacccctgctttcgattctgttcgctccttggagtcgattgtactagtgctggtgctcgaaatgcttcctgtagctattagttggttacgtttgtagccgtgatttcatcaaaaaaacgtttgtagccgtggggttttcagttaatattagttgtttgtgaagccggaaccttaattccattatctcaaaaaataattgttttgaattagcagaaacttttttttttggagggggggataaaattagcacaaactttgtgtagttgccataacccaggattagaaaataaaacgaatttgcggtggaccattatttatgatgatagtatttatgtacagtgtatagatagcacatcacgcaatttatttggttcagaaatcttcatgtgtcatctcacactgtccttatattaagatttaactactattttttttcaaaaaaaaactttatgttccaaatatcaaaagaggattattattggtcatattcataaagtgaagaaaagactaaagtataatagaagtatttgtcataagttccagaaacatttgttaccgtgagtattgaattaagttgtgtttaatatgtctagctaaatggacggtccacagtgattttggagaaccataagaattgctgttttgtttcatgttgcag

SEQ ID NO: 36345 - DNA, 957 bp, Sorghum bicolor
  Intron number 2 from transcript Sb01g039280.1 (locus Sb01g 039280) derived from phytozome v7.0 (chr-ID chromosome_1; pos 62707515 to 62708471 reverse strand)
ggagcgtcgaggaggtatgtattcttctcctgctttaaattctctctgtataatgtaatctctcataggttttcgaaaaaaacatataatctctcaaccataaatcaaaccgatctgtatgtagttaatacgatcggaaactagagaaaattagcatattattattcgtaaaatgaacttggggaatttaattcgttgtcagaatagctgcagcagtgttgcctttcaaacttaatttggacgatgtgacattcgttcggatgtgcaaaatatctaaaacctggttattttattattaggtcaaagatatatgctcagagatagtttgaacaatgttgccaagatgcttgaggtatcactaatatcatccccgatgacaccagaaccgcatgatgatttaacaacgagacagtacagtactagatgaagtgcagacatacatatgtatcgcaaaacaggactaaaagaatagtagcacacatgtttaaaaaaacacacagggcattgccttcagaatttagataataattctgacctacatccaagtagaaacaaagaataattgttactatcacacagttatgaggaattgaggatagtgcttgcctattgcctacccctgcacagctttgcatattattgcaacttaatttgctttcctgaaataaaaattttatggggccttccccccgttacagctgatcttctgtttgaagctgtatgtatgcctgtatatatatctcaaaatatatatcaatatagaagaatatacatctcaacatatatagatgactaataaattggatgagttatattgcattcttctactcaattgccaaaagatgatgttgattattgttcattgttgtgtggagtcatccagttaatttgtttccgtttaaagctgccgtgacacttaaccttctctcttctcccaagcaggttactaagcatctg

SEQ ID NO: 36346 - DNA, 850 bp, Sorghum bicolor
  Intron number 1 from transcript Sb01g045470.1 (locus Sb01g 045470) derived from phytozome v7.0 (chr-ID chromosome_1; pos 68565549 to 68566398)
agctatatcaagaccctcgcccaagtcgtagggaggtatatatggctggatccatttctctgtttagttgttgttggtgtgtttcctgctaggatacttgttggtgtgtttctgctaggattgataaaagtgttctgttgttgcgcatgaccataacagtgtatagtgtttaatttattggaattaggactggctggatatgttactaattgttcagaaattcagactgaatcttttggtattattggttctggcatgcggcctttgttgggttcatgttcaatattcatgttgaatgtataaaaaaggacggaagtgagagtatgcaggccaatgcatgcatgcagcatgcgtatcttggtaatttgagtagtaatccggcggagtactgaacaggcccctagacacaccagcccgccgcctattgtggccaaataaataaaccgcttgtatgctgcctatataggaacatagggagtactaactattagatggagagtccaaatggggctcgattaataggttaactactagtcccgctaaataaaaagctactagctgtcttccctctgctagctgctaactattggcgccaatggatccaaaaaagggcccaagccccaaaatgatcctctgctgtgatattttcagatttgttctttgatatgatccagttatggttcttttgtgcgtctagcacattagagctttggagtgctgatatatttctgcaagttttagttcatagaatgcagttctttttgctcattttttctctacaacgcctgcataaaaaaacaaactccttgtttcagtgaggaagaagctaggcaaaagatatattctgtat

SEQ ID NO: 36347 - DNA, 685 bp, Sorghum bicolor
  Intron number 1 from transcript Sb07g003700.1 (locus Sb07g 003700) derived from phytozome v7.0 (chr-ID chromosome_7; pos 4542090 to 4542774 reverse strand)
cctcgagatccagccatcggagctcgcattcccctgtaagtcctcccagatctcgtatcgagatcgagctgtttggatcatgttgggatgcagccgtgactgttcttttttttttatgggatcttggtcaaagctgggatcttggtagggaatcatggtcggcgatcctcactaggtggatttgcgacgccctagcctgcttggttcgtggagtgggttatagaatcatgtcttcttgtagtagtctcatcatgcgattgagtactagcatctgtataccgatctgttcgtctgctggggttcgagtgggctagatttgtttgtttcttggttcatgcttccagtgtgcattgtgtgtggtgagtcgtcgttttggtagttacttggcctttccgaggctttgggatcttgtagaaaagattgctttgtaactgtactggtgtgtgctgcttgttttcatgtggtagcgtgaaatgacatttgcctgtatatttgttttgacttgacattctggtcattgtctgcttgcttagcttgaaataactgcaatgtgttatttaccacttattccaagtgtgctctgtttgttgagttcgtttgccttaggtctttctgttgactatacattggattaaactgtcttgctatgtgcctgaactgcttctctgtacatgcagttgagata

SEQ ID NO: 36348 - DNA, 591 bp, Sorghum bicolor
  Intron number 2 from transcript Sb03g028460.1 (locus Sb03g 028460) derived from phytozome v7.0 (chr-ID chromosome_3; pos 56324132 to 56324722)
cgttcgacaccgagctaatccccgatgtgaggcccgtcatctgcactcttttttttttattttttttcatcatcagttgctgcttctgttttgctgacctcgcttgtttgggataaatcttattgttcgagaatgctgtcggcgtgctggatctgatgttgctgaagtgaacggggagggtcatgggatcggggaaaacgtcgctttagtttcgtttctgaattggccatcggcttcgataacacacattcttctcggtcttctaggcgtgctgatttttatgtacagaaactggaatgctaaacttatattttgttggtggaatcatggtcggttgttgagaggggacaccacattagtacatatgttgatttatcagtctgtttgaattgttaaacttaatctggtcctttagttcagaacatgcatcaacttttattcattgatgattcttcattctttctttaatcctaatcttgtgcccagaacatatggtgatgtagaaaaagaacattataatttccccactgacagttcttaacaacttaatctaaaattcgtatttcatgtatatagtttcaagtaccaggg

SEQ ID NO: 36349 - DNA, 446 bp, Sorghum bicolor
  Intron number 1 from transcript Sb04g020450.1 (locus Sb04g 020450) derived from phytozome v7.0 (chr-ID chromosome_4; pos 47722255 to 47722700 reverse strand)
ccccgaccgcatctcccgcgccgtcgccctccctggtacggcgtgccgaccccacctctagagtgatagaagtgcggagtggtttgggaagctgctgtcgattagtattgaaaggattcctcgatatttctctttaagttccacctaaggcagtattggaatttggaccagcttgggtgaacaatgggttcctgctcttgcgaatgcgttcttcttcctcggcgttcctaacttcctatatcattactttgtaacaaatttgagtgtagatttggtctacttgtgtgaccaaggcatatatgatgatgccctcgcctggtcattcatagggaaacactgaagtttgatcatgacgtcatttcaattcctttttgtcaacatataatataattcatattttcttttttttactaagtaataaactgtatttacaggtgtaagaactc

SEQ ID NO: 36350 - DNA, 973 bp, Sorghum bicolor
  Intron number 1 from transcript Sb01g048750.1 (locus Sb01g 048750) derived from phytozome v7.0 (chr-ID chromosome_1; pos 71723761 to 71724733)
gtcgagcaggtccatccctcccctcgctccccacactttccccttcgccgcgccccccctgctggaatcaatttaacctcgggggaattttaaaatactggagctgcaacagaaagatctctctttataatttgttcgcaatcagtcacgtgggatgatggtccaagaatattctttgacgtctctgtcatggtcgagaggattgtctgtgatgggaaatcatgcgtctcagtgtcccatctttgcttaagcttttgattgctgtggagaattagatagtatgggacatcgaggaaatcatgacccttttgatcaccaaattggctccacaaatggcctttttacatccacctaaaaacccaaaaattttcaagattatgtgtcacatcgaatctttagatgtatacacggagtattaaatatagacgaaaataaaaactaattgtaccgtttgatcggaatttacgagacaaatcttttgagcctagttagaccatggttagacaataattaatacaaacaaacgaaagtgctacagtgtcgcgaaatttttcgcttcacgaactaaacacggccaaagtctctttcggtgacagccattctgccacaaggaaaaactatacacgcctattgcttccttctttttattgaagacatgagtattgaagagctaatatttcccgacacaattttactgaatgaaaaaaaaactattcatcaaccattcctcattttttggttgagattgaagacggagagtattgaagagctaatatttcccagtacagttttactgaatgaaaaaaaaactcttcatcagccctttgtgtggtgaaaataccgagatgctaacattagatgtctgctgtcaagttgcttgagccgctccatttactgtctggcctgactttggaaagtgaatgctcaatactacctcttcttgttcttccagatcaaacgggagatttcgact

SEQ ID NO: 36351 - DNA, 995 bp, Sorghum bicolor
  Intron number 1 from transcript Sb03g032620.1 (locus Sb03g 032620) derived from phytozome v7.0 (chr-ID chromosome_3; pos 61041996 to 61042990 reverse strand)
gtgctggaggtacgtactacgtacgagtcgcctctgggctctgggtttggtcttggggagtttggtggtttcctctttcctgtgggtagttttatcaggatcacgcgtgcttgggtgctcatgtagtttacgacttatttagttaattttggtggtccgagctgtcgaaacaggagagtggagagttacctagtttgcacttccctcatttttttacagttaaatttatggctgaatcatgtgttccactttagagttgaatttattcgaacctttgatctgtttggaaggtagactaattctaggtggtactgtttgtgatttgtcgtgtgtcctaaggtcataaacggcccatgcttccacgatgaagaatatccacttaaattcaaattctagatacagatcttgaagtttacttggttactaaaaagaagtttatgcacctgaaatttggcatgatcgatttgatatccgtcgtgtaggatgcctattaattttattttgacgagtgaacatggcaatgttagggcttaactctgttatagacctaagacagtgcgcaatggcaactttggatgaaattactacgtactagtagtttacaatgattgcagggcataccagtagtgtttgaggggcaacagacgaggctctacattttagataagcactagttctttatcccaaaccagcatcgagattagtgtttagcagtacctaatcatcaataactgcttcagttaatcatatcttttagtttagcactatgttgtgatagtttacgaagtacactgtcagcttattttcaccataggttcttcaatcccggacattttcttgatggtagaaaggtgaaaaaactactgtgataattttactctgtcccactagcagacaaacaagttcgttcaatagcatatgccacttgtgtgctggtaaaaatcattgaacgttctgtttgacacctattctttttgaaggattgaagcaatctc

SEQ ID NO: 36352 - DNA, 615 bp, Sorghum bicolor
  Intron number 3 from transcript Sb01g001750.1 (locus Sb01g 001750) derived from phytozome v7.0 (chr-ID chromosome_1; pos 1527583 to 1528197)
tcctctcacggataggaccaactgaattcctcaaggtaatatttcttgattaggccactcggtacattatacagtctcaaatttatcttgtgcattttcttgattttctgcaagttggttcagtacccattggcatgtttgattcttgtctaattattttttttagcaaaaaatatagcaggggaggcccccactgtgagattttattaaattcttgtctaattagtaactattgggtatcctcataatcaattttttgtgcatgtacttataatgataataatgaagaagccaaagaagagttgtttatgaatgataaacagacatggctcaatttatgaccatttcaatattggacaaagggggtccttggatgatacctgattaccctgggatgttgtatgctacacagtgcatgcttagttgttgtgatcaaaagagggaaaaggggttttctgttgcaatagttggctaagatttttctggtgtatccagcacaaagcaatgctcttgcatatttaacaatgtctgttgttagcattttgtttatgttgggatgctccctctcttgattggatcctgagacctgacttgtaatccctgcaggaccttgag

SEQ ID NO: 36353 - DNA, 933 bp, Sorghum bicolor
  Intron number 1 from transcript Sb10g029520.1 (locus Sb10g 029520) derived from phytozome v7.0 (chr-ID chromosome_10; pos 59313542 to 59314474 reverse strand)
agaccgcgctcttctccaagaaggacaaggagaaggtataatatcctcttctgttcgtcccttgcatccattgctcgttgccattagcttaaggagctgcttatctgaatcctgtgttgtcgttgcctggtagcgatgctgtctattgcagtcacattcaatttagcataagagctatatgcctatataagtgaaataatgtcatgggtctggtttcacgtttttgtactagtataattgtgctatgatgctgacaatttagtaaacaattgccttaatgaagccttactgatgaaatagttccaatcaccactcacaattctgtgttcagaacctagcagaaacaccttattgatgtatttattatagagaaccataatgtggatgactggatgagtggatgttgtcttgtatttgttgtatagtcataatgcactccacacaataatggacactcatgtgcaaaccaaccttatagaaactttatctacctcatgctgttaatttctcctcagattcaaagtccatttgctcgttgacagcagcaccaagggtatggtattctacaatttgtatcctgcagataaatggtccatcttattaggtttctaccaaaataaaaaatgccagctgcccagctcacttactctccaactaaggtttccaaaaaaaatgttgccaaagaataaattcagttagttaaacaataaatggggaattttttttcttcgttcttgaaatgacgactgtcagtccctcggtctcactaataatgtggaacgtgctagctattcttacgtttcaagaaatgtaaacttcttttgttgtatttaagctgaataaacaactatagttatgtttcaatgctcatcctactgtttccactcactaagaattgatgtcatcagtatccaatttgttttgtaagttcag

SEQ ID NO: 36354 - DNA, 653 bp, Sorghum bicolor
  Intron number 1 from transcript Sb01g014480.1 (locus Sb01g 014480) derived from phytozome v7.0 (chr-ID chromosome_1; pos 13789488 to 13790140 reverse strand)
caaaggtggtggtgaccggccggccggcgaatgtatgtattgcatgcatcatatatcatacccccgatagattcgtctccttcctctcgtcctccttgcgatttcctgttcttctacttcttcccggctggcattgtaaatatgtaatgcgccggcaaaagtgtggtttcaatgcaatgtaattcgtctggattgctcccgtcgcgcaacgagatcaattgatagttagcttttttagaaaaaaaagattaattaatagttaagggtgatatactgtttcctttaatttggttttggtgctcctgtcctcactcaggatgcgattcgcgttcgggcgattcggatattactcaaatgctatcgattcctccggtcgatgctgccattgttggctaatgtatgaaccttctgctgctctgctgtttgtaagcggcgtcctaatactctttgagtaatcaactgatctgagacacccacctagtcacatagatagataatcttttcagaaaagatggggggtttcgccggaacaatttgagttgtgatagtgagttgctggcataactgataatctgatgatgacagcaaacatttttttttgtgtgtgtgtttgtgcagaacattgtgtgtgaagtctgtggagatattggttt

SEQ ID NO: 36355 - DNA, 992 bp, Sorghum bicolor
  Intron number 1 from transcript Sb01g010250.1 (locus Sb01g 010250) derived from phytozome v7.0 (chr-ID chromosome_1; pos 9090017 to 9091008 reverse strand)
tcaacctctggatcaagcgcgaggacctgcagccggtaattgatgacgatgcgcagcccttcgtttgcttacccccgtcacctttttttggttggccttgcgttcatggacgtggatatttgcgtacttttattccaaaaaaacagcatcatttcttggaaatgctggggttggatgtttcagctgctacttgtgtttgtgggatagatttgcactcgccaatgaccttgttcagtgtcatatctttgggatttgggggtttaccttagtactgtcgtgttatgttgttcaccgggttccaacgggatgctttggattcgcagaatcacggggataggtactcagacattccctttgattctccaccttggctttgatacgttcttgtcacgctttctccgagaatagacgttgcaggatagtttgcacttttgacttgttatttattatcgctaatactaggagtgctgaaaccttgaggtggctgtgtttttagcttacatactctgtgaaacttgattccacaagtctataggagcttattatcttagtctgtgaaacttgattccacaagtctataggagcttaatatctttttagaatctcaaagctcaacaagctagacttgtgagctgcagcatgattcagggtcttgagaattgtacctggtctgctatatttgttttttgtgtgttattagcaacagcaaaaaaccacaatgaaaggacgttatttgcatattctttggagaaggaggaacccttgtatgcatattaaagataaatttccctatctggtattttgccatacacacgttttatacataataaggttactaatttaattttgtttgactttatttagcgtttatatgtgctattccaaattcattgaaaactgctattctacttctatgttttctttactttcctcatattttgtttgcttggtgtacaggtgttctcattcaaattgcggggagcatacaacat

SEQ ID NO: 36356 - DNA, 796 bp, Sorghum bicolor
  Intron number 3 from transcript Sb03g035220.2 (locus Sb03g 035220) derived from phytozome v7.0 (chr-ID chromosome_3; pos 63375220 to 63376015 reverse strand)
ttgatcaataacccgtaagtattatgtgaaatccatatgatccgattgatttcgtgatcgtgcctctggggttgtgggattattgaactttcaggcttaaagctcctgtcctctgcccaagtgtggatttagtagtcactggatctaaaatctggataacgcgcctcttaatttgactactactttcattcacgaccagagtaattattgacttgccctctgtaattgtaggtgacctttctgttctatggtacttttttttttgtttctacactgttagttttaataaattttcttctacgatcggaactatattttttttccttgcgactgtgtctgctctgtcccactgccgtgtaagattctctttcgtagtcgaccttgcagttgtttctattgctttccctcctttcttttttgtggtacctgggaaattgacctcatttttgtctgtggggacaatggtttgtcgttcgcaagcactgcaatgctccctctggccctttttatagtattgtgttttgactatgtttgtggaaaacatctccaaataaggttattataaaaatagagttaacgagctatctaactagaatattaatatctccgtatatatttggctgtacgtttgacttttcgagaagggagagcagataaaatgtttcatgtgtatataagcctctgcatgtgacaaactgtcggagtggtagtttatgatatttgaagctgtattttaaacatgattttcttcctatttctaggtcacgtgtcaaggagtacctaccaatcaccggtt

SEQ ID NO: 36357 - DNA, 1017 bp, Sorghum bicolor
  Intron number 1 from transcript Sb10g003610.1 (locus Sb10g 003610) derived from phytozome v7.0 (chr-ID chromosome_10; pos 3150014 to 3151030 reverse strand)
cttcgggaccttcgccggtgacgagcacccaccaggtacgccagttgctttggatggccatctgtcttccgctcctaatgtaccgtgggagcccggccagctgcccagggtggccgggccttggctccgccggtgtttcggatggatgcttctgctgaatccgcccctgtgttggtctcttggaaaacgaattatgaacctagatccagatctctccgtcctacctcacagctttgcatagagcctaaacatgtgagataatccgagatccttatagctgagaatgtagtcttcgttagatgaatcaagtgttacaggagaagatataatatatgcttatgcttttatcttttattaggataataaaattgtattaacaaattcagtgacacatattgtgaatacatcttattggaagtatgttgcttagacagatcgtggctctttattttttttcgaataagggattttccccatttccattacgatgaacggaaatacatcaagttttaaggcctgagcatagtagcaaaaagagcagaaagaagttcagaagaaaacgtaatgctaggatttaacacttcatgccagattacaaccctgggattgataacagcaaccaacatgatcgaggctctttataaacaaaagaaaccatattggtttgtaagtgcattaatttactggttcatgaccaaattgaatcgttggacatgaactggaggatcagttatgcatttgctgcattagcaaaaagatattatgcaatttgcacaatgcgcactgatactgaattacattttgagcttggtgttctcctgtattgaagtccaaatcagagagatcttaatccgattgagaaattatccattcggaaaattgaactgtttaaatgcctatgagaagtgttctttgcccgagtatttatctgttactgttctacttatcaagtatcttacaggctctggatgtttctctgcagctgatacaggaaatttacttttatccatactccac

SEQ ID NO: 36358 - DNA, 794 bp, Sorghum bicolor
  Intron number 4 from transcript Sb06g006720.1 (locus Sb06g 006720) derived from phytozome v7.0 (chr-ID chromosome_6; pos 16140528 to 16141321)
aagaactatgtgagtcttcttcacaaacctttggcattctaaaatgtccagtaggctttgccaaagattaagaagggattcctgagttgagattacacactattggatcaataatacatcctgagtttaggttacactctattgaatcatatatgttcacaaagaaaatgaacaatggggactagctgcaaaaggcagatagtttttcatatgggcagaacagatgtaatagagcaaccatggtagcagcatactgtagttaattaatgcttggtcagcatctggttcgtgggaaatttgaattgttttacttcaaacaatctcgtagtgctggacaccttgttattcaagtttgacaaaacagtctggtgccacatgtttcaagttttgtggcgcgtctgtaattggtcttcactaggagttggtttattagcctctccttaacattttcttctcttaatgagatgacacgtagctttcctgtgttgtttgagaatttccttattcgttttatgctagatgctttcaacagtttcatttgttctgactttacagtgcacaatatagttgactgctttccaatcggttgttcgattgcattttttctagaaataagttcaatttctttttgaagccagaacaaccattgcttttcatgttttactttcttttaaggaatccttgtctttcttgatgtttagttctcccttactgtgctagcatagtgacgttctaatatatgctattttttgtcaccaggtgaatttgtagataaagttgtctcaaaatctcca

SEQ ID NO: 36359 - DNA, 784 bp, Sorghum bicolor
  Intron number 5 from transcript Sb03g042790.1 (locus Sb03g 042790) derived from phytozome v7.0 (chr-ID chromosome_3; pos 70183431 to 70184214 reverse strand)
atactgcaaacaatcctgtggtaagatgttgtgctgctgttctcaccagtcaccaggagagtactagttaaaaactagataataatatttgctttccttgttactgggttagtttccttgtaggtagatatgtactccatccgttcgaaattgtaggttgttttggcttttgtagatacatattcttttactttatatctagacataacatatatctaggtgcacagcaaaatcaatgtacctacaaacaacctataatttggtatcaagtgagtattatactacggacaggcagacaagtttatatagctcacatattattccttagggctcaagttgagtagtcctgatcagtgaccttgtatccattatgaataatgctaaaatttgaattgttcttctctctaccaaaagttacttaaagtcgtacactcataggagtagactctagagtctatttgccaaggatcatctggtattatgttgtatggtagttattcctttaagggctaatgttcacaatacagtaccatttttccctttttttttctctacgtaagctagcacagatgcgttctatggtcagtaatgtgatgttaatgggttgcactcgttgagttttttcagattgcaagtttagtgctgcagtgatcatgccattaacttgctacaaaacagtgttactctgaagtaaacaaatttgtgcaccagtgcttggatacatgatttaattgtttaaaatgatgctttaataattgcactattgcagacagttttgattgga

SEQ ID NO: 36360 - DNA, 1002 bp, Sorghum bicolor
  Intron number 4 from transcript Sb03g009000.1 (locus Sb03g 009000) derived from phytozome v7.0 (chr-ID chromosome_3; pos 9787037 to 9788038)
aaattgatgtatgtgttgctacccttgtgctctcaacattttcagattgttttatatccatttctgattcattgtgctagatgagcactgttgctatccttctattgctctcagcactttcaggttttgtcatatccatttctgattcattgttaaaaggttcctaaaatgctagattgattaaggggaaggatgttgtctagcttcttatgggcacatactacaggcgtagcatcaaataactgaataacttatactacctgtgtcctgaaatgtaaaggcttttgagtatccccgtctactttcagattttgttattatatccatttctgaattcttattcattatcagaagtttccagaaatgctggaccagcactgttggtaccctttttattgctcccagcgctttaagattttgttgttgttcatttctgattcattgccaaaagtttctgaaaatgctagatggggtaaggggacgcagggtttgtttagcttcgtttgcgcagataatgcaggccacatcaaataactaaataacttataacaaactccaggattcttctctctttggagtttaatgatacaaattggttattttaggatcagataacctagcagtgtccatggcacaaaataattttgagatattttttgttctcttcttttgatgaaaggcagaacaaaatttattaagtttacagtcaaccttttctttgaagcttttaggtgatttttagtatctataattctatataatagaacacacagtttttgaagcttgtaacatcacccagatggtgtgtttttaagggttcttgctccatttttcatacttaatataaacacagctctcctgcgtgtttgagaaaaaaaaaatcacccagatgatggggaatacttgatggaatgcctttagtatttgctgttgcatactcttccatccttttttttttcagtaccttgagttgtacttacacattcctgcaattcatagaat

SEQ ID NO: 36361 - DNA, 593 bp, Sorghum bicolor
  Intron number 2 from transcript Sb03g037470.1 (locus Sb03g 037470) derived from phytozome v7.0 (chr-ID chromosome_3; pos 65400136 to 65400728 reverse strand)
agggtctatctggcgcttccaagctttctgaagaggtgttttgctcagtttgcctctacttacttttgtcaatggtatctcataggaaatcaaactcaaagatgaaagctgttgtcatcagcaactatattgttattggagattctgcagtagtacctctcatgttaatgatgttgattatggttaaaacattgccatttagtgaaatggtaacaggattatgattcagattgtgttcaagttaagttgacactcgttctcatatagtatctgtggcttgctgcagagctcagtttattacttatttttttctcaatctttatttcttgttaagtacttgccgctttgactttctttcctgaaactgctctgcagaagcatatcgataagaagaaaatatataaacacatgggaagtgaaatgcacagttctatgagctgcggcgatttttagcatcttactttgatagtggataactctaatgaatatcagtttctactgttacacaactcccattagaatgcgattccattctgaagttgttgcctcatgtttcaggctaagcgtcgagaagccgcttcattagacaggca

SEQ ID NO: 36362 - DNA, 479 bp, Sorghum bicolor
  Intron number 5 from transcript Sb01g001100.1 (locus Sb01g 001100) derived from phytozome v7.0 (chr-ID chromosome_1; pos 997991 to 998469 reverse strand)
ttctgcctgggatcatcaaccaacttggtatgttacactctgtaccctaatgtttaggttgttatccaaaaaatggttatcctgtaacgtatttgaggatttgtggttacacttgattaggcaagttgtgctcatctaactcctcgtcatcatttaatgtcctggtctttttctaatgttatcagaaatacttgttgctgcatcccatcatttcctgtttgatcttttcttgcattctctcgatggttagcacttctagacacatgagaatggatacatacactttgcatattttatctgttgcctttatgttcagcagctagagtttctgttctgcctgccctgttcctttctgtgtttcaatcaaatataaaaagcaacaagtgtgaagcaaacagacgcttgtagccaggttactaaggatatgaaagagatagttaaacactgttttttttttcattcttccaggcccggacaac

SEQ ID NO: 36363 - DNA, 1003 bp, Sorghum bicolor
  Intron number 3 from transcript Sb01g015195.1 (locus Sb01g 015195) derived from phytozome v7.0 (chr-ID chromosome_1; pos 14693598 to 14694600)
tgaacaggagaaagacaggacagtaaatcctaaaaggaggtaaatttaatatatatttctcgacttctggtgtttgaacctaaattttatatttcttatttggtcacatggagtaaattgaattgcagtgtcaaggttttccggtgccagctgcccaaggacaatgcattttatcaacttgaagaacctgaggggtgcggtgaaaccttcgaatcacagtgtgaaggaggtagtttgctgcttcagttttttttttctgtgcattgtcttctcatttagtcacagtatgtttgtatagcatctatcattttgggatgtaaaggtaagattcctcttgtcagtgtagtgcattacagttatatagctcttgcatatatggttgtaaaatggagaaagtattcatgagttttgtgctactgcccacatgtttcagtgtacatgctcagcccatgtccttgttttgaactctctaattttgttccctcaaaattttccagacagctgctaagattaaccacattttcatatttcttttaagaaaacaaatttgcttgttgattgactgagaatttcatttatttttatttgtgaaaaacagattaaaaggaccctcctgctaatattcatagatcgtatcattcataaaaggatagtcatgcgttttgcacacatgacggaaagtgtgacaataattttctagtaccttactactttagcgattccgtgtgtgccaacataactcctaagtcgaattagtattctcgtagtaaattgtaagcaattgaatcatatcttttaaatgtttatattaggaatgcgacctcaactatgccattggtgtggtatgtggaaaggtgaaaaatggtgtggccgttgtaggagagcatactattgttccaagaagcatcaggtatacactaatcaggcaatcacagtgttgttctaaactggtctatttacatctcctggataattagaaatcactgttttgagaatcacataa

SEQ ID NO: 36364 - DNA, 1036 bp, Sorghum bicolor
  Intron number 1 from transcript Sb01g037050.4 (locus Sb01g 037050) derived from phytozome v7.0 (chr-ID chromosome_1; pos 60600078 to 60601113)
gatccatccggacctggttcgatttcttcatttcggtaagtaaccctagcttgctgggttgattcttttatgtaactcttctaagagcttcttttgcttgctgaagggaaggattccgagtgtttagttagttgcggatttgttgtctgagagcagtagtagcctagcgttataatctatccatgcacggttcgattaggttcttctattccagagcgaaagatcaacctcagttggcacaacatgacgatttcgtggtagccgaggtgcgcgggcatttatttttctgaaatacggagtaatttggaattgaatccccgtaccccacgtctgagacgtcccctgtgccactgtgttgctctgctgtcctcgtttcgtacttgctttggaaagcttggcgctgctattaaggcaatatcatttgggaaggcgtttcatcacttcggctttccgttacgagttgagttattgaaagctgctctgtctacctccttcgaacctgcatgagctcctccctcaccgacccttgttctcttgatcacctgtattctatgcttcccctaatttattcgcactttgtgatcttgtacatttctcgtgtgagtgaatgggttattgccaaatctactgtagctacactcatcgatgcttgggctcgtggttttgaatttttaggttggtttttgcttccacaaagctaagcaagttggggcataatcacatgagctgggaaatttaggactatgcctagtaatgggttattgccaaatctactgtagctacactcatcgatgcttgggctcgtggttttgaatttttaggttggtttttgcttccacaaagctaagcaagctggggcataatcacatgagctgggaaatttaggactatgcctagtaattaacgtctggaactaaaaaaatcattcttgctgttttgcatacctagcgtccaaatgatgtgttgctgtattgattgtctttggaattatgagctgctattgacaggaggtgtcattagggaaggtgtcgccacc

SEQ ID NO: 36365 - DNA, 1047 bp, Sorghum bicolor
  Intron number 2 from transcript Sb02g026930.3 (locus Sb02g 026930) derived from phytozome v7.0 (chr-ID chromosome_2; pos 62163101 to 62164147 reverse strand)
cgcgctgctgctctgcggcttggaggatctagccggtgagtcgagtcggtcccgtgtataatttctgcagccttttcagtttggatgagcgatcaggtcacgcaacctgttcgtcttcatgcttccattccatccatcgtcttcggcgcaactcccccgaatccttatctaaacttttatctgaacttttgggcggggtggaactccaattgcctgtagcttggtcggtttgattgatgtacgtacgtttctatgggctaagctagcctcctcggtggctgtagtctgtagctttgcttggtgaattgtgatgtgcaagaaatgagatccgaattgggaaaattgtatttctggggggcgtttagcttagtcaactagttggttctgcaatttaggtcaacgttccacttccttacgatttggttttggagttgaatttgcaatagcctgtagttcactgttgtcggatggaaacactaatggtagatggatatatttgtcttaccctgtgtggattgacatattgtaagtgctcgttaagttggtgtttggtacagatggacttgattttttttattatatatgtactcacgatcggttccaatttaagcttatcctaaaacatctctttcacataactatatatttagtattatcagctagttagtggttttctgctcgtgccatgagatagttggtgaatgatgaattagaacaaaagtccgtgaggcactgacattcaagaagaaatgctaacatgttttgggggtttcacatccagtttacaacaactgtctgtagaccatgaattacgttttgtcaaagtcatatttgtagagtgttgtgatctccagatattagataaacttacatggattttgccagtcaggattttccattttcttgtatgctgaataaacttactaccagaaaaacatcgctgtgatcctccagaggtcaccctggcctccagtccacctaaaatatttgggcagaaaattatttaataagattttcttttacaggagagagttattatctgtcaca

SEQ ID NO: 36366 - DNA, 945 bp, Sorghum bicolor
  Intron number 1 from transcript Sb06g017570.1 (locus Sb06g 017570) derived from phytozome v7.0 (chr-ID chromosome_6; pos 46987430 to 46988374 reverse strand)
gccaacgtctgccccatcgagagcctcgactacgagtacgctctccacataaaccgcctcctctgtttctccccctccgtggctccgttgcttgatactgtcaacttcccaaaagctttctgttctgattcggcgaaaatgtttgatctctactgttttctcgtggtgattgcgacggaagatcgttgggtttttccccccaaaaggacggcaagagcaagatcatgttattacttattagtttatttgttattgtttggcatgccttaccagaaagctaggatcttgtgatgcgtttggaagacgaaaaagttatcctgattgattattgttcaataaggcgttaacattcgtgtgcctttttgccattgaattttgtggttaattgttcatacactatacagcaatactgcatcgacaatgtcatgttctgatcgttcgtgtacttaattgtggttgaatgaggctaattagtagattccatggaattttttaatggtcggatgccaggatcttccgttgttgacattatgtacatagtttaatcgaacactttttataaagtatcaaatctagaataagaaataaaccttaattatttgggatctgaaccatgcactgatctgatgccgtttgagtttcgacaaatggaacaacacacacgaagcactgtgcttctatcttgtagtatgaataaatactgatgcagttaaatttcttaaatggggctgtagcatgccaaaagtaggataccaaccaacaaactgagaagaagctgactgcaaaattcttcagtgtaaactgaatgataataatatctggcagatgtaaattgctgactgtatactccttagaaatagaaaatatgcacagtttatcaggcttgctatgctacttcccgacctaccatcaaaatttttattgcatgtttcagaattgtggaaa

SEQ ID NO: 36367 - DNA, 551 bp, Sorghum bicolor
  Intron number 1 from transcript Sb03g041860.1 (locus Sb03g 041860) derived from phytozome v7.0 (chr-ID chromosome_3; pos 69307741 to 69308291 reverse strand)
tacgactactgctcccccaagacatcgtgcgtgccgttacctactacctgtttttcttccagtatctgattatcttttcactgtgccttagcatattgttctagttttttgccgggactggagaaaggttctattttttttagtctgctactgttgcattttagttggatttggatactgttatactttccgttactgtagcaagtatgcaatttaaagttgttttgaattggggaagagacagcataattaggtaaaggataagatttttggcggtactgctacttttcttatctatttgtcatgaacgagcttgtataagtcttaagatttttgcctgaatggtttcttgtccatttaaagtatacttttctatttgtataggttaaccacctgtggtgctctttactaaaatcgttatggcttgcgttattttgattcacttggtttctgttgagccgacacactagcaaatatccatccctgtatatgtgatatccttttggtatgtcataggctatcaaaaatcttggagaagtaccagaccaact

SEQ ID NO: 36368 - DNA, 943 bp, Sorghum bicolor
  Intron number 2 from transcript Sb03g028730.1 (locus Sb03g 028730) derived from phytozome v7.0 (chr-ID chromosome_3; pos 56771623 to 56772565)
cactgccattgttgtcctatagtccaagatcagtaattaacctttattttcctttcagaaggttcctgaggacagcagcatagttgcatcgctaaagtttagttctctctccatagtggcttctgcttcctgggagcaagttatctgagtaactgagttcttactctagtctcaaaaatggaagaagaatggaaaaagaaaacacaaaccagccttgacacaacaccatgcatagtaataataattattatcaaccaaccacaaagcccagttcttgagctttgtattggttccagctaataccaaagcagctgtgtttagattctcaaacaacttccctcaatcaaatcattttggatttagttctcttagattttctttctatgagtatttaataaactatatcgtgaaaagcttcagtaatttttagaattatttttgctggtaaagaaaagttgaaactcataaaaaaccacattttaaattttgaaatgcgctgtttgacaaatattatatttggaaataacaaaagcattaggatgaggtaggacaaagccaattacagtcttcagttcttaaactcgcaatgctctaacaagcactgagatttgtcagaccagtatttgtgattgcaaattataaaactctgctctataactaactctgcaactcaaatagtttggtaataatggtctgatttgtcataatgcagctgctagtgctctcgattatcaagctgtgagcgctctgcttagaaacaatagtgtatcagtagaagtgagtgggacgatctttcttagcatggatgcatcatcatgtaatttcctacagaactgcatctttgtttcattgtgttttgagatgttatgcaatattgaatactaaacctattacaaaatatttttcaggttcctatacaagtaccatcgtcatcagaccttga

SEQ ID NO: 36369 - DNA, 584 bp, Sorghum bicolor
  Intron number 3 from transcript Sb10g025220.1 (locus Sb10g 025220) derived from phytozome v7.0 (chr-ID chromosome_10; pos 54424208 to 54424791 reverse strand)
agtggccatccaaatactctaaattctttgctgaggtaatgatcccaaacatattgtcacatcaattttgttttgtagcatgacactcacgctcttgttggttatatgttacttttgcaactggggattgtatagactgataaaatgttatgtccagtgttacaacttatcaagtttaaatcaacattgaatccttgttcttgcacactattattgattaggacattacactcaaaaagtaagaaatgtattccagttaacttagtaaaaaaatacatcttcagatgagccagtaactaatcattcaacaaaaccacatggacagtgggtgtggatgccccccacttgctaattaggatatagaaagaaacttggggaacagattgtattgttcattaatcacagtttgatctctgatggctcgtctaatggttgttcagttcaaagagtcaaatgcacatttggtatgaacctcattccagtttcatacttgcccatttttgtgtaaattttaaaaattggcttgtgggatgttggttttgaacctcgttatttctaaactcttttgcttcatttgtagcttg

SEQ ID NO: 36370 - DNA, 1016 bp, Sorghum bicolor
  Intron number 1 from transcript Sb07g004660.1 (locus Sb07g 004660) derived from phytozome v7.0 (chr-ID chromosome_7; pos 6058352 to 6059367 reverse strand)
taattgcgcaggcatctccaattgaaggtcagttcattctttttctctttttaatttttgatgagatttaagaaagttatttttatctgtaagaaaatttcagttggaatatttgtatatatctaagtaactgaaacatttatcaaaaaaatctaaataactgaaacaatatggttctagaatttttttgggcaaatttgttcactttaaaaaagttaacaaaaggccacctcttccaaatagactaaaatcatgttggaaaaacatagtaacaaaagaccttacatatgttgtctatttatctaaataaataaatatatatatatggttatactttttctatatactactgtaatggtattataataatatataaaatctaggctcctttgcaaaaacatattaggatttttagtatcataaatatatgtgtatatagatgtactcaaactgataaataagtgtacattgtgcgtaatacaatttattgaagatatagaagtaattactcttagggagtacgaaaaatgcacactataggtgtgctttgtttttctccttgcagggcccttgcaacaaaacaaacaaatatggtaaattgacataatatataattttcagtgatcagatcctacataagatatgctatcctataccttgttcgtttggctgataaactatgacagaaattactgttgattgatttgttgtgagaaaaaaaaacactgctcatatgcacacaatgtcaatgctatattgccatgtttctactactctctctgtccttgtctaattataaataaagaatattaatgttataaataattatcattaaatttgtcatgagatatattttcataatgtacttattaggtgtcataaaaataatatatttattatctatctatatatattttggtagatacgttagctaaaagcgtgcctagaattgcattctttcttgtacagacatagtattttgaataactggttttctattcatgcaggtgtggagc

SEQ ID NO: 36371 - DNA, 732 bp, Sorghum bicolor
  Intron number 1 from transcript Sb10g008370.2 (locus Sb10g 008370) derived from phytozome v7.0 (chr-ID chromosome_10; pos 8545078 to 8545809)
gactgtccttgccataggcaccgagtgtgacattggtatgcttcactcgactctagcctcattttagcccgtgaaatattgcaaaatcgacgtaccttggtagtgtgaactagttgtagttgtacttgcaataatccaagcttaatgcttgcgatgtctgacaaaatgacagtatcctgtagatgtaaggcctgtaacgtaggagctctttgattgctatccaccttcaagtgcatgttgaatttaagatatctcaatgacttcttcattttcatattggaatatcattatctgcttttccttcttataatgatgatgttggaatagagaatgaagtcgtgcactgttaacttcttatgcctattgcaatctgagagatgtacatgcctcgtttcttggtctttgttcatatagaattgcatgctactaggggcaagcctaagcagaacagatcacatggaaaagtgtgtgttaaaaaatataataaaatattgtaatagttctggtaggataagaagattatagagaaaatccaccaaagctcgtttgtatgcaccctcaattccaagaccttaatatactgttatgaagctgttttggtcaactaactagattggatcaaatgttcaagtaacgcttcatagaaaaattgcagcttctctgacaaataaagtcccaagaagtgatttttcttgtttaattttaaccgcaagggagctttccatttcagca

SEQ ID NO: 36372 - DNA, 1002 bp, Sorghum bicolor
  Intron number 3 from transcript Sb03g013580.1 (locus Sb03g 013580) derived from phytozome v7.0 (chr-ID chromosome_3; pos 17144019 to 17145020)
tcactgacctggtatgcttattttgcgtttctatgattctaccttctgtgctatgtctgctcagatgctacgtgtactgattgtaaggctatgtgaatggaaagaaaaaaaaaaggattgacccttaatgattctgaatgttaaatgttattcctatttcaacattcaacaattatttatcttcttgaactcagtgttctggtgttcttgaaagacaaattttgaaccattgtgtttacctcaactgatagctttgcccatgtcattatgggctatgtttttttttgggtgctgttcatatgcagtgtgcccattttttacaatatctaaagcttatgctagtttcctaatgtaaattaactttgtaggttctcagtgtgtcgctgggtaccaagtttcgactaatctatgttgtgcccactgtgcacgtttatctcagaaattatatctttcaacattaaactttggtagttgctgttgctgcgcattgtgcttaagattggaatttatactacacatgaatttgttcacatcaagcagttgaatcagggctttgttgaatgtttcggaaccttgtttcaccaacttctattaaagtttatttgtttcaaatgaggccctgatttgtccatttgattacttgcattatgtcacatggagccctgatttgtctatttgatttttttgcaatatgcattatgtttattcatgcatgatttgggcgtatggaaattataggcactttagttaacacctgagctgttccccccatttaccgtccatacacccccacttacttttgactattgagcaaattcatgtgcttcaaattatgtgttggaaataactattatgtagtagctgaccactgtgcgagtgttcctgtgagtcactagatggataaaatcacagacatatctggcatatagtttatactgttatttgcaccttcatcattcagtggattcataatgccccttcctcaggtgcacaaggcgcaga

SEQ ID NO: 36373 - DNA, 892 bp, Sorghum bicolor
  Intron number 2 from transcript Sb08g022760.2 (locus Sb08g 022760) derived from phytozome v7.0 (chr-ID chromosome_8; pos 54837405 to 54838296)
tcgagctctccactgtcatccccggcctcaagaaggttattattagctagctcaccatatattagatctttctttcttaattttcatgactgatttattagcttccatgagatatatccttatctcacttctaatctcatcttaattatccccctctcctccttcctatttttcatctttaatttcatgcttgtttttaaccatcatcaaggacatctcttccttctctttgacccttggtagatcttgtgctgactatattcaccaagactgcatgtatatcatctcaagtaaatcagtgtaactactgagcattcattaagtttacacagactatatatctggccaagattatttcttgcaaattaggttcttcgcgaccaaaagtgtgagcatagcatatattcttggctagccttccaataatacatgataggagtagtactagtttctagaataataaattataaaacatatcaaaacatgctagaaaatattgagctacagaaactaaacaacccacagtgtttaaaaggtgcacactttgaaagctcctataacctgctaagctttatttgctagccgcaatatatacccatgcatcgaatcatctagaacgaaaaacattatatacatatttaatttgcaattacaagagggcattaggatgatcacttctgattaataacatttagtttgtgtgtctgtcttgctcaaacctgtattaaagatactgatgattattacaattgagttgtatgcatcgatcaacatcatccgcctgcctgcattgaacatattattgagttcatgaggagaagaaataaagggtgcaatatgcatttactccaatcattgcatcatgatgacatgatcgagcttttgcttgcag

SEQ ID NO: 36374 - DNA, 828 bp, Sorghum bicolor
  Intron number 2 from transcript Sb01g020910.1 (locus Sb01g 020910) derived from phytozome v7.0 (chr-ID chromosome_1; pos 23941667 to 23942494 reverse strand)
tgcagctcttccgcggcgacaccgtcctcctcaaggtctgatatggctaatctgaccttgttgcagcagttttgggatgttgagctgattttagcagattgtgtattatcacgtgactgatctctgtgtcacctacccgaatacacagcagatctgttagaaataaccttgctttatcatgtgaagtacttgctgaattgtttaacgttgtaatttgttgtattgtttgggaatttgagtatgccgagggtttggatccctctgttttgctgctgtagtgtgtacattttagaattttgcaatttgcattggtacaccattgattcagttgaaggtaatagtaatctagatttcttttattgcttggtaacgaactttaatatacttgttagtttattatgttcaaatatattcatacgtcttttctagatgtaaatgcaaccactccgtttgcattaatatctcattgttcatcgttagaacagggaatcaacactatttagtattattcagatttgtgttcattgttctgttagatggagatgatgtgctgcatacagaattgttattttgtgattcttagcatgataatttggatgtgatgcctgtactagaaattctagtgtacaggggactgagcaatttgatatgtattggcctatatcttttttaagtctctttattatgccaaagcagctagtttttgtgttatggcgggtgacaatttgttagcgaactttgtggttactgtttgtctatggatctatttctcaccttatgttttgtcttacagggtaagaagaggaaagacactatttgcattgtcct

SEQ ID NO: 36375 - DNA, 572 bp, Sorghum bicolor
  Intron number 2 from transcript Sb10g012750.1 (locus Sb10g 012750) derived from phytozome v7.0 (chr-ID chromosome_10; pos 19400075 to 19400646)
gacgctagcatcataacagagcatcctgtagtaaggtacattcatcttcaagatgggcattttatattatcagtatatttgtgcaattttttttcttacaacttaagtttgtaatttcaaatgctatattttcccatccattttttggtccagcatgtatacactaatttagctcatgaaaaagtaaaacctatctgcatatcgtgttttttgagaaattgacgtatccccatatccatatccttccaataccgatatgcttatccgtaaccatgctgcttaagctgtctgagttcacaacacaagtgtttgattctgggcagcaagtcattgatccaatgcacgaaattcgtgtaatcttcttgattcgtgtaatctgcctgtaactccactgggattgcgagatatcgcacatgatgattgtaaccctgctcatgagtaatataagctctggtgatcctccaaaaaaaaattcgtgtaatcttcttgattgaagcatatctctttcaatgcatttaatgtgtgcatgggatgcagggttggcattgtcttcagtgggaggcaatccccag

SEQ ID NO: 36376 - DNA, 473 bp, Sorghum bicolor
  Intron number 1 from transcript Sb09g026420.1 (locus Sb09g 026420) derived from phytozome v7.0 (chr-ID chromosome_9; pos 55698961 to 55699433 reverse strand)
ctccttggcctcgcggcggtccaagaaacccaagtgtatgcggttgctatccttcctcctctgtatttatttcttcttcaatttgatctgtcgctgtcatggtaaccggttgttaccatttgcttgtgcactttgtacgttgttctttagtttggctggttgtttgaattttctcctgcttaatgaaaaacgcgcaacggcgtggtctcaaaaaaaaatctgttgctgtcatacgttttgaatttttgccggggtcaactttcaaattctctgctttttgtttcatgtgcgccatggtagctaggttctcatttaatattagcaattactgtcaaaatttaatacttaacatctcaaatgtcatatgcccaataatatgtcttattaggggactgatgcatgctgtttctgaaattgaatgaagtatcttggatgtgagcagattctaagtttacccagcaggagcttccagc

SEQ ID NO: 36377 - DNA, 465 bp, Sorghum bicolor
  Intron number 1 from transcript Sb01g005500.1 (locus Sb01g 005500) derived from phytozome v7.0 (chr-ID chromosome_1; pos 4523613 to 4524077)
gccttcgtcgcgcccgctgccgtacgtatccttgagaacccttgcagctctgcgcttcccctgttttggttgcgttttttggggcgattttccgaagtttttttgtgcgtttttctgggaccagcgaaaaccagcgaatagcttggtttcttagccgcaggcgatttgttggtgaaagcacatgattatgaacttttttttggtggtttcgtgtggcttacaagtgccgactgtggagtacgtcgtgttctattttttgttatgaattttgttctgcgctgctgtgcctcgatcctagttttagctctgtgggttggaattccctgctgattgctgaatccgtgatcttctggtctctgtatttggaagctcctggatcagagttttcccttgactttgatttgctccagatgttgcggatttactgcagacgctctccctggtggatcccaagagcgaaggcgg

SEQ ID NO: 36378 - DNA, 864 bp, Sorghum bicolor
  Intron number 4 from transcript Sb01g000280.1 (locus Sb01g 000280) derived from phytozome v7.0 (chr-ID chromosome_1; pos 134610 to 135473 reverse strand)
gaaggtgaaatgctgacgtgcacttctttctttcgccatgattcaaagaacaaacagcagatctgtggagtctttgttttatcacctactctctccatctcaatttataagtcatttcaggaatcttggagagtcaaagcatctcaagtttgaccaacattaaagaaaaaattagaaacgtttatgacatcaaatagatgttactatgaaaatataactaatgaagaatctaatgatacttagatggtatcataaatattattatgttatcatataaatttggtcaaacttgagatgctttgactcttcaagattcttggaatgacttataaattgagatggagggagtaagtaatataagcaatgtttatttgttactgaaaaagaattctctgtatcttcatggatcacgatacttggcaaattgctatgcagggtttactttagaatttattattcattataaagtttgttgcaatgtaaaatcaggcaatgttgttggattttatacaggtagatagcttattttcaacatactgggctgcacaaggaaatcccagtgtatatgctggtttatgcatgaatgaccttttctagtgtatatgggttgtgaaattaaatgttttagactttagttttagctttagctttagctagctcattggaagttatgcattttgagatggagctagctaacacgtcgggcattttaggaactctcatctactttaaaaagctacatttttcttgaaggatgaatctgagcttaaacttgttttggcgacagttcttgtatttttctgccctgttgctgaatgtccctgacccatctacttacaggcagtaagacaagttacaatcctg

SEQ ID NO: 36379 - DNA, 729 bp, Sorghum bicolor
  Intron number 4 from transcript Sb02g025130.1 (locus Sb02g 025130) derived from phytozome v7.0 (chr-ID chromosome_2; pos 59857306 to 59858034)
gttgcttctttgggcggcagagggtaatatgctctctactttattgtttctcctgtttatctcaaccactcgcatccagcttaaataactactattcatgctttagttcctttatatacaagatatattattttttatctatttgtaatatatataagcagtaggaggcaactccgctgatctgtaaaaaaaagttttttacccctgtttttttatgttgtctggtttacgtcattattattgggttaattcacatgtaaacatttaggctcagacaatgtgatagattgcctgacggtggttgtctgttgatctcaaacttcattgttttatccattcttttctcaaacggttgcgtccagcttgcaagactagctcatgcatacttgagtttcttttcatactatatttagaagtttgtcaatgctgactatttttttggtttatgtaaatatgtaggttctcttctcatgagcaaccactctgtctgttgtttattaactgttgaactcaaactttggccgggtatttagttaaatacatctgaacatagattacacatgttgatagtttaaagaatttctatgagatatttttatgcgttttctttgtcttctccaacaataattatattatgtaaaaaaatgtctattgacatcctattattaatacaatttcttaccttaatgcttgttaatcagctgagtttgagtgagataaaagagctct

SEQ ID NO: 36380 - DNA, 858 bp, Sorghum bicolor
  Intron number 2 from transcript Sb09g004315.1 (locus Sb09g 004315) derived from phytozome v7.0 (chr-ID chromosome_9; pos 5084699 to 5085556 reverse strand)
tggcgcggcggcccgacgggacccagggtaagctagccgccgccgctgctctctctctctctctctctctctctccacttctttctctgttccctggaggcgatcggagcaaccgatcgatccccgccgaccacctcttcgatcttagtggcgattattgcacagtactgactcaaagggatgatcacaacacatcacatagcaagttgatgctctagtttggtagtaatttggatttaggagactagcgatcaattgttcgcttgtctgataagccatgacagaaaatactgttggctgatttttatgagatatttttatgataaaaaaacaatactgaataactagcaaattcggctgataagcttaacgaataaggcacgtcggctgccgccgccgctttgattgattccgctccgcccgctagggtggtggtggttaggtgagctgttccaagcaaagcaacggtgctaacctcccaccccccagccaaatccccctagctagtgtgtgaacgcttaaaaaaattggggggaagacaatgcaagctagcttccctgataccctcctactagagtactactagttcctaatctcatttttttatatgaattgctccaaactattgtttagctaggagcatccatacatatctccatcacagttgttcgttcctatccagtaccagcaatcaacagagcaaagcaatcagcacaaaaacaaatttataagaaatgacaagtgccactagctagtgatcgcgggatctatgtaacgttttcgatgagcattaagcaatcttgttaatttgatttggttgcagtcgctctgcaacgcgtgcgggatccggtataggaa

SEQ ID NO: 36381 - DNA, 1049 bp, Sorghum bicolor
  Intron number 1 from transcript Sb01g014280.1 (locus Sb01g 014280) derived from phytozome v7.0 (chr-ID chromosome_1; pos 13470215 to 13471263 reverse strand)
cgccgccgccgccgccgcacggcgcggactactgggtgagtggtccgacccagaccccggggtcgcggggatgatgattgtgggttgggatttccgcgccggcgagatctgggaggacctcaccgatcgattcgagagccgctctgcttacccccagctcaccaattccaccgtcccaagaaagaaaataaagggggcgtgacactctgttattcccaacctgtgcactttgatatatgcgctaattgttggaggcctggctcaaatcggtgccggatgtcttcaagaactcaccggatcgacttgggggcttgttgggttgttatatggtttgttatttccgtgggatgtatccgtatggttttggaatttgagggcggtgaaacaaacaaatccctgcctacttcttagttgtataagataagaattgctaaattcgatcagagtacctgtctttcactgtaaagtgtaaagttagtattttattttgcctaaagtagtggccattgctcaacaaattcttaagcatgccaaagaattacgagatgcatgctgctcttttttttttttacttaaaaaaactcaaagttcgattcagttaaaaactagggaaaaaaccgcaagcttttgtttaccctttttgtagattctagtaccactaatataactaaacaagcattcactgtaacttgataacttccgaacaaggcatgttatagcaagcaaccattcatctgttgtactgatattagttcacttctcatcagctgatggccagatgtttgatctatggtgtaaacagctgttttttcgtcttgttttctgcaatcatatataggtaccatttggcattgtttgaggtgcttttcagtggattgcacccaaaacagagaatttgtttccccaagaagattatttatttgttttaattaactagattcatccatgctgttttcatactgaactgttttctaaagaaacatgttacatggataattgttgttggttttgcaggctatcacacaagagaccgtttttgctgcacaggt

SEQ ID NO: 36382 - DNA, 737 bp, Sorghum bicolor
  Intron number 3 from transcript Sb10g023830.1 (locus Sb10g 023830) derived from phytozome v7.0 (chr-ID chromosome_10; pos 52580277 to 52581013)
ggccaagaattttaccaaagccaagaataaaagaggtacagtgtagcagtttgccaattccaagaatttaaccttctctctggagtcccccacctttttttgtgtggggtgggggtgggcggtattgcaatgatgttctttagagaagtattgcaatgatgttgtgtaaccacttaaatgcaatgatagtattatgattaccatattgattttagtttccctgttttgcatcattagtgcttgtattcctagtttgctactgctagtgatgacctcttgaagaatgttctgcaagattttcagtggtctgtctttttgctgaatatagatggtaattgtcactgacatggagatgtcttgctctgtgttccattttcaaactttagttccacaattttgcatctattcccattgaatattgtgttactgatgacatgcactagaggactccattttttgaaaactccaaacatgtttctgttgaattccatcctacagtgttcctgattacatcttgcaattctatggtgttccgctgctcctcctaactgtaactatatcaaagaacaaacacatgcacacttttttattaagtcattgaggtgcagattctactcatcagagatgatgagttttctttcttctgtgcataatgagttttagtgggaagaatgacttaattgctttggattcgcattgtagccgcaatacagtgcttgaagaggaagaggctatac

SEQ ID NO: 36383 - DNA, 860 bp, Sorghum bicolor
  Intron number 5 from transcript Sb09g021560.1 (locus Sb09g 021560) derived from phytozome v7.0 (chr-ID chromosome_9; pos 51023191 to 51024050 reverse strand)
gaaggaattctgatcaggtatgccacaatcatgtacttgtatggttagtttattattatatttcctaatatagtctaaacctaaaccaatattatgcataggtcctgattttgactgatgcatgttagatttatgctaaggccctttatgtaactgatgcatgttagtgcatcatgttttgttttattttcttattgacctttgttggcattaagttgtatgataatcaattaaccacatcggacatgtaggcatgaaaacaatagtgcatcagacttaacacgaaaaaaaatcaaatttcttattaggtccactatttatgcgatagtttatgtaccgttgacttttttaatatgtttctgcaaaacacccctttacactttccgagactccatggtattggttttagttgccggcatgcctacagtgggcgctgggttggcttggtttgttttcaattgaagtaccctttgtagttccctccattaccatccatttcctaacaaaactgtgcctggttattaactttgtaatgatggctaggatgggagaaggttcttaaaagttggcatatgatgtagcagtagtaaaactagatctctataaaaaatattgggatgtgcaactaattgttagaaaagtgtattgattgaaagtatgtttagctgtattttatatctttctacctccacttgtagatagttagattgtgtcgcatatctgctgtctcttattttccaactagttatacacattcctccctatttattcttttctttctatctcctcttttctgtctcggtgcttgttgctgcttggcatcaggagtctgaacccaaccgaatcctcttagttactat

SEQ ID NO: 36384 - DNA, 938 bp, Sorghum bicolor
  Intron number 2 from transcript Sb02g038920.1 (locus Sb02g 038920) derived from phytozome v7.0 (chr-ID chromosome_2; pos 73086448 to 73087385 reverse strand)
gaataagaattaggtaactacatctgaatgttgtctcctttttttaggttgtttcatcaaatcttaatgcagcaaaagattttcaaacatatatgtagtgcaaacttatatgtttgcaccttccaagtatgtagtgcaaacctatgcggcaattttttgcctattcatgcttgatgtgccttgtgagcattctctcgttctgatcatcagcaataaagtggcataatattgtaaccttcggaagttaatgaaaattatatataattaagttactgctgcacgtgttaacttttctgaatccagtgctgcaactaaaatcaaagtttgagatatattatggcaggtttttttcattgaatactgaaatcccagtttctcagttctgaaaattgatcatgttcatgtatcagacaagaggagagtccagttaacaacctgtactattgttttagtgcaaatacatttgtacttcgaaaacccacacattatttcaatttggtaaccgtctttaagtttgaatgtctcctcctagtatccagttttcagataataaattgtacttagtatataaacaaggaaagaagaattggtggtaaattaacaacaaaaaagacaaggtggttatgtggggtagatgaaacaactgatcatatttttttcccactgccacacagccagagtgatctggttttgtttcaaggaggcgctaggatgggatagatgcccgatgggtatgcattttatcattggattgttttggtgggggtgaaagactaccatgttaagctttttctgtttgctatagttctgtgggggttatgaatgtcggaataaaatggggatcgagattcgagaaaaaaaaatccttaatcgtctaacgagattttccacaaaaattttcagtttctacaaaagtggtgcattctgctaaaagagca

SEQ ID NO: 36385 - DNA, 987 bp, Sorghum bicolor
  Intron number 1 from transcript Sb02g011360.1 (locus Sb02g 011360) derived from phytozome v7.0 (chr-ID chromosome_2; pos 18844991 to 18845977 reverse strand)
cgaggtttggctgggacgtggcgccagctgccgaggtaaacgcccctcaccgactctctgctctccgatgtgctgtaattcaggatacggttcgcaggcgattccgcataaaactatcacctagtacgttagctatgtgttattatgattcacggatacatggatcttgtaggtctaggtcgtttatgtgttgtgttagagcccagatctacagaaattttatagtggtcttgcaaaactagtttgccaatgatctcgatggtgctgctaaattcttttaggatgattaatctgaccagatttatatctgacctagagcatgcttagttttttttttcgagagcatgcctagagctgcatatagtttgttttggcatactggcaaatttcccagaaaaaaaatactggcaaatttgggctcagtacatattagattttcactcctttgaagttatgctttaattcatggaaaaatatcttgtcctgaattagtagcataaaaatatatgctttctaccttaaatgggaacaatgtttcacataattcaacaatgccttctgttgcaattgttattatgcttgatctacatgattatggtctaactggattttatcaatcagataagaaccacttgttagcatttatgaatagtaatacaagtagtacagcttaccaagtttgcatcttaatacaagtagtttgttagcatttatggatggaataaagggcagaatgtgcaatacgttctcttcagttacaactacatgctttcaagttcttagctataatctctcatgtattatgtctgtgataacttatgctattccttgttttattcacccctgtgttccctttttcttatgtggctctgttatctctgtgaccatcacacatggaagtatttgtctatattttttcttgcatgaaaaaacgatggatggatgtgtgtaggctcagataggaacattttgtgggcaagaagttgg

SEQ ID NO: 36386 - DNA, 956 bp, Sorghum bicolor
  Intron number 1 from transcript Sb07g007530.1 (locus Sb07g 007530) derived from phytozome v7.0 (chr-ID chromosome_7; pos 11672543 to 11673498 reverse strand)
tcgtgcttcgcggcgctcgcaactgctgtgccgaggtacacgatttcggcctcgcccacccacctcctccgatgcctctcgtcgtttgtccggttgtgcatacgacacgactgcagtgtgctggggcgcgtgtgcgcggggccgcgattcgtttctatttcggtgcagttggcgcagatccggtgggaattctgctgatccgcggggggtttgggcggaattcatgaggtttttggtgttccggtgtgcgatttcgcctgtccgtgtcctgtcctggttggatcgttattagcgcattgcatgatccgcgtgttgcggacttggaatcgagggatttaagttttcacgcaggttttaaccttccgaatttgctttaggaagcagtatagcgctgggaggatgggtggttagtgtttgacagcaaccacttggattatttgtccaacgtttgggtgctgcaatatagtattaagtgttaggaaggtagaactgagggacgtgtttgagtggcaacaccggattttataggcctgtaggggcaattagaatttgttcttccatgttgtacttaaattatgggcgaaagtatccatatatgttaattgttatttatatcaataaaatgatctatctgaataatatatgccacctaatttctccttggttggttttatcttttttatatatatgaggtgtgcatagtcaaatctttttgaccctgtaaaatctgcattacagatcatttgaatgacagttctgtgaattgttgatagtgtaaacattcttttgtttcaattttggaaaggcgaacattgagtaactatagctattgggtacaacatgcaactagtgttagactaccatgtcctatgtttttattcttgttatgctttgttttcaatttgattgtagtattactagataataaattctgtactgttttcagatctatcttt

SEQ ID NO: 36387 - DNA, 753 bp, Sorghum bicolor
  Intron number 1 from transcript Sb01g041820.1 (locus Sb01g 041820) derived from phytozome v7.0 (chr-ID chromosome_1; pos 65055016 to 65055768)
cgtcgacttctcccgctccaagggcctccgcgaaggttcatcccggaatcccaaccactcgccgcattctcgggatgtttttctgtgtcgttggttggttcactctgtccctggaatctaggcgtttcgttttcttaatctggtaattgtgcaagaaagctggcgttactatcgggctccttttatctacagagtatcttggtgatatgatttatgtgcttttgatcctagattctggacttgtcgtagattattcgatgcttctgttgatgacccggacacttatccttgatcctccacagacttttctgcgttcctaggatttcccttcttacttttatgattgaacagctcgtgactttactatcacaataaaacagtgctgtacatatgtggttgaggaaatacctcttcggcgtgtttgtgactttcttctcttgttattgccctggccttctaggtggtttgttggattctttctttgcctaagtgtttttttaactgtgcgtctgtgcctgcatatggttcacactgcagctttgatcttcatcgagacaaaagttatgtagtgtgggaacatcgatgctgtacagtaacagccggtgtttgtttctaattgtagtatctatttaccacattttggatcaatttggtgtatgctctatttccatcataatttaattagttctctattatcgacaacctaacaaagtggtgtgttttgggtctattatttaggggagagagagtact

SEQ ID NO: 36388 - DNA, 795 bp, Sorghum bicolor
  Intron number 1 from transcript Sb09g023620.1 (locus Sb09g 023620) derived from phytozome v7.0 (chr-ID chromosome_9; pos 53263798 to 53264592)
tcctgaaaagaagagcttttcaattgatttttcaggtgagttcttgccaaatccgttcatctggttgcaatctacttgcgtcgcgtacagcgctcgtgtatctatgctttgatattaattttgttctcgagtaattatgttctgcgaatgctcgcgttagctcagtgtttgttagtactttacttcttggagtaagagtaaaatcttttctaccgtattcccttctcggacagataagattcgattctgttctttagaggaaataatctgtgtcttcgtcagtacttatgcatcaattgcacaagtatccctgtttcctttgctagtttagttggcaggtcgtgatttcaaaagtaggaaggtgttatcgtcagtgtagttgaattgattgtcagtgaagctgagcgatatatatgctcaaaaaggggttcagtctcatcgctctgagtcatacttgcttcccctctccagttatacatttattctgaacagaggacagctgggccagacaggttgttagaacatgccaacatggtaggtgcactactgaacatgactatatcatatttgcacatatggtcattattttcccctccattaaaaaaatcatgtcaagatagatattttttccctgatcgagtgcaaatccacatcaccaagaatgatgctgctgctgctgctgctgctgctgctactactactactactaatcattgttttaaatagagctaagcgattctcttttcttggatgtatataggaattgaaattttgaatatttgcgctgttggggat

SEQ ID NO: 36389 - DNA, 521 bp, Sorghum bicolor
  Intron number 3 from transcript Sb09g023620.1 (locus Sb09g 023620) derived from phytozome v7.0 (chr-ID chromosome_9; pos 53264940 to 53265460)
tgacagaattgtatgatcagcacttctattttatttattcatcataatttgtttcttctatccgtcagtcttggttattgctcttgtttaataaaaatcaattgacactattattgtcaaaggtagtttgtacggtccagtgccaacttcatgtgacttcttgaggaaaaaaataatgttttattcatgtacacaaaaatccaactgtaacatgaactgcccttggttgacaattgtccaatcatcatgtaaacatgaaacatcagtcctgttagtcatatcaaactaagtttacaaatcctagtaccattgctctctggcttcttttctaatgcttttgttttgcttgaaatatcatgggttttgtaaagtttctttattttattacatcagcacaatatggaatataacaacccactaactcattaagtcgtttctgtaaggttgaagctgttcctaatagcattatattttatctccatgcaggcagttatttaagaggaatctctcaggaactctgg

SEQ ID NO: 36390 - DNA, 810 bp, Sorghum bicolor
  Intron number 3 from transcript Sb02g027560.1 (locus Sb02g 027560) derived from phytozome v7.0 (chr-ID chromosome_2; pos 62841364 to 62842173)
cggtagcagggaggcagaggctgcagctcgatcaggtaaaaactaaaatgtactgacgatcaccatgtatttgcttagctggttaaccgattatgaaatgttaagatatgtgaagcgtggtagtaaaacaattaggatcaaatttctaagcctgtgcttatccagtcgaatcttcacccatttagtaatgcagtattattccaatttctttgctgtgtctactgaagcactgatgcatttccttcagtgagtaattactgcaccctggaatgcgtgtaaattattttacagatatttgttccgcaatatgggattcttttttttgatagttatggatatgcttatagcttgctaccgttgttgttgattgttgagtatgactgcctttggacttctcttgtggtaacagtaaggtcaattgccatcttaagcctgctacttgttctcgtatcatttgaaacatcttgtaatttgtcccactgtttaaccatcgagttcatgttgctggatttctctttttgggactgctggagcaagaccttgttaattcttgtgctgcaaactaagttttcttaactcctgcagtaccagtgcctattgaaatgttttttttttggttttatagtgctcggggatgtgttttgctattggcttgtgaaacaagagaaaacacctgttctcagaaaggatattattacctgtgctaaaaaaaaggtttactgtgtttaatgtcagtgtggttctagctaccaatcaatatctctgatttttttaggaatcactagagttccaaaccttggtactgcagtt

SEQ ID NO: 36391 - DNA, 451 bp, Sorghum bicolor
  Intron number 1 from transcript Sb09g019580.1 (locus Sb09g 019580) derived from phytozome v7.0 (chr-ID chromosome_9; pos 48428819 to 48429269)
ccgccgcccaactcaaggccgcctttcgcgcccgggtagagtaacgctcacttgtttatggggagatttagtcgattgctacttgctagtgtatctaaagaacttgcgtatgtaccgccatgatttcctttaatcctggtgtttggaaccaccatttttgagtgttggttactttgtgattaggggaagaaggcaccgagtgccacggtataaaaggaactcatagattgtccaacttactcgcattatgccctcttctccttattatacgtatatattttttaaaaaagaaacatttccataagaataagtaacattttgttgtgttataaactgtgggggtgtaaggtgagcttttgctaagccaaagctgctttctatttttctggtctaacaatactgccacgacataacattgggagctctgtacaggtgaaggaattccatcctg

SEQ ID NO: 36392 - DNA, 864 bp, Sorghum bicolor
  Intron number 1 from transcript Sb09g001460.1 (locus Sb09g 001460) derived from phytozome v7.0 (chr-ID chromosome_9; pos 1323430 to 1324293)
tccgtgtgctcgacgtctcgcgcaaccagctcgaggtaacaaactgggcatcttcatgtatattaaggtcgatctactactactatttgtttagagtgcctatgctagtgccttctgtctatgaaccatgaaatgttgtttcggctgatagttgtggatgagcgttgttatgcgattgtttgcacatattccactgtttttataagatacatattccactgtcatcctttttcgaaaaaaagaaatccacctttatggcctgcaaatggattaaccggaccatgtgatggctgattggagtttaactgtaaaaagaagtgaatgacttgtttttcttttccaacagttcttgtttgatggatgtgtttgagtgatttttttccccgaggacaaggagcaagtttattttgggtgaaaatcatgtaatatttgggtgacaatagctgaatttaaatgtttgtgcaaaaataaagtatcagatggcatcaggctgaaactgtgttatacctgacgaaactgctacatcacgcaaatatgattatatgattgattgactaaagtgtgtctatctttgtacatattagtttaggccctgtttggttccaccaactaaattttagttagctaaaattattttagctactcttgggtgattaattttggcacatcatcatttaaaaaacgacaagctaatgttatctacaaaatgctcaccatctttctcaagtactaattaaccaatagactgaagggttttgagttgtaatttcacaacagggtttgttacatcctgttaattagtttttgtcccatgcttgattgattaataaaattctgtttcaatgtcattgtaggttattccag

SEQ ID NO: 36393 - DNA, 442 bp, Sorghum bicolor
  Intron number 1 from transcript Sb08g002000.1 (locus Sb08g 002000) derived from phytozome v7.0 (chr-ID chromosome_8; pos 2023996 to 2024437)
ggccacgctgcctgctaccccgtccccctccaccggtgagttccttctcttccgttacccagtcccctatctattagtctttatatcccttcaaatcaccgtgtttccctttccttcttttcgtggatttgaggaaacggagctatgttttctaaacactgactctgagactaaagtatttctggttattatagataaaaactagttctttttttttctccgttggcaaacgtctcaatctgtgaattgtgatggtggaaattgaatttctgaataatttgattttcgaactataaattgcaatgctgctaactcttgcacttaattttattagcttcatcatagtttatagtcccttaaggagacactgtttaataaacttcctttttacttattacattgtgcaggttctgggattcacatatagaggtacacgcgtctg

SEQ ID NO: 36394 - DNA, 394 bp, Sorghum bicolor
  Intron number 3 from transcript Sb08g002000.1 (locus Sb08g 002000) derived from phytozome v7.0 (chr-ID chromosome_8; pos 2024605 to 2024998)
agttagaaccaactacgcctgtgaaggtatccacaacactatcacactttgctttctactgaaatatttctgtttatctttgttgctactttgtgttgccattctttcctttctggttgatcactatttagaaatcctatattatttttagatgctcagcatgtcgaatagcctagtcaatattcaaaatacacgccattcttcggatgcactgattgcattgaatagtttcttgcacatttctgggttgcttccgtacaagcatttatgattctttagttttgttgatttgtttagcttccgaaccatggcattatataaggtgggtataaaagagtttatttttttcttataaacagggtactgacgtaataattgatcgcatacgaaagag

SEQ ID NO: 36395 - DNA, 940 bp, Sorghum bicolor
  Intron number 4 from transcript Sb01g036050.1 (locus Sb01g 036050) derived from phytozome v7.0 (chr-ID chromosome_1; pos 59688640 to 59689579 reverse strand)
aatgtgagttatcctagaaaactttcaaattgaattcatttcctccttgctatgtttgctagagattttcacattcaaagagttgactattagcacagggacatctgtcaaaatgctagcctatgttgtcattggcttccttccccacattagtactgaatattcttatctggtaactgggcatctattgtccatagccgattagtcgtgaagtacctccaggacctcctaggttgagattcctattccaactgcaagcattggttcacacaaaggattgcattggctgtcttgttttgtcgatacgagttttccaatcttatcttggttgaagaaggtgctatggacgttgactgtcttctggcaatgctgtgtttgtgagttcagtttcgagaaaaaaaaaatactcttatgggaattaatttgacagcagcttttttttagagagaacgcgcgctgcgcgtatttcattaagcagagaaaacacaaagtttggtacaggcttagtaatccagagattaccaacaagcgactagccctaacaagactagcacgtggttgcatattacaagacacgggattgcgacacaacagctacaatccgatcacagcaaccactagcgctggagcgataccaggtgccgataccggggaacgggaggccctgtcgaaggtccttgcattccgttccttccacagagaccaccctatacggaagagaaggaatcgctagtttttctccccaatgcaaagtaaaattccaatgacatcttttactatctccaaatgtcattaaaacaatgttgtgaactgtgaagtctgaacgcttgacaaatcgaaatggtgacttttctaataaattgccttgctgtggtatttgaccttttcccagcttaaacctcattgtttggccatactgatttatttcttctacatgcag

SEQ ID NO: 36396 - DNA, 794 bp, Sorghum bicolor
  Intron number 2 from transcript Sb09g025050.1 (locus Sb09g 025050) derived from phytozome v7.0 (chr-ID chromosome_9; pos 54554760 to 54555553 reverse strand)
ttcgtcggcttgcagggtcagtatcattcatctacctaattgctcgttacatcttattacatagcaatatttgtattggaagtttggaacttacggtagaagatggttgtctgcgttcagtgtttatttccgaacacctgggataaaatatctaaacggtgtttgttcgagaagcaacaaagcactcatgttagtcatgtagttgtttcccttttcatgtttttattgggtgtcttagttgctgatgattagatgtatgattcaaatgtttgaggctgttattcaaaggtttgatcgtgttcagaagaatttatgaaggggttagaaaaagtatgaattgctgtgatttggatcgctttgttaatttttttctgaagtctttgatactcctgttggtcatacgggttaaccacaataaccttgcagtctttgtcggaagcaagttattggtcaactttcataactagtgttatgctataccggcaggaattgtcactttgatttttaatatgttgattatttattttgctacaaaacttgatcaggaatttgtacagctagttatagacattttattagacaccttggccctcttgttttagtttctgtttactggtttggacttgtgaattgtcacatgacatttcctttcttcttttcctatttccaagactaatgtttctgctgatcattgttttcatgttcttttcttaacatcaaacatagaagttttcttttcactgagtaacatttcattattgtaggttctgggaaaaccactacctgcaccaagt

SEQ ID NO: 36397 - DNA, 536 bp, Sorghum bicolor
  Intron number 3 from transcript Sb04g005550.1 (locus Sb04g 005550) derived from phytozome v7.0 (chr-ID chromosome_4; pos 5416932 to 5417467)
agtagaagaggttaaccttctggttggaaacagtaagtactttagctaaaattatgtttttcttatctttttttttttaacaatgcgacctataggcctggagaatttcgtctatggaatcatgtaagtagttggtatatacgccttcccccacttggaagtagatgatagaactgaacagtcgaacaatgccaagagattattcctcaaggtctgcattactgtctaatgtgcagcagtgagttcagatccagaaagtattcccattatacttgtttggttgctcccattgcttagccaatgcgatagcatttgattgcagaactgaaccaaactatcgtttcctttcatttatcacatatgctgtcgatactcattactcaaaactaaaatagttgctgtgagctgtcacctatcatctttcacatgtgcaaattttctacaaaaaaagttacttatttcattcgttgctcaaccacactgttgtgtcctcaattctcatacatttgttcatcatgagtagtacttcgaaggct

SEQ ID NO: 36398 - DNA, 1032 bp, Sorghum bicolor
  Intron number 1 from transcript Sb06g020580.1 (locus Sb06g 020580) derived from phytozome v7.0 (chr-ID chromosome_6; pos 50008153 to 50009184 reverse strand)
gacccgctctacacagtctacgccgccaccaaggcgtgagtgcctctgccgttatgcctttcatcaactctttaatttcttcagtagctgtttgaaatttcgagacagtaatctgtgcaccttcaccaccgatgccgatgcacctacagcagttcttcagtacctttgtaccttcatcattcgatgggactgttgccaaaatgcatgccgctaaaaagtagtacaattttgggttgatcacatggaacactaagtttttttttttttgatgatatttcaaatttgtttaattactagtcaattttttgagaaagtctcgtcaacacaacgtaaacaatcaaaatccattcgttgcaagttttgcaacgacttacttaacttggatatttttacttctgtagtcgtgcattgtcattcttccatggaaattagctacacctggaaacaccgaccgccctaccgctggctatccatctttatgtttttgagaaattatattaagataaaacgtgttcgtttaagtttgtttctataacattgtctctaagaatatctccaaagagactctttgtatgatttattattttaaaatttagaaaacaagttaaaaagtcaaagtctaatagactctaaccgtctaacgtctaaactattatccatatataaatcttccgctctccaaaattatctacctcgctctcgcttatggataggctacatcaccctctagattcaatacaagatagatttctcataaatttctttatagaacaaaaatttatgataaatcatttgagcatagagaacaaaacttaaaaagttcgttggagacacaagagctatggagagaatatttatgtgatggttctccaaatagtttaaatatgtgggtgttgcttcatgcacaaatatgaggcaaacaaacttttcatgttttaaacagctgtgatttgctacctaattattaacattgaacaaatgttttgtgactattttgctttgatttaccagctatatcgaccaattttcaag

SEQ ID NO: 36399 - DNA, 930 bp, Sorghum bicolor
  Intron number 3 from transcript Sb10g024660.1 (locus Sb10g 024660) derived from phytozome v7.0 (chr-ID chromosome_10; pos 53765231 to 53766160 reverse strand)
gagaaggaacatcataaatgtaaggatccaatcatcgcccttctattgattttgtatttgttgtctttgtagctttattggtactgttcgtcgattcaagttgttagttaaatgaaccagggtccacctcaaaattccctgatccaatcatgcaatttccatagtgttacatcccggtcttgtttcagcgactgctacttacctgtgagatgtggagcaagattggatttgtggtatttggagtttctcataggaaaaggtggtcaaatcagatgccatgtaacagaggaatttggttcgtggaagttgtaatgccagggtgtgaacttttgaacacaatcacctctagttatctctctgtttaatcagaagatatggtggagtatacagttcatcctggaaggtctttgattctttgactgggaccaggaacaggaacagatcatcgaagaagacggatctcttcgtagtgatgtatactgacagtttccatgtgtagcaaaatcgaactgttggtgaacatttatgctacaatacatggaactactcaccttgtttcaaggtatagtaggtagaggtcttaaactgtcaaagaggaaggataatggttctcaagtaagatatgctacccaaattgatgttattatgttagtatatgaaagtgggatggcagaaagatgataccacgtagtaagattcaggaacctgggaaaaaaaggaccacctgtgctaaaagaagttcacatttgtcaaggtctaaattctgaggcaaaggaccctattcttgacttttgaattaataattgtccctttgtcaagttaattatgactttactttattctggttcctttttgtgtcgataaggtgctgctttgttccaaatcccttctaactgtatgaagttctgttctgctactgtgaatctgcag

SEQ ID NO: 36400 - DNA, 988 bp, Sorghum bicolor
  Intron number 2 from transcript Sb04g002390.1 (locus Sb04g 002390) derived from phytozome v7.0 (chr-ID chromosome_4; pos 2156438 to 2157425)
cgcccacctatactccaggtttgtgttcttagacttaccttttattttgttggcaaaaggaggtggtttggtaattggagtatgcatctctgcttgtttgagtttgtatgcaaagaaaatgctgttagcttacattgcctattagatgtgtagattgagttagtatagaaggtgggcactatggtacgtatgctgcatttgctctgccttaaggtatctaggtttgcccattaatctcaagttgttcaaaatttgttctgttaaagacctagtataacattttttctattgtcacattgtaatcgacgataagttctctgggatccacatggatcaagtctgtttcatcttcgcatcgcatctgtcatgttgtccattacaattatggactccctcacatcaaaataatctaggacttccaaatgttaatgaaagagcaacaagaaggcatctgtcatttgtttcctgcatatgtttatatcagtgcatgcatagtgttggagcccatgtttatccgtttataacttcgctttcttagaatttggcatggtcatgaccatctgcaagtttaaagcttttatagcttgcaattgcattggaacactttcaggtttttttctagtctgctatctctccctctctctagacacatactattgtgtattgtccatggttatgtttattgtatccttgttctgcattttttttgtcaaagagctatctttattgttccaaagaaaaggttaacttattataatcacaattcctaagttcaggtgatgtttctacgcatttttttcataagaataattaaatgagttgcaagctaattgtgctacttgaatagtgatggtatttttatcacttcaggatttatatcatgtaatttgaacaacagctttagttgcaatgattagagttacagaaatgaattcaggaaatgagaatggtaacaatctcctggttcctttttttctgcagtgcccaa

SEQ ID NO: 36401 - DNA, 681 bp, Sorghum bicolor
  Intron number 1 from transcript Sb05g018510.1 (locus Sb05g 018510) derived from phytozome v7.0 (chr-ID chromosome_5; pos 45132585 to 45133265)
gagctcgtgcaggtaatcaatcggcggtgtaacttcttttttgcgcctctcttgctgccgctgttcttgtgtgagtgggaacttagttcaggccgttgaggctagtatgctctacagtttctgcaattagctaattgacttgggcatatactgtaaaccgctgtgtgagttgccctttctatatgcctttgtgttccatcagattatttctttttactttagtggttgtgtgcgaactgccaaagagtaactagtctgtatgtgtgtatgactttgagtaccaatttagcataatccttttgttagcgtaatttgtcagccccccttttcagtatgattatgatgagtttatataatgatcttagttaagccgttgcatgccctttgttatttttgtttctacatattttttccacgtggtcagtaattattttctacagatctcagtttaaaaagcaagtcctaatccttttcttcaatcaagaacacaattaattggaaaaacaaaaaacttgtgagcgaacaaaaacactaatccttgataagcatttatgtgaccaatctaccttatttgtatcagtttcctggtgtttgttcataaatcttaatacttctcatatagtcacacacacaaaaaaaaaccttcttctcatagttttgctctctgtgtcaaaaaataga

SEQ ID NO: 36402 - DNA, 909 bp, Sorghum bicolor
  Intron number 2 from transcript Sb09g003210.1 (locus Sb09g 003210) derived from phytozome v7.0 (chr-ID chromosome_9; pos 3587337 to 3588245 reverse strand)
aggttggtgggtttctcgtcagccggtgaagttaggttggttggttggaatgcaatttgaatgggggaaattgtgaattgcgatataccttggtttcgcggactgagatggaaattagcgcaattcagttgctgaattcactgtcatgttactcacatttttgcattgggcactttcaaattgtgtgcaaacagccaaacaccaatgccttaaaattagcatccatttatgtttcagtcaggtatacattacgaagtcagcatagtagtattcaataattgattagcttggccaaagtgtaattctagagaaaaatgcatctctcttacaaaaaaggcattaactgtagaactcctaggatacaattaagagttggctagagatgctatttgagttctgtagtataaattctattaaggggccgttgcatgatgctatcctagtttcttgattctggaatatggagatgtgttgaaatcctaattaacaatatcttgaacaagtcttgtagaaatgtaatatataaccagaacattgctctgtcaccagaaccaatagtaaaaaggtaaaataagcagaaggcaatcccaagtctcagggcacatgagttcagaaaagaatcccatgaattgtacagattacttgaatatacttgcaaacagaagatacaaactcaatgatgtatttcatgctaaccattatttgtaccagaatactccattattttacattaattaagatgttttattgctcagttggtcactataattcctcagttactagattaaacaaaattttgtaacacgcaagcatagcttacaatctccctttgtttgatttaaatgctgccagttctgtttatttcatcttatagggcacaggactctcacagaaagagtgtgatatctg

SEQ ID NO: 36403 - DNA, 810 bp, Sorghum bicolor
  Intron number 1 from transcript Sb02g040560.1 (locus Sb02g 040560) derived from phytozome v7.0 (chr-ID chromosome_2; pos 74471962 to 74472771)
ctgccagggcctctttggaagcccgcttcggcacggttagggttttctccgctccgttactgttctgggggattcttgttggcgcactggggattggctcggttgtcggatattgaatttatggttaacgcatttggaaattcttctcctttttctttttgaaagaccggaattcttttcttttaccaagctctttgtattctgtagcgattttcccatatcaaagaaatagaagggttcttgtcggagaactcatgggttcataaaacggttcaaaatgtaatactaatttaggtcaatgctgcatatgtacaaatgtggtggtaatcttgagagcgttctatcgagtcattctatgcaacggagttctttggataactgggtttcctgtttgaagaaatggcgatttttggttttttctctaagctcatccttccgtgctcaatacctctttatggtcaatttgttgaaaggtcgggaggtttgtggttaagtaccaccagagtttgtgttcttctttgcttcaagggtgttttccccctattatctgtccttcattttagtgtgcaagtttgaaaatcaaaagtgtagcaactttctctcttgttgaaataaaattgatgttctggctggataatcaatagcttggtgtagagaaggtcattgttttaataatagttagccagttaggcatagagagcttttgctgctgtaaatcttggtctcttttatatttgtaactaactttgctaataagcgcaatccctatctttttcaattctcaggtagaagcactttctccctcgagaa

SEQ ID NO: 36404 - DNA, 979 bp, Sorghum bicolor
  Intron number 2 from transcript Sb10g026710.3 (locus Sb10g 026710) derived from phytozome v7.0 (chr-ID chromosome_10; pos 56176926 to 56177904 reverse strand)
agaagggcgccaaggtcatcctggccagccatctggtgagcaccggtttcttgctctgtgcctactgccgactaggttagttttctagtacgatttgtgctcgagtgcatgagatatgatgctgatttgggcgattgctgattggtaacatcgggtacagtcctgtgtaggtttctactcagtattaatgagttattggtagcatcggagtacatttgtactagtatcgatatctgttagtatagtattaagtattcaggaaggataaacgtggcctgagttctatttatgtgccaaatataccatcattgtcagtcaaaaggtgattacttgaagacattaggttcagagtggtgcaagaaactgcatattttgaccctttttttttctcgaatagcgtaggagaactgcacgtcattttattaaggtagaaaaaatgttacacctgtcaacacactgcatattttgacttagacatgcccatttcattgatcctgtaatttctgtaataaatcgttcagtaattgtcttgagtcatcaaaatttaaagcaatatttctaacatgctggttttcacagtctttagtttgagactttcttcttcaaacgatgtggtttgttacctacattgtaccaatgcctggcaaccaatatattagaagttaacaatggacctacagtagtcatatcctgtggcacttgaattacggatgccatccaagacatggatacactaatggagcagccactagttagtaacatgatgtgattttcaacttttattaggtcaacccaaattcaagattccccttaataagtagcagactaaatattctatgctttggagaaaaaattgttcctccgtaatcatatttaaggttataactacattaattgtttcacttgatcatgtcattctaatacagttactattttctcttcagggacgtccaaaaggtgtcactcccaagtacagctt

SEQ ID NO: 36405 - DNA, 722 bp, Sorghum bicolor
  Intron number 2 from transcript Sb04g004416.1 (locus Sb04g 004416) derived from phytozome v7.0 (chr-ID chromosome_4; pos 4185187 to 4185908)
aacaacacatcaacaccagaaaaagggttttgaggatgccagatcatgagttttcttgtgcctgaaaaagggtagacaaattttttttgcgactgggtgtgtgcccgtttttcattagaggaaaaaaagtgtagacaaatcaattgatactttatccccatatgatttcaattgtctaataaagcgatctgtaccaatgatttgacaataataatagaaatatatcaatgtagacttgtagaggaacagctggatgttaatcaagtccatgtatataaatcttcttccagggctgttctcaagtcatgtctcatgactcatgagttgattatctaatcaaacttgatgaaattggttgattcaagggcattccaatctgttgagttttacttccttatttggttagaactgaacaaatttaatggactaaaaagagtttgtgcaagatatggcggtccacccattgtgtcattgattgcaaaccagaaccgtaacgtttgatagccttagtagagtatgataaattggcactgtattcatgctccatggtgctgccccttttactctttttgctatgaaatattgtgaatgtagtacaagtgtgcacgtgctatggctatttttcctactatctggactttcatattgttgatattgctatgttttttcttccctgtctgcttgaaggttgtagcagcatcagttgcttgtaaccctgaaaa

SEQ ID NO: 36406 - DNA, 969 bp, Sorghum bicolor
  Intron number 2 from transcript Sb06g032610.1 (locus Sb06g 032610) derived from phytozome v7.0 (chr-ID chromosome_6; pos 60766102 to 60767070 reverse strand)
cgttcgaccgtgtgaaggctgtcatcatcggtcaggtatagcttgcctgctgctaccgttatgtcatctctggtgaccatcagctgtttgtgctgattctgtgatactagatatcagcacgctaaattgattagttttctctatgctagcatttatcatttgcggggaaatttgtaatggaatcgtgaatagatgcattgtttgtggtatctgtactgctactacactcaggggttggctaattgcctggatgatcattaggttgcagtaacgatctatttttctagaatatgagatttttcttttcctggtctactttcattagcattgtatcattctatgaaggatgttaagcaccacattctgacttttgtccaatgtaccagcccttcttattgcgcagtggtaatgtgtcacaattctggtactggtagtgtaacaccattttttatttgattatccgatatgtaaatggggctcagtttgtctgactgttacccaatgttggtgttgtctgactcgcaataaaccaaaacatggatagactaatctcacatgttgcaaatatataacttatttgcttctgttctgtcttttaccatgcaacaagatttgttagctcctggtaattgatttgagcatatgcttgtccatgtatgtagtttcttttcctgtcatgctgctagcctgattgtgctagaattattgtccaaatgctactatttattgcctcacccttctggtcagcttttattgggttacactttatagtctatgacacattgggtgttgaaaagacagtttttttctttgtactcaaatctacttgatatttcatcttgtttgcaataagtttgcattgcatttgtcatctacgacataaaccacttttcacctgttaagtttaaaatgcatctattgttcctcagtgctcatattgtagcacacctgcttttcaggatccatacc

SEQ ID NO: 36407 - DNA, 737 bp, Sorghum bicolor
  Intron number 4 from transcript Sb02g011290.1 (locus Sb02g 011290) derived from phytozome v7.0 (chr-ID chromosome_2; pos 18812693 to 18813429)
ctggacaggttaagaagaaaccacaggttagtgctcagttgctcaccattgttgccctatggtaattccttttttttttgaagattgttaattagtagaatccaattttaaagctactgacatgttcagaactaaggttaccttatggcctgtgttactgcaatattcagtgttatcttatataggtaaggaaaagcttagtctgacatttatcatacttaatccatcctacttacctgaagtccaatagcaaaaaaatcttgagataatacattcccactcaatgtttagtaactagctggcttatctctgactctctgtagatgtttctttgagtgtctttagtggatgtgatttggatatcccttgtgaataaaatttaggctccgtttactcctccaaactatttaagttggtccctaatgagagttgtcttttttatttctccacttacaagttgaatacgaagttcaaatttgtgtagtaacagaggaaattatgttctatattagaaaattgcctcaagaattttcccctaacccccctccccagaaaaaagaacttaaagctcaacttgtaaatggaaaaacaaaaagataaatctcattatggggtatattggaccagctgaagtagctctgggtgtaaagggttgtatgaggtagtaacatgtacttttttgtctatactgaaatatcttgctatttgtcagacgctgtacgcaaaaattggagacc

SEQ ID NO: 36408 - DNA, 623 bp, Sorghum bicolor
  Intron number 1 from transcript Sb07g028755.1 (locus Sb07g 028755) derived from phytozome v7.0 (chr-ID chromosome_7; pos 63792270 to 63792892 reverse strand)
gcttctccagtcccctgcagaggtggccacccaaggtacctacctcgatttctcccccttcgttgtgttctggtgtagttgctgggcttctgcgctttgattctgttgccgaagcatttgttttcgttagatttacgttagatttggtactagtacgtattgaaaccacgatgatgttttgaggtgtcaagctaacggttcatctttctatttggtggagattgtgtaagactgtaagagagcattcgaatcgtgggttacgaaatgactactatgcagtatcaaaattttcttctatgctttttgtttggagatgctgagttttgaatttctatttaggctgtgatttagagatgatgtatttagtggccagtggccactgagatttccattttgttgttcttttaaatcttttcgctgagcctgtttccgtgtgctgaaaaaaacataatgtgctgtgattttgtttttatagtttggactagaatacttctgtcattatacttcccatttatgtgaatgtgaacttgtgatggttcctgtcttcctgagaacacaaagatgctaacttttggtattcttttgcaggaaatactgtaaggaaggcatccgtttatcttgct

SEQ ID NO: 36409 - DNA, 1021 bp, Sorghum bicolor
  Intron number 1 from transcript Sb04g003900.1 (locus Sb04g 003900) derived from phytozome v7.0 (chr-ID chromosome_4; pos 3750779 to 3751799)
cgccgcgcctcgcttgctttcccgtcgccaaggtacgtcgcttcacctcttcctcccattcttcctgtcaccatgatttctaccttctgttgcttgtcgtgcggtgaatgcctagttctgtctggccgcttttttatgacctgttgcgcgagatctggttttcgacttcgcggtccagcttcagttcgatatgtattcggctaggctccattgtttagtttccgggacaggagcatgttcagcaatcatactttggatcaatcgctgtgttttgatgtaagttgaaggtcgttggttgtaatactagaaatctggaatagcttgtgcttaaagtgctacccttgattgtgcaatttagagtggcacactgccatttgtgcagtgtagccgggtttggagaagttgctacctcaggttcgccagggacccagggtgaggtgcgaactgtagtaaggccacaacacgtcagtgtggttttgatcctgagtgcttgtgcaagttccagcagattggaaaaatacatttatagtaaactagctttggtcatctgacaccttttccatgtttaatctgaagccactgtgctgcaccaggcagcatgaaacttgaaagtagtatccagtgcaaagtttaaccttgaataactcatgtataaatcagtggcttattatactttttccccttgtgttgatatagttgttatgcgttcactttttaaacgtgtatatacatagttattctcttgctgctattggagagtgaatggcaactaactcaatgttttttagtggtctacatatctagtgtttatttaagaaattgtaatttttctcttgctgattgttaaccaacctgagtgtgcacaatcttttatattgatacgaacattagtcttgaagttacagttttacacttaccagttatattgcattgaacaactctagtgagcatctgtgtaatttattttgtttataatgcttatgcagactaagcgcaccaagaaggccggaattgttggcaa

SEQ ID NO: 36410 - DNA, 982 bp, Sorghum bicolor
  Intron number 1 from transcript Sb06g023030.1 (locus Sb06g 023030) derived from phytozome v7.0 (chr-ID chromosome_6; pos 52234323 to 52235304)
cgtcgtctccgcctacggcatcacattcactggtagaataataaaccccaaatctgcgaagcctgcgctcatttgctcgtgtcaaatttcattcctgagacaagatcggccaatcacccggctcttagttatttttggcttccagattatctacatttagatctgtgctagtgcaatggtattcacacacttgctgtatttattttacttactttatcaccaaatgacttcttttttcgccacgagtggaaattcagtcacgtccctggtgaacgagcaggatcctaacacgttattgataccatctatactttgctaaaagtatatttcaatcatacgatcatttacaaccaaactacagattgtgtgacatgtcactaattagcggtccatgggccacaacaaatcaaagaaacccgcttgaaatatagataaacatgtggggggtgttgaagaaattaattctgactgggctaggcattgttcactggaccatgggccatgcttttattttgggatacaatcctagaagaagattatggatttctcaaaaaaaaaaaaagaagaagaagattatggatgctattactattactgacaatgtgaatacatttagatttgacattgcatgacaattcctgcaatttatattttttttttagagttcgagggcctcatgccccggcctttcaattatagtcaaaagaccaaaaggtttacagcaaagtttgcctctaggcacccagtacccactggcagggataacaacccaacacaccgctaccaaaagaaaccaacctgacaaagttccataatcaaccactagaagcactaatagactagcacctgaaagaacaccacatttaactgagaaaaaaaacagtcttaaggacttagcgtggtgagataagaaacgatataatcatatcatagagttgccactgaaattgtaatttaacaggtgggtttagcagttatctgt

SEQ ID NO: 36411 - DNA, 882 bp, Sorghum bicolor
  Intron number 1 from transcript Sb06g000870.1 (locus Sb06g 000870) derived from phytozome v7.0 (chr-ID chromosome_6; pos 1250508 to 1251389 reverse strand)
gtggctaccccgtgccggggactggatctgcaccggtaacgccgcttttgcccacgctagtaccctgaatcacagattctctttttgttcctgcggctgtcccttgatttagatgcaggctctcatccattccctatgtagcacattgatagtttagtgaatctagcattttttttctcttcttcatcctttgtgttggttctaggcttcttattactactagaatctagtagcatgttttttaaaaaaaaaaacaaaatctagtatgttggtatagccctggttattattgcagccttcttagctagacttattgtaatcatgcagagaagatgttaataaggcaagttagttgcattttaaatgatgagttttaaaacagagcaggtgtaaatttaaggaagtagaaacttcatttaaactgagaaaggaaagtcgaaaatttatttgaccaccgctccttaagctttctatgcaagccaggcaaaacatgtgaccaaactgctcactctcttgaatgcactgcagttggggtatttattagtactatgttctgactccttgaagtatcttttggatcatttttgtttgtgcttcaattgttgctgctacctattagaaaatttttgatttcgttactccttctgtttattttgtttattgaatgctgctgtatgtagataagattagaaaaaaattaccaatgagtgtgctaagtaatgactagtgtgcgtgtgtctattcctttctatgggtttgtgcgtgatggctggtcatggtggtggtggtggtgggtgtgcgtgtgcttcggtgcgttttgctgcctactgtgctggttggtttatgcggcaaatggatgaataggttgcagtaacaataatt

SEQ ID NO: 36412 - DNA, 559 bp, Sorghum bicolor
  Intron number 3 from transcript Sb10g000360.1 (locus Sb10g 000360) derived from phytozome v7.0 (chr-ID chromosome_10; pos 149155 to 149713 reverse strand)
cgacggtgacttcctcattgttccccagcaaggaagtaagttcttcttcctcttctgtcactcaccaccaccaccaccaaggatttcattgcattcttctgaacctcttctcccctagtgtctgtcagctaacacttcagctacatatattcttttatttccctcaaatttcacatatatactaatagtcttttgtcaccggacaattcaactaccactacttcactagactagtaatcacatcacaatcaaatgcttctgttgctcgccccaaaacagattaaatgctgtttgcgtcgctttcagttttccacctgtgccactccatcctgtgtctgcctttattatctccacgatttcaaagccaaaagcaaatggttgccccgtcactgttgccgagagggtcataagcatatttggtgcaatgtctattcagcagcgcttaccttctctttctctgtgtaaatgataataaaccacttgttcactatctatcatcttcttttgccatcacacaagcccagggctattgatcacaactgagtgcggaaagctgctc

SEQ ID NO: 36413 - DNA, 824 bp, Sorghum bicolor
  Intron number 2 from transcript Sb04g017490.1 (locus Sb04g 017490) derived from phytozome v7.0 (chr-ID chromosome_4; pos 40972139 to 40972962)
caggtaagtatagtgtttgcaaatggtggaaaacagaaatatgttggaatagttttcatgatttttttttgctaaatcttgaaattctagtttgatgtgctggtgaattattttatttaaaccataaaatgtggagcaacatacttcctttagcttgttcttctctttctatttgagaatggtgagctaggaaaatcttccaatatacgcaccagtttatcatatgctttggatctgagatttttcaccctgccccacttccctattcatctgatgaagtgcttgagattttagaaccttccatccttaatagatggaagaaaagcagtaagcgattatggactacaacctctagcgttaagacttatgcctctacaatcaagaaagattgctggtcaccctaaaggcttagcatttatagaagggggcatttataaaagctacttatatccaggacagtacaaggcagtgtaaaaagtacctttgttaattgcgactgtaatttgtttttaacttttttactgtttggaatattctccatcttttgttactatcaaaagttcttcatttgcatatcatcaaataattttcataaggactattctgcagcaatgtatctccaggtagtatcagttttttttttaacttcgtgatgctcaaaatgatcaagttgccctgttacaacttgagcagttgtgcatatctggttcaagaagtttttgtttgaaatacgttgtctttttatattgtttattattctttagtttctcaaagatttagctctggcaggttcaggaagcgtatttgagacgctacgactcggc

SEQ ID NO: 36414 - DNA, 773 bp, Sorghum bicolor
  Intron number 1 from transcript Sb07g004010.1 (locus Sb07g 004010) derived from phytozome v7.0 (chr-ID chromosome_7; pos 4971190 to 4971962)
cgctaccctttccagctgcacctccggcgcatcaggtgcgtggcttcgtcgccatcctttctccttcctcgcaatcgcattgcattggaattggaatgcaactctcctcgatcggtttatatatagttccttgcattgctttacttggaacgccaatcatggatgcattctgtctgaaactgttgatttcttccgatacaagacaagactactgaacctgttaattctcttcttcctgagcatctggttttaactgtagcccgcgaaacacttttcacgtggtttctcgattaccttcttgtgcctctgcatctggtttgtggccatattactccacaaattactgtctattctagattgtggccacttcgatcgctttacgaacttatctctgtcattccttaaaaccgcgttaaatcatcgtacgcagggatcgaatcctagttcaggtcacagttggagttctttgttaaatgtgtacttaaatgatttgcgctatttgattttgctcatctggtaccagatcgatctcaattttttttcctgatttctgatcttaccgaaagaatttggtctctgaatgaacattctgttgtcagtacaatgtgtattcagacatgcttattcagttacccgctatatattgtaacagattcagggagtttttaccgctgttgttccgaaagaatttagtctctgaatttaccctcatgctgtttgatttcttttccgaaacagattccattgcaacagattccgctgttgttgtggcg

SEQ ID NO: 36415 - DNA, 620 bp, Sorghum bicolor
  Intron number 3 from transcript Sb07g000765.1 (locus Sb07g 000765) derived from phytozome v7.0 (chr-ID chromosome_7; pos 605685 to 606304)
tttaggtatgtagcagatcttcagcgtcagtttggtctgagtactgtttgctgtgctatttttagatctttacacctgatttattatttgttaatggagtacgaaattgtttcttggctttaagcagtcattttatttttctatgcacctgagtttaccctcttcagggtaatgactatgtatgcatctagtgttttttcaccttccagtctagaaatacatatcacacaagtagtaatggcggtttttagaatcactattgaagttcgatatattctgggttaaaatgcttaggctatttctcttttacaaaaataccaaggaatttcaattggctgacggttgattttgaattttgaaaaatgtgttgcctgtctcatgaacctactctattcagggtcatttattgccttgtacaatgatgaacctgaacctttttggtagttttgttgaacattttgtattgatgttttccatattagctgtgaacgattctcagtttctcactcaaccttgtacttgtagcaaggaagttcagactgaaattggaagccttttattaacttattatttactccatttcttaacattttctttacttttcagtttgaagtacatta

SEQ ID NO: 36416 - DNA, 924 bp, Sorghum bicolor
  Intron number 1 from transcript Sb01g046070.1 (locus Sb01g 046070) derived from phytozome v7.0 (chr-ID chromosome_1; pos 69136266 to 69137189 reverse strand)
ggcctccgtccgcgactccgctcgagaagcgagaggtgagcctcttctatctcccctccatgctccatccatccttgcgatatgccgtagctgcaggtttagtgacgcgtcgcgtgtttatttatttgttatttgagtaccaatttcctgtttgggggacttgattgttgcataggtgttctgaatcctctggtgttaaggtgttttctcttgtgccatggctatactacgtgatggatgagtagcagtagctctgattttgttcattttaaatgttggatgctgtactgtgtgaccaggaatctgttgcgggtgtggccgtgtgggttcttgcttattgatggatctgcagagactttgtgatcgaactttgaagggtctcctaggtctagatgtgcttcgtgaatgaagctgatctgtaggtttgtctagttaagcattgagcatcgtgaaggacacatatttcttagcgcagtaccctcaataatcatggatttttcagtatttgttgtcgaaataaacatgataaaacctgatttctgcaatgggccgaagcctattgaatgaaaggtggtattgataatttggaatcttgccacaacaggcaagcattcttggagaacctaccagatgcaaggtgatggcaataatttggactatgtcatactgagaatctgtgaacttcttctctttcatactgcaaaggcaatctgctggataccaacagagcgtgttctgtccctagtttgtttttttttgtttgtgtaatcttgttaatttgtttgccagtttctactataaaactgtgatttttgagcaaaccatgttgtggtttatctttacctaactgcaatttgaatgaactctgtgaccaaaggatctgatttaccttggtaactgacaaatgctttctacaagtgcagc

SEQ ID NO: 36417 - DNA, 775 bp, Sorghum bicolor
  Intron number 3 from transcript Sb01g016770.1 (locus Sb01g 016770) derived from phytozome v7.0 (chr-ID chromosome_1; pos 16920747 to 16921521)
aggtatttaagtttctgcaatatattgcaaaatttcaataatttacatccacccagtacaaagaaattagtttgtgaaaaagaaatcaagagtctttaagacaagtgtctattttttcaaaccaatgtttccacatacactaagagcagtatgcaggtcccctaatgttatcttatattatgaatatctttatgtgcttatcttgctatactaatttttcataaactcaacctaccattgtgaaaggtgttcggtacagtatgtgatggacttgtctaaagtgctggaaaataggcttttgagtcatggaatagttttttgtttacatatataaggttctggaatagttaattagttgcataagctaataggcatctggttatctgcttaaccggctcgcaaaagcactgaagacgcttgagaggcagtgcttttgtatgtagcctgggcagagaggcagcactcaagctgaagtggtcaacaagcatcttcctatcagccaaaaactatttattttctggttatactgacatgatttctgctttccctcatgtaaaacaaaatgtaactggtatatataaaatggtttttcaacctgttagcatatgcatgtaaagaaaatgcttagaataacatatttttacttctttcaagtagccaaaaaggaaacattagatccttctagtactattggaaaagtttttttttggtaacatgactgctacaagaaatatgtcttcatcgaatcaagtattattttgtgcagcttatatta

SEQ ID NO: 36418 - DNA, 485 bp, Sorghum bicolor
  Intron number 1 from transcript Sb01g046520.1 (locus Sb01g 046520) derived from phytozome v7.0 (chr-ID chromosome_1; pos 69703965 to 69704449 reverse strand)
caaccaaatcaggtaccactattatatctttggtttgatctctgtgattatgtaactgcaactgtagtatgcagaagtttcagatatttgtttgatcccctcaatttaggcattaatgaaactgctgttttttttttgagagagagagagaatgttctctcatctcgatagatgttccctgctcttgcttaatccaactacagatattttagtactgaatattttcttcacaaaaaatcagtcctaatgtttaatctgatccaatccaatgatttttttttaaccttgacagttgattttatggttattccatgtaatggtcagatacttttttgttctgccatatgaaattcttgtccatcttttggtaactgattttacaaagtttctgaataatctgcatcctgtatttcagtccccatatttgacttgcctatttgttttctgcagaatctcccaaaattcagagcccatcggagagaact

SEQ ID NO: 36419 - DNA, 873 bp, Sorghum bicolor
  Intron number 1 from transcript Sb01g046130.1 (locus Sb01g 046130) derived from phytozome v7.0 (chr-ID chromosome_1; pos 69177301 to 69178173 reverse strand)
gattcagtaatgcaccttgttctggctttactctcacactttcccaccgtgcgcttataagttagtagacgtgatcctatatattgtctctgtatcttttgatggcgtttttttatgtgcattggtgaattaaagcttgccttctttataaatttttacttgataaagataatgaagaaaccaagtccagtattgcattttgggggagtgaattttagattatatcaacaatttgtgtctataattgtagtaccaaactttacctacggtgtttgatttgatcaatgttgttagcatgataatattctattatttatctaagaatgaggttaaaaatgtcatagtatgattgacttgtaggttgcgggacaagttttagatatttttaatcaacgaagaagcttacggtttcataacaacagtgttaaggttttttcaccttgtgtaatagattaagacgtgtgtctagagcatataccctttctaatatcttgggtaaacataactctgacacaagtagttaacattagctttttatagtaactttttatgtaggaataataataaaataattttgtagaacatacgaggattatcacaaaattcatatctcatagcgatctagaataatcatctacacaaaaattatatttgagctttgagtttggaccatgagtttatcctttcatatatacgggcatgagttcccactaacttccacttccaacgtacttctgtttcagtatgtagtaacaagataacagcatcactctcctcaataacaaattctagaagagttgtgcatgctttttcatgtgacgatgtctttgatctacagcatattgcgttgttgctactgaatcagctggtcga

SEQ ID NO: 36420 - DNA, 552 bp, Sorghum bicolor
  Intron number 5 from transcript Sb01g037250.1 (locus Sb01g 037250) derived from phytozome v7.0 (chr-ID chromosome_1; pos 60829700 to 60830251 reverse strand)
gctcaaggtaacagattctggcattatctgtcaggaaatatgtttcaaaaaaattatctgtcaagaaagttctaaatgtgctgttctaattggtcctacagcgcagtaatatgtttatgaagatggttaatgacagttgctatctgatggatggttaatgatgtcattagcgatattttcctgtgataaatacatatgtctaaaccactttatttcatcctacaagctgcaaatcctgtatggatcttggagctggagctattctaaacagcgaaacaggccctatttgacagcttgaagccatgtttagttgtttcttttttatgctaattgccatgatagttgaagtaaaataaccattccagatcttagcgtacaggcttgcttcttatgtgatcagcctgagacttttcttcctttagtgtgttcatttggctcctgcacatccttgcgcttgatttggttaatcctatgaagttttgaatttattttctgaaaattcaaatttatgttgcagcgccaccagcacatcgtttgcacagccttctggga

SEQ ID NO: 36421 - DNA, 1029 bp, Sorghum bicolor
  Intron number 1 from transcript Sb01g032280.1 (locus Sb01g 032280) derived from phytozome v7.0 (chr-ID chromosome_1; pos 55164003 to 55165031 reverse strand)
aggcctactccgcccacctcaagcgctccggcaaggtaccgctgcccgactcgcttcccctttcccatctgatccgacgctacgtcgtgtggtcgcgcgccgcggcagtcagcggagacgagcttgtgtgccattgcatcggtttgccgtcgccctccctagctgtcagtcgggaggtgtcccgtggttacattggatccattactgctttggctataccagtgaactcttctcgcgtctggcttcagtctcgttggactcgtacttagtgacatcttaataagccccaatcttttttttggtgttgcaaactactgtatgacggatggcatatgatgatcctcagcatacacgcgagttataggttgcaggaaacagatttcacatgatttgctcacatagctaacttatttcgatttggtaggccaaaagaatgctgctctttgcgtcgttgtgctacgtctgtaataataatatgcgtgatttgttttattcaagtccagatcgtctgtgcagagaagcctgtttgtaaagtgttatacttgagagttaggcaaattttaactgtatgattaaaaatctagagcactcagtctatgcaggccctagatgaggttggccttgtttctattgatgtatccgttaaatacagtctgtagtttgtccttgtgtctggagtaaaccttggctctgctcagaatggaattgttgtttcaggatccaaatgcttgggattcaggaagttgaacactgataattccatttttctcgtgatgaatagtttgttccttattatattaggctcaggtgcagctattatgtagctttcctttttctatttattatcaggtattaattcaaaatcgtagttaagacttttgtgttacttcaggaaaccatgtttgtgatgtatgagcaagcaattagtttagagctggggttttcttcttcattgcatttgttctctggtattgataattaatatgttcctatgtgtaattccttacaagtatcatcgtattcctgtag

SEQ ID NO: 36422 - DNA, 618 bp, Sorghum bicolor
  Intron number 3 from transcript Sb03g033770.1 (locus Sb03g 033770) derived from phytozome v7.0 (chr-ID chromosome_3; pos 62025582 to 62026199 reverse strand)
ttggactcggggattcaggctaccagaagtacaatgtgagacttttttctgggtaattgagcttgtgctaataattcattatatgccgccatcagaacaatgatgtatgcctacattttagtgacttattgctagaagaacgttccacacggtgcatctttagaaagcagtatacggttataattatatactccttagtgattctgatccctttgctttgggttgttgtgatgaatgatttaagtgttaagaatcatattttgggggagatataaagctgttttttagtcctagtactatttaggtgaatgcttgtaaactgaagctagtatattcttaagttctaatgtaaccacagtagcagcttcaggtaacatttgcatgcacctcaacataacattgtaaattttcctttttgtatattgtaaacatacatgctgccgtatccttaactgtatttatatcttatttcattcaaaccgaggctgtaagcttgtaatatgcttttcataagtcatgacttctggtttacaatggtcctcttgtttctgtttgcccttgattagtgtgtttactactgcagtttgctgcaaagaagcttgatagaaggcttttaca

SEQ ID NO: 36423 - DNA, 815 bp, Sorghum bicolor
  Intron number 3 from transcript Sb01g008020.1 (locus Sb01g 008020) derived from phytozome v7.0 (chr-ID chromosome_1; pos 6934393 to 6935207)
gtcaactagataaattaaccaacaaggtatgatgtgtctgtaccgtgctagtaccttgcacattctcatgtgcaaacttctggcccttctcattagagctatttctaggtcatttgttacctgaacacaatgaatatattattgaagaaattgttgttttgaaggcagttcctattaaagggtaaagtttggtcagttacaggacgctgaaaaagatcttctagtaaattatcaacatttatgacttaataaaagttggtaactaggagcaaatttgcacctatccataacacttttgaactacatagtgagaactttgaaattttgcagatctaatcaaatagatgaatctgtacaagcttatgttgacttgttcaattataatgtcttgatcaaagtagtaggatacaagatgtgccatctgcgagtgttcttctgaaggatctgtttttagagaaactcattaacaggtcgttattgtttttaactttttatatcccaattcaaatggttttgaaaaacagcatgacgccccaggtcttgtttgtgacaattggccacacggatagtttgaaaggttttggtaaaccattatgtttgacaacactaatgttttttgccctatggacagtactattttatccataatccatatttacagtctgcatcactggaaagcatcgacacatgcatgtacaaaaatgcattcaatgatgaacagttgatcgatgaaccctattacacattaatttatcctaacctactaattatgagcacaaatcaacaggaatcccgatcgagtgttcaactgggcc

SEQ ID NO: 36424 - DNA, 377 bp, Sorghum bicolor
  Intron number 2 from transcript Sb02g028780.2 (locus Sb02g 028780) derived from phytozome v7.0 (chr-ID chromosome_2; pos 63922187 to 63922563 reverse strand)
tgtaagtaattcttttctttcagtgctgtatttgctctgatcttattctcttttgcaacacaatttggttccactttttatggctgtcatctttcctttgaaatcatcgttaatgatacatcaaacataactgcttatacgagtgtgcattgcattttggttggaacattatgatttttccaaaatgttctccaaagtatcatggatctaggaaagatttagcatgtacgtctgcagcatcgtgaataaaattattgacctttggaacatacaaagtcacacattttttactgcaattctgaacttaatatgtttgtgtaaccctcttctatttgctttcagatactatacctctccaactggaaggaaacttaggt

SEQ ID NO: 36425 - DNA, 976 bp, Sorghum bicolor
  Intron number 2 from transcript Sb09g007180.1 (locus Sb09g 007180) derived from phytozome v7.0 (chr-ID chromosome_9; pos 11698774 to 11699749)
ccgctctcgaaggccccgaactcgacaagctcaaggtacgtgcacggtcactttttcgtttctttgaatatatataatactcctccgtccgagaacaaataaacttctaaattcatcccaaaatcaatctattttctttaaatttaactaaatttatagaaaaacaccaataataaaaatatttataacaccaaacaaattagtatcattacatcacatatataataaaattagcaaatatatccgtacattaggccacaactcaatgcatcttaaaattggactcgaaactatcattggacacgagttgttctaactggaataagcatgtgtcatagttcgagtcatgtatacgggtcatagattgcactagagtagtctagaaaattaaaaaaaagtttgaagaaacactttattttttttttaagattacgtatagatagatacagatataagatatagatataaacatacatatagatgatagtatgattatttggtgacatcaacaacactacttctttctataaagttaataaaacctaaaataatttgactttaagtgattctagaaaatgcaccttccatttttaattaattataagtcattctggcttttatctagatacattccaaaagccagagtgacttatataataatttacgattcggtggcattaatgatgttactctttttctataaaagttagtcaaacctaaaatagtctgaccttaagctattctagaaaattctttctctcttttaaattatataagttgttctggttttctagatatgttgaaaaaaaaagtcagagaacaacttataatttgtaatgaagagagtaatttatctgtggagggaggtgatcatttgcgatattgtttggcatccattgctctgcttccaatgttactaatcgttcctgccttgcattcagtcgtcggaggagctggtgctgccgtcggacaagac

SEQ ID NO: 36426 - DNA, 845 bp, Sorghum bicolor
  Intron number 1 from transcript Sb08g004540.1 (locus Sb08g 004540) derived from phytozome v7.0 (chr-ID chromosome_8; pos 5440300 to 5441144)
cgctgctctttgagggcgccacgccgccgccgcaggtataggaactctttccctcttttctttgtcctgtcgatatgagaatatcatctgttctgttgttcaaatgaaaatgaggcgtcagctgcgagctggctctttgtgatgaactgatagctagtagatggatttggggtacctcaacacttagagagatcgaattggttatgaattcagatccttgtgcagtaatgcttgtgtggtggaatcagagaattggtgtaccaaaaagaaatgatgaaaaggttggtgtgggggtttttcacctttttcaaaatgttggttaggttacaaaatgttttcgaaggtcatgtgtatgcttgataatactattcagcatttttttttggagcggagattatgtttcttgttggaatgagggatgcattctttatccaagttctacttaagaacactgaagaaattgcttctcattgcctcggttcattaatggaaaattcagaagtctaattgttagttgggtcctctaacctatctgtatagctatagcaattctgcattgggaggttactgtattgtagattgcttgcctccttttccaattgcaccttacttagactactagtgctgaatgttctgtcagttaatttggctgttctgattggtcatttggtagctaagcatttggttagtggcgtagctgtggctttgcaaactttgccagctttcattggacttacttatgaatcaaacactattcttcttttgattaagggttttttcccctgtattctcaactgatattctctatctccattctcactttcaagtaatatgttctgcagaga

SEQ ID NO: 36427 - DNA, 953 bp, Sorghum bicolor
  Intron number 2 from transcript Sb10g028180.1 (locus Sb10g 028180) derived from phytozome v7.0 (chr-ID chromosome_10; pos 58063849 to 58064801)
ttacaataacactcttgccactctcaaattcgcaggtcttcttcactcacatcttcttcatctgcttgttcaagctgatttcacttgattgttgtgttagtcgcgatgcacagctcaatattctcagagtagttttagttgtacagagtacggacatgtatatgtaatgtagtttcgatcgtataccaaattatttgtgaactgagcttgtgttagagagataaactgggtagcgttgaagttatatcacataatctttgataggttagtttgcgaccttgttcaatttgtgttcattcatcaagtagatgctggcatttgttaagcactttggttgatttggcatgataaagctaacatatcttttaaatgcctgatgcatatgtttatgaacttttgaaattgtggaggacaaacatgggtaggaagttggaacattaaactagctattcgtggtgtgtcatgtttttttcagacaagaggcaggagcttcatgcaaccagatcagctgctgctaattgctatcctcgtcgtgtttcccttgtctgccaaatattctcctctctagttcctttcaatgaactcatgagttgcaggtgcttccatgtacattaatcttgtagcaaactaccaaacccttctttttcaattttccttaagcctgtcagcttctgacatcttagagatgattgtttacacatctcctttttatgtgtggcatacatactgacatttgcatggattaaatctttggagtggtaaatcttgaatctgtcatggtagttattatgcttactaaccagtggcagagttggttggacatgttactttgcatgggccacggaagagttcaagagtagttttgcttctaacaaattgacaattagcatagcgtattgatcttgtcttctcaaacagattctaagaccttgaaggaggaacaaagagaggag

SEQ ID NO: 36428 - DNA, 696 bp, Sorghum bicolor
  Intron number 2 from transcript Sb02g040830.1 (locus Sb02g 040830) derived from phytozome v7.0 (chr-ID chromosome_2; pos 74758496 to 74759191)
gaactgggtcctcggcacagggacaagtaatttgggtgagtgcccagtgctaaccatattcttgatttgatagtgtagtctaggtcacattagatgaagctatcctccaacttttagctaaaatatctgtgttcgtctaccatgtttttattctctcaaatcaggagattaacattcaaactatcctagttcatttagcaagttctttcatgcattgacgaccatgagttctgtagtgtttaatggatatacagtgtattatggaattacttctgtagtctactttattaaaggaacttaccaattgaggaaaagaacatccaccatttgcatcatcaagcatcattattgggcactcatcaatgtcaaatgcattttgctacttgatatgttttttcttatggtgatagccttacaattcacaagaatttaccctcttatttgaccatgttcaccttacagcgttaaaaatattgagaaaaaagtaaagcttcttaaatgatgatcagaaattaatgcttctgttagcttttcactaaaagttagtttcatcttgtgggttgacatgctttcttcgctgaaaatatattttttaaaaaatatagtttgattcagtgctgctggaagcctggaactgatttattatggaataatatttcagatccactttggagtcaacagtggtgcaacaaggtt

SEQ ID NO: 36429 - DNA, 1069 bp, Sorghum bicolor
  Intron number 3 from transcript Sb01g049650.2 (locus Sb01g 049650) derived from phytozome v7.0 (chr-ID chromosome_1; pos 72594752 to 72595820 reverse strand)
ccttcgagtcctggctcgtcgccgagcacaacaaggtaacccatcgccattgccttgccagttgccccccagatctgcctatcactgtctgtttgtctccatcgctgaattaccgctgctgtctccatcactgaattactgctgctttagaactgctctgcctttgcctttaattcaaaggtttcctttccaagcgcctctatccgtaagccacgtaggagaagatgcatagactaacgcgtatttggaatgtgttgctcttaagttatgccttttcctaatccttgtcgttaataaattaatatagtgggaggacccttagattagattcattcatcacatgcttgtcattgaagctagctaagtgtattggatcttggatgtttgactgctaatgcaataggacacttatataatgagctgactgacttacgattaaaaataatgaacattgaacggacgtagtagtatgatagtttgaagtttcgagaataaaaagatgtccatgttatgtttcactgctaataagcccagtaaaatgtggctttgtcaggatcagaaaagactgagggaaatcttgctggattcaagctgaaatccaccatgttatgttttgtttgatttctgctacttgtgtcggtggatcaggtggttgacacctgacgtggccaagaggacgagcatttaacaagcatggcccagtcctaataaaaagccatcacggatggtcttattgagaattgtccttttattcggccatgtcctggcggcattagtctcattcgcagataataaattatcaatagaatccaaaggatctagtgcagtagctgctgcctgtgatacaaaatgccatgctcttccacttgcggcaaaatctttagtaataccacatgatcttacatttgtgaattctggggatggacattttggtttgtacagacactgaatatttaccttcttttttacacgaacaaggggggaggccctacgctactgaatctgaatatttacctttctttgatcttttgcagagaggctttgacccgcagtggctgtccataacatt

SEQ ID NO: 36430 - DNA, 457 bp, Sorghum bicolor
  Intron number 1 from transcript Sb04g023020.1 (locus Sb04g 023020) derived from phytozome v7.0 (chr-ID chromosome_4; pos 52676996 to 52677452 reverse strand)
atctgcggccttgccaccgctcttgctcttcaccggtgagctcatttgctcctgatccagctcgttagttttcattaaattaattactaccaagtagcgtcgttgccgataattaaacagcagtgcatatatatattatttcctagttatactagtgagtgactgtctttattattattatttatggttgacgcttttggatgtcagtattgtatgtttcgttgaaaatactattatttcagagtcagtatttcatataagtggtcaaatttcccgttaaccatgtactacttgatcgaggcagtattttttttcttctaaatctcagttcccgtatgcccaattcaaaccatgacgtcgttgtatttcgagttctgaacatgcgacgtctgctgatgacacatttgcacccatgcatgcaggaaagggattgctagtctcgtgttggagaagtcta

SEQ ID NO: 36431 - DNA, 930 bp, Sorghum bicolor
  Intron number 1 from transcript Sb02g009940.1 (locus Sb02g 009940) derived from phytozome v7.0 (chr-ID chromosome_2; pos 14505107 to 14506036)
gtcggcctctgcttttgcgccaggtattggtcttcttctaacattcaagttgggctcagaatttttttttttgaagcattacaaaataatacagcttgaataatgatctgtgagaagtttgtagcaaaaacaaacacacaacccaaccctaactgcctagtttaatgttttcaatttccctaaaaaaagggcaattatcttcttttagttatactatgggaaatcaaaaaaaaatatccctttaagaaaaaatagcttgaaaaaaaaattttactccctctatcctagaaaacttgatgttttaggattttaaaaatatcctaaaagattctatgttgtatctcttggataataagggtccatatcagcttgagattacgatctgcatgccttcatgcattccttttaataatggtctatattccttattagtatgggtcacctttaataaatacggggtacatatataatttttattgaacattaacctattataaaataataaaaacattaagattttagggacaaatggggagtatatgcaaatcgctatgatcctaagataaattagtatatttatattatatttcaactaataaataagaatacatagtaccacttttcgaatgacgatacatatataggtcttgtttagttccaaaaacttttacaaaataggaataatagcacttccgtttgtattttacaaatattgtccgattatgaactactaggctcaaaagattcgtatcgtaaattacagataaattgtgtaattagttatttattttatttatatttagtgtttcatgcatctgtcgcaagattcgctgcgctgttatggaaaatctgaaaaattttacaaaataaaacaagacgatattccctccgttgtaaattacaagctatcctaccaccatttcagccgca

SEQ ID NO: 36432 - DNA, 923 bp, Sorghum bicolor
  Intron number 1 from transcript Sb06g032560.1 (locus Sb06g 032560) derived from phytozome v7.0 (chr-ID chromosome_6; pos 60712153 to 60713075 reverse strand)
ccgacctgtcaggggcagaagtacggtaaggcatctccagtccagtgtcgaccagggccttgtttagttccgccgtagtactttcgtttctatttgacaaacattatctaattatggagtaattagacttaaaagattcatcttatgatttagtaattagtttttatttttgtctatatttaatacttcatacgtgtgtcgtaagattagatgcgatagaattttgaaaagattttggttttggagtgaactaaagcccaggaagaggtgggacaaggtttcgtcggcgaggatccaccacctgcgtgtggtggcggccgagacattcggggacgtcggggctcgtggagcgtgcgctgcgacaggtggtgctctccccattttctaatgtcggttactcggggcgggagacggcgcgacaggtggtggatcggtggaagctgccactgccgcgaggcgccattggcgagcacacgaccttgctgcgaggtgtagaacgatcgtggtgcagaacgaggcctcggggccaggggaggcggcggcacctcctgcgctgcgctcgtgatcgtccttcttcaacacggcgcgctagcgcatgtttgactagtggatcgcggtggcgtcgcgtcttttggcaacggttacggggtggagcccgcccgcccgtggcccgtgcactgcgccagccagcgcgcgtgccgctctccatgtcgttgcgcctcggcttccagagccttgagccggtgctcgccgcggcggccgagtcgctgttcgggcacccgctccccgccgcgcgccgtcctccggcgcgcgcgcgcgctgcacgcgctcctcgtggtctcgtccctgccgtccgcgccccgcccgcccaccttcctcgctaaccagctgctcgccctctactgccgcctctccgcggtccc

SEQ ID NO: 36433 - DNA, 762 bp, Sorghum bicolor
  Intron number 1 from transcript Sb01g037860.1 (locus Sb01g 037860) derived from phytozome v7.0 (chr-ID chromosome_1; pos 61416686 to 61417447 reverse strand)
ccctttaaaccggagggcaagcctgcccagggctggtagatctcgatgccccttgtctcggttattactgttgctttagatgtactagtgactagtgatatgcactcttaacctccacggccccttaagcatgtatgcccaccaccactggctttgtttatgtttagttggaccatctaatgcatgcccccatgaaggaaactgaatagttttttagtgctccactcgaaaagctatcctttttttgccttacaatgggattcacttggtgtacaagcacatgctagctttcaaaggtgctatttacccgcatcatgagtggaactgtgattctgtatgacaagtagtatattttctgacagttttttcctttgttgaatgtttctgagcaaaagttcctttctgcgatccaaatgatgtgtttcttctgcctgaagtaatgcttgttatgtgcacattaagatttcagttgctagaaagactggcaagttgagctaaagctattaggtgcaatattccaatcgaagtcaggtggatgtgtataactctttattttgattttttagatacatctctaagcaaagagcagccactttgctaagatcacattccaagtcaatgctagagtatccttatactgcatattataagcaacagcagggttatttgggtatctatctatctatctgatcatgggtgtgcttcatttgtaatgattgaatgtatgactggtccctttgtatgtttctcttgttgacaggg

SEQ ID NO: 36434 - DNA, 610 bp, Sorghum bicolor
  Intron number 2 from transcript Sb01g027570.1 (locus Sb01g 027570) derived from phytozome v7.0 (chr-ID chromosome_1; pos 47859539 to 47860148)
ctccgtcctcacagctcttgcctacgagatcggtatgcgttctgctcttccttcgtttccttcacctcgatcgctgccatccatccatcatgccgtgtgccaacacaattctagtttcctcatcagttcctctcaacaacccagccatatgacgtgcatgtgtcatgtgcgtagccatgctgtgccattcaatggaagcattggcgtgccccttgtttcttcttcagtataaataaatggggaaatatattatgcccagcttgtatttcccatctatacaatagatagtacgatgtgttgccatttggattttcctaccgtcatgccttggtacttgttatgattgccttgttccttcagtccaaaaaacaaaggacaacgccatgtttgcacattatatttagtattacgagtttttataggatcctagcttggtcttggaagctaccaccaaattatggttttgattttgggaggtatcatatgttgtttggtgtaactttaaacttttcggtaccctaatgtcgtcaaggactacagaaacattattatattactactaataaatatctataatttgcaggccctctcagtttcgaccttaacggct

SEQ ID NO: 36435 - DNA, 707 bp, Sorghum bicolor
  Intron number 2 from transcript Sb05g022140.1 (locus Sb05g 022140) derived from phytozome v7.0 (chr-ID chromosome_5; pos 53747588 to 53748294)
ttgctgaaggagaatctagagaagcaaagtagctggtactagtccacagaaactctgctttttaaaagatcagataaaattttcttttatgtgtctatatgtatgctcatcagagttgattctattggggtttttaattctttggatagaaaattgcagactaggcccatataaattgcaacaaactaaaggtacaattttagtataaaatatatgcaataacaattttctgctgagtaagttatttttcattaaattctgttaattttctgaatccacatcacacttaatagtacatatgcataatggcaaatttcatgacatgctctagcagtacacacctacacaattttgagttgtagtagggtgggtgtgaattttgtggcgtgtacgtgtattgatgttggggtgtgtgtgtgtgtgtttgctctctctctctctctctctctctctctctctctccctccctctagaatctctttatcagtttgtgattgcagcatttaacagtaaattttgttaattttctctatccaacttaatagtatatatgtatgatggcaagtttcatgacaagctctagtagtacacgcttacaccattttgagttgtagtacatatgtacaggctactttggttgctccataaatcatttcttcttcatttttgtaggtgctcttgttctttgtgccccctgacttcaaggt

SEQ ID NO: 36436 - DNA, 725 bp, Sorghum bicolor
  Intron number 2 from transcript Sb02g040250.1 (locus Sb02g 040250) derived from phytozome v7.0 (chr-ID chromosome_2; pos 74252107 to 74252831)
gcggaatttgggaagacaaaggtcattgtatcggtgtaagtgcaacatcctttggtaccacctgttttttcatagtatgttttatgttttggaatataaaatgcgaaaagatagtgtttcacttaaatattccgcacatcaatgtactctccttgcctgttaaatgtttatattggtgtctttgcaatcaaatatgagcaagtctgggtcaatcaaagcagccctgtaactttagggcactcccaatcgagaactaaaggtagtttctatgtgctttaattatcttgacagctaagaaatttgctgatgtggcaataaaattaatgtagagagagattagaaaatgaagaaatggtttttctctcacgaaaccacgtctactcgtggatcaaaaacggaagaaatcaacgatgtagcgttggggagactcgagtcgtttctatttccttgctccggatatgagttttgttataaggtcaattattgctcactggagaaatccacatatgagtttagttataaggtcaattattgctcactggagaaattacttgctctagcatgtgtttcttagcgttgtgatatttgtatttcctctattttgtctctgaacttgacgacttgtgagattctttacttatcctgaatctgtattattggttgaccattcctctttgtttcatgactaccttcgcaggtttggaccaagggaaagtaaaaaagca

SEQ ID NO: 36437 - DNA, 822 bp, Sorghum bicolor
  Intron number 2 from transcript Sb03g040550.2 (locus Sb03g 040550) derived from phytozome v7.0 (chr-ID chromosome_3; pos 68173234 to 68174055)
aggtaccactacacttctcttctgtttcactgtggttgcatgttgttgtatctgttgaacatgtgaatgtctctttaatgatgcacccatcaaaggtcacattgtatattgtttatagtcgctgatatggctagctgtgcttagtagttacccttgattcgctatgtgagcctctaatgtagcatgtgtttagctatgtggagatttatatagatgtttgatggtatattttccattcctattttcattattaactgtttgttttgttgacctgctgcaagatttgaatgtgaccataggcagcggatcagattctgtacattttactatgttgtagaatttggcaggttgaaattagtctgctggctcttttgtatgacttaatgtgattttttgaaattagcatgccagcaattctcttagtgctggttggttccttagctgtacttatgtaaatgtgggaattggggaattatctaacttgtttgtcttagcagttggagttttcagggatttttctgtcttattagcccattgcttgctgcattagatagaatttatattctgcaggttcagttttgtaagatacttctgttaggtagctagttgtttcctgttccttttggtttaacctggtgcaatcatatgtgttcccttgaattagtttcttaacaaatgtaatgtcaaaagatatatgtaagtctaagacaaactttgctatgcagatcttagacagtattgttcgttagaaaaccccaaaggccttaatgcatcatgcaactaattgtttcatctttccttgtttcagtaagctgcagagtg

SEQ ID NO: 36438 - DNA, 968 bp, Sorghum bicolor
  Intron number 2 from transcript Sb03g010860.1 (locus Sb03g 010860) derived from phytozome v7.0 (chr-ID chromosome_3; pos 11827620 to 11828587 reverse strand)
gacgtatccaacctcaatcgccagttcctcttcaggtccgtacggttccccattggcctccccgagtggatcctcacgtgttgcttatctggcgagctggagggaggtgatagggtttatggaatttttcggcacactgagggttagttactagttgggctaggtctgtttggaacctggccactaaaatttagcagtatgtttagatgctaattagaaacactaattgtgaactaattgcataagcggtgactaaccggtgagacgaatctattaatcttaattagtctatgattagctcatgattaatgtagcatcatctgagctaatcatgggctaattatgattaatagattcgtctcaccaattagtcaccgcttatgcaattagttttgaaactagttcatgtttggatcttctaattagcatttaaatatattgctaattgttagtaggttggatccaaataggcctggctagctactttgctaacaactagttgaagacttggctaaagaattagctcacctattagacctcttgtttggatgcactaggactaattttagctaacttttagctagctagcaattagctcttgtatccaaacaagccataaaaatctggcttttgccaaaagatgctgaaaaactgatctttgctgcaggacaccataatttgtgtgtattttttctgccagacacgatctactgttctccacccaatgttagaaaaatgcatccttaaaaagacactttgtcttagtgagttgggaaagaatttttcgctctaaattcacattgaggctaaaatttgtttttttttgccatcacataagctgaagtatcacttcattggagtcgcaactattgtgtgcctttatatcatatatacttactatgtataaatttacctgtcatttttattgtctcaactggagctggctgtcctgttgtacagagttcaag

SEQ ID NO: 36439 - DNA, 598 bp, Sorghum bicolor
  Intron number 1 from transcript Sb08g021470.1 (locus Sb08g 021470) derived from phytozome v7.0 (chr-ID chromosome_8; pos 53137832 to 53138429)
atctgggtgagagtccttctccaacaggcaacagttagttttttttttcgaaatttgaattaaaatgcaagtagcaaacttggcatgcttattaattgggattggacaacgcaggctccctgttcttgggacagggtagtcagtatggaacaatatgctctcatgatgcattcgttgatgtttcgaataattttgtccagaaccttgttagtttttcaccagtttcggtaattttttatgtgttcttgtgcgtctattattgtttgctgcacttccttgaagtacaaggtattgggtggatgaacactcaaaggtcaaacaaaacagattcctgatgaaggtgctaaatctatatgcgtggtggccatttggcctaatttattcatttttgtaagtcgtaggctgcctctttagtcctctgtacttattattgcagattgttaactttgcagtcgatggattcagaaaatgtgagagatgggagtggcaggacatagttgaatcgaaacaaacaaagacaagctcatggttcaacagattcatcgggcgggaaaagaaaccaaaaatgacatggccattcccgttttcagaggggaag

SEQ ID NO: 36440 - DNA, 486 bp, Sorghum bicolor
  Intron number 1 from transcript Sb04g027880.2 (locus Sb04g 027880) derived from phytozome v7.0 (chr-ID chromosome_4; pos 57771455 to 57771940 reverse strand)
cgtcgcaccgctccgtgccaagaaatcgttcggaggtacagccccttcgcctctctgttttttacattacgcatattgtggtcagattggcgtgattcggttttttttttggtcttccctgtcgctttttttatcccgttcgttgcgaattcggttcgctctaatcgaaccaatgttattggggcgtatttggattcgtcattactgttgactttaatggaattgacgtgtgatttggctgtaggattttacgaagtatatagtttggttccatgggttccgattccgagtgatttctggagttttgttttcctcttctaaggggttcggggaggatctataccttctgagtggtttgatttgtcagaaattgataaatcaatcgggttttggattataggaaaaatgcaaaataggaagatggagccccatgcttgtatccctatggttgacaatttttttaatgatcttattcctgtgcaggtc

SEQ ID NO: 36441 - DNA, 999 bp, Sorghum bicolor
  Intron number 1 from transcript Sb10g030410.1 (locus Sb10g 030410) derived from phytozome v7.0 (chr-ID chromosome_10; pos 60067256 to 60068254)
tgctctgccaggtactctgcttgctctgaagctgtggaaccagatgaattttgtgaacattgtcatggacgagcttcctagtccattcagtgtactaatacaattgatccattcagtgtgcaaacagattgcattttgtagtagtgcattgcttactggcttagcatcggtttttcagagctggctttggtttcatttgctgttttacaacggaggaggcgaccatgaccagtaaattaacttggtcaaaccagtagccagtactgggcctttcgaaggagggggaggggggggggggatcagatattcaccaaatagccattaggacgtgtttctggaactgatgtcacgacatttgtagaggctaaatgtgaaataaatggtctgttgtggaattttggcctattggtcagagcaaaggccaagtcaaactgttctgtttactgatagtcaactaaatgatatgctggaaaagtccccacattgtcttctttgttatgtttgtataactaacgcagtataaaaggtagcggacatttctttttacagaagttcaacagcaagaaccttgtgcaaggatactaatgttggtgtttaaaatatgtagtatatgttgtgaatgaaatggtagttaaatcaattggtttctgaatggagttgtagtgtagttagcattgcaacatttattaactgtgctgttagagtgttcaatagttgaaatgaaatcattaaactgaaagtattttttaccttattaaaagatggttgtgaattcgcaccgaactgaaaatggacaggctgggacaggactgttgttgccaaaatgttcacgtttaaaattactaaataatggtttccaatacctgtaaatgcttttgaactcctgtttaaggggtgttaataatgttatgttgttatacttggcatgtcataacttggtatggtccagcagtcattgatcaatacttttctgcttgtgccttatgcaggttggtttgg

SEQ ID NO: 36442 - DNA, 453 bp, Sorghum bicolor
  Intron number 2 from transcript Sb06g030040.1 (locus Sb06g 030040) derived from phytozome v7.0 (chr-ID chromosome_6; pos 58473854 to 58474306)
tcggactgcttccagttccaagaccctagcacctggtacgtcctacatttcctatccccagccggccatggccactatcccatcagcatgcagatcgattgcggatttgttttgtttctagttgcagcgccgccatagttacagtttcttaattgctccgttgtcttcaggctataatctgatcaaagtttccatgcatctaggatcgatgatcagtagtggtagtagtcgttaattatcgatcctaattccataaccaatttgtatcataaatagatccggtttcgttcctgttttcagggttttttcttcatgttcagataacacggttttttgttttctgaaaaccttagtgcagacaacaacaacaacaaaaattaaccactgatctttggtatctcccctgtacatcttggcgctcttgcaggacttgcataacggagcttgcaagcg

SEQ ID NO: 36443 - DNA, 900 bp, Sorghum bicolor
  Intron number 1 from transcript Sb02g025250.1 (locus Sb02g 025250) derived from phytozome v7.0 (chr-ID chromosome_2; pos 60002061 to 60002960 reverse strand)
tgcaggctgcagctgcaggtaaattacatgcttggctatggactgacgttctattgtttttgcatttagtatttcagaagtttgatcttttggacacaaagtaaatctggaatagtccataaagatgccatgttccatttgtgttgttgcactaattaaacagatatccttatatgaaaatgagaaggcagaagggtctttcaacctataaccaaataattaaccaatttgatgactacttatgttgtaatatggggataaatactagacaattatatatgaactttcaacaataccactgctgaattttagcatttacctaagggatctacctgtagtggttttgatgcagaaaacaagaagcatcgatgcattagatgagcatatgttttttttctgaaatagcacagttttatgacactggcaaccatgtgttgaaaaatcacttatgcaatggcacataaattttgaaatactgtataggctgatttccccacagttccttcattgatggtaatgcatgttcaaattgaaatgaatttaatggtagcttcatatgttcatatgacaccaaaacatgttttgagatatgagatttgggagataatcgagaaataaaggaagaaggggggcagggggcgtaagtgttgaactaaatgcttgaaaagatctgaccaacagaaccacccaattcattgctattacatctgaacagtacagtgaatgaattctagtaagcaatccatctctcacaaaacctacgttgaaatagtagagctattccatgttatcccattctgcgtacagagtttgtgaatagaagacatttgctttgcactaaaaagctacagcctatctctacatccaattttacagtcattgacttgctggagaactaca

SEQ ID NO: 36444 - DNA, 867 bp, Sorghum bicolor
  Intron number 1 from transcript Sb01g045650.1 (locus Sb01g 045650) derived from phytozome v7.0 (chr-ID chromosome_1; pos 68707427 to 68708293)
ccggcggcaggcgcgacgccaagcttgagcacagggtaacacgcctttgagaattcctgctgattgcatgcttatctatcacatccgtgtatgtacacatatatactttgttatttaatttaattttctgcttactagtcaagcgatttattgctaaccaacgtttattatacaacttattaaaactgtattgatgcttgttagggatagatatgtattcacatcgtttcatttgttcttgctttatgaatagatttgtccgtttctgttcttatttccgtttatatatagtgcatgatcttttgacgccggtgtctgtgtcactgcattgtagcatcagttcccttcctgcaattacatatgaggagatttttcggtgcaattattacctttttttcagcacaagacgtatatatatacctcatggttgctttggctttatagaactatagcaacctgaatatgttactgacaattaatagatggtaaagtccatatttatttttaatatttttgtcgctgtgaaaaaccataaatgttttgtcatataccgtatatacttataaaaatgttatgaaaggacatacatcaagtagcatataacttcgtgtatagagatcaaataactaaattatctatgctgtatgcaagatatttgtcgtaatgcatcttctgaaattgcccgaggatgattgtacgtagggggttcaacctcacatttaagcgcaactaataggatctttaattttgcttttggtttgtctcttgttagtttaaataagcagaaatagaagttttaaaaaatgacctttagtttgattctcaaattgttgaagtagcaatgaaatccacatgattggcttgcag

SEQ ID NO: 36445 - DNA, 833 bp, Sorghum bicolor
  Intron number 1 from transcript Sb01g040990.1 (locus Sb01g 040990) derived from phytozome v7.0 (chr-ID chromosome_1; pos 64287662 to 64288494)
ggcgggttcctctccagggtcctcctgtaagcgctctcttgctcccaatcttgtaacatgttctctgtagattgacattttgaggttggagctttatcagaggcatgagtgttcgggttttaaatttgcttccttgaaatggggatttgtgggtacccattcggagacttcagtctctttctcctgatttaacttcattcatccttaatatactgtttttttcaaaaaaaaaaaaaagaggagatgcgttccttgtcgatttgtccgccttcttcttcgccggaaaatgaggctgagagcacgcacccgttggaaagtattttatggttctcgaggagcatgggagcaagttttcaatacattgcacaacggtcaaaggttctgatcgtttattcttccggtccgactcattctttttgaagatgatgttgtaataatcatgtgttacttcaaatgtttttttttttgacaacatacttcaaatggttgagatcggagaatactatcgcatgagtttatgtggaattgctgtgctctttttatctttgacctgcttctgtgcttcatcaagaactagatttgatcctcttcatctctgtgttgatgaattatctccctttttgctgtaagcgcagaaacaatgcatctttaaattgtcagcttttctttttgtggtttattactgaataaaggcggaaaaaataaaataaatagtcttttactgaaatgtcaacttactatgagaaggaacaggcttttgtcacaatatacaagtggtaacatgccatttatcttcatttgatatgtcaattcctgtaggttggcttttggct

SEQ ID NO: 36446 - DNA, 810 bp, Sorghum bicolor
  Intron number 1 from transcript Sb09g022380.1 (locus Sb09g 022380) derived from phytozome v7.0 (chr-ID chromosome_9; pos 52041409 to 52042218)
agctcgctcggattcgccagctacaccgccttctggtaagcgacatgaaaaccacaaaccgtctcctcgttgacctttgtgttctggggttttcttcttctgcacttatgttggttggggtttctcgtgaatctatccatttggcggggagcagaccaatttccgcagcttagcatggctctcgcctctcagctgcagcaatgcgagattacagcgtgtttggttgctggccaggctccctggatgcagcaatgtagtggttacggtgctggggtttcaggcgcggttaggactcaggagtgctactagtacccccactttgcctcggatcattcgttgacgactcttcagtcctcattattgttttctggatgaattgagtcgtaattaggttcatttttggggggattgtggagtgagggaggggcgattaacaaactgcttgttaatttctgggttgcgttttgttaagtgcatttagtttggacttcggagggttagttgcaacattcgagacaaaaaatctgagaagtatatgattgtcgtccaattatacagataatctgaaaaacatgttagcatggaggtgtattcaaagaatctattttgtttgatatgatgttgggagcttgaaacacgtggtgcatttgtggtcattccagtatctaatggatccttgttgctgtgattgcttatgtgctgatgtttagtaagatgttaactcagattggtacagctcgtaaaatttctcctttcgaatttgcaaaaagctcatattgtccttcacatttcagctacttgattgcatca

SEQ ID NO: 36447 - DNA, 783 bp, Sorghum bicolor
  Intron number 1 from transcript Sb01g036630.1 (locus Sb01g 036630) derived from phytozome v7.0 (chr-ID chromosome_1; pos 60247216 to 60247998)
caggtcttcgccggcgacgagcacctacctaccaggtatggccggcccttctcttcccaccctgctgtgcgcaaccgaacaccccaaaccctagcgtaagttattcgtattcggatctgaccacaggtatatacgtacacagatacctactgagctcttgcaaagattatcgggtttgcatgtgcacaccccccacacccatgtcctctactgggtgagttagtttggattggattggtggtttattggactgggagctcttagtctgcacggaggatttgttgttggataggggcatcagtgaccgactgaccgcacaggaatggaaatatttaggtgcaaatagaataagaagtagatttctttcccgtttattcacctctagaactaggttggtgtcacttaatgagattaactcacacaaatttgttgcgccttgtgggagttattactgaaccttgtggcaatcaaatattaccaaaaaaagaatttttacggaattatatgtatatagaagctctatggcacagtagtggttcacctgatgcataataatatgttttatttgtgttcctggatggggtttggtgtgtcctaactgtgaatggagttgttcaactgttatgcatccttgttgattggagacaatagcatgttcattacccctgaaaaggagacttttcttcagatgatatttttcctgttttatcttcttgatgacaacactaacatgcttctatgtgcataggtgaccctattcctgttcttctatccgtgtataat

SEQ ID NO: 36448 - DNA, 625 bp, Sorghum bicolor
  Intron number 4 from transcript Sb01g024860.1 (locus Sb01g 024860) derived from phytozome v7.0 (chr-ID chromosome_1; pos 40259589 to 40260213 reverse strand)
cttcaagcttgcgcgcactaacaatcgtggagacggtgagccctgattactcatttcagtttgagcctagaaggatgacgaaaaacatatcgtgctgtgttgttgctgccaccgtccatttgtgcaaataattgttgtttgtattttgaaggttcataaaaacataaataacttattgatctaggaaatcctgaattcctggtcataggctatattaagaaggtgaaaaaagtgatctttgtgggagtgtgcttttgaataggttggaattcaacttggctgctgtgtgtgtcctttttgattgcatcatcgaaatccaagtgtattgatgttggggttgttggtctctttgtgctgaataccactgatgatgatgtcaaaatgactatcattgtattgtgacacctgttttccctttccagtgttgataagcgctttgccaaatgcctatgttgttgacatttgtggtgattatcaattagtatttgttctaggctctcttcctgaatgttctgaatatgtgcagacagatttgaattggatacatgtcaccttggtgtttttcttcctaaagatgaatctctatgcaggtcttcttactgctgtacatagcaactacttcaat

SEQ ID NO: 36449 - DNA, 939 bp, Sorghum bicolor
  Intron number 1 from transcript Sb03g031470.1 (locus Sb03g 031470) derived from phytozome v7.0 (chr-ID chromosome_3; pos 59854268 to 59855206)
gccagcgtgttctcaacaccggctctcccatcactgtaagcccatttcctcatttcccgttcattttttgtgttttgagctgatatatgcggatgtctacctgacgattcggcggacctggcgggttttaggtttgatctagacgtacgggtccatctgttgttcagtcagtgctttctagatctacgactgtttttattgattgtatgcgtactgatttgtttgataatccacacgcctgtagcattatcatcatggtttagtgaaattcaaaaatgctgatctattccatacacgtttttatatcaactgggcctgtttggttccccttgctaaattttagtcagctaaactttagtcactttagtagctaaacttccaaacacactgactaaaaaggagctaaaatagtttagttccactagtcatctatgagtagctaaaataattttagctggctaaaatttagcaagggtaaccaaacagggcttgtctcatcacgagtcaagattatttaccattcgttagtttgataaagttactaaggaaacttcatatatccataataaagtataaacatttggaaatctttgaaagttttccccatctctctttgtcatctactcagtgtatcatggtcacatgcaactttggtgacttgcttattatgtgttctatgatttagctactaaactcatactaagtcgttgatacacacaaaatgacttgttagttgttacacctgccgtatataagctttctacctatatattgggtatgtaggctctagatgcttacagtatctgaacctagttgttgctactcgtaattaccgtgctacaccatcttccaaaccatgtctcagttgtgcttttgcatttgtgacttgtatatctgtttctaggtccctgttggtagggcaacgcttggacgcattat

SEQ ID NO: 36450 - DNA, 769 bp, Sorghum bicolor
  Intron number 2 from transcript Sb08g021910.1 (locus Sb08g 021910) derived from phytozome v7.0 (chr-ID chromosome_8; pos 53657466 to 53658234 reverse strand)
ggggcaacggtacgttctgttagttttgggtcagaatatgaaatttatttggctgattttgttgttgtggtaacaatatactaatatatcacaaaaccaatatagtaatacatatatgtaaaaaggagaactcatttcagtggtcaattccacattttcagtgatttacgtgacagttcttttcattttttccttctctttctcaaactgtttttaatgttgtgtattgtttaatgagcatgaaattcacatgtgccttaaatgtacagtaaaattgcattttagtgcctatctatttaataaataaataaaaatgattggctaatatagtatttctaccatgaaaaaataaaagaaatacaatgtaacccatagaataaatgtactatagttggatgggcaggtgtaatagctatatctggtgagattttctttataaatgcagggctgaagccatatctttgaggatatagaaagggatattatatcatgaaaacataaaaggactacaatgtaatccagggaaaaaatgtcttaagattaaatgagcgtatatagtatagctataatctggtgagatttctttataaatgctatgctgaagcaatatcttttccatggattgcattctaattaatgataatatagaaatgagatatctttatttgatgcttcccttttcaagtaggaaatctgtagaatatttatgagtagatattattgcttatcttctagcattttttgtttgtggatgcagcctggaggtcgt

SEQ ID NO: 36451 - DNA, 486 bp, Sorghum bicolor
  Intron number 1 from transcript Sb05g007000.1 (locus Sb05g 007000) derived from phytozome v7.0 (chr-ID chromosome_5; pos 12055822 to 12056307)
agatcgaattcttcgccaaggtaattaattaagacgactacacaaaggctagctagtagattatacaaaaactacttgggtgatgtctagattgcttgaaaagtgaaaacgtgtagtgtggttgttgttttttcttggtcattgcttagtgctctgcaccctccaatctccaattctccattactaatctaactggcatcagtggcaacttccaggtaaggacgctcatcttccctcttgactttgaccccctaaaaaaataaaaatatttcgtagtaaaaagtcattaacaatagcaaaagtgtggcggccatatctactttgctgttaaaagcttcgttcaggaaagtattagtgaccccggcccatccaggggtttcggttgttgcctttttaacaacaggattttctgttatactattatatatgcatgtcactttagaacattttgattgtcgatgcaggtgaaaccaggcctgagctcgt

SEQ ID NO: 36452 - DNA, 586 bp, Sorghum bicolor
  Intron number 3 from transcript Sb02g039830.1 (locus Sb02g 039830) derived from phytozome v7.0 (chr-ID chromosome_2; pos 73986632 to 73987217 reverse strand)
agttgttggattcggtgagattacaatgttgaatgttctgtacagttaccgtaatctactaccagttattggtgaaaatgtacatactggattctggcaatagattgtcaatatgacagatactttagtcctacacgcgctaaagtttatgataatctcttcctgtaatttgttgtgctatacagcactttatggattgcttgaactactagattaccagaccatatggaggtggagcatcattattatgcaaccttttcacttgcacacctcagttcaaactatcagagtaatgtgttgagaggggtacagcctgtcagttctggtgtctttttttatgtagtttgttctggtaccttgttatcttatctcatatattcaattgttcagatcacgctgtcacactccaaaactttgcagtttgaagtagaacaagaatggagactagaaatttagtaacttgttgttgattcatttttcatggtgaaaatgaatgcactatttgtcacacaggagtgacctgtttgctttttttttcgcttcttttgtaggagtgcaaacaagtggacagaggaagcacattcta

SEQ ID NO: 36453 - DNA, 807 bp, Sorghum bicolor
  Intron number 1 from transcript Sb03g002610.1 (locus Sb03g 002610) derived from phytozome v7.0 (chr-ID chromosome_3; pos 2509586 to 2510392 reverse strand)
cacgccgcgccgagtcgttcgagaagcttgacaaggtaggacctccttcgttgcttcgcccatgctactttgttatcttcccattttgctctcgcctttcgcctgtgccggcatctcagaacagtaataatctgtgaaattatgctgtaaattttgagtttttttttgggatttcaattcctagatgagaagataagctgatgtatctttgaacagatggggagcagtaaaattgtgcggtaaatgaggaaatgttacgttttacatggtatatttccgcgacggggaaacaatttgatatcgcgagatcttttcatttcttggattcgtttttgtctatgcctggcgatggcagctggggacggtacgaaatagtaacattccgttatcagtgggggatgccttttgtgttggatgcgagaatgccgtggcatttcctttccttttggacatttttgtagtttcagtggaccgtggaacctatgaatagtagtcattgctagcaagcttttggtagaatgtgccaaagtttggtcttttaccaggaatgaaattagactactgctcttcgtatttcttctgcctttttcctgcaaatgttgtttaactagaaatagtaaaatattctgctaagaccggcaaagagacatactgatcacttctgctgaatcagtataacaaagagtagtattctgtttactctgttctggatggatactttaggtttatacattggaaattgttttcaataaccgttcttttgtttattcagattggtcagggtacatacagcaacgtttacagagc

SEQ ID NO: 36454 - DNA, 652 bp, Sorghum bicolor
  Intron number 2 from transcript Sb08g015630.1 (locus Sb08g 015630) derived from phytozome v7.0 (chr-ID chromosome_8; pos 41762616 to 41763267 reverse strand)
gtcgtggtcattggtatgttgctgatctccatgggtcgtcttctctcttctcttctcgctctaagctcagctcagtggggtttggatttgggatgggttctttttaagagacagctcattcttcaatctccatcatgtcactatcgttgttaatcacatgggataggagggacctcaatgattatggagattttcttttgtttgtttttttccataaatgagatttgttttgattcggagtctaggaatatctagaaaaaggatcttgcttgctgacaagggggaaaaaacgaaatgtctacattttcttttgagatgcaagcgaatcatgcagtgctagtctgacaggacaagtttcttgagcaaattggcctattagttgtaacttgtaagcaagctccttgtgttgtgtcagggcaatatgtgtgtttttatttatttatgcagctgaagaaatgttagtgtcagctttgaaatagaagaacagcatgtagttagcctattaaggagcatccttggaacaaaaatgtcaatgtgatggacagaaaagtcttatttgaattcctgattttcaatgtccataagtcatgtgctgtgccatcccttgtgcttttcaggcacgacactgaactacttcctggacaaccgcatc

SEQ ID NO: 36455 - DNA, 982 bp, Sorghum bicolor
  Intron number 2 from transcript Sb01g048280.2 (locus Sb01g 048280) derived from phytozome v7.0 (chr-ID chromosome_1; pos 71302502 to 71303483)
gaacaacgacaactccctcaccgtcggcgcacgaggtaactgctgctgctgctgtctgttcgtaccgccggctagagctacctagcgatgccgccgtacgtcgctctagcaggggtacctgatgagtgctgcgctagtagtggaattcaggtagctagtacagtaatacgttgcggttggttacgtacttacatggcggtgatactactaaacgccttcgatcgaataaactgtgtaggtagctagctacgtacgggaagtttcgttgtgagtttagtaggagtcagctacgaggaatgatcagcaacatgacgaagctgctgcagagagcagagcacgtacgcacggtaccactagaagaatttcgaagtaacacctttaactaatactacagtactaggagtacttcattaattgaactccaagtattatctggttactcctatgataattgataaggacagacagtaaaaaaaatctcaacttagctctattattacccctcgtaaatatagattaatgatgaaattcacaaaatatatctaaaaaataaagttctcagtccaccctaccttataaatttatgtctaaaattagaaaaagagcactaagaattccactgggccagcagcggtagagggggcagcagcccctctagccccactgttggcttcgtcgctgactgtacctccaattctagagttcaggaaatcaggagtactatgtcagcttagtcctggtttactttaccactagtacttgtgatgtttagaatcaaatcatcaagcagtcggaagtagcgcactcctgagtcctgacctctcgtggtctcgtacgtgtaatttgacggtaatggcaactgagctgagctgaacaagaacacagttgaagaagcgctgtaggattaattagttaattaatcattatatttgttcgtcatggatcaggtcccatcctgcttgaggactaccacctggtggag

SEQ ID NO: 36456 - DNA, 550 bp, Sorghum bicolor
  Intron number 2 from transcript Sb10g024310.1 (locus Sb10g 024310) derived from phytozome v7.0 (chr-ID chromosome_10; pos 53292755 to 53293304 reverse strand)
tcttctccggcacggccaaccgcccgctcgctcaggtggggtcactgactctgttcgtccatgttaggccgcttggttccgtgggctattacaggaaagaagaaaaactgttgtttccattttatgcaacttgggtactatagtgctttatttcttagttctttgactggttttaagtcgtcaatggcactgtgcatgataattttacttatacagttacgcgcataattgcagttggatttagtgctttacatgaaagagatgtctctgcagttgaaattcgaatattttttaaacgtgcaattttttattttatgcattttatatctttcaactactattattgtgatacgacttttgtgccagtactattaaaatagtaggtttaaggtgcttgcacctttttatttgtacggtttctagattttgatgttttatacactgtggtcgtggcgacatcgcttctaaacacagtactgaaaattgtaatgtccctctatgtctttactttctaggaaattgctgcttacctgggtgtagacctcggcaa

SEQ ID NO: 36457 - DNA, 433 bp, Sorghum bicolor
  Intron number 2 from transcript Sb08g006250.1 (locus Sb08g 006250) derived from phytozome v7.0 (chr-ID chromosome_8; pos 9299670 to 9300102)
gattgggggtcaccgaaataattgctagtgtcaaggtaagagttcgtgtttgcttttgcttccaacagggtgatgccaatgtttttgcatgttcagttcaatcctctgtacagcatcttatatactgaacttgcttctaaattcctaccaatcaactcttattttctgtagacattgaggttatcaattattgattctaattaagcatcaggcatctatgctgcaaagctctgaatgacaataaacattacgattgagagtcaacatatctgttgatattattagtacttaaacttgcccaacagtagtaatataaacttgttagacatagtgtggtgtacctcttcatctgtaattttatttgacttcttttgttttcgacgaattggcatctgcaggctgaactgggaaaaccaagcattcttcatcctga

SEQ ID NO: 36458 - DNA, 707 bp, Sorghum bicolor
  Intron number 1 from transcript Sb01g045920.2 (locus Sb01g 045920) derived from phytozome v7.0 (chr-ID chromosome_1; pos 69006568 to 69007274 reverse strand)
ggccaccgtcgtggcctcacctcctccacgcccaggttggtccacgcacctcctccccttccctggctttctgtttcgccgtgtcgacgcccatacggaggtagtagcaccgagcgggcgggctaaccgcctcttcgattcactcgcatctcgctcctcgtcggcagtagtttctagcgatcccttgtcccgttgccgccctcgatgcctccgtgcggcgctgctgcgaattgcttggtgacctgctgcggaatcgccggagcacaacatggattgcagctcccgtgtctctcggtgggtgggtgggtgcagtgtgtgctccaagttgctggtgatgatctctgtacgctctcgatcaaatggcctgactgcctatgctactttgatgtcgcttatggaggaatttatcactctggaaatgtaatagatcatgcttgcttatgcttaacagctctcatatctatatgattctcgatactgtaagtgatatttgctccgtgttacctgtttgttaactagagaacaggggaaatgggcaaacaaatctagtcatgccacttgatgatgctgtgtaatttcgttcatgacttcattggctctgaatgatgagcttatcactttattttcgttttatgatttttttttaacaagtctgttttatggtttctataggaagggattccaagcgagggcatcagctcgtgttg

SEQ ID NO: 36459 - DNA, 947 bp, Sorghum bicolor
  Intron number 1 from transcript Sb06g032480.1 (locus Sb06g 032480) derived from phytozome v7.0 (chr-ID chromosome_6; pos 60614372 to 60615318 reverse strand)
tctacttcctcgcctcgccgctcacctgcaagaaggtacgtacgccgcgcccggtcttctcttctgccaccgcgcgagtttcttagggttccggccttccgggtgctgctttaggcgattaaggcgtgcgatttttttcccccttcgaggcggccggtttggtttgggaatagggtctcggtaaggtttctttgctaggtgcctgtgaatttcgcggtgaaaaaacatcaaattctgttctggttttggacgcatgttctgtttagggggcgatatgtggaatcgcgatttgagcagctttcgggaatttgatataatttataacccctgggtccaagcgtgtgcattttccatgtctatgatggtaccaagagccaggttaatgtgttttgtaaagttgtgtcatctgggcatggggtaggcttactggcaccacacacatcacccttggatttagtgacctctacaatcttttagatgttggagaaggcctcatgagaaaaattttctggtgcctagaacctcactgggctttctggattggtacatgctggctattttattatggaacagtttctctatcataatctgacaaaacatgttgtgcaatacaatatcattctaacttattgtatacactatcagtgtactatatatgtgaaaaaggcaaatagtcatttgctccatatcaatgcaaacgcctgatatgtgtcagtagactttcatgcctggctgtcctctgcttcttgtgtgtattggtttacatattgttagcccattcattcatacatggtccggcttgattagactgtatagttcagtccactcataatactatcccactgttgaatttctaattatcatgcatgtttacctgctattgtttcctataaccatccaatcaaatcttaaactaatatttctctcaaattccttccattagggta

SEQ ID NO: 36460 - DNA, 866 bp, Sorghum bicolor
  Intron number 2 from transcript Sb04g001913.1 (locus Sb04g 001913) derived from phytozome v7.0 (chr-ID chromosome_4; pos 1637986 to 1638851 reverse strand)
tacaggcgggcgctaccgtcttcgccgtcgagaaggtccgtaacgttgcattgctagtttgcgtggtggtccgtagctgggctctgtgctgactgcctgactgctgtctgctgaaagtgagagagagctcctgaaacgaaatcgttcaaatggttcagcgtgtttgggtgaaggaaggtgtcggtttatttctagtgggtgaatgatactatcatcggtgtcttgatcgttgatgcctcaaaacctgagactgagttatgaatgatgtgccaatagtgtggtctttcagttacttgcgaaagattggaagaagttattttatatagactgatctgtctttttttggctcctgtaaataattattatactccctccatcccaaatgataagttattccaagaatctcggagagtcaaagcatctcaagtttgaccaagtttatagaaaaagatattaacatttatggtaccagctaagtatcattaggttcttcattaattatattttcatagtatatctatttgatgtcataaagctttgtaattctttctataactttggttaaacttgagatgctttaacgctccaagattcttgaaatgacttataaattataatttgggatggagggagtagtctatagtcaaacgtgaagctgaacttgaggagttggggtgcatcggtccaaatagaagtcactcccctgatattccagttgtgattgcctttttgggctggtgaaagtagttgcaattttcttctcatttggggagctttaacagttgaagtctggaaatcatttgtattgaggatccaccatagcctgcatcatcgtgttctgttctttttggtaacaggacaagcat

SEQ ID NO: 36461 - DNA, 535 bp, Sorghum bicolor
  Intron number 2 from transcript Sb03g044260.1 (locus Sb03g 044260) derived from phytozome v7.0 (chr-ID chromosome_3; pos 71609665 to 71610199)
ggaaggagttcacgacgtcggactcagcgagaaaggtttgtgatttcggtggaacactgtcacgttatgacttgtgacgttctgcgtgtctctttttgagcagatgttatcaatttgactcttttatttcggtggaacactggatttatccggtagaatattaactttacttaccttagtgtggcttaactgaatatgtttcagaatgcgttttttgaaagctatttcagatatttcacctttcaagccaaatgcctagagatttgtgctgctatttcatgctgacgccagttgtatatgcaaataatggatgaaggcatttggaaatcccaaatcatgcatagtgtgacccctaacagacttgctggttttgttcaaaaaatgcaaaatatagaaaaaaaataaaaataaaataaaataaaacttgatgacttgttgtagttatgttctttgcttctgcaccttagttttctgttctaatacactgaactttcatgtaggtggttgagctgaaggctttcaacaagtttgagaa

SEQ ID NO: 36462 - DNA, 852 bp, Sorghum bicolor
  Intron number 5 from transcript Sb09g029520.1 (locus Sb09g 029520) derived from phytozome v7.0 (chr-ID chromosome_9; pos 58175648 to 58176499 reverse strand)
tagaaggatttggagtgggtgtaatatcttatacagtatgcagctcttttctcctccctcttagtaaaagcaaattactctgtacagaaatggtggcattttcatgtttatcgtcttctaactgttacagattacagttgtttggtattctttaaaacagaaaattctgcttttcataattcacgtcttaacaagcccatacaaacaaacaatcccaagccctgacgtactcaagacaaaccagtaagctctagtggaaaatgtaaacatactaaggcatatagtttggtattttgaaacaaaattaaataacaaaattcgacgaacaaaattgcaaaatttttagctcttaaattaaaggctacatccttaggttacataattaaatattaataatactaggcaagaaaactcataaattaaggttactgacccttgtttggaataacatggtatgcttatttcattgtcaaatgagactattagcacttagaagtgactgaaatcctatgccgaatactgttgcggattgacttcctatatatacaacttgttgcatattgtacagtcaagttttaattttccataaaaccagaatggcaatgggtaaatttcttcgcatggcaatagcatacaggtagcctttcaaatccagccatccagcgtaccacttgctggtgcaggtttttgcgacagggcattcctggttaaacaatgcagtttttaagaaccttttagcgacttagttacttattctttgatgcttttatgcccaatggttacctttatgattggaacttatttttcatggttccaggtaccggtttatattgcagaaatcgctcctcagga

SEQ ID NO: 36463 - DNA, 990 bp, Sorghum bicolor
  Intron number 3 from transcript Sb02g023490.1 (locus Sb02g 023490) derived from phytozome v7.0 (chr-ID chromosome_2; pos 57140128 to 57141117 reverse strand)
tcggagaacattgtgtcaaggaatatccttatctgcttttattttattatctttattctgtttgtcttgtaaaagaaaatgtgaaaaatagagcgctgagactatagtttatactagtgcagtcattattgttttgatgttttctaatatagtaatatctgatgccatgcttctgtagtgccaatatgcattttggatgctgatatatgtaacaaatcattgcccatggaaatatttcttttgggtgtgtttgtccaagcttataacattctataaccgaaattaaacaaatcagctatacatacactcaaaatacaccattatccatacaatattggtttttcctttttgtctcctggccttgataactattttattggtgtttccttttttttcctgctcttctgttttatattaaatttttatagccccgtacttattgttttcttggagcatacacatgctcgatacaaaataacggcaacgatgatcatattttggttacagtttttcttagtatatcttttccggcctataaaagaataaagcagaagtctgagacatgcaaaagaatatttcttgtctgttttgccaagctatacacagaatcaaaactttccattagaatcgaaggaaaataccacttttgctgttataattgtatcatcaatgtttattaaactgcacgataaccattgttcagttacactcagtaagttcaaaaggaactcaaatatggttaaattgaagcttttattaaggtgtctttaatatattcttgtataatcttgagtccggtagtgcactgagattccacgatcactatcacagtatgaccaatcacaccattttactttttgataattcgaagcacatatttgtgaaatttacataggaatggcagaagtcattgaaagtctgtttgacattagctatatatatacacttgtgtgccacaatcttcttttttctttaactacattgcactag

SEQ ID NO: 36464 - DNA, 673 bp, Sorghum bicolor
  Intron number 1 from transcript Sb07g004050.1 (locus Sb07g 004050) derived from phytozome v7.0 (chr-ID chromosome_7; pos 5068982 to 5069654 reverse strand)
aagtagccataagcattactattaggtgctgattcccctcttgttctttgttttttatttccccctcttgcccttcttcttcgatgattggctgggaactacatcttgggatttcttttttctattattattggccttgatatggtcatgtgggtgattctttgcctgttttatctgtgagatggcaagcatttatttgttcttttgggccactggattagctgtgagttttgtttaaacccctgccttatcctgagctcagtctactcatattgcatcagaccaacaatggcaaacagtttccatgaatatggttgttcatgaaaaatccttaccagtaggtttaatcaatctcttcaaactagtgaaatttcttgaaagttggtttggtccttgaaaacagcttgttgcctgagctggtgggatggactagttctttttctgtcgttctgttgatagagctgagactctcgacttgtggaggaattggaacctgaacctgaacctgaaagatttgattctgacgtgcattcagagaatcgatttttctgtttcccaaggaatcctattaagtcgattgttgctagtgaagcactcttgtgtgcaatctctccaagatttgtggatttcaatgcaactgaagcctctctcgctctgttttctccagggtttc

SEQ ID NO: 36465 - DNA, 645 bp, Sorghum bicolor
  Intron number 2 from transcript Sb09g020370.1 (locus Sb09g 020370) derived from phytozome v7.0 (chr-ID chromosome_9; pos 49663697 to 49664341)
gccaggttggactttgacaagtacaccattaggtcagcaggaagaaaatgcttgcaatggccctcgtacatctaatgtttggtggaacctcaaggtacatcaatatttgattgtactctcatcaagagaatagaaagtattgttaggcatatgtttggtcaatgttcacatgtccatactattctgtatgaaatgttggagtctatgatgaattgttaaattcaatggccaaaccccaattactgtaaaagctctcaacctcatggtctagacatatttcaaatacatgttccttttaataatatatatagtacagaagcaaatccctatgttaaatgattagaactggttaggcatctgtctatacaatattgattaattttttgaaataatatccaacacatttgcagcctgctttttgtgaattttgtgtaacactattttcctgccaatataagctctggtggaattttcttgtgcacctttagcattacttggtactattttagtttttattatgtgagagttgcacacttattgatgacttgtgaccttaaaccagagttctaacagtgaagtgtcagattttagctgctattgcacttgtttattaatcgtacttgatcaataattataggccatctc

SEQ ID NO: 36466 - DNA, 790 bp, Sorghum bicolor
  Intron number 1 from transcript Sb07g012320.1 (locus Sb07g 012320) derived from phytozome v7.0 (chr-ID chromosome_7; pos 24561171 to 24561960)
gctcccagacctgcctggaccccgacgccagcacggtatgcccccgccgcccgcctcctgcacggggaatgcggcggcttctcttggcgcgcctggccgtctctcgcttgcggcttgcctctgatccgtcgggtcgcgccttcgaggcgcatttgccgttcctgatgggaaattgggacgcgcgcgcaaaagattgtttttctaatctttatttatgaataacgcgttgctcatctggatgcgcaaatcgggggctgggattgtcgccttctcaagtgcacgttgcgtggttgctacttattttctttttgtattgtacgtactaggtaggtaccgacgaatgtggcaattttaggatgctagttgtgaggctcatgttgttaagtatgattccttgtagcagccaataagaaattgatcaagatgttgacagggcagtagttttaggtattttttggatcattatttatggtttcatcgtttcttcgtcccatataatattagtttttcggtctgatgcggaaattataatggcccacttgcttttatcctcgagtggcctatgttgtttgaacttgtcccatctttttttaatcatattttttaaaacttgtcatgatgcagcgattatgttattagtttccatggagtgctgataaattttgaatttcagagctgtccttgtccttgtgtggtgctcatcagtttactcacttttggctgtatacaataacaaacatttgttgtttgttcagagtgttcttggaatcattctcggaggtggtgctgg

SEQ ID NO: 36467 - DNA, 532 bp, Sorghum bicolor
  Intron number 3 from transcript Sb01g047120.1 (locus Sb01g 047120) derived from phytozome v7.0 (chr-ID chromosome_1; pos 70233806 to 70234337 reverse strand)
ctgatccatcccatatagaatttgctcaccacaaggtaattagtaaagggtagttggaacaccatgatagtattttgcagttgaaagtttgattcgaggaaagatgttttgttgtattcaattttgatcgtttgcccaaaagtcaccacctcaatgctgtttaagtatatacatacattgaaattcctcagaaatgacttataatgataaaaggcgcagaatggtctgagtccagcctcttatcttttctgattgctagtgtgcaagtttaactaactgttacaccttaactgtggatatacccaatatattttattgcatcatagttttcttctctttccttatgctacttgcttattctgaatggacaataaataactggctgacttaattgtgctatctatgtggtatgaacttgttccagtggcatagacaaacaaaatgctttgttttcttgagatacatggtttcagcaaatccgtttcctcctctcacaggttactggacgaagagatagagccaagcctttgac

SEQ ID NO: 36468 - DNA, 714 bp, Sorghum bicolor
  Intron number 3 from transcript Sb04g037680.2 (locus Sb04g 037680) derived from phytozome v7.0 (chr-ID chromosome_4; pos 67260029 to 67260742)
caagtgaaaggtgtacaggttagcttccagggctctgttgcattccttgcctaaactgtttgttttcgatcaactgtttgttttctcatcctttgaactattattgtatctgcaatggcaatatgcactcagacctgttcattcactagtgtacactagttcttctgaagatttgttttgtcctcatgctgtgaaactgacagcaacatggaactctcatttaggaactgccttactgccatattatattgttgtaggataagcataattaatatatgtcgcgtagctgattgtaaacttgtatgtctacaagattgtgaagatgtgcactttagtttatagaagaatagctgataatttgctgtcaatagttactttttttaaaacctttatgcaactgtcaactcagatttaaatcagaggccttgagtgagattttgttctaaacttgcttattcacttgcactcgttcagtatgggacctctagtcacatgacaacatgccagctaccaactatatttgaggtcatgcttttattcttgagtttggtaatgctggtacttcagttaccataataatatgtataaaataggtgcttctagaaatctgtgatgaacacttttttgtcaagttatccatgtaaaaaatttaaaattcagacatttatatatttgggatgtactttgaacaggtggaagagctttattctcttg

SEQ ID NO: 36469 - DNA, 766 bp, Sorghum bicolor
  Intron number 1 from transcript Sb04g006530.1 (locus Sb04g 006530) derived from phytozome v7.0 (chr-ID chromosome_4; pos 6562695 to 6563460 reverse strand)
cctccgcctccgcgtccgcctcgcgcagggttagggtctgctctgctcccccatctcgtgcttgttttttcctgttggatttggtagagaaggcttgatctatggctctcggggcccgattcggcgtcgcctgatcgattcgtgcggttttctttgagcggggtgggggaaggggttgtggtggtgttgattcgtcggatacggggatttcgcgggctgggaattgtcaaggagacgggagctcgcaggttcgtgggttgatttggcctttcggttggtggtttctcttgttctcttggggtggggaaatgaaaacgcgtttttccttcttatttattttttattttttttgttaaaaagctgtataaaggttgtttgtcactttgtcatgatttgatttgtcggtccattttgcctgatttttcaaaagtttatagcgctgttaatagctagtgatttaagtgctctattatggtggaaatcgtgtgtatgtagttgtaagcggtggatttgttaaattatgcggcagatttggtgcacgctgttgtcgatttacatccttggggatttttttggtatgtttttgtagagattcgaatttgatatattactctgattcgtttcaaaagttggtttgagctgtatttgcgcagcatattttgcgatagtgacttatcttcctaaaaattaggatcttgtttcgcccaccacgattgatgtttcctaaggtggcattgattgtttaatgtgcagcttatagtcagtg

SEQ ID NO: 36470 - DNA, 864 bp, Sorghum bicolor
  Intron number 2 from transcript Sb04g033050.1 (locus Sb04g 033050) derived from phytozome v7.0 (chr-ID chromosome_4; pos 62989991 to 62990854)
tgataagctgctctcagacaaagttatagttcattgtaagctctctcattctgttcgtcactttgtgttgacagtatctcatgagctgtgagttttgtatctactggcgtccattgtatcgtgctttttcaaatgccaatttgacaacttagcatatcacaattaccaatccttgaatcttcgtctattcatgcatttgattttcagtggcgtctgacctttacacctgaggtgcttggttgatggattgatgcattagttttttttcctcaaacacgcaggagagttgggtgtcattgcattaagagagagaaaggctaaaatgacatgtatggtttctgaggcggcattgtggcattttgtggcgctaggggtatgcctggacacctaggcgccttctaggtgacgtctagccaatatggcgtaactaaaaccttgtggcatcctgtggcggatggggtatgcctcaacgcctaggtgatgcccccaaaaccatattggctaggtgcagctcatactgaagttgcaaccgcacgagggatcaaaataagggagcaaccggaaaagaaaagaatgtttatttcaagctgttcttgttggcagattatgtgtgcttgatacaaatgattggcttgttgctacttggcactcagctgaaataagataggatcattatcttatattctatgttttgttgagctcttggaatcttgtttccttgaagaatatatgcctagccatgtgcaactgatgatgcagaaagttgcaaacattaaagatgattgtggcgatgtttctgtgttattataatctttcttatgcttacttgaatgctttttttaatgtgtaggtagcaaccgcaac

SEQ ID NO: 36471 - DNA, 734 bp, Sorghum bicolor
  Intron number 1 from transcript Sb02g033890.1 (locus Sb02g 033890) derived from phytozome v7.0 (chr-ID chromosome_2; pos 68428929 to 68429662)
cgccaacgtcaaggccaagatccaggacaaggaaggtaaacttagcagcagccgccgccctgctcctctcctatccgcggttccaaagtcgaaagcttgctcctttcggcgtccgctgctccaaagttgaaagcttgctcctttctgtggtttcgatgtgttcttgtagccatttacttgatcatcgatgtgcatgtcagcatgtggttgggttgatcgcggcctccactctccctatttctctgcaacctcccccgtttaatgcttgaaagtttggtcttttttcatgtgtttattattattgttacttgctgtccttgcacgcgttggaactttacatgttctgggtttattgattgtggttgatcgcgtcgtccatatcgccgtgttcgatcctgatggttttgggttagaacagagcactttgatgcttcaatatggttattagatagattaaacccaaaaaaacaaaactttcttcttgatccggtcaagcacagggcttggttgcgcttttgcgttcttactttactgatctttgtgcttcttggggttaatagtcgggggtggcttgatcggattcttggcaactccacagcttatttgaactgatcagatccctgtttcccaactcggattttaatctttgtagcgaactaaccggccatggaaactgttgtttaaccaatttatttgcaggcatcccgccggaccagcagcggctcatcttcgcc

SEQ ID NO: 36472 - DNA, 715 bp, Sorghum bicolor
  Intron number 1 from transcript Sb07g025790.1 (locus Sb07g 025790) derived from phytozome v7.0 (chr-ID chromosome_7; pos 60928463 to 60929177 reverse strand)
cgctacaagtgggctcgttttcatccccgtcaaaggtgatcatttctagctcctgctgttgtgtcatgtcaattgcgggggattcagttcaattttagcttagcttagcgagaaatgtaggagggagttctgggggttattagtattatgcagggaattgtgggtgttctgtaaccaaccactgctgaactgaatggtaatctaggatgctagcttcgatttgaggtgttttcttcatagtttgtcgtcagtgtgcatggattgattgatccgggcttgctttataatgacatagctaattattcctatatacagtcacattgattgtgtttgtctgtttgcaattagatgaagaaccgactgaattctttatggcactgtggttgacatattcctaaattgtttggtgtttgatgcttgctaccgtttccatttgttggttcatggcctctcttcaggcatagttatgtaaaagtcaaagtttccaggtcttagtaaaaaaattcccttggaatcctcaatgcatctgcacatgtgacatttctgatagtatgcagttgcagggctggcttcattctgtgaactgcgcagttattttgttgcaatttaacctctaaaatgctgttagcattagtgcgaactctgttggattgatcttttcttgctaaaatgggtttctctgccttttttcttctttttgctcctccagatccca

SEQ ID NO: 36473 - DNA, 456 bp, Sorghum bicolor
  Intron number 2 from transcript Sb02g035600.3 (locus Sb02g 035600) derived from phytozome v7.0 (chr-ID chromosome_2; pos 69992503 to 69992958)
ggtgtacccaggtattggagaattcatagtgagttctctttccaaaaacacatattcttccatcttttttgttgttacgaaacaaaaggggattcgtctccatgtgatgaacaaagacatcttaatcttggcctatgctttgatttctgctggaagaagtcacagaaaatgaggggggaaaaggtataaaagtgactaaatcaaagagacacttgaataaagtaaaattttgactgatcaggccagggatgccttaaaagtcgtactgcgcttgaagcaaagccaagaccacaattaagaataaaaccagatgaaatcaaatgtttgataaactactgaagaaaatgaaataaaacaagtgccaactaatataaatatgtcattaccagcaaacagaggactacactttaaaggctacaattgttactaaagcaataaaataaaaactgcagtgct

SEQ ID NO: 36474 - DNA, 929 bp, Sorghum bicolor
  Intron number 1 from transcript Sb01g012180.1 (locus Sb01g 012180) derived from phytozome v7.0 (chr-ID chromosome_1; pos 11158443 to 11159371 reverse strand)
caagtccggcaccgagcaggaccgcaagcacgcaggtaccctattcctaccgtcgccagtcgccgcccgtgtttctcgggcgctccgggtcccttgtcttctctcgcgtatactcgagatggagggggtaggtgcgaggtcatgttgcgcttgcgcgacggggcgtgtgcggtgcctgatttggatgtgcggttggtcggatttcgctggggctggtacacgagttggctacgcttttcgtcgagcacctccagggtgccggttcgatccatgagtaatggaataggcgttttgctttgagaatccgacatttgaactgataggctgtttcgccgtattgctgatcaggagtatctgaaaacccctcgtgtttctggacttggtcgcctgtgaatgtgatatgactggtattgatcgcctggcagtgggttctgagtttctctgaacataatgaaaatgctgtactgcctttggcttcactagacattggagtttcttttttacatataaaccaaatcaaatctagggaacataaactttggggtttcctttttgttatatactattatatataaaaagctgttcacaaaaacagagagttcttccagttcttctgaagtgagacttacagtatattgttaggaaaatatgtgcgaggttgtggctttcagtacaaagtgaactgtggtctttagttaggtttggctgatatctgtgggattttgccgcattgaaatggttggagatgaatcctaggatatatattatttgttgactctgatgcaaaagtatttgtattagttaaactgcaggaaatatcaaatgcaaattattgccttggatgccttttttacagcagtgctgacagtgtgacactatgtttctttattccagctaagattttacctgttgtgaagaaccagcacctt

SEQ ID NO: 36475 - DNA, 414 bp, Sorghum bicolor
  Intron number 2 from transcript Sb06g004760.1 (locus Sb06g 004760) derived from phytozome v7.0 (chr-ID chromosome_6; pos 10999767 to 11000180)
atccagggagttgcacaaaaaccttcaagtgatcagtaagtaggccagtttctttatgaaatactctcttcatttttttacttgtcatattagtttgttctaaatcaaatgtttccatctttgatcattgatttaaaaaggtatataggttaagagcataaaattcatgattttagatcactatgagaaatacttccataatagttcacaggttatgaaggtttttttttgaaattgatgacaaaacatgaaaaagctggactttaataaaactaacatgtaaaaaaggaacaagaacatttcataaggatgcatgcaaaagtttatttattttgatatgaatagtggttgatggaaaataaaatttctaaaatttttaataaactaattaacttccgtttgtttggaccagtg

SEQ ID NO: 36476 - DNA, 975 bp, Sorghum bicolor
  Intron number 3 from transcript Sb10g007760.1 (locus Sb10g 007760) derived from phytozome v7.0 (chr-ID chromosome_10; pos 7611741 to 7612715)
acatcgctgcgcacgtcactggggacttccgcaaggtgatgcgttctcgctctcgcctgtttttccatgcctgtagaagcagtctcgatattgcgatctgatacgtcggtgtgcgatcggttggaattgctacctgcttaccttggccaggggtaactgaatgtggatcgaacctttatctgttgatttttcgtttcttgagtgttgatctcatgtaagatatcgagatgtgaatttgtgtgtttaagtcaaacattgagaatataaatcatgaataactttaagtttttaagtttgaaaaatgtgaaaacgatatgaataggtttgtcttgaaaaacactttcataaaaatatacatataccactttttgataaatgtttttgtaaaaataaggagtcaaagttaggctttagagaccatgtggctgtcctaaatgactttctttataggtatggagggagtattcattatgagatttttttttgaaaattcattatgagattgttgtcggatccagctgtgtatctgggctcagtcacatagattgttctttatgaaaaatacattatataatgtcttttgcctttgttgcatgctggtgatctatactccaagttgcagttttttttatcctccttaaggcaaagctcaaatgaaaattcagtcttccttccaaaatctgatgcccgcagcccaccatttgtcttctctttattttgtttgtatcaatcgtaaaacaaggttagatatgggaatatgcaagatttattttgacagggtctactactttagaagatggcactcattttcatattgatatttgggaaccttattctaggttttgcaagctccctgagatttcaacaaaaggaagaagactgcaagagtaaaatttgccaaactctgtgacctaacctaacctttgttttgttcttcatttcagctactggtgccacttgtaagtacataccgct

SEQ ID NO: 36477 - DNA, 788 bp, Sorghum bicolor
  Intron number 1 from transcript Sb03g035900.1 (locus Sb03g 035900) derived from phytozome v7.0 (chr-ID chromosome_3; pos 63920481 to 63921268 reverse strand)
gaaggtgagctttttagttgtcatttgaccttgcatctattggagtttttctttgctaacacatcatctttgaagcactccagttcatttttgtttttcatggtgatatacggtacggttagggctatagcacagttctttcacaaccataacttttatgcctggtttctgccactataaaaaatagtgcttttaacttatgttgctttaattatgattttggaactgttttcagtggttggttttgtcaattatcgttttacccctattgaaagaaattatttttcattgttgcaatgttttttcatcatgttttatgagtggaacctatatgttgggtgttactttgcttctacgtttttactctcagaaactatttctgctcattttgtaaaatttcctgaatattattattctaaagcagtgattgaatactgcaacaatatatgctaaaaaagatgcaagtgcatgcatggctcctacaattattcttacacatttgaaactataaactacaacttcagggttatttaactttaactggagcacttgatgtagatcatacattctatgctgccttgtaaagagcattctgttcaggtagtgagcattttacttttacctatgtaattgatactgtggatgaagtacaatgaaagtaaaatgaaaaccctgaaggatggaatgtcccattacttcttgtttttctccttgcttcaatgattattactttctttggttgtattgcagaatctgcatccgctgttgagaaccaacttgtgccagat

SEQ ID NO: 36478 - DNA, 870 bp, Sorghum bicolor
  Intron number 1 from transcript Sb02g023340.1 (locus Sb02g 023340) derived from phytozome v7.0 (chr-ID chromosome_2; pos 56956722 to 56957591)
ccttcctcgtcgccgtctccggcaccttcgcccaggtccgtccattcctagaaaatccctactttatctttgtcccgcggcgtgttttttctctcttggcgtgggatctcttgccacgaatttggtaggtcaccagtccgattgtgcggatcctcagcggtatatgcttcggtacgctactttggttcatccgctgataattctgtgctttcgctgtcgaggctttactggccaaaaagctggtgaaggttcgctttagattcctgtgtggctttgggcaccctcttcgctcgtatcagcagtcaaatttgagatgctataggaaaccaaatttagaataaaatgttagcacgaaatttttgctgtttgtttctcctgatgactctgaactattatttaattcagttaaaaatttagtgatgcattcaatatggcaaaatcgaaacatataaggaaagtagaactgccatatccatgactattaatggttgatttatgtctattccatgtttatattcataaattatctgatatccatgaaattaatgttttacttctttccattccaaattttgaagtgggaaccttctctgccatttttctcatgaatataattttttttaactttgaacctgttgtatgaaaatctggttggatctccatgaatatcattgtttgcaatcaaaactgattttgaagattgaaaaccttgaatttagtttgcttgatattttgccacatcaatttttatgcagtcaaattttagtcctcaaaataataataattttttgtatacaagtaaaagatgagaacatgtgtgcatgaaaaatgtttttttttttgagcaggtagcgatagctagaggtttga

SEQ ID NO: 36479 - DNA, 1042 bp, Sorghum bicolor
  Intron number 1 from transcript Sb09g000980.1 (locus Sb09g 000980) derived from phytozome v7.0 (chr-ID chromosome_9; pos 850280 to 851321 reverse strand)
tgaattacttaataagtgcattcaaaggtttgtattgcttccctttcttaaagatatctttatcttaggttcactaaacttctatgcctatctttatgttaaatttccatagagtatatatcttgtttccttgagttgatcactatatatagtaactagtcattcatgtcatcatacatggaaacttccatctagctagggggaaatccaacaaatgcagacaaaagttgaattttgaattttcaaaaaggagaattcaaacctaatatttggccactaaactatattaaacaaaaaatatcgacaaatttgtagattatatgagagcaagaacgttggtatagatcatcattcgagatagtttgaaagttaacaattttaagtttcaaaatttgagaattaggatggatattttaggactacaaaatatctcaaatcaaaaacgtatcaactatgaagatatagatcccatcaagaaccaaaacattggtatataacatgtcaatattcggcatcttttgaaaattgataaatttgaattaaaaatatgagatttaaaacaaatatttggatctcaggttgatctgaaataaaaaggttgtcgtctaaaaattgtagatggtgctgagaactacaattttcatataagtttgtctttatctgactttagatgaaaaggctatagattctttgtgtggtagccatttacaaaggtaggagatgcacctctataaatagccaaattatttacgaaagctggtttcttaagagatttgcctctgaaaattgatttctagaggtaggccaaggctcttgggccttgatgatttctagagacatcagtgcaaaaggcccaccatggtcaacgaactctactgtcacaaaattgttttgtagtagtgagtttgtttaacgaataataacatagttgaactgttgaaaagtttctgcatgtatgtagtaacatttttctatcatagtgatcatataactcacaagttttcgtgaattgtcatgtccagctgggattcaaagggggctc

SEQ ID NO: 36480 - DNA, 369 bp, Sorghum bicolor
  Intron number 4 from transcript Sb06g022790.1 (locus Sb06g 022790) derived from phytozome v7.0 (chr-ID chromosome_6; pos 52013648 to 52014016)
ctattggagactatcttcttgaagaaaagattcaggttcgagatataaactgagcagttttctcacaatatcagacctcatttacagtcaaaggaatgatacaaaacaacttaagtaaacactgaaatctttttttttttgagaaaataaaacactgaaatcttctgatccattttgtacttttgattcaggagaacaattaagtttcggatatttaaaaaaaaatacttggatcaaatgattgattaattgtctatctttttctgggcctaaatggtccctgtgatattaactgttgtttgcactgagctaataccaattcaataatgtgcagcgagagtatcaagctttctcttctggtcttacttc

SEQ ID NO: 36481 - DNA, 916 bp, Sorghum bicolor
  Intron number 1 from transcript Sb05g005360.1 (locus Sb05g 005360) derived from phytozome v7.0 (chr-ID chromosome_5; pos 7155475 to 7156390 reverse strand)
gcaaagctgctgctggtaagaacacgcacacatgaagtcccaaaggctctgttcacctaaaatttttttccctatcatatcgaatatttggacatatgtacgaaatattaaatatagattaaaaaaataactaattatacagtttgtatatattttgcgagacgattttttaatcctaattagtctataactggacactaattgttactaatatgctacaggactcaaaagcttttcttttgacaaactaaacaaggccttaagtcacctttttgttgcatccgatcgatgtataagttttttttcttcctaaacagaccgtcatggggccatgcctatttcattgatacagatgaaagatttatttttttaaaaaaaactggctaataaccagctagaaaaaaaaaacaaagactaccacggccacagagttctgacgtgaccctaccacgtctgcggcagcctcttttttcccctccctcaccgccgccatggttatggatgcctccgcctaaacctagcctggccgccgcctccacctcgctgcggatgtctcctgtccccaccatgttgggccgtcttgtctccctcaagccccttctaaggccgccggaggtgcagaagaagaggaggctgttgtggtagtcacggtcgtgcggtggagtcagagcatgaccagtcgtgagattgagtttgcatattctatataggttggagttagattgaactaaaaaattactaattttttcaccttaaacaatctatccctaagtcaccaactgaccaaacatatggaacaaggtatttagatacgagtgcaactaaacaactacattaggtagcttatgtgtttacctattctaaatcaactttttatcgaggcgtgtcaggcattcgtcacggacagtgcgacata

SEQ ID NO: 36482 - DNA, 794 bp, Sorghum bicolor
  Intron number 1 from transcript Sb08g009580.1 (locus Sb08g 009580) derived from phytozome v7.0 (chr-ID chromosome_8; pos 18764053 to 18764846)
gcaaacagttcgctgccgaggagatctccgcgcaggtaacttgttagataggtcttctactctcatttggtggatatgcattgtttgttcgtgatgaaactgggtgattgtgggatgacttgtatagaaattcgggttttgaggatatggataagtgctactcttgttgtcagtcaattttctatattgaaaatctatcagttttactagagaatagctcctggacctgtcaaatcacttgataaggtacaccagattggatgttgtttgtaatgcaactggtttcattacgtttgatgtaaaaggtgcacataaacatgaatggatttaaaggaagttgtttttatgttactaggcaaccagtaacaataaaactatagggttctgattctttgaagagttagtgctagcttcgaaaatgcagtgattcttcttagaatgctgcatatgtaaaattctgggcggaccaaactgggtttatgtattttaatttcagcctcaaaacaagtggtgttgtgatatgatttctttcatcattggggtttgttagaaatttcattgcttcacttaagcagttgggtcatttgtgttctgtttgtacttatgtcccggggcagtgagtttttgaatgtatatagaatatggtacattatcatctgtataaaactacttttgagttgctactagctaccagaccaatagatgtggtatacttatcattttactttcatagtaagttgtacatttgacttatcttggtttattatcggaacaggttttgaggaagttggtgg

SEQ ID NO: 36483 - DNA, 502 bp, Sorghum bicolor
  Intron number 3 from transcript Sb06g025600.1 (locus Sb06g 025600) derived from phytozome v7.0 (chr-ID chromosome_6; pos 54598020 to 54598521)
gcacagagctgcgaggcttggcgcaggaagaggaggtgagagatgaaacgagccctcgtttgctggcttcttccactactgaattctttctttgtttcttttttccttggtcgtattttttaataattttatttacatgtcaacgctggattatttattcagtattcagggacaaacaaatgtgtcctgcaacagtaaactgaacattccaaaatattttatatataatttatttgtttttttaaagaagatatcacatagccttgtggtttgtgtgactcgtctcttagctcagttctccacatgctcactgcacttgccaactactcctagcaacccccagattcccttctcatgtgtcatgagtaccttaccttgcaatcctctttgttgggaaagccaaacaccaagtatagtatactactgcacactttagatagattttgctaatggaaagccaaacacctttgtttcatggcaccatcgatcatcaggcccaggg

SEQ ID NO: 36484 - DNA, 548 bp, Sorghum bicolor
  Intron number 1 from transcript Sb03g010110.1 (locus Sb03g 010110) derived from phytozome v7.0 (chr-ID chromosome_3; pos 10910265 to 10910812)
ggaagcatccaagctctcaaaatttgatcctccaggtataggcttgaaatacttctttgtcttgtgcttagtatttactcctgtcctgtgttccctttccatgcactgtctgaatacaatgtgtcaaattgcatggatttcatattactgactgaatggttatgggtatgtacttccacaaaaaaaggagtttatgggtatatactgtctgaataggattacatgcatgctacaatgaaatgaagctgatttcctcattgcttaattttgtgtttcttgttcttctccatgagtcaagtcattttttttctcagtgtatgctaaaatgataaaaactcaaataccacatatcttgataccttaaattatcaaacttgcagttcaaacatatcataagctaaacccatagtgaaaaataaccagcctgccgaggttctgttgcctatgggaataaacagctatgcacgggagaaatggatcattctttattgatatctattttcatgttttcagcacatcagtctactgcagccaatccaactcttgag

SEQ ID NO: 36485 - DNA, 923 bp, Sorghum bicolor
  Intron number 1 from transcript Sb04g005870.1 (locus Sb04g 005870) derived from phytozome v7.0 (chr-ID chromosome_4; pos 5709225 to 5710147)
cgacgtcgacacgctcgacctcgaagtcctcaacggtgagctactacgtcatcatctaagaaatccctgctctttgggcgattgggccggcgtcagttcagatgaacatggtggggaggacgagatgaggaattcgtgattcccccaccactaatttctagccgccgggcaggataaattctgaaaccctccttattgtcactgacaagccgggcccactgggcagccacacttgcacatctcgcagccaagacctccaacaattttttggctacgatacacagtaaaggtgccacatgttttctctacgaccagttaccatctgccgtctgcgcaagaactaggtgccgcatagagtagagtgttaactttcttgaacttgtcgaaagcgacactagcatgcgtagggtggcttcggtagtcggcatcaacattttggtgctcaaattggagcccaactggggtctcatcaaatttctttatttctatcaccttcacccctttgctatttctagcaaaaaaatgatctctaaactcaaagactcgtcagacgtcagtgtccgtcctttaacccaataattaaggcatgaacaaaatccaaatcgttccgtgtctgaaatgaaaggataagttctatacagtatatcacaagcagcagagtgcagctgcttggtttcctgttcgcaagctccgacagcgagctcgttattgttaccatgtcttcaggcttcagcacataaccggggttggtttcttgtagatgatgttttcacatttagaatcagaagggatgcgagaaaggctatcagttctgaattttgcttgttacacttgattatatatatggtccaatattcatgtcgtaaatgctttgactgaccatgattgacatcttctctggacaggacctgcattgctagttg

SEQ ID NO: 36486 - DNA, 939 bp, Sorghum bicolor
  Intron number 1 from transcript Sb04g026790.1 (locus Sb04g 026790) derived from phytozome v7.0 (chr-ID chromosome_4; pos 56777808 to 56778746 reverse strand)
gaatagcaagagaattgaatctctctgtagagcaggtatgtgtttagattttcctctgttcatttattgatctgaagcattatatttatttgatctcattttgcatttctgtatttctttagcttgtatttttaactctatgctaccacaagttcagggtttgaacataagtagcatgcagtgcattgttttaacatgcaaaatggttcatttgtcaccatcttggagtgcttgtgtttaagcatgtgaggcataatgtgctactttgcattattggcttgattgtgtcattattctgtgatctcccccttctagatgcttccctactctctttcatggggttgtgatggataagggagcaccttatttgacatatttacacatgctgcaaaaggttgagagcaagagagatggtatatttagcgaaacagttcttattacacactgcagtgtaggggtagatggggcaaataaggaatataagggcaaggggatacatggtgaatcctctggtttaccctgattgagtgaacaatatggaacatgaatgatatgtgcttggtttatttagtgggtaaaaactcagtgctacagacaatagaaatgtagaatagatacctaggaagaacaaataaacaaaggtaattgcaatatcaattggaatgtaacatcactggcaccattgggacacaagtacaaaaatatcccataccaatgtgctagctgcttcaaacttgttaccctgctggcaaagctaccttgcatagcactccagtggcgcacattgcgagacaggatatttttcactatggtttttttgtttcatttatttatcttctcctactgattgacatttttaattgtctattttgtatacagttcttccttagtgtactgattaacaggattggtttcttatataggtacttcgcctttcat

SEQ ID NO: 36487 - DNA, 1032 bp, Sorghum bicolor
  Intron number 2 from transcript Sb08g023090.1 (locus Sb08g 023090) derived from phytozome v7.0 (chr-ID chromosome_8; pos 55258628 to 55259659 reverse strand)
cattgacgtgaagttgtggttggatttattaaccggtattacatcccttcttgcttgccacctctttttgccgttatattattagcagcaagaaaacaaaaggaggttacagagttagttccaactcaatgactcacacaggaccaggacttccttatgctaatacccgaacatagacatggcccccatgaaaaaaaacactcagtatctgagtcaacattcctcgccttatataagttgatatcatatctgtttgcttcatatcctacaccaaagatttactgctctctatttatttagaacaatgaaaaatggctgtacaaaacgagtataagaagtagcactataggccttttatgcacaattttttttgtttgtatttttcctgtttcaaaacatattttatttactgaagtttatgctgtcatggttattatttggatgacaagtctcatcatcactaatatcgatattatgaatagtcattactatatgtgatttgattgtcatccacttgcatttctaaaccttgtataatcttcaaaatggatgaaacaccatgatgtaatatttggtaattggtatcttctgtgctcttatccttgttcagccatagcaaatagatacttgaaaattccaaggtttaaaagaatcttaaccaacattgctgaaatataaatcacaaacctattgttcacttgaattgttgatcagaatgtagatagatttcatatatccccatggagtacacatactactctgaatgctagtaaagatgagtacctgctacaacttgcaatatgctgtttgattatttactctgggttggcaatatcttcatttctttgacctgctattgtttttagtttcttattctttagactatgtcaaaaaatagcctaaactcaaaggagtgtgttattttgaccattttatataatgtaatgaatcatttttgaaatttagaaatgaaatatctaggtgtttgtaattttaagagttcttacatattgtgaactaactttgcagttc

SEQ ID NO: 36488 - DNA, 980 bp, Sorghum bicolor
  Intron number 2 from transcript Sb02g031450.1 (locus Sb02g 031450) derived from phytozome v7.0 (chr-ID chromosome_2; pos 66387115 to 66388094 reverse strand)
gcaactatatcacctacgccaccgccttgctccaggtatcgctctttcatcgacgactgtattcactgtagtgtgtagtgagtttcaatgtgactacacaatttgaattctctacttagcgccataaagtttgttaccattagtagtacgttgtcggcgtggtcagggatgtctgagtcgtttaggggagtgattgaaaagtaagcggaatgattggcccgtacgagttgttgtgacatgcactaaagcgtgtctctccccccttttttttttaattgcaactagaattgtgaaaggggaaaggcacctgtatgtactagaaggtgacctgagtcccaactttaaagttgttatgttgtgattttatgaaacacaatatgttgatttttcatgtcctgcttaatggtttgtcgagtatttttgtctgatttagtaatttttgctgtcaacttcagcaacattataggcaagggcaagagcttttgatgtgtacatgaaaacccaaagcatcttatgctaaagaaggccagatttagtctagatattggcttagatatatggtgacaagtaaaagcggccaatgtctgtgatgtgatgcaccactgaaaaaggcaaactataagttcttgtcgtcactgtctaatcgctttactgctttagttatggtacttggtatactgtttttggttatgtagttgatgtggcaacattattattgtctacacttgccatttttgtcatatggtccacgtgcgtctccttcagaaaaataggaccccagtgcatatttgttcttggccattttcttaaatgatatcttcttgttcaagtagtttttttctgctttaaaatttaaggtgtgtaagagtgtctagaatataattttatgtgatacttctgcttttctgcaatacattttgtgtttcgtgcctgatatgttgcaccatattatatttcttacttgaaggacaaaggttccg

SEQ ID NO: 36489 - DNA, 827 bp, Sorghum bicolor
  Intron number 1 from transcript Sb10g021760.1 (locus Sb10g 021760) derived from phytozome v7.0 (chr-ID chromosome_10; pos 48107895 to 48108721 reverse strand)
aacccgacgcgtctccatccccatccccggaagcggtaatcgaagcactcccttctcgattcatctgatactgagtttccctccctccccggtagattggaatatatatccgcgtgatggtttcttcctagtacactggtgaagcgcgcttagggttcaggggggcggagcatgtggtggaaaaggtgggagcttttgggtttctgcttgttaagtttgagcagctaggttgctggttaatgtgcagtcacgcaggtttatggtatggaagcaagagaatatagccgttttatttaattctccattcccttgatacaaaagatgcaagtttgccaagcagtgcattccaatgtcctgacccatgatcggtgtctggactacctctgcactttcttatcccatctggacaacctctgcactttcttatttgattgatgttttagcatcgaaaagtgaactttagaaatacctatatcttccaaatgtgcccccctacctcatttagcttgtaatgttataaaactacagctctgttttttcatttattattatcagaatggttggtctactgaaccaaaatatttgatgacctagcaattgacaacttaagtagtaggattttgtcatcttgcactttttcttagtagaacatataaattgtcaaatatgataaaataaagtgactgttcagttagcttagattatgtaatttagttacgcgtccaaacagctatatgtatgtacgtgtcatcacccaaattatttaaggttatggtttattgcgaaaatcagggcccccatatatttgaggagggtgctagggatcc

SEQ ID NO: 36490 - DNA, 518 bp, Sorghum bicolor
  Intron number 1 from transcript Sb10g009910.1 (locus Sb10g 009910) derived from phytozome v7.0 (chr-ID chromosome_10; pos 11976982 to 11977499)
cctgaatattttcaggtaatatctgctatgcagtctcttattggttcaaacatagcactgtaaagtatctgaaagatgtttatttattcttggcgctagcaaattttacaggcacatagcgatgggaatgatctggcattgcaactagtttcttagtgctctagcatggacatcgtctagatatgcacaattactggtttttctataccactgtagaaaatgttgcttggaaccctaatcattttgaatttttactcttttatgtttatgaccatggatatgatatggcatgaaactggtgcttcctttatttggtgccacggatggtttctggatacttgtatttgttttcttaattgtgactgcaatttggatcatgttgttctcgaatgatcatgaacccaaccaatcttttctctcttgtagtccttttcatccattgtaaactctatacatagttgctaattatgtctactcttccttatcagggtattcgtcgaccttgtaaaggagttctt

SEQ ID NO: 36491 - DNA, 749 bp, Sorghum bicolor
  Intron number 2 from transcript Sb10g005100.1 (locus Sb10g 005100) derived from phytozome v7.0 (chr-ID chromosome_10; pos 4588339 to 4589087)
gcacaccgctgtaccagaccgccacctttaagcaggtaattgagattacaaacgaatgctgtccattttttttttcttttaccaaaatggggaaccaaaagctccgaactttgctagtacattttgatttctttgatagatatgttgttcgttttcattttccaccttcagatggtgtcccatactaggttgcggtagcagttgtgatcgatctgtattttagattttttttgattggattggtattggttggaacatggaatgaatgttcaggcaaaatgtgggaacaataggctgggtggaattttgttcaaaaattacattagaacaaaaatctattattgtacgttactgaagaattctatgggcctggctgtgcttgtgtatttgaaactgtaggatacctgccaatagttaagtgatgatttcttttttcttaatccactagttatatttgagattgacttggttgtccttgagctatttggatgctaatgttatttgaaaaaccatatgcattttcctctgtagccttgaatccttgatttccagttatgcaagtattttattgtgcggatatttattttgtgaaattgtgtggtaatttctttattcagtttgaggaactagtaagcttataattgtacttaagatggttcatgatttgctctgtttgcctgtttcctactctgcagtagtgagtagtgacttactcccaaaagttattttccagccttcagctacagatt

SEQ ID NO: 36492 - DNA, 430 bp, Sorghum bicolor
  Intron number 2 from transcript Sb01g006300.1 (locus Sb01g 006300) derived from phytozome v7.0 (chr-ID chromosome_1; pos 5293012 to 5293441 reverse strand)
tcacagttgatctcaacaagccccttgttttccaggtaagcctcactcttagttgctttcttcggtgattgttgtgaatcttagcctttttggagtagttttttttatttgtttatttgaagaaaaattttgaagtagcctatatgggattgtcttgcgcactttacagttctcattgcttttgagcttgttgagtgcaactttgggtttttggaaaccaggtctaatgttatagagtgtgccttttccttggcaataattgtggtagacatggtgctgatgtatattatgaaagaagaatctcatgtagttgtaaaattcaagtttctgaatcgacgatgtccagtagctttacagttacataaccttcttctggttgcctcttaattttgtggatgaaggttggccatcttgaggagcgttaccaaga

SEQ ID NO: 36493 - DNA, 765 bp, Sorghum bicolor
  Intron number 3 from transcript Sb04g038060.1 (locus Sb04g 038060) derived from phytozome v7.0 (chr-ID chromosome_4; pos 67562982 to 67563746 reverse strand)
ggctccattgttgcttttaaagtcagcttccgagagtgagattctcacccacactagtcgggcttgtgtttctctgttttccacttggaaggatcagatttcagaagtggagtgtgctgatagttcttgcagcacacattgcaatacactgtcatagtttcaacttaattggattactctgctaaacacattagctccaaatgaaatggctccatgtttctgcaaagagatatatttgcactcctgacctcacattttttatcctgtatagttaagtgcctaatgatgaatagatgaccatctcctaaatttatctattcaaacaaacttgtgttatacatgttaaaacttttgttttaatcatttttcttcctcattgaaagatggtaaatctgaaatcggctactctagtacatgaagatgaatcaacgctcaataactaggtgtctaggttgatagcactcagattgcacaggcagttgatttgatccttgttgtcacaccattccttcccttgctctgtgtatgtctgattcttcgaggccaaatgagctgtgccaatatctgaatattcatgtttgtttctttgtttattccactttcagatgtaatagaccttagatcctgccttctgtaaagctggtggttgatgaaatccctgttttcctaaaaaagaaagaaaaaagaagtttagcaagttaactacatttgttcttttatattattgcagcttcaacccgttgaattcgttcatttggtttgagt

SEQ ID NO: 36494 - DNA, 956 bp, Sorghum bicolor
  Intron number 1 from transcript Sb05g001530.1 (locus Sb05g 001530) derived from phytozome v7.0 (chr-ID chromosome_5; pos 1603278 to 1604233 reverse strand)
ggttgagtctgcagttagtggctactaaatcagaggtaaacctattctttgtttacctaatactctctcctgactcagaaaaaggtagcgctttggtccctaaaaggcatttttgacgattaatttttgtaaaagtacatattgaaagacaaattaatttaaagcattatgaaactatttttcaaggtataccgatgcatgctgttttttttttttaaaaaaaacatgtgtttgtatttaggtagacatggttcctaggtaaaacacaagtcattttcttactggagtaagtatttaagttgccagggaagtaacgggaagaaacctgcatttgtatcttttttgttggatgtatggtttgtttgatatctcaatggtagcactttactctgtagatttaactgttgttatactatttgggctgtaaatagttgctctctttcaagttattcttagcctgttcgaaatatgcggttggttctgctagtgagtcgttggatgacactaatgtggatcaaccttggtaatgtatataagaggtagaaaataacatggcagtgcacagaaagttgaaggagtaattagctttagtaatttcattttttaaaagaaaaatataaaggctatgtaggtccattcagagcctatgcactaaaattggttgaaaatctccttaattttgcgcatttaataataacatatttctgttattacatggaattctatgtgattttataaacataaatttgctcttatgtgctatcttttctgttggttaaaattatattgctgcaactagttactaggctgaatttttttttgtagttcttgatatcaacaaattggtgcacctcaaaagtgttcaggaatttgacaattttactctctcatttttgtcattcaatcatcaattaattttattaagttcatacttcttagtgtcaggcccaaactgt

SEQ ID NO: 36495 - DNA, 888 bp, Sorghum bicolor
  Intron number 2 from transcript Sb01g011490.1 (locus Sb01g 011490) derived from phytozome v7.0 (chr-ID chromosome_1; pos 10327423 to 10328310 reverse strand)
cctgcgctggcgtcgtcaagtccgtcctctgcgcggtaatcactgcccaatgcccacggttgccggttagcgtgtctgaatatctgtgctgactgttgactgtgactctgggttgactgttgaaggatccccaggttgcacgcgccgtgctcgattatttgctggcattactcttttttttgggcgaatactaggttgttttccctttttaaaatagtgccactagcattgatccgtcatataagtactcagtcaaatactaatggatctcgcagtgctggagagctagtttgatgttcattgagatacgggcgcactatctaccactaacatgcctatgttagtaccaagaatcttgagaagaatatactaagaaacatcgatgtgcgtcctgaaaaggaaaaaaaacaaagagattcgtgttgggtatgttcaggtgtggtgtttgcttagatagaggagtatgtttattctacttgttcactgcaatttaaaaatagttgagatgaaagcatatctttgtagttgaagataagtctttgtactcttctgttttgaatctaaaagcttgtcatgtagaaatgaacaaagtcaaagctctagcagacagagacaatccttgtttctttctaggtaccatgactgttggaaaataggaaaaaactcactgtacagagaaagaaaaagacttgtacaaaaccacgcttatctttgggaatcgagatgtcaaccctatgttcatactacatgtcagttgtcagaactagcgcactgtgatttgtttttaaagatttatattgctttatgttttccatcaggtgatacttggctgttcctttgtcactcgtatctatactaaatgacatatacctcggtttacattcagga

SEQ ID NO: 36496 - DNA, 643 bp, Sorghum bicolor
  Intron number 1 from transcript Sb01g018160.1 (locus Sb01g 018160) derived from phytozome v7.0 (chr-ID chromosome_1; pos 18872585 to 18873227 reverse strand)
ccgagccggagtacttccccgagaaaagaaacctggtgagtttgttttctaatatggcatggcccgggtttggtttttggtatccccgagtagtcgtttggtcctgatctgattagctcgcgggcggcttcgctttcgattgttgctctagcggcaagattcgcagcgctttgactggtcgggaaaaccggtgatgatggctccattctgccgccggtaatgctcaattgtggcattccacggttatgtaggattatttatacttgggttttactattggattctcctcatctgagtaggaaatcgcaatgcagtaccgtggtgttaggtattcgttattgatgaaaattttcaaatctgtgtgctttccaatgcaagtgtgcagtttgataggtcaaccattttcttctgtccattgtttgcggctgatatatgaggcttgagaaccatgtatgattataccactaaaatggtgtttaaggttagaagcattttcttgcatgctggctcgaccaggtttatttttggaaagtaccataacgatttagattgtgcttggctgccttgaatgatgactttgctatttatgttacatgcattttgactaatgacttttttggttttgctatgttcaggaggatct

SEQ ID NO: 36497 - DNA, 463 bp, Sorghum bicolor
  Intron number 2 from transcript Sb01g030290.1 (locus Sb01g 030290) derived from phytozome v7.0 (chr-ID chromosome_1; pos 52592920 to 52593382 reverse strand)
gcccaacgataccctcgccaagcacctttttcactgtgagccctcttcgtgctctgcagttcgtgttacctggatgcaccatttgatcatgttccaaagactgggactcactactgtagtatactatatgctgatgtcgtggaattttggtgatagtgaataagttagttatttggcacaagacaggcgaaatgttctactttgattctcattattacatcagttttctgtgcgagctgttctgattctgattatcatatcagtacaaaggggaaactaaattgaaattcgtgagttcaggagtttggagtttgatcgtttgtttttatctttagtaacatggcgatactggttgcatttatcagatggttttacttaacatgcataaacaagcaaataattaacttctgatttattggtcgctatggtttttctcatgtgcaggggaaaaccagagtattga

SEQ ID NO: 36498 - DNA, 1037 bp, Sorghum bicolor
  Intron number 1 from transcript Sb09g020710.1 (locus Sb09g 020710) derived from phytozome v7.0 (chr-ID chromosome_9; pos 50116853 to 50117889)
ccacacggtcgagaagggcgccggtcacaagcaaggtgagcgacacccccgcgcacttcggcccttaagcttatcagatctgagctccggtagccttaggtgcagatttcttcgcgtgtgcgctgctccgtgcgggagtggcgcgcgtggcgcttagatctgttcgattgctgtgggattggtgacaggaactcaggctagttcgtttccttgtcttgttttacagttttagcatcgaaacgcctgcggtctgggtggcctgtttgattttgaacccggcgttagtagagcagggcttgcttgttccgatttctcgttgtgttgaaatgatcaggatcgggtgataagcctactagtctggctgtattgatcccctatagattcggtcatggttgtgcctgttctgtgacctggaggccttacagttgggagcttttactcgggcaactccctgtgcaattagaactggcatggcataataaagatgtatacaaactagaagtggaagaattagttctcattgtttcattagactaatctgtaaaacacaccaccattagctaatctgttttagcatcaaattggggtggcttgtttgattttgaggctggcgttagtagagcagtacttgctctgatttcgtgttgtgttgaaattatcaggatcaggtgatgagtctagtagtctgtctagattgatcccctatggatttggtctgttgtctgtctagattgatccccctatagacttacagcagttggtcagttgggaatttttacctctgcaacttgctgtgcagttagaactagcatataaaaaatgtacgaactagaagtggaagaattagtttttgttattccattcccttttcctgttctgaaggtcctcaccaaataaggaataataaacaatgttcgtcactgagtctttctgatctgtaaaactgacaaccaatgcatgcttgatagtgtatgtttgttcatgtctaaccatgtgcaaaccatgtatgtaatttgcatttgcaggtccaaacttga

SEQ ID NO: 36499 - DNA, 568 bp, Sorghum bicolor
  Intron number 2 from transcript Sb03g001550.2 (locus Sb03g 001550) derived from phytozome v7.0 (chr-ID chromosome_3; pos 1413443 to 1414010)
aaggattctcaggtgagtttgcttgcttttgccttcagcccttcattcattactgagttgggttactttttgtttttttttcctgtcatctacaataaacatgatggctggttgatttatacagtgcaagtgtggacagtttttccttcagcagactgctagtgatatgcaatgtgtattaaacagttacttttttctatagtttttcaatgggatattctgtagctgatactcaaattttgcacttacatataaaaaaattggtgttgcactgaagataatacattctttatgctatgacaatatgtatttaacagttgtggtgttgatgatgaaattctataatcttgcttaaacgattcatcccttcttcccctttctaatgattccctctttaattctagggtccagtttttatttctggttgatacgcgcacaatggactgatgctgctttcgatactaccagttttgctccctttttttgccttcatcaggcagttgaattatgttacttaagtacttgttctacaggatattcagagcacgacagagttgcagtcatcagc

SEQ ID NO: 36500 - DNA, 794 bp, Sorghum bicolor
  Intron number 1 from transcript Sb10g006410.2 (locus Sb10g 006410) derived from phytozome v7.0 (chr-ID chromosome_10; pos 5875578 to 5876371)
acaagtcggtcctcttcttccgggcttctcacaaggtaagcagcgcgctgtgcgcgtataccttatcctttctcttttgcgcgtgtgcttctctatggttttatcgatcggagctgtaattttgttaagggatctggtgtactgtttcctgtaattcgtagcaatcagttggatatggttttcattgttttgcgcgagagttatagttgtttgatcgattgatacgttagcgatcaattagttgctgcttagacgtgacatgggagaattgatgttcaggttgggtgtacgaatactatggttattcgagcatgaccactgcagccttcaattattcaattagtattgtgctgttttttctgtgtggattttgtgcagccaatcgatattgttctgttcttagccatgcaaaggatgcatgtagtctcttctatcttattttttgatgatgccagttacgcttgcttttctgatagtatcattgctgtgcgtcactgcaagatgctgtgtgatttaaattggttccttgccatggagtattctaaagtaatagtttcttagtgcgccaatagcatgctcaacttaatatggaaattgggttgtctttatgtttggtctgcttcttgtggagatgcacattatcgcttttttataatcatatcaaaaccaatgcttgcaaacattgtttgttggtaatgtcatcttacattttttttattccttattattatgctgtgcagtattctcagtgttcttgttttacaggaatcgtattcaagttttgtatcaccaag

SEQ ID NO: 36501 - DNA, 569 bp, Sorghum bicolor
  Intron number 1 from transcript Sb04g004740.1 (locus Sb04g 004740) derived from phytozome v7.0 (chr-ID chromosome_4; pos 4553766 to 4554334 reverse strand)
acggtgaggcatatctcacacaaactgaagtgagtagtctgtccaattccatgatattgacactaatagctctagaataatggaatcacactgaaacctgctaaataaatgaccactttccaatatgtaattctgccttttcaacatttcaggtctgtatctggttgtttgaccaaaaccaataattgcaactgtgtaatggcactaaaaattcctcaagaaggctatcagtaccagccactgaaatttcactcaagtttgccgaacataaagaaactgtcaacactttaaattgagttgccagccatactgtagtattttgctatatttattttttttctcgaaaacagtattttgctatatttaacaaagtggttaccgagtaaatcactagttaggagtatttattgcaaagctatttgaattaagtttgctaaggcactctatgaaaatagacagtaaaggttcttctatattctatgttttatctgttgttttgaattgattcttgtgtacatccattgattctttcaggcagtggcggcaattactgttcatagacatttcaa

SEQ ID NO: 36502 - DNA, 974 bp, Sorghum bicolor
  Intron number 1 from transcript Sb06g020300.1 (locus Sb06g 020300) derived from phytozome v7.0 (chr-ID chromosome_6; pos 49783068 to 49784041 reverse strand)
gcggtacgcacgctaccaacgcctctgtccggccgtccccctccttccacctccgtttcgtctctgagctccctttgttgtggaatttactcggattatctcgcacgggcacctgtcaagttgttagtggatacactaaattggatggctgcacgggttgggttaagcagattaagtggaattgagtgacaggctgtcaggcttaggcttagtttggagcaacaaatttggaatttgaatagagcttgattttggttacattacatggcttcgctactctaagatttgatttgttaagtcctgatgaaaagaaaaagttcctttcttgtttgtggggagctgaagatatccagcttcaattctgtcagttgtagcagaggtgatgtatccgaagctcacctcttgtaggacctttctggtacatagatagatatccacaaataatttctttagggtaatccacagagaattttggaccggccatttgctgcttgcaaatatctagctgctccatgataattctgagatgataatatactggacaagatgagaggattctttgatcttagagttgaactagctgtataaatactgttttagtgtgtgcttgtaatttgatgagattgttgaatcttcacagaactattcttcaagagaagcttcaaccagtaaatttttgggaaggggcattccctccatacaaactgtagttcccctgtgaaatatccaagtaaataggcatttaacttgtattaattaatgttatagggcttgatgccacactagtcctttctgttttcatttatgcttcatcgtttttctgtataagaaaagaaagcgagctcaaattagcactgcgattgcctgtttattgctgcaattccatcctgtagccatacatatcaagtgtagtctcaccgattcttgattaactttcagcaatattggagtcaaccatcactggacaggaacaa

SEQ ID NO: 36503 - DNA, 900 bp, Sorghum bicolor
  Intron number 1 from transcript Sb02g000430.1 (locus Sb02g 000430) derived from phytozome v7.0 (chr-ID chromosome_2; pos 371908 to 372807)
caccaagtgcagcggattcgtcggcacaatccaaggtacactactctgctcttgctctgtttttctttattatttccttattagggattgctggattggggatcggggtttccattccatccttggtgagattgccatgaatcatgctgtgatgtgatatgcctcctccgttttgggtggttgccccgtcattacgcatcatcagcagcagcaccaaatcatctcctttccttctctttttgcaccgcaccgcattccattccttgcttgcttgcctgcactacattgcattctctcaaccttgattttctatttctgcacaagaacatcagcatttgattccatcaacatatgtacctctgtccctttgtttctttcttcttcttcttcttcttttgtaagtatatattccttcctcttttcaatctgcatgcgactcaggtcatgcattgcagattcccacaccttcacattcagagtttctttcttttcaaagttttcacattcaactgccacatagcactaggcaggcaggcaggcaggcagggaggggcactcttctagtcagccaagtctggtttaacaacaaattaagctagactagtaggctccaatattcttcaaacaaaccatgctagcagcttgcatatactcattgatcgaataaacaacaaacatgattactatactagctgaatcaaccgagtttgattttgtaataattgtgcgcgtgtcagttaaactaatcaccagatgagatgagtcagccagccagcctacgcaaatccaatccgttagtcaacgactgcttcattgattgtaaaaacaaaaaaaaaaagtcaaatgcgatggcactgacgactgaccccctcgatccgacctgatgcagccttggagctg

SEQ ID NO: 36504 - DNA, 634 bp, Sorghum bicolor
  Intron number 4 from transcript Sb01g004550.1 (locus Sb01g 004550) derived from phytozome v7.0 (chr-ID chromosome_1; pos 3636172 to 3636805 reverse strand)
cacgtatccactgccttcctggagcttggtcaagggtaactttatttcttccctgactcagttgccttcttcagacttccccaagtcctcgctgtccttactttgataagtttgaacttgaggtatcatatagatttttttagaagtcttagctacactttaattgttcagaaagcacttttacaagaagtatttgacctttctaaatatcgagctttaacttggtcgtacggtaatatattgcttggatttgaaatcattctctcattatcaggtttcacgagggaagcaaatagccaggttctgatagtcacacaagcagacaatttgcatgaggatagtgtttgtctttatacttaaacaagaaagtgtgcagttccctaaattaaattcaatgcacagtgatgtattgtccaatactggtgctgtatgtaaatcaactatttcaggactagtgttttttttataaaaaatgtttgcatagtagtactaaatactaatgcagaatatgtatttgaagttttatctccttttgattttcttgtcagatattagtttagtaaatagccttgtggtaaataactatattttgttttcagttaccaaaaggcaatagaagaaatcactaggcgaa

SEQ ID NO: 36505 - DNA, 596 bp, Sorghum bicolor
  Intron number 2 from transcript Sb10g001330.1 (locus Sb10g 001330) derived from phytozome v7.0 (chr-ID chromosome_10; pos 1098972 to 1099567 reverse strand)
cagttggttcagattccctcgatcgtgctattcaggttggtcattcatgcagcctactttcacagtttcaatcaacacttgggtcttctagtttctacaacaaagaattagtttcattaaatccacaatgaactatatgtttggttttgtagatgttattatgttaatatatatattttttctataaagttggtcaaaattagagtgacttaggacaatagtaaaacaacctacattttttaagggggggggggggggggggaatagctactaacctatttgttaggcacagccataacataaatgctccagcataattgttaaagatttactaaatttgacccatgctttgaatacatctgccatacaattctgattgccagtttcatttacacctagttggtaactaatggctgctaagctgctatgaactggtaacaagaaaatgcaaattgaagttaggattcacccatttaattctgccggtctctttcttacatgttcataatttgtcattttctttcttacctgaagtagtgttgtctatgcaccttataataactttgtatccatttttgacatgcccatgcaatagt

SEQ ID NO: 36506 - DNA, 1034 bp, Sorghum bicolor
  Intron number 1 from transcript Sb01g012960.1 (locus Sb01g 012960) derived from phytozome v7.0 (chr-ID chromosome_1; pos 11991690 to 11992723 reverse strand)
gtctccccgcgcctctcggatcgcctcggcgcgcggtgagtctcatagagtctggcgtgctattgggccgctgttcgtgtccttactctctgtgcagtcccattccctccttccttgtcgaggttgctgcaccacgctgtggggaattggtgggtttttggtcgggcaacggttggctgaattgttgagttgctcttttttttatgtacgtgcgcatatgtcgttgagatcgctgctgggttactacgggattatcccttttgattttcgaggaaatgtttcgtgtcataattatatggaacgcatcgtggtgtttttgatgtgatttgagtggactagcatgtcagatcccagaattttgttagcaccagaacacgctgttaatttttagatgtcgtttccgaatgacgggctcttcatatctattgttagatctgctgaaacatttagaatttctcgtattcattatgtatgatccgaaagtaggctggcagtttcactgaatggacggtgataattttataccgatgaatctgttttcagtaattgcagtttaatatagcatgcttcctgtagaactgttctctaatttattgtccgaactatagtttcttatggatgttatttgtagcatgatccctgcatgtccgagagggaccttgcttcccttcagaccgattttagctctcttgtacccacatcctggaaaagctaggttgcaacctaaatggaaggctgtagtgcatatatcatacctccatggtatggctaatccttcccggtttaaagaaacagccttgattgaccagaggtatttctttgcaccgaagcatttagatcttatgggaggaacacatgcagaatgaatttagagtttcacatgggaggagaagaattgagttcagtttatggttccgtgaaatatacataatatttttttagcttatttgcggctttgttgagacaaatattcagctagcttccctgttggtgtgaatcaaactgagtttaacctttttctgttatatagaaag

SEQ ID NO: 36507 - DNA, 900 bp, Sorghum bicolor
  Intron number 2 from transcript Sb01g000770.1 (locus Sb01g 000770) derived from phytozome v7.0 (chr-ID chromosome_1; pos 743915 to 744814)
caccggagcctcggggtccacatcaccttcgtcaggtacgtaccactactcctccctccccactcgcagatctcgttgcttccgctccagatctcgcgccgcgcttgcccatgaatcaatcatgacgcggcgccaggattgaatttacagccgactagtagtatgcttgatgccagtgtaactttttctttcatcaacaacctaataaccaccaccaccgtagcctagcctgtgcctagatctgagagcccggatttcggaataggggataccctacgcggatagggttgcaatgcagatcatgctccttaccttagcctgttttgattaaggcaggcagcatccctgctccttgtgatcctcatgaaatgcctggttagtttagagctcctgtaccacgttccgctgcctgccgacacaatgagggcgggccttgcaactcaacctctctgccctgtacctacgaaactaataatagcaatggcacatataccacgtgctatttacgtagccccttggaactcggcctcccacatctaaccttggactctaggagcaaactaaaagtgctgcatgaatgaacccccatgctatttctgcaccaacgtgatagacacattacatgataacccccagggccccactacatgatgatcacagttgctgctcatgcatctctctctctctctctgtcactcactctctttttaaatttatgtgctctgactgccaactagtgtggtcttccattcccttcttttttgctgcatttattttttgcaacatcttctttctagcacaaaatttacctactccgcagcattgtcttgaccagtgatgccgtgccaatttcatataaaaccttatcggtgtattccgcaggtcaacgaaccttgactc

SEQ ID NO: 36508 - DNA, 288 bp, Sorghum bicolor
  Intron number 1 from transcript Sb06g002180.1 (locus Sb06g 002180) derived from phytozome v7.0 (chr-ID chromosome_6; pos 4090374 to 4090661 reverse strand)
tgctcgtcaactcattccacgagatcgaacccaaggtgagctcaccatgcatgaccacggccggcacctgtttgttgttttgctcaagtgaattttcggtgctgcttgtacgtactctgtttttccttatagatacaaacgtcaagattcttccatagtcatgcttctttactgaataatcgatgattggtctgtttgttgtgatcctttgattccacttcaccatcataagattgattctcttcttttgacacatttgcattgttaactgagcaggaggcagattat

SEQ ID NO: 36509 - DNA, 931 bp, Sorghum bicolor
  Intron number 1 from transcript Sb08g003960.1 (locus Sb08g 003960) derived from phytozome v7.0 (chr-ID chromosome_8; pos 4642024 to 4642954)
aggctcgccgcccatttcggccggctcccgcacaggtgctgatccattaccacactcgcctgccgcatcttaggcttgcttgccgtggtttagactttagagccacccggttgtggaaatctgtggtcattgtctcggtcaaggagggtagcgtgcttgtttcggctttgagattttgggtgtgggcatcgcgaagcttagttgtgagcttcgtcttaagcgtcaatttttgtagcatgtttatgtttgaccttttggttagctcccactggtgcttccgtgcttgtttgactcggcgatggaatcggagttgactcggtactatttgctcgaggactgagcggatttaaaattttacactactttgatgttggaaaagtggctagcagttgtgtgctgtgtcttgctcgattttggtctggtctggtctggtctttgattaagctaattttggaagtaaatggagtgaacagggtttcttttagaatcatctgctggctcacacccttccggaaaaaagaaagctttcatcctcgttctgaattattgtcttactgaatatgaaaagtaaaccccgacttttagatctatagcagcaaaatttctcaagttagcgaatattcatgcaaacaaatatgttcaagagcgtggcttaaaacttgcatactggcccttaagtcttgtagttatcccttgtattgtacagtcagagtcttatcccttagtcttgtagtttgcctctgtattctccttgtgtggagtagttcacttttatgatattcaaaggaagctggtagctgcagtctctgttttcgtattagaattgctatagggcaattaattaattcttctgttgcttacttgtataatcatgaagctaacgttggttcttcttttgttttctcataccgtagctatcagctggatatca

SEQ ID NO: 36510 - DNA, 1006 bp, Sorghum bicolor
  Intron number 4 from transcript Sb08g022280.3 (locus Sb08g 022280) derived from phytozome v7.0 (chr-ID chromosome_8; pos 54086333 to 54087338 reverse strand)
acgcagaggagaaggggctgatcattccaggcgtggtgggtaactcaaccttttggagcatttcttttgttgttcctagggaaatagcttgggttttttatttgcccagtccccactatcttatattatattcaattggaatgctaattttatattgccgaatccagaaggatgtgctagctgccattttctttcttgagcattgcataagaatattatcaaatgtgaattgtgatggtctgcctgtccatatcaggtggttgttgagaacttgggattataagtttatattctgagttgcttttgtgcctagtagtgccttcttggagcatatgcttcatttttaaagtgtttgctttgatctgtccatgtggtgactgatggataggacatcattaacatattgctttgagcctttgattaatggagtatatatattttaagtacaagaggcaagctttatatatcttattagaggagagcaaagcaattttgtctcttcatttcgactgcacaattataacttacagtcattggatagctcttctacaaaaagtacaaaagcatacttctcctagtactcatggagaatccaattggtattattctgcatggtacatagcaaccattgttctaacctggtattgttaactcccatcttagaaatagcattttgaatggttccagcacaaaacagaagccatttgtttggcttgataggtggtgctagaatgacctgctaaagtgttttatctagttttgaccatctataagattaaaaatggttgttttcttgttttatacatggtttaactgagtctctatgacagtatcagcaaggtgagttcggttataattataggatagtcaacactttctgcagactacttgaaaatatacatttgtataaatttcagaaagttaatattggattgtactaatattttgctttcaatgtcaattgttgacagagtgttctgattgaaccaactagtggcaacacagg

SEQ ID NO: 36511 - DNA, 860 bp, Sorghum bicolor
  Intron number 2 from transcript Sb01g030580.1 (locus Sb01g 030580) derived from phytozome v7.0 (chr-ID chromosome_1; pos 53148854 to 53149713)
tggtctggaactgtaccatccccggcaagcagggggtaagccccggtaacacccgtcggattcgatttgacgtataattgtaatcatgcccgataggatttttagggaaacacctctcccctgtgctaaataaatacgttgtgatcgatgtgtgcatcaaccccccttgtgcagctttgctccatgatgaattttaattattttattttgttttcccagcacatggtctatggtttttattatttctggactagtgcactgtactgcttattgaatacctaagcatttctgtattaggaactgtgtgttctacttcttcttttgatgtactacaggctaaaagaatcactaagactttgctcacacgatttgccttttaagcgtttcattatcgttttgaagttggaacccatggtagaaagttggaaaatcatgttcagtatgtatttctttttgtcccagtgattcatgtcaatagatttagaataccagtgtgttgtaggaattgagaattatattatatgccacctccaccactccaccaacatgtagtcacattcgcatgctgttttgtagtggtttctagctccataactccgtgatattcttttcatcccctgttccttgcaaaatgtttgtttgttcctattttgtagcatgtatgtatctgtactgtttgtaaacaatctcgaaactttgatctacagtgtcttttactgattacttcccagcactctagaatattgtcaggtccaatgtccattgttttttattactttcgaaccttaaattcctttgtttgtaactatcctctcttctatgcagactgattgggaaagtgggtactacccacttaccct

SEQ ID NO: 36512 - DNA, 432 bp, Sorghum bicolor
  Intron number 3 from transcript Sb09g021730.1 (locus Sb09g 021730) derived from phytozome v7.0 (chr-ID chromosome_9; pos 51209649 to 51210080)
gcagctcatcgacctgccttcaaggcatttgtgagtttttgtctgatattatttcttatcagtgtcccaaaatgtagttctttttagttgtcataagtcaaatttctctaacttagactaagtttttagaattaacatctacaataccaaataaatccactatcaagacatatttcatggtgaatttaatgaaattaatttgatccacatgtttttgcattttttgttttggaatagaggggatactcaaaacggttacccatatgttgattcctctggttgatttgagtcagaattttttccttttatgttacattacatagaataaagggaacatgggtattctttggcgctgttttggtgatcctagtgtatgtaattactgcttcaaattttctgatggtcttacctgattttcattgcttgcaggat

SEQ ID NO: 36513 - DNA, 793 bp, Sorghum bicolor
  Intron number 1 from transcript Sb02g040910.1 (locus Sb02g 040910) derived from phytozome v7.0 (chr-ID chromosome_2; pos 74816804 to 74817596 reverse strand)
atcactgaactttggggatttttacgcacaaagaggtattttttcgagttaaaatatttttacctctattagtttcgtctagcatgctgaattaatatagcttgtacaatagcatcacaaaactcaggatatatggaacttttgttatacagttctaactcttatcaaaatacagctaatctgatgcaaaaaaaaaaaagtcaatctatatgctctttaatttcagatgagtgtctatggttgctgtttggttttgttctctagttttggaaaacgttggacatagatgtccttgatgtatttctatcttatagtgtcttatacatatgtataacttttctttttgacccattcttcttaaatctctttggaatgcaatatatatgtgcgtccggttatgttttgatggatggaaaatgcagtactagacttcctacttctctttcacctcctgccccttgggcttgtttatggcaataatgatataactaaaagttttcctagcaaaaaaaaaaaaagtaactagatgttttccttgctaaatggcttttccctttgatgatatgaaaataggttgggaaaccttgcatggaaatttatttcagatagatagcaaatcaaaactaataacttgctgaaacctaatctattttttagacaaattattagctggtattatttaagtccctaaaaaaatatgctgtactgtgtgggcatttttaagtagctctcaatcttggtgcctagttgattaagtttttaccttcaaatcctaggtacttcatctgcatcg

SEQ ID NO: 36514 - DNA, 918 bp, Sorghum bicolor
  Intron number 2 from transcript Sb06g030000.1 (locus Sb06g 030000) derived from phytozome v7.0 (chr-ID chromosome_6; pos 58449409 to 58450326 reverse strand)
ggcccggttccgatttgcgcgtccagatttaccaggttcgccgattcctgccctgatctttcctttcctctaggttctatttcctccccatcggtagccgccgggtgaggttgcgtgtctattgggatctcgggagggtatttctggggaacggcggctggggatttttgtgtttttgtaaatggatacgcgcgattcaaatatcatgggggaatctttggattcatggcgaattctagcagtttggtttggtctttctgcgtttagcacgaggcttctacgaatttagtgcagtaggattagtaattgctgtgaggggagttatcttcttgcaagttctacaagtcagaattgtggtttgaacctgggatgttgcagcttatctgagaaccatcatgattaaatactgacccgtgaccaacaagctgtgttgaggttagctgcagcggaggcaagcaaattttttggcaatggtcattgtaacgagtagtcttgtttctcctaagtgctaccttggtgtacttagcccatgcctagttctatcgtgcttaatgccaagggtaggtgtgctggaaaaaaaatactattcttgcaggttcatgatgtatcatttgctctagtcgaacaaaattcttctacatatgcaaatccttttccattaagcttgttgtactcaataatggcattgatagacagaaatgcctagaaactgtctgttgataacttgctcgtaagagctccctgccttttcaaccacaggtctggtggtgctttacatggatatgaaagggctctgcatgatactagtttattacaatgaaattctatgataatgggttacaatgttgttgtttatgctattatgcttatccaaattctgctcacatgacatgttctgtcattttgaattaagcagca

SEQ ID NO: 36515 - DNA, 429 bp, Sorghum bicolor
  Intron number 1 from transcript Sb06g030000.1 (locus Sb06g 030000) derived from phytozome v7.0 (chr-ID chromosome_6; pos 58450349 to 58450777 reverse strand)
agcgttgccgttgccgatccccttacccgcgtcaggtacgtgcacccacggcaacggcgtcccgtaccctattttatatttctcatcaaacaaattaataaaaaggccttgtttagttccgaaaagatttcggatttcggcactgtagcattttcgtttgtttgtgataaatattatccaattatggactaactaggatcaaaagattcgtctcgcgatttccaactaaactgtgtaattagtttttgctttcgtctatattcaatggttcatgcatgtgccgcaagattcgatgtgacggggaatcttgaaaactttttgctttttggggtgaactaaacaaggccaaagaagaaaaggtccaactattgcctctctttcttgctggccacagcttcgtcaaagacacgcggaaaaagagagaagaga

SEQ ID NO: 36516 - DNA, 661 bp, Sorghum bicolor
  Intron number 1 from transcript Sb02g038360.1 (locus Sb02g 038360) derived from phytozome v7.0 (chr-ID chromosome_2; pos 72638766 to 72639426 reverse strand)
actgcgtttggtagggaatcagttaggggtatttgttgggtagacctttacaagtttaggattggagcaagcgggtgttctcaagtttgggatatgtctttcttccacatgctgttcctcaaatcccttcctttatgaatgagaaatcgagcttctacatattaagctgttggaaatgctcttagtagtacatattaagctggagaggcttaaactggcccgtttgttttcgtctggatgcttactagttgctgtaggtacgatttcagtgaaccattaaagttcatttgcttgatgattattatcttctctagcttgttctctttctgttttcttacgaaaaggtctaatgatatgctgctccaaaatctgcaatttgtggtgcttgttttgatttgttctgacaatttgtctcctgatcacaaagattagcagcccccatctttgaatccgacaaagggttatagacaaagttttcggtagacgctagccgaaatctaggtgtttttatagacattttgccaatttatatatcaatatataatatatatatttatagcacaaatcatgaataatttatatatcaatatacaatatatacattgagagcacttcaaatgaaacagaggagaggagcagggaaagggaaagggtacagagg

SEQ ID NO: 36517 - DNA, 585 bp, Sorghum bicolor
  Intron number 2 from transcript Sb10g006290.1 (locus Sb10g 006290) derived from phytozome v7.0 (chr-ID chromosome_10; pos 5737681 to 5738265)
tctggagttctctcaccatacagctttaaccgcaggtggcttcccacccccccccacccccccccccccccccccccgcgtctcctgatctggagaaaagttgcgtcatgtttagcactctgaatactgtattcttgctatgctagactgtttctttgggatagctatggaccgtattgtttccatgtctttctgtgtacacgctatatgtttggttttcagtgtgtttcatacctgttatcaaatgagcaatatcttggtgtggagcaagtagtgcagctatttctgctcgtggtctgtcaaacaaaatcatgaaattgatgcttactatgggcattgggtgaacattttaggtctgatgggattgcagaattttgttcaacgttggcaggatctgccttttattattaaaaaaataagggaagcgacctaagtcaacaactatacagattgattgcagaaatttgagtacaaatagcaacgtacttgtctttttgttcagctagcttgtctgtttcattttttataacgtcttcttatgagagctactatgtgtaataattttcagaccagtgcaaagcagcg

SEQ ID NO: 36518 - DNA, 422 bp, Sorghum bicolor
  Intron number 1 from transcript Sb03g003140.1 (locus Sb03g 003140) derived from phytozome v7.0 (chr-ID chromosome_3; pos 3236305 to 3236726 reverse strand)
ccccacctcccggtgcgtgcgagagtcccccatcttcttggtgtctcacgttggggacagccggtttcctgacggttagttcccggcgtggactggaaagttcttggttctttttttttctttatttttttttgttctatgcgattttggtttctgccgcttttttcccccttttggtctatcttaggttgagagcatgcggattctgtttggatttgagttttcacatattgatctcacagtaaaaagtgtctggttcctccgatagagtttgtggcagagggggaatcagcatctgaaagacaacagcaaaatatgatatgaactttaattatttttttgttactttcactgattgctgattttattgatcttgtcgatctgcagacatacccaaatcctctccaagacaatccggcgta

SEQ ID NO: 36519 - DNA, 880 bp, Sorghum bicolor
  Intron number 1 from transcript Sb01g050280.1 (locus Sb01g 050280) derived from phytozome v7.0 (chr-ID chromosome_1; pos 73255427 to 73256306)
tcgtcctcctcctctggttaccccgtcagctccaggtgacactctacccctgtttccctgtacagggtgttagacgtttgtttacaacaatagccacctgctgttgcaacttatttgattggtgtagttgctgagtaggcactgtagtaccatgatgcggcggcgcttcggattttataggcagtaataatgacactttttcaaaggctatattgtcagcaggatttgtgtttatcctcgtacaaaactgctatccatcaccgccctcgataaagtagcttgtcacatactttgtattttaacaagtgcaaaatcctttcaatgaatgaacatatatagcttgtaatcacactattctctacttgcttcgtccttgaataactttcgtgttgagcctttccacttacttcttctcatcatcacatgattcaaccacctacacgaatgcattgcctagagaatcatgctttcaaaagtctgaatagcatgttgcagtctaccaaataaccaagtgctcatcgtcgctatttctattgaactatgttatacttcaatcttttggtgcgggtgaactgttgccagtagttgggctttaatatacatgtttcgtaaacttcccatgtctattgtataataataacaactagaagatatgtatcacttcaagtgtagatataattgtgccaccttcacttgctcgtttggaattgaaggtgctgtggtgcagtaggaagtagcagtgacctcacttccagtactctatttcttgtttatattttgcttgtgcattttttcccactgtcgtgtaactatttctttttctcccgaacacccctatctttcaggcggcagcaacagctagctccatacaagctaaagt

SEQ ID NO: 36520 - DNA, 785 bp, Sorghum bicolor
  Intron number 1 from transcript Sb04g035980.1 (locus Sb04g 035980) derived from phytozome v7.0 (chr-ID chromosome_4; pos 65775313 to 65776097 reverse strand)
gcttgagaacctcctgcgccgctgtcagtatcgtggtaagaatttctgcgccacagcgcggcagcgctgtcattttcattctgtggcctgttagtatatctctggttcagtgtagtgtagttagatttctcttttcctggattttgccgaattatctgctttcagagtactctctccatcccaaattacaagtcactgcaagaatattggagagtcgaagtatctcacgtttgaccaaatttatatgataacataataacatttatgataccatataagtatcattaggttattcattagttatatttttatagtaatatatatttgatgttataaatctttctatttttttctgtaatgttggtcaaatttgaaatgctttgactctccaagatttttgaaatgacttataaattggaatgaaggaagtagatgctaaaaaaataaaataaaaatatgttgtttgtgtaattgtgttgtactagcttttataggtatatactatgtatgtacttgtcatgcataaattcttccgctgctacagatttgtttacatcaaatcaaatgatcaaaatagttaggccctgaattaatgacctcactatcaccatgtaactgtgaatgctgcattttttggagcttttactacaaaaagtagttacgtagtttctcatgcagtatgtacaaaatgcttattctggctttcactatagctactcacctgtaagacggattgtttcatatttgcagttacaacgacgaatcaggctgttgtcgccttgagg

SEQ ID NO: 36521 - DNA, 712 bp, Sorghum bicolor
  Intron number 1 from transcript Sb02g023290.1 (locus Sb02g 023290) derived from phytozome v7.0 (chr-ID chromosome_2; pos 56911865 to 56912576 reverse strand)
gctgccgccgagctgcctccgccgtggcgaccccggtacgcctcttctcttctctcggtttacgagcgcgtggtgttgctgtgcggctgtgcgtgcgcgccaggtgtttgcgctaataccgcagcgggcggcacccaacggcgttggcgccctcggtttctgcaggtgttgtttgggtaattgggttggtagtttggggtggtttggaatcgggatttgagattcgtctccgttggagcgttccatggagctgagcggagaattccgggagagacgagtttttttttctctctctctcaagttgagtcagcatggcacgaaaatggtgctaagttctcagttgataaatgtcatacttgttgtaatgttgcatgtagctttgttgatggctcctgctacaccataagtttaatttgcctgtgaatctgtgatgtttcacttgtagtttgatttgatatgaatgataatgtgttgctttccccttctagatagttgctactgttgaacttcaatttaatgccataaactgacacttaaaatatcacatgcttgagggtattgaatttttccatctgttttgtcactacctctaacttgtgcatgcagccacatgtgtagattatttgcttgtgcttgttttactgagttctgataattctatttcttcggttctgtaggatcctacctgtgcagacttaccattccagaggct

SEQ ID NO: 36522 - DNA, 954 bp, Sorghum bicolor
  Intron number 1 from transcript Sb02g043410.1 (locus Sb02g 043410) derived from phytozome v7.0 (chr-ID chromosome_2; pos 77226055 to 77227008)
ccgccgagacagaggtgcggcaagccttgcttagggttcgctcaacttatttcgagtgttttaaaagttcggtaaagcagccaaagggcaaaggtcatcttgaactgaatgacactaatgcaattctcctgtgtaacttgcgaacaatgccatgctatcataataaatcaatccatgaggcttagagtccaacaattcaaattcagcatgatgaatctagtttgaagcacaaacattcaaaatttactgaatcccgtgattaatatgccgaaggaagttctgaaaataattagatgtctatcgtgcccttttctccaccaaaacactgtttacactaccttctcagtgggaaagttatattgaaaacgtggaccaatctgataccatgtttcttgtatggcttggtaaatggcttatggtagtttataaggaatctgatgttttggtactaggagaataccccgcgcgttgctgcgggaattaccggtaaaattatactatcataatatatgttagtggatgatttttagtattctagcatggacaactaaatatatgttagaaaatgatgtggtttgctaatgtgaataacatagatgcaagataaatgatatgtgttagtttgatttattactggataatgatgtgaacactttgcatggcggggtaatgtattagtgggatgatttagtggatgttgatgttgacgctttgcatggcaagagaattagttagtgggatgctctactggatgatgatgtggatgctttgcgtgttaagagaattagctagtggggtttatctatataagagatatagatttcaaagtttaagaaaaacataatgccttcattcagtagtttcattcatgtacttgtgtttcttttcaaatttcgttagtttgtcttttgtatccagttagcttgaaggcctgtcagagctggtcgacaaact

SEQ ID NO: 36523 - DNA, 775 bp, Sorghum bicolor
  Intron number 1 from transcript Sb10g024060.2 (locus Sb10g 024060) derived from phytozome v7.0 (chr-ID chromosome_10; pos 52909420 to 52910194)
ggagaggaatcgcaaagagggccgtctcatccaaggttcgtgtatctggccactctgcacccaattaattttttccgatttgttttttaaatttttttgtttgtgttgtcccggtcaaaagctgtgaattatatattttttctgtgctggttgaaagggtcgatgcggaaccaattgagccgctccgatttatttgatttggtctcgattcgctgtagcaaacagcgaagaacagccagagaaaaactcgggggagcgttctgttcatctgtttgttgtaaaggcgactcctttccacgtattgggtggggttggtgcggctagttgatgccggcctctttgggtgctttgcccaaagttagtgagcagatatggttgctactttgtagatttgttgcgtaaagcgggcgaaaagttgcggcctctttctagaattaattccacccctggtgttgtgttgccgttaggtgattcggttgttagccaaatgatagtgctggttccgtttgatagtaccttcattttgggtgtttgaccaaggtacagttaccctttgtaagatgcttcttaaagtaaatttagcctatttgagggttttaattcattaagctgcggcaagtcttactgaatcaaggcagaaccaactttcacttcgaatttgtgattgtttttttactactagtagcaacttttaggaagctgtgtgtgatacattctgtcaactacgcttgtggtattgatacattgtttcgtatcatttctagttaaggaagcc

SEQ ID NO: 36524 - DNA, 742 bp, Sorghum bicolor
  Intron number 2 from transcript Sb02g032970.1 (locus Sb02g 032970) derived from phytozome v7.0 (chr-ID chromosome_2; pos 67555026 to 67555767)
tcagcgcccacaggccccgcctctcctctgtgcaggtaatacagccaccatcaaggcatcaatagatgtggtggaaatggaacatgctcgtgtcaaagctgcccttgacgttaccaggatttgggacaagtggttattaggattcagcagtgcattgtaagggtaaatgggtgatagtatttgctccaccatgcatttggggtaagtttggatataaagtgtggttgtgctatgaagtttgttgcttcggacacagttggtatgctatggagcattaaatatagacaaaaacaaaaactaattgcaccagtttgactgtaaatcgcgagatgaatcttttgagcctagttagtccatgattagacaatatttgccaaataaaaacgaaaatgctacagtagcccaaagcaaatttttttgggaactaaagaaggcctaaacttataggggccctttttcttatgtaaccgaacaaaatgcatattaaaatattctggttttatcactagcgaatcacaaattatcttgattggtataagactcactagaaaattgcaagattctcctgactggtaataatactggtgtttctgtttttcctttcaaagtgccagtattaatcattcttcatttaacactttttacttgttacattctcttaagcatccctttaaatgcttactggcctcctctttgtaattgtacagatactcatagtgtgcttattggctgaagtggggaa

SEQ ID NO: 36525 - DNA, 764 bp, Sorghum bicolor
  Intron number 2 from transcript Sb09g003900.1 (locus Sb09g 003900) derived from phytozome v7.0 (chr-ID chromosome_9; pos 4405400 to 4406163)
aaagaaggtcaagaaggttctccacagcatagaaggtatggtatgctatgcttcacaagaaactgcaagaacaatactagctcttcaagtttcattttcagtaccttcaagcagtgagcaatcttctgttgctgttgttttttcccccctcactaaatcaggttagttcttaaagacttgacaaaagtctgaacaagtctttgccagtgtcgcctaaatcccgcgctttttcgccttctgttgcttgatcttttccttttgtgtatgaatgtaagaggactttatttggttccaagtgagttttactgcacctactatatgttttctgaattcaggagtgatgatgaatcgtcatcttttgttcgtgatgaaagtttcctctgttttcttcaatataaatatatggacactcctgaactagtgacaattgtattgaaaataccatcatcgtctcccccaaaaaaggccattttgatttcgtaccaccagttttcttcagtaaaccacaggttatcagcactcgccgatgcaccaaaactttcttcaaacccaaacactgccattaaactgtttccgtggctaaactcaaacaaaatcgtcgcaaatttgcttcaaattttgcttgtcatataaagaaaaatattcttcttcttattatagatagatagatttattatagtattgttgttacactactctaatgcatcagctcctctgattctgatccaggtgtgtacaagacggacatagacacgcagcagcac

SEQ ID NO: 36526 - DNA, 439 bp, Sorghum bicolor
  Intron number 3 from transcript Sb05g002430.1 (locus Sb05g 002430) derived from phytozome v7.0 (chr-ID chromosome_5; pos 2593359 to 2593797 reverse strand)
ggatcccttggctttggtgaggaaaatatcatgtgctttcctcgcggaaaaaaaaacaaaaagaaaaacatgtgcttaggtgctttcaaagttagtccctttttcactttgcagcgcaccttatggaacgttgtcacccatgtctagttgatgtgtcaggttgagcatgggtaattctgctaattaaaattatttattctgtcaactgtagcatgtatctatcaattatagtaatgaccaaacatgtactcatgggagtaattcagccaactcatacttcttgtttctttctttcttcttgcttctctttgcagaatatgaataagataagaatatcttagactgtcaatacaattgttagttcatatctcattaattcctgcaaacggcctgtttctcatcagcacggatcgtcaggactcatcttggctgaccttgg

SEQ ID NO: 36527 - DNA, 944 bp, Sorghum bicolor
  Intron number 1 from transcript Sb03g031020.1 (locus Sb03g 031020) derived from phytozome v7.0 (chr-ID chromosome_3; pos 59348791 to 59349734)
ccagtttgatccaccgaacgggcagcctcaacttggtaagtgatgatgggagtccttgcaaaacagtttctcttctatgctggcatgccatcatgtattattaggaatcctaatctttttgtgcttttgaattgaatcgatctagcaggaggatgcacgggcgtcgacgtcctcgctgtcgtcgtcgccatcttcctccttccatcctaccaccatctcgtcgccgttcccaatccatcaaaatttcgcggtacatggacaccttttccttggaaagattactagctagtagttccttaggaaggaattggtctgtcagaaattcagacttgcatatatctagcttctacatgagagagggataacccaaatggaagccttctttgatgcatgattcagtgggtatgggttgatatatatagcacaggccggtgacacatgcatgtggagataacagaaattagtccctttttttctgaacacagaagagtgtgggtcttaaagcctaattctccatggccaacagtgaactgattggtctatcgtttgttcaaaagcaacatctttgacgagtcatgcttctaccagattcggttgagttgcatacatatatgtactttaatttctagctaagttgggtggagttgacagctctaaatctcttctttctttgtgattcgttatttgtcgcctttttcttgtttgtgtgttttctttgatatctagctccatcatgtggtttctctgtttgtgtagttcttctcaatctagtaacacatattgttttcactgtaatataaattgattaatccacagcgaactcctaaaaccagtgtatatatatcatcttcttttgtgctttaatttccatccgaatgcattatgaattattgtaacaccaagccagatagagttcttacattatttctggctttatcctgtag

SEQ ID NO: 36528 - DNA, 729 bp, Sorghum bicolor
  Intron number 3 from transcript Sb10g010880.1 (locus Sb10g 010880) derived from phytozome v7.0 (chr-ID chromosome_10; pos 14530189 to 14530917 reverse strand)
aggtaactctaggaagcctgacaacgataccaagccatattatacttgtgtggtatgataagcaaaatgctattggactattgaggattgttatcccgtttgattttattatatattctactatgcattgtttctaatggcagtggacataatgtaaataagaattaaatgcataccagcaacagagggaaggtaaacaacaaaaataccaataaagtacatggcatgttttgagtaatgaaaaattattggcacatttggctggataaagaacattataccatacagaaggtgaggtgtggtgttgtgaatatatagagaaggaaatgaagtagcttttgtttttcattctctgagattattcatcattgaacatcttgctcaactggtacatccgagtgtcagcaggttagttatgctttggtacttttttcagtttttgtgtggtcgtgtttgatatatctgactttggacttgctccatttagcaaatgctactcttagtgttctcttcattgtaaacagccttttggattatatttaagaaacttcgtaaacagccagtgtaacttgggctgggaaaagtgtttgatggtactatatatgattctctattaacatcagattctgatctccttgattaccttgcatcaatagttttttatttaggtttttttggattgtgctgcactgtttgaaatttctataccttttttaggtccaaagtcta

SEQ ID NO: 36529 - DNA, 745 bp, Sorghum bicolor
  Intron number 2 from transcript Sb06g017070.1 (locus Sb06g 017070) derived from phytozome v7.0 (chr-ID chromosome_6; pos 46246954 to 46247698 reverse strand)
ctttcggtgagtgctcttgagcccatttcagtgcaatagtacattgtggaacgggtgatgatacgaaggagttatgcctgtttgttcaaaaaaggggataaaattggttgactcgagtcctgtcgggttgttgaggaaaaagcgtgttggttatggcatatttgggaatggagtggaattagaaagttgtattccttttctatggtatacctgggctgctgggcatgagaatgtcggcacgttgtcagaatagagcatagaggcttaagagtaactactacctaacctaggctcagcttcctaatgaatgtagaaaatcagatatcttctttgtactatttgccacttatgtatagtatgcattatgcaatcgaaaaggatccttctgattctcaaagaacaaggggtaaagggattgataccgagaaagatttcttcttattataagacgtgatttgtttgaaagagcaaggtgacgtcttcatccttttcagtaaaagcagcagccaatggtaaaaaattaatgtcattaatcctgttacggatggttagttctggtcttattttgaatctgaattaatattccagtcaaagaaccttatctcagagataagctatatacattatagttccagaggtactcaccatagtcatagagtttactaaaccatatgcatcctttttgtttgtgttttccttttaactattagataaagtgtttggccctgctactacaactcgccat

SEQ ID NO: 36530 - DNA, 680 bp, Sorghum bicolor
  Intron number 3 from transcript Sb02g020230.1 (locus Sb02g 020230) derived from phytozome v7.0 (chr-ID chromosome_2; pos 49002633 to 49003312 reverse strand)
tgggtgtacaccgctccatctagcagcaactcgaggttctctgtacccttgcattccttttttttttgtcttatgcaaggaaaaatttagcttgtttgtttgttagtattgtcttggatgtacattgtggttttgtatttaacaggttccaattctttggcttgcatccgggttagtcgataaattaatatgagcacttttcagacagtaagttcattctaataacagtataatggcaaaaaaaagttgtgtgaaacttgtctgaattttctttgggcaagtgtcatgagcaagcctgaggaagactcagattgtgttacgcctcaaaataacgaagttgtctcttttgattgccagaacctggcattacctaaatctgggaacatggccagcctagttggagacacagtccttagcagttaacagttataaaggatgaaccgcttcatagtaatatttcccatttttttttagagttttgatgaaaccatcttcatatttctttatcatttactcctacatctgcttatacagtttaaaggaatgctatcttctacttatagttttggaaattctatttagctgtttgctatggctggcacttcaattatgaaatacatatataatttaatatgacttgaattataatttaacgtcagcaatttcttgatttaatccag

SEQ ID NO: 36531 - DNA, 514 bp, Sorghum bicolor
  Intron number 1 from transcript Sb05g000470.1 (locus Sb05g 000470) derived from phytozome v7.0 (chr-ID chromosome_5; pos 326772 to 327285 reverse strand)
gggaagaggtcgccaaccgcgcgctgctggaccaggtcactcctctgctttcttcctcccttgcttcctcttctgcttggtgcttcctcgtcgcacttactaatttagttaccactagtactaataagccgattaatcagagcttttcctttgggagattcacttttgtttgtccttaaacgaaaacagtttctgtgctccgtataaaattttggtatctattgcttgtgctaacaatagattcaagtagtgattgaagttgtggtttcagttcgttccaagctgccctgaacggctgaaccccaccccctcaaaagtcagccaccaaaactctactagtagtgcaacttcactagtcatattatgaataatcaaaaatttgttagccatcactatcgatttcgaagcttattgatttttccccctttcaagctgaatttactaattggtgtctgtatttctttctctgtacattctagaaactctgcaggaaactggtgcacataactgtcgg

SEQ ID NO: 36532 - DNA, 1054 bp, Sorghum bicolor
  Intron number 1 from transcript Sb02g006070.1 (locus Sb02g 006070) derived from phytozome v7.0 (chr-ID chromosome_2; pos 7357656 to 7358709)
acgccgtcgtgaatccccgcgatcccgacgtcaaggtgcgcacccccctccccgccgccggagcccgcactggcctggggggcacatctcgttttgtttttgttttttttttcctcaaaatacgcagcgtactagtagtagtatttaaattacaaacgaaaaatgaatcaaagattcaaagtacaaccccaaatccacccgcacagcagtagctccagctctcgtgatgaaatcgcactctccggtttcagattgttcaggttgtgatttcgactccagcatgattgttgtccgtctctgtccggggtcacatctcaacttttttgaggtggtttttctacagaagcttcgtctaaccgcgcctcttgttgtcaggagctctcgtcctggtttgtatatactctggttttcacttgttttctttatacacatcccaaattatcatataatttatttcctttcacagctcctttacggatgatgtgctgtgctgtgccgtaacgtcgtatctgtctaccatctactcgtagtaacatacaaatcacactttagtttatatcaaattggtgtgtgttcaatttatcgtgtaaaatataagcacctacttgcgattaacattccgggaatgttcttgggttttatattacaccttagagaatgatagttgatagacactgaagctttatgagggaaaaaaagggaaacaacctgaaaagcagtaatgattcttttgcgctactgatctgataacatgaatgtaactctgatgtggaattagatgctaagatatgctggtggagaacaacggcctacttatgagaatcagtgagcaattatttttggtgatacaacttgggttcatttcatctctgcttttttattccttttattagttaaaatttagcaggttgagtgagtagcaagcctagatagatattcttcgcccattgttttcatcccttgctggatttaccttttcctgtcatggttgatctaaagtctacagaattgcaatacagctttgctagaacagtctcttccagcgtctgtttga

SEQ ID NO: 36533 - DNA, 840 bp, Sorghum bicolor
  Intron number 1 from transcript Sb01g017130.1 (locus Sb01g 017130) derived from phytozome v7.0 (chr-ID chromosome_1; pos 17530169 to 17531008 reverse strand)
gccaggcacccgtccggcttcgtccccacactccagtgagtccctgagctcccgattgcggtgtgacgcgcgtggggggttgctttcagtggggatgttgaaaacttgacgcgagggcatgaattgggtgggacgtttttgtggatgatgggaattggggaccgggtaaaatttgtactcaattacaccgggctcttggttttgcgcaccgggagggattgagggggttggcgtcgtgcggattgggaaccaattcggggcgtttgcgcgttgcgtcaggggggggggggggtgattcgtgtctgatcctgtcagggttatgaaaaggattcgagttctcgtgtagtagtgttccttgctcgaacatctgaaccgattgcgactgaacgttctgcatgcgctgaatttagccacctctttacgaagacactgagagctcaatctttggattgcatatctactaatctagttagtcaagtatagtacgaaatagcagtcgttatatctccgtggggtaggggaattatgcatggcctgtctgatccttactccttagcatgacatggggagattaaagtgtgctgaacttgcaccaaaagggactagcatgccaccattgttgatcatctggctgtaaaagtattgctgtttttctttcctttttgaggtaaagagagctgctgttgctttgtgatgttttttttcttgatttaatttcaaaagggttgataggtgattgcttctttaatttgcttcctagtttgaagtaatggagtcctaaccagcctcttgtttgatgtatcaggaacatcgtatcaacagtcaatttgggctgcaagt

SEQ ID NO: 36534 - DNA, 666 bp, Sorghum bicolor
  Intron number 3 from transcript Sb06g027560.1 (locus Sb06g 027560) derived from phytozome v7.0 (chr-ID chromosome_6; pos 56421038 to 56421703)
agggatattaggcggcagccaaaaatccaatcctggtatgtcattttgtttttctcccttgcaccattcctcacacttaggccttgtttagttcgcaaaaacttttggctcgggtactgtagcactttcgtttttatttgacaaacattgtctaataatgaagtaactagactcaaaaaattcctctcgcggtttaccgacaaactgtgtaattagtttttattttcatctatatttaatgtttcatgcatatgccgtaagattcgatgtgacggagaatcttgaaaaattttgaattttttttgcgaactgaacaaggccttagatcatcaagaaaaaaaggtgcgttgacatttacattgcaaaagggtaaatgtagagggttttctctacaattttttttcctgctagaaatgtggtaattttttttttgaaaaatcctagaaatgtggtattggcaataatgccagctctgatggcccataaaactcaagacaggtacctgtgtggctgtgtaaatttaactaagagtcacatttccttacatgtgcatagcactcctgaaagctgatgttgtgatatgttgtagtacagacatatataatgtagcaatttcttctgttgcctgcagatttctacaactggaatagaataaaggtcagatac

SEQ ID NO: 36535 - DNA, 756 bp, Sorghum bicolor
  Intron number 2 from transcript Sb03g027610.1 (locus Sb03g 027610) derived from phytozome v7.0 (chr-ID chromosome_3; pos 55284575 to 55285330 reverse strand)
gcgctttgcgaagcagaggccgccacatcaagctggtaactcttttcaatgtttgccacactagctggtagctctttttcaaagtttgccacactcgtctgctcgtgaattgtgtagctaatcctctggagatcgtggttctcatgtttacatttttagggtgtttggttcgagaaatcaaaccattctagatgagaggtgatgcattatgagttcattcctcagatttggtggaatgacttcattcctcacaggctcacactagtactaattattagtgaggaatgaggtggtgatgcatcaacccattccattccacaaaccaaacaaaaaaagtgaggagtgagaagatgatggaactcattcctcaaaaaactgtctggatgagaatggcaccagccatttaactaaagttgtcaatgagttgcaattagatttgtgcgtattaattactgagctatagttgcactcaatgtgtttatggacactgaatgtgttgcttgttattaccttcctgtcctatctttccaatggatttattcagtatttcgaagtcaagctgacttagtacaaattatgtatgtgaaactctcattattttagtgacaatgtttgccttccgtcttgacgtgagtgaccattatgtttatgtgctcattatttctagtaaagtttacatatcgcctttaatattttacatattgcacttttgattgtacagagaggtttaaggttctatcgtacaatatacttgcg

SEQ ID NO: 36536 - DNA, 835 bp, Sorghum bicolor
  Intron number 1 from transcript Sb01g050400.1 (locus Sb01g 050400) derived from phytozome v7.0 (chr-ID chromosome_1; pos 73462051 to 73462885)
aggaccgccccgtcgtcggcctcgtgcacctcaaggtcagggtcaggcccgctctctaatttaattattcctcctctctcgtctgctacttaattaatggtaatcgcatcgaaaatggaactccaaaagattaaactttgctatacccaaacaattcgattgcctgtcaacaacccaactagcatactctgcttcaaagatgatgcaggcagcgtgcgcagccaacaactaccatgctatgctttcccttccatgaacaagacttcccttttcatacgaccgtcacaaactgaagggtcttgtctgcaagtaccagtatccagaccagtagtaccattacataattgcgttcctaaattaacaacgcgctgaaatgaaaaaccatatgctaaagtgtttttttccttttaataatcactagcttttgcagcttctcacactcacctttgcttttctctctgtgcttattgtttatttaattagttattactgtctacatcctacttatttcacttcgtatccaatagcccataccattctaattgttatttttgttgctcgccttgtgtttcttctccatcttttggataatttgagtttctataactttcctacaatctgaaaggaataaatcgcagctctctgttattaaaaaagccaaataatctgcagcatccaagatttgcctgtcaatgtgttaacaatgatctgcagtggttatatgaactgctaaaactacttttcataacatcataactttgattttgtcttctgaatgctgattttttcaagttgaaatatctctagatctcctcattccgtgaaagcaagtcag

SEQ ID NO: 36537 - DNA, 584 bp, Sorghum bicolor
  Intron number 3 from transcript Sb03g013110.1 (locus Sb03g 013110) derived from phytozome v7.0 (chr-ID chromosome_3; pos 15939811 to 15940394)
gaaggacgccgagttcaacgagcggttcaagcacagtatgtattgtcaagacaatgccctgataccatattatgctgtgtttgtgcactgtgcgcagagtttccatcattccgatttaggtgtagttttctgtgctagtacacataaggatgcgatcatgatgaacttggacaaatttagtaatttactcaagaactgtgattttgtcacattaactgcaagttcaagttgcagcatgatctgtacatgctaaaaatactttctaattgctgaagcttgtgcgtagtagtatgaataaacaagtgcagtttaattatttgctttgtcttcatttgaaatgatatggagtaacagaagatttattcttgttttagtgtggtttgattggaagaaagtttgcagctagctaaacaatctttgtgatctgctatccacctgttcgatgctatttctatttctgggaaaattgagtaaagtacaaggctaggaatagtgaagtttgatttttgttttgaaattaaatttggctgcttgttttgattttaatcgctatctattctatccaggacctccaaaggcattgg

SEQ ID NO: 36538 - DNA, 831 bp, Sorghum bicolor
  Intron number 1 from transcript Sb03g042150.1 (locus Sb03g 042150) derived from phytozome v7.0 (chr-ID chromosome_3; pos 69560693 to 69561523)
ccgtgccgctgcagtcgccgcttccgcctgccgaggtgagcagctgggtggaattgtggcttcctgttaggtttggtgttggttacggacttacggttcgcaaaatgactctgctgcggttactagcgtttgatttgggagaattctttgcagttttggagcaattggattggattgtttgctagggtgtttgttcaattggtttttgtaaatagaagtcatatatcagattgctgattcgatatttgggtattgatctaattggtatgcatatccacgagggttgcgatagatgtgtttaccagttcataggacgatgcacactaaaagtggagtagccccggtaatttcgagataagttgacacggaattggggaagttagttgtggtcgtgaattccgaggctgtgattttttttgtttaagttggttctcgtgaactgtagagaattggaaacttggggttgattgatgtgagaagatttattggtctcactacgttggtccctatggaaaaaccaagtgagagatgttggcctcaggctctcagccacttgattgttggagcctcatttatttttatctagtgctgggaaaattacttccagcttatatgataacgacttgtgttactattaattttggcgttacgttatgttccaagttttcaaaaaaatggaatggaattcacgcttgcctcttgaacattttgttctgcatagtcccaggctttgtttaatggcatgtggaaatttatgcttatttgttccaaatgatcataattaaggaccttaaaaaatgaagtatactgtggaatacgttgcaggaaata

SEQ ID NO: 36539 - DNA, 973 bp, Sorghum bicolor
  Intron number 3 from transcript Sb01g033720.1 (locus Sb01g 033720) derived from phytozome v7.0 (chr-ID chromosome_1; pos 57013253 to 57014225 reverse strand)
ccagattggagggtgcgtgaggtaatctctgtttcatgaatttctctttttttctgccaaaagtttcatgaatttcttgatggacaattggacatagcatctcacaacttttttagccattgcatttgatacatgagattataaccaatgatgtggaatgtatttgtttgcaacttaggaaaaaagaaacaatttagaaataccagtgtccttagatttagtgtatgatacgaagtggaaaaaatcaggaagaacagtaggtcagtgtgtgtgaggataattttattcaattcaattccatataatctgcgtaagtgtacaggactacaggttaataaattagccagccaggatttgggactgtgtatatacaggttcttggtacaagatgcatgtttattctcatttctatcaattgatgtaagaatgagtaatatttctatattctagcattcaagctagtttggttatgcttcaaatttgttccctgcttagttagcttcaatggctgtgttttatttattggtactcagcatcagttaggtcaacaggttaagccttgtgttgccttatggaagtgtcagtgtttatttcactgatgaagtgcgcttgccacccataatagatccacaattgtttttgctccgaatagatgagtgggggtttagtggtctagcccctcatacgagaaagtgcctagtgtctactttggtgaagtaagttgaccagtgtttaaaatttcaaagtttgattgacacgctacaactgtagcattaaataagttgatgttgaactctgtagtggatcataccctggtcacagtcatctgttgcgttggaccttgtccactaacagtgctttgttatgttctctggaccctcgttttatcttggcactccattagagattgctaatttttctgctataggcctatgactaataatgcttttacagtttgaaggtaaattcactg

SEQ ID NO: 36540 - DNA, 690 bp, Sorghum bicolor
  Intron number 5 from transcript Sb03g030460.1 (locus Sb03g 030460) derived from phytozome v7.0 (chr-ID chromosome_3; pos 58704313 to 58705002 reverse strand)
ctcaaggtgcttcaatgccatctagtctcatattaaacacagtgataacttacggtgcacttatacttaatttctcttggacaatttccatttttattatggtatttgcctccattgtttccagtctttaaggatcaaactacattagcacttgtagtattgccgcattgatgtgttttggttgcaatcaggtgcttagatgtttccatacacatccatagtatcatgcttttattgttgtccaaattgatgtcaacgatcacacttcatttttatatttcgaaatgaatgcatgaatacattatccatcctagttctcaccattaagttctcaacttgataagctcccagtcttgatttccatgttaaaaacctgtgaaataggatgggaatgatacataatgtatgaaacaattacaatttacaactgatcaagatatagctattgtaatttctgccttttataaaaaatggcctttggcttcaacttgttgtaaatagaagattatgcggtaacatagggattccttttctcattgttgtaatctaaattaatgttgaatgctgggtacattctgtattatatgtgtagtttctgctgcttcatttccttttggggtgtgaaaacttcatatcagtgtctcttgtgatctgagatcatcctttttgattttcaggatttaacatccg

SEQ ID NO: 36541 - DNA, 525 bp, Sorghum bicolor
  Intron number 4 from transcript Sb03g030460.1 (locus Sb03g 030460) derived from phytozome v7.0 (chr-ID chromosome_3; pos 58705057 to 58705581 reverse strand)
agctgtgttgaattcgtcagataatcctcgtaagtaatctcatgggattttttttttctctatgacaagttagatggctggatgttcatagacttgtccatatttgttggagtgtgatcgattgatattttattttccatgaaatttgttttgcttttctagttttcttgcaaggacacctttagattaactcaattgtttgttggctatcttgatgcttgatgctgtgccactgggactgcatttatcatttatgatacatttagaagctccaccgatggtcacacaatgtatagcttgatagtctcattaataatttttcctcaaaaaatatctcattaatatttgacagttttcttctgttaaattggtaccatgtgaaattcgctaactaataacaatatatttacatcatgcattcttagcaacatcacaaggcatgtgttgatgtgtatattttatggattaacatcatctccttgttctgcagagtcagatccaaccattcaacttgctgaccaggat

SEQ ID NO: 36542 - DNA, 970 bp, Sorghum bicolor
  Intron number 2 from transcript Sb09g017150.1 (locus Sb09g 017150) derived from phytozome v7.0 (chr-ID chromosome_9; pos 42929700 to 42930669 reverse strand)
agcccaagcgccaccgccagacctccaccaagggggtgcgtgcttccttttccttctcaaatatgctagatctgtatatgaaaactgcctttcgctgaaacgtggccatattcattatgtgggcctgagcccgattgcaaatgcagtagtttttgtatcatggcttatatctatcaatactgatgcctgttatcctagttatctataccagtatgtggcctttgttgctctgaaattgccttgcttcctgacgtgttgtttttgacgaaatgctgcacggctatccttcagagtcttttgtcccaaataaaatttttgtaactttttcgtgaaagtaaactatatgtgttatcatttatattgtactgaatttgttatgccagttattttattctgtttttggtttattgctaaaacattaccacgacatgatctctttatgcatacatcttgttgcacgccttctgcatcatagtttttgccttgtacttgtgtagctatgttagttgatgttctgaattcttatgctgcagttatgttgatgattgactagagaatgagtgctattgacacattagatctcaggctgtacttgctttgacccaaaattgtttgtgcagcaaattagtatgcacggtatacatacttgctttgaccaaaacattgtttgcacagcaaattagtttgcacggtgatatctagtttcagtagtctttcatcttctgatctcaattttgtgttcattatgaattttcacttattctttatctgcagaaacactaaattgcttttgcgaggaaggtttagatagtttgataccaaatatttctagttgcattctcacataaatattgtattcctgcagaaagttcattttctgtgcctatttgcttaatatacccttctggactgggttttatcctcctggccatttgtatgcctattaatgatctcttttgtgtgcttttag

SEQ ID NO: 36543 - DNA, 1029 bp, Sorghum bicolor
  Intron number 2 from transcript Sb04g020690.1 (locus Sb04g 020690) derived from phytozome v7.0 (chr-ID chromosome_4; pos 48601040 to 48602068)
gcgcaaggtcaagaagattctcaagggatttggtaatagatttaccctcttctctttgctgctgtactttgtgcccttgtgttcctggtattctgttttgttttttgaacaggaagtgttcttgatagttggcatactattagctcttcttccatggttacaaaaaccatgttgaaatctgcatattttgtttgtttggtttgtttccccaggttttatttgaaatctggttctgttttctgaattgtggagtgatttcctccagtaattttgaaaaaagggcaaacttttgtggtttttctggtcatttgaaatgtaaccaagtatttctgtactgcatcgctttaaagggaacgtttaaggcgcctcttttgtaaggtgcgagtttgaaaattttctcctttttttaatctatactactgctcgttttctctttgtacttgtgcatcatcataatacatacagtacctggcaaagcggcgccacttctcttcctatgatttctatgatattgcctttggagttcaatctggagagcaaattttcagtaaaaccatgtcgctgttttggttacatttgaaaaagttaggtggggaaatgcttgcttggaggagacaactccgagccgcacgtgtatcctatgttattgatgaaacaatttagatcccagcaaccttaatgcccaatcagacatcttataatgcaaaccactgcagtttagtatatgcctctctgtgcagcatatgttcaaaagaagttcaagttgccttaagaaagatgtaacccctctgtctgtcatcagatgacgatgacggattaattatggtaaagattctgggtctgccataagtttaactaattattgtactctcaactgggaaactgaagttcatgaatttatctgaaatttgtatgctgtctctttgtgcaattgttccaaactttctatttcttttcctgcaaatgtacagtttttcaattgagcttccagagtctgaatttttatcttgtgatgtgcaggtgttgaag

SEQ ID NO: 36544 - DNA, 1023 bp, Sorghum bicolor
  Intron number 1 from transcript Sb03g010330.1 (locus Sb03g 010330) derived from phytozome v7.0 (chr-ID chromosome_3; pos 11194441 to 11195463)
gggacctgcctcctgttcccacggccggattcgaggtacagtcgtgcagatttctaagcccctaatgtataatcggagagtagctcgaattcataacgtttttctgcagatgttagggacttagccacaggttgcagcttcttcaatgctagcaggtgttgcgtttagggttataaggagggtcgagcgggagctagggtttgcagctgtagaggtcacagtgaactaacttggctggatgaattatgaatgtatgtttccgttgtttagatttagattttgtggaggtctaagtgaattaacttggttgggtaaatgtatctttgcattgtttaaactttagaactattgcatatgaagttgaagttttagttgatacccctttacgttttacctgtgaaccatttgattgggttgtataataggtataacatctagcacagttttgtgctccctttctgtaacagcgcattttaagctggggtatcatgctcttgtagtctgtcttttatttacttcagatggaaatcctgtacagatgtttactttggtttcagataaagtctgaatgcccagaaaaggacacgcttatgcttttagttcgatggattgatgtttacttctgatgggtttgaggttattacacctcatctggtcatgacactgaggtctgaggatcaaacatcgaccatttataatgaactatgcatctctacttgaaattcaatattaaaacatgacttggaagattttctaagtttgtttttgaagtttttaacagaaaatattctgtactgtttagtgagcacttctattaaactttgaccttgtgatgctactatcttctttttcatgtattttaattccacagatatcttagatatacttgttttaactattgtgccatatcaaaaccggaaccatgatgtgaatcaagatgtttgcaagttttgactgtttgaaaatctatgtgtgatgcaattaatgtaaagcatgctatcgcttttgtttcagaatcatcct

SEQ ID NO: 36545 - DNA, 837 bp, Sorghum bicolor
  Intron number 1 from transcript Sb03g038030.1 (locus Sb03g 038030) derived from phytozome v7.0 (chr-ID chromosome_3; pos 65978007 to 65978843)
caccggctgggtcacctcgacgcggcggccacgcggtgagtcgagttcttcgcttctcgggccgccagtccgcctctcgcttggttggggctgctagcggggttcaggattcgcgggtggcgtggcgtggcgtcgtccgcgatcgctctcgctcgcattgagcgattattcgcgactgcttgttcgtttgctttctctctgttttttttctcttgtggggatgtagattgtgatatgtggcgttgggattctgagctcggttgcttcctaagcttccgcggagtggtttaacgcgtacgtatatggtaatcggttttgaagctgctaatatggatgtgccgtgtgcgtgacgaatcgaatcggccgcaggatgcctacgccctacgcagctcggcagctgggggaattggatcccccgaccatgcgaatttgcaacccagagtgctccgggttctcggtgtcgtcatcttttactagtataagtagtagtcgttgtttggaatctagtttgtcataatttctcttcccgatttgattggtttgtcgatgcgtctgttttcgtcgaacaagaagtttgttattgctaagcttcccgtttcggggggaagctgcctgccgtactgtgttacgcgaatccggtgagttgggctctgcggttcctctcgacgcgctctgcgccaacggaagacgagctctgttccagctgggtggcccctgaacaaccagcgccaaaagcagttccagaattttcctgatgttgcctctatattttgtcttctaagtcatgcttaaataatggcagagtcctggttgcgtgggtcactggatcctgaggca

SEQ ID NO: 36546 - DNA, 688 bp, Sorghum bicolor
  Intron number 1 from transcript Sb04g031260.1 (locus Sb04g 031260) derived from phytozome v7.0 (chr-ID chromosome_4; pos 61247769 to 61248456 reverse strand)
tcgtccctgccaacgccagcgagtgggtaggtcagcgtgaattttctgctaatccggttatattttgtttggctatcgtcgttctatatccagcttaatcgattttgtgatctttagggattatgttcatcatggccagctgctaaattcagcatatagttgaatgtgattggatccactgatgtaaaatttgcacaaatttccagcgtcgtgatcatttgtggagtgttttggtaataataggagttattgtaaaagtttttatttatggagatccttcatactggcatgctttgcttcatcaatttgtttctgtagaatgagtcaaagtgtttcagtacagtggtatatattggtagatgtgattagctctgttggtgtaaaaatcttttatttttcagtttttcaacggcatgaatttttttggttgtaactttttgtagagtgttaaatttgctttgttttctgattcattcatatgtgctgcctgtaaaaatcttcatcgttttagtctcgttttagtcctttgttattttcgtagtcatcttttttcaccagtgaagtactttgtacttgattttataaccactcacgccccgtcatagtccattcttgatctattcagtgatcttttcttatccgcatttctgcaggactttgatcctttctcactaacctttgatagcga

SEQ ID NO: 36547 - DNA, 858 bp, Sorghum bicolor
  Intron number 3 from transcript Sb01g021680.1 (locus Sb01g 021680) derived from phytozome v7.0 (chr-ID chromosome_1; pos 25621915 to 25622772 reverse strand)
gctccaggaaaatatcaccggtgagttcattactgtcttcacttcatctttagcgaagagcatttttcctacattacttcgaggcaaagcttacagtcagccatgctcatgctcatgcattgtttatgtcctttctatcatgatattcctatcattgttctacaatgtatataccggtcaacctggaaattcaatgcagtacacttattatttagttggaacaacatttctgaatttctttgctcatgatcagtctttcttttgatatgaatctttctgctgcattggactgttttctcaatgtcagtctttcttttgataaaaaattgcacatatggtatttgaatttggaaatattttcaaaatctgttaacactattttcgaaactgttggccatatatttgcgtaagagtttccctttgatgtgttaaagaattctctggagagagtttctgctgcattggactgttttctcaatgtcattctttctttgataaaaaaaatgcacatatggtatttgaattcggaaatattttcataatctgttaacactaggtcctaaactgttgcccatatatctgtgcaagagttttcttttgatgtgttaaagagttctctggagagaggcatttttattggtccagttaaactgaagtctatttctgttgtaaacacttggacggcgtaaatgtttcgtttgatgccttttttttgtcactgtggagtaactaacattggtccatatatgttccttttttcataactatggaatcaatttgaagatatggttgcaatgaaaggactgcatttataagtgtggtccatgaactaattgggtcttgttttgtgcaacagac

SEQ ID NO: 36548 - DNA, 878 bp, Sorghum bicolor
  Intron number 1 from transcript Sb03g026530.1 (locus Sb03g 026530) derived from phytozome v7.0 (chr-ID chromosome_3; pos 53329109 to 53329986 reverse strand)
acggcggacttcgggcttttggcgccgccaggcaggtttgtttgtgctgcatccaccttgcctgcgttcttgatcgacgtggccgttcttgctttctagtgccaattcgtacgattagtaacagtcaacctgcgcgcggttacgcgtgaattttgagcatttttctggaattctggtgattagttgacttcttcactatgaaagtcataaccatcagttattagagctaaaatatatgatgttgggatcagaacacggcccccatgatacctttgccttggctattgagtcgagtacacaataatgattgttaaacaacaggatcactgtcttgatattcctatggttcgcacttgtgcaattttcatgacaactcttcctggcgtaggtgatagacagtgggtatgagcagcatgcatcattatttaccacttcgaccagtatgttcaagatttaagattttttaaaaaaataaattcgcggaaaccagtatgaaaaatgtgatggaatgtaactataaggtaaatgtatttcttgcttgcatccattcaattcatcaaggcataaatgagccaactaaatttgttgcaagctaagtacaagaaaagtactactctttttccaagaaagagaaactatctgaccttttcccctttcaggtaactaattttctatcgaagcaaatcaaaccttttgtccatccgcttctttattagatttccatacatggttctaagtggtgatatttcttttcccacataattgaaggggaagggacatgaatacatgatttacctttttcattttttggtacctcattttacagtctcttatttaaccaaacatgtaataggtacctcaacgactttatacattgg

SEQ ID NO: 36549 - DNA, 921 bp, Sorghum bicolor
  Intron number 1 from transcript Sb07g024260.1 (locus Sb07g 024260) derived from phytozome v7.0 (chr-ID chromosome_7; pos 59292337 to 59293257 reverse strand)
gcttattggcctcaaggaaaagctaaaaaaaatatgtaagtaaatatataaacatgcagcatatgctactggtggttaacgtctacctacatcaagccacgatgtttgctattataatccatgcgtatatatagtcactgggctgctacacgtacgtactcctagctagtcgtagctgaaatatatcattaaccgctcaatatgtttcatagcttcagctccttatatctattccaaaatcaatcatcaaagacgtacggcacgattaagataatgcatttgcagagacgaatgaacttcctgaaaaaatgaaataaaatcagaggttgtcagcaagaacctgaaccatatatataatagttctaggatcaacaatgttgtcatcttcaaaaacttgatgactaagcatccggtcgtgcctgttaacaagaaaaagcagcctgaccttaattaattaacagaaacccgccatttttttctaccttttgtgaacctttattgctaacatgtttgtcacattttttttcttgatcggacatttgtgaccgtattttattaagagcaagtttcggaatacaatcaggactgcagaagccggctatacttttatcaaaatgactagctaactagaggggctatataattagctagttaaaataatagaaagactatactttttaatttttataaggtgctatataagagagtaatatgaactattggacggttgaaatttgattttttttgtttaaaagaacaggaggccggggtttttgacctctactggagataaatcaaagcaaaacaaaaggtttacagatatacagttacagaaaaagaagaaaaagagaaagaacataatatatatatacaagctctctttcaggccataaaacaggcatagagaagcggcacttccac

SEQ ID NO: 36550 - DNA, 779 bp, Sorghum bicolor
  Intron number 2 from transcript Sb04g029320.1 (locus Sb04g 029320) derived from phytozome v7.0 (chr-ID chromosome_4; pos 59417952 to 59418730 reverse strand)
gtctgctgcacagcaaccgcttcctctaccgccacgtgcattcttgcaatcaccggctggtggcgccgtacccgtacgcggcgcagtaccagggccgtccctgtgggagtgcgacctgtgcgacggcacagggcctccatttttagggcccccaaactccaattgcaatgcatcatctagtagtaggatgtgctggtcgctgcaggcagctcaaggcttggttctaaactgttggtccacttttcttgacgtgcacaacaaaagggtgcaagtgccgcgctgaactgctgcatctggccttcggcaagctaacaagttcatttctatttctttttcttcatttgttatgagtcttttgcaagtgaactggaactagcttgtttgttgtctgatgcatataactaacgcaatgtctcttaatttggtttttttcccttacttattgttgtgtattgacgtgtctaggcataaagtgtttcaaatcaaagccatttctttgcaaatgaatctaggaaaatatgaatggaattacaaaaaactcaaaaaagatagagaacttaatattatgaaggagctatggataggtcatgcagccaaaagttaaaactgtatagttgttgatcattgtacatactccctatatttccaattatacgtcattctaaaaatcatgaagagctaaaacatctccaagcttcttgcaataagtacattattttactattgtattttgttagttgttagggcctattttagaatttagcacagggtccccattt

SEQ ID NO: 36551 - DNA, 939 bp, Sorghum bicolor
  Intron number 1 from transcript Sb07g024480.1 (locus Sb07g 024480) derived from phytozome v7.0 (chr-ID chromosome_7; pos 59533592 to 59534530 reverse strand)
gcagctccccgcgcacacgctccaggtgcggtctcgatcgatgcctttttcctctccgcttccgatcctcgcgaatcattcaccggaccagcccaccactcctacttggaattttacctgcggagtactagtagtttcgggaactcatctgcgtagtttatcacggtttcattccggccggatgtgctactgtgcacaggaagagatatgtgcttcattaacgtggagttattacaaaactgaataatatatattgggtgcagtgcaatacccgcgacggtgctgctgctgctgctgctaattcttgtttcctttcttcacccctatacaaaaacacctgctgtctatttccaggacttggttttcttctcaaagtctgaaacacctgcagtgcaaactcattcagtaattaagcatggcttgatcatgttgttagtttgatgatgaaacctgaactctgatggcccaggtcctgttttactttatcctgttgacagtgaatctttttttatattatattccacaagtatcaaaccatggtgctctaatggatattgattgattcctgaaagtttatcatgttgatataactatttctcaatacttacttgggttaaacaaaagaattccccatactgcattttgggcttgcaccgctgacaaaatttcagactactaatgaaattactaatttagactccaaaggcattgtaatcgaggtagaaagttataggtacgcaccttttgtttttcaacattacatattaatatatgatgttgtcagccaaccatttgcttcagatcatcattctctgataataaaacagagacttatccaagccatttttttatataatttttgtgaacagtggaatgacaaatttcttaatatctcatggaacagattgttgcaattacggttttcttccttctggtgat

SEQ ID NO: 36552 - DNA, 697 bp, Sorghum bicolor
  Intron number 5 from transcript Sb01g009280.1 (locus Sb01g 009280) derived from phytozome v7.0 (chr-ID chromosome_1; pos 8013639 to 8014335)
ggctccacttatccgctgggctccgtttatccactgtatgatcctgactccctttctttagtgcttagtcttgttgatctagttatgcaaatcttgaaatattactacagctatgttttcagtgctattttagagcactatttgactgtattttaagtactgctgcacatttatttatttatttatttattttgatgactggtgactaagagttgatatattattttgtgtactgaatgaactcgagctttttcagttttcaccattgactctttcaaccttgctatgaatggttataaaagaaaaaaccttgctatgaacaaagtgatatttctccatgtggatatggaatcttctatttttgtgacattagaaactctaaatactagcatggatgtatattctttgtttacagcatttttatagatatagaagcttccgtttctccctcagaaatggacttattacaagattccaattacaatggctgtcatggtgttaagtgttaatgcaacctttgcatttgatatttgatttcttatgagtcttagactcttaattcagaataaggacgaggggaattggatttgactatgccagtagcctccctttataatctttattcttgaagatggtttaagcccatgaatttcttaattcagcgctctcagtggagttcacaaagtcccagattgtt

SEQ ID NO: 36553 - DNA, 846 bp, Sorghum bicolor
  Intron number 3 from transcript Sb01g001320.1 (locus Sb01g 001320) derived from phytozome v7.0 (chr-ID chromosome_1; pos 1250272 to 1251117 reverse strand)
ccttggacgaaaagagagaggagatactcaggaaggtgctgattcctgtcttgcgttgcatttttccttcctttttactggaatggtgcttgggcttttccttggtctgttttttattcttatgttctgtgtgatcgacgcaaaacagagatttacaatgtggctttgtgtttacatatgtcaactttgaacctcctgcgtactctggctgcggtcaataatcttggcactgctaccttgttgccttaagctacaacacctagtacttttcttatttggcgtattgttgacaccttctgtcaataaattgttatccatgaaaactaagaggtatgtatgatctggttgttgctcaactgttcaccatgttatgctaccagcatatgaaaagaacaagtttcccatgcatgtaatcaaacatgttatattgagaatgtgcctactgcctacagcaatggacactattggaatttggaagtagtatgagctagcattgaaactagtttgtaagtcatatgcttaagaattctgttcagtgccaacaacaaattggaagtatgcatgcttacttgtttaagaaagcgatcttttatcataattggaagaccgaagacgtttagttatttaatcagccactgaatgcagacattttttttcttcctaactaataatcgatatttattagcatcggctttgctttgtatatatggacattgaccagcagagctgcttaaactggatcttttttgtactctattcaaagcaatactccataatattacattcactgcttgtatttttttcctggcagatcaagcaggctgattttgagttggtgaaagttat

SEQ ID NO: 36554 - DNA, 925 bp, Sorghum bicolor
  Intron number 1 from transcript Sb04g017420.1 (locus Sb04g 017420) derived from phytozome v7.0 (chr-ID chromosome_4; pos 40414712 to 40415636 reverse strand)
tcccagcacagacgaaactgctccaagcaaacctggttggtgctcctttagcccttccctcttgaatggaacttgtggataacatgatattaagtctcctttctttgttctccatgggggaattgcatttatagttcatttatgtccatgcaagtttaagtggctacaccgtatctggtggtttagatgagtctacagggacaactaaattgatgagaaattagtaccaaccagatgtttgccaatggcatgatgattgtttactctaatgtcttggtaatatgcagcaatttgccaagcttcttgagcccttcttgtcttttgcctgtttttttattggaaacagaaatgactggccactagcaagtctgtactcaggaatttaggggcccagtgctaaaagcaaattgggccctgcatttgaggaatgctgataccaagctttttgtgctaccattattcgcaaaactgtttttacctaaagttttgaattagattgttgtagtaacagagaaacagttaggtcttgtttagttctgaaaagatttcggatttcgatactgtagcactttcgtttgtttatgacaaatattatctaattatagactaactaggatcaagagattcgtctcgcgatttccagctaaactgtgtaattagtttttgctttcgtctatatttaatgcttcatgcatgtgccacaagattcgacgtgacggggaatcttgaaaactttttgctttttggggtaaactaaacaaggccttaatatatttttggtaggggaacctcattttgtacttttgactgcacgtattatgtgtcactgtttatgaccacatgctgactgtagttgttccatagcttcaatttctctcaaaagtaattgatttggttggaaatttcattccctttccagataaaa

SEQ ID NO: 36555 - DNA, 762 bp, Sorghum bicolor
  Intron number 1 from transcript Sb02g040350.1 (locus Sb02g 040350) derived from phytozome v7.0 (chr-ID chromosome_2; pos 74317634 to 74318395)
cacctacagccctgactgatccggtctctcttgaggtaagcgtggctgtgaactgtgatatttcctcgcagaattgcctttttttagctattttttcgatggaggcgcggattagctgtgaagtgtagccagtagctgcttttggaggatggatcgttagttatgctcaaccctaatcccttttactggtcatcggtatgtcattttgtttgtttagactatgatctactcagcaagtgatgcacgatggtaggtagatgactcttctgtgattgttaaattcagggcgtttcgctagttttttcacagtttgcacgtgaatttgtgtctggttttgttctgtgtgatgactctgaatatacatgtggcggtagtctgctgtgatacacccattatttcgcgattaatcctatttagtattcttttgacttcttttttttaaaaaaaaataataatcctttttagtattcttttatagtctcgattgatatagaatagccagtgaacccattccatttgatgtttcaatatatcgagtattatgtcgtcccaaagggtagcttttagggagggaatgatgagatgttggaagttcacaagtttgtgcctttctgaaggctgggtagactgccccttgtcttttataatgtccttttcagatgtcttctttgtgcacgtactgtttcattacttagggagttactaatgtctatatttaactgtagtctctctgcttatattagtggttaatcctagatcaat

SEQ ID NO: 36556 - DNA, 404 bp, Sorghum bicolor
  Intron number 2 from transcript Sb03g033940.1 (locus Sb03g 033940) derived from phytozome v7.0 (chr-ID chromosome_3; pos 62176426 to 62176829)
atcgtgaggaattgcgaaagctagagaaggtaatgcaccctttactggttgatgtgggtaatgtagaatagtttgacacaatttgtggttaataacgccgagtaaataaacaccatatgtacaattcattcttaacattttcccactctatggcacccctgcttgcagaatgatgtgcttatagtcagataagcgtgtgcataaatcaaatagaatggaccacatggattctcttgtttgaatagaagcacatggatgattaatgtttttctgtcctgatcccgtatttagcaaaacaacataagtatttcagttttttttggggcaaatcttcaccgacccatgataatgagaacaactcattttcagaatcataaaagagacaatactgcagtcagtccttt

SEQ ID NO: 36557 - DNA, 834 bp, Sorghum bicolor
  Intron number 1 from transcript Sb01g033050.1 (locus Sb01g 033050) derived from phytozome v7.0 (chr-ID chromosome_1; pos 56116851 to 56117684 reverse strand)
cctcggctctgggcgccgcggcggggcgcgctctggtgagcccatttcccgttttctattgccaaaaggctgttatttctatgcttagctcaaccgtgaaatttcgctgtaccggaggagtttcaccgcatcggtagtgtcgcagcggagatttggcggcgggttataggtgggagttttatacggttccagggtcacatcgctcgtgtgcgcgcccgggatgtaggctgtgacgggattatacccagcttgatgccggcatcttggtctactcttttttttttgtatggttttgggctcgccgtcagctcatgctctggagtatgttggtgggtttacaattgctaggtctgcttgcaatagtttcactaaattttgtgataaacctaggatttttatcggcaggaggaactgtgcctacaaggaaatttcagacccaattttggtgttgccttgctgacaatcaaaagaaactgaaatcttgtcttgttcatgaaattgtccagtctggaactacagcaagcttgcattccttaacagctgatatttcagctgtcatgcctggttttggctgcgcctctgtggtgccattagttcagcacaaacataccaaatgaaatgtgtgcgcaaaccagcctatattatttgttggttctggtgtcttccccccaaggagccaattagatgaccaaagtgttacttgaaggaggattcaattgatatgagggcatttgtggatgacactgccttttctgttgtctacttctatatgtcttacatgctgatttctggtagttgtacaccgtatgaacaaaattctcgtgaactgcagga

SEQ ID NO: 36558 - DNA, 770 bp, Sorghum bicolor
  Intron number 1 from transcript Sb01g049500.1 (locus Sb01g 049500) derived from phytozome v7.0 (chr-ID chromosome_1; pos 72449393 to 72450162 reverse strand)
gtggcaaaagggtgagatttctctactttttgtttgatcggtcttgttccatttcgtgatgttcatcaatactagcttgtttctccactgttaaggagtttggacttggataaagttttatgaattaatgattgtaaatatataagtattattggtttactaaaccggatgcaaaaggaacttttttttcctcaaagaaaagcgaaggtttatggtagttctcattcaattttgtttgcaaagaaagacgtccaagttcagttcatcgaatttcaattcttgagtttgatttttgtgttcgatataggagaaagttgtcggttcttggggaactacgaaaattcgtataagagcaagtattataatacagccagctgcagggtgtaagatttctttacaacctttttgcagcccactcatataatggttagctcatcactattaatacatggcccacttatctatctcacagactttcttggtttttttgtctgagccggctgtaagcttacagcctgcttttactctctctcctcttctctctactccacctcagcatttagctggcttacagcctgctataatacttgctctaagaaaaactatctttaccatggactagtgaaaagtattactatgaggtttcttgctttgtaggcaagcaagattgaatatgacacatgctttgttcacagaggagtttttcaacgtgtacttttctgctttgtgctgtaggaattctggttggagaagagtaaaggtgggatttg

SEQ ID NO: 36559 - DNA, 697 bp, Sorghum bicolor
  Intron number 3 from transcript Sb03g034310.1 (locus Sb03g 034310) derived from phytozome v7.0 (chr-ID chromosome_3; pos 62528559 to 62529255)
gtctgccaggcttcagtgtcaaggatctggaggaggtgaggttactcctgtcatgtgaagatttgtctggtatatgtagcgattgctagtatgtttcattccaaataaatggtgctctcatctcctttccaaggtgtatgttaataatggttagcatagttggtgtcagtccttaatgttggcaataatgacctactgttgtataggcactgcatagcaatgatgggtctatgtcagtatgaagatctattcacaattgtgccgatatatgagttttccgtcaaagcttgactatgattgattggaaatcagcaataaccttttagttgcagttggaaaggttgaaaagtctcgaactgtaaggaatagtgaattcaaagtgttcttacatcttacaactctgatgtagaattctgtaagtctgtaagagcttcacaccctatggcatggacttcagagttccctcttaaagtctgtgccatttctcagagagaatataattcataggtagattttttttaatggccatagggacggtactgagtggtgctgatgtattgtacctcctacattacgattcagacttgcttcacaattgtcaactgaatctgtggttctgttcatccttattttgttaaccctaatccgtttgatgattccaggggtcagtgtcttctgtggtggagtgtctcttggc

SEQ ID NO: 36560 - DNA, 651 bp, Sorghum bicolor
  Intron number 2 from transcript Sb03g000470.1 (locus Sb03g 000470) derived from phytozome v7.0 (chr-ID chromosome_3; pos 325465 to 326115)
cagaaagccgtgtccaggttggtggtttactgttacttgccccaatcattcacaaatcacaaggtctgtttactgcgtcagattgtaaattgtaatttgcgtctagtgtttattttttttgaaagaaagtggcaggagctctgccttgcattgaattaaggaaaacagaaggttttgcctcagatcagtagcagacatgcctcaacaagctacaggacaaccacaagctctttagacttgagagagccagcccgcaaagaaacaaaaacaagacgaaagcccccaaaactagtcttggaaagcaccttgtcgtctttgatcaaaatcctctcttttgtacctagcgcaactgatagaggcgtggagcaatcattttggaaaatccaccgattcctttctttccacaaattccacatgatgtagatgcatactccgttgaatggtcatccacaatttgcgtttagttagttacatgctggaaagtatgttcaaccaatcattttaccagttattcattcatgagtcgtcatacttcttttatctactgtactgtgaccgggttaaaaaatatgttcaaccttttgagttcattgctgaaatcgttgcttttgtctagggaagctcaaatctgtctgtgttaacagaaactgg

SEQ ID NO: 36561 - DNA, 1013 bp, Sorghum bicolor
  Intron number 2 from transcript Sb05g025420.1 (locus Sb05g 025420) derived from phytozome v7.0 (chr-ID chromosome_5; pos 58703122 to 58704134 reverse strand)
ttgtctgggtggtggactggtgggcaggtgttaaggtacacgcagatatgaccagcagctaagaattttattttcgcatttcatttctagtagatagattgatctgtgacgtgttctccttcagtatcagaactcaaaattgcatttctgcctgggagttgcagcattctgttggtttgctatattcaaactttcttgtactgtcatatgatgcgttattttgaaatgaacacaagctgagttaaacagctgttttcagtgctgcaccctaactgaatctggtagatgcatatgtctaaccaaataaagtaagcaaagaagtttcaaaagtttagctcccacacaccatgttcataaatacaaagttgtaaaggcaatgtcggcaatactagtagggacactgatagagattgacaacctatgttggctagagtttagtgtgatgtttgtaaagattctatttggaagatttgcatggattgaattattgaaatgttactttggtgacctttttattgcatatgcactagaaattagaaagttagtcatttaatcatattgcgtatgaatttccagtattgttggggtggtcagtggtgtggcttatcaaacaagaaggaagatagttagttttttatcctgcagaattgtggcagtaaattagacaagctaagaaaaaaaacaaattctgatgagtgacatttatgtaaatggcttaaatgtgtatcaattgaattgctaattgaggatactttgtctaccttttttgtattttgtctaccttttttgtattttgtcttcctttttcatcaggagatctaaatgaacatacttcttaagcacttagcatgcaaacttcacgtttgagtgatgtttttgaagcaagcattatttttttcctcctggtcccctgagtaacttcaacgcgtttgagtgatgtttttgaagcaagcattgtttttttcctcctggtccctgaataacttcaacttatggtctgcaggtacaacttc

SEQ ID NO: 36562 - DNA, 1007 bp, Sorghum bicolor
  Intron number 2 from transcript Sb10g031080.1 (locus Sb10g 031080) derived from phytozome v7.0 (chr-ID chromosome_10; pos 60737087 to 60738093 reverse strand)
aagttgagaaattgggtgccggcaaccgcgtcagggtaagctatctgctttggtttcagacattgattccctgtgattgcaaataaaattaacagactatagtgaattaagacttcaaagttggtgtagtgttagctcaggtacttaatttaattctttgctacctgcacttagttgtcaaccaattataaatctcaaggatgaatttagaggactttcacaagaaagacaaaagagccaaattccagagcttagcagcactttttttctctgcttttaaaaagcaatgagttcgatacaatgctgggggttccagcttacaagactgagcaaaagaaactagtgattacaactcaacaacatcagaactcatgaagctcccaggttttaaattcaatgtccaggtcttgattttgtccgtcatcttaagggttgttcctttgtcctccttgtgcagcaccaaccacttctgcatcagagatcacctcagtaggagttttaggaaatttcttttcaatggctatcttgttcctagtcttccatatcgcccaaaacagacctgcagtcataaaaacacctaagctataccgaatccccattttaggtagccatttctccatgatctattcacatcagtcttttattcttttcttttccttttgttttgtgaggggtcaatcatatttgcccttgttatatgaatagtatacatgccacccagccgttctttatttaaggaagagctaaatttcaagtgtaaaatctgttatttcaagtgcaacctgttgatggctagactttgggaccaaggaagaattcagctcacgcatcactgatttgctattcttgaacttgagaagccaaaactagtttgcagagcgatatgttcttttgtttgcacgcacgaacaccattctcaccagaaactcaacattttctttctcattggacattgccttgaccgtgttatttctgacattagtgttcttttgcattgttcattagag

SEQ ID NO: 36563 - DNA, 859 bp, Sorghum bicolor
  Intron number 1 from transcript Sb01g028030.1 (locus Sb01g 028030) derived from phytozome v7.0 (chr-ID chromosome_1; pos 48800428 to 48801286 reverse strand)
tgttcaacacgcccgacgaccaggcccagtgcgacgtgagtatacatatacaaatccttcttttttttttcgctcttttcgtctctgttattattattattattattattattattattattattattaatttgggttattgggctattcaatcaaacaaatgaaagctcttttgtccgagttacggcatagaattggattggatgatactctcctatagtatattagaacaagccagaggtagcttatacgagcactgtagcacgaacagggacagccggacgacgatgctctactacctttttccctttccatcaagagttgtccatctcctcctcctcctcctcctccctggtctaggctgtttggttcgttccagaggtgagctgggacccggacctcctcctccgatccattaatgacacagctcatgtgtggctgtgaatgagcgcgcggtgcgcctcttcttcctcctccagctttcaggtgcggtgtgaggtcctgctcctgctcctaccctacggtaggaccagaagtactggtagtacagtatagagtagccgagcccattaatagctcgactactcgtgagagagaggaaggaagaagaagctcacacacacaccaacgggaagggctttccgcgtgggcattaacacccacatgggcatggcagttgggcttcgtcctcgccgcccctgctggcctgctggctgctgctctgctctgtctctgtttctgtctctgtctctgggtggacaagcacgcacgactggacacgagctgggttttctgatgatggtggttttggttgcacggtgcaggagtcgacggtggaaacggaggtccgggcggcgca

SEQ ID NO: 36564 - DNA, 588 bp, Sorghum bicolor
  Intron number 2 from transcript Sb02g018880.1 (locus Sb02g 018880) derived from phytozome v7.0 (chr-ID chromosome_2; pos 45892807 to 45893394 reverse strand)
agagccaggacttctttctggtaaattcttcggtcaacaatctgttatgttcattccagtgttaccatattaactgtgtccaaggaacttatgatttcgttccaaatgtgaaaatgtctctgtttgttactgtggcagtagttgcatttctccctttcttctgcttatttgctgtattaaatattttggaggattgaaataaagaataccaagtggcttgccctgtatcaatcaaattactgcagtttactaacagtttctattgattctaagttgacatgatcatgcttcctaatttatttcctggaagaatcattgatctgtctcatttgataatagcggtgtcttcttttttcaatccacaaccatttatattaatgcaatcatttttcgataggactgttcacatgctgatgccacttttattgcttaaaattggaaattcatgtgcatattagttaactttcctgtggattttactactgtagcttctattctgttaggttttgttatgtagtatgtgtttttcctatgccataaaatataattcttcccatatgccatttttagcttaaggagctagagaaa

SEQ ID NO: 36565 - DNA, 481 bp, Sorghum bicolor
  Intron number 1 from transcript Sb05g000280.1 (locus Sb05g 000280) derived from phytozome v7.0 (chr-ID chromosome_5; pos 102067 to 102547 reverse strand)
gctcctcctcgtctcgccgtccgctgcgcagcctggtgagccaccctgcccttccatcccccattctccaaagattcgttttttcttcttcttcttgttattattgttttgtttacggcggcgccgcaccgccctttttctaccagctttattttacgcattcatactcatagccaataatgtcatggggacgaaatgctccagcttctccaggagatttgcgaaatatattgcaagcagatgaatgtgcatatccacactgaacccctgtttgattttggggtcagttagtttgcattccatgaatgatagaactagtaaatctaagctaacggagtaagcaactagcttggattatagtgtgttccactaccctgcttactgcatctaagaaacctcaccatctcacctttaatttgccccatccaatcctgctcctcccccaggtttcatcagcttggactgcgggggagctcgcgat

SEQ ID NO: 36566 - DNA, 1011 bp, Sorghum bicolor
  Intron number 1 from transcript Sb06g028310.1 (locus Sb06g 028310) derived from phytozome v7.0 (chr-ID chromosome_6; pos 57124295 to 57125305 reverse strand)
gtcttcgaccgggaacccaactacgatatctaccggtgggtaaaaagagccattttcccttttgtgttgctatattttagttaattttgggttaagcctttgagaatcgatagcgattgttgtctgaattggatttgatagtttgctagttgctgatcatggaaaagtttccgtgctgctaattctagtttgttacttcgggggattaaggtcaaacatagaaattgagcaggtaatggtcactcggtgcttacacaaccctacataaatacaggagtagtgttcaacatgaaacataatggcgattgtttggtgatgcaagtcatgattctagaaatgaagtatactgattatttgtttatttcacctagccttctagtagaacggataatttgtcatctatgcaatattgagaaccaagaaacaatagatgagcaacaagtttactgcttggttctaagactaggctgttagagggcaatgagatgcaacagtcatcattttttttccatgactgtccatcaaggcatgcttttcattaagagtaaagaagttttacaagtgctgttaagccatagcttactgcccatagctgaacagacaccaacctaacaccgaaaataattacagattgtatggcacactattttgtgacaacaaattaagcacatggtggcgatctagtcttaggattgagagccattagggtgccaggacctccctttttgtttttggctgtgtccttttttgcagaggtcaaagtgtgtatataattggaattgtatcaactctatctaatgatcttgaattaataaaatatacaagtcatcatcaacagttatgctattaattatttctgataagaacactaggcctgaattttgcaatctcttgcaaacttattctttgtaggcatgcttctacacaaatgtaaagatgggaactgaaaataagtttatttttacatctattgcagtgaagacatcacatttgtcgacccactaaacactt

SEQ ID NO: 36567 - DNA, 837 bp, Sorghum bicolor
  Intron number 1 from transcript Sb05g025980.1 (locus Sb05g 025980) derived from phytozome v7.0 (chr-ID chromosome_5; pos 59527602 to 59528438 reverse strand)
acctggagcaaggcgccgtcatcgtcggcgcaaaggtagtgcggggggccattgatttgctttcgattccgtttcttgtcacgggttgttaaggcactagtagttacagagattctgctcgcgttggcattcagagtgtgtgtgcctatccttttcaacctgcattggctggatgtgagctggtgctaggattggtattgctgatctggtcatcttagtctgtttagatatggttgttggatgtactacctcaggaaggagtgattttgacatctgtgaggtgaaagtcacatgccatggagctggactccatctttcttgctcttacttatgttctttgttattgcttcatatcatggggaaaatcctttgcaggtattacgataagtagtattcaagttttgatctagatgagaggcttgtacttgtttctatttgcttttacactgcatggagtgagtttttggaaggtgaaacatagctattgctgcgaggcaggtagccaagaataggcagttttccttttgcatagttttgaggtcaagcttacctcattaatcttgtatcaaaaaaggctattcgtgtttcttaggtcctgccatgcagattgtggtcacttctctgtcgttattgaactttttttctcttttgacatgcataactctttacaaacgtggtttggcattacacattgtatgccatatatgtattttgggatgtaaaaaggcaagcaatgccatgttcttcagatctgaagttttttgtatttttaattattgaaggtgctaacataagtatcttttctttgttttctttctcattgcaggattcatcaca

SEQ ID NO: 36568 - DNA, 976 bp, Sorghum bicolor
  Intron number 2 from transcript Sb02g023460.1 (locus Sb02g 023460) derived from phytozome v7.0 (chr-ID chromosome_2; pos 57083982 to 57084957)
tactttactgacagcagcaccacgtacaggaggaggtatgtacaggctaattaacggagagttgcatgcatatatagtagatacacgcacggaaagagaatatattgtgcatatactcactgcccaaaatggtttgacttgttagtatcaattaaaaagaaatgcttggatcgggttatgccatggcccgttctccattgtttgaacttaattttcagccggcaaaacttcagtttgtaagatgtgaatatttttcaaacacgatatctatataattgacataatttgtaatcagtgtggattaccatgcattccggttaaaaagaacgttgcatagcatccgtaaaaacccagtggcagcaaggtgaaaaggggccattattcatcattgtacgtatagtacgtagtaatatctccccaactggtaacaagaaactagctagaaacccaatttcacataaacatcaataaataaacagcacttcttgtgccgtagtagcctcgtaggtcctgcaacgacatttctgtgataatgactcaaacttacgttcaacaccgtagcatggatatcacagcaacattctcgatgctaatcttctttgtttacctatattcggtaaagtcatgatttatgaaaaacatttcggaagcaaatatgagttgatggcttgttcacaaattttgttcccaaaatgtcaattgcccccgccgccctccaattttcgttggacccatctcgtcatcaccgaacaaggtcacatcaactcaattaattttattctgattactgtattattacttgacctcccacatctcagataagctcgtggaatagacccaatcgtaaatatcgatctgacagttattatgatcccagcgggaaccaacactgatgccaacctgactttactatcttgcaaatcgcaatgcattgcatgcagtgactacctgctggtggtggcgctgggcgacgaga

SEQ ID NO: 36569 - DNA, 740 bp, Sorghum bicolor
  Intron number 2 from transcript Sb05g009360.1 (locus Sb05g 009360) derived from phytozome v7.0 (chr-ID chromosome_5; pos 18570134 to 18570873)
aggctggagggtatgtcatcttccgtgatccactttattttctcgcaatctgtgcaagcttaagttgagttttatggtctcttgcttgtattgtagacttgtagttaccttatcgatggtggtcattgtttattgatatattagatgcagagcaatatgtgatgtctcctcgactctggagaacatgtgaaagagtaataagaaatactctccctttatcctttatctcaatttataagtcattccaagaatcttggagagtgaaagcatcttaagtttgaccaacattatataaaaaattagaaagatttatgaaatcaaatagatattactatgaaaatataactaatgaagaacctaatgatacttagttggtatcataaatgttgttatgttatcatataaatttggtcaaagttgagatactttgactctctaagattcttgtgatgacttataatttgggatggagtagtttatgtcatttgacatgttataacaacgattgaatattagtacctgagaggaagtcagatgtttttgacctcctggcagtaaacttccatagatttatgatcttagcagcaatttaatttagtaatttctaaacatatacttattccatcaccaagtttttcatgaagtttactgatgtgtaatctttttagatccgagtcaaactcctgaaattttgtcttgttacagcattgtagaaagtgttggagagggtgtaactgacc

SEQ ID NO: 36570 - DNA, 637 bp, Sorghum bicolor
  Intron number 2 from transcript Sb05g003650.1 (locus Sb05g 003650) derived from phytozome v7.0 (chr-ID chromosome_5; pos 4247237 to 4247873 reverse strand)
acagcatcctctcccagttcgaccttgcccgccgggtgcgttcgttgatcctctctctgaacgctagtccttgagagctgaaatcgggttgaattggataagtttttcttgtggccattgtgtggatctgagggcaattgaatgaatgtgtaaaagggcaggtgctttctgctgtaataggggctgcagttaattagtcttggttaacatgattaagctgtatacgcagttaattagtacgtaggttcaatgcaggaatcagtaatataaaatgactgttctcaaatggaaggatattactcctgtctaaggttatgttatttaggggaatctgttcagttgtagggcccccttggcacagcgcccagccccggcttatgagatgaagattgagttaccataattataatgcttcttttgaatggggctgctgtttttgtaataaaacatcttgaactgtaaaattgatggctaactgaactcctttcattgaaagtatagtaatcctgcaagttaatgttgctggcttttggtcaggctttgacttcaaatgttgctattctcgcatcttcccttagtttttttttttttccttctttcatgctttaggctgaggcaaccatattgaggggtcccc

SEQ ID NO: 36571 - DNA, 1014 bp, Sorghum bicolor
  Intron number 1 from transcript Sb02g024000.1 (locus Sb02g 024000) derived from phytozome v7.0 (chr-ID chromosome_2; pos 57962195 to 57963208)
ggaccgacgtcggcggcgccgtcctgcgcctcaaggtccccccgtccccgtccctgcctcttgattcttgttttcctcgttctggaaatagggtcgcgttagcttccatgatttgtttgaattaggcgggattgcttgggtatgctgtttgcaatctggtgaagtataagcttacgtagtgttgggctgttggcaactgttgtctgttgacttgaggtggtgatacgggcaatcacttcataggtgttgattgtgtcgagaacaatttagttgggagttgggaccgtgataaatagctcaagttccttcgtaaacatggcttcattatatgttaaaattgggagtgttgggcgatactcaattggcatgctatggggggaatgttttataaatcataactgaagactcgatgtagttttgttgtgtggatgtgattgagtggtactttggggaagtaaagtgctgagctcttgtaccatgtaatgtaagaatcacttctctttttggttgggctagagaatatttctgttttttgtggcaaattcttgcttcatttggtcattttaaggctatattgataaatgataatgaggtggaccctgcaatttttctttcttgtctccttttagagagattcctcttgttaggcccaaatattcttagctttctaatgaacttacaatttagttcatttgatgaccagtcctcgaacattgaggaatcagattcactttgttgttttgttacaataatatgaaaccatttaaccatttatcataccgtaaatgctgcaaaaatctacatttcctgccatctcagaagtttaaactggcatgtgcttgttagataaacaatggccaacatagttagcggtgaatcccttgcttaatctgcactcatggacaagaccatttatttagattggtcgttttatatatgatgatcagggtcatttacatgagtgaagttgttttttcctttgtttatgcagactgcttcagctcatagttggac

SEQ ID NO: 36572 - DNA, 870 bp, Sorghum bicolor
  Intron number 1 from transcript Sb03g043350.1 (locus Sb03g 043350) derived from phytozome v7.0 (chr-ID chromosome_3; pos 70700655 to 70701524 reverse strand)
gagttctggggtaaccacttcgcacttttcccctcgctactactatcgatcgactgttcttacgcatactaggcggtttttgtttcgcccctgtgttccgtttactattagtagtctccgattgcttttgttctgtgatacccggtccagatgccagtttatgtactgctttatgttacttttggaattgaactgaagttgcgatggagttagattcagctcgttgcgttggctgtaggcatctatcgtacaactagtgttcattttaattggctaaagcactcctgttgaaaagtatgttgtttggatgtcactttctacatttgttctatgaattgcgaactaggatatgtatgagtctgttgtccatgtctacgtggacaggtatcatcgaagttttatttttgccccttcgagaatgattatattctgttgatagatatatcatatatgtacatatatggtacacaatcggtggccactgctgaggctgtctactgacttaaccaaggttggatattgcacatgttacttaattactatcttcatacttggccaatctgttttgtcatgtgtaaaatatatggtcagatttctgtggttccgccagtcagtatgttgcaatttgttagatttctgtggttgtccgccagtcagtatggtgctgtttgttagaaagcttggtgtctgatagccactttttgattgttgatattagcctatcactgttttgtttctggatttattagaaagtgcattaagtagtttttttctttctatttttgtttctttgtttgtgatactaaattaaagagttgtttttattatcatataggtaaagaagtaaagccaggagccacggtttcttgc

SEQ ID NO: 36573 - DNA, 885 bp, Sorghum bicolor
  Intron number 1 from transcript Sb03g030540.1 (locus Sb03g 030540) derived from phytozome v7.0 (chr-ID chromosome_3; pos 58776796 to 58777680)
cccaagaagccgcccaccgccttcttctacttcatgtatgttctgtgttgcccttctccctcccctgttaatttgcctgctacgaatttcgtgtctgctgggtgttactgctccggcctcagctaagcgattgattggttaaatggttaggggttccagtatgcagctcttacctatcaagaaattctagtgtatactagtgttaggtgcaaggtactacttcatatctctgatgtgtattggttcgctagccgctggatgggctcaccattgtagctcagcttgtgcaatcaggcttttcctagtttcttttcttttcttttaataaactgccatttcttgcttttgatttgggaattgggatgctgggagattaggtttcaaggcatcctttggtgaagcaatttgatttttcctggttcatggccagatttgctcgtttgtgctacattcccaagagtcaagtaggtttatgttttttgtgcactgtgattttgtctttcagttccatttaggattgagattatcggttaatgtcatttctgaactttccatatgacgctggtgtgaagaacatttgatttaccaaagtaatcagcttactgtactcagtccaggtctactttacataggtttgtaaaaaaagtcatatgtgctgttacttatctaattcttatttaacataactgctttgtgctgcaaccatatcgacacaccatcattgaacatatcgattgctccttgaggtttctcccacatctttaggtgtaacacgaatgtgaaagctctttcagttgtttgcctttgtgttatataccactctataatgaagctctattttgtgctgaagggaggattttcggaaggtttataagcaagaaaaac

SEQ ID NO: 36574 - DNA, 490 bp, Sorghum bicolor
  Intron number 2 from transcript Sb03g033290.1 (locus Sb03g 033290) derived from phytozome v7.0 (chr-ID chromosome_3; pos 61638843 to 61639332 reverse strand)
ggtaaacttcagctcgtcaacacacctagccctatatattattcatgcacatcattcaccgtacacatgtgctgtttctcagaacctgcttgcttgcaaggaagaacttttccccttatcttaacgggaactaacaaaatgttttgtacgtacttaccatttttaatggcaattttgcgttcaaaaagggaccggtagccccatgtgtatgatgagagccaaaagaagacatctttttagcgctacagatttgtttaaaactgataaagaactgatcgatgtacatagtggaaagtggggatttttcttgtcaggaccttatagaatcaaactgtttcctacctatgcaactttctgcaaattcttcttacatttttccaaacaagagcctaagtaagtggctggttctacatcatctcactcacgcatctgtttgttggtgtgtgatgttgcagaagggtactgctggagccggacgagcgagcggcag

SEQ ID NO: 36575 - DNA, 397 bp, Sorghum bicolor
  Intron number 1 from transcript Sb05g000680.1 (locus Sb05g 000680) derived from phytozome v7.0 (chr-ID chromosome_5; pos 456471 to 456867)
agttcgaggtaatgtaactaactaaattttgcaaaatggacaccgtagcactttcgtttgtatttgacaaatattatccaatcatagactaactagctaggctcaaaagattcgtctcgcaaattacaggcaaactatgtaattagttattttgttaatctatatttaaggctccgcaagattccatgtgacgacagagaatctgaagaaaatttttgcaaaatttgtgaggaagtaaacaaggcctaaacaaactgagagagtgactactgctctactacgtactgatcgatcgaactgcagatcgatgccaaaggatcaaatgcatgcatgcctgcatgccttaattacctgtctgaatctgaatgcaggtgaaggaggcgacagtgacgcggct

SEQ ID NO: 36576 - DNA, 947 bp, Sorghum bicolor
  Intron number 1 from transcript Sb04g010240.1 (locus Sb04g 010240) derived from phytozome v7.0 (chr-ID chromosome_4; pos 13861968 to 13862914 reverse strand)
gaggggactggcagccacgggctcggataaggccggtgagtgtttcctgagattcgtccttcagcagcggagataccatacctctgcatataccatactagtagcattttccccatgcgtgctgggtttcatttggtatctgaggtagtaactttctttcttttttttttttaaaaaaaaggcctctactctttctgaaatctgaagtcatagggccacaggctgggacttatctttgacgagtttatgcaagcaaatcctctgcgcacaatcatctgcaaactcggctcatacgttttctgacgagacatgttagtggtaactcttctggatcgaatccgagtatttcgatgtactcagagttatttttgagctgtgttgaaggtggtgggcaggtaccttcatgatgatatgagattttgcctgttcgtttgcgcttggtcgttgcctcgcggcttgtgggcttgttggtgacttgatttgatgacgaccctttgatggcaatttcaggccggctgctttttgtcgagtgtggggattcgtagttagtaataggattgcttccaagttgtcttcactctctgtccttctcttgttgattgggatgggctggagatggttgggcaattttgcaaaaaattagtctcaagattgtatccgtcatccacctttgcatatcttctgcaaaaggttgcttctaaattttagattcgtttagataattctggaatgacaacgactttagctgtttctttttgttttggaaaaagttctttagtgttgacctgaagtcctttccagattaaaaaagaacagaaaaactctgataaaattgggtgctcaacattttatttatgtggactaggcagttgcttttctttctctataatcttttttttttctgtaactaagggtacaaggaaggagagtgccagcctgcgggtaga

SEQ ID NO: 36577 - DNA, 738 bp, Sorghum bicolor
  Intron number 2 from transcript Sb10g028250.1 (locus Sb10g 028250) derived from phytozome v7.0 (chr-ID chromosome_10; pos 58104808 to 58105545)
tcaggttagattagaccttgtttagttccgaaaaatttcaaatttttccgtcacatcgaatttttggacgcatgcatgaaacattaaatacagataaaaaataactaattacataatttgtctataatttgcaagacaaatcttttgagcctagttagtccatggtcggacaataattaccaaatgcaaatgaaagtggtacagtagtcaaacccaaaaaattggattactcaacaagtgattgctcagatgtcaaatagcaaactttatcatgattcatgacctacaaaatccaaaatcatatcattatcaatttttattaagaaatcggcatcctaagtgaaattcaatacatgagaaattagaaaattactgatcatatttggctaattaatgactaataactgattttagatcatacgttctgaaaaaaaaatctggagcatagagtcctgaaaaagcatttctgttattgtatatcagataagtcagtttcatttggaatatgaattaatttgtctgataaggattttgcttccacgaatttctagtatatttgttcatagagcaacaagtttttttttacttaaaaatccgagtgaacctaattgtgtaaccaagcaatctattcttctgttgaacacatttttcatctttttttattgatggttttggcaaaacaataatctttatttaccattaggtttccaagaagtgttttggacctcaccaaaatac

SEQ ID NO: 36578 - DNA, 540 bp, Sorghum bicolor
  Intron number 1 from transcript Sb09g001375.1 (locus Sb09g 001375) derived from phytozome v7.0 (chr-ID chromosome_9; pos 1218920 to 1219459)
ctgcgttttttgctacaaacggtatgatcacacggattctttcctacacatctttcactacctattgtatcagtttcatgtttattatatatactttatttttatctttgattttttgtgctaacatcatatacaaaaacagttcgaggtacgacattggtgtggtattttattgtagaaatagaaaatgcatctgtagacttagtgtttggtaataagggcttgtttggtagccctgcttttgttcctgattctgtgtgtagtgattctcctagaaaaacgattatatggctgaaattgattctctacggtaaactatatgtaggaagtgattctgtgtggtaagtaaatcaggagaagttagtcttttttccagctcccagcctcctatatttgagagaatcagcatagaatcgtttgtctatgatatactgtctgtacgcgagagctcctcctgaattcaactctgagctctaccaaacgttaagtgtgctcttttattgtagtggtaatattttcttttcttttttagctcatagt

SEQ ID NO: 36579 - DNA, 1008 bp, Sorghum bicolor
  Intron number 2 from transcript Sb03g037750.1 (locus Sb03g 037750) derived from phytozome v7.0 (chr-ID chromosome_3; pos 65715896 to 65716903)
ttggagccggaccaagaacaagaagggccggcaaggtggagtctttgtttacttgtccctctgatgaacaaatgattctttttatctcttctatgatcttcatttgtttgatttctcacgctgtagcaaaatgtgctgacattattctctgtttttttccttgattgttttggtttttttatatgtgctcggctacctcgacattcgtgtgatacgtggatgttccatgactgattgtcgcctcgcttccaacagtttatctgggtgagtcaagataaactttcccatctgtaaaaaagctcataaactttcccacgctatgattcagcaattatttgatctggttgcgaatgaactgcattgcgttgttctgactgatttcggctttggaatctgcaaaaaactgctttatcccatcttttcaacaaaaaaagagagatcaagtgcggtgaaaaaaaatgctttttggataaagttgaaaggacttggactgtattttgtttgtcccctgttatgctgcacaattaaggccctttggattgttggaaaaaatgtaggattctcattcttatagattaaagtcctgtctggatcccactgtctaaaatttagaactttagactactttaactcttgcgactacaaacagccctctagtattagcccggtagagagagagaggtaaaacttggtttgtagaaatagcttacatgaaaattttaggatcttttttttttggtgtttgattccacaataaaaaccaacgtgttttttggccgttgactcaaacatctattccaacaaaaaattcttggctatttctctgatttgcatatgcatttatcccgttcatgtgtttttcctacgtattttaaaattttcaatcctaaattccaagagggcccctaagaaacgtgctccaacacaaaaccattaggtatttgcatatatggcagttatacatgaattaatttttttgatcttgttttttctcaggagcatttgaca

SEQ ID NO: 36580 - DNA, 227 bp, Sorghum bicolor
  Intron number 1 from transcript Sb04g036210.1 (locus Sb04g 036210) derived from phytozome v7.0 (chr-ID chromosome_4; pos 65996482 to 65996708 reverse strand)
catcgaggaggtgcaggagcactgcaactacctttgtaagcgccgcgcgctccatggacgatccgacccttggccccctctctttcccaattttggtttcttctctatataatctactagactcctatatatctaattccattttctttttgtgataataataattagtgttttaatttgattctggagcagtctcgcagcaggagatcgtgtcgctgtacgagcgc

SEQ ID NO: 36581 - DNA, 1012 bp, Sorghum bicolor
  Intron number 1 from transcript Sb01g038485.1 (locus Sb01g 038485) derived from phytozome v7.0 (chr-ID chromosome_1; pos 62010877 to 62011888 reverse strand)
aggaagctcctcttcggcgagttcgtcgaggtgagcaccgtccgtaccgccgtttgcgatgatgtccaccgcattggggcttagggcgatggtccgcgggtgatgggctgggtgcctgggttttcgattttattgggtttccaatgcttgaggccacatcgcccacgatcagggtcgtgaccaggcgattctcggttaatcgtgataccgcgcattggccgttccgcggccggggatgatcgcgagggtatccgggtggttattggttaggaatagcatgcttttattaatctgggggtgaagtgggtgcttaattacatatttacatgtattctttttagttgttctgcggagtttatattgggtggttggagtgaccttatcttcctcatgcggaaatgctgacaagattagtagaaggttatgccacatagacggctatcaagttgcaacagcgattcggcagtgagccttctttatgcacctgcaaatagttcagaatcttggcttctcgcttcttccctcagtgagttccgatagtattattgacatctaagcaaagtgtctaattgtgcgtaaattgtatcatattatttttatttcttcggctgatgccagttacctctggccattgatacctgccaattgggcagccttgcattagttaggtaggaattacttaagtggtatatcactgtttattcttttagtatgatccaatttgttttttttgagcattctatgatccaatttgttgcatgcatgtattggatttgacctatcaatgaaccactaatgttctactaccccttttaacacaccctttgtgttcgcatcagaattccaatgtgtttcattgtttttgtgacttgctgatgattatgggatatgccaacccctggttttctttttgcactgtcactatgtatgccctcacaatgtgggatggaagtgccagagttattcactgacatatttctattctgtaggtgttgagttgtgatccagggct

SEQ ID NO: 36582 - DNA, 685 bp, Sorghum bicolor
  Intron number 1 from transcript Sb07g028100.1 (locus Sb07g 028100) derived from phytozome v7.0 (chr-ID chromosome_7; pos 63093778 to 63094462 reverse strand)
ttgcaggtggctgcatccaaggttaggtcacgcctctctgcttctttttcgcatgacgtagtttttaaagtgctttgagccattttctagatttgaatattgcattgtcggttcatactattaccaatctgaaagcacccacgaatcataaattttgtcatacatgcatgtggattgatgtgttatttattcaacaagatgaaaaataatgttttgatccctacacttgcagtatcaaatgcctttattaacgttgaactaaactgaccagtagtttcttcttctatctttttttttccatatcatatacggtttgtcttaagtcaaatatttttaactttgaccattaattttgtaattaaatctatgtaatttcagaacatatgaactgtatattataaaaatatttttatagtgaatctaaagcacataaattttatgctattaacctatagattttttctaaaaaactggtgctcaaaggaaaaaaaaaattatttagacaaaattaataccacgtataaaaaacaaaaggagtagcttccttacattagtcctagctaattcctcactttgtgccatgaagcagattacaatccaaacgcgaccaaagcgagctgtacaagatcgtgtggaaaaatgaaaattccattcccttttgggattgaaaaaggttgttttgcaa

SEQ ID NO: 36583 - DNA, 851 bp, Sorghum bicolor
  Intron number 2 from transcript Sb02g028610.1 (locus Sb02g 028610) derived from phytozome v7.0 (chr-ID chromosome_2; pos 63796974 to 63797824 reverse strand)
tcgcctcccctgttcccgcggataaggtccatgatcccgaggcaagtttgggtccagctccagtctcttcgcattgacatttgacaccactggccgtgtttagttagtgaagaaaaaaattttcgcgacactgtagcactttcgtttgtttgtgataattattgtccaatcatagactaactagcctcaaaagattcgtctcgtaaatttcgaccaaactgtacaattagtttttatttttgtctatatttaattctttatgcatgcgtctaaagattcgatgtgacggagaatcttgaaaaattttaggttttagggtggaagtaaacaaggcctcatcactttggttctgaaccgtgtaagggaatggatcaagatgcatttaatttgcgtttgtcctattgagatttacttgcctaatgtagttgcataaaagcttttatactgcttaaacatacactgagaaaaaccatgcagtcagagggattggctcctgctgtcaaagacactttgaatgtccttgaggcttgctcggcgaataatgttcagaaagtattctaaaaaaataatgttcagaaagctattgtggtttcctccacagctgctgttcgttttaatccaagttggccccaagatagaatcaaagatgagagttgctggtcagacaaaaaattgtgcattaagaatcaggttagaaatattatttcactttctttacacagaagcacccatcagttttgcaattcattatcaattcatattgctaattaatactacagggaggactaagcagggccaaccaagttttgcttgcaggactggtacagtgctgccaagataattgctgaaga

SEQ ID NO: 36584 - DNA, 398 bp, Sorghum bicolor
  Intron number 1 from transcript Sb02g028610.1 (locus Sb02g 028610) derived from phytozome v7.0 (chr-ID chromosome_2; pos 63797904 to 63798301 reverse strand)
cggctacgccgtgcacaccactgtccgcgacccaagtgagcccgcacccctgcgcgtgcgctgttcttcttgatcgatcgacgcgttcgaattgggaacccatgcatgtcttgtcggcgtctggctctttgtggcttctaaatttttttacaaaatagaaatggtatcacttttgtttatatttgataaatattgtctgatcatagattaactaggttcaaaagatttatcttataaattataggtaaactatataattagttatttcttttatttatatttagtgctctatatatgtatcacaagatttgatgtgacgagaaatctaagaaattttgcaaaatattttgaaaactaaacaagacctgcttcacgtgatcccaagaacgccggagagc

SEQ ID NO: 36585 - DNA, 1003 bp, Sorghum bicolor
  Intron number 1 from transcript Sb07g022420.1 (locus Sb07g 022420) derived from phytozome v7.0 (chr-ID chromosome_7; pos 56948746 to 56949748)
cccagtctcctcagattccccgccggttcttattggtgagtccctctcgctctaggcggaggaaattttctgctgtattattattggttatttcgctcgcattttccagggattggaatcggagggaaaggatagtttcctatccgtgtgtgatttttcaagagccagtgacggtaaatctagcttgcgggggtagaggctgcagcccgatcctctcgttttcccttcccttttcccgttggatttggttcgggacgcgactccgttttgccgcggattatacgagcccggttgtgattgtcgacgggcagttttatttagggttcagacgcgcgcgggctgtcgcgatctgactcggggctttggtttcatttgagtgcggtgtgttgctcctacgagctgggatcaagtcaaatggattttttagggggtggggccatggccatgggcgagtttgttggatttgcggttgcctggaacccgagtgcttgttgattttcagcggtggctcctactagtgatcttggagcgtttagtactgggtttaattggaagatttgatctgcacccacggcctcaagctgtgggttatcttgattcgaattgttattctctttgttctggaatgccgtggatccgaagtcctttgacatgctgtgtgctttcggtttcacttttcctccggatcattagtagcgcatcatagcttctgcttctcaagttgaaagtgaactagattgcttcactttgtgatcaggcaagtggtaggaataagaaggaccacttattgacaaagacacacaaaatgtaaatggcctttccctgtagtacttgtgctgctacatgattttactagccaattggcagcttgcaaggcagacttgatcctatttatttttggcaactgaaaaaatataaatactcaaaaatgatacgaggatatactctacccctaacttcaccttttctgaaacagggttgcaacatttttcctatcttttgt

SEQ ID NO: 36586 - DNA, 820 bp, Sorghum bicolor
  Intron number 3 from transcript Sb03g030350.1 (locus Sb03g 030350) derived from phytozome v7.0 (chr-ID chromosome_3; pos 58599218 to 58600037 reverse strand)
caaggccagccagtcgaacacctataagaagagtttgtgatttcagccctccttgtgttttgtgttaatttggcacagctacttcagaaattttagctagatactgatgtgcataaagtatttttaaagacatattagcttagatgttttgttttcttttggaagctagaaatcgtagtgtttgtgtagaactaagacttacttgtcgatatcgagaagctgaaaatttcgaaatataagaactatgtatgcttatttaaatatgtcacagtccaaagtactcttccaacacccctttccagataattggtattatgccttggtatgattgaatgtctcggagtccatactcgtaagacgggtaccgtttcaaggtaggcatgaacttcaccagctggtggcaggtgcgacgcaatgtggaggtagggtggtgcactggccactggcgtaagcaagaaaaaaagatttaatattaagttgctcattttgaccacatgaatcggttaaaatcagcaatattccttcaaaattaatacttcgactatttgtgcgtgaatgatgtgcaccaccacttatttttcatgctagcttcccccttgatcaccagtaagcagcttgttgtccatttgctgttggagaaataacagcccataactttttctgggagatcaaagattcaactcaagtttgttccagttatccttgagggataaacaaatattacatgactttatgctattaagccacattaagatgtttggttaatgtgattgtagttcatcactgcgccatcttgcagggaaatctgcttcaatacatt

SEQ ID NO: 36587 - DNA, 783 bp, Sorghum bicolor
  Intron number 1 from transcript Sb04g011160.1 (locus Sb04g 011160) derived from phytozome v7.0 (chr-ID chromosome_4; pos 16405772 to 16406554)
ggtcaaggaagtcgccggctccccggttccctccggtaaaccaactcctgcttcctctcgactctccctaatttctcaattccacgaacggtgttgtacgtttttttttttgcttgatcagtgaacggcatcgatgttagattagcgccgtcatgagttgatcaatgttttactttcggattagtaatttatcatagtgagctcctgagtccatttcagtgggcttctaatgtgttctttttgcggaacgtgatagctctatctgtcaggctccacggtttgctcgctgttcatggaacgtttgagcaacctattgctacaagcctacaactatgtttgcctgtttctgtaattagatgaacaagtcacacaaggatgcatttctctccattgcagcaatcatgggttcaagaaaagctgatagctacaaaagccttaattaatgcatgattgagcagttagtccttggagcttaatgaagcttgacgatagatcatcggctacaccatcggttttatcaaagtagtgccatagtggtccatattgatgacatctgcatttttatataatgcccttcactttgtgcaaattcaaaatttcaaattcatcaaattttcttgaagcattgagtgaccacttattgtcccaaaatttccttcaagccattttgttttctatctgcatctgtcggctccctttcttttctgtcgaaacaatgccaatttaatgtacattcttcactggattattcagcagggaagagtagtcaagcaactagaagag

SEQ ID NO: 36588 - DNA, 912 bp, Sorghum bicolor
  Intron number 1 from transcript Sb09g004530.1 (locus Sb09g 004530) derived from phytozome v7.0 (chr-ID chromosome_9; pos 5504477 to 5505388)
tccgcctccagaacacctccgccacgaagatccaggtctgttcacgactcgtgccccgtgccccctggtgtggcttggagtagggcgttggggcagtgcgatcgggctgggggtttagctacctctgctctcggtagtgtcatgagctctgagatccaactatgggcttttcggtggctgtgaatggtcatggttcagctggttaagtttcgtagaagacgggttgtgtgttagatatagccgtaggcttctcggcgttaggatggactactagcttggattaggatatactcctacattgcttcgtttccttttctggttgtgtgatgagatgtttcaaatgggatggattagtgtgttcatgctgtctgtccaggcaagttatgatagctcacagaatcacatgtgaagttcttttggtctatttctgcacattaggcgggaacatggggaaataagggttgtggtgtctgccagactgccagagaaattctgtcaatttccttttggtttgctgggtttgattagttaagtggagtgggatgtttgtgcatgtattcggctttccgttttgtcgtttagtgtgtgtggattaatggcgggaatttttcttgatttcctttttttggtctttttggacgttacaaggtgggggaaagtcctcatctttgcttttgtgggttaggccactcgcaatgccgtgagctggcaaggcatttattgctgttacttggttttgtttgccatggtgtacctcctcaggatagtgtaggcgcttatgagtggaattaccattccagcagtcgtgcatattagctgacgtacccatactttatttgttcacaaaaaatggaacttgactaattataagctgcagaaattcttcagagggaagaaggctttggaatcggc

SEQ ID NO: 36589 - DNA, 689 bp, Sorghum bicolor
  Intron number 1 from transcript Sb0012s014610.1 (locus Sb0 012s014610) derived from phytozome v7.0 (chr-ID super_12; pos 4474858 to 4475546 reverse strand)
atcaggttggtgaactttggtggttcccttcctggggaagaactgcaaaatctttgtcgatggtttttaaccataatagattatttctgcagttccataattaaaggcctgggcaaatacctgataccctttacccgtaccttgacccgaattacccgaacccgaggtatttgatcctaaattcggtagcgattttgattacccaaaatagtttgggtaatttgggtaatatcccttgtacccaagctacccaaactatccaaagatttgtttttgtctttgtatttattatgtgtcgttagttgaacacttcaacttatcactttgttagaatataattctctctatttaaacaagtgagtacaatatattattctgtacaaattgatgttgaaattctatacaaattgctgctgaaactatgtataaatcgctactgaaatttagtgtaatttcctgttttctataaattcgggcatattgggtaatacccgaatctgaatttgcgggtagtgattttttagggctaatataggataacagttttcattatccgaattacccgactcgaaaaaaatcacgtaacctgaatgcccaggcctttagtatcattcttaaagcttatgagttagtctatgcttctattttttttagggttggaaggagcgtccggtatttggaaagatacg

SEQ ID NO: 36590 - DNA, 549 bp, Sorghum bicolor
  Intron number 1 from transcript Sb02g008740.1 (locus Sb02g 008740) derived from phytozome v7.0 (chr-ID chromosome_2; pos 11995680 to 11996228)
gacgtcccagacttctacaagataaggctgaaaaggtgataccttaaccttttggacgatatcccttctgccttcctcttcactgctactttaattttatcaacggcatcgaacccaataaaccagaaaatattaaggaagtctaatatttcaacagagcgactcgcagagcaaatttaatttaccccatgtttttttgtcaacattatatatattccatggaacctctgccagtttcaaaataaatcgttctaacttttctaaatatatagtttttactgtgtatatctatatgtatagcaaaagctatatatatatatatatatatatatatatatatatatatgaaaaagccaatcttacagtttagaataggagtagtagtgttatctgctattctccgatgtccttgtcccaataaggtatttttgaatagaatataaaaaggacattatcaaattaattacttgtagtgaacgcagctgagctaacgaatgatatctctaacgtttctatcaccttctataatcattgttctcacccttaggt

SEQ ID NO: 36591 - DNA, 767 bp, Sorghum bicolor
  Intron number 1 from transcript Sb02g040300.1 (locus Sb02g 040300) derived from phytozome v7.0 (chr-ID chromosome_2; pos 74280646 to 74281412 reverse strand)
tcaacgcccaagaccgctggcagaacacggtgggtgggagtgggatgggccaatcttctccgacgatcctcccctgtaccttgcatctgcgtttgatttgcatgctttgtctgttccgatggtcgtgggctcgatttgggtcggtgctgcacttggtctctgtttgttttcgtgctgcaacgattatgaggtttcagatcctactcgcttctgttaggatacgatttggtttgtcgaatttggaaagcaagcgatcagctacagccatcacgccatgctctgcagcttttcatcctactattgggtggtactcttgtcatcttctgcgttgggtggtactctcgaccttcctacatttcaggaatttgcaaattgtgctgcgaatttatggggcctcgtgctatgttggcttatcaaatgttgccggtgctacaatgatcggttcattccactcttaaagcatgtttttttgttgcctcacgatgagtcttactttcactcagtctcgattgttgcttatttttttggttttcattcagtctcgattgttgcttatttggttcgttttggtgttaagttttgaggtagaagcgtgacatgtttctgtccagtgcacttctaggtttctgcttgcggatgggttatatttgtgctgcagtgctgtaaatattgactggcttcgtccagactctaatattatgatgtcgcacttaggaccattgctaatcatgctaacatttctttggtttgtgtacagccactagctg

SEQ ID NO: 36592 - DNA, 1007 bp, Sorghum bicolor
  Intron number 2 from transcript Sb10g003600.1 (locus Sb10g 003600) derived from phytozome v7.0 (chr-ID chromosome_10; pos 3146571 to 3147577 reverse strand)
acttccttaaatgtaagccaaatgatcgtgctgtatacctgtactgtagtgtacctggctccataactgtcaaccatgaagttggttgtcttcaaccttgttactagtgctgtaaagacaggggacaataataatctaattccttctgcattttatatctgctcaacagcatgccccggggcggtgatgtggataaataaactgaattctcctgtaaatcaagcatctcacctaactatgtggtcattgttctgcattatgtgaacttggcacatgatctgactgagtagaaatttgaggattgaagtctactaagcttaagcattagcaatttgcattttagcactactgaggcatcattggcgctttgtggactagttcatgtcgctgactcattagaattagatagttttaccattcatcctgccagatacaaataatggaacattgcacagatcacagctacatggtcagaggaacttggaagctactgtgttatcatattcgccacctaagcctactaatgattaatgaattattctgtcttagtattgtgtggctctagcaccttcaattcaattgctgtgttacttattatttaaatccacatcttgtgtaacaacattgatttgatgtccataggcatgtccaaaatcatgtccagatttttcttggccatttaccagtagtgtagcgagtcaatacaaattctatgagaaaaattgccctggctacacatagcgaaaaaccaacttgggttatcagaaatgccaactaaaagaatatctatccatgtcaagcctaaccaacatgtaaacttttattttatttatagcatgtaaagcacaagtttaacgtatgcattagtagacagaaattagcctacaaattcataactcttattactttgtagctatatttattcaggcttgagtgctattgtaactgatctaatattttgatccatttcagggaacaatttttgatccggagactggttaccgttt

SEQ ID NO: 36593 - DNA, 580 bp, Sorghum bicolor
  Intron number 1 from transcript Sb09g003370.1 (locus Sb09g 003370) derived from phytozome v7.0 (chr-ID chromosome_9; pos 3827662 to 3828241)
caaacccacaagaaccaaatccgtatgtatgatttcgatctgtgctgctgcaatttgatttccataggaatgttgattttgcccttgtagacaatctgcagatggcggcatggtggattgaacttgtgggatttggttagcaatgttttctctgtctgatggtgtgggatttggttagcagtgttagcaatgttttctctgtctgatggtatgcatatggttcagccaaaatgtctgaacctgtagcttattttatacatgacataaaatgtgtaattatgtcaactgctaatgatgtcatatagttggacattgccatgtttgattcagaagagcatcacacttgttttggtttgttctgtgagagtgtttctgtgcaaaactggaattaccttgctaatatatgtttttgtgagattgtacttgtctgaaaacttgcattaattctctttgaaacctaattacctgaattgaacatttggaaaattgttgtcttatgctaatatatgcttctgtatgtactgatggatgtgggcatttgtatattttcaggggctatcctccaggagggtttttaaat

SEQ ID NO: 36594 - DNA, 431 bp, Sorghum bicolor
  Intron number 1 from transcript Sb03g002170.1 (locus Sb03g 002170) derived from phytozome v7.0 (chr-ID chromosome_3; pos 2009554 to 2009984)
aggtgaacatccaaggcttgactgtttgagtaccattgtgttgtgcaggcaatttgttttatgttgtttccagtctttatttatttggatgtatgaataccttctgtttgctaatactcttctctcttctcaatacttgtaaatctatattattatacagcagttttttatatgattatatttccatttctcatgctaaaagatgggtaatagataccgtttagtaatgtgttctcttcatcgtttgtgaagcttattttgtattttttgaaaaagggaaagaccaagagatgtcagtattgctcttgtccagtactgatgtagtatgtttttagaatttgtactgctgtagcattgagaagtgaaacaaattaaatgcttcttccatttctgtagcatcctattttcgataacacgacccggttagtgaa

SEQ ID NO: 36595 - DNA, 438 bp, Sorghum bicolor
  Intron number 2 from transcript Sb01g010825.1 (locus Sb01g 010825) derived from phytozome v7.0 (chr-ID chromosome_1; pos 9722056 to 9722493)
aatatcatcgctacaaggtgcgtcacaatcaaatgagaccccacatctgttttaaaattattgcttattctgtcagttgattgatggatcagaccatgatagttattttactggccatggggatgctttcatttatgtagtagtatagtttattaaaacatgaacaaatgtggaaaagcaaaagagtatctatcccaagtgaactcaaatctggaacaaagcaatcttaaggtagtgttagcctctgagcccagctaaaagttgatttggcataaactaggcttgttgcgtatcaaaccacattattgtatatgattttcggaaattttgagagagctagcaagaaacatctcacaccaaagaattaattcttcatttggaaattaggaaatgtttctttttctctgatatttggtttttttatccttgcacaggaag

SEQ ID NO: 36596 - DNA, 655 bp, Sorghum bicolor
  Intron number 3 from transcript Sb03g013840.1 (locus Sb03g 013840) derived from phytozome v7.0 (chr-ID chromosome_3; pos 18284943 to 18285597 reverse strand)
tcttgcaagtggtatgacgatttactttgcctttgactgtcttatacttgctgtgtgccttgggtgtgcaattcaatttgctccacctcatagtcatatgctgaactaatgaaaaatatgatccctctaggatgaaaaaacaaattaggccttgtttggatattgttggattcacctcaattcacatgtgttggagtggattggggtggaatttagttcaagttccactccaatccaccccaacacatgtggattgatgcgaatccgactacatccaaacaaggccttagaccatttgtgtcccctaaaccaaatcacattaactgagtgctgctgcaatcgttcggtattcagtttgtctgttaatagacattgtgcagtagcctaatctagcaggactaattctgtctgaaattgaaggagactattccaagaaaaactaatgatttttccctaatttcttcccttaagttttggtattgaaagtagacctgtgaagttttttaatagacatctttttagaatggaatgccaaatatttagtacccttgaactgatttttgatgaccttatgcttcttttcttaaactgattttcgatgaccttatgcttcttttgttatcatgtttatggtggacatgctttctacagggtg

SEQ ID NO: 36597 - DNA, 908 bp, Sorghum bicolor
  Intron number 2 from transcript Sb02g041910.1 (locus Sb02g 041910) derived from phytozome v7.0 (chr-ID chromosome_2; pos 75647834 to 75648741 reverse strand)
agccagacagtgaaacggacaagcctactgataaggtcatctatttacttaattgctctgcatagaatggcatataactgtaacattctacagttccacatattaagctacatcctccttttattatttgggttagtttgtgtagtgaaagtttgttacaactatgttcgagatctatatgctgctgcccgtttatgaaatcatttacatatatattatttatgaatctgagctggtgatatttcaaatagtgccttagttgaactccaacttacgtaaaatggactgtttcttcagttggtgtaatagacccaagaacacaaattatctcttagcatcagataggtaatctagaggaaatatattcatagtatatgggaactaggataaacttatgcaagcaaaattcatgtgaatggtcagaaccttggatggatttggctctttggtattcttgaacgaggtgataaaatatgctaaacatgatttctgtgggccatcttaactgcatcagctgcagtctgcagttgtttctaaccgagtcctggagtagttctatctggatctttttggtgccattctaatgtacttgacctttctcatgtgaccagttctgcagcattttagagtgcttatttatttgtactgtgatcatctgaggacagtttctgaacacccccctccccctttgattttcagcctacaaattgtccactaaggcccaatttttttaaatataaaaatggttttacagctatgttattgtgttcttctggatttctgagttttctattggcccattcaaggaaatttatcaagttaatgttattcattttttgtatttgagctattggatatttttgcttgattatctaccctctgaaacattcaactcacaggataagttt

SEQ ID NO: 36598 - DNA, 869 bp, Sorghum bicolor
  Intron number 1 from transcript Sb06g019420.1 (locus Sb06g 019420) derived from phytozome v7.0 (chr-ID chromosome_6; pos 49002291 to 49003159 reverse strand)
tgggaccctgccaagtccgccttcgttgcccatccgtgcgtgcctctttgtctcgcccgaatctccttcatgttccagtaataacccactagtagctgaggattctgaatatcttatcgaggttttgggggtgcgactcgcacattttttgtgccgtaggcaacattttggccttatttcctattgaaagttttgtgctgataggaggagaagccacaatagggggggcttttttttttctgagcaggtgtgagaaaacagcaattattagtttggcttaccgtgcttcgtgcaatgctctgcaacgataagctcaaactagatagcaacgaaaatggacttctgagaaacctatggggaatgttgaattgttgatcaagaatggatcatcaacacgttttaccttgcatgaatttccaattgccgtgtggtagtttcgtctaccatggtgcacactgatggcaccagaggcaaatgtgaattttcctttgttagggggtgacagcagtacaaattttgtcaaaattttgatcaaatttaaaaatttccagtggaaattgtactaacttatggggtccccgcccctgtcctgacacatgtccaacactaccaatatagtttgctctgtatctctgtctgtatcagtcttttcataccatgacattccctctttgagtatcttagttgtgagggtttgtactttgcagtatattgagtcattgccttattactgctttgtaattcgacaatcgacattagttgttgattgcttgatcacttgctaatcagatttgcagctgtttttttcaggatataacctttttcttcttgcaggcataacttctttatcttccctcgcaaggagctcc

SEQ ID NO: 36599 - DNA, 441 bp, Sorghum bicolor
  Intron number 3 from transcript Sb03g031270.2 (locus Sb03g 031270) derived from phytozome v7.0 (chr-ID chromosome_3; pos 59633473 to 59633913 reverse strand)
caggtgcacttattattatagtagtagcaatatccggaacccaactagaaacataggatggtactgtgtaatcaccagatgctgaataaaagaaaaggctattagcctcataactacaagtcctattgatacaacttttcttgttccaaaaacgaaaaagatggcaagagcaacgttacatagcatgctggaatttattggaaagtaattcttctttaccacatagttttgactttgtcaattgtttggtccttttgaggataacacgcttctagaaaagcttgtgtgaatttctatcgatgtagatgccagacgtctactgtcttttatgaataaatttctgcagctttttgtttattgaccatatcacaactttcacagtgctatcaccttttttacttgttgcttatgcattccattgcttaattgttcaggcctgca

SEQ ID NO: 36600 - DNA, 554 bp, Sorghum bicolor
  Intron number 2 from transcript Sb02g001960.1 (locus Sb02g 001960) derived from phytozome v7.0 (chr-ID chromosome_2; pos 1996764 to 1997317 reverse strand)
atgtgagcgcagattcatacattgttctgtcttttgtagtttattatatgtgttgtcttcagttttggatcatcaggttttatcatacctaccttactaaaatactaatgttgtctgtgtatcttgattcactaatagtaaacatctggcgttgctggacttatacttaggatgtttctgctgtgcatcattttaggtgtagccttgttctgctgtaattaataaactcataaattattagttgataaggttgttcaaggatgggtgaagcttgaatcttgttgcattcctcagtatgagtcaggactcaggatatgaggataatgttccatggtttgtttgagttgttggcatctactgatcaaatggctatatgattatgaaacttgtactcaaatatttctgtgggtcatattcaagttagtatttatataagggaaaaaatattgataaatattttttaaatggatcaaatgttatgttaagtttttattagttctgacaacaaaaactaaatcactatgcagaagaaggctaagacagcagtggctgcc

SEQ ID NO: 36601 - DNA, 799 bp, Sorghum bicolor
  Intron number 4 from transcript Sb04g003390.1 (locus Sb04g 003390) derived from phytozome v7.0 (chr-ID chromosome_4; pos 3261426 to 3262224)
ctctcccgtggattcaaggatcaggtttgcttctcactctgttagtctacaacttccactgccattgtcaaccatgcttgtgtttttatttgtccttgtcatgctgcaactttaggtactgtaattgtacaattggtctgtgtttttaagtttgtgatgtgacattatgtttaggtgttaccaatgaaggcctaaacctgatgtgtccttgtaaaaataaaaatttggattaaaaacaaatctgattcttgaattgctgttacagccaacctaggccttgtttagttccaaaaaatttgcaaaataggaatagtagcactttcgtttgtatttgacaaatattatccaatcatgaactaactaggcttaaaagattcgtctcgtcaatttcgactaaactgtgcaattagtttttattttcgtctatatttaatactccatgcatgcgtctatagattgatgtgacggggaatctgaaaagttttgcaaatttttttgggaactaaacaaggccctattttgaattgctgtgctgcagactgtaattttctatcaactaatccatatttatgcatggcattcgttggctagtaggataatgatatgcatatgtcaaatctagtattgggatgcctataataagtcaatttattttttgtgacccaacttgctgatatggtatctaatgttcctgaaccagttttgaactattcttttcttactgcaattattatggaagatatctgttgatagcttataagctgctaggcttgaactgacttgtgtcttctgcagatct

SEQ ID NO: 36602 - DNA, 541 bp, Sorghum bicolor
  Intron number 1 from transcript Sb06g027500.1 (locus Sb06g 027500) derived from phytozome v7.0 (chr-ID chromosome_6; pos 56399154 to 56399694)
cagctagggctggtaatactatcttccttttggcacaaatattattataaatcaagcatagttcttgagagcaagtaccttgggcataagagcattccctgtattttgatgtaccgattaatctttgtggatattcacattttaggtagaagcatgttcaattctgaactatagtgagatcagcatctagtctagaagcatgttcaattctgagctatatgagatcagcatctagtctgtagaattgcctttggtatactgttgtttttttggctttagtctacaggctcttgttaggccatgcctatcactcaaaagtcacatgttaactgtagaatttgcataacccaagtcagaaaaatatcgttgtccttcactgattagacaaccatgttccaacgccgaagctcttgctctagaactgtctgtttaacttatgcagataatatccagtgattatggttgattccgatgggctgcagtgtaacattttctgtgttcaacagctaagtcagcaaggcttaggcaagccaaggaggag

SEQ ID NO: 36603 - DNA, 858 bp, Sorghum bicolor
  Intron number 1 from transcript Sb10g005480.1 (locus Sb10g 005480) derived from phytozome v7.0 (chr-ID chromosome_10; pos 4930842 to 4931699)
aggccacccgtgccaagctccgcattttgggtgagcatttttgttttttttggtctgtggtttccagggcattgtggtttgtttgatgagtaaatttgttggtagcctctggattggatgagtcacgatgctataattttgttgatggcatggagcagagaagataacctagatagtgtacaacaaacacagatgcaatgcaactctaagtttatatacaagcaatgtactcgttgcacattgtattttgcagcagcattgtgatttgagtagattgctctgtctgtggttaactcaaggaactagtgtgtagtggggctttcatgtcttttttagtgatataataaaaaaaggggaacattgagtcgggatttagaggtcatattcatcgtggtctggaaatctgtttgcctaaagtgttatctctgaaacaaccattagttgaagctatcctaaacaggtaattggagtgtacttgctaatttttctgcttctagtttcttgtttatcatagatcaaactacataattttaatcttgtgaatacttttgacggtgccactacaatattttaatggctttataccattcacatcagttattttagtactccgtatggaccgtatctttttgtttgtctgcatctatgtttcttattgattttgcaattctatgcattccatatagagcagtttgggtttcatcttttgggccagctctaggtctttatgtgcattgttacctgctagatgttttacgtttctaatttgttgtaattctggtgttcacaaggtcatggccttcatagcctataattgattatatgaaatgaaatttacagctggggaagaaagaacac

SEQ ID NO: 36604 - DNA, 1030 bp, Sorghum bicolor
  Intron number 2 from transcript Sb10g002460.1 (locus Sb10g 002460) derived from phytozome v7.0 (chr-ID chromosome_10; pos 2135551 to 2136580 reverse strand)
cgcgaggggtgccgtgccgagcggcgcatccactggtacgtctgtctgcctctgttctgttcctgagcgactgcttggtttgcttgatctgggcgtctcgaggggattcggtgcgtttgttggttgttgggtgataataacagtccttcgtcgtattgaactggctaggacggttgttttgttgctagatctgattgatgcgtatattcttgttctaagtttagagtctgttctccgccgccatgaccagcgcttgtttggaaccttcctattttttttactgcgcgaatcgaaatactccctgggtagggtttataaaaatcatcttatagtttagtttcaaagcagaatcgttaccgtcatgacatggtcagctgatctgaaaattgcttaccatctggatctgttaatgaagcaggagacaaacttacttttgaacttctgttattatactgtctcactattaattagaatgttttttcagatataatgtgatttatttgtttatctatttattttcagctacacttgtctaaacctttgcttcaatcatcgattataagcatgattttgttttcaattaacacagaaataatatagtaaagcactaaagccagtagacctcccctgaagtattcttatctaatgaatcaagaaacatatttatatgtgataccgttccatttaaccattttgctatgttagcaacatagaaaaagacatactattgatattagatatggtattatgagacgtcaacatctgccgttccgtttggaatggactttatatgaaatttcagtttgtggtccagacacttttagatattagatgtggtactatgggatgtcagtatctgctattttggttggtcggaatggactttttgcgaaatttcagtttgtggtcgagatacatttagtttttgaattggttgccttctgtagttgcctcaaattccatatgttagtcatttaatgcacataatttgacatttttatctttgaacaattgactctctcaggaatat

SEQ ID NO: 36605 - DNA, 478 bp, Sorghum bicolor
  Intron number 1 from transcript Sb06g030940.1 (locus Sb06g 030940) derived from phytozome v7.0 (chr-ID chromosome_6; pos 59355876 to 59356353 reverse strand)
tgctccgcctccatttccacgactgctttgtcaatgcaagtgccattcataagccgcctccagattttctttttcttttcttttctcgagattatctagtattcagtaatgaagttacattaaacttccatatatgagtctgaactgaattaacgaactccagttagatcttctcaacttctactgttttagggaattttgcttaggcgtagcataacagagcatgctggttcagacgtccagtactcagtagacagttttacgtcggtactgttaactttacgacaagtcagttaaaaagtggcgcgcactctgccgcgtgcttcgatttttcaaatcaaattgtctctgtcgtttctagaagacggtttgcctctgagtacaatgatggagtgtcttttcgtggactaaccgttgactgcaattgcaaactgactttacagggctgtgacgggtcagtgctgctcgacgacaccac

SEQ ID NO: 36606 - DNA, 829 bp, Sorghum bicolor
  Intron number 1 from transcript Sb05g006920.1 (locus Sb05g 006920) derived from phytozome v7.0 (chr-ID chromosome_5; pos 11738952 to 11739780 reverse strand)
cttctccccgtggctgctcccgtatccgtaccaaggtaccgttttcacccccaccccccccccccccccccccccgccttcttcttcttcttcttgtacagcctaggcagtcggtgagacggtcggtcttttgcctggccgcgtggcggagtcgcgagtcgctgttgcccgtccaatgggttttgggttcggggattttcgaatgtcactcgtttgggcctgggattgcgtctcggctggccctcctccatctgattgtctgggatggtgtggtgagtgtctggattcaggtacaatatactgcgtacggcactatgcgcattggcgggtcttgttagttcaattcagtagaggaacctgtggctggagctggacactgaacttttcagccgtactgaactactgatagtaagtggaccaacttatgtcgagacgaacaagctttgcaagggcatgtcatgaaaagttgcatgtgtttgttggatcatgtagataggtggcaatttctaattatcatatatcagcgtgcttgcagttgcagggtcttagtttgagtccgtatgatgaacttcaatttacctatgtgcatcatagttacagttgacagttaaggatgactgacaaagatatgattgggaatgtttgtagttacaacctttgatatgttcttaataactctgaagtgcatttttgctatacctgaaactgcagttgccttgttaattgttaccttcgtcttggtaagttagagctctgtgtgttgaagatcttactgtgtaaaaatgtgtttctagggtttccaatactaaataccttcgcgtctgcatcg

SEQ ID NO: 36607 - DNA, 963 bp, Sorghum bicolor
  Intron number 2 from transcript Sb09g006700.1 (locus Sb09g 006700) derived from phytozome v7.0 (chr-ID chromosome_9; pos 10908984 to 10909946)
gcgtcaagttcgtcggcggggaccaccgcctccaggtgagtgcttctgctactgctgcccgtttactctacttccctgcacaagctctgtttcagcgccctgcttgcttgtcagtgttttttatttcagcactttgtgagattgtatgcttgccttgttaccatttctcctctttttaccatttgactacaatcgtgatcactggatgttatgaatgaaatgcattgctatgcttgtgagattgggaaattctgttcttgtgatttgttatgagcctttctgacagatggcatcttgggtcctgtttcaaagctgggattggcatccaaattcttatgatttattaggccatttgaacttcattactgtaccatctgttgcaataaaagcaattagcttctgctgaggcactcatcatcagttaaaacttaatccattggcctagttacctcgcttctcgtgattgtttgccaccctgaaaggatatgctcgtaacccgtactgttttgacttcttatccacatatgtgtagtacgaaaggaccactgtaccatctgttgcaataaaatcaattagctctgctgaggcactcatcagttattaaaacttaccttgcttctagtgattgtttgccaccctgaaaagatatgcttgtaacctgttctgttttgatttcttatccacatagtactatttagtacgaaaggacatgtcttagagactgttactactcattcgttattcttcgtctagtcttcagattgatatataaggtgtaaaactttgatgtttcgtgtgctgtcaagtgattgtgaagcaaagtttttgtttgtgtcaatgcctactggctacagtggccatctttactcctacttgaagcatatctttgatccacactgatgatgagttgtgtttgccactttttcagaactactcatccatcataacagtccacccggagag

SEQ ID NO: 36608 - DNA, 893 bp, Sorghum bicolor
  Intron number 1 from transcript Sb05g006580.1 (locus Sb05g 006580) derived from phytozome v7.0 (chr-ID chromosome_5; pos 10791686 to 10792578)
caggtaaacagttacggggagggtgcgtcttggggggatccgccgcctcggttttgctgtccttcgagggttcgtggtgttggagagggaggcgcgagtagctgcggtagcctggtaggcctcgtaatcttggattggtggtagaactttggtcggattttggggttccttattctgatataaaaattgtagggtggaggagggcgacgatcttactcttgtggttgaaatttgtccggattctttagatgttccgctgaatgctggtcagggtagtggcccgttagtttgatacccatgtattggaggttctgggttgtgcgagtcttgtcggtgatttatttggttctgatgatgcaattacaagtctctgaataagcttatttggcagtgcgcgaatttgttgggtgttggcgtgttgctgcaggatgtagcgaagagcagcatcacagtagtggacaatggatgctaaatttttgagatatgtgaatatagtttttggtgcatgtttttttgtaccatctcttagaaatctgttagggtcaccttgttgttttgtactagtaactagtagtaaccatccactcctgtaattgttcactattatgtttattttcttcacctaatttctggatacgagaggaaattactttatactaattgttcaaggtaccttgacagttgacattcattcttgtgatgatggaaaagggggttggactaatattagtaattattgtactgaggatatttattggtataaaaactgcagacatcgttgatatctttgtaggagtaggaggggaaggggcatgctcccaaatcaaaacacttgagtgctaattattgttgaatttctgttttattccagcaagcatacttcaagtgcgcgc

SEQ ID NO: 36609 - DNA, 523 bp, Sorghum bicolor
  Intron number 1 from transcript Sb09g000620.1 (locus Sb09g 000620) derived from phytozome v7.0 (chr-ID chromosome_9; pos 403199 to 403721)
ccctccatctactctctgtcagctaccctccccaggtcagtgcgacttcttgatagttaatcttcactcttcttcttatgttttagtatttacatttatttatttatcgggataaattttgtgttcatttcggggactcgttgctgggcggcgcttactagctagtcaacgtgctgcagctctcgaaattgtttatctatctgtcattttttccaagcaattattgctgctccaaattgaagatatttgattccaaggcatatcgatctgcttgggtccaaattagtaacttgtgtctaattaactgtctatagatcaacttgtttctgctgctcgtcgatctggatctagggctgcctactaatgcgccatgttccagatccagggctgggagattggcctttgagcagtgataatagtataaggcataagaccagagatgactgttattttcgcccactgcaaagcagtattttcaacctagctaatttcctgcaggtaattagattaatcccttattcgg

SEQ ID NO: 36610 - DNA, 672 bp, Sorghum bicolor
  Intron number 2 from transcript Sb06g002050.2 (locus Sb06g 002050) derived from phytozome v7.0 (chr-ID chromosome_6; pos 3832595 to 3833266 reverse strand)
ttacactgattttggtatctgagattggagataaggtataaaattcatttcaattggcctcccccctctcatcttgaacttctagatatactgcaagatgcctcttcaccttctttaagaaatactgcaccttttctaatatttctttgtagtgttattgaaacattcacaacctacttggagttagtaaatttactgagcagactaaagttttgagttcaaccattggtatagactatagagtttcaccaaaattttaatgttctcatccttccttgtagtgtttcattctcattctccatctccatctttgagattttgtttcacaaatggtacaaccttggtttgtaacgtacatgaagctttgctgttagcagcatgcagtttcatttatcgttgtgatcataacttactatatttaaagaattgaggattttgcattacctctgtagtgaattgctattgtttagtctcaactatacatgtattggagttctttgatttttttgtcatgtagctatatgctgttcaatttgtaactttttttcagcagatatctcttccttctttcatattatgttctatgtttaaagcacatctaatagatgaaggaatttgactgccttgacgcttctgccatcgcagacgtttttcattgctgcactactagcg

SEQ ID NO: 36611 - DNA, 920 bp, Sorghum bicolor
  Intron number 1 from transcript Sb02g035890.1 (locus Sb02g 035890) derived from phytozome v7.0 (chr-ID chromosome_2; pos 70273881 to 70274800)
cgcggcggagccctgcaacaacctcttcgtctcaggcaaccaacctcgctccaattttttcccccgttttgcatgttttgcaagagaaaccctcgctttgattcttatgctgcgcgcttaattagttgcttgttgtgctggcaggcggtggatgcctgcggtaggattaggaatgggcgaagttgtttacttttgtctgagacctgcgagccagtagtcatttccaattttgatagggctggctgattaactgaacagtctaaactgatactaatcgtagtcgaacagtatttatctcgcgactaaatcgatttgctctattctgaaactacccactctgaacaagagaagtactgcacgggcgcatacagactgattgtcgactagttaaccttttataattataagcccaagtattggtaaacttggaagcagacaacatcacagatgccagtgattagtgctggtttgagtagtccaccttcctatatggaagaaaggtggagctaaagattattgcaagattcggtgcattagtagcttcctacaatttttcttttttgtcgatagttcatccggtcatctgtgtcaactagtcagtctcttcatttaaggaaaaaaaaacagcgatatctgaatccgtgaaataatcctgctgaaggtcgattattatttctcggcaaagttattactatgcaaatataaataacaccaccaaaacaataaataatcatatacaaatatagtaccacagaggttttcaaaatttaaggtgtattgtcttatcattgattaatattgcttcattatttgttatcatcacagcatgcactcatcatgtgcgaaactaggaatgtgggtatatattgtggtagtagtaacagcctcgtatgcagggttaaataaacgcacaacatcca

SEQ ID NO: 36612 - DNA, 632 bp, Sorghum bicolor
  Intron number 1 from transcript Sb02g033090.1 (locus Sb02g 033090) derived from phytozome v7.0 (chr-ID chromosome_2; pos 67735594 to 67736225 reverse strand)
cgctgatctcttcgccggcgaagagcgtccaccaggtattcccatccccttctcttccctgtctgtctgctgtgcgagacttaccaaactctaacctcaagctatttggctatttgattgatgcctactaacttttaacttttgcaaaaaattatcggggttacatgtggtgctgcattaattatattgctttgttgatttgcgtcatgtcgaacttgctggggatccatatgtaatttattgggttatacctgaagagtgtggactcgagcacaaatgtataatctgtacacaactatctgtcatacttctgatgacgatgtcataggtgggaatggactaattatttgtatcgtttagttgccttttagtttatttgtcctgtgataccttgcccctatgtccttccagtttagctgtattcaactgtgtggttcaagttccatatgaattttgttatgtttgtcgtgtgtagcatttggttttagtttcaggcagttcaaactaagatgggggctttgtggaattttagcttcacctctggctttcttactattttttgtatcaccgtcatattggtttctgttaattaatattatctcattttctttggtaatagcctaataggaaaa

SEQ ID NO: 36613 - DNA, 745 bp, Sorghum bicolor
  Intron number 2 from transcript Sb04g023500.1 (locus Sb04g 023500) derived from phytozome v7.0 (chr-ID chromosome_4; pos 53189745 to 53190489 reverse strand)
acctcggccgagccagaaccagaaccagaaccagagtgagtctccaattcctgatcttttctttaagacttcctgatctgttgcgacctgacaaagataccgtcaaatgttctagtgatactgcacattataactgcctttttcgcttgagccgaatctgcctgtcattcggtagtttttctctcacaacaaatcagtactttttgccataatcagccaaaggacagttctaagaaagatttccattttcgtaatgtaaaatgtgcaatctgcaaaggaacaggcagcagcctttaatcgagcaacaaggcttagcacgatctccttgccggctgttcttaggtagcaatggaatagattgtttctataggacacacgttcccaaaaaaaaaagattgtttctagcaatggaatggaagcatttttctttgagagtaacctgttttttgagttgctcatcaaatcatcaggttaccagcatgccttttcctaggatgccaagagccacgtttttttcaagaacagtgctcatcaaatcatcaggttaccagcatgcctttcctaggatgccaagagccacgtattttttttttcaagtggtgaagagaaccttgtggtctctgtgaaagaagcgacaccacacgtaaacacatcgctgcgctttgcaactgtggtaacaatttgggatgacatttccatttcctttgcagagaagaagagcagtaggagtgattcaactccagtg

SEQ ID NO: 36614 - DNA, 966 bp, Sorghum bicolor
  Intron number 2 from transcript Sb01g028400.2 (locus Sb01g 028400) derived from phytozome v7.0 (chr-ID chromosome_1; pos 49583130 to 49584095)
tcacccctcacatcctcagcgtcaaggccggcgaggtaagattcacagatcttggtcaattttcaaacgttttgctgcatgcctgcggtcgtaaatggcgtagatctgcgagtccgcgcatctcctctgtgagtgcgcatgtagtccatgtcatgtgagcaagtcaccggtgacctttgtgctctgttctgccatgccgttgggaagcccggcaggttgtgagctcgcgtggcgtgggtgttcgtcagattcccggcacggctaccagttgaccgggccccactgtcagtggtggcaagctggtactggtgggtgatgcactcggtgtcattccggattctgattgatagtctggtgctgctgccagtaccagactgcggtgtacgatgaggggctccaggcagctggcaccttttggttgtgcagtcctcgctcttgactcttggcatggagtgatggtgcatggactgtgcagggtagctgggacaaaggattgcttatgctgatcaaatttactccatggtagcaaacattgtatattaattgcctcctaatatcgttgttttggtgaatcatgatggctgatcgaatttggtagcatggatgtaacatactttactggtgtttgttaaccctatttattacttaaattgatggatctcgagtggtaacctaaatttacttttaacagttgtttgaattggattgactgtgtggcttgtgcatctcgatcgaccaatctgtaactgaattggatgttttcatctctctgcttcaacatttgctttcaccgagctgcatagaattcttctacggaagctgttagctaggatggtgcaaggccaagccatgcgtttggtcgtgcctttttctttttctttatggctatgaagttatttcttcatttattgccagtgggtcaaaaacttgcatttctgttctaatgtctgcttcttgcctgacagg

SEQ ID NO: 36615 - DNA, 510 bp, Sorghum bicolor
  Intron number 1 from transcript Sb01g013080.1 (locus Sb01g 013080) derived from phytozome v7.0 (chr-ID chromosome_1; pos 12110256 to 12110765)
tcctcatcaccggctccaccaaaggtgagcgagcagcttggtgctggcgaactttcgtttaggcccccattatttattgagtttgacatgaaagtcggggaaggttccacatctctgttgcgtgcttgtgttgagacttgagacgcaatgtgtgtaattcgaagcgaaatggataactaattaactactcatactgagatatgaatgcttctagtatcgatcgacctttcactcagtcaatggaagcttgagcttggaacttatcggttgagcgcaggctctctttggcggaacataaaccttaagacacttgtcctagaaaccaaagaaaagagaaaattacaggcatattaaatttacttcctcttctagactggcttcaaacaaagaaaacggcacacatatgagcaaacgatttgctgatttgtatcttcgacatggatcctactcaacagttttctgtattcttctgcaggtataggatacgcgttggcaaggaaatttctggag

SEQ ID NO: 36616 - DNA, 951 bp, Sorghum bicolor
  Intron number 1 from transcript Sb10g027040.1 (locus Sb10g 027040) derived from phytozome v7.0 (chr-ID chromosome_10; pos 56634773 to 56635723)
ccctgcgtccgcttgccgcttctagcgtcggggaggtactacgtcctctccttccgttctgtttaacaataatttaataaatgatgatgttactactgaaccgattaggagaagccgattggatttgtagcatttcggtagcccctgatgagagttcctgctttcacgctgtgtggattagattgcagttgcactggtgactggtgtacactttctaatcgaattagcaggatgaatggaattagtatcattcctgagaataactgattgatcctgattgattgtgaaccgattgtttagtagcacttttctgttgataacgcacgcttcaaattgtttcggtttttgtctcaactgatgcttaatcaaacactaactgtaaatttcggaaacttacgttcaaagatggcgagcctgagagtgaagaactgaatatacttaatagataccaaaagagttacaaaaatagcaatatctacgtgaagctagtaaccgaaacaaagtggctttgggcatcatggtcttttcacacttaagacagataatcagccatgtgtaaaggactggccaaacagcgaaattctccatatacctccttaaggctgatgcttctgtgtgcagctaacttatcagaagagctcctcacaaataagccgtcccaaacagggccttgtcaccttgcttgacctgttcgtagggacggggtttggttgactcgttcatttgttcagttgattcccaaacaagacttaagatgaaattgtgagtggtaaccacagtatgactcgtttttgttgggatccttagggattacaaagataaatcacgattatcagcttgggattgtgagtgaatgaattatttttcatgtgtgtatatatttggttttcgtcctgcattttaccaggttgttaatgccatctttctacaggaaaattacagaggaaggac

SEQ ID NO: 36617 - DNA, 955 bp, Sorghum bicolor
  Intron number 1 from transcript Sb07g026310.1 (locus Sb07g 026310) derived from phytozome v7.0 (chr-ID chromosome_7; pos 61505129 to 61506083 reverse strand)
gcgcacgagcagtggccggagacgaggttagcgatgatctgatcgatgctgctagcatatagcaagcagcatagttgtactttcgatttttcactggtgaacacacggacgcggtttttttaccttaggcacatatgccctcactctcccacccattggattcactttgaaaagtgtgcaaacacacatctcaaagcagtttcacattgagatgtgtgtttgtacacttctcaaagcgaatccaatggatagaagagtgagggcatatgccttcaaagacaaagaaaactttaccgtaaacagatttcctttcgaacaaacagatttgattttatttttttgaaaggagcgcttgatttatatatggacctcagatgcattatagtgaattataacggaacttgactgctaatttttactgcattttgtgtgagctgaatctgcagtatggtgcctacgtgggcgaaagttctggacagtaaatgcagttttttttccaccgatctttcttttacatctttaatcgatactagctatgttgtaaaatattaccagttcgtagaaagaaatcatgcattttggttatttacatttctctaaacaagaagtagtgaagattttgattaaaaactgtagtacagatatgttttatggccactaaacagtgaagtcgtggagctttgtcatagaaatcctaactaaaagcctcgatcatgaaaacccttaaagctgaagctggctactcaacaggcaaagaatataatacgaatatatcatccgagtgagacgagtcatgcatgctgcgcatattctctagttcctgtgtcactcaaaatcatttagagatttctgcatttcaaaatctgggttccaattcatgagctgatttgcggcatggcattagcatctaatctaacaaaatggatggacaaaataaatgcgcaggcgaaaccgt

SEQ ID NO: 36618 - DNA, 876 bp, Sorghum bicolor
  Intron number 2 from transcript Sb10g022130.1 (locus Sb10g 022130) derived from phytozome v7.0 (chr-ID chromosome_10; pos 49461724 to 49462599 reverse strand)
ctacacccatcctgagagactgccaggtgatccaattaattttagctaaatttatcatcagcacagttccattccatgggttgttatattgatctcatcagtgtgtatgtatatatgtggtgaagccaatttcttcaagaggggattcttattttgttcccctatatatctcattattctttgatcaaagaatttccctctgcctttctttggatacaatggttttgtttttttagttttgcgcttgctgtttttcccccatttcaacttaaagtagtttccgttttccagatttttcgttacgtttcaagtattttactctttgctatttctgcatttgttgtatataattaaatgttgcttaatcgatacgcgatacgcgtataattctcattcgtcgtatatacgcgtataattcctatttattgcgcacattattattaatggtgtagatttgcatagtgacgcacactgtctatatgaagaaaaagatatattgcgcatacaaatcttctagctagtactgaatcttcatgtacgacattaatgttttgttgtagcgcatatcgcactctctcctcgtccatctctagaatgaaacgtgacatgggatctgcccctatcttccaaagttaggttttgtcatcctctcaaggttgttatatcctccaacagccaatggctagttgcatcatcacccctcccccttgtcccaaagtgaaacaaccaaccagacatctgttggccagctctctctgacactgaaggtctatgcatttgcacctacatattcatgcatgcacacgctgacatccatctatatccatggtcatgcatgcaggtttgacaaaggacggccggagcaggcactttttc

SEQ ID NO: 36619 - DNA, 770 bp, Sorghum bicolor
  Intron number 2 from transcript Sb09g003510.1 (locus Sb09g 003510) derived from phytozome v7.0 (chr-ID chromosome_9; pos 4042761 to 4043530 reverse strand)
aacacggtcatcggctcgctcgtcgcccagcgcaggcaagagaatgttgttcatcggtttgctgcgtcccgcgttgcgcgctagctgttcgacgcattgccaagcggggggacgttttcgtcgatatgccttagtttggtttcggttgcttcgctcatgctgtgctgtgcgtgctagcatgtgtttgctcattcgattgttcgcctgcactttggtagtattatgcagctctaggccagtttacccttttgtgcatgggaattcccaatgctgactcgggtagtctttttgttcggtgtgtcagtgatcctggccacctgagctagactgccatgaatacccctacccccctgaaaaagaagggattgcctcggttactcccaaatggcttaaagcattgtatgcattgtatgcattgtcaaattgtgagaacataggggcctacctgttagcttctcatatttctttcttggttacgcacagatgtccatgcctgtttcaacagcctcctttattctctatatatgctgaggggaaaatatgtggttatgcggttgttttcttaaagttatgttttatattacttttagcaaattacttcatgtcctattgtactgtcatttttcttcatgcctgtgcttatcttgacttgaatttctgtttgagtagagcgacagctccagtttcagaaacctctattttctaaccatgtatactttgcaagtctgacagttacattctcattgtttttaggccctaccttctgcgtg

SEQ ID NO: 36620 - DNA, 578 bp, Sorghum bicolor
  Intron number 1 from transcript Sb02g025190.2 (locus Sb02g 025190) derived from phytozome v7.0 (chr-ID chromosome_2; pos 59912658 to 59913235 reverse strand)
cccggcatcaccttcgccatcgccgccgtcatcgggtacgtgactgtgtacagtgttctctttcttcttccttttctttcccctttctctctgttttgttttgttttcgaggaaagttgggcctaccatttcgcgttttttagactactgggccagaacagactctggccttatttagatgtcaaaactttttgaatttcgctaccgtaacatttttgtttgtttgtgcaaatattgtctaatcatagactaactagagttaaaagattcgtctcgcgatttacagacaaactgtgtaattagtttttgttttcgtccatatttaatgtttcatgtatatgccgcaagattcgatgtgacgaagaatcttgaaaactttttagttttggggtgaactaaaccaggcctcttacagatgggtttatttgctttgtgggcacagttagccggccctgcgacgagaaaggaacattccaaggcctcgccgtcgccgtgtgtagcagcccaaattcttactcccgccttcttccgtccggctcgcaggctagagaaagtggatatcagaagcttgaggagcg

SEQ ID NO: 36621 - DNA, 951 bp, Sorghum bicolor
  Intron number 2 from transcript Sb01g046090.1 (locus Sb01g 046090) derived from phytozome v7.0 (chr-ID chromosome_1; pos 69145590 to 69146540 reverse strand)
cgctacaagtggtgagctgcccacctcgaacctcttttatctcgtctgttgaagtgttcgttttgttttgcttgtgtgatactgaatattactgtaatacagtctgctcataggatgctacaggctaagatacatcactagtttgaatactcagttgggctcttgctagacaaatatgatatctgccaaattatgagttggaaatttttgcatagtttttgattggcatagtaaattttctgatccagcataatctacacgaacaggatagtcatttggagtagtgcatactgactggtagatatatgaataggtggattcttaaggctcactttctaggtgcagtttggttggttcctttttcgacgtgaatccatcacagtgcgattaggtcatgttagtttttgttttcctggagtggaatggtaacgcatgccatgggagtagatccgggccttcagcaaactgatcatgcccgattattggtggtagctggcgctcctgtccagcaactgttttccgttaccagcgctgaccaaacagagagcgtagtagctgattccatttacgttgccgctaggaagccacttcacgctgacgttgctagtgctggaaccaaacaaaacaacacactagttcctatgctttccttatttatagggatgcttgatgccttgaatattgtctagaaatggatgtacctgctgaacatgttacgaaacaactggtataggatgtgaatgtcacttttgcagtgctgagtcttcatactacaagcaacttaaaataatctttcatttgtgatgctaattctttcttttctcccctgccccccctaatctactataacacagttttgaactttttattcaagaatacccatgaaatcctgaatattgattttcctttcttgaaggtaccgcatacaaagtgatcgcagagctgctatct

SEQ ID NO: 36622 - DNA, 800 bp, Sorghum bicolor
  Intron number 1 from transcript Sb04g001040.1 (locus Sb04g 001040) derived from phytozome v7.0 (chr-ID chromosome_4; pos 881272 to 882071 reverse strand)
gaggaggtatgcatctatgcgactatgcccaaatgatggtagctaaaaaataacttattcattgttctgggaaacacagcttacccttttacgtttgattttatttatttacatttgttagacaatgtagattgaaattagttgtacgattctagttcagtttgtcttcgcaagtggtttgttgttaccccactgtgagtagtttctttcttttttccctgaatagggtagtttctttctatacaggtggacatttggattctaatataatgcatatggctagtgagttactttatgtgctgtgcattccagtgaaaagtcacgagtgaatgcccaacccccttactgctaaatgctaaggccttgttcagttcgtgaaaatttttggctttggctactatagcactttcgtttgtatttgacaattattgtccaatcacagactaactaggctcaaaagaatcgtcttgcaaattacaggcaaactatgcaattagtttttattttcgtctatatttaatgctccatacatatgtcaaagattcgatgtaacagggaatcttgaaatttttttggaactaaaccaggcctaactgagacaatctatccactctattatccatatctgttcaaagtgggttagaacaaatgctgataatagttgtctgctttttttttgctcaactattaaatgttaataagttcatgcttcattctgtaatagaaaagaaggcttaccactggctttatgaactctaaactatcttggtaatatgttcaatgttcattcatatttcagg

SEQ ID NO: 36623 - DNA, 891 bp, Sorghum bicolor
  Intron number 1 from transcript Sb02g034873.1 (locus Sb02g 034873) derived from phytozome v7.0 (chr-ID chromosome_2; pos 69328842 to 69329732)
ttacgaggcattgttagttgtcaggtttatccgtttgtggagtcaattaaccccaatagtgtttcttctgtcccaaagactagagttgcataaagcactgaaacttttgaatcccaaatattatgtaagatactatcaaatttcttagaaggactatagaaaaaaattgtcaaaagtcaacatatggcatagcttgcaaatagcttatcacttacacattgttgattttttctaagtgggtcgaatagcagataccagtggatgtcaagaagtttattgcaatatcttcaaccaatatttgtgagactaatttttttgttgtggatatacaataattttaaataaggcattaccatatttgacatttttttcctgttggcgcgttatgtgatggtattgtgtgtattaatatacgcggcacaaaagattgttctcaattattgactagtgcattatagtaatgctaaaccctatttatattttcttaaatgtgattgagaaactaaatgcataatcttgtgtgatatggctagatatcatttcatgcaagccgcacatagtttttctattaatcaggttgtcctatataatccctttaaggcttaactctctttgacttaaaaaaccctgaaagcttcctctcatttaccaagagtgggaagattagatccttgctcacgaaagaccactagatggttgtgttgttgtgattgtgatcccgaattatctttgaggtcaagcgaccagaatcacaggtaagggaagtgacagtttttttggtttgcatggcttatttctttcccatgtagatctcaactttcaacttcagttggattggatatgcacttatgttattaactttacagtaggggacacaaattcctaggattt

SEQ ID NO: 36624 - DNA, 798 bp, Sorghum bicolor
  Intron number 1 from transcript Sb02g027740.1 (locus Sb02g 027740) derived from phytozome v7.0 (chr-ID chromosome_2; pos 63014495 to 63015292)
cgccaatctcgtccccacatccctcgacacctacggttcgtctacttcaatcgcttcttcctcctcttgtgacagctataaccgtccttcccgcgacgcgctaatatatgggtgaatggtgatgcattgttttggttttggcccttttcgccttggattcgggtataaattgtatcgtagcaattgattgatggatgcatacaagaaaaccgtatgctagctcgccgattccagaaaaatgcggatacttgtgctagttaaagaaggatatgacgcacatgctccatttaagactatgatttttacccttaaaattactgactctatagtttgtttggttcagagcaccttgcaacacacagcatatccacgtcactatgtattttagcaactccttttgtgtcgagggtgatacaagataaagaatcaaacaattgctttaggataccaaatcgacggagtgatagcattaacattcagcaaaagggaagaaaagggaccatatcctgccatctaattaaagcattaattatttcatgctgtgataaggacttcttctttaggaaacttgccatcttgcaatagttttatactagtagtcttgtatttttttcattcttattcttatcttggttttgagcatcacacgcgttaagatcacgtgtttacctccgaatctcgaagggccactatgttttgttctgtgtaaacttttatcattattacttgcctattttctctacaaaatatcctctttttctagaggctctgaggaacaagtacagcaaagcagaatca

SEQ ID NO: 36625 - DNA, 320 bp, Sorghum bicolor
  Intron number 2 from transcript Sb01g028830.1 (locus Sb01g 028830) derived from phytozome v7.0 (chr-ID chromosome_1; pos 50278156 to 50278475)
cagccgtttcgagaagaagggcttctacctcaagggtaatctagcgtccatgttttgattcaaacttacattgaattctgaaactagctacagtttcttcttgtaaagattgaagctgtggctttagacggaaattgaaccgtttgggctcaaatgagttgtcattttaccaaaatctgttgataaaattcagttttttttggtgcacagctgctaagttttctttaatctgattacggattgtaaacaattttttgcttggtaacctgccatctgaaaatgcagccttgaagcttgtgaacgtggagaggtcgttcgcc

SEQ ID NO: 36626 - DNA, 1019 bp, Sorghum bicolor
  Intron number 1 from transcript Sb01g045840.1 (locus Sb01g 045840) derived from phytozome v7.0 (chr-ID chromosome_1; pos 68917449 to 68918467 reverse strand)
tgccggagacgcccgccgcgggcgacgctgccaaggttggtctcggtttctcttctccctcctcccaacatctctctgctttcccaagcaagccacatgtttgaattgggtaggagtgagtgcttgcttgtacttgtacacacccagtgatcagggggcaatcagaattttttttccccacctactgtactagcaggggcggtcgggcggagctacaaagttttaagagcctcggcgatcaaaaatatttattatctaggaaaatagagtattcctagttcatacagaagaaaaactttcctttgcacttcatcggcgagccggccgccagacgattccaccgtggcaactcatgcactagacgatttgatgatttttctgtagcagttgctcccttaagatttatatatgtttaggatagtgattttctgttcttcctggttttactttttggcttccattagcaagcgaattttgcggtattttttttcgtctctctctctctctctctctctctctctctctctaacagcagtgttcttgctgttttcgcccagcataggctatggttttacgtcagccgaagaaacacttggtagtttattcagaggtggcgcaggatttgcccttgctttcaaggattttgccaccaaatatcttttattacactactactgggttccagaagctgctatatcaaccactaccgattgcaacatcattaatttgtttcttgagctctaattcagaacatcacgcgacgaatgatacgggatcaattacatcaccatgctttagtgttaaaatcacaccatcaacagctgttgtggtagctatcaaggagttagaaagaaaataattaacattaaaattcactgatccaaccgttcctgtgaattctattttttctacccgcaaacttgaacgctcttgcaagaacttcagtaggtcaagaactcaacaagcttatctgcatgattgcaggacatccaacaaagcggcagcagcggcacgactga

SEQ ID NO: 36627 - DNA, 804 bp, Sorghum bicolor
  Intron number 1 from transcript Sb05g008340.1 (locus Sb05g 008340) derived from phytozome v7.0 (chr-ID chromosome_5; pos 15234094 to 15234897)
tgatctcttcaaaaaggaggtgtgttttcatacaagatacttgcctattctcttggtttatacatcttgatgctcaaattcaatagttagtctatgatttctcacccccagcccccccccccccccccccccttgcctccctccaccgggagaatgttttgcaaaacatgaaaaatgatgtgaacattttcttttgcaccaatgtagttttatccaagttttttttccctgttgttatggttatccggacttcttataaaagacgcagaatgatcttatccaagtcttcagaaaatgtactttagtatgcttaacaaaactccatatccatatggtatgataaaagttcagaacaattctaggaccatgaataaaaaaattctctattaaagaattatatattcagtagtattgattttataaacaaatagacaaattacaatcatactatcaatatagatatgtcacaatatttcaacaaaactatatttttttctaaataaaaactgacagattataacagacaacaagctgcgatccacaatttgaaggatgaaacaaacagggccttgcacatgtaatttttccaatttttcaatgagtttatgcatgctaacagcacaaactaaaaccaaatctaaagtgtgattagttgatacaataattattacttttcttttctcaaacaatgttggagagctgcatgtcatttcattaagaaggaaaatataataattattactaatataacttcttttcaataatataggtagggaaatttccagattcatctgctttaaggga

SEQ ID NO: 36628 - DNA, 572 bp, Sorghum bicolor
  Intron number 1 from transcript Sb03g009130.1 (locus Sb03g 009130) derived from phytozome v7.0 (chr-ID chromosome_3; pos 9905282 to 9905853 reverse strand)
tgctgctcaggccaaggccgcaggtgggacttcaggtgatgattctccccagaaatgcattaaaggttttttaaacttgattttcctaataggtgatccattgttgaactagtaatgtgttgaactagtaacagaaaggaaggaggctgttgttcttgcctatagattcgtaatgttttaagctcagatggatcaacatgcttagtcagttagtttgtaaataaatctagcatctgacttgtatcattattgcagtattgtgactgttgctttgtgctgctaatggttgtttgctgttgcttttttttcctttatatatgccatggataactatatatcttacacctggctaagatggtaaccctacaaatcaaatttagttgtgagctctctgcaaatttgtttctttttaatttaagctgcttactggatattccattactgtaatttgcagcaactgaaattatttcagtatgtcactctaaattgaaaattaacagtttttttttcttgtccacggtcctgttgctcacttgtatattttatcactgcaggctcaataaacaaagctg

SEQ ID NO: 36629 - DNA, 785 bp, Sorghum bicolor
  Intron number 3 from transcript Sb03g027900.1 (locus Sb03g 027900) derived from phytozome v7.0 (chr-ID chromosome_3; pos 55608335 to 55609119)
agccaaggaattctcaaaagcaaagaataaaagaggtatgatagaccacaatagtgcagtttgagatgtatacttgtgctctggcggtatgattggagactacatgcttttgttaagtaatctgaatctccttggtgcacatgctgtactccaagcttatccatcatatttgtgtatttctgcatataaatttctttggtgcattggatcaagaaatatgggcgtattattttgacacagttcctgtgtttatcattattactttgttagtgttgtggttaccatattgacatagtattttaccgaaatgaatttagcttgtccatcatatttgtgtatataaattttgttggtgcatggtgcattggatcaacaaatatgtgggtatttcttttgacacagttattgtgcttatgattgttacttgttagtattgtttcaccatgttggtatagtattttatcaaaacaagtttaggtttgcatgcacctgcaatgtaatagatccacacagaatgcaaattccatggaacattatttgcagagcaattttcaacatctttgacttgaagacctcatgatcataatgttattagctaatacagcttatgttcactttattttgcttcttttttggcttccatgcaaactaatgttgaccatctttaaatgctaccgacctcctttcctatgcagtggaaactggattaatagaaacttgtgctaatacaaatgaacttcctcttaacagcggctatccaatccttgaagaggaaaaaactttat

SEQ ID NO: 36630 - DNA, 1021 bp, Sorghum bicolor
  Intron number 1 from transcript Sb02g039720.1 (locus Sb02g 039720) derived from phytozome v7.0 (chr-ID chromosome_2; pos 73775426 to 73776446)
tacgacaagttcgacaccacctaccaggtaaccgctaccgcaaatcgtatccatatatccatcgtctcgtccgtgcgcgcgatcgatttttgctgatgattcgtgtgagtgcaattgcatcgattgcgtcctttcgctgccgatgccgttaatgcacatgttttttcatttcatccggtgggatggtaaccgtatgatgaattggatgaatgtatagcccctcatgatcggctatggtaccacggggaattagcctcaatttgctgctgtctgattctaatatttgtctcatcatgcatgtagaagatagcttggttggcagatccgatcctcagcatttccacagttcttccgtcacaagagaacggcgatactttcgtaaattccaggcaatgccacatgtgccatcgtgtttctccagcttcacgtgatgcctaaagatgtttagtcgcgtaggagtggggcgactccaaacttcaaactctaccagtggttgtcgtctgtgtgggtcagctccaaagaaaatattgccggagtgaacaacgaaagcacatgctgcagcgaatgggacaccacggggacgaatttcgggactggattaaaaaaaatccacctcactgcaaaccaaaattgggcctgcattgtcaaggtctgggcggtttcttgatcgagcgaaggctgttttttccctcctaatgaaatgtggggtggtcttctcgcaccgaccgagtttctttccctttttttataaacgcttgctgcaggatagttggtctgttttctggtgaagacagaggcctagaaacgtctgcaaatttgattacttcctgaattccagataatccattttgtcgaaagtggagtttcgtgttcgcatttcatatattttggatgaatagatattgcactggattctgtttgacagtatgtagtatgttaatttgcttcttacatcatttgtccttaaacgtgtgtacttggtccaggcaacgattggcattgactttctgtcaaaaacaat

SEQ ID NO: 36631 - DNA, 484 bp, Sorghum bicolor
  Intron number 2 from transcript Sb04g004620.1 (locus Sb04g 004620) derived from phytozome v7.0 (chr-ID chromosome_4; pos 4437703 to 4438186 reverse strand)
ccatttgtcttcacccttgggtctggcaaagtgagatacagatatcattaactcgtgcagagaacttaattgtatctatggtattgatactactgcagttttggctaaagatcttaactaaactttgtattcttccactctgaagtttcattggtgaaagtttggtactacagcatagcattggtattcctacgttcttcaaacatgcttgcattcaatcctagttgatttttgacacatggagttacaattgttctgtcgtgaagtataattattgcaggctattttcatattagcatcgcaactgctatgcatctgtaggagtataaactatctgttcttcatttcctttgtattttgagttacctgaatattattcatacccattatcttagcatctaacataataaattttcatgggagttcgtttgtggaatcattatggggccataatagaatatggatcttgcaggttatacctggt

SEQ ID NO: 36632 - DNA, 702 bp, Sorghum bicolor
  Intron number 1 from transcript Sb07g007610.1 (locus Sb07g 007610) derived from phytozome v7.0 (chr-ID chromosome_7; pos 11963368 to 11964069)
aagcaatcgatctggtatgcttcttttgttcatgtctttcctggccgtcgattcaaaaaccaacacattttctgctcttttgtgcacctgtttctccaacatgcaggatgtcttcgttactttgtttgagaagatctctttccatgaataattagatggcgaagtagatagccaaaatcacatttcttttctcgaaaaaaaatgttatgaaacaactacgatcgaataatcacttgcatgatatactgtatttgtttttgtttttttttttctgcttcgttaagaacatatacctggcctccagtcgtcaccctgctcaacatcgctcgtactagagtaaactagtgattagtgatcttcttttgcatgtgaagctagctagcgataaagttgcctccgttcgttttctgtatcattgcttgattcacgggttacaagccgcttcatgcggcttccatttatttttcgcttttctccgtcttttttttcctcttcttgtgatctgcaaccgccgcacttttttccgctgggatcattaatgactgctactagcaatcataattaatcactgattagacagacgcaccgacgtcgctgttccaggacttggatagttttactatttttgattgatgctgtcctactctctgtttgctatgcatggcaggagaacatccccatcgaggaggtcttccagagtct

SEQ ID NO: 36633 - DNA, 789 bp, Sorghum bicolor
  Intron number 2 from transcript Sb01g039810.1 (locus Sb01g 039810) derived from phytozome v7.0 (chr-ID chromosome_1; pos 63257217 to 63258005 reverse strand)
cggaacaagaagtcgagttctcagaaggcattcaggtacgacgactaacaaatttaagcttatttgtgattttgtggtgctatgcggattgcggagacatattagtagtagattattgagtaaattaaaatgcaccgtgcctccctaaacttttcccacattctcaaaatgatgctccttcaacttctaaaatgagccattctacttacttcgatggaatgcagggttcctgtcactttctttttttaaaaaagagatccatttcaagtttactttagttccagtcacagtcatggacttgaattctaacttcaaacgaaccacttataaaaagttgaaggaccagatgatcactttgagtttatggaccagatgagaatgtgggaaaagtttgcggacacatgatgcatttcagtcttagattattgagaggttgcaatagtatctgcgtgtcctgtgctaagtaacgaagatagtgaaatgcacaatgttggcatgttgcagcgcagctctgttcaacttaaatcataaccaaactgcacattgcacacatgatagcttgtgttcttgtgttttatgcgaatttatatagccaaaatttagtgtgctcttcttcctcttggtggcatcaaccatcaccattcgtcaaccaattcaccatttcgtcaggtgtttctgctaggtaccacttaccattgtcctattggtaccatcacgttgaacttatcatgcatgccacaatgaatgtatgcaggacctcctgaaactggaagccatccaaaaggaggt

SEQ ID NO: 36634 - DNA, 462 bp, Sorghum bicolor
  Intron number 5 from transcript Sb03g001390.1 (locus Sb03g 001390) derived from phytozome v7.0 (chr-ID chromosome_3; pos 1249688 to 1250149 reverse strand)
ccgttgcaacattggtaagataagcatagtaatagagagttgagagttgaaaccagagaagtgaagtcaaacttttgcactgcaaacaacattggtttgcaggaacactcattgactaacatacttgagcaatgagcataatagtattgcgatggagcagacaatcttttcgcacattcgccattggttagttcattggtctgtttttgcctcagtatttgtttgtttcaagagtcttctctaattgttgggaattaggaagcttgccactctgcactgacttggctccattgaattatctgttgttgattgagtacaaggagcagatgtgtcatttcataccaatcagttattgtgccgcaattttttatatttccctctttggttttctaaaaaaaaaatgagattaacacatttcttccaacagattgcagttcttggtggctctttgctgggaacatt

SEQ ID NO: 36635 - DNA, 721 bp, Sorghum bicolor
  Intron number 1 from transcript Sb02g043030.1 (locus Sb02g 043030) derived from phytozome v7.0 (chr-ID chromosome_2; pos 76815096 to 76815816 reverse strand)
tccgggccgcagcggcggagcagcaccaggagaaggtgaaaaataaaggctaatcaaaacccttaatttttaactgcgcaactagctagctcgccgttttgcatgcattattgggatatactccctccgtcccaaaaagagtgacgtttttgactttgagacatcgtgtttgaccgttcgtcttattcaaaaattttatgtaaattacaaaataaattaagcatgagcaaagtatctctaagtcttaacaaaatatatattatttatgtaaaaaatttgaataagacgaatggtcaaataagatgtctgaaattctaaaacgacactctttttgggacggagggagtatgcatgagccactacctatgctgcttacttttgcaatttgaaggatacctagctagctgtataaaactttatgtgccaatgatagggagaaacttaataaaacttgcatgcgctttcttctttccaacaagactgtgatttcacttgtcaaatctgaaagttcaaaaggttaatctatctaggttcagtgcaaaagtactacttgaatgcatgtttaatttctataaataagcatgcatctatatatctatatataattcacatgaagtagcggtccatccaattaaaacttggtgtatgatggttatcgatctttctttttgtatgtgatcgggatgatgcatatggcagatcgcacagccccttcgtgaaa

SEQ ID NO: 36636 - DNA, 612 bp, Sorghum bicolor
  Intron number 4 from transcript Sb01g017250.1 (locus Sb01g 017250) derived from phytozome v7.0 (chr-ID chromosome_1; pos 17701275 to 17701886)
aaaggggtaacctgctgaaagcccttggcacacaggtattgcccattgttgcatttatatccgtaacgtatgaatgcactggattatggaatatgagccatatatgttttccgcgttatgcttacaaataattctaaatgtattacagagtagacctgggaaatgacacaaggctttgatgtatagtgttttttgttggactaatcatcagttaacacagaataaaacacaagcatttccattggctcatctcttttttgtatcttcgtgatctactgataggatagcaatgcttatctcttttcgtatcttgtgatgtatgttatggtgatttgtactaattaaatagctcatgttatatgtaagtgtatctagaatttgcaacagttaaatacttggattgaaactggcagtcaacagttaaatactgaagtagattggaagtgccagtttgtggagcttttcttaatttcttgttcttatgttcaaaattttaccacgagtgccataatatcctttcatacattgtccattttctcttaaaatcaaaccaggacaaaacttaatataagtaatgctaactgtcatcaggttgcagaaccattgagggct

SEQ ID NO: 36637 - DNA, 372 bp, Sorghum bicolor
  Intron number 3 from transcript Sb09g026770.1 (locus Sb09g 026770) derived from phytozome v7.0 (chr-ID chromosome_9; pos 55969209 to 55969580)
cagtgaaggcacaagctgccttccgtggttatctggtaatatttgtttttttcttcaaattatctggttcatctaccttaactacttatgctatctggctgtgccatgttccaatgttatctagcactgctccaagtctcttaagagtcgttcatataaaaatgataaggcaaatctgaatacctttgagccttttgtctgtttttgttcatttttaatgctgaatatccgcagaactgtacccctgcttcattgttgtgatgaagcaattcgtaaataccattgtcatagatacctggcttaccatggtgctaattgtgtcgtggtattggtccaggcacgcagagcattccgtgccctcaaagggatcat

SEQ ID NO: 36638 - DNA, 927 bp, Sorghum bicolor
  Intron number 1 from transcript Sb04g002310.1 (locus Sb04g 002310) derived from phytozome v7.0 (chr-ID chromosome_4; pos 2078591 to 2079517 reverse strand)
gcctccgtcctccgcgcaccggccggcgaccctgcgtacgcacctccctctcccctcccgtctctgctgtaccgtgggagcccggccagctgcccagggtggccgggccttggctccaccggtcttggtggctgtgccgctgtgggacattttcctcgtgccaatcatgcctccagcttgaactgaagaggagtagcatattgtgcaatgtagcgattcttttttttttcagttactagtttgaactcaactgataacattgtactggtttttgctactctccctgtttataggaacataacactgttagaattttagatgccaagcatccttaattttgctgtttcacttcacccaatgttttttatatccatgttttgaccaaaacataatgttttcagtcaatgggtgcttcactaagatggggaattcgcatgatgttttgagttatttattcaagaggttgtaaacttgaacggctgatatgagtctagtgccagaccttttttcttttgacggttcagtgccagacttggtgttgtgtgcattgtacatgacatgtacttaatgtgtttgtattgcgtaccttcaattttaactgtagaaggcctggactaatatgttattgttgtgtatcttactgatgcatggtcttccttccaattgttaactgtgcatctgttttcgtatttccttgcagtgtctgttctcccaagggaattccttattttgttcaaaatttcttgatctgtctcatcatgctatgacttgtatctctgttcatcttatcgatttagctttcgttcagtaattattgacacactgacaatcctgcctagatatatgtatgcacatgcatattcttattcaaagggcctttcttgtaatacaggtcatcgttgagaaggccgagaggagcgacatcgg

SEQ ID NO: 36639 - DNA, 968 bp, Sorghum bicolor
  Intron number 1 from transcript Sb04g024620.1 (locus Sb04g 024620) derived from phytozome v7.0 (chr-ID chromosome_4; pos 54381213 to 54382180 reverse strand)
cgctggtaaggtgccatttttcgctgtgcatagtttagattggtagctcctgaggttcagcttgcggctgggattttcaaatctccagctgagccccgtctccagctatccgattatttggagctcctttccgtggctacaagttccagatactcgctcaaggctttcgaaatttcaagctgcgagttcaaattttcggatgatgggctcaaaatttcagctgatagctcgctcttcagtttgatctattccaactctagatgcaatttgaaagtgagggacggagaatgagaagcttagactgatggtgtctaccacttcacttttttaagtcggtggatccctttcctgagtgttgaatccactgcccattttccatgttcctgaaaccaacaaaacctagtgaactggttggatttctgttttggttatgttagtttctacaaatgcatactcgatgattttattttgaaaattcctgcttcttatttaagaacttaaaccagtgttaataaaatagcaaacaaattaggttgatctattcactagtatcatcagtcagatggtctaaataatttaattaattatacatcttattatcatctcttgagatatatgcatttttttttcataatttggtatggtcattcagtcactgaagtctcaacactctagtgcttgcctgattttgctgaagacgcttcttgtgctccagatctgcttcccgatggttaccaagcagatgtactcaccgcttttatgtagtctggccctccccaagttagcagatacttataggaagaatacacttcatgaaatggcatagttgtttgcttattcttgcaattagtttcctacattgacaatgcgtcctgttgtcctttaatttgttcattggagaatttttaatttgcttggttggttctgatgcagtttgaagtgtgatcattgaggttgtcattgaagaa

SEQ ID NO: 36640 - DNA, 1029 bp, Sorghum bicolor
  Intron number 1 from transcript Sb08g019580.1 (locus Sb08g 019580) derived from phytozome v7.0 (chr-ID chromosome_8; pos 50379196 to 50380224)
agaggaggaagcgaggaaaaagggggcataaaaaggtgagggctttttttccgattgcttctcgccgcactcgcgcacatattttccgccgccccgccccacctctcaatctccctggattctctggaaggttcatcctgctttttcgagaggtgggtgggaaaacccgcagcggcctgatgagcttctgaggaattcattcctgtggtgacttgtttcctggattttttctttctttctttctttctttctttctttctttctttctttctttcttcgtgtgcgggtttcattttcgtgcccgctttgttctttattttattagtgcgcttgcgctgatgatgtgatgtgctgggttttctatacttgcatccttttcgctgcattttcttttctttagcgcaagttcttcgaacaagcgatcgagcgctgctcgcgggaatctttggagtgaagctcccatcccatcagtcctcttcttccttgatacgtattcctctgcttgtccctgtctcgccagttccgggataaggaagaggaatcggtggaggtctggtcatcgattccccaggatttgcctccgaatcttccccgaaatctgaatcttttttttttattttgcgtctgtggagtctcttgctgcgtgctgctgccactccatctgagagttagtccagtctagcgcgagacgctagcagcagcaaaggtgaagtgttcttgcgttctctttgccgagcaatctctagaaaatgttgccgatttccggttttccccccttttctgaatgtttgatgaggaagaaaaggtggcgaactttgagtgctgctccggccatcggtttctttttgctgctttctccccctcgtgaatcgcttgaaattacttgcatctttttaattcgcaaatcggagtaattaatagtaggaagcttccaggaaaggggtggagcattttaggtttataatttcgattcctctttctcctgttgcagcagtccagtcggagaagcggaagttcgcgtgtcgttgc

SEQ ID NO: 36641 - DNA, 734 bp, Sorghum bicolor
  Intron number 1 from transcript Sb07g003990.1 (locus Sb07g 003990) derived from phytozome v7.0 (chr-ID chromosome_7; pos 4917407 to 4918140)
aacgacaacgccttgacgttacacttgagtatcaggtgcgtggcttcgccatcctttctccttgcgttgcgttggattattgcaactctcctcgatcaccaatcacggatgcgttggttttgattttcgccttcccaaaactctgattactgcatcggaatctttgcgtttatcctcgcctaagtctgaaactgttcgtttcttccgatacaagagtcgactactgaacctgttaattgttgctgacaagttttaaatccatagccgaggaaacagtttttgtggtttctcgtgttatgttcttgtgcctctgcttctggttcgctttagggagctgttcctgagcacattcaaatccacaaattactgtgtattctagattgtggaccctgcgctttacgaatttatctgtcatccgttttttctgagtcgaatcatggtatgcggaaagcccaagctgaggtcaccattggagttctttgctacgatgtatactatagcttgaaagatttgggctatttggtcttccccatttcatagcagatcgatcacagtggtttttgttttactgatttctgtgaaagaatttggtctctgaacattccgttgtgagtaaaatgtatattcagacatgttcattcagttaccgctattgtccagccttttgatttctttaactcattcttttcctaaacacagggaggcgacagtgacctgacgtgtccgcagccgcc

SEQ ID NO: 36642 - DNA, 735 bp, Sorghum bicolor
  Intron number 2 from transcript Sb02g029780.1 (locus Sb02g 029780) derived from phytozome v7.0 (chr-ID chromosome_2; pos 64844325 to 64845059)
ccgaggccatcgagctcaaccctggcaactacaccgtgagaattcccttcatccttttttcttggcctactttatttttatggggttatttgaaacttaagtttctatggtcaagtaagaatgatttttttaagggaaaatatactacttttactatggaggttcaaccatttagtttcgattttgacttgaaaccaagtgttagtgatgagcttcaatgcctacaatggagacaatttattatccactactcgtcttgttcaattatgagtatgcaacactgctacagaagtagaaaaaagcagtggacgtggagccagttttagaaagttggaatttttccatgtaaactacccactctagcctgtagccagttgcagctttagaaagtttgtactctcatgttgacactgtctatcattcagtcatacagaatacttttatcatcctccatgattttttgtagaaggcaaaggcataccgcttggtcataattttctccctgtgctatgtttcttgcagtatgctacaaaattcttgaacagcactcatgctgtgtagtaacagagaattactttttatgctgtttctagcttattaccatgttgttttagtttgaatcgtgtatttcgtttgtagatcagtcatctcttttgtttgtaacttttttgacattacagaataattgtctacttgataggtttggcatttccggcgccttattctggaggcact

SEQ ID NO: 36643 - DNA, 994 bp, Sorghum bicolor
  Intron number 1 from transcript Sb09g029770.1 (locus Sb09g 029770) derived from phytozome v7.0 (chr-ID chromosome_9; pos 58419366 to 58420359)
aacacgtctccttccagatccaggtacgctttgaccgcacctgcacctctcccgccatccagtaaccctagaatcttccatttgatgcgagccaccctgaaccctagcaataatctgtttccgcgacccaaaacattccatacggttctttgaagcttcgttcactaggtttgtttgctgcgtggtggaaatcgacagccgtaggttgatttatccgccggaaccccttgcctcacggcaaattcgccgcttgtggtggtccgaatagcccgcgctatgcgtccatcctataggatacagagtgctcacggggaattattgggcaccgagacatctcggcgtgattttgtgctgcgtagatttgttgtgtgccagttgttcagttagcagaatattagtcgattccttagtgatcagagtatttatattgaaagatattcatctagagaattaaggagaaaaatatcgccattcattctactatattatcatacagcaagtacctgtttgtgatcctcattatagtatctgggtacacaactttgacatttttctttgtcttcacttgaaccaatggcaatcctctgttgggttcaccttttgaaccaccatcattttagtgagttcgaggaacaaactggtgaactgatgtaaaacaaacaaatatcatcttaggaagattagtattgagtcagcgtcattactcttatgcgctgaaacaggccacttaagtggtcagagaaaatccccagtcattgctcaaaaattgccttagttatatgttgccaacaattactttattgggacacaaatttcactgtgcttttttactaaaactagagcttgtttagtattctttctgtctattcaattattatttattttctgcacagttatctctacatttgggatattacttgaaattgggattgagagatggggggttgctctcctttcttttctccttttgggactctagattatctgaagggca

SEQ ID NO: 36644 - DNA, 711 bp, Sorghum bicolor
  Intron number 1 from transcript Sb01g012760.1 (locus Sb01g 012760) derived from phytozome v7.0 (chr-ID chromosome_1; pos 11776758 to 11777468)
acgccgtggtgagctcctccctcggccccgtgctgtccgcgcttgaattttgaaagcccccctctctctctctctctctctctctctctctctctctctctctctctctctctctcttcctctgcttccgcctctgttctcttcttccccgtctccggcttcggatcagccctgcttacgcggttgatttgccaaattagtagcaacggatgtttgactgaattgaaagaccgctccttgaccttgatgttcttaagttttttcgggtggaagaaaaaaaaaatcatccctttccccaacgtggagattggagaagtcgaggcctccaagagacagtcccaagtgttttgctagtattatgattttattaaagtcttttgttcttcaagtccaaattccattctcttgtgattagaattcgagcctttctgcaactctgaattttatattgaaacagttgctctaccagaatcatgaacattccctagagttccacgatttattattttgttagaaaaaaaatctgtacttgcacacgctgtcctatttggttttgtttattagtagacttgtttagaggaattaccagcatcagtagctgcattagcttatgcttcacttcacttgtacttgcttgctgagaaatgaagctaatgttttgtgtggccacgtgcagcccgggtgggtgtcccaacagaagcacgcgtgccc

SEQ ID NO: 36645 - DNA, 514 bp, Sorghum bicolor
  Intron number 2 from transcript Sb06g027510.1 (locus Sb06g 027510) derived from phytozome v7.0 (chr-ID chromosome_6; pos 56402340 to 56402853)
aagagacctccaacaaactggaaggtgacttgattggttccttgttcaagagtcaaaacatgcaatgtgatgtcgtctttttttccaattaatgtattttgcgttgtgctataatattgatagttgcgtaatgtgataacatggaaaattaagatttctgttggcgcagaaggcttagttatgttcaactattacaatgttgcggtctatttgtgattttgtccgtgacacattacttgtttgagcttaggtactatgttattgtgttcattgagcaaatttatcaggaaaagtgacgtgttaacatttactacaagaaacgtgctatgcttattctttcttcagtgaccatttgcagatatcatgctatgtgtgtgcttgtttctataagcattaacggatataaatcttctgaactttcagtacactacatgcatcactagttgcactaattgcggtttgtgttttgcataaaacaggccttccaggggttctatttgtgcttcctgactct

SEQ ID NO: 36646 - DNA, 1024 bp, Sorghum bicolor
  Intron number 2 from transcript Sb04g005770.1 (locus Sb04g 005770) derived from phytozome v7.0 (chr-ID chromosome_4; pos 5659759 to 5660782)
atcaagggcatcatcgtaagtagagtaattgttttaaatttcccactataacttccgctatagcccactatagcattttcaggcagtgtgttgttatctatgttcatggagtgaaagtggtgtggataattctctgaattgatcccatccgaatctgagttttaagcatatcaaggtagaaatcttaatatccgtgcggatatggataatccgaacctcattgtccgcggatacggggtaagatataggataggtaaaatccgacgtatatggattatctgaaaattttacgtgaattatccgatgttcaaaataggatatccgaaagtttctcttcctacactaaagaattcaggattttgaaagtttgttagttgagaactcttattttgtttggtttgttattcgctaataacttactattttttagggaagatgtcatgttaagtgttaattattggtgtgagagccacaacatagaatgcaatgctagattattatctattgcatattcttgttccctactaaatcaaatcttaacaagcatataattctctatgtatacacatgttactctactattaaaatacgtctccgatccagttccactccatatccgtaccaattacgactaccgaaaaatccacatccacatcatccgtgtattatccgctccgcactgaatccgacagagaaaagcagattaggatatggggaagacattatcccaccgatcccatccgttttcattcctatatgttcatacaatttggccactctatcctgctatagaccgatcacgattagctattttagagatatgccgttaaaatactttagcccgctctatttaaaacgctctactacgtgtactgctactgcatgcatgtctgtggaaggttttggttcacgtctatgtaattcacgatcgagttagtggatgatgcattcacttgtttggcttgttgcttgcttgtatttgtatgtaggacctttttggtgcggggagtgagacctctgcaag

SEQ ID NO: 36647 - DNA, 1045 bp, Sorghum bicolor
  Intron number 2 from transcript Sb03g045390.1 (locus Sb03g 045390) derived from phytozome v7.0 (chr-ID chromosome_3; pos 72649468 to 72650512)
attagctctgcaagtaagaacctctcttgtctctgtcttgtccctgcctgcgtattttaaacttgaaagattcaaccaacaagtttccttaaggaagttgaatagtcttggttgctgaaaaaagtttatgatttgtgacatgcatgataagctgattgagatagtgtaataattaaatagcagaattctttatcagtgtactccctcctttccaaattataagtcattccaagaatcttggagagtcaaaacattttcaagtttgacaaaaaatatagagagaaatataaagatttatgtcataaaataggtacactatgaaaatataactaacaaagaatctaatgatacttagttggtacaaaaaatgttattattttgctatataaatttagtcaaacttgaaaaactttgactctccaagattcttggaatgacttataatttgggacggagggagtacaaaatgttatcatgtggaaagttcatttgtgtactgcacatctctgacaaacgaacctgatgtctgtagtctatgctaataatttcattacgttaggacagcatgagcccatttactgcttctcttctataccataactagatagtaatttgcacaattaatgccattagctgctgaacacagttagtttgtggatatgcgctcaccaacaatccattcgctccatgatatagtattaaaatttctcctccatttgaagactgtactgaattctaattgatgtgtttacttgtctgttccaattctttatttaccatgtgttttatgtatactgtaagtcaaacacaccaaggttgtaaatttatggcatgatcatgacatggtgcttatcttcattcttcaatactctgatggatggaatggccttgatcttgacatgcatctggttgaaatgtatagtcagttgttgttttttctctgcttaatgcttggcctgcatatttgagctcaacagtacagtctgatattttttagggatgcattgcagctggagttccaactgagaatatactgtatctagga

SEQ ID NO: 36648 - DNA, 741 bp, Sorghum bicolor
  Intron number 2 from transcript Sb07g028380.1 (locus Sb07g 028380) derived from phytozome v7.0 (chr-ID chromosome_7; pos 63367831 to 63368571)
caaatccacaaagccgtgagttcttaatctgtctcacgatgtcacattgtgtttggacattggtgtttgctcatgctatggagaaaatgtgtctgtttcatattgtaatttaccattcgtttacttgatgccacctaacagtaggtggcacctaggattcttattatttctatacatgtttgacctatttaaagtgcctaatagtttagtaagtgaagcaagtgaagagactgcttcaatgtttctggaatttgggaattctctcactgtacacatttgattggtactgaagcaggtgtctagtaactatagctgccaataacctaataatgtaacccattatgcttctaataaggtttcttttgagttttcacgtttataaacagtatactgtagcataattaacacatgaaaatgtcaagaaagttgcatctttcaaagcctaacttcaaggcagaattaagtaacaagaagtagctttggatgtttgataattttcacagtattaacttattaagtttccctcttatatgcaaaaatcgcttatcttctgtgcagcaaaaccatatattacttacctctatataactttacctgagttcgtgtgactgaatggaatggcagatatatgattttggcttgagagagttgagaaattacctgcctgcagacttgtttgatctgtgatgtatatattcatttgactctgcctaaccttcttttatctgtattatccagttg

SEQ ID NO: 36649 - DNA, 611 bp, Sorghum bicolor
  Intron number 1 from transcript Sb04g017760.1 (locus Sb04g 017760) derived from phytozome v7.0 (chr-ID chromosome_4; pos 41492121 to 41492731)
attttgtgggaaagctctctgtaagtgccttactgtttgtatgtttgacttgaatatcttctcaacctaaattgactaactaaatatcgagctgtcatatgtctaggggcgcttggccattaacaaggaggacaagccaactgaggaagcatgcaccgatgtcttgcggtctggggtccgacaaatgcggtaaaggctgaagaataaatacttcaatggtgtacctgcaaatgagatccccactacttctccagttgcatgcatgtctgatcaagagtggcaggccctggttgcaaagtggactaatccaaaaaacatggtatgggtatcttgtcatatattctatctcattgagtttccaatggatcttcttattttaaacctatgaaatcatctcacatgttcattctcttttaggaaacaagtgaaaagaacaagattaatcgcagtagagtgaagtatcatcagactaccggttctcgcagctatgtggcacacttacatgcatatgtaagtaactcattctgtacataagattgacttttgtatcataagactcacaaaacttagttgtaatggattctctatgaaacagaagcagaacaagaaca

SEQ ID NO: 36650 - DNA, 923 bp, Sorghum bicolor
  Intron number 1 from transcript Sb07g028510.2 (locus Sb07g 028510) derived from phytozome v7.0 (chr-ID chromosome_7; pos 63489646 to 63490568 reverse strand)
actttgcccggcgacgagcaccaccacaacactaggtattccctccccttggtcttgtccccttcctgctgtgcgaaaccgtgcgcccaaaccttaacgtaattcatagatcgtgcgcccaaaccctaacatactatttgtagtccgatctgaatctaattacagttgtatagcctactaacttcgattgctttgcaaaaattattgggtgtacatgttggtgtgctgatttgatttgttttagtaattcaatctacttgttgccgactgatttgatttgtttatatttttcatgttctgattagagtgtatggctgaagacattaagcatctaggcatcagtttgcgacggtatcataacatcactaattctagttttaagatttttagacttcttttatataattggagattttattttaagacatatagatgatgcttttcagtagaagttcaggttaataatacttttactatgtttccacatattacttacagtatccttaattctaggaaccaggaaaaggaattcattattgggtacatctgtattctagaagaagttgtagttgaaagaataaatgtactgcaacgacagttatatttaatttatacttttaaaattattaaacttttgttgttataaattatatgaggggaaattaacggataaaatatgacattaatgactacagcaaatcaagttgctctttatatttcgaaaatgctagtgttctctatttgcgtttggttgttttttttttggttggttagtgtcatggtggagcatctaatctaaatgcattctcaattgcactcccatcctgccgcctccctttgccaccgattgcttgtcgttctaatcttgactcacttaaaaccctaaaggcctccagcaaaggtcccaatctcgagaacggagg

SEQ ID NO: 36651 - DNA, 642 bp, Sorghum bicolor
  Intron number 2 from transcript Sb02g003760.1 (locus Sb02g 003760) derived from phytozome v7.0 (chr-ID chromosome_2; pos 4193976 to 4194617 reverse strand)
ccaccattcgcatctgggactcagaggtgaggatagcaatatagcatgctcttatgtcactgcaaatagtactgatggccactctaatttgggtgtctagtcctaagctaagaatgccccatcagttggtatggggctatgggcatctggtggtgataatatgcaatgttcttttttttcccacttgatcagtcacgatagcagtttatggtttattaatttgtttagttgtattcttagaagtttataatgccaaatttcactttactttttatcagcttagtgaactaagacaacaaactaatatgctagtactaccagtatctgcagaactggacgcatcctttctgattactgcttccagtgttactctagtctatgcaacaaggcatggtaatttatttaatgcagcatttacccaatggtggggatttggagatcgaaagggggtgtgggattcaaaatgaaacctgctctgcttctatttatatatccatgttgctctttctctgcctttttctgcacacttaaaaatgttacttgtttctccataacaatggagacttttttcacatcactcatcggatgctctttgaattgtatgtagactggaaaactgctgaaagagtctgataaagaatc

SEQ ID NO: 36652 - DNA, 1006 bp, Sorghum bicolor
  Intron number 1 from transcript Sb02g024442.1 (locus Sb02g 024442) derived from phytozome v7.0 (chr-ID chromosome_2; pos 58757849 to 58758854)
ctcaagctcgacggcgtcctctcgctctcctggtggtaagctgtaaatcatgtactcctgcccagcaatccaatccatctgtgggactttgctaagcgcaaatgttagtggcgacccgcgtttcgctgggccgagggccgtaccgtaccagttcgctcggagaaattgtgtatcgtttggggtatctagtatcatgtagccatggaggttgtggaacttacagagggcacgagaggtggatggtgcgggcatcctaatttatcatgcagccttttcatttgcaacataggacatgatgcgttggtgatttggcaaattgcacgtgcaactgagtcactgactaaggggattctgaaattccttctgggtaaatgaattggaaattcgctcttgcatcctgtcctgggtcagggtatgaagataccttccatgattggaaatttataggctatttggtttgaggaatgcgttactcattactgacttttttttttgtgtttggtctgtgaaatggaatgggttgatgcatcatcagttcattcttcacaagttaataattagtatacgaggaatggagtcattccaccaaattagaatggactcatggtacgccacctcatctaggatgagtgattgctcaaccaaacaatctatttgttttttaccagccaagaaatgctttgtacgtctggtttaacgattaaggtgctgagatttcgggtgacagtaacttcggcagacacagtttcattactttcctcaaaccaaaagaaaaagtcagggatgacaaggttatggatcaccccatccctcaaaccaaacaccccattagtcttgtgcgtgcaacttgatgaagaatctgcagacatgaatgttgcagggtatgtcataaaattgctagaaacactgaaacaggtacaacacacatttaatgtcagtctttcttgtctcaatattggaatcctcaaaataagtaccaacactgcagggtgcttttcatccctgt

SEQ ID NO: 36653 - DNA, 790 bp, Sorghum bicolor
  Intron number 1 from transcript Sb03g030650.1 (locus Sb03g 030650) derived from phytozome v7.0 (chr-ID chromosome_3; pos 58876233 to 58877022)
aaggcgcagatctgggacaccgccgggcaggagaggtactgcgcccttcttttccccttctttctttgctgttcgttcgttatgcagattgcagatgcacttcttaggatttgtgcaccatttttcaggaaagcttcctgtttagtagtaacttgtatgcagtggcggaggtggggaactttcacgactagggccaatactataaaccaccaacatcggatcacataaaagtaatactaatacgtagatttagctggaaaaaacaaagggaatactctagtgttttttcccacgcctagggccatggccatgttggccctaggtttatatccgccactgcttgtatggattattagtaagtaaatggttgttaatatggaaacttaagcgtaactgacggaatgaacatgcacttgtgcttctgactcacatttcaaaaaaaaaaaaaaaaaccaaaccactggcctgttgatgattgcttcatgctttattgtagctgaaaacggccgggattgatttccgtgttactccagctgggcgttcatgccaaaatgaaccgaacaatataagtttgtccacgatcatcacaagcttttcagttttttgcttgcgtatcgcattttcaactccagcaaactttacgtgcattatcgttttattaaaaagaacaactttacttgcatttcgctagcgtgccattcaatttgcttgcgatcgcagctgattgcgtgtgcccttgctgcctgtccctccaggtaccgcgccatcacgagcgcatactaccgcggcg

SEQ ID NO: 36654 - DNA, 489 bp, Sorghum bicolor
  Intron number 1 from transcript Sb02g020250.1 (locus Sb02g 020250) derived from phytozome v7.0 (chr-ID chromosome_2; pos 49078850 to 49079338)
caggtcaggccccgccccccttgcctagggtgtacttgtttatgatgtgagaattgagatggaatgttgagggctgcatgatgggataaacttgtcaagtgagatggtgtttgtttttcgactgctacaactggtggaaaagtctttttttttatttttttcaactgataattcgagttatgctacttaattagttgagcgcatacaattctttccctttagggatgtagaacttagttggacatcataattttgtcaaagtactagtggggtttgatacggaagactgtcctacggccagatatttcattagctagtgtttttcataattcatttctttgtggatactgtcttttccctttctgccgcttgtgctaatttatgctaaacttataatcacacaagtcttcatgaaaccttgcagttttactacttcttctgccattgtgatgatcccattttctgtgttttgcatcaggaatccattaa

SEQ ID NO: 36655 - DNA, 513 bp, Sorghum bicolor
  Intron number 2 from transcript Sb01g037350.1 (locus Sb01g 037350) derived from phytozome v7.0 (chr-ID chromosome_1; pos 60940704 to 60941216)
gggattacgcttacactaaagggtactttcgccttctttctgtgtcactacatctgtaccagtgcggatagagcgatagtgggggttgtagtgctctttatggccactcttttagttcagagacgttgggcaaccaatcagctactcctatatcgtttttttgatgcaccaatccgtcacgatctgtttgtcctttaactttggcattgtcagttgattggaggcctatagatttatacatttttctcgattgttctgttaaatagtactagtatcataacagcttttcttgttgtgttggtcttctttgaggcctgacggtgttttaactggattgagtataccttccacccaaggcatgttgctggtttgatttgattgattgtgccttgcgagaactatttcattctcaaaatggattttaaccttctaccattaatttaaacatatagctctgaatctagtaacctgtgcttttggttcacctgttcatcaacacagggaaagtaacaa

SEQ ID NO: 36656 - DNA, 621 bp, Sorghum bicolor
  Intron number 3 from transcript Sb10g001320.1 (locus Sb10g 001320) derived from phytozome v7.0 (chr-ID chromosome_10; pos 1092388 to 1093008 reverse strand)
gtttgtctatcttctttcatacgttcatatctcaggtaattcatgacatgctagatatagttacatttcctttaatgctaaagtttgcatttcattttttgactttcctcttccatttagaacaaaagggtgtggtttatctgctagtcttgcactgtacagtattttctgttttgtttttcactgcataatcagtaatttagtaatgtatgatgtataatcagtaatttgcactgctagtcttgcataatcagtaatttgcactgtcaagttgccaacagacacttctgtgttctcagaacaccaacctgttgatttatagtgcatttatgtaactaatgtctgttaaatagccatagtgttgcatttcctggtaaataaccatattgtctgttaaataagcatatttaatgttcacctatcagaaaacggttcctaccttttctatttaatgttcactgtactgctatctgaccatgcttgaaattcttaaactaattcacattttgtagctttatttttatgcatttgccttttcagttaccttcccaaaataaacttttgtataatgttgtgcttttcttaggtgataaaataattctgggtttactactattcata

SEQ ID NO: 36657 - DNA, 646 bp, Sorghum bicolor
  Intron number 3 from transcript Sb09g015030.1 (locus Sb09g 015030) derived from phytozome v7.0 (chr-ID chromosome_9; pos 38073793 to 38074438)
gtacaccaacaccgtctggaagactggagtaagaggtgtgcaactccaaatatgcctgtgaatctgctgatcatcgtcttgttctgctcatacaattatcattgcatctgccgatcgaatcatatattacagatcacggagagtttgaatctcaaagtccatatatatatgaacttactaaaaatagatatcagtgtgaaactcgcacttttaattttgtttttgtttgaaagacaacttattatttctccagttcatgatatatacttaaaattgcagtaagacttgcagcattagtgacatttgaagacatttttttgtcttaatattcgaagacagtttgtctagttcatagtaatcctcttatgaggcaatgcatgcttcactttaatgtgccactaatttaagatgtaaaaataataacatggtacataagtgctgaaaaccaaaacaaaaagaatcagggaatcaggttcacgttgcaggataagtcattgcattagtcatgaaacaaaaagaataacacgagtactgaagacatttccatatggtacaggagtaggctttgatccttcatggcctacctactattatccctttgatgtcgttgatattttgccccattattgcagtggagaaccagaag

SEQ ID NO: 36658 - DNA, 1029 bp, Sorghum bicolor
  Intron number 1 from transcript Sb02g030280.1 (locus Sb02g 030280) derived from phytozome v7.0 (chr-ID chromosome_2; pos 65355119 to 65356147 reverse strand)
ccctcgtccgcggattcaccaacctctacgccgtaataaacacagaaaagaatagcaaaattcgcccatccttttctccgttttattcacggctccaattgactcttctcgcggggtcgtcttcacttgacccacccaattcggtggtgcttgtgaggattggatgggcaggctgcgtgtgctggcgaatggtgattgcctgattaaatcggacctcaccgaattttcgggaggggatgtcagcagggttgtctgaggagagaggcagtatgcagatagaaaagtcgcatgtcgcccttagttttccatgtatggaagtcatgaagtcataggcatttgcctaggccaggccatacgagatgcaaagttaccaattcgggttggtttgggtttgtgcttgtatagtttgtactttgaggcatgtgggtcacagtcacaggatttttgctcactgatggggcctgcatcttcatgaaccatcccaagtggtgattaggctccttgaatagtgtggtggtgatttccacattatttcttgagttgaatacagaagttgaagaataggtagcagacttgtacaaaagaactaaagaagtacctaatctttagtaatatatatttttttctttatgctaagaagaggttaatatcaaattaggtggttggcttacagaatacccattctattacaagaacatgttccagatttgggtattaaaaaaatgtatgaccatcgactaagcgccagattttagcatttgcctcattttctttgtattttcatccacgtcaagcatgatactgatacaaatctatgtagtcatttctttgtattcccacaaatgatatacaaagcaaaacaagtttcatttgttgtcctatgagttctgtttttaagagtaatctgccatttcattaatttgattcatttttcaaaaggtagattgattcatgttattagagttggtatttggctgaatagtctcatttcataactttatttgcaggaaattgacccaaaggtagaaa

SEQ ID NO: 36659 - DNA, 682 bp, Sorghum bicolor
  Intron number 1 from transcript Sb02g035500.1 (locus Sb02g 035500) derived from phytozome v7.0 (chr-ID chromosome_2; pos 69928215 to 69928896)
gccggctgggacgacgacggcagcggcaggaggaggtgagttaaagcgtttattgttttaccctttgttgacagaataacatggactcatggaccccgtgcaaattgactgtaaattattcgtgcgtgtgaaattgcttgaccgtgattgatgtttgttagtgcgcgcgtgcgtggatgatgaattattgtaatctttactcgagtggcgcaaaaatcttagaattttatattagttgcttcgaagctagtcttcaacatcactttcatgttacatattccggcatttcgtgatcacaattatccaaaagttggccccaggttttcaaagacgagcactcgtattatattgacaagcactcataatctggcataataatggcgtaacatgaattttttacccattttttgtccatacaagtaccaattaatatattctagtttctgtcactggttcctgaaagtatcagttaaaacttagcagttaacatagtacttaaatataagcattgatgactgatgaggaaatacttttgaccaatgagaaagctattgatatggtcttgatataccaatctaattgtttgttttgtttctactgaaatttcgtttgtctgatcacaccatctttaattaattcattcacaggggagaggaagtacagtgtgttcattgtggttctt

SEQ ID NO: 36660 - DNA, 1038 bp, Sorghum bicolor
  Intron number 1 from transcript Sb07g023320.1 (locus Sb07g 023320) derived from phytozome v7.0 (chr-ID chromosome_7; pos 58189204 to 58190241 reverse strand)
acgtcaaccaccagctccagaccaagttctcccaggtgcccgatcccgcttttgtccttccccactgggctgatctggcctagggtttccagatctggcgccgctcttcctgcgctgacctattctcttgttggatcgatccgtttgagtagtctatgtacaaatggcgtcatgcgggggtagtcgaggcaatcgggtttgttagcttttgttagtgcgcgggcgttttatatatgtttacatttttcttgagcgctagtggtctcatattgtattgatgtaacgttgtttgattcctagttatatttgtacaaattaggatagctcccagatagctgttagttcaaattcagtgccaggtatgctgcattttcactttgtggtcattgttactttagtcttagtattgatcggtaatgaacacagcaactggacactgctagaaccattacagtttatcctgtatttagtcaactttgaaactgtgctcaagccctccactacttaggatccgggaaactcttttcttgtgagaaggttccgttcagtttctgatgagagaagatgtaggcattacatttgatgatttgaataattgagtgatttcagagaaaatataggacaactatttttgagaccagagaaggccatttttggcttcatatgtgaacaaagtgttgtcttttcggctcaaaaggtttgttttggccttgtgagttgtaagttttatactattcaaactgcaattacacatgccttggtaggctgcaagcttcatttgagatacgattagtatggaattgattgagtgatctctcctgtcatgttggatacctttcttcttgttcctttgctacattatcttgaaagttcctgggaggcagctgagatatgcactacccctcaaacttgcagtattgtgtcttccacatgttttagttctatatcctaggtcaatagatctgtgtgttctctaaaccttgtacttattttatttttgcaggaaccccaaccgattgattgggagtactacagaaa

SEQ ID NO: 36661 - DNA, 755 bp, Sorghum bicolor
  Intron number 1 from transcript Sb03g028340.1 (locus Sb03g 028340) derived from phytozome v7.0 (chr-ID chromosome_3; pos 56124809 to 56125563)
cacggacttcggcctctccgtcttcttcaagcacggtgagagcttgattttgacttcatcccttcttccatatggatcttaccgtatccttttgtgatgtttgactagatgtggatatggatttgacttgaccgattcgccgggctggacggtttcagacccagcattgctaaaatgagtgtctatatatggaaatggcattattcatatctgtccttgttgcgtgttgtgtatatgtgtatttggggtagggatccagcttaacttttttttgcgaacatgcgctgggactcaagcttttggattaactccactgtttggctggccgtaaaagcggctgatgctgatactgtgctgatttgttgtgagagaaaaacactgcctagctgtaaaattctgcccgaaatgtgacattgtggtggcattgtagatttgtattatttattctttattaggcattgcattactttaaccattaatcgttaattgaaggaagcataacggattgaacttgtgtgaaatgtttccgttgcacaaaacaggaaattgtactatgtttgttggataaaattgggattgttcactttgcaaaatgttggtttcgtggaggatttgttgtggggcttagaagcttagtctcttttctatatattatccctctttgttttagaaccttaacaagtgagatggtttgtttatttgtatactgacatgagcaaactgaatgaaaatccatgttggatgatgcaggggag

SEQ ID NO: 36662 - DNA, 684 bp, Sorghum bicolor
  Intron number 1 from transcript Sb01g008360.1 (locus Sb01g 008360) derived from phytozome v7.0 (chr-ID chromosome_1; pos 7205986 to 7206669)
ccgatccttacatctggtctccgttctacgtccaggtatccttgaccaactacttaatcaatctcatcatagctcattaactctgcttggtggaatttggtgagctaattcagcatgcagcaggagcgcgcgttctgttgccttgattagtttgatggctcggctgttgagtagagtttggttatccagacatttcaaaaatattagagagtcgaaagatctcaagtttgaccaaatttatatgataagataataatatttatgataccaactaagtatcattagaattttttattaattatatttttataataaacctatttgatgttataaattgttgtatttttctataattttgattaaacttaaaatattttggcttttagaaaattcttgtaatgtcttgtaatttggaacgtgagagattattacttattaattcggtaggaacagatccagaattaaatgtcttgtgctcttgtaccgttatccagttggggcatcaattgactgcgtcacatggctgcatcactgaagagtgaacccgtatatgcaggagctgcagatgcagtataggaccagagacgcgaacctgataatacatttctgcttaattaattttctttggtgatcatgtctatggatgcagctgacggagttcgccgacaagtcgtacgcgctggg

SEQ ID NO: 36663 - DNA, 782 bp, Sorghum bicolor
  Intron number 1 from transcript Sb01g026760.1 (locus Sb01g 026760) derived from phytozome v7.0 (chr-ID chromosome_1; pos 45788375 to 45789156)
caggtacctattatattatttttatatatacgtcgtatacgtagtttgatttcttttctttccctatataactgttctccaagtgggttctatgttttgtcaaaatcttttaaaatcttctaagaacgtgagaagtggatatggatttctgacatgttttctgaactagttttttttttaacgaaaattctgaaatatttaaccagattttcagatataattgtaattttagcagtgtgctacatctttaatttggcctgaaaatttaattagttcaggcaaatagttcattttaataggtcaagagtcaagactaaactcctgaaaaagtagcttttttcaaagtcaagttagaaagaagtggatgttgactcaaaaggagatatgattatagaagatgttatcggccgaaaaactttttacatagtaatgattttttgttgaagtgccttcttgctataaatttaatttggaaaaaagaattaaaccagtttggtcagcagaaaaaacctgatacctagatatggcagagtaccttgtatatataggttataatcataaaatatttctgatttttggatattttcctttcttttatatatgctttctattgcacagctagaaagatttttatttcagaaaattttctgaagttatttgtagttctgagatatcaaaaatgtatgcactgaatgtataataagtaggttaacataggtaaaaattttcttaccataagtgacttgtttttttttccctcatatataggtgacagaactcaa

SEQ ID NO: 36664 - DNA, 741 bp, Sorghum bicolor
  Intron number 3 from transcript Sb02g009610.1 (locus Sb02g 009610) derived from phytozome v7.0 (chr-ID chromosome_2; pos 13759107 to 13759847 reverse strand)
aactaaagctgagacttaaggtttgttctttttatcctgtgaatcttttgctagcgcgatgatggtgtcatatgctgtccgaaaagctgaagcgattctgtgcaattcttagtccctacgatcgaccaaccaattttcctccttaatttacttaccaaggatggttgatgttaatctctctctatttctcaagtcaagtactccgtatatgactagagcaactagaaagcaagctgagaaaaatatcttatgtggaaaagtcatttggagctgtgaaaactccaccaaagaccatctttagatgtttggaaaaactacagaaaaaaaaagagcatgcatatagaggcaggggtaatgcacagtaagcatgtagttctaagatcaaacttggttcgatctctttctgagttatgaaaagggaaaacattttttttgtttactcgtcaatttgatagcccacaagcgaagtcagggtttgtgcatcaccagcttctttgcatccacgactcgagttcttttcaggatgatgagagagaatagcgtggtatagaaaatgaggtgctaacaatatagcaagtcattacaaacttaaagtaaaataagtagcagtagcctattactaaaaatcccccgtgattgcaccataagcacataaaacattgttcttaatctgcaattattttccttgataatttctcctctctagaaagaaggaagtgacattgtaacggaaggtccaag

SEQ ID NO: 36665 - DNA, 1015 bp, Sorghum bicolor
  Intron number 1 from transcript Sb01g035760.1 (locus Sb01g 035760) derived from phytozome v7.0 (chr-ID chromosome_1; pos 59404714 to 59405728)
aaccttgacaactgcaggtaagtgttcgatgcaatggaaacatgtttcggtagcaaactcttgggtatcttcatgttatgtgtttaacggtgtgctgatgtgaatatctgaacaaaactttgtttgataagtaataaccagcacaatctaatatcaaagtttagcttggtcactcttttcatgaaccctgttctaatgaattgaaaaaaatatggacctgcttgcaaaatgtgtttgtggcagcacacacgttagggtgactattgaatttgtttcatttagttttctttgtactagagtggatagtaagccattgcctatcatattatcatgtagggcatgatgttatgttggacgcaacatatagcacttgcacaaagagatccacttataaatttgcaccattttctaaggaaagaggagcatatgttctcatatatcagtattcagtacttttatagttttattcagcaattgttttttaattattaatgtgattattaattcatatcaaacaaaagtgatatgttttttagtaaaagtcgtactgtggaaaaggagtgtttaaagtatttctgttgcaattattttgtagctgtcattctgcttctagttcagcagtggtttttatcaagtgccgcagaatgctgtagcaagcatctcagcagatggacctacaatcctggtcactgtacccagatttcagattttagcttgcaatatttatctttggctaatttgttccttcagctgaatgtagttttggtattccaaagtctttgaaagatgccctttttaaaaatctatcaagcaaactagatccttatcccatgtggccatgtgtcagtgctttatgtttccagttcagactttacttggttcattcagttagttagagcgtaaactggtcaatctctccgactctaatgaggttcctaccattccaccaattattgtacatggttctaagttacttaatgtcccttttatgatctgtgcaggtacttaaccttag

SEQ ID NO: 36666 - DNA, 545 bp, Sorghum bicolor
  Intron number 4 from transcript Sb09g019690.1 (locus Sb09g 019690) derived from phytozome v7.0 (chr-ID chromosome_9; pos 48541193 to 48541737 reverse strand)
gatcggtatgcctctcttctatataaaagtagtagttatgagtcttctcatcatctgtaactagtgcagaagtttcttcctttttaaaatgcaatgacatttaggacaagttaattagttaaaaaatgaaaaaagaacatcatatatttaaaaaaggagggagtaaacttttaagctcatcaagtttgcagtaaacatagactatatttctgatggatattcattggattattgctttcttatatgctttgcaaattgtttactcttgaggattttgtgatatcttgaaataagattttttatgtttttttatccgtttgctacatctgcatgttacatcaatgtgtggttgcattaacaattatggagatattttgaaaaagagagagagtagttgtggccttgtgggtattgggtatcatggcgagtcacaaactaactgttcctttcaaagctccttgatgtagccattttgatgtgcttatcttagttgcttgtttgtttactcaggtgaaaattcaaaaagagagtgaggtgcggctgaa

SEQ ID NO: 36667 - DNA, 1018 bp, Sorghum bicolor
  Intron number 3 from transcript Sb03g045160.1 (locus Sb03g 045160) derived from phytozome v7.0 (chr-ID chromosome_3; pos 72433594 to 72434611)
tgtccgcacagtactataattattattatttgtttctactctctaacctactgtaaatattctagaattgaacatcttgagttctaatgctgaaaagggacggctaaaatcatgtctgaaaaaggaccactgtggatgctgttcttgcctttttttatatatctctgcttcagtgtatgaaatcttgtgacacgagctatttcatggcaatttctgtgttagtgctatattttttcctcagttaaaaccctggctaataaatcgttgatagtatagatccacagcaactataccagagctttgctgcccgtaacaaatgaagcttagatctacatttgtactatttgctgaatatttattacctacagtactatttggtttatttgatttgaggcaaattatgagatgacaccagcaggaattgctgcaaaaaccatcgtgtctctaatgccctagcaacaaaagcagatacattttcacaacaaaactacacatgaatgtgatatgatgtaatgtgaaataggcatgtgctaatattataaataaagtggatacagtagtgaactactatggtcgaaacttgaaagtgtaataatctaatttctgtgcatatttgtgtggtcatgtacaaacatgacaaaatattactgtttctatacgaattatggagaggctcctacctaaattttcattgaaaaaataaaaaaacaatttgtcacaaacaaataaatatggatcagagtgagaaagcagaagatgtattactgtcgtttcactgctttactgtagtacctctgtaatgtcatttttattacagtagtcactaccctgatttactgtagaaccactatggtatcattcctatcgaaataccacacttcagatatactccatgtatctgtatacaattcagtttagagatgcttaccaagttaattgagtttggcaaggatatcttcctttaccccctggcttgacattttcactcttgtttgtttattaggttctgccccatctc

SEQ ID NO: 36668 - DNA, 998 bp, Sorghum bicolor
  Intron number 1 from transcript Sb04g026990.1 (locus Sb04g 026990) derived from phytozome v7.0 (chr-ID chromosome_4; pos 56910807 to 56911804 reverse strand)
cttccctctacctcccacggctcactgcccacacggtatgctttctctgttcaggttcctaggtgatattctgtgttagagattgggggtttccaacatgaaattgttgtgaattattgtgttgttgattctatgccgtctccatgcaagtacacactacacaggcaccgcgcctgacagtgagaactttggttgcccatccaatagctaccggcgggtgttatgtttcttcagttgtttaccttcagtaggccattggacgtgggtcgatcattcttgtttaatttgggcagtgggaacaattgaggaaatctgtagtttggtttagttttagactcttagtaagtgtaccaaaatgctgtctatttctgattatttctctatatgattttgtgcgggaagaacaaagagcctttcaattcatggaagaaaatagaacctgataagaagaaagcacaggtagttaagcctgcattagcacaaaatctgcatatatttcttatgtcatgaactcataatacaaagatattaccaaggaagtgcagttagcttttttaggttaagaaagaaatgcaattgcatactttgcagatattttgctcagtgcttgcataatcttatcttccaacaattgagattatttggtaaatatgatgtttagtgtcactctgtggtgttcagtgatactgagcttaagttttgtattgtaattatgttatctaattccaagtataccatatttatcaaattcacgttatgaacatcttgatatccactagtcatgggtatccagaccattagaacatgcatggatattttctgtctaggtctttcactctgttttgtctaacttctaagtcttcttttgatcccaatcttatctaatccgtttatgttactatttacgcaggcacaagagcacctttctgtaaacttataacaggtttgaaggaaagaatagttttggtgctgtgattgatttcactgtgaggagtgaa

SEQ ID NO: 36669 - DNA, 742 bp, Sorghum bicolor
  Intron number 1 from transcript Sb06g020850.1 (locus Sb06g 020850) derived from phytozome v7.0 (chr-ID chromosome_6; pos 50270218 to 50270959)
aggaacctttacactctggtaagtccataactagttcattactacattgagcagtattaagattagttaaagtgaatacaaggtattaggttcaataaaaaaatcatatgcataactgcacaagatttctttttataaaactaagtacacaatctcttatttgtaacatctgcttttggagttcatcacctttagttgttttcagtgcccacataacaatgaaaacaaagaatctcaactttccataaattgtacaacctcttctttatggattgaaaatgacctctgcacttccattttatttcatgtaccatccgtatgtttgatagcatcagcacatgtacctgcatcttgtacatggtgctggctagaatcaaattgatgtccttaataagtacaggaattttgaataactatagttagatgcagaaatacatgtcacatgatatgagtttcgcattttagtaccgttatgatgattgatgaagctatcatagtagtaccattaaaacaagtctgtaacaaagaaactttacttcattcatcagggttaacaggtaccttgaaaaaaaaatgtctagattgtgctggttaagcaaatagtatctttgtaatcctctgaataaaagataaggaagtgtggtagtaatttcagagaacaaatgttactggataagggaactattatatttatttgtgagaaatatttccttgacataacaagttaacttgctactaggtg

SEQ ID NO: 36670 - DNA, 806 bp, Sorghum bicolor
  Intron number 2 from transcript Sb07g003440.1 (locus Sb07g 003440) derived from phytozome v7.0 (chr-ID chromosome_7; pos 4141127 to 4141932 reverse strand)
cctctcctcctcgacgtcaaggtccaccgcctggcctgccttcctctccccctctttgcttaattgctttgcttcctcccctttttgcgtgttgagttgtgctttggggattagcattcgtattggtttattgggggcgattcgtctgtaacgaatagtatatcgacccaagtaatggatgaaatcaaagatttgagctttattgggaggcaagctgaaaagaataggacattcttttgtgttttgctgcattactggcaaacttgctagtaattgattagggtgttcatatttagcagcttgttagttagttgcattgaggatttgggttatgtgcatccttgccagattaccatgataccactcaagtgccttgtctaatacagtttcttgctgttgggtgtctacttggtttagtttggatacaggtaagctttaatgttgtggttgattagcaactgggtttccagtgatgtagaattgcaggatatagtttcatgaaagccattcactgctttaatatggcttcatggtacggaggagcacaaatttgatgccacgtttttagtgtaagatgtcctatcatctgaatctgaattaatctaatacaaaatttctggaacaaacaaagtaatatttctcttgctgctgcctgctggtaatctgctaaaccatctgatgatgtggtttgcccttggtagttggtactacacatcaagatgctgatatttttctgtatggatctaacatgagttttgtttctgtcatcagggtaagcttgcagaaaagactcacgaggtgatact

SEQ ID NO: 36671 - DNA, 796 bp, Sorghum bicolor
  Intron number 1 from transcript Sb10g028320.1 (locus Sb10g 028320) derived from phytozome v7.0 (chr-ID chromosome_10; pos 58173745 to 58174540)
gtcggtcggtcagtcggtctcgtcgtctgttgttggtgagtgacctccagctgcctcgtttgcctggatagatagatttccctctccgttggcttcgttcgcagtccccttcgttggttcagtccactcgccgatttgtgtgctgcggcgtgccacccagctaatccatccagtcccgaaacaatccgccgctacctcccgcctgtggttcatcagcacgcaaaatccgcccatctcagttggcgccgcgccgtagaagagagtagttagttgttggtgcccgaataaggcgttcgcgccgtgcggtttatttcccgagtttttttggtgggggacgaggagttcaactgaaccccgtctcccctcctgggccacgcggtattttggggtcgaaatcagattctgacacatgcgcagttattgaatctcttctgggggtaaggaatttttctaggatttgtttgagttttaccagaactggcacaggtgttgttattgatctcttctgggggtgaaggaatttctctaggattcgttttgagttttaccagaactggaagttgtggttgtggcaaatcattaggttggtgagttcgtttttagtgtcaaatagtcatgtggggttatagggggttcattacatacatggactgattgtggcattaggatgtttgttccctgcgatacaccatcattgtcgtgattgaaatgctcagtctattcaccatcactcacagaatttgcacactctgtttttgaaggagcaagctggaattgatctggttgccctattggt

SEQ ID NO: 36672 - DNA, 605 bp, Sorghum bicolor
  Intron number 3 from transcript Sb02g000510.1 (locus Sb02g 000510) derived from phytozome v7.0 (chr-ID chromosome_2; pos 456694 to 457298)
ctcgtcgttgcttcatcatcatattttcccatttgttgttctgttgaagaaataggtaattttatcattgtttgattgatttttcggtttgactgattttatcattgtttggtctgtttccataaattaaagaggagtcttttttgtggtagcttgaggtgacccatcttttgtacaacgtccatcagagcattaattctctgtgactaataatgcaacatataggctgctctcctgtcatctgcaattctctctcaagtcaagtgttagctttgaaaacagaccattttaggttattcacaaattggttgctttaatttcttttttgcaaaattgccacttgccttaagaaaccatgttgagtgcatataccaaggaaaaaaaaataaaagttgtagtctctccattctatgggccatgtactctacttttcttgggctgctggccactctcaggctaggccctctatttgagagctcgatgggctaaatagtaggcccactatcatcagtactatttctatttgcatcatgtgatggatgtgtgtcacttcactctttttttttccaggcgcggtgctcgacggtgtcgccgcggctgtacgg

SEQ ID NO: 36673 - DNA, 574 bp, Sorghum bicolor
  Intron number 2 from transcript Sb04g023890.1 (locus Sb04g 023890) derived from phytozome v7.0 (chr-ID chromosome_4; pos 53590445 to 53591018)
aggtaaacaattgtttccttcagctactactccaaatgtagcaaaatggaaattatttcttgtatatataagacttaaatgattgattttttccattttgttttcttcgaaagcttttcattaggctaaattagtgtcttgtttatttctgtattttaaacaactttttggatgcacctagtcttagtgcactgtattattatatttccagctattgtttaaatgtttaaacatagtaatttgtcaagaggtactaggacctgccatatgcaaaagggaggttcacatctgaggatccttttatgagcaaaagagggtcatgagcttgcatcgtaactcaagctatttttttagctgaaaagatttcgtatcataaatttaataataatttcatgaatttgaatccttacaagtcaagttctcaccaattaccttctctgcactttgtttgcctttgcagaaatgtttatgcttccttgctaatttgactgaactttgttgctgtaaatagattatgaattttattctctgtttatcagtcgtacaagcctggttacactgccccaccccaagt

SEQ ID NO: 36674 - DNA, 953 bp, Sorghum bicolor
  Intron number 3 from transcript Sb07g023230.1 (locus Sb07g 023230) derived from phytozome v7.0 (chr-ID chromosome_7; pos 58133611 to 58134563 reverse strand)
tggtcatcccgaccttcgacatcgcattcctgcaccccacattttttcaagcttgagggtaagcattcaattataaacaccagttagtcaaagaaagtgaacagctactatagcctatagtactgcattgtcactctcctgtaaacagaaatagtgtgcatttggtgggtgattctctggtccgtttccagagaggagaatcacccctaccaaacgtaaatcgtttgtctttagagtagaaggatccctacgtaccaaaccaagttttttttaccaaaccaagttatacaggagaatcatagtaggtggtcgcacattcaggccatcatcctcggcgacgacgacttcttccctacgtaccaaaccaagttttttttttctgactaaaactctttcaatgagacaagtctgtgtctgtcaagccaacgttatagcagaatagccagagcagttagtatgataaatattgtactaagcatgccccacccccgtctcccggttgcccattcaggcgaatttgctccatatgcatcactgtctgctattgtcgtatctctccggtctttgtagcttaaacttgggagcaaaccaaagacaggttttgatttgatggcatatgtaccaactgtacttagtattttctgtatatcttataagaggctttaatctaaaaaaaagatcttataagaggctagctatactactagtttcagtttgatccagccacgatcgatcaacaactttgttacttaattatatgatcagatcggatcaccatcattaagacattaactactgctaatgatgcttatcatctagtcacaaatgtcagcgaagaatctttttggtgtttttttaatatcaacgcgttgcatgcgtgctgacaagtgacaagtgacaattgcccttgtttcgaatctttcgagatcagctgaagcaccggccgtcgaaaa

SEQ ID NO: 36675 - DNA, 778 bp, Sorghum bicolor
  Intron number 1 from transcript Sb01g046585.1 (locus Sb01g 046585) derived from phytozome v7.0 (chr-ID chromosome_1; pos 69754151 to 69754928 reverse strand)
gcagcgaagacggcacccgacgtgttcacccgctggtcagtgatagactatcctgttgccacttctctatgttttggcgtgttcgaacaaaatggaggagctatgaactccttgatcgatgtgtgagacatggcttaggtaaaaataaaatagtgtgcattgctttgtttagtcgattcttgactcttgattcgtgactaacacttgttgaatcaaatactgttcccgtccccatcgcttggtgtgtttagactggatgtgttaggccgatgttgcccaaagtttatcagacacagaatgagtacaaataatctgattgctgtttttttaaggttaaatttcaaccaaacattggaagatggctttgtggatggctttgtgatagtgtgtgactgtgtgaaatggaagaggaaatgttcaatattagttgagataatacttttttgtggtgtgaagaacaaccaacaaggattacttgcttttgacaaacaatagtgaatcataggcatgttgatataagaggatcagtatgcatgttgatattttgaaagctaaaagtagtctcctcatgcacaacgatataccatactaccaggtgaaaataaaatcagtttggtgtttttctttaaaaaacatagggctgctctaagtctagcgtttatcttctgtatttttgttttgccagtgccatgatttgcttccatccatatctttatgggatttaacttttttttttgttgcaggaaaaactgcctgttgaacagttcgttggcagaaa

SEQ ID NO: 36676 - DNA, 780 bp, Sorghum bicolor
  Intron number 2 from transcript Sb09g020640.1 (locus Sb09g 020640) derived from phytozome v7.0 (chr-ID chromosome_9; pos 50038635 to 50039414 reverse strand)
agttcttcctttttgtaacagatttctgaaccaaggttggcatcctttgcctttcagtttctgtgtatgtgttattgttacttttatatgcacttcttaatagttttgcatacaagctgctataagagcatgatttagctagttgctatttttagctatccttgctgtcgacataatctgctaatcttctagtacaaccctgtccatcctttttgttagtttgtgttgtggactcgtttgtgctaactttgtcactgatttaattcacaccaaggatgtacagcaattacttgtcctgcacattatggtttttggccaaccatatattaattacaaatccctaatggataccatttatgcaaatgtatgaatatttcgctagcgttttaaatcacaagagctcatacaaaagaaattggtaattgtaaaattcttcaatcatatggttagttagaacacttcaatcgttatctgttttgtgaaacagaccgttgttactttagaatctttgttatgtaagtcgttatgctgttgagtgctgagtgtggtgatttctgtattctgcttcttgcagtggtttcagttcctgctttagacatgtctgaaaatattgcctgggtggtctccatttctctctgatcttgaaatagacattactagcatcctctgttatatggtagtgtttcagataagatatatttgatttcatcccataatggttaacggtttgttttcattaatgcagaaattttgcgagcatcttctttgccacctaaccca

SEQ ID NO: 36677 - DNA, 636 bp, Sorghum bicolor
  Intron number 3 from transcript Sb01g047960.1 (locus Sb01g 047960) derived from phytozome v7.0 (chr-ID chromosome_1; pos 71058977 to 71059612)
ttctcagctagaggtaggttacaacatacgaatgtttcgatttcattcactaatcactagtgtgccgacagattggcacagtcatttggtttctttattacatgaatcgaggaaagcatgctggtcaactcctagtgtttataattgtccaattaatgaactgaagtcaactgatatagaaagtttgtggtatacataccatgatctgtatcttgcttttattagttcttttcttaggccttgtttacttgcacccaaatacccaaaaatttccaagattcctcgtcacatcgaatctttagacgtatgcatggagtattaaatatagacgaaaataaaaactaattgcacattttggtcggaattgacgagccgaatcttttgagcatagttagtccatggtcagacaataattaccacaaacaaacgaaagtgctatagtgtcgtgaaactttttccttcgggaactaaacaaggcccaaggtagtgccatcctcaagatttgtatgtgagtcattgatgagcccttgtgatcagactgtaattctactagtgcataccttattttgaattagcctgacattgttccaacctttttcagagtctgagattggcacttgatttctcaacttttga

SEQ ID NO: 36678 - DNA, 970 bp, Sorghum bicolor
  Intron number 1 from transcript Sb01g008090.1 (locus Sb01g 008090) derived from phytozome v7.0 (chr-ID chromosome_1; pos 6999574 to 7000543)
tcaataagaacacctcctcctctcgccgccttcaggtattgacacagctctctccgccaggtttcgttgtttaccctagtatttgtgtgtgtccggggcgaggcatgccccatgcgctggctgagtgcagtttgagctcaccagcgatacttgtttcgaacactgagatggtgatgtgtgcgatcatatgacgaatgacaaagaaataggaaatggaattattttgccttcaggtttctcatgttggtttctgtgcgataaataggaagggaaaatttgtgttagctacagttgaactcttattacatttgtttttccgtaacaattgtatctagaatcataattatagaatcaaatgttatttttttccaatgatgtcctacatgttgctccaattggtaggaaccaaattatgacatgtaatgagtggacatagcaccttcagatgatcagatatctcatgctcatcttctctcacacatatacacacaaaatatcttctctgtaggcattaagaataccaaataccttgatctcaaagttttttgatgaaaggatagcctaatactatttctcccatttgtaccaaacttgagcagaataacacccctacttgttacagaatagactcctggcagcatagcttcgccataatttgtatctatgcaaaaacgaccgtttgtgtgattcaggaaagaaatttctagttttatttacttttatcagaacaattagtataagtgtcacagcctactgaatggaatctgctgcatttgtcaagaacctacaactttgaaagtgctaaggatatacccatgttcatttctgctaacaattagcttcacatctgcatcgttggaacttcataagtcaattcatcatatacagcctttcagcaaactcttgcccatattcctgacacagaaattttacagaacaaacagaaagaaactacagtgagctcaaaacc

SEQ ID NO: 36679 - DNA, 1030 bp, Sorghum bicolor
  Intron number 1 from transcript Sb09g027690.1 (locus Sb09g 027690) derived from phytozome v7.0 (chr-ID chromosome_9; pos 56766687 to 56767716)
acctcaagcccgacatccagatctccaagaaccaggtttgtctctaccctttacccgcgcttagcatgtttgttatcttttgatgagagaaatcgtgtaggtaggtttgtctctaccctttacctgagcttagcatgtttgttatcttttgatgagagaaatcatgtaggttaggatatgtagttacttacatgggtaatgttcggatgcctgcctcattaatgagttagtcctttaatgctacttgtatgtgtatgcaacaaatttccagtactctgcagaattggtgtgttgaatttttagtgctaatgcatatagaaatatatttttgtcatttttattttgttctatcaattttccatttattttacatttgctcttgttttccaatctgtctcatgagctatagacctatatagcctgtagtatattgtttctattcagcatttcaccatgatatcaatgcatatctactagtattactgaattttacatatcttcgtattacgcatcatgtgagtttatagcctcatccagtctattgtttgttatcagcattatacctcacctggtccgtcattgttctagatatgcttgggcacacatgtaatgttgaactctgttaatgtcattgtgttctatgttaagctctgtgccaacagtgcacttgtgtagactaattttaagagtagtgtttattttcaattgtgcataggaactgtagtctgcaatggattttctgctataatgtgtatcataacctactatcatctagacatgttcaaacattttatatactcatgaatccagagcagttaggtgtttacgtgtaaattgtcttttgttgtgatgttggactttgaaattggtagaaaattctgttacaggatgtaatatatacgttcagtgtatactaattattattattttttggatggatgattatctactatttctctgattgatatttaactgcttctggtgcacttgtatagatcctgtactgctcaagcttgagctggagcgcaga

SEQ ID NO: 36680 - DNA, 797 bp, Sorghum bicolor
  Intron number 1 from transcript Sb10g023910.1 (locus Sb10g 023910) derived from phytozome v7.0 (chr-ID chromosome_10; pos 52665292 to 52666088)
gatcggcaacggtggtgcgattcggatgtaagtgtgtccgggtcagcactctagtttttctgctgtatgttgtttcgaattttgtttagggatgggactgaattctagattaaactattgaagttgcttgggaatgattgaatcctgtttttgtgggtgcttgggtggtccacttaatctattaggaaatctgataaagttttggtttccattttgcgatgaaattgtgaagcgggcaaggtgctttactcacaacaacattcatctcttatgtacgagtacgactaaaggtccaatgtcttttactgtttgcccctccaagctagtttggtttaattctaaacttggcgtatagtgtttcagacttgataccagtatagtatccaataatgtaacatatgtgcaatactttggttgcgtcgtcaattgtttcttcttcagttgtttggtttatgcctgtctccccttgtactctctgtttgattgctagtttgcaaatatttgcataagttcaaaagccaaaaggcagaaccgtgtggttgtgacgtggttatacttgccagtctgcttttcagttcaatttgcttcaggcttctcacgttatatattttacaatgtgttaggtcactcaatccaagtttcttaatactttgctctgatccactatacgattcctgttcaagtattttatgtttgttccttttgaaggcccgataatacttatgctctaaacttgtcccatttctgtgtttgatgtaaaattgtaaatatctgtggtttatgcttttgggtgcaga

SEQ ID NO: 36681 - DNA, 948 bp, Sorghum bicolor
  Intron number 1 from transcript Sb02g031330.1 (locus Sb02g 031330) derived from phytozome v7.0 (chr-ID chromosome_2; pos 66268269 to 66269216)
cacaacaggtgtttgaggtaatgccccggtggatgctcctgtttatttttcttcgattaattaatgtgctcagtgctctttaatcactgtcactgcattttcgagtcatatacatacagtcacttgattatcgtgtgacttgatgcactggagcaatttgggagatgctccccgcgcttgccaggcgctgcacttgagcaatttgagaggtgctccctgcgcttgccatgcagtgtactggagcaatttgatttgttcttttcttttcctaatgctactatgttcatttgtttgtattataaaaaaattgggattagaacagtttctgcagtaattcgagttcatatagattttccgtaattatttatgacaataaccggtcaactggaggtgattgagatgtaggtttaaggaaaagtagcgagcctaggcacatcgtgagggaaatttgagcatgcagcatgtattcatactttttatgtcttattctgtaaacaaactgattatgtctgcacagtgtgcagagtaacttgagttcatttagatttttcataattattttattataatactctgaggtgattgggatgtaggtttaaggaaaagtagcaagcctaggcacatcctgagggagatttgagcatgggtttatacgttttatgttttatttgttctgtaaaccaactgattatgtctgatgtaagaagtttgtatgctttgtgatgttcaacaaaggaaataacctaggcccttccgtgtgtttgttctttcctcacctatctaataagtactgtcagattgcattcattcaaaaaatgttagaaatccagacttttatgaggattatttatttatatgtccaactatacacaaagaagggcataatgatcttcttgccaatgtgttgtgtttattcatggtctaatgaatatttgctttttaaggctc

SEQ ID NO: 36682 - DNA, 838 bp, Sorghum bicolor
  Intron number 1 from transcript Sb02g022140.1 (locus Sb02g 022140) derived from phytozome v7.0 (chr-ID chromosome_2; pos 54592736 to 54593573 reverse strand)
aaggcccagatctgggacaccgcaggccaggagaggtactcaaccccattctctttcccactcttcttctttttctctctctcggtttattttttacattcatcttgtgttggatttacattcatcttgaatgttcatagtatgcattcatgaggcattcattctctggttctgtgaagaaacagccttgcaattgcaatactaatgtcctcataacagttattccaattcattaattcctactatcgctgccagaaagattccgtgtcatcatggcttagtgatgtcctgtcattgtcttatctggtaatacgttgcgtgattctacattttgtactaccctcctggccgcattaaaaaaaaaaagctgttcttttgcaacctctataggtgatggacaataggcaattaggcagcacctcttgtttaatagtctgtctacaaattaacataatgtggtggcacttggccagcccttctgcataatgtaaattctgcagtggttatgtaatattctaggatcctttcgtattgtttgtgtcattgtgtagacatcttcgtttttcttgtgatgctttgcacctggtggaatgttggctaacatttttttgactttgtctaccatttccctaagaatataatgcttatttttgttggcattttgtcaaattatgttctttgtaaccgtctccaatatgatgttttgtttggtctggtcagctgtactatttattgcctaatttcgctatcaaattttctttggatggagcttaagtttgtcatatatcatcctccctctgtaggtatcgagcaattacaagtgcgtactatagagggg

SEQ ID NO: 36683 - DNA, 472 bp, Sorghum bicolor
  Intron number 1 from transcript Sb06g017970.1 (locus Sb06g 017970) derived from phytozome v7.0 (chr-ID chromosome_6; pos 47433234 to 47433705)
gtgaaggagaaccaatattatccatctctaaaaaggtaacagatcataactgcataatagtaacccttggacaaaggttgcatgatttcttgattttccataattttgagtgtttcacactttcactaatcgataggtccagaactgtagctctattaaattgatctaattcctatgagcttttttacattatttcatacttttttggacaggctagctcttaaattttgtggagatgtgggaattcttttctgtttcagctcccatttatgataatgagactagctcttagagaacaaaataacaagaaggatgcagaacttctttttcttgagaaatggcagaaagataacttgtgaaaaacacatataacatatttgccatacaatgacttcatttcctttttttttgtgctcaccatattaataccactacagggaggaattgtccaggcgctaagcacaaggaacaa

SEQ ID NO: 36684 - DNA, 986 bp, Sorghum bicolor
  Intron number 1 from transcript Sb01g022470.1 (locus Sb01g 022470) derived from phytozome v7.0 (chr-ID chromosome_1; pos 28570453 to 28571438 reverse strand)
ccttcggtgacgtcagagtggtgagatcttggaatggcttcttattagttgctaaagttcggtggaatctggaaatgcctaatgtctagcgccagtatggcaacaaatgtctacaaatagatttcttgtactagaaaagaaacaaaatttgatcctttttcttatttatttattataccagtatgaaagaccaaaaatggatttcgagaggaagaaaaaatgaagctagactcttctccccatcttgatgactgatggtgcttgcttatcaactaaaattatcatattgccttaattctgtctattgatggctgagatctatcagaagtcgtaggaacagaggtaagactgtctgaaggtgtgtgcttggggcttctgtgtcactgcagtcttgggtttggatgcctatgatatattgacagaaatggaaatattcaagctttgttgaggttgaaagttttctcattgaacaaacattcttttttttaacacaatgaaccaccattgttcttaacacaatgaatcaccaccattcataatgaagcattgaaactctggaagatattttgttctgttgtagcttaaccagtttgaacttttttcaccatgtttcaactgcatgatttcacttgatctgattttgtaatgtgtaaattgatggatacagtttggctatatcattccagcttaatttgagccttgaaaaatggtaacatcaatgtgattcttgtttttttttccacatggaaaattttcacagaaccattaaaaacaagcatagacattgttggttctgcacatactagtattgtagtatgtgatttggaaagtgcatttgaaatgctgtaggttaacatgttcttcgtagccttaataatgtactaaagagtgatgcaatgtttgtttccatttcatatggagtatttgcagaattttataggctaataaagaccctgccttttctttctccactgcagataaacagt

SEQ ID NO: 36685 - DNA, 584 bp, Sorghum bicolor
  Intron number 1 from transcript Sb02g036310.1 (locus Sb02g 036310) derived from phytozome v7.0 (chr-ID chromosome_2; pos 70732352 to 70732935 reverse strand)
cgggctcatcttcggatacgacatcggcatctccggtacggcgcccgccaagcacctcttctctctgattgatttgctgttggtcgcggtattttcagtttcttttttttttccattgctgtggactgtggttgaaaagagagagagctgagagggaagaaaaaatggcagtccttgtttgcatctcgcacgctgctctgttcttgcgattttgcgaatcacgcagggtattttctcgggcgcagttcagttcacctaccgttctgtcgggagactggacgcatggcttccgagcgtcttttgcgcatacatacaaaactgcgatattcccctcgttttatttatttcctttcaccagattcttgcaaacccaagaagaatctttccatgcatcacctcgccatctttcattttcttttgtttttattccctcccatacactactagtggttctttaagttaatgattttggataatctgttctttcaagcaaaatcaaaatcaaaatcagtagtaataacaacagaaaataggttgctgacgtgtttgtgcaatgctgtggtcgagcaggtggcgtgacgtcg

SEQ ID NO: 36686 - DNA, 1032 bp, Sorghum bicolor
  Intron number 1 from transcript Sb09g015460.1 (locus Sb09g 015460) derived from phytozome v7.0 (chr-ID chromosome_9; pos 38825370 to 38826401)
gaggtgtcctggtcaccgtcaggagcagcggccaggtgattatcgacttcttggctcctgcttcagtacttggtttggtttagaggagtaactaattgggtttcttggatgaggctgtaagaaagctggagtaaggatttccaggttattaggaagcgcaagattggaacgtgtctgaggaaatcgatacatcagtattcagcactgaaaaatattgctgtggttttaaatttgcttctacctatgtgattgtcctgaattggactgcaaaatgttactcatattggagacttttgtatcaatagggtgacagtagtgtgatgtttgcaacaaatgagtggtattgtgacaaaattgaacatctagcttgtataattggacagagtgccctgctgaatttgaggggaagaagttgcaactgctgaacatatcatcagttcagtaatttggatgcaccttcaataactagtaataatctaacagacagatcagaacctcaattgtctactttcgtgctttaaaaactttgatgtttttatcacagtacgaaccgcatctgaatagctagtgcaggattcaaagacatataaaaaaagaaaacgcccttagtacatcaaggaatccccaacacatatgggtgttctagagagtttttaatatgtggtgcatggaagttggaagatttctttaaattttgactcatcctttctaattcatttctgaagaaggcattaattgtttggtcaaatagatcaccttttactttcatgatccaagggcaagattttaactatgattcctcattagaatacttgtaaaaatagtgcaaagtcatcatagcatatttttgaagagaaatctaatggcattattattttcatgtggttagttcataggtgtttcactatgaatgttcagttatcaggaacttgaatacatggatccatggacactgatatagtgttgtgtttcatatcatattttttcctttattcagggtgagtggcaagcatttagtggaaatagtttgga

SEQ ID NO: 36687 - DNA, 956 bp, Sorghum bicolor
  Intron number 1 from transcript Sb06g018280.1 (locus Sb06g 018280) derived from phytozome v7.0 (chr-ID chromosome_6; pos 47714331 to 47715286)
actacctccacagctgcttcgggcccagcggcgaggtttgctttctctcccgatccggactcctccgtactggatctcatgaatacagctagatttgtaccatttccgcgcgttgatttgtgtgttgttgccccagattgatatagaagcttaaactgcgctcgatttttgcttgctgcaaataaaggtgccatatttttagaatttggacgttgcaaagttgcttaaggcgccaagttcgaggtcattcaatgctgtacgggcagaatgctcttgttgtttggtcctgtttggtttagagccgtgtaagctttgaaatgtttttttggtatcgttttttttcctagactatagaagaaggggtcatcttattcccttggaattggtgtatgcgaggtgacaaacgtgccgacctctggtaggatttatatgcatataacttacttggaggaaatggtcttgattcttgataagtaataaacattttgaatgggccaagttagcttcttcactttggcggatcctgtatgagtagaataacttttggtggagcaaaaggaagcaataatttcagccttgggccaattatccttttcggggcatgcctatgctcactgatgttgacaggaagagaaaagatgcctgattataggatccctgtgatgggctactgatacaatgcctcttcaggagcagagataaatggacaaagcgacttgtatctattcttttttttttgtagtagtagctaccaggaacctttcttcaaacatagttgaaaatatgtttatcggagacagatgaggttaactgccaatcaggcacaccttactatttcttctttctgtttttgtgtgtttttgcttccataactttttaactagtaatcttattgtcttttgctaccttacatttttgtaggtggttacaataaaagttatccgcaataggcaaac

SEQ ID NO: 36688 - DNA, 1055 bp, Sorghum bicolor
  Intron number 3 from transcript Sb04g033920.1 (locus Sb04g 033920) derived from phytozome v7.0 (chr-ID chromosome_4; pos 63822954 to 63824008 reverse strand)
ccgtgccattgggccgctcaagaggtagaaacagagatcctgcctttgccttgtgctttgcttagctaaagttactgctgatttcgatgctgtactgcctaactgggacagactctgtgcccgatcaatatcataacacatgacttgttaggaagcgagccagctaatactaatattctgaactagctagtactccatcagaaagcaacattatcttaagtatatagtagtagatagatgatgatgtgcatcttttaagcaacaacattgaataaagagctggctggactaccttccaagggaaacgtttgtgggcatcacaacaaggattaaaaaaggtgcagactgagcagagctaaatccaaacttaaattctatctgcacgcaaaattgacattagttgtagcttccacttcgggacatgtggggaaaagttttacatattatcactttgtttttctattaatctggcctggcatcatatttgagagttgtggctaatcacatacttctgtttaagtacacattgtgagctgcaaggaagttgtttttaatctgttctctcatctatggatgacagtttcaaactgttttgacaagttcagttgcagaaaattatttgtatgcttatcatcacttgttgatgttgaaacataatacttcatttgttcaattatgaatcccttgatatgcttatcatcatttgttgatgttgaaacataatacttcatttgttctagcatgctgctgtgtgtatcatgtacagtggctcagttttctgctaggatgtctgtctggatacctatcagtgatcactcttcttttgcagctggaactgagtctgagtgctgccatcgttctgcatttcattaaagtttcgttacaagttggacagccagttgtctgaaaaccctttatgatagtcgtacaagtgcctgactactatgcctcctgctgtccgatttctgtatcaaatcaaagccgcaatctgatatctgatgtatcgattcctttgtacagggtgttcttgggcagtgtgagcaactactgtatca

SEQ ID NO: 36689 - DNA, 925 bp, Sorghum bicolor
  Intron number 2 from transcript Sb02g011300.1 (locus Sb02g 011300) derived from phytozome v7.0 (chr-ID chromosome_2; pos 18818028 to 18818952 reverse strand)
aagggtgtaagctctgaatctcttatgctgtttgttcagttattgctacctttgtaaagttgctatggtcgaatgtgataggaccattaaaactgtcccagcttgtgctctcatggactaatgtatgcttttatagctctgtgtttgtttttacttttttttttcatatcaacataggatatgcatatgattattctaaacacagtatgtaacttattcatatccatggcttacttatgcattgtcttagatatcttctgtttgtttttgatagtcaatattttatactacaagcactcagtttgtcctgtgctaacagctctcttcccactcatgcatttgctaagtttagttttgcttatgcaatgaaatacagtacacacttatgtactcatattcagtgaaatctgtacttagtgatttctttttgtcttgaagtgtataaagtactagttatggcacctgtgcagacatatagtttatcagggtttgaccactgaattttggatatttatcttcttatatacactgtgtgtagctgtttctccttaaagacattactaattcatgttcgtcttttttgctctgttcattaaggccttttttgaatagatgaaatccctggcccgtccacgtggatgggcccagtttaggcccagccaaactcatccaaaggtgttttcatgaagtcaaatgttaacataattcgaaccatatggtttgctaattgtgccacttgcttgttctggaacctccactcccaaaaaaacttatgtcattcactttgcagttgcatcaaataatatcatgaagactcaggtctaggaagaaagattgcttttaaaaaaattctggatagattaacattggtatgttacagcttaagcgtcttttgcaggtagagtattgcaggcagctttctggt

SEQ ID NO: 36690 - DNA, 592 bp, Sorghum bicolor
  Intron number 1 from transcript Sb02g011300.1 (locus Sb02g 011300) derived from phytozome v7.0 (chr-ID chromosome_2; pos 18819097 to 18819688 reverse strand)
tgctgcctggggcaagctcctcttctccgccgcaggtagcctgccctgctcacgcactgctgctgtttttagaactgtttgcttcccgatctgttgtgttgccaacggtaactaatttccgtacatatttgtaagtatatttgttttctggaacgtcgtgtgcttgatctacggttcatttatgttgggcgctcgagattcctgggtttgtttctgtaaggtactcctagctgagaattgatgtatgagacttcagtgcgttagttcttatccatttgattcacttatatatgagtgatcataacacacgttgttcggattgtgatctttattcgcaatgtagggtgtagcatttagattcacagtaaactttcattttcatgctcacatttacaaccacacttggtttagaaagggagcttttcatcctgaatcggtaactgctaggatttatcatggcttcaggactactgagttgtatagtaagacattcttctttgtgtaactaccttgaataaagtttgtgatggtcttgtatgaatgttcttgttctgcagatttgctcgtagggttgttcatagacaccattctg

SEQ ID NO: 36691 - DNA, 915 bp, Sorghum bicolor
  Intron number 1 from transcript Sb05g003730.1 (locus Sb05g 003730) derived from phytozome v7.0 (chr-ID chromosome_5; pos 4300452 to 4301366)
ctgcacaagctcaagctcagcttggtaagcttcctaaaaacttttggtaatacttcactgttgattaggaagaggatatactaaaccttgagaagcaagcaacaggcacaacgcaaaatctaacatgtcgcaaattgagcaggactctcaacttacttgagtgtgtgtgtgttttttctttcaattggaagaagttgattgtggaaattgtgcagttcccttggtgtcaaatggagatgtttgtttgaatttatatgggaataaactctcatgcgattcaaactgaattgctttgtggacacaaatttaatgtggaatcgtgcatatctttttagtagctttgctaaatagtatttttatgatccaaagagtacttgtgaatttgaaaaacaaagtgtgaaaataaagattttggttagtatacttaacatatttggaagaaaatgaggctagaaggagcactctgtgactgttagctgctcaatggatttgatatttttgttatgtgcggcgccatataatagaatttggttagaattgaaattacaaatcgagtaccgaatgagttaaggaaggtagtaatattataatcaattggaggttcaaagctcatagagatgttcttctgtgaagtctactacaagtttaaccaattttattttctccatattagatttatataaacggaacttatagagcttgactagaattcaacaatgaaaagtcagcagctggaaatttagtcatagtcttcacttttcaatagattcagtatctgcatattcatgtaatttacactggcttggaacatgtcaatcttaattaagcttatctcgggatatacatgatgcagactgctcttgttcctgtagcagattaattgatgcaccattgcacttcttattgcagaaatct

SEQ ID NO: 36692 - DNA, 1008 bp, Sorghum bicolor
  Intron number 1 from transcript Sb10g027810.1 (locus Sb10g 027810) derived from phytozome v7.0 (chr-ID chromosome_10; pos 57672203 to 57673210)
ctgcggcctcgacgacaccaccaccgcctgcaagggtaattctactttctcgtttaccgcagtaaattaaatgttcttcctctatgtgttcacatgaggttttccagcatccggttaatggcgatcagttgcaaaagtaggtaaagcaagcatctttagcgatcaaactgtcatgctcagtggtcgatctgcgcaaagtaaacatcagctaagtgattaagcaacaagcagcatgccagagcaacgcgaggccgggacaagtgtgcaaagggcccgtgacttgcgtttccgcgtttgttgctagtggcgtaggcatgttggatacgttgccatctccatcaggtcaactgcaactgcagggaaacatctagtagatgcgaacattgaaatgagatccatggtcggtgttgattaaatgctcagagccattaaaattaatatatagctgctgtatgttttcctcagtctgactctgacccgtgatgtgcttagtttatctagctgtgtgccagcttgtctcccatcaaaataccatgacctcatgctctcagcccagtcttggtattttgattaggctgagagcatattttcaaacccgtgatgagctttgtcctaatctagctgtgtgccagcttgtcttccatcaaaataccatgacctcatgctctcagcccatattacaatttacaagcccgttcagaaaatatgtagtgtgagtgtatgacccgacgtaatagacccttggttctgattaggactttcgtactgtgcgtcgaacttcattggggttcagacattctactctgaaagccacataacgaaaccccaaaccttgcactttggtattaggtgcgctgtatctatccaggtgttccacttttgttctacattaactgcacatagatttttcttcaaataatttggtgtgtatcttttgttttctgataaacgtctataaactttcattttacaggactttctcctacacagtctcctccaggtaaacta

SEQ ID NO: 36693 - DNA, 785 bp, Sorghum bicolor
  Intron number 1 from transcript Sb0010s016100.1 (locus Sb0 010s016100) derived from phytozome v7.0 (chr-ID super_10; pos 5726384 to 5727168 reverse strand)
agctgaagctcgcttacgccgctccggcgattcaggtggcccgcactgctctgtttttggtggattgtcttccgagttacatttgctgtactgtctttgcccgcttttggtgctgtgttttcctttgtgtttagtttaacatgtgacaaaatcgggagacttagtccacaccttagatacgttgatgatcaacaaatacgagtacattaatcactctcaaacaatgccatgaaccatgaccatgtggtgctttgcctagaacaaaatgagttcagggtcaagtgattggagcggctagtaactgtaggtgcgggctatttattgcaaaatctagcatagcaagcgctaaatcccactgttaaaaatgtaggaacattgaataagtgacgttgtacaagtttcagttgatgtcggttactgattttcctacttggaagacgaacattttatatcaaatcagcgggactaattttgatctgtggggacaattattggtatcagttttgcttccttgaattgttggagtatttctctagcagtattggaagaaaaagaaatgaagcaggagttttaaacttctagaaggaaggatgaaattcagtcattatatatgcttctaagcccttttcttttcttgttgaaggcagctgccttttcaccattgcctgtagtctgagaaattccttaacagtatagtagaatgtacaacatcacaatgtttgttcacttttactttgtaatgtctgtcagagaaacttggaggcaactctggcatcagaagcact

SEQ ID NO: 36694 - DNA, 380 bp, Sorghum bicolor
  Intron number 3 from transcript Sb03g040846.1 (locus Sb03g 040846) derived from phytozome v7.0 (chr-ID chromosome_3; pos 68354938 to 68355317)
attagagtgtggctacaaaacatccgtgaaactgggtatgtttgctgcttgtgttatatagagcatcttcagctggaagtaacttcaaacagtatattagggtaggcagtgttccacattatttgaaattatcatccagaatcccactctccttgtttagtaccttgagaatgtatccttgcaattgaatttgttgaaatttcccagctatatcttgttcccttttctgtttgatttcatattagtatggtgctaaaatggtggttgatgatatgttttcaatttattaggaaatcttatggtgtccatgcttgtctgttataattgtaattgctccctaattatattgttcatatttatgttgaataacctgtaggtac

SEQ ID NO: 36695 - DNA, 897 bp, Sorghum bicolor
  Intron number 2 from transcript Sb01g027860.1 (locus Sb01g 027860) derived from phytozome v7.0 (chr-ID chromosome_1; pos 48520084 to 48520980)
agctcgaccaattcctacagctccaggccgcacaggttcgcttccttttcctccgccttcctcatcttagggttagttaatcttagggttagttagttagttagttaaggcttgatggatggattacagatgccttcgttcatatggcggatctcgccgcaaacccaccccgcctcttagacttcccatgctttagtaagatttaagagttgtgactggataattgttgccagcctaattattttgagttacttttgtgggggaattgcatagtagtctacagtatttggtcaattctttgttgctcatggttctcaatttgattccgatatatgctgtgagcttcaccagcttgtgtcttgactgataaaactttatatgcatgttgttcgagtatccttctttagttccagtttgctttagtcaaacataattgaattggataaaaaaattaccaaggagttgttctggttatcttcatttgaatgctacaagtgatatctatcacgcatattacatattacatgaatttccactgaactaaacttagatgctggatgaatgtgcaattgctaaagaacaatgatgttgaaagaaaaccagagcaggctgagttgcttctttcaattgttcattgccttgtttaataaaatacctaacgtaattatcgatatctcatgtacctatttgttttctcaagagtttctttgtcctctggacgtattacttactcttgttgtggcttgactacctatgatgattgaaagtttgccaaatttatattgttccatgccatttctcctgctgcgatttttgtgcccttttgtcttttatgattctaacgccaccttttcttctacagaccggagacactatcattcagctctacaacaattt

SEQ ID NO: 36696 - DNA, 855 bp, Sorghum bicolor
  Intron number 1 from transcript Sb07g003080.1 (locus Sb07g 003080) derived from phytozome v7.0 (chr-ID chromosome_7; pos 3345951 to 3346805 reverse strand)
ggtacaccgtctcctccggtaaaggacgacgtctcatgcttgtaattgtaatttcactcggttttttgtattcatgtatatgcgtgtttttactaaaattttgtctgtgcaacgttcactgcaatagaaagctttttttagaggctgattttggccctgtttagatccgaatgtttttttgattttgacacggtagctctttcgtttttatttgacaaatattgtccaatcatggagtaactaggcctaaaagattctcgtgatttacagacaaactgtgcaattagtttttgtttccatctatatttaatactccatgcatgcatgtgccgtaagattcgatatgacgtggaatcttgaaaaaattttggtttttggattgaactaaacaaggcttttttttagaagtttcatagtctctatcaaatagtctttgtccatactaaggctctttttaggtccccatctaaaaacctttcacctattccatcaaatctttggagtattaaaaatagacaaaaaaaaaactaattacacagtttggttgtaaatcacaagacgaatcttttaagcctaattaatccatgatagtcataattgctacagtaatccatttgtactaatgccagattaattagtcttaataaatttgtctcgtagtttctagacgagctatgtaatttgtttttttattaaaacccctctcgatatttttctaacacatttaatgtgacatctaaaaatttttttcttttcgcgaactaaaatggcctaatttacagaggtggtggtcttaggatgtctctctccatacaacagaggggctgcatctaaaaatgtctgcatctgatgcag

SEQ ID NO: 36697 - DNA, 680 bp, Sorghum bicolor
  Intron number 1 from transcript Sb10g027310.1 (locus Sb10g 027310) derived from phytozome v7.0 (chr-ID chromosome_10; pos 57045947 to 57046626 reverse strand)
caagcccaagagtttcctaccgtcgccctccttctgtaagctccctgctcttgttcgcttatgtggggtaactagctgtcgtggctgtcaactgatgtagagaaaaacgaagaggaattggctgactgtgtattggttatggatgcttagagtttccgtgattgatttcgtgtgctggtgtctcctgcaaaacgaaagatggatagacagaattaattttttttctaggatgataaagcagtggcgggttcgattgattcactttagtttgtagtattagtgttgtgtgctttgctttgatggttctattaattaatgagatttcaggaagatactgaactcccactgattgacatgtattccatatatctagttgttttatttatggataaatttatggccactgccaagaagatgacatatgaaagttagggcgtgtttgggcgcgctccagctccagctctggcgacggagcactgtgagcggagtctggccaaatgcacccttagtttatattgaacagaaactgaaacctttatcactaaattgaaatgaatgattggtgcattgtgttgataaacttatcaaattactaatgcgtatgcagcagcatctccaaatatttacttcaaaattgtacttcagattctttctcgaagaaggctaatcctcggaaattg

SEQ ID NO: 36698 - DNA, 960 bp, Sorghum bicolor
  Intron number 1 from transcript Sb09g019520.1 (locus Sb09g 019520) derived from phytozome v7.0 (chr-ID chromosome_9; pos 48364422 to 48365381)
acgcagcggcaccgacgccgagaaggctcaggctggtccgatccgaatccctgtccattccctgctgttacctcgttgtgctcgatctggttgctgtcctatgagcgggtttgttatattggtagcgggatcacactgtcgtgacttgttacattagggaatgaggatgagagcgtcatacactgtatcggattctcaagtttctctgcaattttgaacatcagagcgtatttggtgtatctggtgaatttttttctggcccctatcgttgatctgctagattttgtaggtagcggtaatgacagtgaggataaaatgtgatgttaatgttgacatattatttacatacagaagtgtttggaaaggaaagtagaacaaacaaaaaaaggtgtagtcagggaataagaaaaagcagtgtggatgggatttgttcttttctaagattcacctctttctggtgagatgtgaaatgatacatcagacaagtgggaagtcgaagtatagtatgcaatggacaatcataaaaaaagtgatcactctggagtttcctggatttgccatgtttgtttactggggtagcgtgcacttttggttgtcttacactcttacctgataatcaccatagttactgaaggaaatggcatatctgggcatctctgttttttatcagttcatcgaatgttcatgtagatgtggcaataattctgcttagtcacttttactggctacacattgccgcttttagcatctcgagcaatgattctgattagtcactttgactggtacacattgcctaatctcattattaagttagcagcagtctattgctgttccctgttgaagtccagctcaattgttgaattttccctttgattgatgcttctgctgccactcatgttttgtttatttaccttgtttgctgcagctgccatccttccagttgttcaaaagcaacaccag

SEQ ID NO: 36699 - DNA, 1001 bp, Sorghum bicolor
  Intron number 2 from transcript Sb07g023080.1 (locus Sb07g 023080) derived from phytozome v7.0 (chr-ID chromosome_7; pos 57934144 to 57935144 reverse strand)
tccggcggtcctttgacccctttgctccgtggaaggtttgtatctggttaatttgtacagagtgactgatgcttctttcttgttcattgctttgattggatctttcaggtgctattataggactaaaattatgaaatagtgcgaggaaagttcttgtcagaatgtcccaattgaaatgtttgtacctgtcaagtgttgagattttgtaagtgtaggttggtcagcattcttggcagcaagttaatctgaaccaattagtttgcgattgctattcacacgttcaggctatgttgccatctcttaattcaaagaaacagagggttgctagtatgggattatgacgttgcaaatggtatgcataaaattctccaacaaaattccgaaaagaatggtatattcgagggtggccacatcactgttctgctgttcctggtggaatccggttcagtatctggacagttaatttggacccctgaaaccaggacagcgggccattgagaattcaatcaaagtttgaattcacgccgcatacaattctaagttcacttgtacccactaattttgccgaccttgattcttgcattgagtactattcatagtgtagacatccataatccatcttttcatccacgattgtctatgtggtgactgtggcttaaaataatactggtaatccaacaatgcttttgtgtaactgacctgatttgatccacttgttcagttatctttttgtttaagcgagtttaaaaagatgcgtagagggtctgtcaaattatattaattactcacagtgtttggtaaatttcctcttgatgtttctatatttggtatgtttaacgaacaatcaccatggccttgcaaataagagctttaaggatccaatcatattacaggcaaatggttgaatgcagatagatactccttttgtttcacaaatgacagtcgtgataaattttgtggttgcaggtagacaactttggcacagtgaacctggttgaagc

SEQ ID NO: 36700 - DNA, 535 bp, Sorghum bicolor
  Intron number 2 from transcript Sb09g020570.1 (locus Sb09g 020570) derived from phytozome v7.0 (chr-ID chromosome_9; pos 49929315 to 49929849 reverse strand)
gccgctcttcgaggcgctgctcaaggtcaaagaaggtgccccccatttcttctccatctcgtttctttcgctccgacgcttatcgcaggaggattgcatgcacaaatggtttgattattactaagaacactggtgattttttttccgataacaaacacagatgattggttctcctctgagaagaggatgacaaagaaatctttattttttattaaaaaaaaacttttggtataaaattttgttatttttctttcatgggtttccttgaaaccgggtgactggttcaaagaatgtttgattgcgatggttggttctctattacacactaagaatgcatctcggcaaaaaaacttttgtgatttaacggcaaaaggatgtaactttctcaagctctgcggtgaccaaacaaatgggcgtggtgcaaaaatcttcgtctccctttcctttcgtctatgattcttgataagataaagatgttcaccggcaccgcacaaacttgaactttttgtctctgtctttgtgtgatgcagagttg

SEQ ID NO: 36701 - DNA, 951 bp, Sorghum bicolor
  Intron number 1 from transcript Sb03g038150.1 (locus Sb03g 038150) derived from phytozome v7.0 (chr-ID chromosome_3; pos 66085231 to 66086181 reverse strand)
gacacaccaccgcggtacctccaaggtactcttccgcagcgttccaccccttcccacccgatcgatcagtcctccttagatgtgtcgttgttttgcttcgtcgactggtacggttcggtagaactggttccgctggtcgaattcgtggaggaacgaactgtgcacgctatgcttcgcgtgtactttgctgtgcggttcatgtgctatgtggttttcatacgctcttgattttgtgggtgtgcgctctgtagcattttgagcactcgagtgctattttaggggcaggtgtgactatgttggactatttgcaagctttagtagcccttcagaagcataatttctggattcgttgtagacttgattcgaggctagtctggttaagccaatgaagggtatttggttgtactttagattttgtgtgatatacgtagctgtgtgcagttatttaaacttcgatctgcttgtttgactatggagctcatttacagtgccatgccatccaacttggtgagggtcaaaggatattgaggatgttactgctgctagctcttatgttgcattcaccgtaccatcttcatctgcttgtttgactgtgcacacatcttatctcactattacatcacagcacctgtaggctgagaagacaataaaatcaaataaacgcaaaaccttggatgacatgcaaaactagtaattcctactatattgtcaaatacacagaagtttagagaacatgggtcgcattaccacccaggtttttgtcactgtgatattgcgcactgttaatggagttttattattcatcctaggtttactgttaatactgttttttcatatgcaattttgatttcttaagcagtctatcctttttcccaccaaatgattattttgtctgaatttttagatttgtatgccatttccaacattgtttgttgtattgtcttctccagg

SEQ ID NO: 36702 - DNA, 1005 bp, Sorghum bicolor
  Intron number 1 from transcript Sb10g008280.1 (locus Sb10g 008280) derived from phytozome v7.0 (chr-ID chromosome_10; pos 8422733 to 8423737)
cgtcgtctctgccgcgccgctgcggacacgcgcaggtactcggtgtcggcgccggcgtgagagtgcttcgtacgctcacttttaagatcgttctccgctagcatacctgcatatgttgtttactctcttagcattgggatcatgcatttattaagagagtgttatttttgtgctactcttagcattgggatcatgcatttaagagtgtgctattttttgtagcaacagtctaacagattacagatgggcttcggggaacttgaggaatggggatggtacttgaaatatgagctaggtgtatcatgtttgactgatcagacacatgatttccgttcaaatcagtccaatgtgcagtgctcagaattttggcttcatgagaatcttgtgtgcagaatttccgggctcgtgttgggatggcaaattcaccaagttttatggttgatacttgaggttagatcagtctgggtgtttaaattgctaggtccgactgggtttccatttgattctggcttgtctacatgaaacatgagaaaaacagttttatgctccaaaaaggctatgttaagttgttaacaagggccgcatccgtttttctctagcaaggagctcactaatgctaacaataacttgtaggcttgcagttctaattaattctttttactgcagtgatatttccttaacttatcttggctgcatgatcagcctttcatttgattattcagatttcttttttattcttcttcttcttcttcttgtttgtggtgaactttattttactccagggctttcatgtgcattgattgatagccgtaccagggatcattatgggtcgctcggtggtcactcattttacaatattatgttttcgcagaaacagaaagacacttaggtttatagttaacattttgtcaatttagatatgacgctgcaaaagcaagaatatctgatttggttcttgcttgattcaattttcaaccttagttcgaacaaaggcaaccttcagtg

SEQ ID NO: 36703 - DNA, 555 bp, Sorghum bicolor
  Intron number 1 from transcript Sb03g045740.1 (locus Sb03g 045740) derived from phytozome v7.0 (chr-ID chromosome_3; pos 72990133 to 72990687 reverse strand)
gtgcacgaccacggcatcaacttgcccaagttctggtgagagcgctgcttgctttcccttgttgtcgccttttcttctgtaccatgatgtacgataccgtgcagttggaaggacggttttcatgttaggatatgttgagagtgggattgctcccaaatattgcagcttttgttctttgttgtgtcgcaacgactaaccaaatttattgttgccttttatctgaaaaaaaaaatactgtgaaccaaatgttggacctgcttaattatatatgctgcaaaattaggcatatttctttgcgtttaggtatccaatagtttataaccattgtttgagcgcggtagtctaaacaccagaagttctgtagtctgaaatttagactactctaaaatgtactgaggaccaccagaagcatcttttttgttgtttgtggagcagttttattaatcttattttttgacaagtctgttgttgtcatttgtttttcatttttcttgcccatttgaatattctgaagtcccagttgttttaccttcagggttcccatagttttcaaag

SEQ ID NO: 36704 - DNA, 326 bp, Sorghum bicolor
  Intron number 1 from transcript Sb08g018875.1 (locus Sb08g 018875) derived from phytozome v7.0 (chr-ID chromosome_8; pos 49352338 to 49352663)
aaggacaggctccaacaagaggaggagaggctccagcaattgaaggagaggctccagcatgagcatcttggtcagttctgtatgcatgttgaaatctatttcaataaatagtttgtttggaccatgatgtgtatatcacatttatttgcatgccctcattctctagtataatattatccaaaatgatgagcttattgcattcttcaaacattgctagttaatcaaaatactgtttctcaattttttcttgtcagaaaatggagagactttagcaagaatgaaggaggacattttatcatccaagaaaacattggtggaagcaaggg

SEQ ID NO: 36705 - DNA, 798 bp, Sorghum bicolor
  Intron number 3 from transcript Sb07g004180.1 (locus Sb07g 004180) derived from phytozome v7.0 (chr-ID chromosome_7; pos 5318792 to 5319589)
aaagcttccaggcttcgcacattgatcaatcaaaggtgttgattgtttaattttgatatgtttagtcacacatattgactttgattgtttaattttgttatgtttaatcacacatattgacttccttaaaatatcaggaatgcaatttgtgaatagaaattctatggtgttctttggcatcaatttaattagattgtatggtagcatttgttttttatgtgcacaattgatacaaatcaaatagttcaatcacgtaactgctacttgtgtaggtttactatttttgttctttatcttctttctggttattctgatgccaaataatgtgtttctttgacttcccttagtatttatggatggataaggtgacagttaaatgtagtcaatgcttcctttattcttttgacttgttggaattttattgctcctggttgttcagcactacagaatcttcttgatttgggttcttgcttttgggattgttttcatatgttttggacatctctacctgtttatctgaagtaacccgcttttatcgacaatgtgcaaacaaaatttgtctctttatagcggctctagctttagatgcttatgttatagcagataccatccttttttcttattgtaagatcatatcctgccacaattgcgatttctctacttgttatgcctacaagtctaacaatgcttccagaagcacattttgtgcatgcaaaaggtgaggctaactgggctttatttctttctttctgatgcctttcagtctgaactggcaacatcagctctgcaagaacccca

SEQ ID NO: 36706 - DNA, 749 bp, Sorghum bicolor
  Intron number 3 from transcript Sb04g030690.1 (locus Sb04g 030690) derived from phytozome v7.0 (chr-ID chromosome_4; pos 60673406 to 60674154)
ctcagtcaaagtaattctgttcataattaaaccaatccatactgaaattcttcttatgtgttccattctctctcctgttatgaaaatgctttagtttggcacttatgtttataaattacattagatacacatgttacttataagatgtgaagttgagttatgtggaattatggattgctgttatttgctagttaatataaatatgttgccgtaattgttcaaaagagttatgttaaagtgcaactgtgtaagtgaaccatgctgacaaaaggccacacaggatactaagcactattcatccttgacttgagtttattacaatgttcatggcaaattattccatctcactaaagcccccccccccccccccttcggcccaacacacacaaggattttttgctgtagcttttgcatagaaagtcagttgtctattgtctatagcatctaagtgaagcagctcttcttccttgtttttgttcccctagaagaaaaaaactttttggtctatggagaaagtcaccagtagtcaatgtgtatgctttcacagatagctataaatagatgtgtagtctttgacttatgtttttcttctgtatcatggtcctaccattgcattgtaatttacctaatgggcttcacttagtgtaatctaaactaaatgattttaattgtgctgttttgtctttgactgagctgtctgctaatcttctgtatattattgtggtctttgtgatgcagctatactacag

SEQ ID NO: 36707 - DNA, 811 bp, Sorghum bicolor
  Intron number 1 from transcript Sb01g047020.1 (locus Sb01g 047020) derived from phytozome v7.0 (chr-ID chromosome_1; pos 70111563 to 70112373 reverse strand)
tccgacgactcccacccctcccaccaacgtacgtaggcaaacgcacttttctccacccatttccccactgcttttgtactttcaggttcttttttcagtccaagatggtgttttttttttgccagaaaagctagtcctttagtcctttactatgctctattttgaagactacgtactgttatttgtgcactaatgccgcaaaagtactcttgtacaatgaacagttttcgagatattttctccaattattagtaactgtgtctaattagtacctccagctttgtttgcaagagatttaactttgatcttagtttaacttctatttgctgcagttttgcagcatgtctgctgcaacaataacatttgtctcctgctgagcttacgataaaccggacgtgtgcgatacttcgcctgcctgtcctttatggtttatttatttatttgtttgccttccatctgtcaccatgtggccctgccccagccccatatactatatgcaaaccccaaaccacaaggtacgaatttgttaatgtcctctatgattgagggagaattccgaaacctgtaaagaatgatgaactgtgaccttgttaattctttcaaagtcctgacgacatcaaatatcttagtgatgtatagataagctatccttgaatggcagctgttgaattcattgaaccatacacataaacgctttttgactatttttgcagcacgtgctatatctcgatatgttttctggcatgctcagggccttacctctgttaaatttgcagtatcacagtctttgagctcacaaggttctaacagt

SEQ ID NO: 36708 - DNA, 858 bp, Sorghum bicolor
  Intron number 3 from transcript Sb02g041500.1 (locus Sb02g 041500) derived from phytozome v7.0 (chr-ID chromosome_2; pos 75310782 to 75311639 reverse strand)
ccctgtgaagaccgactcgtcgttctggacaataggtgtggctgaactcatcgcccttgaacacttcatcattttttttgagcctgaactgtagatattgatttctgtagtatttctgacatctccatgaaccgtgttcttgaaattgttattcgataattgtcaaattggcatggtgcttttaccaattaataattaaatagttgatgaaagcttcgctgttacaaataaaaaactacttagcggctatactgataatcgttggatattattgggtggctttagtttttgccagggttagttgtagatagcagaaattgttaatgactaaattgtacagctgctactgatttggtacccttttgtgagcgcacatctttgaccttttatagtcttattacttatgctgggaaatgcagtatcagtttcatgccaatggtcttatcagtctgtatagtttatggtagaaactggaaactcgctagcatcaagtcttggctattgttagcttttttttttatatatataatctgagttagtagcaaaagtagttaagtagcactgaattgtgcagtcaacttagggctgtaggaaaacacatgttttctgccaatctacagaacaagtgaatttgacaacgtgctttgctagaaacaacaattaggatgcttctttgctgtgatgatttttttgaacagccagtaacatgagattatgcataagggcatgctagcatctgccactcacatgaaatttagtactatggatattagaacatgtctgtaacgacatctgagccatatacatcttatttcactatcatttttaacgtgggcaatcgtgatgacaatacagagg

SEQ ID NO: 36709 - DNA, 666 bp, Sorghum bicolor
  Intron number 2 from transcript Sb02g034490.2 (locus Sb02g 034490) derived from phytozome v7.0 (chr-ID chromosome_2; pos 69072058 to 69072723 reverse strand)
ttgcactcctcctcgtctctgctgccgcccctcaggtccgcatcctggttccactcccgtctctttagctgcgtttcttgcttgctgtaaaatataggaatatattgtaaatagaacactgcgaaggcagtaaacatataatcgagcaaaccgagcctgtttaattcttcgcctgtgggataatgggatgggatcctatcacaagttacgcctacagatctgcttctttcgatgatcgatttctatattaatacaagaatcctaagattttgaagtggtctataattttcactagcaattttttaaatatatatatatatatatatatatatatgaagattttatttaagtaagatatgatcaaatattatgatgaagctactttcttaatgagtaaagcgacatctatctactatcttattatattgtcaaacttcataattttgtattatggtctcggctacgaaatatattttgagttgaaggcactgaaataccaaaccccacctgcactttatcgagccttatgtctccctttagaattgtactctctgcagtctgcctactatttccagacagccacggctggggttgggaaagcatataaccacatatgaatgtgtctgtgcaggttgttggagtgggggtcggagacaactccctgag

SEQ ID NO: 36710 - DNA, 926 bp, Sorghum bicolor
  Intron number 1 from transcript Sb05g022370.1 (locus Sb05g 022370) derived from phytozome v7.0 (chr-ID chromosome_5; pos 54225049 to 54225974)
cttcaggaagtggaagtaagtgacataacattcagttcctctcacacacgcacatttgatgtcttgtgagaaaattagttcatttaacaaagatatagttatatatacaatatctgaaaagtatccaatttttagtaagagcaactaaaaaagaacatataatgaaataaccgagagttttgttgtcaaaacaaccatcaaaataggttcgccgtgatttgaactgattttggagctttttctcatgtaagtatatcacgttgtgtttctttccatcatctgtaaggaaaaaatatctagtgttattggaaagaatgaaagtcagacttgcatagttccattattgttaactgaaaaagtatgaaatgaattaatttggagtgtactcttgctgaaacctttttcctttttttctgaaaacaagttgatttatgaaaaaggttataataattatgtcaacctttattaatactccaaccaccttatataaggtatccaagcatttaaattttatccttaattataatcgattcaagttaaaagtaacaccgaactcaaatatggtaatcacgatataaccatatgtttatctatgattaatgtctgcccaaatatggtaatcacaacatattaaaggacaattacatgtgtcattttctatgccccataatatgttatagaattcctagtacaccctgtaatgcaggatgtagagagtaatccctaactatttatcgtaatgtagactttccattatatgccgcatgagcatattcttacagattatttagtgggcacagctaaatatgaagaccataccattatatcactatataagaaaacaagtttttgttgttaggaagagtacatgtttgtagtgctgtttgcgatgatcatgcatttggtacacagaaatactttgcgaa

SEQ ID NO: 36711 - DNA, 692 bp, Sorghum bicolor
  Intron number 1 from transcript Sb10g024790.1 (locus Sb10g 024790) derived from phytozome v7.0 (chr-ID chromosome_10; pos 53948887 to 53949578)
ccggcaggggatagaggaagctgaatttcggaaaggtgcggtgttctcggctctcttcccatcttccttgccttgtggttttgttgtggaacagaggattcttgcttgggtaggattggataatttgagagctcatttctcggggttctgtggctgtactcggcttttctgaggccagtttaagtagatgaaagttgtttatttcagtttgagttgctgagttatgtgctgtctgcaatgttgtattgtttcatagagtagttgttttgttgatgtgaattgtgttggaagaatggattttgggcgtgctttagcaggcctacttaactagtatctacaccaagacgatcatataccataagatttattgttatgccatttggctttggctgtcttcttacttttgtttcaggagaacttatttggtgtgcatactatccgaattgttttgttcttataatggatctacatttccattgtcttaagacactgctcatacatatatgagaagattattttgggtaaacaatataggaaatggaaatcaaaatagagagtgcataattcaaagaaatctagatctcatcatagttatattctagtaaaaaacaattgtaactggctattctaaccagtgatctgtttctccatgtttctgacttgaaagttttcatatccaggagaacagaaaa

SEQ ID NO: 36712 - DNA, 930 bp, Sorghum bicolor
  Intron number 1 from transcript Sb01g008490.1 (locus Sb01g 008490) derived from phytozome v7.0 (chr-ID chromosome_1; pos 7332247 to 7333176 reverse strand)
gcgagcgtgagctcgagtctgacaaggtttgtgaatttgaaatgtgatccttaggtcactgaatttgtaatttggttctgtgccaatctacgtgactaatcagcattctagtttcgtgcgagtatgcataatctattcctgcggcagccagcctgctactactcatcacatttaataactcttctggctgatctctcaaacctgtaatgatggtttgaaatttgaatgtaagtagcttgttgtaatgctagttcaggcaagaattaactttctgccactattagcatgacccatctaagcactctcacattcacctgtctcacatttgccactaccccactaccttgtggcaactggtcaaatacagcaagtactctgtttgcaatcaataaatgcgggggcaatgccatctttgatcttatgttacataacttttttcttctgatagtattgcttaagttgagtgctgttacatctactgaaatagtgaagtgtagcttggtttgtaaaattcttcgtggcctggacatttatccctgcaatgtactccttttttaggagctgtaggttcttggtgttctaaggtggtagttgtcggatgtataacttgaatatctctgcactgtaggataacactctcgcaaatgctcatgtccatatatagtggtagagagaatgtggaaacttgaaaactgcatagccatttttccccctgtctaaaactttgggtttggtttagagtccctgttgtccaaagtccaaacttgccatataaaactctggttccctcatcttttgaatttcttcaagtttggtgatatgcttttgcaattgcttgtattttagaaattattgtggttactgtatatcacataagccttcttttatatttcagatacaagaactacttggtgttcaccgttcaccgta

SEQ ID NO: 36713 - DNA, 584 bp, Sorghum bicolor
  Intron number 1 from transcript Sb01g004430.1 (locus Sb01g 004430) derived from phytozome v7.0 (chr-ID chromosome_1; pos 3542820 to 3543403)
ctcggctccgacgtacgcacggattcctctgtgactctcgtcttcctcttttttctgtgatcattctagtttgatctatgtcccgggtttagcttggcttgtataatggctttggtccagttacatgtcctgtttgtttcgccagaaatggtgccatggcttagttgcttttgtgtttccgggggaatttattcagttcaggctacagaagcatgttgtatggaacgtagtgcagggtatagccgcaggttaattacggtagtcattatcatacatctattgaattcatgacatgagttgaaatgcgcaaattgtgtaatacccggtgcagtaaagggctgtccttctgaagcaaattcactacagctagatgtagccgtcagtagaaagtcttacagccttacccatggcaaaacatgcatgtgcaggaatgatcgttttatgtaatgctaacctgtcctctgtcctccaaatgctttgttcatttcttttctcttttaagaagcattacgcggtgattaactctgggactgtcttcatatattgtaggtgaaacttggaaatatcatacaaagaagaggtgt

SEQ ID NO: 36714 - DNA, 963 bp, Sorghum bicolor
  Intron number 1 from transcript Sb03g043270.1 (locus Sb03g 043270) derived from phytozome v7.0 (chr-ID chromosome_3; pos 70643900 to 70644862 reverse strand)
tccagacccgcgtcctcgcatcttcgtcggaccaggtaatgttttctactacttcgttattaatgttcttcggaattgctcgctctgtccaaaaaagaatgcaatttttgttttaaaccagtaagtttcttaaatttatagaaaatggtatcaacattttaatctctaaataggtttattatacaaaaaatacattctatatttaatttaatgatactcttacttattggtattacaaatgttagtgtttttgtataaatttgatcaaacttaaaattgttttcactccttaaaaagcaagaattgcattctttttgggaggtcttcgtttcaatttagttttagttttgttctaagtctaacttttctaactctgaccaaataatatattaaataaatgcactatcaaaatacatttcatggtgtatctaattaaacttgttagatgttataggtgtttgttcatttttcgataaacttggtcatcggtagagaagtctgacttaggaaaaagccaaaacagacttaatatttgtaaggaagtaggaattatggtatgaagtttcttagtatatgtgcagggcactgtactggagagtgttttgaagtttggtcacaaatcacaatacccagattttgcaatgggtggatatgatttttcaaagtagacagaatggtgatattttggaagataaaaacatcgtgatcgaatatttgtatgttttgatcacttaatgttatgtttaagatattgcaatcaggggatatatcatgggagagggagttcatgcaattgggggataatttcccaaagtggactaaaatggtgatatttaggcgtaaggataaaagtattgtagtggattgctatattttgatcaccaaatgttataagatacggtgattgaggatatatcactaaatcatttttccctttatctataggcagctgagctcactgac

SEQ ID NO: 36715 - DNA, 958 bp, Sorghum bicolor
  Intron number 1 from transcript Sb07g027060.1 (locus Sb07g 027060) derived from phytozome v7.0 (chr-ID chromosome_7; pos 62213638 to 62214595 reverse strand)
tcaactacctccagctcgaccagccacttttgaaggtatgtttctcaggctccctctaatccccctcatcctgcgacctgaaaatgttgatgaatggatggatttaggtctcagtcgattcgtgcatgattcatttcatttctttttaatgggttcacacatgtagcagtctgtccatactgatttgcatgcgattaataaaaaggcaaaaaaaaaaaacatttggacttgctgtagagtgcagtagatatgtcgtaggagtattacagattgttcttagctgtgttgtcgcatgcagtttcacaatgtatttatagaaataggtgacacggtgtatgctatgttaacagaggagtagtttcatatactcatctattgttatgtactatagttacaatttttgactggttagtttcatatgctcatgatcaataggatggatggatggacttgtcattctaatgtaatatggacttcatctgcagttgcaaactagttgaataccccgtgtggtgccatgggactactattttagatcatttaagattgatgctaacaacatatatgaattatcattgatatagcttgaaagtgaatggttaatcctgtaaataagggtaaagtgttgaatcaaattttatgaaaaaaaatatctgagaagcaagtataagttacctgcattcgtgtcactttctaaccttacgtcatgaatggttgtttgtagatttctaaacatatatattatatagatgcgtggacgtgaaaaaaatgagttctcaaagataactgaatcgagtaatagtatttcagattacttgcaataactatgattgtctggttaggatactctgataaagtagaatgtcgctttattaaaaccagtaatctgtcggtaggacctctcattttctctctaattgcagttgaggcatacacttcttccccttcctcttctcac

SEQ ID NO: 36716 - DNA, 462 bp, Sorghum bicolor
  Intron number 2 from transcript Sb03g036990.1 (locus Sb03g 036990) derived from phytozome v7.0 (chr-ID chromosome_3; pos 65005980 to 65006441 reverse strand)
gtctgatctcgacgtccagcttccatctgcttttggtatacatccttttttctaacatttttttgttatatattttctcattgaaatagtaaacatttatactgattataattgttcttaaataggttcaaccaagagtagatcacttattagtttctttccttgttctcttaacccgaaataatctgcagatatagtctggttgtcttaagtggtgtaccgtgcagttctattggtgcataatatccagtaatgacctccacctgaggtgataatgatatacatgtccttattagcgaggctatgtgcattcattggttattgggttatattggctttgttcatttggttttcttccaatgcaataagcttattttgacttatgtgtccaggcctgagcacaatctgaagccagaaggtgataactttgtgttttccttgtagatccgtttgcagaggcaa

SEQ ID NO: 36717 - DNA, 907 bp, Sorghum bicolor
  Intron number 1 from transcript Sb06g031050.1 (locus Sb06g 031050) derived from phytozome v7.0 (chr-ID chromosome_6; pos 59419658 to 59420564)
cgccgggcccttcgccggcgacgagcatccaccaggtacgcccgccccttctcgtccctggctgctgtgcgaaaccgagcacccagaccctaacttcagctatttggctatttgtattcggattcggatctgattctaatcgttgactcacgagtgtacttgttgcctcgttattcagcgctaagaatgatcgctggcttatacgagtatattacaacgcaatatacctaatgtagtcacttcatctaaagcgagctctgtttttttttcctctctgcgtgcatccagtgatccagtgcaaatgatgtgcttgcatttggttggagattctcacatttgtgctgcgtccattttgatttggacaatatgtctactgcttaggtcttggtttcacataacattcgtgaaaacttgagccaaagcaaagaattctgttttgcaatttatcatcttcctcgaaatggctaatgtgtacaatactgcaattagattttcttaaactgggtctataggatatatggcttcagttacaccgtgatcgatcattggagcaattaaattgcaagaaggtgaaaattatccaagaatatgggtttaacgtttcagtgtcatacatccaaaaacaacactgacagcacaatgtttctgaaactctcgaccaaaacctgaattcctattaggaatgcaggagctttttaggaaataatttgatacaatatgactaaaacaaaatccctgtgctccaaatgaattcttaagttttgaagttcttttttttttggtattttggtcaatttgtgcctcatgtgcaatctgaaaggctggaacacaccgtgagatgtgactgctgctggctttcttgtttttctcaggctcagaaacatcgctgacatccacctgcaccaca

SEQ ID NO: 36718 - DNA, 987 bp, Sorghum bicolor
  Intron number 2 from transcript Sb03g041950.1 (locus Sb03g 041950) derived from phytozome v7.0 (chr-ID chromosome_3; pos 69417190 to 69418176 reverse strand)
cggtgagaacttgtacgctgtccattttaccattcctgtcctgaatgtgtggatgatatgttaatgtcaaacaatagttttgattggcgttttacatcacacatgtgctgcacgatcatgatgacctacccattcgttgaacatgaccatgcatcctaaatgtgtgcctggttttatgaatctgtaatggtccgatacagggaaaagtgtttctggtcaatgactgctatgaaaagacaatgtccttcaatagctctgcagatgttgatgcttgagggctggtatgatctgttgcaattaaaatcgtgcacccttcagtcacaaatacttgtacttggataacatcagtcttaagaagatgtacttttcacgagtattttatattgcggtaaatttgtagaatccataaaatttgtactgtggaagttttttccaaaagaaaaacaccatacatatgctttttgtgttcctagtatgcatattttggaatatattgataaccattgctttagaaagtttgactggaagcttgtccaaaaattggttgtcactcatgttcacttgttcgtttcttggttacggccacctatcctgaagtacaaaccgccttatgaattttttttgaaaggaaccgccttatgaaattatccttgttcttttctgtgctttcaactgtttgctattttacggaggtacctgttccagcattatgcaacatggaacagaaatacaactagcatttcagtgcctccaataaaaacttgtaaacagtaactatccaacttcttttgtctgacaacacatcaagctaaccaggagttaaatagttgcacataatgagcattttgcacctgacatatatgatcatgaaatgtggaatgtctgttttaacctcttttatgaaatatctgttttagcttctgtactcttgaaatctattgtaattcattcgtgagcctaattttgactttgtacagattggcacat

SEQ ID NO: 36719 - DNA, 505 bp, Sorghum bicolor
  Intron number 2 from transcript Sb01g020800.1 (locus Sb01g 020800) derived from phytozome v7.0 (chr-ID chromosome_1; pos 23709416 to 23709920 reverse strand)
ctaggtatattcttgacatccctgctctttatttaatgttttgatttggggcacctatccgatcctttagctatctctattttaaactctatgcttctattatattaaaacatgcatttataaagacaaactagtacacattaagatcaagttttgtaaaatttgattataatacgtagggtttgtgatgtcaaataggagtaaaaagaaaagggttacccccgtagtagatacggaatagctagaagaattacggagtggatttctttttcccagatttagtaatgtagatgattctgtgtttgtgcatatcgatctgcgcgctgggatggaggattctctgcgtaggatgagtacagtagttgtactattcatgttgctattgattttgtttgttctacacatttacgtgccttgtggatatgcatatattatcataaaaagacttatgcagacatgctcgattattcttccactgcacaggctgtttctcgggcccttggac

SEQ ID NO: 36720 - DNA, 546 bp, Sorghum bicolor
  Intron number 1 from transcript Sb07g004600.1 (locus Sb07g 004600) derived from phytozome v7.0 (chr-ID chromosome_7; pos 5884155 to 5884700 reverse strand)
actgctcaggtcaggatgctcctaattcatgttacatatcaagtaaacaataggggtaaaatatactgtacctgctaagaaagaactaaaaatgttgttttcttattctcataactagtatggatgttgcggtcaaaaaataactagtatggatgttaaatgtgaccaatcagtcttttcttatatttcacaaatgacatggaagctagtgagattaagcacttctccagttcatttataactttgcttttgatggcacaatagccataatgatgtcccttatatttcccccattactcagcctgcaaaactcatgtagactttgaatgtagctattgcactgtgccttggcattctgcttgtagtattgccttctccctgtttattaagcagcagatgtgatttaaatttactctgccatctgtaatcaagttatgaccttgatatgtgtatcaataagatttctactgatattttaccttctgatcaattactgttttgactttatcaggtttatatactcgacaaaagtgacaaagccaagac

SEQ ID NO: 36721 - DNA, 924 bp, Sorghum bicolor
  Intron number 2 from transcript Sb06g030050.1 (locus Sb06g 030050) derived from phytozome v7.0 (chr-ID chromosome_6; pos 58481983 to 58482906 reverse strand)
ctctcgcgagggtccccagaccgatctccggcgaggtacacggttccgtccccattggttgtttgttcccgttgttgcctgttgtgttagaagattggttttccgtttaagcttagtcaggaaagacttttgaattcgtgaataggctaggtagattgctgctgtcctcattagtttggaaatgctggtaaggctggccattgtatatggtgtaacggtagggaattctagagtttccacattttgagattgaattaaataagcaaggattttttggaatacaatgctgtgatgttgtgacaggtgtgctgatccccttgttcacttgtctgagaaagttccaggatttaggatgatgaggggactcaagctaatagtaatgtctacttattggttatgaaagtaatgtcaatcccatttcatgtgtggttcaggtattcaatattgagatacataagttcatgtcatattggagtactgttagtgactggcatactgatctccacacagataattgagatgctttattttcttaatcagggataattgagatacataagttccctgctgtgcctgattgttgtaatgttattggttcctgttttagtaagctttggatggagttattttagttgtgatacttaagctcatgtcgcggtgaatgctatatcccacttggattggagtagtgttacatatggccatgttgtttgttggttaatcctaacgaggtcggagattcttttatcttagtatgctatgtccagtttttcctccccatgtagagcatcgaatataatcctgctgtagttattttttcctactgctttcataaagcttgtctagatagtatatgttcagtggaactgacatgacctatctggtccagagtccaacattccttaaatctagaagcaactcaac

SEQ ID NO: 36722 - DNA, 1004 bp, Sorghum bicolor
  Intron number 1 from transcript Sb02g007930.1 (locus Sb02g 007930) derived from phytozome v7.0 (chr-ID chromosome_2; pos 10018558 to 10019561 reverse strand)
ggaggggcagcaggtgcgccggccatgggcccttgcaccttgggggcctaaatatgtatagtactagtatatctctattctctgtatatgtattgagttacaggtaacgagcagccgcaacgcctgtcgcaaagagccagagacacggactcgcggtgtctcgccaaattcccgattgacggcactgcacgcagacgtaggcacgcagccattgctctggccacaaacctgcagtcatcgaggcctcgagggacttcaaacaaatcagccaatcaggcaatcaccaatcagatctttattgaatattgatttgattcagtttcatattttcagtttatatgatcatgccaaattttatatgccctagttttttttcttgttcaatttttgtctattactttgcacaggtactcatgtagtcatatttttattttaatttaggtaaagtgttagaatttgagaatgttacctaaaaaatatgagttgggggctgcgaagaagaacactttcggcagtcacaacaaggtgctttagataagtttttttcagtttcaagtagcgctgtgcctgagcgtgatgagaaccttatagatgcacctgagaatcaagaagagactatgtcacaagaaaggttaaatggtttggctatgtgcaccatcgaaagggatatcttggacactattgatcttaataccgttctcgatgattttgcatcaagaaatgtccgaagaaatttatttatataaaaagcaatgaatatgacgaaattctattttttctcaaggtaatcatattagttctaaaagtacaaatatattgctttttaatctacattgtttctcgctattgataattatcagacatattaattttaaatattgatttccctttataaacaaaaatagcctatatattatagactagagaggccatcgcgacgagctcgccagagggccctcgaaatcgtagggccggcgctgtcagtaccctcccttcgtggaatc

SEQ ID NO: 36723 - DNA, 342 bp, Sorghum bicolor
  Intron number 4 from transcript Sb02g031970.1 (locus Sb02g 031970) derived from phytozome v7.0 (chr-ID chromosome_2; pos 66752186 to 66752527)
gaagtacagaagtttcgagcattccacgcataaaggtgagcagaaaagaaattagtgttgcagctttgaattttgccaaataactcttttttttaccaaaataagaatctcaggacctctatattccaacttaatgtaggcatgatatggaaatctacttaaattgcttgttggtgaagaaaaaaactttgcacgtttctatttacctaccctagcacaaatataaagcaagtgtataagatattattgagacatgaaacagcgatgcttacatcttctcactcatgacttcatggccactcttattgattatccatcagttcagcactgcttcctacaaag

SEQ ID NO: 36724 - DNA, 1029 bp, Sorghum bicolor
  Intron number 1 from transcript Sb06g031140.1 (locus Sb06g 031140) derived from phytozome v7.0 (chr-ID chromosome_6; pos 59509703 to 59510731)
gttgagtactcaaccatcaacaagcaggtgagccctccccgcttcctctgctaaccttaaccagttcattgatgtttccgatctgaataaagtagctaccaatgtggtatggtatctatgtgtctttttgcacaatttgcttagatgaaattgactttgcttgccatggatttcgccatgtgctaatctggaacttatctgccttgactgtgctagcaccacatagcccttgaatattacacaatgataactgactttgattactgaaaaatgcgactcctacatgttgctgacgaacgagctgatactttttttttaaaaaaaacttcattatatggttacatggaatatattatattcttgaaatctaaattgagccatgtttgttcagattcattacttaataatcaacagagaaaaacaggtctgttgaattggaagcccctgtgttcaaattagatgtactgtactgtggtttccgaaggaagtaacttcaaacaggagtatgataatattgctgtcgtattgctgtccaaatccggcatttgatggctttgtaacacataaattgcataattctttttgatgcattcttcttagtttggttgttttgatgtgttagtttgctattgtcaaactagactgataataccatgctgcccaaatcagcatttgatgggctttgtaacatgcacattgctttttttctgctatatcattcttttgtttggtcttcttgatgtgttagtgtgtgcattgataagagtaaaataaaagtaggttacataagaccggtggcaaactatagtcctttttggctgtttcttagtacacatgtaaacttgtggaagtatcgaatgcatactcttttcctttatatatatctaattccctgtttgctcacaccaatggagtgcgaaatttgtttggaaagcaccttgaatatagttcacacattctgtcatcctccaatttatgttaaatctaacttcatttgctcttcatttacataggctgggaggttggaga

SEQ ID NO: 36725 - DNA, 509 bp, Sorghum bicolor
  Intron number 1 from transcript Sb02g028500.1 (locus Sb02g 028500) derived from phytozome v7.0 (chr-ID chromosome_2; pos 63653306 to 63653814 reverse strand)
gggttccaccaacaagaagcacgtgcctgctcttggtaaatattggtgcatcctcatccgagaatgtttttttttccacccctttttttcttgtatttcttttttgttatacaacaaattataaaatacggcctggagtctgaacttgctcagaagagctggttggcttttgaatggatctgaggtgatggactgcaagagcggtgcagtaaattagtactttgcatccttctttaagaaagcagaaacctcttctttagtttgcatgtaggacaatttaattgaatcattctgcaatttctatcggaatgtataactaaggatgcttaatgcttggctgtttacattactgaagtatggaatactccaatctgtttaatttaaccctcaagactccaggtttcgtccctgcatggatttcaaaccagtttacatgtgttggatttgctgttttgattcaagtatgttttgcagggccaacaggggcaggttttacacctcatcttatt

SEQ ID NO: 36726 - DNA, 977 bp, Sorghum bicolor
  Intron number 1 from transcript Sb01g035220.1 (locus Sb01g 035220) derived from phytozome v7.0 (chr-ID chromosome_1; pos 58739218 to 58740194 reverse strand)
ctggccacaaggtacttcctcttaatcatacggaattacatgtgctttgttcctgtatgtctcaaacaaatgctgtgaggcaaggatgctgagaattgttacctattaattctattattatgtgacttcactagttaattctgggtctggcaatacttctgatcattttgactaagcatatcataataagggatatccaatatagaaaaagcttttacattgtggacagtgatagaaaataatctgaactgctgtagtttttttgtcggaagtccatgtttagtcaatttattatactttgttgcatggattcattcacttgtgcagtccggcttgaacttaattgtgatgagtttttcacctcaagcgaactgcaactagtaagttcagatatgacatttgaaaatgtcaccatctggtcacttgggaattaacaaagttaactgtattttagattttagtgtctgaaatcactgcgggctgctaggaagccaggatcagatttgcttctcttctagttgatagagaatgtccaacatattatcaatcccatattctccaaatggggtttggttggaacttgtatcactacccaatgcacataatccccctttatcctgaagaaccttgtagaacataaagctgaagttacatatgtactttagctttattcaggattattaaaataacagcaacaagaccatcttcagcaatattcactttgagtcattaatttaaattagttagctgttcatgtgcacaataataagattgttaactgaagttaaacaacttatctatgttacttatgttatgtgcaactagttgcttattaaatgtcatgatagctatcacatctttacatttgttttgagctttaacatggaagattatgttcttgtactctttcttccttttcaggaaataaccatttgcttatccgcattgtgtagttcctggagtggaataatcaaagt

SEQ ID NO: 36727 - DNA, 1039 bp, Sorghum bicolor
  Intron number 1 from transcript Sb03g012770.1 (locus Sb03g 012770) derived from phytozome v7.0 (chr-ID chromosome_3; pos 15391991 to 15393029)
accgggagcggccctccattgttcctcctcccaaggtgggttcctttctcttctttggacttgtggttttgtgatctgatgtggtcttgattgatgcgctgagttagtcactgtcgtagtttctaggcgggtcaaagagtgagaagggagggggagctgttggcaaatctgaagctttacctgcttcgggacatggttgcgaaatgcagcttgatttaggtttgatattggttcttgatccggcttggtgtatccgtgagtctttcattgccattttcaagtgcgcctttcccccaaatgcagtgaggcttgatgcgggcttatttggaggcccatttgatcatgaatgggggaaagcagtttgttctcgtcttgttatttcaatttttgcacaatgcattatacttgacccaatgacacctcctgatccaaactagatcagcatcctgcttcaattcgagtttatacatgctaatttctccaaaggtaggtcatgtgccaaatcttggaactttcttccttgtaagaccagggaagtatttcttttttcactccagttcgagttgagcatattagggatgtaagtggattgccccagatgagtgattgacccatacatgagtagttcatttggtttacaaacacgtgatcctgatgagtaatgatctaccaattaagtgaacactgaactcctgactaactgcagtgggttttgaattgacccaaccacttgcatccgcggagcataagctggtaaatggaagagttagtctcgtgttagtgttagttctgtggccatgtactcttctgtttgctagaacttggtaatgcaggcaatcttggtgcacaaaattccatctgttcatctccagaaaagaactgcttcagatctctccctttttttctcttattttttcatcaatcaagatatgcaattagagtattctgaaatgtcttgaagcagaaatacataaatgtaatataattttttacatctcttacaggaaaacgaggatagagatctgaagctatcttctcg

SEQ ID NO: 36728 - DNA, 889 bp, Sorghum bicolor
  Intron number 3 from transcript Sb04g020440.1 (locus Sb04g 020440) derived from phytozome v7.0 (chr-ID chromosome_4; pos 47714998 to 47715886)
cccgtgccatccgccgccgcctgaccaagcaccaggtatacactgccgctcctagtggttgcacgcctttgctcttcgttttaattgagacactttaagatgttctgctgctactttcattatatactaacatcatgacttattgaaatgaggtggaaccttgagtatatatttttccagggcgcatatttctgataatctgttgagtcgtcaatgtgtgatttgattggtttatttgtatataagttgtattttctagtggcacttatttctgacaatctattgtgccgtcaatgtgtgatttgattgccttgtttgtatataagtttggttatatgttccttccttgctggatataaatcattaattgagtaactgatgttttcttttgaacttcctcttgagctacttgagctaatagatctttcagtatgcaactttagaaagtgaattaagtttcttgactgaatcaagatgtagcagacacgtgcttttgtggttcatgatgtttttccttcaatttgttcacacatgatattaggatgtttcttgctagaatgtcttggtttaggttttagggttattaggtgcctgcacgcattagccagttgtgtgatctttcaattgctatgacacagcagaaatgcaggtatacaatcagttcctgaaggtgtgacatgtgagagtgtcaattgaaacaccaacctgtttaaaatgtgacactgcagtgccaatcctttgatattctgttatccgtcatcacctgtttgtagcagaaattttgcagtcgataattatttgagttgggtttttaatcatagatgtcctgacattttgctctatttgtcctgcagctttctctgaagacggagagggaaaagaagcgtga

SEQ ID NO: 36729 - DNA, 799 bp, Sorghum bicolor
  Intron number 4 from transcript Sb03g008670.1 (locus Sb03g 008670) derived from phytozome v7.0 (chr-ID chromosome_3; pos 9317879 to 9318677 reverse strand)
ttgcacttgacagagaagaagcagagaagattcaggtgcgcacatttgtttacccacgtgcaatatgtatatcaaatttacacttccatgacctctgaataaataaaataatgttacttcctgtttttttaattatgtttaccttgccactctccatgtttaagaccattcttccaactccagtgtaacatgtacatgcacaatgcatcagcgtacttccaactcaaatgtaacatgtacatgcacaatgcatgagttcatgtatgattagtaatatcattcaaaaatcaaaatgttaaaatttcactgttcttaaagtttatatcaaaacctagatccattacaagctttgttgtacacacatgcctaatttaagtatcaaacaaaagagtaaggtgctgtccatcctgtatggcagcagaagcaactattaatgctaatggtgatgattcaacatagggattacatgttcatcaccacatgcttggaaatgtattataactatgaagcattgtgtcttgcagttttaataaatgaggtgcagcgatgcggcttccataggggcaccaaattctcactcatttatgtatctttgccttagagaagaaactgcccaaaaacaaaaataatttccctagaggggagcccatttatgtatttcaatcataaatgaaaccaagcacataatttaatatttattgtttcgttgtacttgttaagagctcttcagcatatcccagttaatatgtccaatcaacttgtattttcatctttcctcaacatgttttctcttattagg

SEQ ID NO: 36730 - DNA, 766 bp, Sorghum bicolor
  Intron number 2 from transcript Sb09g022650.3 (locus Sb09g 022650) derived from phytozome v7.0 (chr-ID chromosome_9; pos 52278043 to 52278808 reverse strand)
ctggaacggaaggtaattttacatctggtttctcttatacggaaggagttgttttccaccgatggtgagcctcggtgagcgttgttgtgctcgcttgaggcaatccagagtatttgattagcattatcatctcatagtgaataatgaactcatgagtgtgatactgtgatgtattgttataatccattctatatttgctgatgctgggcaagaatgcttccatggaatatgactttttttgtataggggtagaaccacttcttcgatgttaaattacagtattacaccattcttgctttgactctcttgctgtgcagcatgttaatttacggtccctatgccattttattcattgttcactgacatggcttatattcaaatttacaaatcatatgctcctttactcctccattccaaattgtaagacgttttagcttttttagacatagcttttgctatgtgcttagatatacactatgtttaaatacatggtataaaagcaatgtatctagaataaccaaaacgtcttacaatttggaacggagggagtatatattttccgtgtcctcccttgtatcctcttttaacctcagtcatgacactgtttgtactagctcccactcacaccacaaatctgtaaatgagccagggctaaatttacatctgactgaccttaattgtccttatacattgaattattttttattttcttcaacttcaggtatttcatatatttatttgtttctctttaacagctgagattgta

SEQ ID NO: 36731 - DNA, 767 bp, Sorghum bicolor
  Intron number 4 from transcript Sb09g005310.1 (locus Sb09g 005310) derived from phytozome v7.0 (chr-ID chromosome_9; pos 6827077 to 6827843 reverse strand)
ctttggtgtgcctttccttccgtgcaagctcgctggtatgaggaactgcccagctgctctttgttagatattagctgtagtttgcagccttggcaatgtgaattacaactgtttggttttgcattatgtccacaaaaaactagcgccacaccttttaagttactgtgtacagatgcatatttctaggattatatagacattgaccagatggtcttcatggtacttgtgtctgataaaatcaatttccaccaactaccctggcaatagactaaatgcagacaatcattttctttttcctagccaattttctaggcaggacttgacatccggctgcaacttctctcaccataacagaaaacaattcagtgtaggatattgtgcccaccagtgcatattgtttgtggattgactggccaaatttcggcagtgtagtatcaaatgcatccacacttgttagatgcccctaaagggctgttaactaggaagtctaggactgaaggtgcacatattcccttttttggatttgatttttgggtttcattttttcttcatggcctttttttgagtgtaccaatctctatatttgggttccccttgcatatgtcattttttttgcctcttaatgattttgttccaaaaaatatattagtatgaaatttcatatttcttttacatctgtcactttacattgcattgattgtatgcagtgaaactaatgtgctatattaatcttaataagtcaatggttaactggtcctcaacagaaa

SEQ ID NO: 36732 - DNA, 839 bp, Sorghum bicolor
  Intron number 1 from transcript Sb07g002820.1 (locus Sb07g 002820) derived from phytozome v7.0 (chr-ID chromosome_7; pos 2991146 to 2991984)
actacgacgtctttgccactgccagctccaacagtgtaagcaaccgatttctccctacctctcatttgctgtccttttatcttcttgaggtttggggagttgttaatgatgaatggcaatgaaaggtatgcctttggtggtgtttgcgtattggtttggaattagaaagggatttgactatgggttatcatgtgtgtgttttttatagggaaacttaatatcttttcccatttacttgtttggaagcacgattaatggtttgggtagtaaaagggaaaatgactaaaaaaccattctcatacagaccatgtacttttacatagggatatttagtcatattccacaccatgtttatgtccctctcaaataaccattccccctagtgggaatgggatgattcgactagttcagatctctccctaacaacatcgttttccatacccaatttttttcttacaaaaacattgagataaacttaggtattattttactttcttgccccttctaatataatatgtttgtcactccacattttggtgagggtggtgggtatttgggggaatggaatagtattgtttttaatttgattgaaagctaggaactttggctgcattttattggaaatttgaggtccattatctttaatatattgtgatctattttgctgaaacatgaatttgttgtgtattttaattcatttgatgaaaagagtttatagggtataatctgtaaattcccttatgatgaaacaatataatgctactttcacctactcatcttgaggagtcgcttaccttgcttcttgatcttgcaggtgacagtttaccggtgccttgaga

SEQ ID NO: 36733 - DNA, 817 bp, Sorghum bicolor
  Intron number 1 from transcript Sb03g042300.1 (locus Sb03g 042300) derived from phytozome v7.0 (chr-ID chromosome_3; pos 69693914 to 69694730)
gacccgaccaacaccgtcgtctgcgtccttgacaagtgagtgctacatggaaaattgattgaattatttacctaaagtaccagatacaatgtcttatgtctttgaatgggtttcgcctcaaatggaattgcacaatatttaggggcgataataaatgtgtctaccacagttgagccgtaatttgcaaaagattagtgtacatactgttagatgtgtactctaaggtgtacaccttctatatagtaaataaaatgcatatagttgtgtcctgtgtaaactaaatggctctttgattttacaattctgaattgtgcaaaattcttgttaaatacaagtgattggtgtgtactttctcaggaactatgaagaattccttgggaacaccactaagtcacaatttgtaatttcactgtttctgatgcagggaacttaaactgttaagcaatgggagggatatttgttattggcttttctatccaatcagtttctaatttacatatgattaaaaatttaaaatatatataaatctagaagaaatattgttctccttttttttaaaaaaaaaatcagcctaaccaaaatggatgccatgtaacttttcacctctctggattttttacttcaacaagattaatgatagctttcgtttagatttgctatatgtttacttctgccaaagcaattatattttaagagtactctatatttaacttccttcagaacctttggtctcttgacatgctgccatctagtagcacttaccaacttttctcctccacattaccaacttaaatttatgctgtgtaaggtagctttg

SEQ ID NO: 36734 - DNA, 844 bp, Sorghum bicolor
  Intron number 1 from transcript Sb02g037670.1 (locus Sb02g 037670) derived from phytozome v7.0 (chr-ID chromosome_2; pos 71971236 to 71972079)
gcaacaacggccaggtatcgccttgcccaatcccaatccccctgatccccctccccgcgcttgatgatacatcatttgtttcgtcaattcaagattctttcatcgtgttcgacgctatctgcgcgatcctgttttattcagttacaattacaacgcgataaggccaaattttataggatttataataatggaaaaataggatatatatacatatatattattagaatatacgtagtaagtatataaattttgaattggatccgtcatttggtgctggttgttggcgctggtgctccagatgtacaacgacccgcgcattagggcactaggggattggtggcggggcctatctgctgccctttccgcttcttttctgtgacgacctgtacctctctccctccctccgcgtcaagcgggcgagatggagagatacgcgctgctgctcctgtgctggctgcgcgcctttggaataaaggagaagcctcccaagggatgcacgctgagagtggcgctctttaattttgctacgctggttatattgacaccatcgatcgctttcttgttaatccagctaagcttccataagcagcagcagcagcagcaccaagcaatgagccgtcggcgcgcgggcgccgcgcgagattccgcacgcgctgcttgcttgcctgcctgctttttttttttttttggttgaaagtgccgcgtctgttagttagatgttgctttcgatccatacgatacgaatgacgatgcgtgttggaacctcgggctaaatctaaatctaacggcacgcacgcgcgctcgtgcaggtgaagattggcgacctcgggctggcggcgatcgt

SEQ ID NO: 36735 - DNA, 806 bp, Sorghum bicolor
  Intron number 2 from transcript Sb03g034660.2 (locus Sb03g 034660) derived from phytozome v7.0 (chr-ID chromosome_3; pos 62833089 to 62833894)
tcgtggaaggattactgtttacgaggtgggtatctgcgtgatatggtgtttctaatatttttcatatgtctactatagtcggggtgagtatcagttccacatatagtgcaaaatgtcatgtgaattggaatattggatagctcggtgctccataatcagcaaaactaactttggctattctggactaaacgtggatgtggataggattgtcaaacacagtataactagcatcagggaagcatagtcgagattaggtcttttgggataaggtaaagcattgagcatggaggaaattaagcgttttggtgtgaaacaaccatgaggccagatgcgtatacagaacaacctatatgctagattaagcaaggacggaaaattaccatcatttgtggtgttgcttcttttaaatggtaatctcacccatgctcccacctggggatcaaaccctggttgcgggtggctcactccctcacagttaccaccacaatgtgaatcaaaactgctacagagccacatgagctcaaaaatagagttggttgccacttcccttgtttgtatctttgtcattacattgcagcaaatttgaaccatggtctatgatctagaaaacacttttcactcgatttaaaaaaaatgctagtaaaacattagtacaattttgtcttcctgtttactcatttgtttgtattttgttgtttaagtttcaataaatagtaagttcaatatttactctaatttgtatgtataacaattccagtattggttctgcagttgtcccaacagctttggctactgctcttgatata

SEQ ID NO: 36736 - DNA, 490 bp, Sorghum bicolor
  Intron number 1 from transcript Sb01g030700.1 (locus Sb01g 030700) derived from phytozome v7.0 (chr-ID chromosome_1; pos 53280038 to 53280527)
accgccgtcgccatcaaaaacctccacaacaacaggttagcttctttccgccgcttcgagatttgtccggttggatcggaagcgtgaacaaaactcacacgcaaatcaaacttttctagtcgtttttttgtttcctggatctcatgctggaaaatctctcatttcattttgtttataaaagtttgttatcaccaaatatctgcttctttcttggttggccacgagaagagaggtggttggttggttgttacgtttcaatttggattaaattgcttcctgtattgtatcctcctgaacataacaaaaatcaaactctatccactcttcagatcagtgtcagatgtagcgcgctagctagccacaccactgatcgtaatcgtttgtttatcttctgttaataaaagaaagatttgtatttaatacaaaataatatcaacggctgatgtgtacttaattaatcatcaggggtcaggccgagagagattttagg

SEQ ID NO: 36737 - DNA, 987 bp, Sorghum bicolor
  Intron number 4 from transcript Sb03g030230.1 (locus Sb03g 030230) derived from phytozome v7.0 (chr-ID chromosome_3; pos 58493976 to 58494962)
cagttcttggtattgtggttgacaccaaaccagatgtaagtatacattatatattcagaagtatttgagttcatatttgtttctagatatttatctgaggctaacatggatcatggctgtcaaaattacaattatgttttacgattctacatatttgcgatcttaattaaagggcttgattctacaattctagtaatagaatatactccctctgttccaaaataagtgatgttttgggtttgtcctaagtcaaactgatttaagtttgaccaaatttttaggaaagaacatcaatatttgtgacaccaaatagatagaatatgaaaatatattccatgataaatctaataatacttatttggtattataaacattagtacttttatgtataaatttggtcaaacttcaaatggtttgatttaggacaaacctaatcatcacttattttgggacagtgggagtatgttttttacaatctttatgtttaagatttgtaatttgtaattgttgacaaccttgatggaatcagataaagaagcaccataccaaagaaaaaaatagctggtagtattgaaacatggacaatcactatcaaatgacatactacaacagtacaactacacaatcccttctactatagcattaaactgcgtgaaagtggcagaaatattacttgatttgcttggtggacaagcaatgtggaattgtgcttccttcaaaaatgatcaagtgttgcaaaatgaagaggatttttgtatatatacaatgtcaaatacatatatccctagtactggcaagatgatcagctgattaccttttcatacagttctaatatacaaacagaaaccagaatgggctttcactagaagctagatatttgcttttttatgttaaataattgtattttgcctgtgatgtgttttctttgctgaaatagctttggttattacagaactttttggtagacataaagggtcctaatttggc

SEQ ID NO: 36738 - DNA, 933 bp, Sorghum bicolor
  Intron number 1 from transcript Sb01g001450.1 (locus Sb01g 001450) derived from phytozome v7.0 (chr-ID chromosome_1; pos 1341850 to 1342782)
gaagaattgtttcaaatatacactcattcagaaaggtgagtttatcaaattatttcttagcatggatttcaagataagtcctggtatttatatccatcatatggccttataagacctaaacctgcaaattctcttctacctgtattgaatggaaaataaaaggagatatagtttctgctaaaaacagccaagccatgtggccatgtccctatatgaccattttcatttcaaaatggctaataattgaattcttccgttaattctgcttcatggaattgaggtgggaactgatatgctttgtggggatatgcactgtgggtgcacacttggcgttttgtttgccagctagagttaacataagaagtggaactgcagcatcctcatgaattgagggatcaaatagtcaaccctatatcaaaacgtattccagcatgtggctctgcttaccttttgagatctgtggcaggcaaaactatttgtaatgggatgttgttatcatatgctaggttgccagaaagttgtcctcaagcaatatgcatgtcagacatgttaaatggattgttttgtcttagttgaacctaacaatggaatatagcatcgcattttcagtataagattggttgttggctgaatcaaaatatcattgtattgcacagcttataattatgcaaagcacatacgttcatgaaacttgataaacttatgtatcatatgaaccctggaaaagtaggcagagagattatatactatcagtggtttatgcgtctgcatagtatttacttagtacttatgtttgtttatgttttactttcatgttgtgattatggatttattgtttttccccatcacagcattgcacttgttgtggacagtcctcaattctttaaccggcttgcagaatctttcatatcaaggattaatacaagattcatt

SEQ ID NO: 36739 - DNA, 577 bp, Sorghum bicolor
  Intron number 3 from transcript Sb02g033190.1 (locus Sb02g 033190) derived from phytozome v7.0 (chr-ID chromosome_2; pos 67896759 to 67897335 reverse strand)
ggaaaacggggtagatacatcatttatcaaccgtatgatttcattttgaaatgttggtatctttgagttgtatttaatgagttatatctgttttgcatgcttacaacataagtagattgagaatggtagcttgattgcaaggtaaatgtgattgtagttgtttcatccattagattttatagcatctttgatatgcaattaattgtgcttgtaccaacaccaaactcatacccacattgtttctcttttgaacaagaactgtacatactcgcttgtttttcttggcatgataaagaaaatcacatgtggtaaagaggctcattcagtaatcagtactgttgtcatgttaaagtcagtttacagaacattgtttctcactctcttagaatttgcaagggaaagttttttgttagcatgaacatctgtggtcagttcttcagacaataacacatttgttatagctaatggcctagtcaatagtaccattttttgtgggggatatggatgaatgaataggttttgatgccagggagtcatttgtataccaattaatttttgtttctgcagctgctgaagc

SEQ ID NO: 36740 - DNA, 823 bp, Sorghum bicolor
  Intron number 1 from transcript Sb02g039025.1 (locus Sb02g 039025) derived from phytozome v7.0 (chr-ID chromosome_2; pos 73147624 to 73148446)
aggtgcttcagcacggaaatatttgtcagcagtaagtacatctttgctgattcgtgcttgtctccgcagtcacatggttcaccatatgatgattggatttgtgccagatcttgtatgtgaccacgtgatgatatggtactcttgtgtttgattcatgtagatgtagcatgctagtcaggtactgtggagctgtgacttttcatggttttggcagaagatagcactagttggtggtctaagcttttgacatttgcttgggagcatgtggctttcagggtttgcaactagtatctgatgctatcagaatatgattccttttaatggtaacacttagtgccgttgctacctagttcctcttcctcacaagtagttgaccataagaatgatgatgaatttctgtatccatacatctagtgctgaagctggtggaatatgtgtggttaagctgtcatcttcatgacttcacctctgaaattttgctgttaatcgagttttggagatgattctcatttgttaccatggagcttgattacaatgtgaacacagtatattgtaaagctgatataaatgcttccaacatacccaccctccctttccttttcttcttggtaacatttgttgtgaacattctgctacttatgcgctctgatgaagacaggttctgctcatagggtatatacatccccatgttttactgagtattttgtctaatgttgtctgttattactcctgtgtggttgtggcatgcagtattaactcattgttgttgtgtttttggctttttgcaggattatcattctatacaacggaggaagaattcaaa

SEQ ID NO: 36741 - DNA, 788 bp, Sorghum bicolor
  Intron number 1 from transcript Sb06g018010.1 (locus Sb06g 018010) derived from phytozome v7.0 (chr-ID chromosome_6; pos 47451865 to 47452652 reverse strand)
cccgcccgaagcggcgccgtgagcgtcagtcgcaggtccgtggtttatttgtgatctgtgatctgatgctgctgtaacacccgaatgaatccatggtgtagtagctgctgcgtctgtccccctgttcgacgccattctttccgttctgctgtactaccgtgtacaatctgcttctgctccgtgcagagcaccactagttgagaggctatgtgatatgagagttgtgctgcagctttgattggttgttaccgtgccttacctgatctagattgctagttctactactgctgatgtgctattacagtgttcgctcgtgtgggggttagaatcgcaatcgctttactcactttaaatgggcttcaatgtacaaagcgatttatatttcaattattgcactggatgatataaactaacctgtcagttgctcttttccattttcacagtcaagatcactccacatgtgaatgatcgagtaaaataaaataaaaataaaacatacaatgtgcactcaggatattggtgcaattttacaaagctatatactactgtctagtgttcattagattttatagatctgaatgtttttactgtttgcaattccaaaaaaaaaaaatcagaagaaaacgtaccagtgcttcagttatctttcttgaaccagaaatactcattttcctacttatgtaggagtatataattagttattattgttttttttttgaagttctgcaatcacaacttttcatcttatgtcagattagacaattgctttattttcacaaccagtgtaa

SEQ ID NO: 36742 - DNA, 460 bp, Sorghum bicolor
  Intron number 2 from transcript Sb04g023860.1 (locus Sb04g 023860) derived from phytozome v7.0 (chr-ID chromosome_4; pos 53547847 to 53548306 reverse strand)
gatctgcggacctatcgccggatttgtggtacgtgcatgcattctcttgttcttgtgtgtgtatatatatgattccgattctgattcagttactaggagtatttggataaatataaagaacgttaaattttgtgaaatggaaataaatctgtgcagtttacgaaactgctcgtctacgattcgtttccatcttttatgttataccattttgaggttttaactgccaagatttagtattttctaagagataagataatctccaagatttattttcaggagatgagatgagatgagatgagataattaccaagatccgtttttcatactacgtctatccagtcatcttcctcctcccttttccgaggccgccggcggcggctggggattaatgtggccatttactggaattgatttctcgttggcaggtgcaacccatcgtgggctactacagcgaccggtg

SEQ ID NO: 36743 - DNA, 354 bp, Sorghum bicolor
  Intron number 1 from transcript Sb04g001570.1 (locus Sb04g 001570) derived from phytozome v7.0 (chr-ID chromosome_4; pos 1338118 to 1338471 reverse strand)
gactccgaccccctcgccatcccggtgcgctccctctctcaacttcgtcattttttcccacacaaaataaatttgaaaatttatgcttgtccctgtacctggcactgcaatctgtgaacaatagactcaactttctctagttattatctttgaattcgagcaaccgtagtgtctgagtgccttcttctgatgaactgccatttcattcatacttgtgcatgtgcacgccaaggacatttggaaatgtcttagcttgctgaactatatttgaaattccaaaatggtctgcacagaaacaaaaaatcatcacctgattcgttatcatctcgtaacttctattgttgttgcagttct

SEQ ID NO: 36744 - DNA, 885 bp, Sorghum bicolor
  Intron number 1 from transcript Sb09g007930.2 (locus Sb09g 007930) derived from phytozome v7.0 (chr-ID chromosome_9; pos 14530206 to 14531090 reverse strand)
acatcgtggtaatcttctcttttgcagtgaaaccgtgtagagaaccctgattgtgggtagaaactagaaactattaactgtgtgaaacccctactcttctattatgttcttgataacctcataggcattaagccataacacgttttccatctggcatttcttgcaaaaaaaaagaagatctttttcttttgaattcgtgatgaagacactctggatgtaatcatactagtatgagtatcttttgaatggtggatgctactatgctagagaaagtgtttagttgattgaatactatggaacattaaccatacaaggccgagattgtttaagttgcagattgtggattgcagcctttaagtttgtacaatcttgcagttgaaacaaagcaactataaggttctatcgatcaacaggccagattattacgatccaacaatctgcttcctacaagatgcaacaatttgcaagacaaacaaataggctaagaatacatagccttgtagaaataaacagtgctttggtcgcaaacttgcaatgtaatgtgtattgattggaaagcgaagtatggaagaataaactttctgcactgatctacttatttttgtgcttatgcatcaatattgtgttatcttgtacaaattaactagctataagtgaacttcttgtgcatttatattgaaagtttctatgtagcattaagtgcaacttgccaagtctattttgacttaattgtaatggaattttgggcattaagggtttcatcagtcttcctttgataccttatacttctattccaaaacagtaaaaaaaaactcatagccatgtcccgtgttcatataactattttcagtgacttgcaggtacatccatcactacagaggagag

SEQ ID NO: 36745 - DNA, 814 bp, Sorghum bicolor
  Intron number 2 from transcript Sb04g016750.1 (locus Sb04g 016750) derived from phytozome v7.0 (chr-ID chromosome_4; pos 38980166 to 38980979)
atcgataccaccgcgaagatcaagcaggttgcccctttcttcccgttatctgactcgtttcatagattcgggtcgtgcctcatctttagggctttttagtggtctgggtcttggtttgtcccgcggatcgaaactctgacggttgccccatattggttgtttagtgcggctgctgcttataatacaattgtagtgtgttttagatctagtctggtcagcagctatcacactcttttttttttttttgccttttttctgccagtaacatgctcggttgtatcagtggcgcattacctgcatacttctacaaacagttacaatttgtataaaaatggccagcttgatgtccaagaattttggctttgtaatgcagtgatattgtttgccttcaatttcttttcctccaagagctcccatatgaagtctaatgctgaaccttttaacttcagcttaacatatgtgctttacagaattttctaccttgtttatttcctagtatgaactccaaataataagaaaaaggaactgatttgatttttgttagttattattgaaagacaagttaatggtttgctagtaatgctgtgataacatcatttctgtcgttttacaatcatattgcacaaaattatttagagactttgtaaatgcaagcatattagttcgatttggataccttgatgggttctactctgttgtgattttatctttgatggaagtttctttgtgaggaaatttctatagtaacttcaagcctagatgtaatagaacctctgttataataatacctttctttcatcagttacaaacccaa

SEQ ID NO: 36746 - DNA, 870 bp, Sorghum bicolor
  Intron number 2 from transcript Sb01g033590.1 (locus Sb01g 033590) derived from phytozome v7.0 (chr-ID chromosome_1; pos 56917637 to 56918506 reverse strand)
ctcgatttcaccgaacacagcgagcagggcgacaggtgaaaaaaaaaaaatcttccatatactgagttgatttattcttgcaattttttatctgggaccacaacagctgcaaagtagtgctctctccgctgtgaaaaacgtggcgtgcggtccctgatagagatcaattgtctgtttcatgaactgcataccctgcgtatatttcactatcaatgttgagcaaaattttgatttgaaaaggacagaaaaggtagtgttgcacaaatgtgtggtggtatcgaaacctgcccagattcttagatgctctcgtgaaaagtaactgtcaccaaaaattacattttgttgttgttgttgttattgttgttgttgttgttgttgcgactattcagttatatttatagcaaatgaatcttgaagttactagactcacttaggtaattagaagtaattgtcatagtcagatccgaattgtaccgtgtgaccttttgacaggactgtctttgtccacagcctccatccttctcccataccactttttcattaactttttttcaatttttttctcctttttatattgttaaatgttaaattcacggaccacataaactttgatatgtatggtccatatgttagtatactatatggaatatggtagtggtgaacaacaatccagtccagcttcagtaacagctattcaaatattgatatgtctattgtcgaattgttttgtggttcctctttaaaaaaaattgttatggtgaaaaattgttaagttttcgtctattccgttagttgtgacgttgtctattgatgtgaccaagtgaccattgttgggatgctgtaggtaccgtgaattggcacatcgggttg

SEQ ID NO: 36747 - DNA, 570 bp, Sorghum bicolor
  Intron number 1 from transcript Sb08g000630.1 (locus Sb08g 000630) derived from phytozome v7.0 (chr-ID chromosome_8; pos 556318 to 556887)
cgaccttccaaggtaagataatcataagctttcctagaagaggggtatttttagttcaactttgttcttctggatccaaaagttccagcaaatctgaagccgcggaaccaaaacaagaacctgtgtcattcagtcagtgtcaggatttttaaagggtagtaatcttttctgtggaagcagggaaacattcagatactctataaccagaacagaaaacaaaggatagtattgcagagagagaaaaaaaatctatactggttaacattggaaatttgatctaattgcggtggatagctggatggccaatcagaaaccaactgccatgaacatactttaacaggccatcacaagggtactaattgacaatgaaagaccaaagacgacgaacattgcatctcttcttattttattataaattctatttgataagcctggaaggctaaaaagggggatcaaatctaagcataaaatccagtcattgttcaaattatagaatgcttccaaagttttgaaaacaaaaatatatggtgcatggtatttacaacacacgacctggtttaaacagattcg

SEQ ID NO: 36748 - DNA, 487 bp, Sorghum bicolor
  Intron number 1 from transcript Sb09g019950.1 (locus Sb09g 019950) derived from phytozome v7.0 (chr-ID chromosome_9; pos 48957885 to 48958371 reverse strand)
gagagggtgaaggtgaggaggtgtttcttgagacttggaacatgaaaatttatgagactctgataaatctcaacaactagggggtgtatttcttgctaaaatattgtgctaatgtgagcttaagtgattacttttgtgattgtttcgtaagagtatgagccagcgttctttaattcatttatagaactatactaggtttagactttcaatcaattttgctgaaaacattagtccttagtaaatgtgatgttgatgcccctttgatgtgacaagtgtgagcttttacttaatgaatatacttgtatagaacaagaaccttatatggaacttagcatggcaagttaatgttcatctgtggtcagtgtttcttctttctgatttgcatggttatctgatgggtgcagctaatcaagtatcatttacctctaaactcaatatttgtccctttgtaggcttggataccagaaatagcagctaccacctcatc

SEQ ID NO: 36749 - DNA, 414 bp, Sorghum bicolor
  Intron number 1 from transcript Sb04g036230.1 (locus Sb04g 036230) derived from phytozome v7.0 (chr-ID chromosome_4; pos 66002303 to 66002716 reverse strand)
atcccagaaaccctgctgtaagttgatcacctgttctatccacttctttaaggccttgtttacttcgcaaaaattttcaagattctccatcacatcgaatctttggtcgcatgcatgaagcattaaatatagacaaaaacaaaaactaattgaatctttggtcgcatgcatgaagcattaaatatagacaaaaacaaaaactaattgcacagtttatctgtaatttgtgagatgaatcttttgagcctagttacttcgtgattggataatgtttgtcaaataaaaacgaaagtactacagaagccaaaaaccaaaatttttgcaaactaaacaaggcatcacttcactgaacctgcaagttgttgtcttccttcctcaggtgatcgccgacaacgtcggagacaacgtcggcga

SEQ ID NO: 36750 - DNA, 840 bp, Sorghum bicolor
  Intron number 2 from transcript Sb08g018570.1 (locus Sb08g 018570) derived from phytozome v7.0 (chr-ID chromosome_8; pos 48777665 to 48778504)
gcagcgagccagaggtgcgtgtatctccaccatttcgtcacaatactgaattctgtagcacggtcgtaaatgtttatttgaggttgtcataattcttattggtagccattcttctctgccaccaaattgtgctaagctaagcatagttgcgatggcagagggttaccactttccagtctctgctgccaagtcggtgcaggttttatcatgtgagcttttaatgcaaaaggatgaaagatgtagatgtgtagttgtgaggttcttcaaattctggtatatgcaaacttcagccttcaaatcaacgtgctagcttgagctcttataatttgcctagctaccggttagtgtagattgggacatcaccaatctaagcatcatcagagtattttaggtcacttggtgtatctttattatattcactatttcacaggcatactagatgtacagtctatatacggtaacatggactggggctatgtttttgttaaattctgatctgtaacttttgtgtcttgaatggctgttaaacaattgaagtgtcatcatgtttccaatcctaaacaaatgcttgttatatgatcagatatgctctggccgttaaacaattcaagtgccataatgtttccaatcctaaacaaatggacaatatagatatgttccttttttttgggcactgctaactataaagtagagaaaaagtagacatatttgtcccactatgttttttccttttctttatctcctggttatggacaatcaaaaaatgaccaatgcagtttgttaatctgaattgttctcatacactaaatgctgatccattttttcttttttggttctcag

SEQ ID NO: 36751 - DNA, 1031 bp, Sorghum bicolor
  Intron number 1 from transcript Sb09g017970.1 (locus Sb09g 017970) derived from phytozome v7.0 (chr-ID chromosome_9; pos 44890369 to 44891399)
ctccaacccgcccgtcaacgccctctccctcgacggtattgcccccaaaactgttccatttccccgcgggcgctctgatttttttcgctcgtgttgtttccttagttgggggacttggcgtggggaatgatcctggatcaatcgatcttcgcttcgccagttcgcctgtaacagtagcttttgggggggatgaactgttcactgcttgctggggatgaaatgttcacactgcctgctagtggatgaacagtagtattgcctcttttgtgcatattcagcactttgttctttgttcccgtcgttatagctgtgatttgtaataagggaagatatctagtgcaaaccacaaccttcgtgaaaacctgtgcaaaccaaggcaaaaaagtcatctaaatttaccaaaaaaatcacacatgtagatgatatgatgatacacaaccttgtaaaatatcttgtccaaactcaaattcatttgtgagacataaaaataacaaatttctagcaaattctgtggacacctttctggcttgaaatttgttatttttatatctcacaaacaaagttgagtttggacaagatattttacaatgttgtgtattatcaaatcatctacatgtgtgatttttttgatgaatttagacaacttttttaccttagtttgcacaggttttcacggaggttgtggtttgcactagatatgttccctttgtaatatgttttatttatgcaacaagtcaacttatgttggctctagcggagtggctgttgcctcgtactctcagggtcaatcatacatgctggtatacattctaggattttcgtttgtgtggcctgataaagcaatctagcagtagtactgttccacttgctatgggaatctgctgatcattgttcttactctgcaactttgtactatgtttcccctaaatcaactccacagaccgttaatgtgccaggctgattggccctgtcgtttactcgtttatgttttttcagtcattgctagtttgcagaggaactatacagaggct

SEQ ID NO: 36752 - DNA, 905 bp, Sorghum bicolor
  Intron number 2 from transcript Sb03g039200.1 (locus Sb03g 039200) derived from phytozome v7.0 (chr-ID chromosome_3; pos 66936487 to 66937391)
tatcgctcggcgtagcccaggagctcggcagcaaggtctgtgcttccaattgctcattttcctcgcacaaatcagctattcagttttaggtggtaaaactagggttttatttcttccccttttcttttgctatgggagataatgtctcctaccaataacctggcattgtaataatatttggttgtgctcagcacatttgtaaggaagagggctggatttaatctgctactccctccatcccaatttataagtcattccaagaatcttggagagtcaaaacatcttaagtttgaccaatattatagaaaaaattaaaaagatttacaacatcaaatagatattactatgaaaatataactaatgaagaacctaatgatacttagttgatatcataaatgttattatgttatcatataaatttggtcaaacttaagatgctttgaccctccaagattcttggaatgacttataatttgggatggagggactagttttttatatcgactgatagtcccagatttttatctactcaattcgtctattggactgtggttgtggaggcgaggataggttctgataactatgggctgtcttcaattatttttctgtttataggttaccctgtttggtgagcaaggtctggatgagcaaaaaagaaaaaaaaagttttgctagtaggctatagggatcttgagatattttagcatacttgatgtcattttagctgcatggtttaagtttcatgttcaactagctgaattggtgttctaaagggacagtttaaccggtaaaatgttattgatgttgctatggtgttatgcttgctgaattcactgtagattttttgttgttctaatatactgtttccttcccctgtaactacaatgcaggtccctttctgtcct

SEQ ID NO: 36753 - DNA, 934 bp, Sorghum bicolor
  Intron number 1 from transcript Sb03g039220.1 (locus Sb03g 039220) derived from phytozome v7.0 (chr-ID chromosome_3; pos 66950169 to 66951102 reverse strand)
gaccggtccgctccaccactgcctcggcgttctaggtatcctctctctcggctgtattgctttgcatccatccatggcgccgcccgtgtgcgcccgtgtttcgacaacttggtttttgttttcatataaataaattagttgctttctgcgacttgtgaatacgaacgttgccgattttttttgggtactattaagttgacgctagggtggactagcttgattctttttctagtccagagctggggatcaaattaggatattgggtagtgctggcctagatgcggcctagttcttaccgatttgctattacgccactttgggaacccagcgcaaatgtgtgtactgtatctttccgtataattttagctttggggttctggaaattccgctcctgcctatttgaggaagggcagtctccatcacgtgaggtactcatttcttggactgcgcatgcagaagctctggaaaattattgttattttttggttggtgtatagttaagcggcaactgacagatcagcatacaagcgtaaaggccttctgggtgtcactagttttttttttccttttccaacatgtcggcttctaagtagtggaattgaatgacaagagtcctattcccatctcagttactccatttatagtcatgttctccattgctatatgagtgtacctttttttttctttgctttagctgtctgggatagttctgtttagttccaggagttctattctatctccggtgccatatactaggaaaagcaactacaaatgaattttgaagtgtgactttattaaaaaaaaactgtgtgcatggtaattttgctagtcatatcattttaaatccttttgactttcttattttgatgaaacttttttacataatttcttaatataacattcatggttctattgacagctcaaggtcctgagg

SEQ ID NO: 36754 - DNA, 876 bp, Sorghum bicolor
  Intron number 3 from transcript Sb04g004540.1 (locus Sb04g 004540) derived from phytozome v7.0 (chr-ID chromosome_4; pos 4379513 to 4380388 reverse strand)
ctcttgccccacaactcatcaagggtgtcaataccgtaagatttctactcgagtgccgaattctacattttcagtcctgtatttttttcagaccactcaaaatgttcactgtgagctggttaatctttgatttcaaagctttctagttaagagttgtaatgttatattttccctatctcagctaaatgttctgtatgtattgcaacaaaaatgagctgaggtgtagaccgtttgtttagacagcatcataagcatataaacatgtaactatgatgttgaagctatttaattatccaacagctagcaatttcaaccaccattgttaacagcactgttgacgtgccttttgtccacaacagaaccacttgtaaagcatataggtttttcaggctgattatcaaagctaaacagctacagaaaattttaagttctctagatattgtaaactacattttgtccactacaatggaggtaatgttaatgtggttaaaagtataatcaagttggttctttgaagacaagtatggtgcagctgtttagcaacagaattttagctcaaaattggcattagaatatgctcacagcttagctaattcatacaagaatgtttgaagttcatagaatagtagtaggattgaagttctacaaagtgtatgcgattactggtgtattttgctgctttcttattttttcttgttagggtacatttggaatggatgtattgtatgatattttcaccacctattgcggcaagtaataatgtattttgtccatttcttgattgtacagcacgtaaatgtttttgttgtcgtatggctcatcatgtagttaaatgtaacccctcatctgttggcaggcaaaaggtgctgaaattaa

SEQ ID NO: 36755 - DNA, 903 bp, Sorghum bicolor
  Intron number 1 from transcript Sb08g020420.1 (locus Sb08g 020420) derived from phytozome v7.0 (chr-ID chromosome_8; pos 51441156 to 51442058 reverse strand)
gctctcagcttcctcaaggtatagcatacatcaaatttaaccttgaatctagctagtttctgctcctgaatcatcactcttgtggttgatattatccgttatatgggagcacaaaggagcagtggatgacatcaagaaagcatttaggcactgctcttgtttccttctatatacgctactttcagctattgccctagctgagtctattggcattggatggaagcatgaatgttccaaatcatactttctccctgtagcacctttaattaaatctatgaatgacattcttaggtctctgattcctgaaacttgcagggaggccatggaatctacgaagaatgctgcttgccttggagaacaggaccctcgagttgctgcatgtgttcgatcagactaataatcaatcctctataatatctatggggattagcatcagcgcactctactactaagatcattttaacatgttcttgactcgatcttttggaaatatcatttctgcctggagttaactggtgccgtacgttgggtctcttccaaggagaattgtgagttatttttccttgtaaagtactactaccatccatttgggtagcacacttgtggaccaactgatgacctgccaagggggactcaaccgatgatttttctgtcagatggagatcatctttcgaacaagttggtacaacctgcttctgatcaagaggcttgcatagctgttatagctgaattgttattgtgcttcctgatcattttgtttttaggaaccaaatgggttgataacgttgtgcatgcatatgctgtggatatatatgttttgttatcccctgagctactggatctaaatgggatgtgcctaatgccacaagaatctgtggcgaggccgcgctggaggcgtgcggc

SEQ ID NO: 36756 - DNA, 658 bp, Sorghum bicolor
  Intron number 2 from transcript Sb02g007010.1 (locus Sb02g 007010) derived from phytozome v7.0 (chr-ID chromosome_2; pos 8967209 to 8967866)
ctgagatcaagaaaacagctaaagaaggccaggtatgaactctggtatcttttggaacttcgaagtcatattttgactctctttctcttactcagcgtgcttgatatttggaattgttggaagccattttttcaaagaatttattttggagaatagcctgacctaaatcatatgtatacaacaattaccatgtgtgcgggaactgggaacttcaagatatgtccacctattttcactttactggaacacctgtaagtttggttgatagccacattttgccacaatgaagtcaggaaaatttgactcgcctgttgatttgtttgttcacacaccaattacattttcctagcccatgtgtcgcttgtcatatgtctgttccattcccaagcttgcaagactcataaatagaacattaaggtcagcttaggggtctaaaacttctatctaaattatatcaagtatgttatttacttcattcagtagcgtagcaatattaacctggcaattctttctgtcaatgtcttgcatcttcaatttacaatgcataaacgactaaacgtacacggaagttctgtgtgcaatgttagaatttcattcattttgcatgtagtgtttgttttctaactttttgttactgttatagggagctgtcaaagta

SEQ ID NO: 36757 - DNA, 929 bp, Sorghum bicolor
  Intron number 2 from transcript Sb01g002710.1 (locus Sb01g 002710) derived from phytozome v7.0 (chr-ID chromosome_1; pos 2242331 to 2243259 reverse strand)
aggagagagcccacgacttccctggcgtatgattccatgattcggccgttttgcttcgcgtaactaggaactaggaacggtgcttctatggccggggtttgaactattatttagatttctcgccttctcggcgttcggtttggaagaggattgatgaacaagttatacctagatggacagaaacaagtgaagaacgttttgggatttcgtcttgctgtgtgctttttgtgttttgttggggttgtatggccttatgggcatggcagatccaaggaagaactgacatgatgttatgcaaaacgcagcagcagtttagtaattctctgattgtcaaactatggacagcttaggttccccatgaattatgttgcgccaaactcagcaaagtataataatgaatcaaaattagtgtggttgttaattcagtacaaaggcatacttacgatcctgatcctgtaatggacagagcaagattattatatcgttactagttccagaatatttgggtttgattttcatatttggttagtgacttagcatacttttgaatagtataagtatatggacgtgctgcttactctaaaaatcatgttgctacattcttggatgtgttagcaatttttcagcatacagtacagttcgtggggctgcatcaataaatccacatgcttaaaataaaatgactgaccggctatttcgattctattttgattctatatcgaagactgctcaacttgtaactattattcaacaagagttacgcgaatgtcacattcgatttcaatttcattatagccattccttattgcattattacagtttttcttaatctggtttgcgctcaattgtccttattttccttttcgtatttatctatttgttcaccattcaaaaaatgatatacagaaactgagtgtaagggagttctc

SEQ ID NO: 36758 - DNA, 777 bp, Sorghum bicolor
  Intron number 2 from transcript Sb01g038980.1 (locus Sb01g 038980) derived from phytozome v7.0 (chr-ID chromosome_1; pos 62446223 to 62446999)
catgtattacctgtgaacatagtttgtcaagtaatcagcatatattaattaattgaccatgccttaggtaccacataccacatgttagtcctatggcacttttttcaattcatagatcatagctaattattttttcttactctaattataatatatattataagatatgccttgtagcaatatcacaggttattggataaaatggagaatttttttttcctcaatgagaaggagggctgcataccaggatatatttttttatatcctcagcttatcacacagccttattattctgaaatattttgtcgcaacgagagttccttgaagaaacagtactggtactgatattattgagaggaatcttagtgatagtgatctgcactgttgaacttgtggttttcaagggaacaaggataatggacttggccagaatctgaaacacccatgaaaatataattttggggcaaagcagctcagttttgtagttcctaaagtggtggctccatattttttgatttttgtactttcactgtcacaaagcaacattacatctagcttttaagtaaaagaaaagcatgcataaccgaaagataaagcaggttcgagtcctatttttgttgaaagtcctctctctgaagtcagaatgacgtatagttgtatttgtacctgtttaagaggattttcgaaataatctagacaaatctttgctgttggtcttgctaaatgctaaccttatgtatgtataattgtttttacagtttcttgggttgctggttg

SEQ ID NO: 36759 - DNA, 565 bp, Sorghum bicolor
  Intron number 2 from transcript Sb02g025940.1 (locus Sb02g 025940) derived from phytozome v7.0 (chr-ID chromosome_2; pos 60987517 to 60988081)
tgtttggtgctggggttgctgatctcgtggaaggggtatgtgttccttttcccttggatcttgattatttgttgcagttggaaaatattgatatttcctctgtgtatcatcaagttgttggttgaatcagttgcaattatttgatccaattatgatgatctactccctttatcttcaagtcaataatcatgtggcgctttcatttgacttgtactatcttataatcacctaatgaaaaattgtccatttggatcaacccaatgtgtgacttctgcgatattgtatgagttgtttagctgacaattgtatcacattgtttagtctctttcttaatagttctttatttgtttccacaaccacaacttgcaaccattttgccaatatgttctgagttgcctgcattcttctgtttgacatgtctactttgaaaattcacttttatttgatggtatccatcatcatggttctaaagttgctccattctgttgctagctccattgtccttaagtttttttgtctgatctgttcaggtatccaagttgagccaccttagcaaacttgctcg

SEQ ID NO: 36760 - DNA, 269 bp, Sorghum bicolor
  Intron number 3 from transcript Sb02g043050.1 (locus Sb02g 043050) derived from phytozome v7.0 (chr-ID chromosome_2; pos 76830078 to 76830346 reverse strand)
actcttgtttcggtgagtgaaagtttagatctatttgctgtttattcttaattcaattattttctggttaattgttttttgcttgaaatattgtttcttgagagttccctgcatttgaagcatttgaagttgttgatcagtttgaagttgttgattagtttggatcattagtatgtgaagattgtcatatctattcatatgggtattcattttctgtgtttgagttgttaatatgtgaacattttgtgatatcttttcaggtgggtgtc

SEQ ID NO: 36761 - DNA, 815 bp, Sorghum bicolor
  Intron number 1 from transcript Sb02g007530.1 (locus Sb02g 007530) derived from phytozome v7.0 (chr-ID chromosome_2; pos 9512946 to 9513760 reverse strand)
ccacgccatctgtgcccgtgcactacttgcccaaggtctggctccgcagattcttgttcctctttcggtggaattttaagttgcgtgcctggctttccttgcaccggttgcgttgcgcgtcggtgcttggtttgactgcgacgaaacgtctatggctgctagaatcattgcggcgaaaactgctgctgattgttagattttcgactggtggtgccaaattcgtattgctgctgtcaatcattgtgattggggaaagtttgggacccgtagctgtgaagaaactttgcttttctctagtgccaagttacacatcaacgattggagaattagattagagaatattccattttttcatatatttatgccaacttgttttatatatctgtgctgcatgagtgtgttactgttggtgatttttttaaaaagttttttacctagtacacaattggaaagtgttgctagagcgatcaatatcaactgcactgatgtagaaacccttttcttcaaacaaagaactgttagctcaaaggttgggatgagttcccaatgttgatgttgcagtcatgtgagtcagccaacctaggttctttccctgggcaagccagttgggaagcacttagtgccaaaaagaatataatcagtagccttattttatggtcaggccagcagtcctgcttccaggagagggacaatttatattcatcatagaaaacggagtttttttgtgagatttattgaatatgttgcttttgagttcttttttcctcggtttgatttgttttatgataaatgatgatgcatttatccagaccagc

SEQ ID NO: 36762 - DNA, 936 bp, Sorghum bicolor
  Intron number 1 from transcript Sb04g001910.1 (locus Sb04g 001910) derived from phytozome v7.0 (chr-ID chromosome_4; pos 1633501 to 1634436 reverse strand)
ccgcgaggtcttccccggagacgagcacccaccaggtatgcgcaccccttctcgccccttcctgccgcgggaaactgagcgcccgaaccctaactttgagctatctgggtatttgtattcggatctgaatctagttacaagcataggcatgtattatgggtactatctttcatttttctgcaaatattattgggtttgcacgtgcatgcctatgccctttgctggttccgccgctgaccgaaccctaacctaagctacttgatgtttgtatttggatctgatctagttacgagtgtatacgtgtattatgcctactatcttcgattttttttggccaaaattacaccatgggtcctcccacctatctttttcttcaattctgctcacttgtgttgctactatgtgtatagaatgtttcacccagtttccttcgctcccatttgaaataatctttcccccaatgcagaatatgtgtacattttgaatagtagttggtttgtgaactcaaataaattgcaagtgttaatttttgtttgtttagattagacgggtatactatgtactagcgttgaccagtctgcaggttgaatgacctgtccagttggacatcttattagtgtttagacaagcagcatatcttgtatccaatgaaggaggcgaaatgtacttatcttttgggtcgttctgtttgtttctcaattttcttctgactcacgagtcggatttgtgtagtaaactcgcttgagtcgttgtggtttgacttttgtaataaaatggtatgattcctcatcctaaaggatgaagtcggttgattgactgcagcatctgctgttaatgctgttcggcttgctgaatgttggatactgtattgtattcccgaactaatgtttttactactgttgtactgattcatggaatacaattttgacctgtaga

SEQ ID NO: 36763 - DNA, 831 bp, Sorghum bicolor
  Intron number 1 from transcript Sb04g022844.1 (locus Sb04g 022844) derived from phytozome v7.0 (chr-ID chromosome_4; pos 52463173 to 52464003 reverse strand)
cacccgaggctcgtacacttctgtaagtgctaattctccccaattcaaagtaatctagctgaaacataagttctggtaaaatgattggaatggtgatactcataatgttatgctatgatacgttttaaggcatcatgtcatttataaacaaaagagtatctgtttccaaataattgtcagttttgtcattcttgactaaacacgcatagctacataaataattagccgatcattctttgaataactatatgaccaaagttctcttctatataaaattggaaagcaaggcatgatgatttttttggtcaagtgttagctttccgctagataaggcagtgttaaataactttctcaagaatttggccatgtaggcaccctagctattatggtgtaagaaaaaaatagaccagcctaggaggaactaggtgatattttgttaagaagaaaatgggcacctaaatttgcctcgatgaggacttgtacctaggtgatctgggcatatatccacacacaccctcgaccaattgatgcgctaagaaaagaaaaatggggactccattactatcccatctttctgcttgggaaaggaagtagcacacacacataatacaactatttaacagattagtttggacatgggtcaccaattccattacctatgggcttgtggctgagaagcaatattgtgactttgaccactgtatcagacttttaaatgctaaggcattatgcgctgagcttcttttgggtggccttttttcttacagattgtatattttaatcttctagttctaaactcttatgaacttcaggaacagggttcaaaagttg

SEQ ID NO: 36764 - DNA, 853 bp, Sorghum bicolor
  Intron number 1 from transcript Sb01g046120.1 (locus Sb01g 046120) derived from phytozome v7.0 (chr-ID chromosome_1; pos 69173161 to 69174013)
gcgacgggccttacgctagggccaagcacttccaggtaaaagcctccatctattttgattcctgtatatatatgggcaatgcttgcttttgcttatgaagaattttgagttggtttttccactttcttccaggatctatatcgatctatcattacctgttagcttatgctcatgctcacgctcatatatacgatataggttgagtatgtgagatgggactcttttccttttaattgtttgtcattttctgttttttgcgtagcgctagcttgtttatcgctttgatgtcaacgcatggttggtctagtttaattataggtctcattactcattattgcagttgtaacctggtgattagattaatgccacacacacaatcacatataaatcttgagatctataggcactttctgaattttgtattacacgagtagaatttagcaaagtcatttcgggtccatttttgcaacaaaaaatggtgaaagagcaagcttctttccagtaagactatcttcaatgttcaatccaaccaaaacagcactacgatatgtgaaaactatagctagcttattagctacccccttcgttccaaattctaattaatttggtctgatttttctagatatatacaaagtagcccttattacgtatctaaacatgatctatatcaagattcatgcataacaaaaaaaaatgaatctagacaaaaccaaaaccaacttccaatttggaacggagtgatgagcagctcgaaatcaataatcattgttaacatctagctagcactaactgacatgaacttcattcgaaaaactaagctggtggagaaggacctggacgcgtcgatcgcgtg

SEQ ID NO: 36765 - DNA, 621 bp, Sorghum bicolor
  Intron number 1 from transcript Sb06g019710.1 (locus Sb06g 019710) derived from phytozome v7.0 (chr-ID chromosome_6; pos 49282757 to 49283377 reverse strand)
ccgtatgtgctgttctctaggttatgatagtgtgtgaacgcgtaccagaattactattgctttcgcctatagatgctaaactggcagttcaagaatgcttgctttattgaacttttgacctcttcgggggagttcgtgaaagctctactttggttccatgatcagttctgctttgttttctagcatccagtctcttctttccaaacatgtttctgtttgttttctcaaaagcagaaaattggtatgatatcattcaaatatttcaaagtttcctcgaaagcagaaatatgatgaccaatctcttttatttccatagtaatagaagtagcaatgtacaccccacatttcagatccaaacttttctcccatgtactacatggaaatccaatataatagctcttaacgttggcgaagctgggataggaaattcacgtgtttgctctgttcacattcatatatgtaattggactaaaatgtgtacaatgtcttcagaggtatcaactagggaaattatttttctacactctgatactgaagctatttcttacctgacaacaatgtttttggcttccttgcaattcttcagggccaaccctcgccaaccacggggaagctattcat

SEQ ID NO: 36766 - DNA, 511 bp, Sorghum bicolor
  Intron number 1 from transcript Sb01g021150.1 (locus Sb01g 021150) derived from phytozome v7.0 (chr-ID chromosome_1; pos 24650689 to 24651199)
cgcatcaccgccctgtacgctctacacctccgcttcttaggaattcattcatgacttgccaaactgagtcctactagtgattagtagtgactagcactggccatctgatgttcatgccgcgacctaactgcttcaaattgtttgtcattttcacatacatggattagttgatcaggatctgaacttgacatgagtcatatgtcatgctccacctttgccatggttgctgttttcatgtggtttgtgcacatttaaataacagtttctgtaaatccagagagagcagtttgtgttatgaaattcccatagcagtaggcaaattttaaaatggattttattaagctattacttcagatatattataactgataaactgcaagctgcatgtttgctctgcagagtttgcttcttacataacctgcacttaataaacaatcaaacaccacttcagaagtggctcactgcttcttcttttttattattatattattctttaccgcagggtgatatc

SEQ ID NO: 36767 - DNA, 637 bp, Sorghum bicolor
  Intron number 3 from transcript Sb04g009630.1 (locus Sb04g 009630) derived from phytozome v7.0 (chr-ID chromosome_4; pos 12173309 to 12173945)
ggagaagagtcaacgatccgtaggcgtaatctccagtaagttgatttcgatgagttcatctttcttttaagacaatgtatgggatatttaaggagttttattttataatttagtcagttacatgggcatcccttccatctgggtcacttaaaatttgagaaccagataaaggctatcacttgtgaattctaattttctaaatttaagctaagaatagcggaatactcctttcaatccaacatgtaattcattttagttttgtcctaagtcaaacttatctaactttggccaagtttatagaaaaatgcaggaacatctacaacgtagtttcataaaatttgccgtgtaatatgtattggtagtacatttatttggaatcgtgatgcttggtcaaagttagaggagtttgacatagataaactaaatggcttacttttttggaaaggatgaagtaacaattaggagttgctgtgttaatgcatttcactactgaatgggtcatccttttagattcacactcagatcagttctcttgcatcacagtaatgaatgtatcacccatctacattatgtagtccaagaaacatctagttttgttgtataatgtgatttctgacggcgtaggacaaaggctggg

SEQ ID NO: 36768 - DNA, 531 bp, Sorghum bicolor
  Intron number 3 from transcript Sb02g036425.1 (locus Sb02g 036425) derived from phytozome v7.0 (chr-ID chromosome_2; pos 70832022 to 70832552)
agcaataaaagtaccccttgggatcattctgcaggtacattatcatagcaactcctttatcatatttatgtaatgatgcacatcagtgagtagtactatgtcttaggttcattccatacgcgaccatttgtttaaccaaggttccctgttcggttgcctgtaaaagcggctgatgctgatttgttgtgagaaaaaaacactgttggctagccataatattctagctgataagttcaagagcttgtagctttttcagtttttgttcagtttctagcatctgtgcactttattgttgttagtgctctaggcagacatttcacgcgctacaatgtgcaatgggtactggaaatggaatggcacaatctctattgcatgctgctcaatcatcaaagatcagtatttttttccacgttttttgtcacctttcatctagcagccccgtcatctctcttcattatctcacccatctatgtgtttgaacaattgctgatgcagcttctttctgttacacaggtcataaacgtgcacttg

SEQ ID NO: 36769 - DNA, 630 bp, Sorghum bicolor
  Intron number 1 from transcript Sb10g008970.1 (locus Sb10g 008970) derived from phytozome v7.0 (chr-ID chromosome_10; pos 9549732 to 9550361 reverse strand)
ggcagagattcctaggtgcgtacgtgcgcgcggcttctctttctggggtttatactatcttttttttttagtattttgctacccttgatagttgatttggcttttagattccgtgcttagcagtgccgattgtgatcgttttggtaaatggtagtgaattatttttccaaaattgtgttaagtactctaggcggcataatattttattgcagagaactctgttgattcagtcattctttctgttataggtgtgtatttcttcatcaaatgtctctgagaaaagattactaattacctgtgtgtgatgcactaacagtttgaagtttattgtttgatatttccatgaatacttatgtgcagaagcaatatgcacagatgtgtgtctaaactctaaagtactttcaaaaaattgtagttttgctaattgtttttttaattaacttactatatatgtagatttgttaaaattttaatggcaatgcaaataaacagaaagaatacatgttttaaggtaacaatcacatgttgagaaatcgaatatctcagtgttgcctcaaataaacatcaacagtttttcacaaattctcaatatctaaatacctactgagtattgcaggcagtggcaccctc

SEQ ID NO: 36770 - DNA, 308 bp, Sorghum bicolor
  Intron number 1 from transcript Sb10g008250.1 (locus Sb10g 008250) derived from phytozome v7.0 (chr-ID chromosome_10; pos 8361170 to 8361477 reverse strand)
aagctcttgtaaacaatagtacatctccatccttggtaaggacactgttttctctaacactatgttcaagtagtcattctttatgttttggtaactccatcttatgtatgctcgtaatatattggaggacaaagagttatatgaatgttactgcccttaaccactgaccttaatcttctaaggcactatgttgagaatggcaaacatggctcttaaaatttgagtttctgttttagcgtcatcaataaaattctgacttctggttactgtcagactgcaattctccttgatctagtgagggaggaagt

SEQ ID NO: 36771 - DNA, 615 bp, Sorghum bicolor
  Intron number 1 from transcript Sb02g029860.2 (locus Sb02g 029860) derived from phytozome v7.0 (chr-ID chromosome_2; pos 64948308 to 64948922)
gccctcgtcagccccaacctcaaggtgagcggttctctcagtcggatgcttctctgcgtggttgcaaggataatctcgattcagtaacgctgtctgggcaattctgctagaatggttcagattaggccgagatatttttggccatatatcttggtctgctccgcagctaagctctagttttgggttgggcactttgttgcctgtttcttctcggatttgggaagaaaattagggttcagtcttcgctcttcagcgattatcttgctcgtgggatcgtgtgtacaataactcaatgaggactttaactgagttctgactttcagaaaaatttgggtatgtagaatcaaacttggaaagcggtactgatatcattttattcagctctagtgaaaggcttatacaagtctaaaaacatgttccgacttcagactggcaaatgttgttgcaaattaattatgtatatgggaatttgttttggaagattactaaatgaagggataatttagcattacgtcatctcacttttcatctcttaatattaccttttccttatttagctcttctcttgagaattacaatttgaatatgcaggttggtctgcagataaccaatcaa

SEQ ID NO: 36772 - DNA, 878 bp, Sorghum bicolor
  Intron number 1 from transcript Sb10g006860.1 (locus Sb10g 006860) derived from phytozome v7.0 (chr-ID chromosome_10; pos 6571002 to 6571879)
cgcaccaggcgacatccttgccataccattgcctggtaaacaaattcactcattggaccgcagcatgcaacaagattggaataaactgccgtggccattgcagagtcataacttggcaacattccatcactttccccttaaattgactaaacattggttcaaaatatatgttgtttcaagttctgtagggatctagtttgccaataaccacccatcatttctatgcttatgattgtcaataaccgtaggtcagggaaaataacctgaaatattggttggcgtcgacaggtgtacctttgtgaaagtctggaggggtagttctgtaaaggccagtttattgttattacatagttactttaggccctttttaacttgttataaggaattgccagcctttggattttacaaacgcaggatgcagtagtagctttaaacttttaaaatcaaactaccactgcagaaacctgatctacggttgtgggcttgtggcttgggagaagccgcgcttgcattgcagcggctaggttgtgaaagattacttttctatgtttgtgtcattgtgtggtgcatgtgagtaattttatttgctatggatcatgaattttagcaagggttatttagagtgattataatattcagtgcattagctaaaggtagcttataaaaatgtgcagtgatagtcttcattttttatggaagtatctttcactttcatggtggcatacctttctttttgctgattgcttcaataatgatagttgagaaggatactttctaattttgccgtcctctctgctaatcattactttctttctaatgacaaccatttgtttctttcattagcttgcgcctcggcatttcctaactctgcttcggac

SEQ ID NO: 36773 - DNA, 1041 bp, Sorghum bicolor
  Intron number 1 from transcript Sb08g001400.1 (locus Sb08g 001400) derived from phytozome v7.0 (chr-ID chromosome_8; pos 1360578 to 1361618)
attcttccatatctggatcatcatcctcgtctcctgtacgtgcatccatccctcaatcagttgtatcgtgtttgggaactcctctctgctctttacatctgctatatatataaacctttttagtccagatcattgtcatatctgcacttaaactttaatttatttatttattttgcattcaaatgattgatatctatctcagtcggatccataattggtatatatatggtttgggtaataaacttcagaatgagtagcgttctgttcctcaagtagtaaactagtaataatgctgatgtcgatgctagtgacttgttagttggtatacctgctgttactattactagttactactcccttatcagtcacttaaaactattgacaaacaaagaatgcttagtgatgcttgcgatcaatgattcaatgatactatataaagaaattcctcgataacaccaaccccatatgaaacagagtggctgattagcaagcttgtattattggcagttcactgaagatcctaagcatctctcagtatacaatactcagaacaaaacaaattgacagcctgtgttcaaagccttccttttcacactaaaacaatataaggaactgagagatatcttctacattcgctatagttttcacgtttcagtaaagaactattcagtaatagctcctgaagtgaagggccaaaatttagtcccgaaatagatgctactaattaaagttgaaccgtcagagtaggaattttcccatgcttctcctacaatgccggccacttatgaaaaggaaaagacacaaaagcaattctctttgacatccaaatttgttatgaaagtctgcagaaagatgtgtcgttagaactgatctattacattagaatgctcttgttctttatttactttagaatttgatacatgctgcagagtcttattccattttttgtgctcattttttctattacaccgaactgtttctaactgattgttcccttttattttaggtttgccaatatcattgttgtttcccttcatatat

SEQ ID NO: 36774 - DNA, 275 bp, Sorghum bicolor
  Intron number 2 from transcript Sb04g020130.1 (locus Sb04g 020130) derived from phytozome v7.0 (chr-ID chromosome_4; pos 47316323 to 47316597)
tttaaccacaaaactgaaactcgaagaaatcttaggttggttatttcatttatggcatcttcagatgaatgaacaaaagtaatgtttgttgtaatcattgctttcaaaaaatgtttgttgtaatcaaatattcattttttctcataaagaacattgggacaatgagttgtgtggttctttaatagttatctggatggttttcttccttttttttactcattcttatccattggattgtaggaattagatcttttatagtacttgacagaaaaatc

SEQ ID NO: 36775 - DNA, 1006 bp, Sorghum bicolor
  Intron number 4 from transcript Sb04g020130.1 (locus Sb04g 020130) derived from phytozome v7.0 (chr-ID chromosome_4; pos 47316992 to 47317997)
ataactagtaagtgtcaattgaaatcgtgttttgaagggaattagcaattacattatactttctatatagtacttctggttagtagtacatttgtactgctatatctatagctcattgcagttccatttcttattaagctctgttgttgatattgatatgccttttaagatgattggtttcatgatttcctgaattgtgcaacacaacttgagtaagtcacagttgattgtagttattcattccccacttgtgcacttgccctgtatgatcttggagcagtaaaattgggtttgtgtcttaactaaagttccaacatgcaaatacttacattgaatagattagcacttgtattgctccatgctgctagtgttttgcgtcttcaacataaatgccagaggatccaagagttctgcatcgtttttttctaattgtagtaaaatgtttgtagagcactctcaacatatttgatactgtattcttaagtacgagacacacattactaataggaaaccatattggctatgttctattcgaatgaacagagcagcatgcatattttttttaacttgatatcttcttgggaaacctctcattccttagttctaaatatacatgggtttcaactaaccttgctgtttgaatcctgtaatggcacttttagttttatgaatgatagaaatccaaaaggtttgttaagagtctactgacttgcattgccagtatttggagcaaaaaaggggatgtttatatcatctgatcaagaatcacttgaaagaaacctacagcatcaaagtgatttattgatcaatttccctttattttttttcaatttgaagtgtaggacactactgctataataccagtgaagtacaaaacagtatttctgacagtgatgcttatatgtttaggaacattatgtaatgatgaatcagacgctcactcttactaatcattttgttttaccttgcagtgattctaggcgaagtagccaattttgcagcatat

SEQ ID NO: 36776 - DNA, 935 bp, Sorghum bicolor
  Intron number 1 from transcript Sb03g023440.2 (locus Sb03g 023440) derived from phytozome v7.0 (chr-ID chromosome_3; pos 46645382 to 46646316 reverse strand)
cggaaccttcgcctggcacaagcaccacccagcaggtatgctcaccccttctctcccttgctgctgtgcgaaactgagcattcaaaccctaactgcctgctcggtgcgaaactgagcattcaaaccctaactgcctgcccaggtctttctcggatccttcaccgggcacaagcaccacccagtaggtatgcccaccccttctcccccttgctgctgtgcgaaactgagcattcaaaccctaactgcctgctagggtttctcgctagctgataggctgcgttctggcgtaagattgggatcgcaagatgttccagcaacttttagtttgatttatttattaggcagcacaagttggatgttttagtgcagaggagttgattcctaaggaatgcctagaattctcgtagtgcatatgcgacccacggtggggagatcttttggttttagctatatctggtcagtagcaataaactgggttggactctatctgatccaatgctcataatatgcgtgccgacaaaaggggaaggggtccgattcctttaccaaaaaggaaggttgttgcccttttttgctgggggagtcaagggcgggtaggcaagacaaagcaccgaacacctagagttttcgttactcctcgtattgttagtgagcatgtggcgatgagagtttttaagttagctgttgcagctcttatccaatagcttctctgttctccacgtgtcatgttctgtaatcaatctctgttttccgtactttggacgtactgttagctagcgagcacgtgccaatgggagtttttaggttagctgttgcagctcttattcttatccaatagcttatttgttctccacgtgttatgttctataattaatctttgtttttccatactttggacagtttacagctgtgatctctggaggtgctcttcctat

SEQ ID NO: 36777 - DNA, 627 bp, Sorghum bicolor
  Intron number 1 from transcript Sb01g028260.1 (locus Sb01g 028260) derived from phytozome v7.0 (chr-ID chromosome_1; pos 49347959 to 49348585)
tcaaggagctccgcctcaagaaccgcaggatcgtgagtttacctggccggacccggcaatcctcttccttctgtcttctgtagcctcccgggccctgccattctcgatttgccttcttgccaaccgaaaagaacggggtttctttccgttactgttggcaatgaatgctttacttgtgtgcagcaatggcggcgatgccatagattcaacgactgtttcttgaccgcctcgcccggcccctttgtttgggatctccgcattgcctctccgatgcagccggcgtctcattctgattgtcttgctatcaaatgaattccgtgccgcccttccccaagcaatatttataaaaaaaaaaaacaatgtgagcgcaagcaaccaaatttcttggcgatggttccaaggagataacagaatttctctttttcttgcagactactattccatcttgtttgtttgtttgtttgtttgtcaatctatctatcgctgagcttttcttggcaaacaaacagccaattcaaatgcttcgccattgcgcaaagtggctgtgctgcatagcctagtcaactgaccctcttggttgttttccgtgcagggaggcggcggccctgaccctgagccggaggagga

SEQ ID NO: 36778 - DNA, 1030 bp, Sorghum bicolor
  Intron number 1 from transcript Sb05g006060.1 (locus Sb05g 006060) derived from phytozome v7.0 (chr-ID chromosome_5; pos 9031924 to 9032953 reverse strand)
gctcaggagggccgccgactccggcgtccgcgcgggtgagtgagggctctgttcgccgcgtccgtcggtggatgcccgctctggtgtctggatctcctcctcccaggctggttggtgcgcgcgctgggttggttggttcgcacgacggcgaggcgggtcgagttgttgggctgtgtgccagccatgtggttgcttagctggatactggggaatcgggttgaagctttgaaattgatttcttgttttttttggggggttccccttgcaacgcggtttcgggtggctgttgttggtttggttggtgagagggatctgccgcggtagaaaaaaaatgtggttgtctgttcttctcgatggtatactggaagtccagtcgagtccaagaaattactttcgtggtggaaatttggggatcctgagtagttttctctttcctgaagcttttcttttcttgatttggtttgtcagaggagcaagttgactccggagaaaaggttaatttctttgggcgtggtagatttggtcatggccgaaattgaccacaatgacagcaaagttcgattgtgtcagccagcccaatgaatttagtcaaagatccttcctgattcttcttattgtcatttggtggatggattgattctctttgcttggtagggaaaaaggttgcaatcattgacagccagacatatcttaccggagacttcgggtctatgctgatgcaaaaaagttttgccttccataagtagtccaatcgagtcaagggcgtttgcttgtgctcttcagttgcaacttgcaaaggaggcacaactagtgaaaacgaaaacatctgttttacatttgcaatgacttttattagaaacaagctgagtgaatctttgtttttgttaacggtacgcccattgcatgactgatgacgagtctggcaatatactgatattattcaaatgtatttcagaaattatgcccttttgctttcctttagtttagtgcaagcataattagatgtttttatgtacttataaaccaggat

SEQ ID NO: 36779 - DNA, 1028 bp, Sorghum bicolor
  Intron number 1 from transcript Sb06g027650.1 (locus Sb06g 027650) derived from phytozome v7.0 (chr-ID chromosome_6; pos 56486602 to 56487629 reverse strand)
caattcgatcggcaagtacagccctctggcctcaggtgagagaatgatcggaatccgtcgtcgtcatttttctttacgctctttcctaccgcatgcgatgttgttagaattagaacaattatttttaattgcttaattttaacattcttttgatacgaaatcaggtgagagttcttcatcaacatccagcatgtcagtgtctatgaaggatttggacccggccttccacggagccgggcaaaaggagtatccttttttgcatgcttccctatatactagtaccttttttcatggcctgacatctttatatcatcgagatgcattgtgagaccacatgatgactctcttaggctaaacaagtgtggataaatagccaattgtttgtaacagtaaacatgcttaccagcaagcagctaattagtgtgtctgcaggttagtctgagaaacatacagaagttgcatactgtttgtcagttaaactgttaaataacactttacattgtcttttcagtgctcccggttagtgattgctctctagtctctagtgtctactatatcttattttgctgtgatatgctgctaaagtttgacatgttcctgaaaatgtaatacacatacagtaagcgtaatagatattcaaatgtcttgacttcagtattatatgccaggagccataagttttgatagttacaaacttacactgtatgacacagtagaactttatttgacatgaactgtaaaacgttttccgtctatcatgtcacaagtgtttagctttagacaaaattaaaagtgtagatatattgtgttagagggtggctgaactaatatttttttactaattagagaacctcttggtaactaaactatataggaatagtgatgaggttgatgtaaatatccagcaaacatatctatcctttcgaagtttctttgtcattttgccttaatcaactttactgctttgttcataagagttccttctatgagcattgtactccttaattttgttatagtggtctggtggt

SEQ ID NO: 36780 - DNA, 596 bp, Sorghum bicolor
  Intron number 2 from transcript Sb02g011480.1 (locus Sb02g 011480) derived from phytozome v7.0 (chr-ID chromosome_2; pos 19215551 to 19216146 reverse strand)
tacaaggtatacaaccatcagtttagttagttggtaccattgctatattatatttatgttgccagttttacattattttgaggctctcatagtaactaataattgcaattaaatgagttatctcttattgttacattttttctatttgtatgcaaattgttacattcaaacaagaaactctgtatatacataattttacaactagtaaacaaatacattgaacatatttgaattatagaagaggatgacgtggaataggtagattctgagtatgtaattgcaccgcaatgagatgcaaactagagtggagatatataaggaatatcactctatgagatcattgcatttttatattcttaaacttaactattgtttttatttaggaaaattatttattgtgtatatgctatccattgtccagcttttattcaagaaacttattataaagaaagttatgtatatgttatcttcaggtcatggaagtaactgaagtatttttgaaatggcacatcaagtgcaaacaattttgtgtactaataattttagtatacattgatagctactactgatagtccgtatggtttcattgtagtttt

SEQ ID NO: 36781 - DNA, 1025 bp, Sorghum bicolor
  Intron number 1 from transcript Sb04g034120.1 (locus Sb04g 034120) derived from phytozome v7.0 (chr-ID chromosome_4; pos 63974399 to 63975423)
ccgtggcggccttgaccaggccggaccgcgcggtacgttacgtaaactacacgcgcgtgttcgtcgggtttgacagtttccgtttggacttcgactgtttgggaccgccatctggtcgcatttttgaaattctccgggtactttgtgcgggtctctgccggcgtcacgtcttgtatggcagacgtgacgttttttttaatcaaatgtccgggcctctggggcttcgtgactttcccatgctatgctccatactttactagtgcactccagtcatttgttttttatgcaactatggccttgtttagttctcaaaattttttgttttaggatagcgtagcatttttgtttttatttggcaattattgttcaatcatggattaactaggctcaaaagattcatttcgcgatttacagacaaactgtataattaattttttattttcatctatatttaatgttctatgcatataccccaagattcgatgtgacgaaaaatcttgaaaaattttggctaaacaagacctatgtatgtgatgcgaagtggagatcgatcgctgtggagggataataattgtcactgtttttttataaaaaaaatattgtgtatatgtggagtcttgatcttgcaatatgttctcgcttctcgccgggaaaaaaaatattagctactgtgttttaacatgtaggtatcatcccgagtaattatttttttgtaggcggttcaccgttcattgcatctgtgataaaagaatttgttctggtttgtcacttaaactgtggcaaaaggtctcatttaagtttggccgtgatgctgtccatggaagcatacatttatttttattgaaccgataattaaagttaataattctctgttacctcacctttatttcttttttttattttctaagaatatccacgacctcacatatgtacaagtcatgaatgtaatgtaatggaagaatgaaaagtaccatttccatctgaactctgatataaaactattcacttcctgtgttcaggagagc

SEQ ID NO: 36782 - DNA, 988 bp, Sorghum bicolor
  Intron number 1 from transcript Sb01g003990.1 (locus Sb01g 003990) derived from phytozome v7.0 (chr-ID chromosome_1; pos 3247082 to 3248069)
catcaggtataaccctcagttaccttttcccttatcgatcagcagtagttggcattgtttctttgctcgctggagatgccaattttccattcacatgcatttgttggtgttgttccagggttaggtggcagatctattgaattcaaatagcaatacttgttcccgtagatttaatcattgtggtgtcgatacatttacctgaatttgtgtagaaattgaaatggattggatgaactgtaaggctagtctcaatgcatgtttcatgagagtgtcatgcacattaaatagggtgccacataagcaaaattgctgacttggcagagtcattaaatgaaggagtttcatcggatgagagaggagtttcatggagtttcatcggatgagagaggagtttcatccccatgaaaattctatggctcggttacctagtttatagtcttagtaactgtgccatgaaactatgcattgagactggcctaatagaaatttgcacagtttggcgtagaaacttgtccataatcgtgtatgtcattgtgatatgtaataatgtaaattagcaaattgtgttttttgtttgcaatgattgatttgtcattgtgtaattgataaaaaaagttccttatctttgcaatttttagcaattttgtccacagaaaagtatgtcaatttgcttattgtttttgcaacttgtagatggccttctctgacgatgatgatatccttgaccaatggttggagcaagaggagtccgatgatgatgactactacattgcagctgctcttctagcccacgtggagcgtgagaggagcaagaagcactgtgtttcagtcccaggtcaccaggtagttgcatggaacacgtttgggcagctttttgcgtggaactgtttatgatttatctaatgttttgagatataagtaacacatttcccctttctaaattacttttgcaggttcagataggcctttgtgggcaagaagttgtaaa

SEQ ID NO: 36783 - DNA, 1043 bp, Sorghum bicolor
  Intron number 1 from transcript Sb10g014850.1 (locus Sb10g 014850) derived from phytozome v7.0 (chr-ID chromosome_10; pos 24299110 to 24300152 reverse strand)
ccgctgcccggagcgcctctccgcaccgcgtgcaggtaacgctgttcgcctggggatcgcgcgctgtggtgtcgtagcgcagtggtgaggttttcgggtaccgcgatcttaggcttaggtgccgtgaaatgggatcgacgcaatcgttggtttagcaagtgattgcttgctgccgcgagacgtatggattgcttccttgtgcaagtataaaccgagtttagagcttaactaagttgtgtgcgtggcacctgctaggcattagtagtacacggacccaagcttcatttgttgagctttgcacttcactaacctgcacgtttgtagatactagctactaagctaggctattgattaatgtggctgctgagtttggggttttttacttagggcctgtttagatttgaaattttttggcccaaagagaaaaaattttgtggaattgggacctgtgaactaaacggggccaaaaaattttggggcaaaaattttgggctgcaactgtgcacgcacttccatagaagcccaccaatgacaactgcaaatgcatgcagcccaagttgtgccagaaaatttttttgtcaaactaaacacctaaaattttttgcttgttctaaccacaaaaaattttaccactttgaccaaaaaatttcaaatctaaacagggccttaaaattttgtttaggttgtaactaggcactatggccgagtatcggaagatcagcacatgtatgctttggattttcttttcttttctttcgagaactgtggagcgtatttaatgccttggtaggcgtcttgcttcaaaacaagctctaggctacattatctatttgtacagttgtttatctctttagttcttgcttcaaaacaagaactatgctgtttatgatgtgtgccttttaatgcaactatgacctttctctatactaggtggctaggtgctccacaatgttgatgctttcttattccctgctttgcagcttataatattctgccacatcactctaggtgaagcaagattgggtaggtctcgggtgcctact

SEQ ID NO: 36784 - DNA, 674 bp, Sorghum bicolor
  Intron number 1 from transcript Sb04g000520.1 (locus Sb04g 000520) derived from phytozome v7.0 (chr-ID chromosome_4; pos 353021 to 353694 reverse strand)
ggcgacgaggagacctccattaaagaacccacctggtaggcggctgtgctctttgtgcttgtgcatcttccctcccccaaatctcgaaatgaattcttggtggaaatcgaaaggaaagacgagagaaaaaaagatggcatcttgtttggttctttgctctgcttcggatgctattgctcatgctcgtggggagggagcagaggacgagcaataatagtgccatgattgagatagaactgcagctgctgatgatggctgatgctgatggcgattcccctctccccttctccctccctccctccctccctcgctcaaatcattctcactcgagcacctacttttcagctctgcattccttgcgctatgctatgctatgcttctgcttctcgtctctcgctcggaggacggacggacccttttgtctttgagaccacgacgacgatggatggagggattcgatgattacctcacccccaacaaaaagtttaggggtgacatggacaaacaaaagcccgcatcttgttcttgcatgcaacaatttctttctcttcgtctttctacctagcatgtagatgcagcagtgtgaatcaaaatgtggcacctttcttctccatctcaccatcaaaatgttttgcgcaggcggccgctggacatcgactacttacacagctcga

SEQ ID NO: 36785 - DNA, 704 bp, Sorghum bicolor
  Intron number 1 from transcript Sb09g002250.1 (locus Sb09g 002250) derived from phytozome v7.0 (chr-ID chromosome_9; pos 2432071 to 2432774)
aagcgcctcccagggaatctggtaagaatcacaagatgctcctgccactgattgcaaagagaaataaggaattagcatgttttgtactgttcaatctgatagcatagaaaaggattattaggagccatgtcggcaaacagatcaaacaattaagaaacaaattaaatacaatgcaggagtatacagatccaaaatctgcaatcccccaatacgtcctgttcttctgcacatcaattttatagctggatacctgtagttaaagaatgtataccgtaccaggctcagtggtttcctgcagatgtgattagacctccaaataccgaccattcagtgtatctttgttttaaggacgaatgacacccctgtgccactgtcttccctctgggttatgtatatatattcctctctgaaccgaatccgtgtagcaattatattatgcactatctgtttccctgtcagcgtcacatgtattttggtgttatacatactactgcaattcatgtctagttcttaactgttatggatgaaattggctttcattcagtgatataacatattcatatacatgctcttcaaatttgttcagcaaatgacaagaagaatctgaacaactaaatgagcagacaatagaaatttatgtctaatgcagtttaccactcacctttgcagggtccgtcaggccatcaccagtcacttcaaagcac

SEQ ID NO: 36786 - DNA, 646 bp, Sorghum bicolor
  Intron number 4 from transcript Sb07g006290.1 (locus Sb07g 006290) derived from phytozome v7.0 (chr-ID chromosome_7; pos 9083615 to 9084260)
tcatttggtcaaggtacagcttggttattacaccggtaagccatcagtttgtggtacttgtccattggttctagttgtccactgaaatatgcaaggtgatatgagctgtatttgatcttaatgtttcttgctgtaaatatattggttcttctattaatcttctcatggtgtatttcctaataagtgttgatattcatttgcttgtatagtttaggcttgatacttctgtgattctgtcttctccttcacacatgttctacaagatttgtcatctcagagaacaacaatttcttgttctgatgtgtttcgactcgacatacaacaaaacattttaaccatactgattatctatatgaaatttcttgttcttaggagtttggactcttcatagacaatcaaaacatttttttcactttgctgattgtttatatgacattgaaatgagctcatagtttcacagtgaaattatgcatgcgttgtgtttttcatagctgagatagtattgatgtccttacatctggttttcccatttgattgcctgatatgttaattgctgagatactagccttggtatgttaatcggtgcttacctgattgccatggaatgttatcttcttgcagagaaacttgaaccttctcagtgtta

SEQ ID NO: 36787 - DNA, 785 bp, Sorghum bicolor
  Intron number 2 from transcript Sb03g023440.1 (locus Sb03g 023440) derived from phytozome v7.0 (chr-ID chromosome_3; pos 46645382 to 46646166 reverse strand)
cggatccttcaccgggcacaagcaccacccagtaggtatgcccaccccttctcccccttgctgctgtgcgaaactgagcattcaaaccctaactgcctgctagggtttctcgctagctgataggctgcgttctggcgtaagattgggatcgcaagatgttccagcaacttttagtttgatttatttattaggcagcacaagttggatgttttagtgcagaggagttgattcctaaggaatgcctagaattctcgtagtgcatatgcgacccacggtggggagatcttttggttttagctatatctggtcagtagcaataaactgggttggactctatctgatccaatgctcataatatgcgtgccgacaaaaggggaaggggtccgattcctttaccaaaaaggaaggttgttgcccttttttgctgggggagtcaagggcgggtaggcaagacaaagcaccgaacacctagagttttcgttactcctcgtattgttagtgagcatgtggcgatgagagtttttaagttagctgttgcagctcttatccaatagcttctctgttctccacgtgtcatgttctgtaatcaatctctgttttccgtactttggacgtactgttagctagcgagcacgtgccaatgggagtttttaggttagctgttgcagctcttattcttatccaatagcttatttgttctccacgtgttatgttctataattaatctttgtttttccatactttggacagtttacagctgtgatctctggaggtgctcttcctat

SEQ ID NO: 36788 - DNA, 650 bp, Sorghum bicolor
  Intron number 2 from transcript Sb07g022400.1 (locus Sb07g 022400) derived from phytozome v7.0 (chr-ID chromosome_7; pos 56893940 to 56894589 reverse strand)
gggacttcaaggcctccaacatcctgcttgacgaggtgagcgatccacgtccagcgtgaaaattctgcgtattcttttcgttgcgcttacattacatgcactggagtctagtggtttgtagcttcgacgctaggaaaagcatggtcattttttcatcaaaaaaaaaaagcatggtcatttctgatgcatatatacggctcgctgctttccacggcagctcttgtgtaactgtagagaaggatatagtgacgacacctacccgtactgcaagatatttgaccctgaatcgtccataggagatggatgtcaaagtcgcgtggtttcgatagatgaccagccccggcatgactgcaacttggaagtttcttggatgcactacctcgattataaaaaaaaaaaataagaacctgcatgcagctgcctcatccgtactgcattatttttcttggcatcaaatcaaagcactagtaatattagcttaaacagcttgatgctgacagtgacagtctgagagggccggggcgttgtcttagcatccaagcatgcagtacctcgctgtaattgtcacctatgacgatcttttgcctaattcaatctggtcttttggattttcaggactacaacaccaagttgtcggactttgggctggc

SEQ ID NO: 36789 - DNA, 719 bp, Sorghum bicolor
  Intron number 1 from transcript Sb03g003350.1 (locus Sb03g 003350) derived from phytozome v7.0 (chr-ID chromosome_3; pos 3562115 to 3562833)
gacaagagaggtcagtgtgcctgcctgtgtagtcttcctagtacgttgcactagtaaattattagtcatcctgctcgattttcccttgagtttcaaacattaattgcaagtgaattcaattgaagccatttcttgttttgttcctaaagctgaacgtatgttccaagcttgccctgaataagactgctcatgaaatcgtccccggatgattagttggttacttggtttgccaattcagctatcatagttatagttgcactattctcatttgtgggcatggacagacaaaccgcagtggtagattactcagagagttagagtactcctcggtcttcgttcgacttatactgtggcctgttttccccaatgtggactatgcagagttgcacgcacaaatgcatatatgtggtagctattttcttaggtagtgcttacatgattccttcacccccaaaaagagaaactaataggttttgggatcaggacaaaccacatttatgtgattttctgactgaagattcatcagcctgcagtagtttacaagtctccataaaccttcttgtgtttgccttattatatcaatttgagctggggtctcattttagtgtttccactcacacatgtatcgaacaaaacataagtgaaccaagttgtgagtatcttgttgctagtttgctgttgcagggctggaggccgaggaactgcgtgtagctagtgac

SEQ ID NO: 36790 - DNA, 709 bp, Sorghum bicolor
  Intron number 2 from transcript Sb08g004470.1 (locus Sb08g 004470) derived from phytozome v7.0 (chr-ID chromosome_8; pos 5378566 to 5379274 reverse strand)
gcctcctctccggcatagtcaccgacaaggtggcttctcttctcttctcttaattttctggttcagtttcatggttacatgtgttccagtgcgcttttatagagattgagatatgaggaaaagggtgagttttttttaatttgatgtaacaggagcccaagatgctacatagtacatatcttcgtggggaaaatctgtgtttggattatattcttggtttggagctttgagcttagcaattgtcagtttctgtcaaagcaaagttccattttatttcgagatttcgatcagccttttcttttaccaaacttggacgactcataggaatttccttttaccaatgcatatttttccctttgcgtaaatggaatagggacagaagggcgctgttgcactcgttttagtagttggtttatgcctaaaacgatcgaagcagtccaggttaatgatgatggtttgcactgtacttctgttaggcatctagaagactagaacattgtaagttgcattttaaccaagcagacgatggcatatttttatgttctataatttctactcagtaatttgaagtaaaaaaccttgtaagttgcattttaaccaagcagacgatggcctatttttgctgctttcagtatgacttgttcatttttgtttgtattcaaattggggtgcaggatatagctacaagggtgattgctgaggggcttag

SEQ ID NO: 36791 - DNA, 1021 bp, Sorghum bicolor
  Intron number 1 from transcript Sb03g042830.1 (locus Sb03g 042830) derived from phytozome v7.0 (chr-ID chromosome_3; pos 70217415 to 70218435)
tcgacagcgagcgcgaccttcgccaactctcccgggtaagctccaaggctccaagctagagagcttaatgcactctagtcttctatttaacccgccttaaattgcatgtttaatactgatccctaaaatgagaagtaactaattgttcagtagtaatgcctctgaagcaccaggggtagcagaggcatcgatggccggataggacgcaagctctcctcgactgtaatgatctagctagagctggatgaatttggggataaattgcaatcgaaacagaggtttacagggttgcaagaaccgcgaggactaattctatagccagcattccatccagctgttgcccaaccggccacagcaaaaccgcctacagggttaacgcctcagcagtgttggtcccacctgtcagcccgtgacatcgaccttgcaaattgtgttttcagaccacacctcgcggggatgtgggatgattgaggtggggatcgtgtggtgcacttggtggttttggacattgggcccctgagatatctatggcgctaggtgcttgcagtgtggaactggttgttctcagcagaatcctcttggcttctgccctgaggagtgtcatggcctcttgtgtgtagcatgatggcagcactgtctgggttgtgttcatacattcctcgtatgcagcttgcaacattagcatatctgaatctgacatctttgtctgtatataatgattcatgggagatcattaatcatcaaaaagtgagaatgttgttctcaattgcttctttttttctctcaaaaacggaagtattctgaacttgttgtaagctatgctgttgagttttctttttggtagttttatcttcaccagcatggagcaattgcattactctgtccaacagatacagagtgcttcattactcgtattgttttttttaagtaatcgccttattgcattttaaatgttaacataatgcatattcattattgtaatagtatctgaagctttatgtgaacagctacgatacaagag

SEQ ID NO: 36792 - DNA, 714 bp, Sorghum bicolor
  Intron number 1 from transcript Sb03g005050.1 (locus Sb03g 005050) derived from phytozome v7.0 (chr-ID chromosome_3; pos 5255814 to 5256527 reverse strand)
aggaattacaggagctgtttggaggaataggccaggtataattcaatttacatcacttctttttgtgtgatagtaattgtatgctttacaagattatcatttctctaatggtatatattttataattctgtaacagaattcattacttctctgttactagtttgctagttagatttgtacgccagtaattgtgcattttatagccaaaatttctactactgaataggtagaacaacctgcagttaactaattactgtatgtaattatattcatgcaatcttctaatgtgacttctggtgatggaaaatgttatggcttacatcagatctggtattagtgttttactgcatccttggttgttattatgcttctctaaagtttagcttatttgtttaggatatctgtatggaactgttttctctctttgcctttcctttctatatttaatagtgtacagttggcttcacatgatgttgagtctgtgtttaactaacacttttttagagttttgtttttagattcttattgtcaatcatcacttttttagagtttcatcttgtttttgcatgaggtatcatgctgttgaaaccaattcatttatttaatgtgttgccattcatcttcgtgttatctttgcatcggatgattctgcaactcttgttgcttttttaaaaaaaaggttggaaggatcaagcaaaaacgtggttacaaaga

SEQ ID NO: 36793 - DNA, 871 bp, Sorghum bicolor
  Intron number 1 from transcript Sb06g002900.1 (locus Sb06g 002900) derived from phytozome v7.0 (chr-ID chromosome_6; pos 5856339 to 5857209)
cctcccgccgccgccgacctgccggagatctgcaggtagagcatcctctctatacatagtctgcctgtggctgtgctgccttctccatagtctgccggggatctgccggcggtgtctagtcaaggcaggattttaatgaaaatgagcatgatcagaccgttcgtagcttgtgcttaatagaatgaacaaaacaaataatgggtactaaactacactgagaacatattcgcttttacttgctagcaaactgaacatgctgtaactctgtaagattttggtcatcaggaagactatatacagatgctagtttgctactcgtaatatactgataatacgtcatatacttgtcaaataattattactactttcttacttttagataatactataaaatagttctgatagttctgttaacatttcttgatagtctgcctgtactgccctcaccatagcctaccggagatctgtactgtcttctcaaagattcgccggcggtgtctactgtctagtcaaggcagggtgtcgatttgtcggtcaacttgcattaaaatattgtaaggatcaacgcttaatttgattagatcattgcgacatgtggcgatcctctgcaaatagcatgtgcttgataaaatttacaataggaatcaaggaatgaaatggataataaactacactggcaacattttcactttgacttgtaagccacagattatacgggctttaagaaagtagaaactttagctgtacttttggttatcaggaagactatacctcctatttttgatagttccatacacacacgtatctaacactcatgcagccaaacacccacatatctctgtaaaattaaattgtattatgatttgcaggg

SEQ ID NO: 36794 - DNA, 900 bp, Sorghum bicolor
  Intron number 1 from transcript Sb03g041690.1 (locus Sb03g 041690) derived from phytozome v7.0 (chr-ID chromosome_3; pos 69179446 to 69180345 reverse strand)
gggcattggtggactgccagcaaattatttgacatgtgagttttcttactttaactcgtagcacggtttgttcttctttaatttttatgttataactagctgactttcagtcatctgatttgttaccaacatgtatcccttcactcatcacagtccatgaaaattgatgctttgttcaaggcaactcagatagctagcacattgttcctaacttcctatctgaatttctaaggagctctacaggattaaaggggatagactgtagtttttcacaagaattcaaagttacacttatcctatcatgagtcaatgtgaggtgcattcttagccaaggtagtgaagcactgaggatagatatttagaaatctggttgccagttcgatgtgtttaccttgagagctgatgtcgtatcagttcagttgttccttgaagtcatagcaacatgaaagagtgttaggtcctcttgtcatctcatgatacctctgcctctgtctctgtctctgtctgaatattggctgtggaccttatgattttgactataccaagtaaagcttagtgcttctctcagttggcattttgttcttttcttgtattcttttggcttattggtgtgcccatgttttttttgggagatggtgtgcccttgtttctaagatcacaattcacaacatagtaataaacgtgtcttttttggggggacgatattgaaactatacttttgttgtcttttcagtgcttagctttggtagggtagctactgagtagtggaattgttattataaaggtgtaatccattgtaatttcttgatttgcattgaagacaacttcatttgtgtttgattttcaagctcgatctttgcaacaggggttgctattttgaggctggaggtgtgcttaaac

SEQ ID NO: 36795 - DNA, 899 bp, Sorghum bicolor
  Intron number 1 from transcript Sb08g019900.1 (locus Sb08g 019900) derived from phytozome v7.0 (chr-ID chromosome_8; pos 50899975 to 50900873)
acaggagattttgctcatcgcactgtaagtttctccagtagtcgaccacatccatgctaccatgacaatgaacactaactttgtttataaatgtcttaaatgtcaagtcaaatattctgtttatattttactcctatatatagcagataagtgtcagcggtaggctactaggctactctgtcaaagaaccacaatttaccatcattacacaacaagtacgtacttcagtttcatgtttttttcttaagacctgtttggatccccttaattaaaagtaatatctagcaagtgcttcccctttttttagattactttccaactcctctcaattccgggaactaaacagaccttaatgattttagtactccatccattctaaaactgtaagtcattctagacttttttttagatacatagctttcaccatgtatctagacataatgcgtagcaaaatctatgtatcttgaacagctaaaatgacttacaatttggaatggaggaagtagcgtataccgcgacaaaggcaataataaagactgatgtgtgataaccgtcaaaagaaaagaaaacctggtgtgtgaaatgacaattcagaatgaagaagttgtgcatcatgcagtgttctagccctgtgattggtgaagttgtgatttgttgcctaaaggagcaaaagagtcacatatacaataatttgttctagtacttttgtagggatcttaggaacacttataacagcgctgatgcatttcagttagtttcatgataacagttatcagttgatcagtgattatgaagaaatgacttttcttagctattattacagtatcatccttcagaaaccaaccatctatttctgtttccattgtagagcataccggagaagtttgtgaagaaattca

SEQ ID NO: 36796 - DNA, 499 bp, Sorghum bicolor
  Intron number 2 from transcript Sb01g042965.1 (locus Sb01g 042965) derived from phytozome v7.0 (chr-ID chromosome_1; pos 66251082 to 66251580 reverse strand)
tccttcagagttattcctcgtctgcgggctggacagtaagtctctttccagagtatagtaattcccaaccgcttgattacatgatctgacgaagcgattgatgtttctcaaatctctgtcctctgttttatattgttattatgaaactttggtccggtctctttgcaatattttgtggtgatgaagagatctccttgtataagtggttaggtagtttaacctcttggttcacctagatttgtgttaaagttgcccctaatgaatattctctccattctgaaatgtagatcgatttagttttgtcaagtcaaatttatgtaattactatgactaagtttatagaaaaatataataacatctacgatgccaagtaaatgcactatcagaacatattacacggtgaagttaatgaaactaatttgatgccagtgctttaccatgattgcctcatagttgtactgcatacatttaatagctctatttttttttcagggatcaa

SEQ ID NO: 36797 - DNA, 814 bp, Sorghum bicolor
  Intron number 2 from transcript Sb02g042190.1 (locus Sb02g 042190) derived from phytozome v7.0 (chr-ID chromosome_2; pos 75895988 to 75896801)
ccgggtaagctaaaggacgacggccattgcttcctgccacatgttcggttttatttgtggaaacagttactagtagtatatttatgagcttattaaggtttcctgggaatctctctcccctgtgtgtgtccacagtagacatgattgagtggagtgttgcatggctggtagcaggtttcgatcttgttttttcttctgggggcctagctgtccatcttacgaatgtctggttcatatacttgcatgtcgtaagcatttttttaattccaccactttcccctttctggtaaacatggctgtttttttttctgtcgtcagtctggaatacgtaccttacttgccagctgccgcctgcagctgctgattggaattcttgacccttgcttgatgctagtgagacaatgaaaaaaaaagttttttttactactgatgaaacggtagaatatactacgcagtgctaatcatctggcacctcatgcgggaccacgagggagtggtcctgttgtttaggaatccttatctgatcagtttctaaaacaacccaaaaccatggtagtctgaacttgctggaggctgcggcattaaaaccttgctctgaaagttactgatgtaggactgagattgaagggatgcatgctgtgaatcgtgcaactccttaagcagaaactgaagggtcttttgagtccgtagtgtagtgccaatcccttctagtttgataattacctcagctttccagttcttatacgtatactcaagattctcacatattttctcaccaggttccaggtgaagaagaaacaattcttccggaatt

SEQ ID NO: 36798 - DNA, 731 bp, Sorghum bicolor
  Intron number 2 from transcript Sb08g003410.1 (locus Sb08g 003410) derived from phytozome v7.0 (chr-ID chromosome_8; pos 3863206 to 3863936 reverse strand)
ccttgagtccgcctggaacaagttgaggggagtcggtgagcgtttttgttgcttcccgcgaatataacgttttttcacacatctgatgctcatccagtctaaattttttttgtccgaaactcaaaaaaaaaaaaggtagacacagctcggaattttagtacgaagtaaatatgtcgatacaccaaattatgtttccaaatgtgtcgttatttgcgatgcatcgtaacaggtatagaatataatggcaataatagtctgaatttgtgatgttttctgttgttttttttttctcaaatgctttgttcgatccatagacgtcatgtggtatatgtctctcgacatcggttttatgttatatgttatacatatacgaactactcagcaaccattggtcaaacttttcggaaatagttgatggcactgtttcctgtagtttcatttacaaggcctacctgactgatcacttattcaagatgtatgatctatccagtcttattaatttgggcagatatcaaaatcgtcttctttgcaacaaaagaggaaaccgtttttgagtgtagcgaagttatccatggataacttgtgtttgattctgctatgatattatcagctgatatgctctgcatttgtcatttatgtctgcatcctctataactcagctcaatttttcactaagcaatatgttttttgtgtctcaagatatattgacaaaggaaaacatagccgaacca

SEQ ID NO: 36799 - DNA, 563 bp, Sorghum bicolor
  Intron number 2 from transcript Sb01g019560.2 (locus Sb01g 019560) derived from phytozome v7.0 (chr-ID chromosome_1; pos 21268979 to 21269541)
aggtaaggtgttttcttttgtgaaacaaatttttttgtggcacaagaacagctgaaatacatgctgaatgtgactaggaaacgccacaattttacctccttgggtatctatcttgtgcttcaatgtgaagatttttattgaaacagctagtatgattccgagttaagtcaatcttgggtttcttttgtcaattttccttcctcgtgaagatttttgtatgtaactaaaatcaacctgcgtttctgcagtggattgagtaaacatatgtttatcttattcttccaccaaaattagttcactacctcctatctagcagtttatccgagctatccttttctataccaaagtatttaaattttaaagggtaaattctttatagttccaagaaaagacttaccatttttattactgccattctctttctttgatttcttcagatgctagaatgccatctgtcacatttctatatttcgtcattacatttggacctagctgtttctagcttgactaatagcacctgctaaacaggaagcaagggcattgctaggaaggctcgaatatca

SEQ ID NO: 36800 - DNA, 693 bp, Sorghum bicolor
  Intron number 2 from transcript Sb01g035210.1 (locus Sb01g 035210) derived from phytozome v7.0 (chr-ID chromosome_1; pos 58731881 to 58732573)
catttagtcctccagcgctgccctgaaacagccatgtatgttgccaagcttgcttcaaatagaatctctctccatgtcatgttttcttgacttgttgcccatcatctttatgcatttgcttttctgttttgtagactatgttctaacattagagcagaacccatgttgtaccacaatattagtatgtttcaagttgaaatcaagtatctttcaaccagcatttgatgcttggatgaatgcaggagaaataaaattgcagccaattcatctacacattcagacacaactttacagttgcatttcgataaatgtaatcccttgtagtatgatattctgtttggaggtattaatagatatggtcacttcttttctctacatgccagttgcaccctaactaattctgttcctcagaactgttctataatttgatctatgcatattctttttaggtaccatactattgtagtattgtgggcttcaactgcaccttgtatccgtagcatcttacatgttgatttcttcatgttggatttaccttttgttgctgttctcacctgctcttttctttctatactatttttatctcaaaagttgtgctatatcttattgattaaatacttagcttttgtaattttccctttaggctgaattagttatctcgtttgttgcagcccatctgtccttgttagtgat

SEQ ID NO: 36801 - DNA, 962 bp, Sorghum bicolor
  Intron number 3 from transcript Sb06g004050.1 (locus Sb06g 004050) derived from phytozome v7.0 (chr-ID chromosome_6; pos 9064407 to 9065368 reverse strand)
tattcgtttgacaagtgtgcagatctggtaattttttttcggcattgtatttgtccttgtcaggttgtgtaattatccttgagagacctttaattcttaaagcaaaatgattttttggtttttgacaactcttgtttcatacacaggaactgtagagaattagatacagttttactaggttccgaaaactaaatttcaatttgctagcctacattggtttcaatatacttaaaagctatggactcgtttttaataaaatcccatagctttcctaaatctacaatttatgtactcttaacaaaatccaacagtgatatgaattgttgtttcatgactgaatataatacaaatacaaatatactgatgtattttgttttctcccattactattgttttaccataggccctttgtcatcttatgtctactagctaacctttccattccaaattataagacgttttggattttctagatacattgattttcctacgtatctagacatagtgtacatttaaatgcatagcaaaaactacgtatctagaaaagccaaaacgtcttataatttggaatggagggagtacattcaaatggtttactcaatttgctaagaaagacaagcttcatttggattctaagtcataagtcctatcattatagttgcttgtggaagacaaatcacaaagtcgaacactgttaacttattaccccctacagtctaggacatgcattttgttaggatagtccaattaaataagactagatttaaaaatttgtccataaactatacttgtcatgttcatctactagttactatggcatagactagcaagagtgttgtctaaaaagagtatatttcatgccttttatatatgtaccttcttgataatctccaagctatgatgttcaacctcttttttgtgacatatgtgcacgttttttcttggaccatcagcctaaaagc

SEQ ID NO: 36802 - DNA, 874 bp, Sorghum bicolor
  Intron number 1 from transcript Sb08g001657.1 (locus Sb08g 001657) derived from phytozome v7.0 (chr-ID chromosome_8; pos 1680643 to 1681516 reverse strand)
aaattggtggcgagactagtaagtattatcttgtttcactatatatgatgatattaattcttcacaatgcagcagctcctagagttgttctagagccttgtccaagaatgcaggaggatctaaatgtgttactataattaaagaactatagtaccattgaatcaatgaccaattcaattaattgtagcaaactattggagtatatgtaatggtcatggtcttgtgcagtgcatcgattttggtaagctgagcatagcttcaactgacatcaaaatgatcatggtcatgtgtgtggtgcattttgttgatgtctgttgaagctgtgatcatggtcatgtgcttggtgtattttgatgtctcttgaagctattaccatggtcatgttgatggtgcatttgattttggtatatgtagttgtatgaacagaaaatgttagcttaaactaactagaacagaatcaattagtaaatcaattagcctttttagtttgtagcctaatttcctccatttccaatagtggtgggtttaatgaatatgttgttttcttaaacactgtcgtcttgcctggtaagttactactcatgtgccacaagcagcaattcaggtttttttccactggtgtttctgatgttataaatgtttggaagggtcattcaattttaatcattgttttcatggaccttcattaatactgtgtaaagaaattttctgcaaaatcttctaggagtgcaccaataggacatgatactgtgttgagactacattaaatactggataactgatgggtaatttgacgtgcttcatttttgttggaaatccagaataaaaaggttgtgtctaacttatctgtaggaactacacataggaatttggg

SEQ ID NO: 36803 - DNA, 811 bp, Sorghum bicolor
  Intron number 1 from transcript Sb03g034070.1 (locus Sb03g 034070) derived from phytozome v7.0 (chr-ID chromosome_3; pos 62281025 to 62281835)
aggccgacttccggtggtgggatcgcgtcgaccaggtactggccctcccttgcttttgttctgcgtggcgtggattgtgtggttactagtattctggatggtgttgtacgttctgatttaatttgctcgcaagtggtactgatgcggttattattgacttattcctgtgggctgtggctgagatcagtactgttaatgttggatttgtgattctcggatagttcggtgttttatcaatttttttcctctgaagttatgcacctgttagtggccctaaatttgagttctacgcagggattgactctgttttgttaatctcgtttgtgcttaagagtgacttttactcagcagcagggaaatatgtcgcccaacaaagctcgtttgtgcttaagagtgacttctactcagcagcgaggaaatatatcacctcatcgctcccttgtgagcagtgattattctcgtgcttgcttttgtcagacgttacaattttaacccagtcgtgagaagactgtgggtacttgctgtcaacgcgcatgattgtttctcgtcctttagtattttgtgtatatatcatttagcactgaggatgaatattcatcacatgcctagggccctggagccctgccttcgcaggagtagcaaaccttgagtccttgactggtgtcattaattgtttcttcgtacagaacctagtattctaaatttctaatcatgtatcagaagaatgtgcagtctgaaatgcctctgtctaatctttttttctgatctccatccagtttattttgcttggcgctgttccttttccaagtga

SEQ ID NO: 36804 - DNA, 1024 bp, Sorghum bicolor
  Intron number 1 from transcript Sb05g006210.1 (locus Sb05g 006210) derived from phytozome v7.0 (chr-ID chromosome_5; pos 9520805 to 9521828)
cgagtataccggcggcgttaagattatcgacacgggtatccgtggccaatactttttcagttcaacgtggggtacttaaattgttattaatactctagtttatactccctccatcctaaattgtgagtcattctaagaattttgaagagtcaaacttttctaagtttgaccaaatttatatgataaaataataattattatgataccaactaaatatcattagattcttccttaattatattttcatagtatacttactttacgttacaaatcaatcttagtatttctctctataattttggtcaaacgtgaaaatgttttgactctccaaaattcttggaatgacttacaatttgggatggagggagtatatagcaaaaatgcccctgccttaagggaaaaactatcaaatctatatctatatttatatttctgtattacataattatatatataataataaaaaggcaatatttcagtctatttttttgtccatctattttttatgtctccctctagataccggacaatacagagtttctttcgttcgaaattatatataactcgtccttattatatgagttaaaataactattgtctaatatgatatggagttcaatttcagttttatataggtcttatatatggtcaccttgatagctaggaagagtcttaattctaatataaatagattacttcaattttttgagtaagctaaataggaattctaattcaagagtttgatttcaaatttattagtattagtacttttattcactgagatagataaagcaacaatttttcgctgatgtaacacgcaaatcgatcaaccccaacaccaggaaccacaacaagactagaactggtcatagaatcacaccaccagacaccaagtggcatgctagatccatgaggcaaagggaggcagaagattttgcccaggtgaccaatcccagccgtccacctgcgatccaatggtctcgttccttcccttcatcctctagtacggtcgtcgctctcttga

SEQ ID NO: 36805 - DNA, 999 bp, Sorghum bicolor
  Intron number 1 from transcript Sb08g001290.1 (locus Sb08g 001290) derived from phytozome v7.0 (chr-ID chromosome_8; pos 1268857 to 1269855 reverse strand)
gcgcccttagccggcgaagagcacccaccagccaggtactcacaccctctcctcttccgttacctccgcgcgaaaccgagcacccgaaccctaacgtaatccatttgtattcgcgtctaatttgatcacactgtagtggtgtatatgtctactgtcttcgatttttttcgccaaaaattctcgggtgtgaatgtgtacactcatgtccttttctggctccgccctcggatccgaggagaacgatagtttatataagacactgtatggcccttgttatatgttgagttgttgactgaggtgttctgtgctcaaattaaatgtttgactacaacacgattagatggctgctatatttgtgtggaagaagacgagtttaatttttcgaatgcatagaagtaaatttttttttcaagataaagctaaggtactttgcataagtgagtctgaaagttactgaagttatagactgacagaatgaccaatttccgcatgttttgtcattattagtcagattatacgctaccttgctgtttacttgtgctcaggtttttgtttttgttttctcatatcatttacattgttctctaattcctgtttcttttccctgttcttttttctttctttccttccattcctcatggaatgttggtgccttgcaattacaccaacctgttcagttatacatcagatagcatcgtctttgcttgccctcttttgcatgctcatgcggccgatgctatcgcattcttgaaagccttccatgctgcccatctgcgcatactgctatttctgcatttgtgccttaacagccgcttactctggggtcccatttcccacttggatgcccatggctgaaccaaattgcagattattttgtatcattttttctagctgtttctgttttttttcttcctatccatacatcatcacttttctcccccaatattgttggttcctgtgctctttccaaagtttccttggaactttaagctttggaag

SEQ ID NO: 36806 - DNA, 989 bp, Sorghum bicolor
  Intron number 1 from transcript Sb06g017380.1 (locus Sb06g 017380) derived from phytozome v7.0 (chr-ID chromosome_6; pos 46653470 to 46654458 reverse strand)
ccaggtccgcgctctctgcgtctccagtgcttgtggcgttgctgtgggtgggactagtccgtaattaggacttgtgttactatcctgtttagcctatgaaccgtggtaggatgctaattaagttcggtttggtactattctcgcaagcaattagcttgctcaattagcttgctcctttgattgtggtgacctaattattttgtttggcttccaatagcctgtctggtaactttatgtgctttagcattgattgctagtttgttatgttactgaagtgttagttagaatttagaactagtgcgttgtctcattatctgtttatctctgttgactgcatcgcacaatctgtattgacagtctgacctacctgtgcttttgatatagtttaaaagggataaaatcattggttagggcagattcatttttttcactttacatttgttgtttctgggctcgttatgttttcatcgtctttagttctttagttgtagagaatgttgctgagaagaattaaaatccagctgatagctgattgctgaactacctttacacattcaactttatttgctttgcagtattactggttagtgattttctctggccgttttatatattagtttaattttacagggacttgtatctacattagaaaaatttggtgggaattgcgtatgctgatctgttttggcacttctatctctgttttcatagtgtgttatgcagtctatctctgtttttctttcttttttaattcattagcaataatttgcaatcaagttttctgtcagtgacatgtcccacatgcttaatttattatatctttgcttcttgatcttgtttggggactgtctacttcatatatagcaatttgcttttctgcttgagcatgttagtatatgcttaattttgaagctaaatgatagtgacattcttctttctcatttttttatccagccaaaagaatcataggtattctcgactttacctca

SEQ ID NO: 36807 - DNA, 550 bp, Sorghum bicolor
  Intron number 2 from transcript Sb02g010250.1 (locus Sb02g 010250) derived from phytozome v7.0 (chr-ID chromosome_2; pos 15248675 to 15249224 reverse strand)
ccggataccagagcaacgtccctcagtggctcaaggtactacaacatgttgtttgtttgttggacaccttgttaactaacttcttgcatgtcacatccatagtattagtgcgtgggtggctcacctttattttcatccattcacaataatcaatcaatatatgaaaacctcaactcaattaaagggttttgattgaagaaaaggaaatttatgctgctagcaactaagtgactttataaaccatttttaggccaacttgataacctaagagaggtgtagtgtattgtatttgtaccgaaaaggaggggtttcgctcgctctaaaaaggctggataatgatgcctaacaaaggagggatttgttaatttctaatgccaatttgacagttctaaagccgttaggtagtactaaaagtgccatcctccattcctctaaatactttttcttgttgttgttatactatatcataaagtttttcttttaaaaaaaaaacagaacttgtactgtcatatatctaattgggctctccatcttgtgctgctcatcaggg

SEQ ID NO: 36808 - DNA, 1007 bp, Sorghum bicolor
  Intron number 1 from transcript Sb01g041640.1 (locus Sb01g 041640) derived from phytozome v7.0 (chr-ID chromosome_1; pos 64934704 to 64935710 reverse strand)
gacagggtgctcccggcgctccgccggacgctcaggtgcgtgcgctgcttcctcttcttccttattctgcctcgggcttggatttcgctgccgcgattgccgcgtctgagatttacatgctgcttgattcgtgcacggatggacatggatcgtgaatggtatgcttgggtttgattcagatttgggaaaggaagtgggactctgtttctagtttaaacgttgccctcgataatcgtcgtttctaggccgcagcatacgcgacagtcccttctttatcacattctgtactacatatggacaagccggggataagtatagttggtgatttaagtgtagtcagtgattagtactcccaaacaactttaaatttatataggaaaaatactactatttagtgttagcagtaaccaaacgaaatctatttactctgctgtatgacatgaatttagtggttctttttttttttggctgtttttagtgccttcctgcttgaattgttgtaatagtattatgttagcagtaaccaaagtaataaatagtcggctatagctgttttatattgtgtactgctatttgtactcatgttcaatttagctcttttagctcggttttagctttaggagaaccttgtagctaaatgcctatagcctgctacctaagaattgatttcagtacagttgggtggattgtcgtatttgacggtgctattggtcccattcacttgtaatctacgaaagtatttttctttcatagcaaatcaatgactctcttttttttttgagaatctttttaaagacgtacatcggagtaccatgcgtccctaacaacgcaaccaaatcgtcagcctacgtggagatgagtgaaaacaaaaaagaaaaaataataattggctaactggacctcctagctagcaatgtgcggttggttttggttttaggcctgcctgagtgcctgaccgaggtattatatctccattcgcgcaaccatccaaatgcagcaatctccag

SEQ ID NO: 36809 - DNA, 1048 bp, Sorghum bicolor
  Intron number 1 from transcript Sb10g029780.1 (locus Sb10g 029780) derived from phytozome v7.0 (chr-ID chromosome_10; pos 59496215 to 59497262)
cggatctccgcccgctgcatcctcttctcattcgggtgagctgctcacttgctggatcgtcagacgcggttacatgcttagattgggtctggatcgtaaactcggtctcgttttgattttgtcgatctaatctggcacctaataatcgctttaatttccggctacctgtccttttttttaataaaaaaaataatagatgattagatttgtgtggcgaaatggggctttctaatcctgtgtgtcgatgacgcgattgtgcggtgcgagttggtttgcttgctggatttgtagggttgctgattcgcaacacgtgcggttttgttgggagcccctcaatgatgtggttggtgggacgatgctgtagcggaagctgaatgtccgtgccgcagatgtgtttatggcgtgttgaagctgacctgcatgaattgcagctttgaagagaccaacaggaaacgaacgggctataaaccgccgttggaccattcgtacatgcgttcagctagcttttacatctggaactgaagagcgaaagcgtgtgcacagttcaaactgagatgccatgtgcatgtgcatgtgcatgctgaaatgaactgtggggtgtaccatgctacaaatgggaatttctcctatggtccttccatccattgcaatgattttaatagccccgaatggtgggcaatttctctatactggaaatatagcaaagggaaaaacaaacgtggctatggtgttgtttgtgtgttagctttcagattcgcacaggaataacaagcatttgattcaaaactttagcatggacaatgagtgctatcttctttttgctacatgtatttactttcaaaacttagttttcttctggccatggaatttctttgtgcgctgcttcttttgctgcttgtttatgctgagttgatctgagtttttggatgcctactctttctcagagtctgtcttattgtgatgctagtgtacactatctgatcttagtcggggactcactttcttcttatcaggtaccactggatcagaaagaaaggaaggcccgctc

SEQ ID NO: 36810 - DNA, 594 bp, Sorghum bicolor
  Intron number 1 from transcript Sb10g024430.1 (locus Sb10g 024430) derived from phytozome v7.0 (chr-ID chromosome_10; pos 53502673 to 53503266)
atcccgtcagcaagaagaagaagaggtatgttgattctgttgttttagtgcacgacgtgtgaaaattgttccctcttcgtttaagaaattggtttaagaaattgagggggatttatgtgatcatgcttgctagtgaaatttaggagctacatagcagttagcgatggaccatatacctaggtttgggtggatgattgcttaggttgtatgcagaaatcgtgttccatccgattatattggaatttgaagatgtcagtacttaagcttctgttatgttggtatttagtttgaactctaccgaatagaagaaatgtctgcgaatgataactaggagatttgaattcgtaaatcgcaaaagctaggaagagtatttgcaatgatatgcacaaatgcttagttgcttaccttggttgcactttgttttaaaagggttgcactgctaattgctagaaaattgttcagcagattggaagaatctgattcatgaattgaagtttttttttttgttttacatttttgcttctaagtctagttggggaatttatgtcctctataaaaggaacttaaaacctgccttgtgaatttatcaggcaa

SEQ ID NO: 36811 - DNA, 830 bp, Sorghum bicolor
  Intron number 1 from transcript Sb07g026360.1 (locus Sb07g 026360) derived from phytozome v7.0 (chr-ID chromosome_7; pos 61547509 to 61548338 reverse strand)
atcctgtcccgcgaccactccaagatcgcccagctgtatgtttctgaacctctctcttgccgtccgtcccatgtcgttgttgatttcagagtccatacagacttgggtcgaattcggtagctctgaattgagatcccgctctctggctttgggtccggttagtcttgtagggcctcgcgtgtgcttcaaattattatttgtgcctcctctgcaattgtttgattacggctgaaatcagcaattctgttctgaaagtgttcagtactcagtttgttgagaatttgcaatactttaagctgaactttagtgctactaatccggccacaatttcgagtgcctctggatatgcaaatggtcttcgaaacataaatataaccacaaatttgaatttaagttgtcaaaattgccataggtcctattgcatgtgttctaagatggctcttatagtggtgcaatcatggtatttcctaaatgaatgaatattaacatacttgtataatggtgctatcatgatctacagtattttttgaactatattatggaaacagaacaaagtatgtcacctagtcctaaatgggatttatatttacagatggaaaattgttattagtccaaagcatctatctttatatacaaattattttagaagtaaccttcatataatatttgttttggaccgcctcttggtgattttggcactctctcagcaaattgtattccaaagtgaacctgccttatttttatagccacagaaatacctctctgatattgtcaatggatgtgctgaattgctaatgttctctctgcttccttgcgaacagggcagacaa

SEQ ID NO: 36812 - DNA, 1069 bp, Sorghum bicolor
  Intron number 1 from transcript Sb02g037470.1 (locus Sb02g 037470) derived from phytozome v7.0 (chr-ID chromosome_2; pos 71735984 to 71737052)
ttggttcccaggttcttggggacgaaactcacaaggtttgcgcgtttgtccgtgcttgatcgccatggaatttcgaggttggggttgcttcgtaccgtgacttaggaccgatgtgtgcagttttctttacagcctgagggcagttcgtgtggaccagggcagggcataaaccgatcattttcgcaagttttaatgcgtactccttactgtttgactcaatttcctttggactttaaagcctgcagccagtcctcctgaacctgaacctggggttgccaaaaaatcgatcttgtggcggaacttttttttattgcatctcgattcgtattgaaaatgtttgggcaggctggatgtgtgggcgtgaatatgtgggaatccttgcgcggaatgggaaaggtaacaccagaggaggtcataaagttctggattgagtgggagggcggggttaagtgccttggtggtggaaatgcgaatatatctttctgctgtcaacttctttccagtctttcttccaaaaaccatggcgcactgaagtagttgctgttgcctgtagcccgtcgcaggggctgggtaaatgtacatgtattcgagttgggtgatcgacttaaagcctggttgaccttacacggtggtcttgtactttcccaatcgctatcagtaagatggtccatatctcgtgtttattgcaggacaatgtaatgacatgtcaggatcaatcatgcaagtgagactttaatcctgttttgttgctgtaggaatcgtgtacaatttcactaattatgctcatttatcagcttttgttgccagttgatcaatccaaatatatctcagatgaactgaaatttggtttttgacctggaattttgcattgtttccaaaaactcatgagtaatatgcaaacattttcagttttagtggatcttccgcacagcagctttgccgtattattctgttttcggaagttaggaatgatattttgtactatttacatattattaataactgaatgtaacatgagtgccattttggtgcaggtggttattttttagtcttgctaacttctgttgag

SEQ ID NO: 36813 - DNA, 289 bp, Sorghum bicolor
  Intron number 1 from transcript Sb01g002600.1 (locus Sb01g 002600) derived from phytozome v7.0 (chr-ID chromosome_1; pos 2126281 to 2126569)
agtgcttgctgtttggtgtgttcccatcttttaaaaatccagagaaattgttgtgtttatttcttcatcttatggtataatcaaataatgatttctctttttctatttcattttcagatcttgatgacactttgtatcccttcagtgctggcatcaatctagtttgtcacaaaaacatacaagttgagtaatgatactaatcgttttccatggctccatgctttatgaagtgtttattgtctgtaaatgttaaagagactgcaactttgaaatttggccaccagattac

SEQ ID NO: 36814 - DNA, 964 bp, Sorghum bicolor
  Intron number 2 from transcript Sb07g024900.1 (locus Sb07g 024900) derived from phytozome v7.0 (chr-ID chromosome_7; pos 59876651 to 59877614 reverse strand)
agaccatcaagctcgctatcaaagcactccttgaggtatatacccagcacttaattagccctggtggattattcagagaaacaatagtacttgaagagtgtcaattgagagtaattagcataggatgagaaagatcaactacttataaaagcgagataatttgttagctgtcacttaattgaaccaaatgatgtgctggtgctgcacttagaactaagcttacattggccaacccaatttaccagtggactgttgaaaatctggactgtgtgtgtgctttgccagccaagtgtttcatgtgtcatgacttattgtttatgaatattggtatcatcaactatagatcccggtttaactgacagttgaatctgagttccttgaaatctttataatcaggtgggttaaaacttaaaacagtataagggaatttcactaggaagttttagatcttgttaatctgaactaattactaatccgatcagctgcactacacaactgccggctgctggctgtcgctgcaaacactgcaggaaacaacagtacctagtgctagaagtaacagtgtttgtatgcagcatcatagctatggcatattgtagttctacacctgttgtctggttagtgaaatctgaactgacttgttgcttttaatatggttttcacccatacgtccataccttataattcatgagaaaattgttaaaggaatttttaagtaagctcactttagtttttggtttccgctttctatattggaaattgttcaattgacccaacgcattcacctttgggtcatgaagaatttgccccgctagctgtccacttctagtttgattccttcttattcaatgaaccattttctactcaattgtttagattaaacattcaactgtatttcacagcactgattgaccacccataatctctaggttgttgagagtggcggcaagaacatagagattgc

SEQ ID NO: 36815 - DNA, 636 bp, Sorghum bicolor
  Intron number 2 from transcript Sb04g003175.1 (locus Sb04g 003175) derived from phytozome v7.0 (chr-ID chromosome_4; pos 2978738 to 2979373)
gtagtagtaagccgttggttgccttgtcattttctgaagccaacacattatttatttttcttcttctagcaactattatgtttaagaatcttaggaatgcaaagctgcatattttgtctgtgaaattgatcttcttgtttatttacaattcagtgtcatgattttaaggtgtaattctttttttttacgatgttagatgacatggttactttggcagtgttggtaactgatgaactccatctgagggagtgccattttgatttgtatagaggggcacctttgcttcgttcttttcagtttagatatctaataacacatgattcagttttgtctaccatgatgccatctctcgatatgggttccacattatacttcaggaaaactcactttacgtttgcacaaacaaattgatgcttcgaagacactaggaagctgagtaagccttagttcaaatttattaagtccatgccatggccactatattttcagcactttgtggtttgtacgaaaacagcttcaacattaatactatgcaaataatttgttccattgctgaatctgttagctttagcactgaatttgtcttgcctttcttaaacagacacaagacaacagacaaaccttccgtttggtcaa

SEQ ID NO: 36816 - DNA, 904 bp, Sorghum bicolor
  Intron number 2 from transcript Sb07g001800.1 (locus Sb07g 001800) derived from phytozome v7.0 (chr-ID chromosome_7; pos 2057739 to 2058642 reverse strand)
ctccctcgtcgacaccgccttcattggccacataggtttgctcttgctcttgcctttcttcgttccttccaagcctcgggctcccgtcctaaacctgcctccatcctaactccccaaaacaaatatagtatagtagtagaaataggagtatgttaaggttgggcactttggatttccgaacaatagtataatatagtggtaaaaaataggagcatgctaagaatggagactttgcgacaagtatcatgctctgcacctgcttgttcaatgcgattttattcagtgaaggggcttgctgtctgcacctgagccatgatagccaccgactgacatgccctccttggctccttccatttcacgttgtcacaagaaggcttcaatagagattcctggcgtcttttaggaataatattgtcatgccttgaatcaaaggaaaagcatatgtgcagtcagtgtgcattactgcaaaaggtacgaggaagaactgtggtgatagaatacagaaaatacagaaatcagaggggactggggaaaatagccatcctttcttgcttaattaatcttctgcatagctcaacagtataaaccaaccaataggatactttgacctttaacctcaactcaccttagcctaattagtgggctactgactctgctctaccttaactggactccctcagcttcttaatctagtcaactatctcttctaagttctaactgccttggactcccactgggcctgatcattcagtgctaaatgaagtccacataagtagtgtgtttctcttgagatgttttgacaggaagcttggttactctgttatacaggtattttgattgctctgatatttgtaatttgtgacaaccaggtcccgttgaacttggagctgtaggtgtatcaatt

SEQ ID NO: 36817 - DNA, 586 bp, Sorghum bicolor
  Intron number 2 from transcript Sb10g006380.1 (locus Sb10g 006380) derived from phytozome v7.0 (chr-ID chromosome_10; pos 5863996 to 5864581)
cacaaagcaggtcagcttcctccttcctgcgcaaatgcctgagccgacactttactgaaacgaactctgaaaacatgcatatgttttgttgcctccaagaaacagcaagaaactctgaaaccatgcgtctgttttgttttgtttttttgcctccaaagaatagcaagaagctctgaacccattccagtgcggcgagtaatgcagcgtagtactcgtataatcatttgttttgttgcaaaggcaaaagcttgtcaatttgtagaatggaagcaaccaatggaagattgacccaaaagtagctgcatctgaaaaggcagcttgtggtttccatccctttagttgacttttgacctttattatatagaagaagaaaaagctcaaaagcagctcccaaaagcccagccaaaatcactcctgaaaccgatgtatgcaaagtcggcaaattgcctgaaatcagcgtgtgtctgtctgtatctgacctccaccaccaccaccaatcctctaatctgcgctagttggtgcatgcaacacaatgcgaatgcgaattgcaggcgtgcgcgttcagggactcgtacgagaagttcaa

SEQ ID NO: 36818 - DNA, 882 bp, Sorghum bicolor
  Intron number 2 from transcript Sb03g038020.1 (locus Sb03g 038020) derived from phytozome v7.0 (chr-ID chromosome_3; pos 65965753 to 65966634)
gactcgctaaagaatgtgcgtatgctttccttaacacctgcccttctgttttatccagtatcgcaaagaagaagtcattgtgggattgcatagatgctcttttttttgagtgtgtattagatatcttggttctgattgttgctagcactggttgcattattatcgtgagcctaattctaagctccagttcagtcatgacggatctaatttcaattaatactggtatgtaatggcttttagatttttctatataatcttgattaaggttaagttctacagattaaggttaaatgcttttttccataccaatactcactgttatgcatatggggctctgtgccaagcagtgaatgctgagtttttctctgaagtatggacagaagtttcatgcagccttgtttagttctcaaaaaattttgcaaaaattttcagaatcccgtcacatcgaatcttgtggcacatgtatggaacattaaatatagataaaaaaaactaattgcacagtttgcatgtaatttgcgagacgaatcttttgagcctagttagtatatgattagacagtatttgttaaatacaaacgaaagtactacagtgtccgttttgcaaaaaaaaatggaactaaacaaggccggattgtctgaaaatggttatgccctgaggttaccgatgttttgaaagtgtatccattcagttgcttgtttgtccattgtctcatacttagtgttaatgaaaaataacatggtgttgcacataacctctgcttctgcttttttctcttggatgaaagattgttctgtcggcattatttgatttgcaggtatactgtcttcatgcttttactcacctttttgtgaaatatatacattagggtgctcctgagaa

SEQ ID NO: 36819 - DNA, 556 bp, Sorghum bicolor
  Intron number 3 from transcript Sb04g002930.2 (locus Sb04g 002930) derived from phytozome v7.0 (chr-ID chromosome_4; pos 2765711 to 2766266)
aggtatctgttgaactcagcacttctttgaattggctaattggaggctttatatgcagcatttaacataagagaaagatacatctctataatgcatatgaccatgtgcctctgtttcctgtttcatacatttaacttaaaagtcgttaagattgctaaaatactaatagaaaaaaataaagtccttagacctgggtacatgttcagttgatgaagaactatctacattaagctagtctttttacaatcttattaactaatgcagtcctttctaaattacttggaaggtaaggaaacaaaaagtttgctgtaggggctgcagcccctccaatttcttcaaaaaaaaagaaagaaagaaagtttgcttgcagcactgatttgtttgttggttggattagagatttgttgcttcagttgaataaaaaacaagtccaggatgttgttaatttgtcacttagaaaatgatgaatcctaattttcctgaattttcctgcatcccttattctttctgtaattttgcagttaaaggctcttttggctgattcggaacgaagtaa

SEQ ID NO: 36820 - DNA, 629 bp, Sorghum bicolor
  Intron number 1 from transcript Sb02g008130.1 (locus Sb02g 008130) derived from phytozome v7.0 (chr-ID chromosome_2; pos 10644241 to 10644869 reverse strand)
acaaatttctcttaaaaacagtagggttctttcctcccatagcacctcttcatttcctactttgctgaaatggatatatatcagaattacttcactatttttcttaaatttttgtcaagaggtagacatagcaaacaaggactagatagtactcttgtctaattactagatgataatgatgagaagaatataataactgaaaaggtagaggtattttttgagaattaaaggtagaggtattttgatgatgtgtaattccttgtggtcaatgtccctggtgtctctcctaagatttttgtcaagatgaatacacaaagaattaagctaataaggtcaattgttaaactatttaaacctgcatatgctgtgttttttttcttctttgttatttttgttgtattttcggtttattctgtaattatttatttgttttctatcttaatataatgataatcagtcatctgtgttttttcttgaaaaaaaaattatgaacaagataagcctaaagaagtataaaatgcaaactgcaagtttcagttgctgctcttattgttttgactattagtgcatgtatgctgcttcctttaaagaagaatagtctgatagaaatgatgtaggtggaatgcagg

SEQ ID NO: 36821 - DNA, 803 bp, Sorghum bicolor
  Intron number 2 from transcript Sb07g003760.1 (locus Sb07g 003760) derived from phytozome v7.0 (chr-ID chromosome_7; pos 4625540 to 4626342 reverse strand)
tgtcgaatcacaccaacgactacatcgccttcaaggtccgtttgttcttagcagcccccctcgccttcagccctctatttgggtgtccccccccacgtgaaattatctcatattagaaccctagagatggattgagaccatgctatttgggctgttttgctacctgatgggtttggggtgacattcctgcaaagtctgttttgcatgaatggaaacatcgaatttgaccatccaaaattggggccctctagattgttctttgatggcgggccctcagtttggacttttactgtatcaacgaagggcgagttgcgtgattaaaaaaactttaaattgtctgttctgttcatacttgcatgtcttgcttgctcacacttcggagctattggaattgtattgctaatatctttatattgaggtttgatgcttggaggggtcgctttgttttcctgtgagacccaactattaaagtgtggtaaaaatgcctgctcagtgcaaaaaagaagtattgagctttggtgatttattcacctgttagaattagcactgatgttatttctcttagaggtttcgatgcattgtgatttaatctgccattgatgcttgaacatacgatgatgttttttcttgctattataacaatggttagtgtgacatctttgtgctgtttaactacttatagtttgattttaaaaatgtaaacatatgttcaaggaggtcttatagtacccatacatttcttgtttgactggttctttgattatctaggtgaaaactacaagtccaaagaagtattcagtgcg

SEQ ID NO: 36822 - DNA, 604 bp, Sorghum bicolor
  Intron number 3 from transcript Sb02g003920.1 (locus Sb02g 003920) derived from phytozome v7.0 (chr-ID chromosome_2; pos 4369047 to 4369650)
actcatctataggtaattagatattttttgttcttgctgataactagtaagccatgctttattgcttctggactttaacttcctcttaatttgggggatctttgtcagattatgtaacttatggtttagatgaagttaaatttcctgttgtaaagccggtgtttgtgcaagatacttttgaattgtgtttgtagtttttataaaactgataattactatttctgtgacttgtcatcgtcgatgcttttgaactctgtatgaaactgagaattgttctttgttcagtcttatgcacaggttaatttgctgtaattgtgatttaaaagaatataagcgtatagctgttaatcacttaattgtaccctttggtgtcatcttggcatctggtcatgcattcatgctaaactactggtcatgaaaaaaattgatccctgtttgagaaaatcagctaagctcacctgaacagtacttgtcttgaaaagaatggaagggagctgttctggttgtgctcattttctattgacatcatctcttttatgcattagttagttcttaaatactgtgaaaacatttttttaatcattcatgggtttcgtttcagacg

SEQ ID NO: 36823 - DNA, 881 bp, Sorghum bicolor
  Intron number 1 from transcript Sb01g044700.1 (locus Sb01g 044700) derived from phytozome v7.0 (chr-ID chromosome_1; pos 67878224 to 67879104 reverse strand)
gctcaaggtccgccccccttttgtctttgtttcccgtcctaacgtttgattagttcgcgccgcgatggtgatccgcaatgtccctagtgacctagtatttccaatttggtttctcgcggtgtttggtatggtgtggcctggctgatcttatcatgggctctgtatgcacgattgctgatgtccgtttttttagtttaggttagactaggacgctaggtttagtcgatgctcttcttggtggcatctaaaacgcctcgcattacagttggtaatgtttgtagcttaagtatggtgaaggaactgatgtttagggtttactcgaaggcagatattgtactcaagcttcaattattgttgtttcggcctttttttttctttttgagttatattaggatttatttaggacccaaacacggcacgagtctcactaattgatgttgaaactcccagtgtcatcctcttgtacttctcttggttatccagtgtctttttttttaacagaattgctccccatcctaacctctctaaagttgctaagcgatccctgacacgacaccgaatcctccaaattaagaaactgttatgtatatagtgattgggtatatgcagtgttttccctcattatatttcccctcatcagttaattctattatctactgcatcaattccaaagttttcatcagattgctatcagtgatgactctgttcttatttatgctcatcctaaggtcccaataatattggagtttctatgagccagtgggtccaagatttctcagcactttttatgttgtgatatatttttgttcctattgtgtacatttatctcaatatttgattctgcagggaagggctaactatcaggcctgctgcatcatcaa

SEQ ID NO: 36824 - DNA, 955 bp, Sorghum bicolor
  Intron number 3 from transcript Sb10g026430.1 (locus Sb10g 026430) derived from phytozome v7.0 (chr-ID chromosome_10; pos 55856762 to 55857716 reverse strand)
cggtaataattttcgtctatgtttcattttttttccccaaagcaactctgaataggtagaaaagaattgacctagtttatgagggaaactaggcccaaaaaccttacaaacacatggtttactgaggaaaactgggcgaaaaacctgaacatgcatcattgtagcctggacaagtaaccctaagcaacctaccaacaaacaagtgtacaatggcaacaggcaaccgatggaacccaccatgcatcattgttgccaagcttgttgcaagagtgaccatcggctcccacttcccatggcgggcatcagccagaggacccagaacgcagccacctacacacagcgaaccctgacacatctagaaaggaccacagcatgtcatcattgcattttcgtctgtgtttcggacatttggatttaacacttttgtctatctgctttatcagggtttcatcttgtaaactcaatccattatatttccaaaccttttgtctaaaaaaaaacctccctctggtcaataatgaatgaagaatgtacaagtggttgaccttgggtgccatcagatacttcttttgaactaggattttacttcattgtagcaataatcagcaatagcaattaaccaaacagtagttacagaagttttacatgctttgtgcaggactataggacttaactcatgttgaagttgaacacaccaaagtgacttgataaagaataaagatagcattctaggttgagaatattactgtttaaaacccacaacctacaacagtaggtctagttctaacaaaagcgctactagcaatctggattgagaatacttactgttccaccacttgcaaattgaatgaatcgtaattggaattcttctctgctaatggactatcatattgcttatgctgtaattttgagattgataacattgagcagagtatgtatttgttatgcaggtagt

SEQ ID NO: 36825 - DNA, 815 bp, Sorghum bicolor
  Intron number 1 from transcript Sb03g042430.1 (locus Sb03g 042430) derived from phytozome v7.0 (chr-ID chromosome_3; pos 69823842 to 69824656)
ccccgacctcgtcctgatcacaggagaccttactggtatgtcgtagatccctccctctctcccaccgtccctcgtcaacctgtttgattccttggcctcgcggtttcagggctgatccaatgctatgaaattactcaatcggcaaatgagctgatgttttcacttttcagtgcttctcatttctcagttcaagtgaaaacccagatgtttcggcacattcggtatgaaatcataatgtaaggcagtacaatactacaatccatacagggggcagtggccggttttctcccaattgaccaacagggccgcttagggtatggctggtctcaatttcaccgtcacaacaaacaatccatagaacagatacaaattttctccaaatgaaatactaggtggtaaccacagattgccaagagctgtaaaccatcgcatatgttttggctcttgtattgttgagggatttgtatttgactgtgttactaatgagcatcgtctactcttttttatattgaaaaaactgatatggagtagtaaccaaaccaataaatttgaacctcaaaggcctatgcaaatgcaaaatttagcgaaatgaacatatgatcttccgttacctgtttcagcaaattggaaatgacagccacctgtaagtctgtaatatcgatcagcatcacacaagttgatctatccagcataaaaggatgtaactaacacctctgagaaacgagctacattcatttcagaaggtggaatagtattgcggagggagtcctctcaaccctcaacgttctaatagatatctttgttttcgttaacag

SEQ ID NO: 36826 - DNA, 763 bp, Sorghum bicolor
  Intron number 1 from transcript Sb03g045030.1 (locus Sb03g 045030) derived from phytozome v7.0 (chr-ID chromosome_3; pos 72338814 to 72339576)
gtctcaccggcgtcaaccccctcgcccaggaggtcagcaattcccatcttcaatccttgccttgttctattgagcttctcccattgatgtgagctgggcaatttctagtgaagtagcatgtaaattgctttggggatatatgtgcgattgggcgtgggtaaaaccataggttcctaacggtgatatatgagtggagtttgccgttctaattttaggctgcgcttcatcatagttcctacatactgtggtgctccacggtggaaactggaaagttcttcgtattcctgaaactaggaatgttcttctaatatttagattatgaatgaatgaatgcttgtgttttatgaaataaaactaacaaaagtctatttgttgactgcagcgttgttgaaaaaagctgttctgatccttcctcagtgcaattattaaaccatcattaacttcatcatgttgctgattgtgctgcatacagcattgcaatgttattgtgtttttatggattatgaatattgaaagaacaaacttttgagtggatgctggatatttaggctgaagattgttgaacaaaactttttctgcttccatgttttgcttgcgcccctctttctgtgtcattagctttctatagcgttcaaacacactgcatgtccatgagccatcatcaccattttgagctaaattattttgattcatccattgacttatgttgcgtttggttggttctgcaggctgccggtgcattgtctatcaagataggtcagtt

SEQ ID NO: 36827 - DNA, 709 bp, Sorghum bicolor
  Intron number 2 from transcript Sb02g004450.2 (locus Sb02g 004450) derived from phytozome v7.0 (chr-ID chromosome_2; pos 5026332 to 5027040 reverse strand)
atagcaagcagttgactgtaggagacagggtgagatactgtttagaatttatatttctagttaatatctgtgaagtatatttgtttcatattctgattattgtccaaatgaaaatagttccattacatgtgtttgaacttcaaaccactggattatttttgtctaaaagtgaaaagctgctaattttttattgcgacatgagaaaacgcacctggacagaaaaggtacttcatgaaatgaattttttttcttgaatgaaatggatatgtttcatttccagtaatgaaaacttatataaattgactaatgattccggctggaattcttcctgggaagtgattcccggtgaaacgaacggggcttaataaaagttaggaatttggatgcagatcatggacaaagtgcagatagatatttccgctttttgcattatatggtttgatttggtctattgtgaaagcattaacacttgttgaaagttgaagattgaatatccccttatcttcaacttattatagactgaacattttttactatagactgtactatcctcccattaccagtgtaatttctttgttgcctttctttgagaaagtatttcaacagtatcattccgtttttcaggtcattgaactgaataaaccaatccgatttgctgactgctcctctcatcactcaaaatttgtgatggaacaggaccatcaagcct

SEQ ID NO: 36828 - DNA, 583 bp, Sorghum bicolor
  Intron number 2 from transcript Sb04g028520.1 (locus Sb04g 028520) derived from phytozome v7.0 (chr-ID chromosome_4; pos 58585898 to 58586480 reverse strand)
agctgtgggctgaggtaagactcgactacagctacagtagttacacaacccaaccgcgtcgatctctctcgagccgtcgtcatctcacctgcctgaccatgccgtgccgagacggcgagaccagttcgctgtgacttggcctcgcgtgcgaaagctagctgttacacacaacatgaaacgcaacgtgatgaaagctagctaaggtagctagctagagaccaattcaaattttcaattatcgcttgtagtttagtgactggtttcttcattcgctacactttttcctaacaaacattccaaaccgcaatttgtattatactctggtatgattaattaagtacatagcacacagaaaagatatctgtttctggtgaataacaacaaccaggttaggtggcccgcccattgaacgtacgaagcagtagcaataagttatggagttccacatggcatggcatggcaatggcatgggatgggatgggttccaaagctagctagctgctcgatggatccgaaaccagcaagtgttgacaatttcgtgcgcgcaggtgggcgacggcgacacggaccactactgctggca

SEQ ID NO: 36829 - DNA, 634 bp, Sorghum bicolor
  Intron number 1 from transcript Sb07g005850.1 (locus Sb07g 005850) derived from phytozome v7.0 (chr-ID chromosome_7; pos 8312017 to 8312650 reverse strand)
caggccgtcgtcgccggaaccgccgcctcaggtaggtgctctctttccccctcccttctgacctctcttttttttctctacgccggtccaattgaagttacccagttcttcaattgttcctcaaaatcaccttagttgaaatgttgaattgccaattgtagctacctgattttttaattgttccttcatgatttctctcatcctgcttctagtcaaaacggtcaactggcagttgccagtaggtgtcatcagaagttgaagcagaatgtatggtgttggcctatcgtggttcttcaattgcttcgaattaaggtggttgtgttgtgtgtatttggctcaaagctagtattagatacatattggggatcggaagtcgaattgaaaaagataagagcacaaaattgcagatgcacagcttataagcttgcaagcattaacctgaataaactgaaaatggagtaacttgggcatagtttgacgccgcgcctataccaatgcaatgcaattggtggatgtggtttctgtgtgtgtttctcagtgtgtttgatgtttcaaggattcagttagtcgacagatcctaatgcttggtacatttctgcatggatttcattctgcaggagtacttgtctcggca

SEQ ID NO: 36830 - DNA, 668 bp, Sorghum bicolor
  Intron number 1 from transcript Sb03g037610.1 (locus Sb03g 037610) derived from phytozome v7.0 (chr-ID chromosome_3; pos 65523140 to 65523807 reverse strand)
atacgtaaggaccgggagccgccgtccaagtgagtgttctgtcttcttatccatttacgtattactgaaagtggggatttcctaatgctgaaaatgtgcaactggaagtctagagatggaaccttgtgtgtggtgataatttgagtagctagtggttggcgtgtgcaaattcaagcaaccacatttgtctgagtagttgcattgtaattaaccagacacaaacatattagcatgttaaaacatggtcattaatgtatcttagggctttagtattatcatcccattggtcatcaaatttaaatagatttcgctagtttaagcatgattagaaggtgtttgccactttgcccattgttttaaggatcatattttccccctttgcttcatgatatgattcaatattgcaagttgaatattgtgtagcctttatgatcaagctgtctccatgtacgtataaatgctacagcaatacattattacaaatttacaatgttccatccctttattttgttttggtctatactccttttgatgtgctaatccactgtgcaaaacttagtagcacaagaatgtgtgctgctggttggcatgcttatttggtgaacttcaataaaatgcctatttgtgttccagggctgtgttctgggcactatttggagctatatatt

SEQ ID NO: 36831 - DNA, 815 bp, Sorghum bicolor
  Intron number 3 from transcript Sb02g004740.1 (locus Sb02g 004740) derived from phytozome v7.0 (chr-ID chromosome_2; pos 5473199 to 5474013)
tttctttaacactgtaagctctttctcaaatcagtaagcatacacctctgcttctagcaattttcgtagtttgcagttttgtttttcctatttgagtcactttggtttatcgcaagcatctgggggcgtaagagtgcaagaaggaaagagcatgttggcaactcttctttgcattatgttagaactctatgttgcacatttccagttttactcaatatatcattactaccacctgtcacaaataattggatttttttaggaaacaggaggggtagcccccctactggttaatagtagaaaaagcaacaaaatggtatccatagggccataagctcataacacaaagttgatcactagtttctattgtaactttaatttataaacctaaaaaaaaatattaatatagtttgttgtgagacgaatgaaacaaagttttagatttcaattaaatatcaacagaaaacatcgataggtaaaatttgaaagcttcactgcatgtatgagtgctcccccaacattacttattgtttactgcatagagcgcactaaggcaccaaacaaatattttgcttatttaaaagtgaaacaatgagctaactatgcaactgtcctttttgtatcagttattagtcatttctcaacaaatattcaactttgcctgcttaggtcccttgcactgttcatgaactttgtgttgatagcatttaaagtagaaccattgcacagatatggcttagcatagtgcccagttccttgatccggtttgctcacaacttgcagaaagagaagaagaatttacaggactcagctggtgt

SEQ ID NO: 36832 - DNA, 879 bp, Sorghum bicolor
  Intron number 1 from transcript Sb01g025290.1 (locus Sb01g 025290) derived from phytozome v7.0 (chr-ID chromosome_1; pos 40895624 to 40896502)
gctcaagacaaatctcctgccacagtttgcacgctgtaagtcaccgcttctgaccaaggatagagaggaaagatatatctgtccttgatcagtttttgcttaatttgatacttgtttcctagctagtcagcccgtcgttaccatttcttttgaataatgcatatgatgagttcttaggaaacgcacggtacgttgtgctaatgatggagatcctatcctagctataaggcttagtaaacatggatttgcatggttccacacacatggaaatgtccattgctgctgagcgcattcaagtattttcattttacggaaatatttcagtttttaaaaatatttgattacggtgacacatagcgcagctgtatacatagcatatatatattagggatgatatatacacagaaggagtgatcaattgtccactcaattttctcatacaagtgatctggatgtatatatgtaggatatcagaggaccatgtaacgctaataaatatgttacctctgcaaataaggagaccagatttcccaaagtcatgactgaaatggttcacaagaatccattctttagttcgttgagctaagtttgtacacggaacacttttgcatacgtaatctaaattttcacagagtggaatagttcacctctgtattcatggtatggacagcaaaaagatggcagcagatgcagctggtcagtatatgcatagcgcagttagaagcaaagcagccgtagaataatgtcaaagatctggaaagaaaaaacaattgtactacgtcagttatgttatgttagtggcgtttcacttgtcttcctcgatgtgcatgtattaacaaaaatacgtgccatgtggccttccattcgaattcagattcc

SEQ ID NO: 36833 - DNA, 302 bp, Sorghum bicolor
  Intron number 2 from transcript Sb09g024950.1 (locus Sb09g 024950) derived from phytozome v7.0 (chr-ID chromosome_9; pos 54461571 to 54461872)
gaggttctgaaaccgataaggtatacttcactaaatcatccctgaagcatttgtatttattttgatctcaaataaccctatttggatgctgatgaacttcaaagataaattttcattttgttaatctgatttactctagctgcaatgagtttgtactcgacaagcctaattgtatctctattctaatccagacaagtcttctgtgttgatgaagaagttcagaacttcaagtcagttttcatgtctgtttgacaaaactgttcatgctttgtataatctgcaggtgaaactagattttccag

SEQ ID NO: 36834 - DNA, 947 bp, Sorghum bicolor
  Intron number 1 from transcript Sb02g043950.1 (locus Sb02g 043950) derived from phytozome v7.0 (chr-ID chromosome_2; pos 77751985 to 77752931 reverse strand)
cgacctgcccaggtaccgtaccgatcgacttgctgcttctccatttcctttggtatttgtgcttgagattggcgatgaatttgtgcttcgcggcaatcacgtcttctcgcttgtgttttcttcgtttcatcgacccaactgtatgtttttaattcgcttgcttgcttgcttggtatccaaactccgtatccatggcagaggcagagcaccgaagaggactccgactccagtgagattttcctttggcttttccggcggggtcccgtcccgtcccgtcccgatccctcttcccttttgaccgttccttgcaattgcattccggccggtagatgacatgactgcagagtggcaaggtcgatcagcgatgctttgcctgccatctcaaagtagtagtagtgtttcgtaatgcacgatggaatagaggccttgtttagatgcgaaaagattttggttttcgctactgtagcactttcgtttcttttgttacaaatattgttcaattatagactaactaggatcaaaagatttgtctcgcaatttacaggtaaactgtgaaattagtttttattttcgtctatatttaatgctttatgcatgtatcaaaagataaagattcgatgtgacgggaaatcttgaaaactttttgattttcgaagtgaactaaacaaggccagactctctggtgaaacaatcgtcgctcggacggtcaaaatgccttcaagtagatttgagatctcggattcccaccccatgtgctcgcatgggatggtatgggactgaactagcacacatgccgcagaatatttaaatagagtgctagaaaaacagtagtagaatgttgcacctgctgatcgtttcgttgatccaccaccggcacggcaccgacacactggcaactgagattttttttactcctcaaatggattgtgaattgtgatggtccaggt

SEQ ID NO: 36835 - DNA, 476 bp, Sorghum bicolor
  Intron number 1 from transcript Sb07g005970.1 (locus Sb07g 005970) derived from phytozome v7.0 (chr-ID chromosome_7; pos 8495527 to 8496002)
ctgtcttcctcaaggtattgtggttattattgttattttttctaacattaataataataataacattagggatttcaaatgctcattctaataaactgcccatattgacttgattttgagtttcgtaagaacctaccataatatacaagtagttttagctgtatattgctagacttaaggtaataaaggtgacacaaatcttccaaaacctggagacggttgagacgtgagaataatgggatggatgatcagaactgttgaatttcacatgcagtggttcataggataaataaaatggagcaaataaatcgtgttagaactaaataggcactccattctagatatcaaagggtgaaagggactgcactcagaaaacaaaaattcagaagttcatgtgaaggtgtgtccatacataatgcacaagaattggatgaactgagattgacctattaatgttttttttcagtggattttgc

SEQ ID NO: 36836 - DNA, 980 bp, Sorghum bicolor
  Intron number 2 from transcript Sb04g036190.1 (locus Sb04g 036190) derived from phytozome v7.0 (chr-ID chromosome_4; pos 65979386 to 65980365)
caaatcctctccagtctttcacttccccctttgcggttcttaccggcaaaataaattttacctccattaatttgttcgaatttcgagttagtagtagttaatgcttgatgggagcattgaaaaaaaaatgtggatactggaattgacagtgctgaggggaagtttgggtgaattcctgaaactttgttacctttctcatgatatacatatgctgtacctatacctatggataggcctctgaagcatggaattcgttcaaatgtttgcatcactttctggtcatgctgtaaggatgaggaatcaattgtgtctctgtataccaataggattgtttacatggtttcagcatttggcggcaaagttgttagccattttcatacctacaatctgaatggccttgttgtagtgtcctgtgtatttgttgctaccacaacattgactgtacctagatttcatttcctgtatatttaactgtcttattggaatgtttttgatatttgattattgtaatatcttcgataccatgtctgtctgttttgaaacttgaaacttcatgatggtaacagttatctgcgatattttgtttactgctgcttgtattgcaaaacttatcctattgttatcaaaagtttttttgttctgtgaggttttatgttaagtcttagtatcgtaagtgccactttctcgcagatgaaatatgcacagggttttagaatatctagacctttctctgcttcaatgtgcaatcgtatgttccaattgtttttgttcatctggtcctcctaagttctcacaccaactgtgaacgaacaaaagagggaggccgcctaaggaaataggagtgtgccttacttcattgtttgacaacttagtacatttagcttaaatcgttttcttggtgaatagcagttagtttcattgctgatggatattgtgtgatgccaggttccaaagacctcctggtgctttgccatcatctt

SEQ ID NO: 36837 - DNA, 782 bp, Sorghum bicolor
  Intron number 3 from transcript Sb01g042410.1 (locus Sb01g 042410) derived from phytozome v7.0 (chr-ID chromosome_1; pos 65680349 to 65681130 reverse strand)
gcattgatttcccaaaggtatattcatctcttccttttgaaatcagaaaaagctagttcactatggatatgaaaccggatcatgtcttatggccaagtgatgcattgtttataaaattatcaacaacattagactattatatggaatagacaaagagggtgagttcttcagtcagacagtcactataaatttgaatgcagataaatgtcaacccaaattgaattttttggatctgattttgttctatgttcatgtttgacatgatttagttggagcccattgcattcttttgatatccatgtagtggctgccttttcagtttgcacgtgttttatggcataggccaaggcaggatttgtcacatcaccaatatatatcatactctgttgctatttttttactctcaaacatgcaagagagctgtgtatcatactctattgctcatacaaataatgtgcacaggaacatgagaattaaggctaaacatttctgtttataagttgtttaggcttagctttgttcttgttaatgttatggccatcaattgttctttatggaagaaggaagaagtactagtatactagtatctttctttttgttagtaaattgtccatgcattggttcagtctgataccttgtgttgtgcttactatatgacatctagtgtcatattttgtaactttaaactgcttttggactactataattttgaaaaagtttcagacttgtatgtaacttgagcaaagtgtgcatctattgcaggtgccaacgattgggtgtca

SEQ ID NO: 36838 - DNA, 1035 bp, Sorghum bicolor
  Intron number 3 from transcript Sb02g008910.1 (locus Sb02g 008910) derived from phytozome v7.0 (chr-ID chromosome_2; pos 12466182 to 12467216 reverse strand)
aactattcgaattttttgaggggtaaagtctattcttgtcaggcaattacttacagatatgtaaataatggtggactttaggttgctgacttcaaaatgttgcagttgataacgaaatatttactgagatgtcggattgatcaatagaatttgaattttaaaactgattcattcaggtgaacattgttacataacgcgtaggtaaaaccgcaggcgccaatgcatgtcataccacaggtccacagggatacttgtagccccttatttccagaaatattgttaaccaacttgttaggtgtacaccaatgcacagatcgactacataggtatctatgctatagaatgttataaggtgaagcacatatattcatcatatatcacaagttatgtagtttactagggattgattggaggatcactgactagacaaaaaggatgcaaaattaatttgatgtttagtttgtgtacctgatcacaggatttatacagtttatataattctgtgtcaagtcatggcagaaagacaaagttatagctttgaggtcttatgtgacattctacagtaacataatcagtggacaagttttatcagtagtcggtacttttctatttttttcatagcatgcatttaaaagatgaaattgccagaacaaccatttatatgagaaacttcattgttccacaagtatgaaacttttgtgtgataaacatgttaccttttcaaacgatacaagatgtgatgcagatgagatacacacagcatcagactaacagccctaatttttttaaatgcactctcacctaaaatttttgttatgtgctaaatgcatcaatttctatgcacaacttatgattgtacaatgcaatgctgaacttaagatatataatgtaaacagctaatcatttccccagcaactaaaagtaaaggaactttttactttttgagatacgtgtctgttggctccttaattttgattactgtatttctttaatttcacaggaactttggaggtgttgaaatcataagcgtggagg

SEQ ID NO: 36839 - DNA, 808 bp, Sorghum bicolor
  Intron number 4 from transcript Sb10g004870.1 (locus Sb10g 004870) derived from phytozome v7.0 (chr-ID chromosome_10; pos 4306006 to 4306813)
atacggtcagtagatatttttcaagatatatgttttcttcataaaaaattatgaaggttataaaatatgggttttcttcaacttagagatctgatagtctcatagctggttgtgtaatacatgagcaattgcatcatgctggtgtcactggtaaactgcttgcatgggaaatatttggcaccaccatgtagtaggtcaaccaggcaaacttctagtaaacatcatgagaatatggtagtgatgaaatactaaatgatgaagtgacagttttcagatttatcaccttgacgtcttatcaacatgttctattggtaattgtgatcataatcacagtattggctgcatgttttgcactagaaaaaaaatgacctatgcaggagtggtgatttggtgatcaaatgggcaaatcttttagcaagttaaatcctttgccagcatgtttcaccttcattatgcattttgttaccggtatatatatattcacatagatttcctacatctttagatattgccctacccgaccaacatgaccacaaatgaaatttagtaaaggcatgctattatcatcttcactttgtatccttatataattatgttaagtgtttcatctagtttgactcacacatatctcgcataaagaactgcgaagttccttttcctttcattatgtttctctatactgtactgctttactttgatattgttttctgatgcgttgatgtcgtgttcttggtataaatgcgaacacttggtgctcctgcaatctgtaacaggctgctgggagttctcagggtattagtggtggggc

SEQ ID NO: 36840 - DNA, 977 bp, Sorghum bicolor
  Intron number 1 from transcript Sb01g046740.1 (locus Sb01g 046740) derived from phytozome v7.0 (chr-ID chromosome_1; pos 69887037 to 69888013)
tcaggtgcatgaaccagctcaactcgggtttattgagacaaactgctaaacgagctatattactggataggattttttaggattgacctttaaaattatgctagaataggcattgcaatttgcaagcaactgctcgtaaatctgtttttgtttatcaattgttccatgcttataagaccactgttagttttaaactacatcgataaaatcagattgccactagggcatcccacctgtacctaatgtttcttgtgtgatatgttcttgatgtaagttatgtgacattcagtagaatcgaacatcagtatgctagtctgctagagtgatcttattcttagacattttttttcacatcaatctgacctgggaattcaggtgtaggatttcccttttttttggtgaattagagattattagttattagcattccagtagaatatatggccacatgtggctacttatttcctgcatccaaaatgtggtcagatgagcagtgctgaactgatgatgccatatgtggctacttatttcttgcatccaaaatgtggagctgaactgtatatgttttgttacagaaatattggtgtttttgtgcttcttttgctgaggcactataacaacaatcagtgttcggtccactgcacaaacaagtcatgcgttttcctttgagcaattcttttagaatatatggccacaaaggcagtgaaggatgttcatattgtgtttttcctacctctgtgatattaagttgcaagagagaattctatacttaagacatgctacattctgttatccttatagctgcttagcctattcacagaagatggttgaacctgtactttgagaccaaatatatgttgcgcacttgctattctattattatttgagcttgtctttcttattgtactctatctgttcttatgaagaattctctttgcacagacgtaggaaagaggaggttgctgaacctgaagttg

SEQ ID NO: 36841 - DNA, 743 bp, Sorghum bicolor
  Intron number 3 from transcript Sb09g026910.1 (locus Sb09g 026910) derived from phytozome v7.0 (chr-ID chromosome_9; pos 56078443 to 56079185 reverse strand)
tcaggaagcgcgtcgagaagctcagggagatccaggtataaagttgcttgcacttgtgggactatgatgttggttttgtgatagtttctgctgttgtggcatgcttcggtagggagctttgtgtggtcctgcatcattgtctgtgtctaataaaggatgcattatgtgattgtgtttatacttgtcataatggtaggatggtgtatggttggtgtgcactagcaccagcaattgcaatcctaataggagctaggacactgttggatcctactaatattactggagattctggagaagtgccagccactgtgaatgtttgtgtaacacattggatgatatttatgatgcctggttgtcagctctagatttatttttgcctatagttactaacgagcctttcgctcctgaattcaaggtgtatttgggattttgtttgagaattttggaagtagtatgatactgatacacattatctttatagatctaaccatgtgaaaaccttagtttagatcggagtatcggacagaagctctcttattatgcatgtgtctagactctagactgggcttactttgtgcaacatatttctgcttttctgtcaagcagatccatcgctgattggtttacccacttggttctgtattatatatatagtaatcacttggacaatttttgaatttatgctctagatacaattgcggatagttcattaccattgtttactgtcttctagggccaacacg

SEQ ID NO: 36842 - DNA, 1017 bp, Sorghum bicolor
  Intron number 2 from transcript Sb07g027160.1 (locus Sb07g 027160) derived from phytozome v7.0 (chr-ID chromosome_7; pos 62302012 to 62303028 reverse strand)
cgttctcttacgcccgtgcctcgcccgctcagaaggtgactgtgactactcactactgcctgcactgcactgtctgtttgtctctctgaattctgaattctgaattctgattgttctgaagcggagtagcagacttgtacgtgtctgattggttttgcagcattgcatttctgaagcaaatggcttcttctgaactagacaatcctgtagccaacaagcagttgtctttcacacaaatttattctagtgtcattttctgaaaaatgttatgttcatgtttcctttgatcaacatctagtgccattttctgaaaaatgttatgttcatgtttcctttgatcagcatgtagcatcattttctgaaaaatgttgtgttcatgtttctcaagtcttgatcatggcatatctgacaactgaaagtctgaaaccttgcggcttgcgcgttgcatgtttcctttgtccctctgaaatcaatctgattaattttctgaagtggagttgcagaaatgctcagcagtatctgattggttttgcggcactgcatttctgaatcaaccattggcttctttctgaactactgctgtagccaacacgcagttgtctttcaaacaaatttattctaggccttgtttagttcggaaattatttcggattttggtattgtagcacttttgtttttatttgacaaatattatccaatcatggactaactaggctcaaaagattcatctcgtgatttacagtcaaactgtgtgattagtttttgttttcgtctatatttaatgcttcatgcatgtgccgcaagattcaatgtgacagggaatcttgaaaactttttggatttcggggtgaactaaacaaggccctagtatcattttctgaaaaatgtttgttcatgttctgaaaacatgttgtgtttatgtttctcaagtctcgaccatgacacatctgacaactgaaagtctgaaccttgcgcattgcagttgcagcttctctgtcagagcccgtgccaggacat

SEQ ID NO: 36843 - DNA, 727 bp, Sorghum bicolor
  Intron number 1 from transcript Sb07g021560.1 (locus Sb07g 021560) derived from phytozome v7.0 (chr-ID chromosome_7; pos 55699705 to 55700431 reverse strand)
atccttcttctcctggctttgcatcgtaatcactcaaaacgtttggatctgtgactatcagtcctagttaagattacagtagaagaataactgaagaatattcagtcactatctatgtctgccctgccaaaaaaatttagatggacattatttctgcttgccctgtcaaaaaaatcagtcactatctctttgtgttagcaatcgatgcttgtaaatcactagtttgcaaatgattttgtcgcataggcttttgtttcaattacttttgtagatagttagttttaaattactatggttgcaaatgcttgtacctgacagctaattatttttgtttctattaccagtagatctggttgtattctatccgcaaatgatagcagcaggaaattcagattcagtaaactatacatgacgcatagtgtctatacaagtcataggctgtatgtatgtgttttatcttacaagtcatagattgtatatatttgtttttctaagacaagatggtgactgaaaatgctcttgaccaactgcattttgccaagccgtactagaactgaacatagtaaacagagcagctaagtactactaataactactttatctagtaaatctgaacagagcacgcggaggccatgtcgattcagaacaactctgcacaccaattcattcagttaatactacctatgtttcctgcagggataaagacccacgtcctcctggtggtttc

SEQ ID NO: 36844 - DNA, 925 bp, Sorghum bicolor
  Intron number 3 from transcript Sb08g017780.1 (locus Sb08g 017780) derived from phytozome v7.0 (chr-ID chromosome_8; pos 47666360 to 47667284 reverse strand)
atttccaggtacagtttttcttctcttgttgcaagtccctacctttcttataaccatacgattcagtccctacctttatctcttagagcagtagccctatggttagcacaacaattgtgtgtaggattttttgtgagagcccaaaatttttgtgtaggtccttaccagcgcttatcaagaaagagatattgaaacgattggtaggtgagccgtgagtgcctatttttttattattattagattttttttttctctgacatgtactttatggtgcaatcaaccaggattaggttcaaaaattagttatttatgtgtttctaacattcaatagttcctatattacacttaattcattttctcttattaagtttcgctactcattagtagggatgaaaacggatcggatacggacggatatcatcgatatcatatttgttttcatatttctagtcggattcggattcgaatacggataatgtcaattatgacggataagatacgtttggatgtcgacatcataaatatacgatttaagtattcggatacggatacggaatcggatgttgaatattcggactcggatacggatagatctgaatccctctaaacgaattcggtctcgaatacggtcggaaaatatccataccgttttcatctctactcattagaaatctgcaaatctttttatccctaaaataaaaaggtctgtaacttttgtaattattctactgccactgcttcctgcaactagggacaggttcagtaacatacattttatagaattcatccgttcaacacaagttttatttcacatcaaagcacatttatttacatttgtttccattatcactatttttaatgttcatcctttctcttctctttggctgtagcaagctggagagttttcaggagcagatcgagggtc

SEQ ID NO: 36845 - DNA, 996 bp, Sorghum bicolor
  Intron number 4 from transcript Sb07g029000.1 (locus Sb07g 029000) derived from phytozome v7.0 (chr-ID chromosome_7; pos 64067899 to 64068894)
ctgagccaatgtgagtaggcaccacctcttttcctctcttgttatgttgatatatcctgttactatgttctccaggcaattagtttttctcctagagtccaggcgtgagtcgggtttctttcccccttcttattcttcttaatataatgatacacactttctcctgcgtgttcgagaaaatatatcctgttacttgtggtgtttattatgtagttaacataacaatatgaaccatgttgcttatctcatttgttgtaaaccactcttggtttgatgtgactaactatatgctaacagcaaggaatatgattaggttgacgtgtctcgtttctttatttgtctgtgatcttgatgatggttgatgactggttgtctatcttttatcacccaaacacgtcttagtttaatctactgacatgagcataccaatgtactagttatgccttatttcatctagtcttgataatgtgaatgaacattttggagtttgtttgttcttagttcaaaaatactaaaatgagactccagaaacaaaatcagcaaaatcttgctgttccctatatttttgggttactgatacaggaaataggttgagagaatcaattgtctaataatatgtagcattgtgtttatccagctttaagatatatagcttgtttttcttatggtaaaattccagtacccatacaatactcattctatacatctagtctgtcatatgcattcatgaggtagcttgtgtaaaacagtttgtttagttaaatgtatacaactcaaagacaacacttgcattcaatctcatgtactaggctctgttacagaatgtagttttttttttctccttgaatttatttatctcctgaagctgtgtgcaaagagagtgtatgcatccatttatcttatcttctaattatttcattcaggtcaccatagtttgtccctgctttttttgtttctgtagccaaaaaggaagggtcaaagagggggctgagaaat

SEQ ID NO: 36846 - DNA, 676 bp, Sorghum bicolor
  Intron number 1 from transcript Sb09g024990.1 (locus Sb09g 024990) derived from phytozome v7.0 (chr-ID chromosome_9; pos 54518099 to 54518774)
cgtccaggagctcgagaggttctcgcattacgtcggtacgctcccccccccaaatctgttcctgcttcctttctactatgatggactgatggtagcatcgagttctgtggattggctgtgctatttgaatttcaagtggttaagttttgatttgagttccgtcctttatatcgtttgcttttcagtttcggttcatgcgccgatgcacgctgctcggatgtgaattccatccatggtatatcgttgctactagtgattagtgaacagtgatggaagcatgttgactaatttggtaactccttggggttcgcacgtctgtttgatttatttacttggcccaacccaaggtatatggatacggctctgaataccaatgcagaagcatcttaactagtgtaaattattagcttccgtggagagatttgcgtagaaccaacttgcttatacatggttctgtcgcttgcatgtcacactcaagatctagattccacatgcgacatattctttgcgattgactggctgtggttggagttggagctttcgcaccttatgctatatatatgctgtttttgtggtcttgggacctgcactgtctgcttacccttttgacctgtctgcatcgatgagaaaatgctgattctcttttcgttttcagctaggcaaattggctttgacg

SEQ ID NO: 36847 - DNA, 946 bp, Sorghum bicolor
  Intron number 1 from transcript Sb05g027330.1 (locus Sb05g 027330) derived from phytozome v7.0 (chr-ID chromosome_5; pos 61608619 to 61609564)
ctcaaggtatatatgcataattgggaaaataaaaaaacagggtgaattctttctcacatgcatgcttcattataatatataaaaagagcaaaatacatatagtcttgtgatggtgcatcgatttggtcgatcaggtttcaaagtgcatttttagattcaaaacaccttgatcagtggtgcataaataatccatacagcatctttttatgtttatatttgtagaaaaccccctgtatttattttgttcaaaagcttacctttcctcatcttttgcatacaaattgataattgctgcaaatagcctgctacaaaacatcgtaagtgctctgctatagggtttttaatggtctaccgatataatgttgtaaaatatttcgctattgctacttgctttagttccattaagcactgctatatatttggcttagccatgaaatattttagcaccactaatcatggccaaaacacaatactgattctttactctagaggagtatatctttcaaaacaaaaaactctagaggagtataatcaatgcctattcatcatgttcgttacttaataaccatcaaataattatggaaccattaaatatattgagtatgttaactgatttaatggatgctaactactaattaacatggagacttgtgttcctaaagcatgtacatgtgtttgagtatttatattcataacatttcttttatataattctcttcatgttttatacacaaagtctaaactaaatagcctccgctatagaccgttgtagcttttatagcttatagaggaaaatgccgctaaatgtcatagccagctatttaaagtattaaaattaacatattcaaatattatggattgtaaaacctgtattaattcggcattatattctgtagcttgtactacacttctggagcgatgaggattgtgtgaagatcctggagca

SEQ ID NO: 36848 - DNA, 457 bp, Sorghum bicolor
  Intron number 2 from transcript Sb02g036050.1 (locus Sb02g 036050) derived from phytozome v7.0 (chr-ID chromosome_2; pos 70453085 to 70453541)
ggccctttggaaccatcctgctggccccaaaaccagttaattatattctcatcttttgcttttcttttgtatccatgatcaattgcatttatatttccttaatcttatttcgtcgtttctgattgtggctgtctgctttgctctcattacacacacttacagactatataattattgttctagacttcaagctagcttatatatatttcttggcattccttaaatgcattattagttactgaatcttgaatttatccttatactagtctggactgaagaaagtgcgcatttgatgtaaaccatggaacaatttatgcagcctatataatttgcagttccttactaggaatgggatgcatatatcagatgctgcatttgactagctatgcttttgcatctcctgtgacttcaatcaaagcttccctactgcagttcatttctgggctcctacatttaa

SEQ ID NO: 36849 - DNA, 1022 bp, Sorghum bicolor
  Intron number 1 from transcript Sb10g020560.1 (locus Sb10g 020560) derived from phytozome v7.0 (chr-ID chromosome_10; pos 44573936 to 44574957 reverse strand)
ggacatagattgcccatagctgttgctgaaggtaaaaaaaggccacatgatcctgttcgagccgctaagttcgcatcagaggccggtgtcatcattcgggataagattcctgtcctaactcattggaaagagtacaagaaggacgaacaacattacaaaagctttgttggaaagctagctgtgcattactttcaaatacagttatgctattatccagtacataatgcatttaatacttaacctgtattgataattatgtgtaggctattctgttaatcctatcactatgaaaattaaacaatgtgctactgaatgttatactatactcctgtattcatatttaaccccttggctcaaaactaattaggaaagggcaataaggaatttattgaggaatggccaccatactttctgctcatcaattgatatgtcttaaatgatggtaacattggtttggctcaatcatgtgtttcccacatatgttaaattttaaattggtcaaatagtacattctggacaggttctaggaatgcccttgttacagcaagaaacaaaggtttgcagaggaacttgttatggacaaatatgaagttaacttactcatttaactgcttatcaaattttatgacaattggttaagtggtttacaaactacaattgattgaagttcaggttcagagaaaactgctctctggattttctggaacagatttgatgtattgaattgtttgagctatttaagtttggaatcaagttcttatttttacaagtgaaatacagacaactctctaagctttccagaatgtccttaagcatgtttactggggttatagaactattgctatgaatattttactgatttcctgtatatctgctatacctgattgtactaactagttatggatttgacatatgactagcggcgcttggccattaaaactgaagacaagccaacagaggaggcttgcaccgatatgttgcgctcaggtgtgcgacaagtgcgttaccggctgaagcagaaa

SEQ ID NO: 36850 - DNA, 803 bp, Sorghum bicolor
  Intron number 4 from transcript Sb07g023746.1 (locus Sb07g 023746) derived from phytozome v7.0 (chr-ID chromosome_7; pos 58688061 to 58688863)
cctcaggctgctcctgctgctacgcttgctgcatcgtaagctccagaacctttataatcactgctttgaaatatccattaatatcttttggttctagaaataaagaacaagctttcattccacttctgtgttcttttctgtttgtgcaagactgatcagggaattatatcatacgcttcattaaggatcttttataaactgggaacaaatatattaccattctataagcctgtgcaccttggacattttttgttaagttgtggtgtagtacacgttttggttggtataatttaaaatagaacattataaccttgtgatgacaagtatttatatatagggagcatatatggtgaaaaactctatctaattttttttcaaaaatcttggaaaatccaccatttatagataaagttattgtatggtgtcacacaaaatttcaagtccacacatcacaccaccatttgagagatacaaatatagtaaattcaggtcgaggcataataaactaacctatattattttccctgttcatatttatcaaacagttggttcttgtatcctgcaaatgggatatgatttttgagacctaggaattatttttgacaatctgatcccttatttatatgtatatataaaggttatttcttcttatttatatattattatattgtagacaccacataggatggctcatgcttatcggttcttgcaagcctacatcaaaagttctctttatttcttgttgttctatcgtagtatagtacattaatcctgctctttcatgtgcctgttctacagtggtg

SEQ ID NO: 36851 - DNA, 751 bp, Sorghum bicolor
  Intron number 2 from transcript Sb03g040700.1 (locus Sb03g 040700) derived from phytozome v7.0 (chr-ID chromosome_3; pos 68241386 to 68242136 reverse strand)
tgcaggcctacatctcctaccgcgtcatcaccagggtaaaaatctgtgtttggtctcggctaccaaaccactcgtgagttgctcctggtttagtgattgattttttgcaacatggtgctcatcgagcatatgctttgcttgttcccgtgcgggcttgcctaattttagtttttgcacagtgtgtgtggaggtgtaaaagttggatcagtggaactctaattttggattatgacctcctaatatagatctggaactaatattggatgtaatccagtagtattggagctcactggtttgcaaaactcatgtgtcgttctaggtttgagtagaccattaatcagtagagctatcagcaaaatatttgcttgggaaagaaaacagtgggaaatcaacttgtatttctgaaacattgaagtccaggggcaatgaagaacaaactatgtggcgctagagctatgaaggaaggtcgtgttatgacttgacaattggctgtgtgttggagtttgtgaaaaaatgtatatttaagtttcaataagagatcaaaacactatcaattagaagaaagatgctatctaagctacttaacaatgggaacggcatgataatcttatgtctaatagccagtttctatgcacttctcttgtacgaacatatgggacttgtcttcacattcaacacttgttgatttgccaagctagtaacatttgtttctgcagaccaacctccctgaatttgagggaccagagaaaat

SEQ ID NO: 36852 - DNA, 985 bp, Sorghum bicolor
  Intron number 4 from transcript Sb04g025220.1 (locus Sb04g 025220) derived from phytozome v7.0 (chr-ID chromosome_4; pos 55052303 to 55053287)
tgtggcagcttttcacaaagaaggcaaaccttaaggtattctaaatttgcatagatacaggatccacttttctacagcttgctttttccattatcgtttctcgttttttttttaatttctgttctaaacataaacttgtgttttattgtataatccttgaactaataaagttcctagtgtttgggctgctttgtgatagtggctgtttcaccataccataaaaacgtggaagcagaaaaataagttgaaagcaaattgttaggattattatagttttgttcttccttagccttttctctttgactttggaaaattgtatttgtatgaaatatggttttatgtgataattagttttgtttattccttcgcgaaattagtaacttcttgatttgtcaatttttcatttgaaattagccttctgaatatgtgtactgatgccacaacttctcttagcatagttttataagcaaacaaataattccttatgaggatgtatttatttagtgacaaaaaaatgctgagatgtgattatgttccctccatagcaattagtagccttgtgttattcaatgttgcttgtggttatgttttttagtggacatgtgtgttaagtcggtcttaagcctacaccaacttgcttgggagttgggactaggcggctttgttgttgttggctaaagttgagccatgcactgatgcacaagtccagaagacaaggacatacatgatacagtattgcagaatgcatactctgtgcatcaatttccatctagcaaatccaagtgcattagcattagaacgtctctttttttttctcaaccgcaggagagctgtgtatcattatacattagaacgtctcttgattgatctaatatatagcttctctttcaaacgctgacctcatttatttgtctcgtatggaaagagataatgttattcttgttccacagggatcagtacctttcttctttggtttgtttcttct

SEQ ID NO: 36853 - DNA, 839 bp, Sorghum bicolor
  Intron number 2 from transcript Sb03g041770.1 (locus Sb03g 041770) derived from phytozome v7.0 (chr-ID chromosome_3; pos 69255014 to 69255852 reverse strand)
ttagggtggggagttgcaaatctttcgctgtcgtaagaattgtctttcactctttcaggcatgtctgttttagtttggcatacgttatcctcagacgatgagttcatcaattatcaagattttagaatctagaagcttccatactgtagatttggatacaatagtggattagttattcagctgtcttcgatttcttagatgtttaacccaatatcctcataatgtttgattgcaatggtgctattcagtcagtaattccataatctaaatccacgacggtaacctgtttggttgaatttcttttcagtggatcattttctttgttgctgttgtttgtcaaagtactgttgttgcagttgttgttcaaccacatgatgtagacagtcaaccatatgatgttcttgctataaaggtcattgcaaacatgagaattccatgtgctgatttctcagccctacagttgactagattatagagagaaacctaaaaaggtagccataaatgattatacatgggctgtttgcctgtgttctgtacaagaatccctgtggatcatacatacttacgtagcaaacttcaagcactaattttagttcgttatttcataccttctgatacacaaagtagttggccttcgagatagaactggtgattttttttttctttcggagatagcaaaatcatccagagttatgtgacttcctgctatgcaaataaagtacatagtaaaactttgtttacttcagttcctagatgaccagctggtctttttgaatagcttttggagaggaaagtgtttattgaccaaagaaagtgtcaaattcaggtgccaggaccac

SEQ ID NO: 36854 - DNA, 550 bp, Sorghum bicolor
  Intron number 2 from transcript Sb10g026797.1 (locus Sb10g 026797) derived from phytozome v7.0 (chr-ID chromosome_10; pos 56238977 to 56239526 reverse strand)
gaccagaagatcgctgtcgccggcacattcgaacggtaagcatttcttcggaggggaaggggaaactagacgagccatctctgaaggtccgggcttgagtgggtggcaactagtttcgtttgtttttctgggggttcgatcttgttgttgaggagtggcatttggagtcctccggggggtatgcttcaaatttgttattgcaaattgatacctagattgactgattttgagttgacgccatgcactcctaaagaataggccaatttaattttctcagactattcttttgtcaaattgattcaacaaaccaatgtttatgccttttgtcctatgattcattcttgacatatgagggctattaatgccttgactgaagcatggtgaaacttctataagtcatgctgcttgtgtgtttaagcatgattaccgttttctgaagtaggctgcttttcctcttgaaagagctacggagtctttcgctgataacaataattatctattgcctgctctgacagcaatcaaacagttcaggaatactctcctgcaccta

SEQ ID NO: 36855 - DNA, 799 bp, Sorghum bicolor
  Intron number 1 from transcript Sb06g021970.1 (locus Sb06g 021970) derived from phytozome v7.0 (chr-ID chromosome_6; pos 51221320 to 51222118 reverse strand)
gaggtgagtgagctcccttcgtcgtcggcggtgctctcagggggcctgcccatctctcccgggaaatgcatgtagctgggaagctagattaagcttcgaattcgagctaagaggtcgagcaggagcaggttggagattcggggcttgtttttttttttggtaggtcgggtggggcacggtagatgcagaagttgcatagtcgtgctcaagtgggaaatccaaaggtattcggctgaccatgatagattgataggcataccgtttaaatggatcaattggctaactttttgtaggaatcgtgtgctcttgggctcgagtatggttcctaagttgaacttccagtggcatgtcttattcttctgtgattttggttgtaccaaacaaagataaatttgggattcaagtaaagacttagctgcttccctgtatgcaatctgatactggggcatttacacataattcttttattattttttaccatttaacattagaactaggatgtcttttggagccgtgttttttcataaatgtctcagtgcttcaatctttggctttttgcaatgaaaatgacttctaaattctgatgctgtttttactagtaagtgctggattacagtatattaagacactattgttaaaccatgttacatatctactttcgcccttcaactatcaaagcattcaaggcaatcatgttttgagtgttttaaagtttaggattaggactattatcttgcaatattttgattttgttcaactctcaggtttcttcaccaacaatcatagttgaaagagctgg

SEQ ID NO: 36856 - DNA, 638 bp, Sorghum bicolor
  Intron number 2 from transcript Sb10g008240.1 (locus Sb10g 008240) derived from phytozome v7.0 (chr-ID chromosome_10; pos 8353629 to 8354266 reverse strand)
cggaccgatcgagcccgcagagcacatcctccgtccgtgacctacttcttcacattcatccggcatgattacttgtgcaaaatcaaacaatagagtgtatccgtcttgctttagctacagaaactccatcggaattagtttggaaattcttatatgctcctagtattgttccttcagcccagactatggaaattatatagtattgttagttcattcagcccagactatggaaattatatagtactcactccgtccacgaaagagtcaatttctagagttgtcctaagtcaattttttttaaactttgaccaaatttttagaaaaaaatgctaagatttatagtatcaaattagtattattatattcatcatagaacatattttcatataatgtgcattttatattatagatgttgttactcttttctataaagttagtcaaactttaaaaagtttgactgacacggatcctaggaattgattctttcgtagacggagggagtattcttagttcattcaacccagaccacggaaattatacttttgcaaccacattattttcagtgatccatgggggacatgcatttaagagaatcacctgttgcattttccagggggacttcatagaacaactccttc

SEQ ID NO: 36857 - DNA, 931 bp, Sorghum bicolor
  Intron number 2 from transcript Sb09g004840.1 (locus Sb09g 004840) derived from phytozome v7.0 (chr-ID chromosome_9; pos 5913204 to 5914134)
gcaggctacgccggcatcgctcttcccgcccgccggtgagatatctacctatatctccttctcatgctgcatccgctcccgcggtttctgtactactactactactagtagtttggttatattcgttcgaattggagtggccagaattgttcgatcgaatcaatatgattgcgtaagcggcgaatcgattgtgatggcgtaagcggcaatttttttctgttcttcattcgccaagggtgtctgcctggtcatttccagagtggaggatactggttctgttcatccttttgcagtacagtaatggtctcgagtatttctgtttgcttgttttggtgccaatgagcagagctccagtctgtacttgtctccaaagatgtggtattccaataatatgaggggctttttttgggcacccagacgcagtaaccatgtcttcgaattttgatgtagttcaatttttttttctggagtttgtttatgatccccttttatccatggttaattttactgaagtttggttgcattcagagttagagtaaccttgggcagatgcgggcacacggcacctacttcatttcagctgtccctgttttccattttgacaagattgcctctggttggataataattgggcggctcactgttactgtacaacttgcattgaaccacacgtgatgtggacctgttttcttattttctgttgctgtcagaaaggactctagttttgtttttcaatctctagctcctctctaggattactgtgtaagtaatgctcgtgtcagttaggttaattagcattgtgtagtgttacttgcatataacaatctgtgactactgcatcataatttgcaggatgtctgttatcaatttccgtttatttacctttgagccgacctattgttggttgcagcctcggactactaccaatttg

SEQ ID NO: 36858 - DNA, 618 bp, Sorghum bicolor
  Intron number 2 from transcript Sb08g017570.1 (locus Sb08g 017570) derived from phytozome v7.0 (chr-ID chromosome_8; pos 47253719 to 47254336)
gttccttaaagttaacacccaggtattattgctgaaaagtgaaagctatctgttcttgtttcatttgaacctagtactgctggtccaactttgctgattcttttgtattttttttctatgtgttctgaagaaggattaatttgtatcacgtataattaatgttttttttcttgaacatgcaggagagctgtgtatcattatattaaagaaggacttaatttggaaaattgatgctggaagctcgtgttcttgtgttttgataaagtctaaacaagaacacaattgagattttttgtaatataagtgaagaaaaatatacataatatagcaatagcatttggaaattcaccataaatagaatttcagttaataaatatttttgaaagagtatatggtttcaatgcatgaacttaaatcaataccatagtggatttgatttgctttagatatttataaatcattttttgttttcttgaacacgcaggagagctgtgtataattatactctacccttacaacacattgatagatcatgtcatggtggtcatttgattatattactactgagatacatttggttcattctgatgaattgtttgatttatttttacagctctt

SEQ ID NO: 36859 - DNA, 990 bp, Sorghum bicolor
  Intron number 1 from transcript Sb10g010510.1 (locus Sb10g 010510) derived from phytozome v7.0 (chr-ID chromosome_10; pos 13219784 to 13220773)
attgctcagtctcgcggactcgtcaaaaccgttcggtgagcgcctgacttcctgttgccgacataattttcatgttttctggtgcccatgagttagtccatagtctgtacaaaaataagaaaaggggtgtgattctaaaacttgattatgaaaaggcttatgatagagtaagctgcgagtttttgtttgagatccttgaatccagaggtttctcccccacctggatatgtttagctagcatcccaatttatatctcgtctttggatggtgtaaatctcaaatgcacttttatttagaaggatgggagatgaaatatgatggaaatttgggatcaggtgtaccagatagcctctaccattagttatagtgatgaggaggatgctctagtttggcaattcacctcaaatggcatttattcttcccaatcactttatagaatcatcaacttcagaggcattaagcctattttagtgccctcagtttggaatcttaaacttccacccagagttaattattttctttggttagtctgtagaaacaaaattctaactagagataatttaggaaaaaggaagaaaatagaggatgacacatgtttgttctgtaatgaaaaggaaagagttaatcacctgtttttcgagtgtgttgttgctaaacaaatgtggactgttctttctagcattttttatgtccagctaagtgattacattgactctgtagggaaattctggcttagtaacaaaagaaatggaattttaaacatgtgcacttcagctatttggagtttacccttaatttgattgatgggatactgtcttatttgggggcacatttcagtcatcaagcagcaggtcgaccaaaattggccatctaataaaacaccaagtttcagtagtaggttcccttctttgcacatgtttttcccctttatctaactcatgttgtgtttacgcagagagcaagactgacttcaagacccaactttccgtg

SEQ ID NO: 36860 - DNA, 865 bp, Sorghum bicolor
  Intron number 2 from transcript Sb05g016720.1 (locus Sb05g 016720) derived from phytozome v7.0 (chr-ID chromosome_5; pos 41049119 to 41049983 reverse strand)
gaacgcgttgcacgctgcggttttccagagctcaggttcgttcaatcagctcccccccccggcatggtccaaatggttgaactactggaataatgttagttttattttatattatagtatctaataatcatcgttatcatgagagtcaaaccttagcttcattttaatatgtgagcatgaggaacaagtaagctctgggcccatgcagacaattcaacttaataacgctttttataatgtgaagaggtgccattgtgttgtgaatattttatatgatcaataacttattaaaataaatatttacttaatgtatgtatgtatgtttactttctacatagtagcatttatgcctactgtttgtttaacaaccatggaagtatgcaatttagaatatatgatttgatgggaatttttagtttagaggtgggagtttatataaaaattaaatcggttacactgtattatttttcataatgaaggtgtacatagttgaaaagaaaatttagggattacatttcatttacctttcataacggatgatgttttagaagaactttggttttaaagttatcattataatggtagaggtgggcaatttattgaagtttagagggttgtcgaacagaatagatccaattgctactattagtgatgctgactagaatttatcttttgtcctaatgctccttgcggggattaacatggatgttttgttgatattaagatggattttgttttttcttccatttcttcaggatttgagcatttatatgtctcactgccaccaagattattatgaaatgttcaatctcgttttatatttttctttttgaaaagtcaaatgtttcatttttttattttagaa

SEQ ID NO: 36861 - DNA, 835 bp, Sorghum bicolor
  Intron number 1 from transcript Sb04g027550.1 (locus Sb04g 027550) derived from phytozome v7.0 (chr-ID chromosome_4; pos 57471579 to 57472413 reverse strand)
cgcaagagggtacattgctccccctgttcattactgtatgagttttgttgacggagttgttgacttcatctgggaaattagcataaaaacaaatcgatagtttcttttttcaaacgatggatgaattgacggggcctgctccatatgctcactttacgatctgtattatacagtgatagagagtttatgatagtttgagttctgactcagtcataacaaagaaaagggattcctgactgatcacttaatatatgatatcaagtggaaagtccatacttgcagttacttgcattttatgggtggaacttaaattataagttaaaatcttactggttctcacaacgctgctgtgacaggttctatgcctgttcttttgtattaattgattacaaggatactccaaatcttgatctttatatgtttatatgacaatctgatctgcaaatggatagaatttttgtttctgtggacttctgaatgtagataaaagaatcttgtaagccacagaatgatacggacattgatcacaatatataagaaagacctgcatggcatagaaacaaatgtgttacaagttacaagaagatgactgggaatcatatttatcaccttcttttcagttttcactggactagacacatgcatgcctagaacaaacaattcgctgcagattgattaaaacctttgttcctctaattggcccaatcaatgagatagcaatgagaaaggaatttgtcaagttaatgctgattttgcacttcctattcttccttttcagttaaccatgtatttagaaatctctgtttactcaaatttttatcttcagattgctcgt

SEQ ID NO: 36862 - DNA, 797 bp, Sorghum bicolor
  Intron number 2 from transcript Sb06g027530.1 (locus Sb06g 027530) derived from phytozome v7.0 (chr-ID chromosome_6; pos 56409039 to 56409835 reverse strand)
gaaggtgaggagtgaaactttacttttccttgacaatgcttatcacttatgaatactttggcgcaagtttgtgatcttgcattgccttggtaaataatttacttgttgaatttgattagattatataagcttgtaagaaatgctgtctatcatgagaaatctatgacctgtgtaggtttatattctctactggatgctggcatattattaatattcaacgatccatcaattctgcttatgagtcattttagaattgttctcaagaattagaatccccaatcatcgactgacatgtagccttatgttcttcagctcctatgtgcagtaggtatgctaaatggagttagctgttgagttcttaatgtgcaaacattgggaggtagctaagagtaggaccacacaaagacatacatacacatagggagagattggaaaagatggctcatttcttgatccaaattgggtttgttttgctaggggcacaacataaaagaaacaaaaaaatagcgaagtgtctagaggttgttgaattgcttttatttaaaaaaagaatgcaaaaggagcttataatggagatggggggagtaaaaaagtgagtctatcgctcatgagttgcttcagtcattcacattttcatagtcttgggttttgtcagtcagcagtcactacacaatatctctgatctcattaagatttttttttgtagcatagcatttataaattggctgtgaaaatgttcctctatgtactttgcattttcattatattctatcaggttcatttgtgcaggaaccaga

SEQ ID NO: 36863 - DNA, 762 bp, Sorghum bicolor
  Intron number 1 from transcript Sb01g018570.1 (locus Sb01g 018570) derived from phytozome v7.0 (chr-ID chromosome_1; pos 19350654 to 19351415)
cgccgagcccaccacgagctctagctgtagtgtaggtaaactttcaagatctggtcttctatttacttgtgctttagcaattttacgatgctttcctttcttctccactctcccacgcgctctccgacggagtgttcgtttcgcctccgcatccgcaaggcgttagttcgagttgtgatggtttgtttggtctgttgtattgtgctatgtggtgggttaatgcctagggtttggcgtaatttgtgagcagttcactcattttttttagttattatactacgctagttgtttccacccgatttcagtattaacttttacggagtgttagctagaattttacattcttttagcgaattccatactatctgatcgtaggtatatcagttcaccgttttttgtaggcccccttcatagaattttagatacctcacattcttgccaccaaattctggtggatgtaaaaccccttgatttttcttgcacggattggtcctaattcatgtatacttccacgagtagagaatttctgattttttttggtaaatagtttttattggagtgattgtgattagatggttgtgaaataccttgttggtgttactagaggatagaggtatgagaccgtatgactgtgagcctatgcccatagaagttgatgtttgctaagttcgcccatgtacctatataaatattggatttgtgtttgatttagtttggagcatattacttataatcccattattgtagtgtagggacctgaaa

SEQ ID NO: 36864 - DNA, 627 bp, Sorghum bicolor
  Intron number 1 from transcript Sb03g006120.1 (locus Sb03g 006120) derived from phytozome v7.0 (chr-ID chromosome_3; pos 6218622 to 6219248 reverse strand)
cgccggagttgtcgccgcagcagcgtatcgagcaggttcgccgcgttctccttacccgtgatcctcccttccctgcgaccccgtgccggtctggcgtagcgcagcggtggttgcctgccgtgtgctgctttggtgttaggtcccgtggcggcgggtgatttgggattgtgttttttttttacctttttgcggttcagttggctggctagcctgttgccattcgctttgctggcgcgacgattggtgtatttactgtgatagaaactggcggcggagggagttcgagggtaggtgctgttttttcatgatactaggtggcgcggaattgggaaaaaaatattagtttttttacagtaatgttactggacttacagatggcactttgtgttataatattccttcctattactactttatataagaatgtgccgttttttcttttgatttataagatagggatgggagattcttcagaacgattctgtgttgaacagaatcagctatatggttacaatgatgcgagctttgcttcataattaattaattaatttataaacgattcatcaaggctttttagaaatttgctgatgcacaacattgccctctccctgcagaagctcattctct

SEQ ID NO: 36865 - DNA, 976 bp, Sorghum bicolor
  Intron number 3 from transcript Sb03g036400.1 (locus Sb03g 036400) derived from phytozome v7.0 (chr-ID chromosome_3; pos 64455390 to 64456365)
ttccatcaagctctgggacttggaggaagctaaaggtgtggctatataattatataaggcccccacagttggattataccctaataacatatttcttacttaatttattgtctgtgcataatatgaaaatggccattttatgtttacttcatcaaaaatccctttagagcctgtttggatccttggaattgaattcattctaataattataatttaggcacaaattaattaagctaatatggttgtatatggaatatatttgtatattattattagccatacaagggagatacttatatgttgcatttctactatagagaagtgagttgaagagcgtgctataagttgcggagtagaaacatagcatgatgatctatagaatcgatttccatcttccaccctatgaatttgagataggcttatatgtgaattttggcaacttttggaatctcaaattccaagccaaatagcttaatccattaagtagctttcaattcctccaaaatgaagggacccaaagtcccaaacggcaccttagatttattgtgatacagttatacagatggaaaatgctctatgaggataatgttctgttgcgttaccttttcatttttgattgcctgtggtagaaccatgattatatgtttgtcaagcctccaagtcatttcaaaatgtcttgaatggccacttttaacgtatgcgctttggtggttccatgaaaaaggggccagggtctactgagctaaggccgatagtattgcctgccaatgttgtcttaacaatttctgttaagcgttctcggatctatgtaattttgtcctgcatcagaaactcatccaacttcatcaagtttaaccatgtatagtaacgcttcctgtgaatggataatgacatgctttggagaaaatagatatatgatttgttttttaattgaaatgtagttgtgcggtctctcgctgggcacagatcgagttgc

SEQ ID NO: 36866 - DNA, 617 bp, Sorghum bicolor
  Intron number 3 from transcript Sb04g001050.1 (locus Sb04g 001050) derived from phytozome v7.0 (chr-ID chromosome_4; pos 883629 to 884245 reverse strand)
gggaccaagaggaggcagcttgtgaattggttcaggtattgcttcgagtttcagtattttttttcgtttcattgttaatccacctatgaagcttcgtattggtaattctctctggctagtccaaaatttgtgtttgatgcttttgtaaccttctaatctcggaccatactagatgtaatcaataaattttatgtttgatacttacatgacccttccaattctcaatccatattggatgatagcttcctgttctaaagcagtaatatttagtgacatttattttgtaaatacttggtagctgattaaaaccagaagaaaaaaacctaatctttgatatcaatatattggcacaggatatcttataacgttttgctctactcaagtatgatgatctttatgagcaatgtaatgttaatgagatatcatttttttgtggtggaagtatctgagttgacttatctatgtgtaaatttgtgaatctgacatctatacttttcagtcttcacatccatttactctgttatgtgtacaactgtcacaggagataataacacatattcatatttttcccttttcatttaggaaactctttctgattctggagaagttcatagttg

SEQ ID NO: 36867 - DNA, 707 bp, Sorghum bicolor
  Intron number 1 from transcript Sb04g031680.1 (locus Sb04g 031680) derived from phytozome v7.0 (chr-ID chromosome_4; pos 61606720 to 61607426 reverse strand)
ccgtgctctacggcgtcatcgccgccgcctcattcgtaagcgtcccgtctccttctgttaatgcagctatactatatggacgccactagggaaagatgcgtgctttcatggttgatggttctgctgaattatttactctggcgtgataccgtcgaaggaataagcctgtgccgttggtgtgttgatgtcattgctggagaataaatacttgtttttttagtacctatttgacatgagtaccatgaatttgccgtatcacgacctgcaacttttagttgggaataaaagagatgcttgtttgctttgtgccttgaggaatgaggataacaaattatcaataatgtattgcgtccgaaccttgtgaaagatgataaccaggacgaatatatatacgcgtttgggtcaatcaagatgaaaaccacaatttggaatagagatagatagttggacaaggacttgaggagttgaggttgcttgcatctttctgatacatcaaaatctcacctgatagatagtgctggataagaatgtgtgcatagcatctgaatatttgtattaagtaagagcattagtatctttctttatgcctgtggttgacatgcaatgcttgctgtttaaataataaattatttgaaaaatagaagaaaaaaatgattataatgtgccatgcagatccaagttgccaggatacagcgcagagttcctga

SEQ ID NO: 36868 - DNA, 1022 bp, Sorghum bicolor
  Intron number 7 from transcript Sb06g031753.2 (locus Sb06g 031753) derived from phytozome v7.0 (chr-ID chromosome_6; pos 60052370 to 60053391 reverse strand)
aaattgttgttgaacaggctggtgcattgctgtctgtaagtcacatctttcaaaatcttaccggcaccagttagctaatcttattttttcttcttactgctttgtttatgtcttctgcacattgctatcgacttgatgatgttgtgcattacttgatctttgttgatatttaacctcatttatttctgataataaacatgtaaatttgtattttttttgctatttgaatgatggcaaatcttctcttttatctgtatcattactatggtactgcaagatttgtgttttgtagatccatggaccctcagttagcactttttaaaatccaatcaccaatagtaggatgaaatcgaatgctctacagtggcatccaatctaccaaaaatccactggtttatatgcaatttcgtgtaccatgatgtattttatattgaaataatatacaacattcttgtcaattaaaaacggaacatgtacacatgatgtccccggttattttttttaaatgtttttcattgcctatttggtcaacatttcatatgaaggaaagagggcaatgttgatcatgactgaattatgtgaatgctttaattttggtagtaaagggtaatctgttagtgttcaggcagggaattgtagcatccatgtgctcctttaacatgtttactgtagcactgcagtacgccaacactctcacggtgtaactggtcagcacaacacgccgaagaagcggttggctgagccagcccgggttcgagtcatggcaccatcttcttaagacaaaatcagggggacgtctctccctctggtcgagttttttttttagcactgcagtacgaataaaaaataaataagtgattcccatgcacgactcatgtattttcttttgaagtttgtttgcatcttttaaattctctgcttataagttcttgttattttcaattgaacatctcttacaccttgaagttaatacccttgtaaaacaatccagcaactctcagctcagctgggagatctagaga

SEQ ID NO: 36869 - DNA, 565 bp, Sorghum bicolor
  Intron number 3 from transcript Sb01g043890.1 (locus Sb01g 043890) derived from phytozome v7.0 (chr-ID chromosome_1; pos 67001670 to 67002234 reverse strand)
tgttgcctgggccatctattccagtgttgtcacaggtaacttatctatataatataccactggttcaattctgattacttcatacgtgaagctttgattgtgggaggcatgaatcatgtattgcctacaactttacatataaccctgtaaatgtttgtcaaatggatgctgttttcgcaatttctgtttttttacttagcgtttctctttagattgttttttccattctaagtgcttacataaattcttgtagctaggatggtgggctaagtgtttccacatgctcgcttgtgtattcttttcgctgatctattaaataatcatcattattatataacatttgtataagttacaattaacttaattttccattctacctttgctagtgacatactttctttttaggatgtatttatttttttgtatagatccactggattcatccacattcatgagtacttttcatgtgatcgtcctattaattgtctaacatgattgttatctttgtgtagtcttttctggtttggcagcttatcttatctgtcctcatcttgggaaggaaata

SEQ ID NO: 36870 - DNA, 976 bp, Sorghum bicolor
  Intron number 1 from transcript Sb01g029400.1 (locus Sb01g 029400) derived from phytozome v7.0 (chr-ID chromosome_1; pos 51373485 to 51374460 reverse strand)
tccgccgacgtcccgcgcgactgggtccgcgcaatgtgagtgctaaaccctccgccgcccgcccgcccgcccgccttccttcttcctcctgtcctccgacgcgtccccgttgttcgactccccttggggcacggcactacttgatcaaccagtagcgaatccagattttgatgccattcctaggaaaactttccataccattttttattaccagtaattaattccatatttattacgcacggcaaacccgcgtcgcgtctcgttgcggcacaaacaacagtagaaactgaaggccaggactagaagtgggtggtgacgtgtttcgggtacctgggagctttcggaagtggaacagggaccactggcagagaggaagcttctcttggttgcctttgtttttccaaattctagtggggtaaacttcggccattcacatggatgtgcatgcttattttgccgtcatgcgcagtaccattagtactgcttataagttgcttgttaggccttgtttagttccaacttattttgaacgttagtctcatagaatatgctgtcatggatgcaccaactctcaagctttgactattggcttcctggcttcctgtcgctggttgcaacctgtaccatttaattgtctgctatccaattgcactggtcaactttcctttttctttctttaatagtgattgcacagtggattttcttttgtatgaaaataaaagtttgtctgaccaggttcatagctaatacttgtgtctttcattgatggtcttagtcagtcccaaatgattaatagctatcggtgaatctccccaagatatagcttgatcgtttcacgaccgtcaacataaacattttctacttgtttcacttccataggaacgaactagtttttcttttttcttttacagcaaaatgtgaaatgaaatgagacacctattgacagtacatgggaacttatgcaggacagaagagg

SEQ ID NO: 36871 - DNA, 916 bp, Sorghum bicolor
  Intron number 1 from transcript Sb04g034810.1 (locus Sb04g 034810) derived from phytozome v7.0 (chr-ID chromosome_4; pos 64661944 to 64662859 reverse strand)
cgccgcacgcagcaggagggagagatcagcgcggggcaaagcgtcaaacccttctccgccgcgggaactactggtgagctatttgttctcggcgggttttgccgatcttttttcccccccggtggcctaggtcgaattcctgcttcgccggacgccgctgctaatttttggaggcatctggtgggttggagtgcgcggatttctctcccccgtgtgaacactggattgatggattttggagtagtcaactaagcaattctggacgagtacttcgccctccatgtgtgtgtttttttgttagattttttctccctcgggagcggcgtgtggaactgtgaataggcatctccatttctccaccagagttggtccctgtcactccgcgaacggagaatctaatagtagtgtaggattatgtgctttcgtttgatttgttgtacttttgagattccgccatcgctcttgggtgattctttcagaaaagtgggatgtgttctcagtggggagcctttttagttttgcaaaagtacatgcagttagttgttaggtggccttatggctgcatattagattgagacatagcttgtttcatgctgttctgttaccggttagcggccatgtttttgctgtttttttagtagaagaagtgaacatctaaaggttctgtggatgccaggagtttggtgatatgattggaattaggtgatccaaagctgacactgatagaataatggctacagtttacttgttggatagatgctataactggttcctgaacgtgaaccttggaattacttcatgctagttcttcatatttcctgttgctgtgtgactaatgaataatgactaatatctgctctcggtcacaccactgaaatggcaacccctctgcttgcatgattaccaggcatttacg

SEQ ID NO: 36872 - DNA, 637 bp, Sorghum bicolor
  Intron number 2 from transcript Sb01g040650.1 (locus Sb01g 040650) derived from phytozome v7.0 (chr-ID chromosome_1; pos 63958353 to 63958989)
ggctacaaggcacccgtattcatctctccccattccccttgcagctgttgctgatttgttccaagtttcacgcttgataaaaatattgttatgctgttctcatttctaacaaaaatcacaaaaaaaacattttttttaatgcacaacatgaattatagtgttatactgttatatatcataagagggtttctcatctgttggtattaggttacctctttttggtgccaccatcccgagcaataccagtcaccagaccaacatttattctcttacacccagcaccttttggcaataaaaaactttgtataaaattctataacatcttgaactaggagctttccttttatgttactgatttttttagattcagtaaaagggggctagattagtcactttgatcttcttggtagctttggtggatagcttcagtgagataacatgttcttaattattttagtggatttgagatggttggttgggaatactttgttctttgcactagttcaccatctgcgtctttactttttgctatgtagaacaggagataagtttgaaattatattgtcagaagaagatattagcttattttgttattttcttccatttccattttgtaagcaatatcttgcgagaggga

SEQ ID NO: 36873 - DNA, 901 bp, Sorghum bicolor
  Intron number 2 from transcript Sb02g035840.1 (locus Sb02g 035840) derived from phytozome v7.0 (chr-ID chromosome_2; pos 70240281 to 70241181 reverse strand)
gcacaagataagagcccttataatatccagattaagtatgtttggatcttgcaactaatttatttgcaacattatttagttccaggcgttatgatttattagcatagcatatctatcaatgaataaataagaacactaggataggaatagttatgtacaataatgtcatattctggtactcataccaatcagaagcataatttttgcaatcgtatttacacgccatgtctactaggaagcacgttcttgtatcacgtgggtcgacttggaaaatatcatttttataattttgatcttaatttagtagtagatggtacaattaggctcttctattactttcaaaagacctcatatgatgcaataagaaattttgacttagggcctgtttagttctccatggaatgcaaaatgtaaaatgccaactaatttggaatgatgaaatgcaaaatgccaaaattttcagggttatgtttagttccatccaaaatgcagaatttattgccctcattatggcctcttgaggctcttttgggttttttcggcctcttgaggccaaaatccaaaatggagaatgacaaccgttttgccaaacattttgcatgatgttcagttccattatgcaaaattttggaccaaaacccagaaattttttgagatgaaatgggaactaaacaccctgttattctcaatcttttaagaacatatgaatgtagtgtaatggtaatctacttcatacttagcagaaatttaaagaaatatattgacatacttgtttaattggctcttccgcctccctaggttttctttgctcatctgaattgtccagttttatagcctcaagttttaacatgattccttatatctagtgtgaaagatttctttgtcgaagagcagccaaaga

SEQ ID NO: 36874 - DNA, 641 bp, Sorghum bicolor
  Intron number 2 from transcript Sb01g029960.1 (locus Sb01g 029960) derived from phytozome v7.0 (chr-ID chromosome_1; pos 52164990 to 52165630)
ttcgactctctgaaactgcccctcaacattctcatgtaagaagaacgaacagatccttctagtacttcttgtatattagtacttcatatttgtactaccatcagatatcacgtactaacgaagtagccggcgaaaattctgcggctattatagtggcttaatatttttctcaataggaaaaaattgagttattttttaaagaaagcaaatggtgcgtaatttatcaacacgtctttgtgcactttgattttattttctctaattaatatggtaatcttaactcttgataattaaagagaggtttcttttgttagccaaatactaggccctgtttaattctcaaaaaatatcttttcatcccattgcattgaatctccctatatatatataaagcattaaatataaattaaaaaataactaattgtacagtttgtatgtaatttacaagatgaatcttttcagcctaattttgttcatatttgaatactaattaacaaataaaacaaaaaaattacggtagtcaaatccaaaaatttttacaaactaaacaagaccataagacacatcctgaaatcaaggcatattgctcgaatgtgtttagttgacttgatgttcttttcgacagcaataacgctggtgtg

SEQ ID NO: 36875 - DNA, 734 bp, Sorghum bicolor
  Intron number 4 from transcript Sb01g031710.1 (locus Sb01g 031710) derived from phytozome v7.0 (chr-ID chromosome_1; pos 54327931 to 54328664)
ttgagaaaattgatccaaaaaatcaagcacttgtaattccttacatcgaataattccatcttttagttgaagtactattgcacaatcagtccttacattggtacatctttttagtattgggttgcatgcaccaaccttttcaaccaaaatcttaagctaagcactgttacaccgcctcgcctagcacctgggcattttgtctaggccttctccacatagatgtgttttgggcatgatgtatgcatgaaaatggggcaaatagagatggaagagtttttttttcttttttcccccaaacacgcaggagagctatgtatcattatgttaagaagaaaaaagggtataaagaaacccttacaacacatacctacacacttctaaggagcgaggtgcgaaatacctctactctaaatttcctttatttagcatggaatgaatctaactgtccataaaatgtataaacgcttagcaattcctggatgctaggcagatcccaaccgcctgcctagggcctagcactttttgaaacactgagttgtccacttgtttgcattcgactggtgtcaatatcctgctttcatgcatatttatctatttgtatacatttttgggatacaagactatattgccttgtattgcttttgagttttatattggccaccaactcagttgctttttttttgtgtgtgtttcttgcagattttagtatcctgctttgtaaagacgtcacattt

SEQ ID NO: 36876 - DNA, 382 bp, Sorghum bicolor
  Intron number 1 from transcript Sb06g013980.1 (locus Sb06g 013980) derived from phytozome v7.0 (chr-ID chromosome_6; pos 38712616 to 38712997)
tgctcatcaccggcgcctcctccggcatcggcgaggtatggcaaccagtccgctcccttctgtatgcctatttttggtgaaaccgcttaaaccatggattctctcatatatttttttcatgtttttttcttaataataaataataataacaataccgaagacttacctaaaggagaatttgacttgtgctaattgtgaggtgtaattcatggctaaaacaaacactaacatattattattgtgtttacatatttgcattcagttgcagattaaatcagatataaacaaaatgagcttggataaaattttttgactctgatttgccatgagctcgtatttttatccagcaaatagcttaccagtacgcaaagaaaggagcaag

SEQ ID NO: 36877 - DNA, 756 bp, Sorghum bicolor
  Intron number 1 from transcript Sb04g021810.2 (locus Sb04g 021810) derived from phytozome v7.0 (chr-ID chromosome_4; pos 50950972 to 50951727)
aactggatcaacggtacgctagctacttatcttgaagttggaatgatcaccccctcctgctgccttgcgccttgctcttctaatctctccctgtgtgttttcagttaagctacccatgcgttcctcgtgttgtttgctgtactacaagcgattaacttgtgtcacagtctcacagaccatggatacagaatgctagggagtaggaatggagaatcatatatgccagtgatagttatactaatttgagctcctcttgtcatccctcatgccatcatggggatctgattgatggagagctagctcatgtttcaaaaaatcaaaatcacgcctgtatcttggaaaagcagcaaggaaatgcagtcatgtaggagaaatcaaaattagtcttttctaagctcggttgttcacatggagcttgctgcatgcagtttttttctttgtccttgtccccagaaaagtctaagctgcaagctattgagctttgacagtagctggagaaacgacgaagacacttgcagctaatcaaatccgtgtggtggttaaatacaataatacagatgctctgtgtttgattaagtactactatgctaatggttcttgtgattacgtactatacggtcgctgcagagactttgttctagctaacatggtgtttgttttctgtctccctgtccttgctggcggctctgattgctgggacggcggaactcatcggttgcagaccccaacggtacgcctttaatttcttttacccag

SEQ ID NO: 36878 - DNA, 567 bp, Sorghum bicolor
  Intron number 2 from transcript Sb04g021810.2 (locus Sb04g 021810) derived from phytozome v7.0 (chr-ID chromosome_4; pos 50951667 to 50952233)
gggacggcggaactcatcggttgcagaccccaacggtacgcctttaatttcttttacccagcccgtttcttacagttatcttattcttatcttatccctgtgttgtgctgcctgctaagtagtagatctatataatctctgaacgtatcatgattcatgaacagctgtacttgtttcttaatcgtgggaggatgaaatggcgcattttaatagccaaggacaattctaacattcaaaaatagtgcatgcccctgcagactccacatgaggaggcagctcctaggggtgtccttttcctgtgtgggttctgggctccacagtctctatactcttataaatgtgtagtacttatatggtttagcgcgtaataagtggcgtaaaagccggtcagcgcaagtacacaacacagtttcacttcatatgtatatatagacagagcaactgtaaataaagaaataaaaaagattctactagcgaaagttagctagatttcttcttcaatagaaaaagaaaactacttattcctctgacgacgtagaatttggtaactgtgtgtgtgcagctccg

SEQ ID NO: 36879 - DNA, 656 bp, Sorghum bicolor
  Intron number 3 from transcript Sb06g021200.1 (locus Sb06g 021200) derived from phytozome v7.0 (chr-ID chromosome_6; pos 50544974 to 50545629 reverse strand)
agattttgatagcaactgttgcgttcatacttgtggtaacatcatcacttcatattttaccagttcgtaggattatgctatattttagatgaagatttgtgttagcccaccaatttcaaaccatcattagtttttttctttcacgggaacggtacaattgcatcacaatactgtatttttattatcctgaaataccatctttctacctatgttattagttaaataaggaagaacaataaggatcgctggagcagagaatattcaaatcaaattgaaccttgatgagctcaatgatattaccataaacagtttactttgatattttgcaactattcgtgtggttttacttttgtcaaagaaacacacatatcatgtatatctggaattctggattgatcaatgtgatcagacattttttttaggaaactggaggggcgcaagcccctacagataaatgatattaaaaattagaacattcaaatgtgaacagacttatagggaacatgataatactttggcagtaccttaacagggatgcagaactggatttcacaaattaacatcagtacatggaaactattgtgcttgctaaatcacccttttgtgccctttgttatgcagtatatccacataataagaggggaggaattataccg

SEQ ID NO: 36880 - DNA, 560 bp, Sorghum bicolor
  Intron number 1 from transcript Sb04g023160.1 (locus Sb04g 023160) derived from phytozome v7.0 (chr-ID chromosome_4; pos 52918045 to 52918604)
ctgccatcgcaataaggtggagacagttgccgctggtgatgctcaaacagtcatcagttacttcacggaatgcaaatatagggatcctgatttctttttccaatacaagactgatggggaatggcacctgaagggactactctggtgtgactgtcaatgtcggtttgattatgcagcatttggtgatgtcgtcgtatttgatagcacgtacaaaactaatcgatacaacctgccccttgttccatttgttggggtgaatcaccatggcagcaccgttctctttgcatgtggaattattgcacaggagactattgagtcctatgtgtggatgctaaggacattctgtgatgccatggcttagaagcatccggtttctgtgatcactgatggagatcttgctatgcagagagcaatcaggctggtgtggccgaattcagcgctaggctatgcatatggcatgttgagcagaacattgtgcgtaatctgcacgaagatggtgtcaaggatgatttcagacattttctttatgactgttggtccatagaagaggttgagaggaa

SEQ ID NO: 36881 - DNA, 470 bp, Sorghum bicolor
  Intron number 1 from transcript Sb02g027950.1 (locus Sb02g 027950) derived from phytozome v7.0 (chr-ID chromosome_2; pos 63186181 to 63186650 reverse strand)
ttcttgagtctcctgtgtttctctacaataaagtatgtggtatttccttaattggtttcttgtgctctcaagatttgtatgttacactattatccaaggttgaaataaagtcataacttgagcaagcactgaagactttcatattgcagttttcagacattgaatttggtccagtatagaagaacattgattggtgcctactgtatagaacattattttctgcagtatacttatgcatgtgactacagcaccgattgcactgtgcaaaacattgtcatattagaaatatagtcctctgattggtgtcttacaagcttggcttctgttttgattctatagctgctaatttggacaaacacttacgaattcatctctgtgcctgccctttaatatttgccatgcggacttaactgaattggttatgatatattgcaggcacaaccttctccaaccactggcacgttgccatt

SEQ ID NO: 36882 - DNA, 721 bp, Sorghum bicolor
  Intron number 2 from transcript Sb03g008350.1 (locus Sb03g 008350) derived from phytozome v7.0 (chr-ID chromosome_3; pos 8840204 to 8840924)
cggacgtcactgtcgacgagtaccatcgctacaaggtgacaaaactatgatattgtgatttttgatgctttcatttcagtcaacttttcttcgtttcttttacttaaacctataattcaaatgtgacgttttcagtatttgaaacttcaaatcaagtaacagaatttaacaaatccaaccattgaaattttagatattacgtgtactaataataataataacaaaaggaaaactataggtacttaggcgtgcgggttacacatatataatgccataatggcatgattaaaaaagcaacacatgcaaaggtggtatagtttagaaagttgcgaagcatccaaatttatgtcacctctaaggctctaacctcaacaaatgttaggttcttgcccacctgagttcaaattatcaatttgacacaaacaaatgatggaccacttcatttgtcaaaccaaacacagctttagataagtcttcatctgctgggtcttgacaaacaactaataataaaaaagaaattaactaattccaagtttagaagttgcacaaggggttttgattaccctattcggatgctgattccaagtttagaagtttataaattgtagccaattagccatcaattgctaaagcttttccatatatttttaaaaagtacttctcgtctagatttgaaagcaaactaaattcgttctccttcatttaggaggacgtgaatatc

SEQ ID NO: 36883 - DNA, 896 bp, Sorghum bicolor
  Intron number 1 from transcript Sb04g033650.1 (locus Sb04g 033650) derived from phytozome v7.0 (chr-ID chromosome_4; pos 63564244 to 63565139)
ccatcgaggccaccaacaagaacctcatcttcaacgtgagtactgcctcggtgcctcccccctccctccctccccgtgctgtgctccccaattggataaggcactggttgcttcgacgccgacaaatttttttagcctcttttttttaaaaaaaattgtttgctctttttttttctctttgatacagtaaaagtaggatttgatgtcgcgtcgacagtgagtgtttgtaggctgcttcacgagctagaaagtgaggaaatttaaacctagactagaattaaaacaaattatatagtgcagtggtcttgatgaatgatgatacgtttaacctatttgctgttaactcattcttaattgttctgcttacgaaggctctgtttgtgagcgtgtggcatggccttctttgcttcagccttcagctagagtctagagattgtggattctagcttttctaacacgtaatagctttttaacctaaaataaattgcacaatccagcttgcacagattctagaatccaacaatctgctcaaatatagattttatatgattttggcacactatagtgagagaaaaggagagaggccataagctagaatccacaaacaaacatcaggttttggaccttcagatttccacaatccaggacttcatgctgcttttcagaatcactagctaaaactagcatagcatgtaatttgtctttatttggcttgaagtttgtaggttgctaagcatttcgctgcgcactcgaatcacaaaaactgtgtatctattgtttctagtttcttaatcatttgtttcatccgtactattttagcgaatctgaataataagttgatttacagcatttcagagtgcatcacatgttaaatattgcaggttcaccctgttctt

SEQ ID NO: 36884 - DNA, 708 bp, Sorghum bicolor
  Intron number 4 from transcript Sb01g009790.1 (locus Sb01g 009790) derived from phytozome v7.0 (chr-ID chromosome_1; pos 8555974 to 8556681 reverse strand)
atgtgagtgcaggattcgtaaattgttctgtctttttttttgcttggtgttttctatagatagactatgcggatgttatgttgggcatataattactactgcattgtcttgtctgctattctaaatttccaccaacatacagtttttttgtgcatgtgtgggaattatggcagggatgacgatgggctggtttgttcagttgtagcttccttctgttgtacttcacaaactaagaaaatactccatcccaaattataagtcaatccaagaatcttggagtcaaagcatattaagtttgaccaactaagtatcattatgtcttcattagctatattttcatagtatatctatttgatttcatagatctttgtaattctttctataattttagtcaaacttgagatgttttgaatctccaagattcttggaatgacttataatttgggatggagagagtataactgaaaggtgtttgaggagatgggttcagagcaggtgcataagaattaggatatcagtatatatttcatggtttgtttgatcgtatagaattttggagcttgctctgtaagctaatacacaagaaaagaagggttgacaaatgactaatattcgcatattaaacctcatgttagttttttatcagttctagcaaccataaacaaaatatatttttttcagaaaaaggctaagacagcagtggcagcc

SEQ ID NO: 36885 - DNA, 457 bp, Sorghum bicolor
  Intron number 2 from transcript Sb02g022280.1 (locus Sb02g 022280) derived from phytozome v7.0 (chr-ID chromosome_2; pos 55171081 to 55171537)
ggccagaaggacatccttggagccaagcacccaaggttgccatttgatttgacacagttcctatctatcaaaagatttttcttttctttttttttctagacttcagagcctaatctcatttgcacgtgttcttatcgcaagtggaatcgaaatcatttcctcctgctttcttatcaacttttgatggcgggcctccagtcttgtctcgctgaaaaaaaaaagtgctgcctctgtttgtttgtgttgtttgcaagtgtttggctggcctccacttattctttgtgcaaatcggattggtgatgctacttttttgcaaatcttgttctggatgcacaagcaaaacctctcctttttttcccccaaaaacaaacaaagattctgggcctgagtctgacctgacgtgatccgtgcaaacattgcaggggatactaccgctgcacgcaccggcactctcagg

SEQ ID NO: 36886 - DNA, 759 bp, Sorghum bicolor
  Intron number 3 from transcript Sb06g030440.1 (locus Sb06g 030440) derived from phytozome v7.0 (chr-ID chromosome_6; pos 58863685 to 58864443)
ggcgttgctcaggtacaacgaagcagatgacccctactcctgttgttgccagggatagcgaagtgatgatcagtgcgcatgcggcgccgaggttccatgaggattactatgggccaagtggccatgagcctaatcaccactgatcaagctgttcgagcaaaccatttctagctacctctaccctttttcttagcctagctacccgtagtcgttcttctctctccatacttcatcatcatcttggcttggagaatgtaaagggagaagctagctagctagttgtagttctgttccgcaccaggtcaatatctctgttatgctatgtatgagtacttgtaatctagttgatctaagcacattttagctctgcacacagctttggtctttcctgctcggtcttttcttcatatattctctctgtggatgcttgaattattcacgtgcgagaccaacccacggttccactctctgcacagcatgtaacggtactagcaagaaataggaaattcagcatgtcagtcggcggctacagctatggctaggcattagtacagtaacattttacacacaacccttttggtcccgtgcagtagtcaattgcatcaagttgagacatagaatacgctaggcaaagcttttggcatctcttttaccttccgtaccagtacaccaactttttaatgtaacaggtggtttattttgtaacctttgattgatgttgcaggaaaggtgaaaaaggcactggcgcaccctgaagca

SEQ ID NO: 36887 - DNA, 843 bp, Sorghum bicolor
  Intron number 1 from transcript Sb05g025915.1 (locus Sb05g 025915) derived from phytozome v7.0 (chr-ID chromosome_5; pos 59452599 to 59453441)
aagttggggaggtgagatttcagttcctatcccatagatttctgcagttcttcgttgtttggcttgtatctattttgtgttttttcccctagtgactagcagtactgaacattggcagatattgtttttctttatttttttggttggtacaaggtttaggagttcatgtgcgagaagaaatgttggcgctttttcatgtcataaaaaaggggaaaaaggttcattggcgtcttctagttctagttgataagtcttatttcagtgagtcccaaatgcctcagaacagaggtgctgttaaaaatgttggacttgtttgcaaatttctggagattttttcaacctactaaatgatttcagttcctagcccatttttttgcagagttcttccttgtttggctcgtatctgttttgtgttttttttctaactagtaagtagtatactgaacattggtagatattgtcttaatttttttttggttggtacgctatgtgcaaagatatttactttaattttttatgataaaaggcaagaattttttttggttggtacaaggtttaggagttcatatgccagaaaaagttggcgcctttatgtaaatttctggagattttttaacctacttttgattctttatgtaaacctagaaatgagtcttgtgtctatatagtataaatgactcggtgatgaaatttggttactgtagtgagcttgatctttactgtttagattcaagttataaccataagcttgtcagtgcctctttctctgcatttgctctgtttcctctcatagtctcatctattcattgtcacatgacttctgcaggttgaagggtcatctac

SEQ ID NO: 36888 - DNA, 832 bp, Sorghum bicolor
  Intron number 2 from transcript Sb04g002680.1 (locus Sb04g 002680) derived from phytozome v7.0 (chr-ID chromosome_4; pos 2476183 to 2477014)
ggtgctggtaggtcattctttatttattttatatattactttgcagttatgattgtagctttggaaatagtacaactgattataatttattatcagtgtagtttcgcctttgtcatagtaatactgttatagcatattaggcagagttgtactttgaatgcctgatcttttaaattggcaatattagtaacaaagttccttcaatcgttttgaatgttgaaaacataaccttgaaatatcttcagcaggttaagttagtaaatttgtaatgacttttacttgttataacttttttgcttcaagcattgataagggtggggagtgtatatcttgtatgtaggtcccaaatttttttttgagggtctaggtcccaatttttggtagtgtttaaccactgttcacctccttgacttttgtagtgtagaaaagaggtctcaagtggagtttctaaaactccaaaaaaactgcagttttgacaatatcatggtttcaaaaactaaaagatttggaaaaccaaagtattttataaaactgtagtatttttccaatatttcacatccaaacagggcctatgttttactttccattgataccccatcaggatcgattcactttataattttttattggaaattgagattctttatgcttaactctacattgatattacattaggatcagttcactccatgcttgagattccatatgtttggtacatatattcttggttttgttttttagtcaaactcctgttgggtggaagtgacatctctgcacaaatggtctatttttatcagggacatctctgcacctgcttgaggcaatagtcagc

SEQ ID NO: 36889 - DNA, 801 bp, Sorghum bicolor
  Intron number 1 from transcript Sb02g007220.1 (locus Sb02g 007220) derived from phytozome v7.0 (chr-ID chromosome_2; pos 9277730 to 9278530)
gtggatcctcctcctgagcctccaggcagcaagcggtattagtcctctaaattcttttctagggcactaatcctctgactcatctttttctgtccagtggctgtgctctgctcccctccaatatttataaatttattaaatcaaacgtgaatgtatgctaaaaagaagagagagctagtactcccgtagtgaaaagagcacaataattaataatactgttgtctcattgaatgtttattaaatttgattgtcttttattacattactacgtagcaaagatattggatctcactgaatcgactccgtatccatgaggtgcttcactgtttgttacttaaacaaactataccttgcacacaacagtgatgacaaggttaatactcactacagttaaaaaatatataattaagcccttatggccatctttgttggtatcagaaatatgtacatgagcacctcaacacttcctcaaggtattatctttgttatgacttatgaccactcttcatattttacccttcttgttcgcattgctttttagtgagctactccttttagcattgccgtgcttcagtgagaaaatggaaggtgacgtgaatagaaaatctgccaaaacattaatattgattctatcaactgaccacaactatatacgttattatttcgaaatcatttccacaacaaaaatacctatattctgtgacagaagaactactgatttattttattatgtttatgagtataacataatccttgagacgcaaccatgtactaaggtattttgattataatgtttgatag

SEQ ID NO: 36890 - DNA, 992 bp, Sorghum bicolor
  Intron number 1 from transcript Sb04g037420.2 (locus Sb04g 037420) derived from phytozome v7.0 (chr-ID chromosome_4; pos 67060721 to 67061712 reverse strand)
ccttcaaggtccatctcttcctccctcttgcgtctgatcttgctttgctcctagcttcctttctttaagcttgggttgctactatgattgagccgggctgtctgatcctctcgtgcggtgcggtagatccccatcggaagctaagcttgctgcttaatttctgtgggggcttgggcgtgaatcacctcctcttgctgcgtgtctactgttggcgctgacatgtgtggtttgtgaccggcgattttgacatgaaaaaaaggtgacatcttttagcctcctgctgctgatgcgcagatttgttcccggctcgatccaaaatccccttctcctcatgccctatacttttcgtctttgtgacggaagatgaggggcctctttcaggcttgagctgagctcccaaggcttccaagcggctcaaatttttcgtttttttggaacccaaaaaaatttccacctttagttcttgttcttgttcatcatcaagtgatactacttgcttgtttgtgaggtcgctatcatcataagatatactgtcatgcaactgttacctgttagttcggctggtgtgaattactattgctttctcgggattattatgttcgattgacaaggacaacgccatgttatgtgatgtagacgcgtttttgtattgccttccccgatgcatgatctttttgctttcggaccctactttgatgggtacacgattctagacagtatctggcaattgacttggaatgggtatcaggttcccactcgatgacgctccttatttttgctctgatttggtcatggcttgtaaatggttgacatctttggttcctgacggtccaattgggctgagtgtgaaatcaattacaagacttgtcatacctactgctctgcagacttgtgtgatctgctgttcctttctaaagtctagacttgctatggtaataaacctctttttttttaatccttgttgccacaacagattagcaagagagtattca

SEQ ID NO: 36891 - DNA, 1021 bp, Sorghum bicolor
  Intron number 1 from transcript Sb01g047150.1 (locus Sb01g 047150) derived from phytozome v7.0 (chr-ID chromosome_1; pos 70258797 to 70259817 reverse strand)
cgcccacatcgacgacgacatcgcgccaaccataggtatgtgcgcatccactcctcctataccctggtggatctcgccgctgcgtgactcctgtgcgtactgagtactgacaagcgtggcggcttccttgtccgtctccattaacggaacacgatacgacagcaatagattttttgtttttgtcccaagcggagaactgggggttactactactgggccgcgttgctgttagtagagtacagtaataatacagtaacgtaattacgttcgttgtcgaatgctcttgcaattttttgggacggggtgaagggatcaccacacactgtaacgtgcccaggcgttgcccactagcagaaactaaggctaggatacttctctggttgcatctgcgcctgtgtttccagtgatatcattgggggcaactctttatgtcacaaccggaagcaagcactgtggaaaacacgagagtgcatgtttgatgccttttttttacccatggtaataaaaactttgaaatgcatcttgtagctacttagctgcaaacctactgtatcttcactttgcatagaggcttatcatttaaggtttataattattgtttttaacagcctttgaccttcccctaacttttaatctaccttttattaagataataggttggcttccttccgtcctaacttttttttatcctgtcaattcaagctgtggttactccttaagtatctagtaaataatcaataaatcaacatagtcaacgtagttgaataaatgctctttataatgtatagctcaaaacactgtgttagaaaagccctttggatttgatataacaatacaattttagcctttaagatcagtcatagcagcccctgatcattttgttctcaaagaggcacttgaattctgacataattattacataacctgtactttatcaaccaaatacctacttttcttaatttaacttttttttgctgttttggtaggggtggattttaaaatcaaattcctcagtgtgggt

SEQ ID NO: 36892 - DNA, 726 bp, Sorghum bicolor
  Intron number 1 from transcript Sb06g030930.1 (locus Sb06g 030930) derived from phytozome v7.0 (chr-ID chromosome_6; pos 59346788 to 59347513 reverse strand)
gccttccatcacagacaagttgatcttcaggtgaaattaaaaaaatcattttctagaagagcttcttgcacaatagatgtgttctttttattcatcttatctacttactgtgcatctcttatttatgtttctatggaagtctccctttgcacaattgcactagctaatgaatgcaagcaatttttgggctgatcagtttcgtatcatttccaggtttgggtcgagacatatccaacaagaagatatggaaaaccagtgaagggactgcaagatgcttggtggattttatatcaaactttatataactgcacagatggtaaaaatgtaagatttttttaatataaaacatgtttagccattgtgccatgtgtccattgttcttccaacattacttaagcatgtacaagggatagtaggttgtgagcaagttgcaaaatcacaaatatctggtacactatgctactaacaacctggagtttttattattttacacttaaatcttactctatattgtaaagatctttgctagacaaaattattctgtgaaaatacatttctcattatatttttctttttggcaattgttgctacatgccaaatatgaatagaagtaaaacatcaatatatcctactttttgaagattcggtgggttcttatctgttactcttatcataaattttattctggcaggacaaaaatcgggacgtgatagtggccttcccaga

SEQ ID NO: 36893 - DNA, 1025 bp, Sorghum bicolor
  Intron number 2 from transcript Sb03g028370.1 (locus Sb03g 028370) derived from phytozome v7.0 (chr-ID chromosome_3; pos 56242832 to 56243856)
tctccattgaagaccctgcagttcctgtcagactggtatgcattcgcttccgtcttttcctttcccaaatctcttgtctgggttcttttgcccctaccggcctaccctgtccaaactctgtaaatattctcagcaaacgagtaacaaaggaagtactattttactgctagcactaatttattaccagtcttcctcgatatgtgcaagtgtcgctgttatttgtagaatcaattgtacatagcattcctttagctatgtttcgtacagtgtgaaaaatcaggtgtctccccatatcatatactagtagtagtaatttcatatgctaactcagcctgcagtcactacgtgaagggaagtaactatttgccttttatcttctcgctgaatcttactaaataacttccatatattatggaaattaactttgtctattctttttttttttgagagagagagagagttgtaactgatcaactgaattgatgcacacttgtaattttcctatgccagctaaatctatagttgaaattaagccatgtttaggatcttttaagcttcttaggttaggttgaatgtatcagtttgctgagcctacctgtggttttgatatttgactatttgagtctcaaagggaaatatgaatgtctgtggcgaacttcgataggagggctgagatgcaaacttgagctagaaaatagctgtccttgaactttcatagttgaaacgctcgttctccatgtcatttcagaagacaatttcttgagctagaaaatagctgtccttgaactttcatagttgaaacgctcattctccttgtcgtttcagaagactatttcttgagctagaaaatagctgtccttgaactttcatagttgaaacacttattctccatgtcgttttagaagacaatagcttagtacacacactatgacttcattttccaaatctctaaagagagaaacgctcatattgacaagtaactctctctcattttcaggaagtttttgacaaggacactttcgttg

SEQ ID NO: 36894 - DNA, 749 bp, Sorghum bicolor
  Intron number 1 from transcript Sb03g003770.1 (locus Sb03g 003770) derived from phytozome v7.0 (chr-ID chromosome_3; pos 4031520 to 4032268 reverse strand)
ccgcttattcgacattttcaggtgaacacatatatttttgcgttttatttatttatttttggcttcttgtttagctttccattgtttagtcatcatttggttgatacaatagagaaaacaggtgagcattggatagttgttatctagctctgttattatgtttcatgtaatgtttagtaagcagtcatggatccttcatggaatcatggtaccagcgtgactctgcagttcacttgcatagttttatgtgcatatatttatttatttatttatttatctaggcatatagtactgaaacatgcttgacattattttgcaaacaagttatcaatttcagattttgttgtcagctttttgataactgccagtgccaatgtagtgaagtaaaacaccataacactctttacatttgctgcaaatcaatcttatcccacggtggcagggtatcattctgactaagacttattgaaatagatccttgagggatcttttcgttgcttattaattggctaaagatatgaaagccttctttttgaacagtagcaatgcagcaattgtttggtcatagttgattgttcttcggttctgatcaattatttttagaattcaggttaacatagatgcttcctgtgaaataattgattgtctttcctgagctttgattatgacatatctttctgacaaataattgctgagaatgggcacaatcttgttctaactcttacatcattttcacttttcagtccgct

SEQ ID NO: 36895 - DNA, 942 bp, Sorghum bicolor
  Intron number 1 from transcript Sb07g006420.1 (locus Sb07g 006420) derived from phytozome v7.0 (chr-ID chromosome_7; pos 9327089 to 9328030)
ttccattcgaaaaattgtgggagttgttctttaaggtatccattgccactttcccttgtgtatattgatgcatacttagcaactttacacatgatattaattttgttacagactttggatttgctgtctccagatactgtttgtgggtcctaaaggatgacttaataaaatacaaatacattactcccatttaaagtacagatggttactgtgcagtaattttcttttctagaactatgcaagagagatgctttcatttcattaagaaaatgagtacaaaatgcacaacaccaagacaccagacaacaacccaatgcactagatcataaaaagcaaacacaccggcttcaaacaaagcaaatgatcacattttttttcttgaaggacaatggagagctacatgtcatttcattaagcgagaaaaagagataaaaagtgagggtaaaacagccccacctgaaaacgacaataaatgaccaaaagagaaacatataaaaggtcacaaacactggagccaaaaacaccataggatgtcctcctcttctaccatcctcacaatcaaggaaacacttaggacagcattgttgaagacacaatcattgcggtgtttccatatctcccatccaataagatgtacagtaattcaccagtcataactaagatcaaaagaacattagttgttcataggctgcatcatatctttctatctttcatttcatgaaatgtgttttttattggccatttttttatttaaatgtgcttagatctaaaccagaatcagattttgttatattaacggatttgcccctaataccaaaccacaactgtactttgttctgaacctatttttctctttactgtctttgtggcaccatttgaatcaaaagaccaagggatatatcttacttcatttgtgttttccatgcttatctctctagggac

SEQ ID NO: 36896 - DNA, 752 bp, Sorghum bicolor
  Intron number 1 from transcript Sb05g004663.1 (locus Sb05g 004663) derived from phytozome v7.0 (chr-ID chromosome_5; pos 6039384 to 6040135 reverse strand)
atttctatcacctaaagagcacgaaggtgaaactgaactactttcctttcatttttttgctctggaacaatattagttctctatgtgtactgattgctaattcatattttgctccttccattaattcttaaattgacagtctcacttagtgatatcatggagagtcatgattatagaagtattctgtttgctttgattttctggttcatatgttctctagcctaatgctgaaacgtatttatgttgtatgaaggtattaaagttaaaaagattgtctttattgggtcaaggaataacaaggtgtgcatatttgaacagagcctctgtaaaaactgaaatcaatcaacattttttccttgcaatggtccataatgtgtaaaagtttttttattaattcataaagaaaagagtcattgtcttcaattcgacgctaattatttgtaacatattttcttagggatacaaagctacattttttaaaccatagttatattgttctatgttcatgttcaaagctgcatttttaccatagaaaatgaaccgatttgaacttaatcaatgtttaattaatgacagcaatggcataatcaccattatttaaaagcatggtatttttctgttttttgtttcctccatagcagtagttcacttccctacatccaaccttgcatgggagctttcagcagtgggcatgccctttttctttgtgtttctttcatacactgctaaattgtgcatttttctcacaggga

SEQ ID NO: 36897 - DNA, 1052 bp, Sorghum bicolor
  Intron number 1 from transcript Sb06g014420.1 (locus Sb06g 014420) derived from phytozome v7.0 (chr-ID chromosome_6; pos 39919877 to 39920928 reverse strand)
gtctagctgctgttgcgagtcactgcaagtgagttttccattccagttcgtcaaatgctagtacctcatttgagttttctatatgcctcttttgttaggtgcatcattttttttcctttcctgatctgacattgtaatctttaaggacttgttgatttcactatttagtccttatgcagctattgcaagtcattgcaaatgaccatgccttgaaaatttcagttacaagcataaaattttacactttttttcccacaaatgaccatgccttgaaaatttcagttacaagcataaaattttacactttttttcccaaaaaattgatcaaattctatttccttagcagtgttgtatgcaatttccttttgatatgtcattatttagtccttaagcatctattgcaaatgactatgccttgaaaattcgtttccttgagagcatcacattttacttcttagcagtgatgtatacaattaccttttgatatcgggatccagaacaacacacttctgcgctttctcttatttcccctgatgcttatcacttaggggccattgcttgttagtcttttttagcttatcttccaattgtatttttgaattcattttacaactgttcaagtcttgcattgttctgctcatgtttccttaatgagctgaactgtgatgaaccattcaattcaagtggtgtttgattgttctgttcttgcatttgctctttagatattttatcactgtttttctgtatgacttctatgatttttattcggcgtgatcattccattcagtttcgaccatgttgcatatagttaattagttgtgttgtggttgtaatgcgtatgactgttttctaggtctaagatgcaaattctcttgcagttgttcaacgaattattgtcattggtactatcagtattcagtagtagttgaatgtttttaactgaatgcatcaagtttttcttgttacatggtattttatggttaatgtgttgactttgttctcttccttttatctgttatctaggctcctgagggagttagatttgcaggaaa

SEQ ID NO: 36898 - DNA, 571 bp, Sorghum bicolor
  Intron number 2 from transcript Sb05g019800.1 (locus Sb05g 019800) derived from phytozome v7.0 (chr-ID chromosome_5; pos 48566862 to 48567432 reverse strand)
gttcgacaagctggctgacaactacttctgccctggtgaggatagatgaattctagtctccttgtccttgttcttcttataatatctgggtgattttggttttctttttctttttatttacacactcgattgatgcaaccaattattgcaaatagcgtcctccttgttcttcttgtctgtgcagctatgcataattaaattaaacagcatgtgcctgcttgtaaataaactggaatatgctacttgtgtagatgtagtgcttaattgagggtctcttctatatatatatgttgccagcatgtattgtcacaaaacttggcttgcattttcatgccaacaattcgaagaatcaaatagtgatactgcatagtatttcagaaaccatgcgaaatttacagctgagagtggactcttttgataacactaacttcaaatgatataatgcatatataccagtatttcgattatttacgaacagcaaaacaagaagatgctccctccaatttctgatctgttgttccccatcgctgatgcagtttgtggggctccaaagagaaggttcagaccctac

SEQ ID NO: 36899 - DNA, 567 bp, Sorghum bicolor
  Intron number 1 from transcript Sb02g001550.1 (locus Sb02g 001550) derived from phytozome v7.0 (chr-ID chromosome_2; pos 1372182 to 1372748)
tgcaggtgagtccacttcatcttttgtctattggatattttctgtatgaatgccaaacatgatagctttgctagattactatagtttgattttttctttattttttctctttcgttttaatttgtattattagttacctgctgggcacagatttgagaattattattggactcccaagcacagtatgcatgtgatacaatacaccgctagcagggaatcctgaataatatataattctctagttgggggtattattggagaatcaacggaagaactctcacctgttttgctttgcttgagtccctgctatcactacttcccaagatatatatatatatgctcgaatctagcctatatattttggcctttttttttctgaaaacaatgttccatcaatgaactatatctaaaaaaacaattgctggacatgaccactatatactgcatatgcacaacctaggcatgaatcctatagacatttctagaaatagttcttggcgatataaatctttcttgaaaaaatgatttcctatgcacacgcaggacatagagaactatcaatacctg

SEQ ID NO: 36900 - DNA, 776 bp, Sorghum bicolor
  Intron number 1 from transcript Sb01g019490.1 (locus Sb01g 019490) derived from phytozome v7.0 (chr-ID chromosome_1; pos 21024964 to 21025739 reverse strand)
acgggctctgcacccatcctaaagtttagttctgggtaagttcttgctcgtcttctctggtacatgttctttttattttttctagaaaatctttcaggtaaactgtttccagctcttgtgtaatttttgtatgatatcttagcattgggacagcagttgtcatgggtggggatcctactgatggtaactttcagttgtaagtgaaaaatgatgactggactgttaagggcacctccagtgtactgcaaaagcgaaccgagggagaagcaaaacgaaccgagaacactacacggttcgactgctcgttgtcagaagtaaaatcaaatccaactcaattgccgaacatagccatgtctgtctaacaaaaattccttatataggacagatcattgatggtgttgcctgtgaaaccaactcactttcaatttatttattgtttctttggagcaaccaccgacgcgacactgcatccctcccaaaccgaactctacccacccgaactgtatctgttcagttcgatttaacactggagctgctctaactgtgcacacctaattgttgcaacaactttttttttccccaaatgggtcactattatccttgggagtatatcaactaggatttcactttgctatgttgatgtgagctagcaactgagtaacgggttaacagcagttttgtgatgtttatgtgtcaatttctaagtttacaaaagattgagcactatgtgtttttcatgcattcatcttttttgcctgtgtacagagaatcactcc

SEQ ID NO: 36901 - DNA, 583 bp, Sorghum bicolor
  Intron number 5 from transcript Sb02g043460.1 (locus Sb02g 043460) derived from phytozome v7.0 (chr-ID chromosome_2; pos 77285899 to 77286481)
aactttacatcaaggtaagataattactgctaatctacaatcaggagactttccctcactgtattctagagtgctaagtgctggacccaagtatgcattcactattcaattctggtgcctctgtgttatcttctttgtggcacatatcattttcaatagttctaggcatcttttgctcttctttttatctgaaaatttcatgacgatgatggtgctagtttcgaaaattgcatggattgcttttttcaaaaaaaaaagaaaaagaaaaaagaaatctgtatctttcctggaatacacaagagagctgcatatcattgcattaagatagggaaaaggaaggctcatagccaatacaaactcacaccacaccaaacaaattctgtatcttttgatgctgatgtatggttatgcacagttcacatgatgaattctaaaatatgcatcaagccatcaaccacattctagtttacaaatctgccctactccaacttacaattctctgtttggttgtataatagtatacagtaaatttgtttgctgccatgcagatattcctcaacccgctttacctgcccggttctcg

SEQ ID NO: 36902 - DNA, 602 bp, Sorghum bicolor
  Intron number 1 from transcript Sb03g004970.1 (locus Sb03g 004970) derived from phytozome v7.0 (chr-ID chromosome_3; pos 5214578 to 5215179)
tcgaggtgaaggtagacaacataaggtcagttattttttaacatatataagaaccagttctttctattacatgaactcaggaatcaagtttccgttctttttcctgaggtggtagcaataacaacttgattttttagtacaaaggccaaagaatagttaaattttagtggtaatctgtaaagtgtatactcataagttggcatcaaagctaaatcattagatagcaaatagatcctagacatgtcaaaatatagtcaatttctacactaaagtaaattgatatggagtaaggaatcatttttatttttataaaatgttgttaactaggaagaatatggatcttagagagagagagagagagagagtaaaactaccatttgagtacaccagaactgcctacagattcattagtacaatctataaaccaacgctatttaaaaaaaacattagaaattcatgattgttcattgtttcacagactatgattagctgtagaaagcaacttcattacaaaataacatttgtccatatacatggactatctaataaaacaaaataaaaaggaaaagacagcactcactttggcatctatcacaggtgtg

SEQ ID NO: 36903 - DNA, 886 bp, Sorghum bicolor
  Intron number 1 from transcript Sb05g006260.1 (locus Sb05g 006260) derived from phytozome v7.0 (chr-ID chromosome_5; pos 9644330 to 9645215 reverse strand)
actctatttcgtctgcagagtctgatttcactcaggttaacatattgttatggaaagatcccattccttgcaagcatgccatcattggcaactgccattgttatgctggatcctactgattattatttgcctaataatgacaacacaagttgcttgcttctcaatggtttatctgaagctacaaacttgagctatcaacttctcctcaaatggtagttttaatgtactttgtactcctgacatttcttctactccactgtttctcttgctttaatgtcagtatataattctcaagcacgctggatagtgatgttatcagatttggattaaaaccaaaaccccatggttattcttttgtttccctttcgattacattttttagttattgtttactcatgatagtcatgctatattactattagaattatttcaaactcctggaattcatgtcattattacaaaaaaaggagtttctgcatgttattaatttcactacttattcaatacggtaaataggcagaatttccaaaacttatgtacctattgcaaagatatggttgcagccctttcattagaatgggttggattttctgaatgatgttaaattcactgcctatgaaatatggaaaatagatgggatttcttttcagaaatttatatacctgcacaaaagatatggttaaacccttttcattaaccattactatcttattgttagttagaatctaacttcgagttctatatgagataggaataataaatatggtatgattgtatagtaaaccttgattatattttgctattccttttttgacctttactttgaactttgcatagattgtcttctgcagagatttaaagtttgcccaggcatttaacaagttaa

SEQ ID NO: 36904 - DNA, 614 bp, Sorghum bicolor
  Intron number 3 from transcript Sb06g016730.1 (locus Sb06g 016730) derived from phytozome v7.0 (chr-ID chromosome_6; pos 45803312 to 45803925)
gcctcttcttcttgctctaagttctctcttggaaggtaagattgttactatgaactattgaacttcttatcactgttgagatccccactggaatcttgtcacaactctagagtctagaatcagtgtccattgcaagtattgtccctttagtgcagtaaatttcaggggtccttttgagattttgagttgtatgagaacccctatacagtacagggcttgtaagttcaaatatcaagcggagtctgctgcatatgcaatgtaattaatgcacccatcggtggtgaaatctatacaccctgtaatttttcaacagtcttttctcctaggctctggttttcttgggaattgatggttccttgtaatttgcattgcttggattctttgctccacataatatattcttgcttctatataaagaatgactgaatggaactgcttttatttttttttgtttttttttctgaaattagtcatgtcctgcaaaatgtaaacgtatggcactctattcttcctgacacacaccatttgattataaatgctttttggttacatgctcataaattattattattgtacttgagctttggatgttgcagacttgagcatagttcgag

SEQ ID NO: 36905 - DNA, 981 bp, Sorghum bicolor
  Intron number 1 from transcript Sb01g038070.1 (locus Sb01g 038070) derived from phytozome v7.0 (chr-ID chromosome_1; pos 61667480 to 61668460)
gtcggcgtcctccgccagctcggcgacctcaccgagtacgtgcgccgcaccattccccgtccttcctgtttcgctctagctcctttgtccgccatgaacatggattctgctgttctcgtctttaattctgtggtggtttgcgctccggcccgttggttgcattcgattcgagcatcttcatttccctggacgagctgttgatgtcacgcatttcgaattgctgcgtcatggttcccggaccgatcgcatttgctttgatttcgggcgtagtagatcacctaatgcttttgttatgttatgttatgtcacgaacaaaacggtaggttttcgaatccctttctcctttttgacaaacggtaggtgattgatgtattcgacgtttgactttcaggccgttaactctgctgatggccttgtcctagctcagcagcacagaccactgtgctgtcattatatttctgttcctaataagtactacaattgtgaattgtcatcaagcacttctagctaccctgtaccgaaaaatagctgccctttctaaaggaaaaaaaaccattttttttctgatcgtcatttatgtgagaatgctctgattaatttctgatacctggagattgaaacaaataaaaaaaaatgaaaaaacaaaaccgaaattttttcttatcgtcatttatgcgagaatgctctgattaatttctgatacctgaagattgaagcaaagtttttttttttttggaaaaacaaaaccgaatttttttcttatcatcatttatacgagaatgctctggttaatttctgatacctgaagattgaagcaaagaaaaaaaaaattgcaacagaaagaccaaagtttgaccatgatgaatcgcaggaagctgcatttgcagaaaccagaattttagagaggaacaacccatgatgcaactgaattccccccattgtatggctgcagatttgctgcacaggtgttccacggactgt

SEQ ID NO: 36906 - DNA, 642 bp, Sorghum bicolor
  Intron number 1 from transcript Sb01g003790.1 (locus Sb01g 003790) derived from phytozome v7.0 (chr-ID chromosome_1; pos 3050508 to 3051149 reverse strand)
acacccggccctggctccagcgactgagcggccaggttattgcccctgcagcctcttgtatgctgaagagtagagggaacaaattggtagcgctgtgctgtgtttatccagtgttgctaattactctgtgttgttattcggtcaattgaatagatatgtgcttaccatgaaccattaatatgctacaatgcctgttcctttcatgcttttctaatcgcccactgaatgtttaccttctactaaaacaagatggacgagtagtatacgcctgtcactatgtttgaattggtgatctgtattttgtagtgagactgggagtagcatggttagctctaataaaacaagatgaatgagttagtatacatcactatgtttgaattgttgatctgtattctgtagtgagactgggagtagcatggttaggctgttaaatttgggctcagtgtttggttagtatctttttttggtagctggtatgtgttaccatatactaaacgttcaagtagaatgatgttggtgtgctctatgccaaattaaaatgaattttcggagttgttcaattgaaaatctgtgtgtgccttatggaatgttgacagatatgttttccatgtcaaaactatgttcttaaacatacatttcagg

SEQ ID NO: 36907 - DNA, 614 bp, Sorghum bicolor
  Intron number 1 from transcript Sb01g048810.1 (locus Sb01g 048810) derived from phytozome v7.0 (chr-ID chromosome_1; pos 71801764 to 71802377)
agctcgtccctgccgacccctccgcgcagccctcggtcggtcagcaacttgcccttcctggcgatctggcctctagtatcatgctgtaatgctaggctccgtacttcctgacgagcttagataagctcgaatatgtttaattgaccgggttcatctgcgcttggcctgtttcttttctctggtttcaggtgccgtcgagaaaaaaaaatctctcttttttttaatcccgtagtatcactttcgggcaggagacagtaatcggtgccggtattgttagttttggctgaaattttggtatggatggctggagaaatggggtctcactgtttgattttagttcagctgccaaagacctgttcaatttgaggggactgtctggccaatttctgaacatctggtctggttttctcatggtcatgtctaccctgggtagattcagttgatgtggtactgatgggctaatggtagttcagttcatggttgctaatgctaccggttgattttctacaacgtcagaaattcgtgctgtcaacttatattatgaattatatatgtccatttcacctggtgctaatgttagttcttttttctttccatgcgtgtttgtcatcaga

SEQ ID NO: 36908 - DNA, 854 bp, Sorghum bicolor
  Intron number 2 from transcript Sb03g045520.1 (locus Sb03g 045520) derived from phytozome v7.0 (chr-ID chromosome_3; pos 72763734 to 72764587 reverse strand)
caacggtttgaacattagcgtacaatcagctaaccgtaagttctgctttgctggctcctgctcatgtccacaagctactagcataggagagtgagattcggagaaataagcactatgtgctgtacaacaacactattctgatgccagctttttttttcactagtggagaattgtggcttttggttacaatttatttatgtgctgctttgctgtttcgtactcactggcttcatacctataagtggggcgtggagttcagaatgtgcttgcttgctcatatttcaatatacctgggccttgtttagttccgaaaactgaaaagtttagttttcggaactgtagcactttcgtttgtttgtggtaaatattgtccaatcataaactaactagactcaaaagattcgtctcgtgatttacagtcaaactgtgtgattagtttttgttttcgtctatatttaatgcttcatgtatgtaccgcaagattcgatgtgacagggaatcttgaaaactttttggatttcggggtgaactaaacaaggccctgttcaaattactgatcacctttcttccatttgatgtcatttgctagaatgggaaaagagagacattttgttcgttttggtacaaaggtcgttcgatgtcaaccacaggtatacccatttacacgatagttgctcaatttttttgctactgtcagcgtatctactacagagaattccaactttaatgttcctgcatgaaataacttgttgaagtagtttccagagctataaagttattctctcgcattctgtattcacgctaccttatgagtttctatgttactcaggaatctgtacaaatttccagttgat

SEQ ID NO: 36909 - DNA, 1019 bp, Sorghum bicolor
  Intron number 1 from transcript Sb06g012050.1 (locus Sb06g 012050) derived from phytozome v7.0 (chr-ID chromosome_6; pos 32793280 to 32794298)
gccccgcaccccgctcctctcccgtcgccgaggtacgccgcttctcctcttcctcccattcgttccgtgaccaagaatgttcgcacggtggattcctagttctgggcgtttgttattatgtgtcgcgcgagatcctattgtttgacttggtagtccagcagcttcagctcgatatgaattcggagactgcatcactttatttttcaggataggagcgtgcctgcaatcttgctttggatcagtcgtgtttccatggaaatttaaggtcttagggtacccaaattggcctatgtgaaactaatgaggtggtattgttagcatgacagggacaccagaattctgtaatagctttagggtacctatgtgaaactagcctgttcgtagggtcgtgcgagtagttggattttgctagcctgtcagtagcctggattgtgcaatttagcgttgcataatgccttttgcgcagtgtagtttggagcagttgctacctcaggtttgccatggtgtggtgcagtgtagtttggagcagttgctacctcatttttcataaatccaacctggtcacctgacacctttgctatgtaatctgaagcccctgcgctgcaccaggcagcatgaaacatgaaagtagtatcaaatgctaggtttagtctttgaatacctcatgtataatcagtggttcacttgtgttgattttagttgttattattcctttattcagatgtatatagggtaatttttctcttgttgctattggagagtcaatagcgactagctgaactgtatgtttttaatggtttacttacctaatgtttaagaaattgtatttttgctcttgtgttaactgttaacccacctgattggtacaatcttttattctgaattattgatactaactttagtcagttaccagtaatattgtcttgaacaattttaatgagcagttgtgtaatttattatgtttttattataatgcctatgcagacgaagcgcaccaagaaggccggaattgttggcaa

SEQ ID NO: 36910 - DNA, 871 bp, Sorghum bicolor
  Intron number 2 from transcript Sb03g014430.1 (locus Sb03g 014430) derived from phytozome v7.0 (chr-ID chromosome_3; pos 19302118 to 19302988 reverse strand)
ccattccgcggctgaaacttctggaagggtttaaggtacagagttttcttctccggcttctccatgatctcatcagccttccaaaattctaaactttttttcttcagttcttgattttctttctctttctccacttggttcagttcttcctttgccgctactcactcctaagcgtttctctatttttccgatatattaaaggttgctgtttctggtaccgtgaaaggattgttcggttgagaaaggttgttgctggcgtttcattctattttaatatttgagaacggcgcccactagatctgagcacgaggaggaatttttgtgtgggcggtatttcaaaccggaggacggtttcttccctgattttcggtttacttacttatgctagggtgcttttacttcctcccttttcaaacctcgctgatgccgtccaggctgtgaatccgttggggctatcgctatcatcttttcttacataaaagtagcatcatgttacgcatatttgtgttatgtgatgaaagttctggatctgattgaattttacgtcacctttacttctctttgacttccctgtcttgtggcaaaatttctgtacctaaactactggtagtttttatcttgttcaaattttgttcttttttctttctttttagaaatgaacacacacttccttgaaatattaccctataaggatgtgtacctcctctcgttttttctttacttgactgattatggatagataagaaatgtattttagttggcgagttttcacttcagttcttattgcaaggtttgctcctattctcgtcctggttattaatttatgttttgaccagagagtagggagaacttggcctcagcggtagagaag

SEQ ID NO: 36911 - DNA, 1026 bp, Sorghum bicolor
  Intron number 1 from transcript Sb01g010330.1 (locus Sb01g 010330) derived from phytozome v7.0 (chr-ID chromosome_1; pos 9166684 to 9167709)
gagcttgggagcaggagggaagagcactgtaaaaggtagtaattctgtctgttgttttttcatttccaaatgagcctgtaagctggttattgattgtgtcaaagctaggggtaaagtttgctattttgagctcttgtttaggcaggggtgagggaaaatgtgtgagcaaacaatagctattagttactccctcaaatgcttactaagatgttaggaggagttaacattgcacgattcatcttactatgctgtatccgttcacacttgaaacactagtgcaaatgaaggaagtttctagctgtttaaagtgaaatcagcaagctaggagggttataatttataagttgagttagctagtgcttgctctttttttcgctttgaacataagacatttctaacgagcgagctcataagtcctgtttatttctctatatacagctcattggatatgtgcttgatgaagtattcttgtagcacatgctagataccatctatgctttacattacttcattgacgcgttatcaatgtgtataggaaccgtggaagtcaattctctgaattgcttattacactttaagaaatcaatctgtttgagaatcacagcaccctggatggtagtttgtggttgagtgagagtagtttactacaaggatccatttcctaccccaagtagcttatgcttatgtgatctgtgcctatatatttctgcacatcccacatgaaattgcattgaggctgaccataggacagtatctaacagttgcagatttgatttgcaaaaatattagtcaaatgcttcttctgcagcatagatatcttgtttgtgtatgcccatagtaatttctccaatatttcccctctttttgtctgttattatatgaaaatatttgtaacgctaattggtgggctctccttttggggctttgttctatttttccctctctctccacaaccttatgtgatacatgggctaatccatctcatacacagctaaacctagtgcacagcggaaccattctggagat

SEQ ID NO: 36912 - DNA, 552 bp, Sorghum bicolor
  Intron number 2 from transcript Sb05g027030.1 (locus Sb05g 027030) derived from phytozome v7.0 (chr-ID chromosome_5; pos 61113101 to 61113652)
ggtaagcgacaaattacacggacacacacgtatagtaagacacattagttgccattgtttaggtgtagtttgatagtttctacctatgcaaaaggacggcatggatttgcagctaatttggttcatggaatttgcaaaaatggacttttctttttaaaagacctgcaaggcatcatattgctttccccaccatcatcttgtttcacatgaatgtcttctttgtattggtccatatttattcctttatgtagtgttcagaaaaagaatgttgaagaatgaaatgctgaattgagttcttccgaaaaagtagcattggtattgattcaaaagtttctcgatgtcttattgtacaatttacaagggacactaaaattagttttattctttgcaataatacacatccataaaactcatgaattttttccaaatttgtaaaaggtcaaaatgtcttcggcattaattcacagtcatactgaagaaacctttgtgtcgtttcttttttcttagtgcagactttacatcgtttatgtgttttccttcttcaggcttgga

SEQ ID NO: 36913 - DNA, 804 bp, Sorghum bicolor
  Intron number 1 from transcript Sb04g035970.1 (locus Sb04g 035970) derived from phytozome v7.0 (chr-ID chromosome_4; pos 65770727 to 65771530 reverse strand)
tccggcgcgcgcgccgctacgagcacgccctcgaggtgagtagtggaactttggggttctcgtggttctggtttttgtcgacgcactgattattactgtatcatttgaattgatgatcttaatctaataaaacaaacgatgagtgctagttcagtgacgctattgctgccctttgctatagacaattggaatcatttttgtattcttggccttcgcattgccagatcgcaagtgtagtctgatctggaggggtttccgcccccaagtgggagttcagtgacactattgctgccccttgctatagacaattggaatcatttttgtattcttggccttcgcattgctagatcgcaagtgtagtctgatctagatgggtttccgccccccagtgggagttcagtgacactattgctgtcccttgctatagacgattggaatcatttttgtattcttggccttcgcattgccagatcgcaagtgtagtctgatctagagggtcctctctctctctctctctctctctctctctctctgagctgagctgatttgttacacacatacaagcaataaattcgatttgttatttctattttttcattgcaaatcatgtggtactgattcgttaaagagttgatagcaaggggcacctatttcttatgttcgatcatgaccctgaagcttgggatacgagggtttagcagcttgtctcttatgttattgacagcattggtataggatattccgtagcatattacagggtacaccggctaaacaagttacattgtgctgcagattttctcttgg

SEQ ID NO: 36914 - DNA, 555 bp, Sorghum bicolor
  Intron number 2 from transcript Sb03g026110.1 (locus Sb03g 026110) derived from phytozome v7.0 (chr-ID chromosome_3; pos 52509343 to 52509897 reverse strand)
tgcagacatcgagtgggaaaaaggtaccgtttgctgtttcttctcatgtgttctgcataaggtctccatcttgctattaatatgaattcaaattatgttggtgttattcttgaaagcagggacgaagctagaaaaaaatttagggggggctgaacaaaaattctacatcgacttagctctactattatccctcgtaataaaaaaatatattagtttaaagtagtcttagattaaaaatatagaccaataatgaaattcacaaaatatatctaaaaaataaagttctcagcccaccctactttataaatttatgtctaaaattagaagaaaaacactagaaatttcactaggccagcagcggtagggggggctggagcccccctagccccaccgctggcttcgtgcctgcttgaaaggaagttctacagttctgttccagtattttatatcaactggactcaggatataggctgtatctttttgacagaaaatggattctgaaagtaatgcttttgcacaggttaccacagacaggtcaaaagtttttcccaagga

SEQ ID NO: 36915 - DNA, 848 bp, Sorghum bicolor
  Intron number 3 from transcript Sb01g021445.1 (locus Sb01g 021445) derived from phytozome v7.0 (chr-ID chromosome_1; pos 25157463 to 25158310)
aggagaggactgatctgtgcgcggtgaaagtggtacaatgtttttggcatttttgcccttttttagacattcattgttgcatgttactttttttgcaaacgtcatgtggctgctgcagaattggaaatgagcattcaaatctggacgccagggtgtccagttgaacctcttggtgaagttaattatgcagcgtgcttgatcttaacactgaattacgtgcaacagttgcacaatcacagtttagtttgtgcaccaacccatttggttagcccagtgtgtccaaagtttgagctaatgaacttatagtaaagtaacattggttgttcagatttcagaaacatcaaaagtcactaaacttcaaaatttgagcgatcatatcatttgtctttgattattagagtaatccccagaactcaatagttctcttcataactatgtgtacactctggtgcctaatcatgatttcgatctcgatcttgaaattgccatccaattccagttgagcattgacatgcaaatgctctaatatcctcttatgaatcaagtgcaatgctgttatgctcgatagatatataaaagacatttttggttcagctacaaaagcttcataatgttttcttaatggaaaaaacatttttagaaatatgagtctagaaggaaaaaagtggaggtcacattaccttcacttgtttgctgcgattcatctgttaaatgcttcgaatagactaattctaccttctattattttctactataaagtataagcttttgatatcatggctctggatgttacattgttttagttattattgtggtggaactgctgcaggaagttcgattagggagaa

SEQ ID NO: 36916 - DNA, 722 bp, Sorghum bicolor
  Intron number 4 from transcript Sb03g005080.1 (locus Sb03g 005080) derived from phytozome v7.0 (chr-ID chromosome_3; pos 5278456 to 5279177 reverse strand)
ggtcacacagaactactattgctaattacatagaggtgtgcattcttctcttgtttttgtttctttctactttttctagaacttatagacttataatatgctttatggtctgtctacatttccattttcctttacttttgaatgtcaacattattttccttttctgtttgtatttagtcagccaaagctttttatgcacaagatatcttgttaataataaatttattgttttttattttgacaaaagtgtataagaaatcaactaggtggcgctacccagcggtcatgaactcatgattttgccaagttagcaggtttcctgcctatgcggtgatggctggtgacacccatatctgttgcaaggatcattactcctaaacaactaaataaatagtgaacaccgttttatacagaaacagaacttcagtacacctgatttgactgtataaaaattatatctcagatatcaaatagtagaatccaacaaaaaaagcatgtctagttacattagatttcctccttttgttggtcaaaagttagctactgcactatgtcttcttgcagagttctgatttcattttgaaatcgtcatgttctttcttatttgctaatagaagttcttggcaaaatcagtttcttaccctggttttatgtgcacaatcagtttcttaccctggttttatgtaggagcaatattggccacctagtgattttgatcactt

SEQ ID NO: 36917 - DNA, 884 bp, Sorghum bicolor
  Intron number 1 from transcript Sb04g005696.1 (locus Sb04g 005696) derived from phytozome v7.0 (chr-ID chromosome_4; pos 5590640 to 5591523 reverse strand)
acaaccgcgtcgccgccgcccagtacattcttgaggtcggttccccaccccgtcttcttggtgcccgacgcggtagcctgctgggcttagctgctttgctgatagcctgataatggcggcgatcacttgttggcagtgactagcgacgattttgcgtgaggaatgggcaatgcgttttaatattttaactctatttgtggcccctacagcctcgtgctcggatgagaattgcgcagatgagctcaagcttatagccattgctctactgagttgttgttattgggagttttcatccttagtctgtttgagattcgagcctgcctgtgggcactatggctggtgacctggtggtggtgggtaaggtgggcagaaccattgctgtaactgagtgcaagttttatgcttgttgccttgctgtagcttgggagatgttggatggtgtatatgatgtccattgcaacataggactgatggaagagcttgggttttggtttcgctagattgcaaggcaaaatgagctttctcttgcatatccttaagtactgtttaaagctgagccttcgatcttatctccaaacaaatgacattttctgtcttcgtagctgagacattctcaaattgaacctggatgcttagtttggttaaaatagtggccatcttcaggatgttaaacaggcccgtcataattattagaaatgtaagtgtagtcatgttaaaaaatgcctctcttgaaatcattattccaatcatgtgtgtcctgtgttgtaaaatgtggttacgtccttcttaatcatatgtttttacttcattacagcattgcattttttttcttccttttgggttggttttggtggatgatgatttgagtttttaatttggacagc

SEQ ID NO: 36918 - DNA, 808 bp, Sorghum bicolor
  Intron number 2 from transcript Sb04g033130.1 (locus Sb04g 033130) derived from phytozome v7.0 (chr-ID chromosome_4; pos 63055205 to 63056012 reverse strand)
tgcccaaggttttctgcgcgggcgccgatctcaaggtatctgatgcattagctctgttctggaagtttgattttgctcattactcattataggattaggattcctactagttcgtgagttgtgctgacacagggtatctttcagtggcaacaattgagtattctcagtttagttgctataggtctataacacatatgctgacaccagactcatgagcggtttcatttcattaatccccacacttctaagtctttgctgatggactagatgctaatattatgtgcaccgacaattgagtattccgggaagacaatttgtgaactatatatgatcatttcatttcaatcaaagaaataaataaatgatcgtaggtgaaaaattttggcttgttggatttctagagcacatagaggactattcagatgaatttcagaaaacaattattaaaaaaatattctgaacatgtttgcatattttatcaacgaattgagaaaaaaacagagtcaacagctactggaaggtcagacttatgttctagcaataggatgattggtgatgaactccaaagttagaataaatgtactacattatgactttatgagtaacttaagtggctatgactctttgcacactgtttacagtgttgctttatgaagaaatttttttgatttgctaaacaagtgctagacactcgtttatatttgaccattgtgtatcaggtataaaactgaacatgtatccgttttacagaaaatgacgggtgcaatgatgtaccgcgtgtcctttatgttgacaggaaaggaggttg

SEQ ID NO: 36919 - DNA, 983 bp, Sorghum bicolor
  Intron number 2 from transcript Sb07g006010.1 (locus Sb07g 006010) derived from phytozome v7.0 (chr-ID chromosome_7; pos 8553766 to 8554748)
cggagcgtccacggcgaccgattccaggctcagaggtgcgtgcttatgtcttctggtttagtggtttggcactgcagctggattggtgtaggagtagaaactagaaagattcagttctctcttcattagtttagagggaatgtgactatcattaggaatatgcttttcctgacttctatgtttgcacgatgctggtttagttgctgttgcacttgctgaagcacaatgtgtgatcggtttatttccctccgaaagatcgagtggcgaatgggcatgagcttagtttgagtaggcctataagggattgggatcacttcaacccttcccaagccttatgcaagcgttaggataggtaagattttcagattatttaatcttccaacctagattatattatctaggggttgccaggctgggccttagtgatggcacaatctatgtgtgattttcttcctaagttaagagcataatcaaagttctgttctgtttgaatagaagctatgtgtcggagaccatcagaatgtctcatatagtggttttactgccccaaggtctcaatgtctatgcggcgccattacacattcaggattaaatggcccctcggtggtgcagtctaatgcaaactttaatatttataagtctatgttgaacatgatagtcaatcactttgtgttcatgatatccttttgttcttgttgtttgacttccatccagaagttagttagatatatgtttgatttggtgccttgtgtacattttatcttaccaaggattctaatgtttgaattttgaagaaacagattcagatccattattacatacttacgtaccagaaagttttatgcaccctccagcttaccttgttcattaatcaacacaaagattttgtattatggattagtaatcgattctgaaaaaaaactatggactaagtattagtttctacagctacaggagtgaagcaagcactgatatcattatca

SEQ ID NO: 36920 - DNA, 817 bp, Sorghum bicolor
  Intron number 1 from transcript Sb01g007370.1 (locus Sb01g 007370) derived from phytozome v7.0 (chr-ID chromosome_1; pos 6318854 to 6319670 reverse strand)
gctgccacgccgctccatcgccacgccaaggtacctttgtgcactttatgggatggcggaagcatcatccgtttctcaataactttaatttgaagcgacggaaggctgatgctgagggactgtataatctacatgctatttaaccgcagaaaccaaacattaatctctggaattatgattcctaattctaagtaaactactatctttcaaaaatatatatatatgtatcgtatagatgaatccgtacatgtaatcaaacattggactgtctaattttagttcttttactttaatttaatcaggcttgaaaatagatatcatattaacagtccaaaacattgcaatcactcgcttcccatctagtactgttctgaatcttcaatcttccagtgtagttttagccaacaaaaaaacacatcatttattcttccatgttttggaaattcagtgttctgcgtctgtctgaaaaaaaaaatcttcattattgaattgatggtctcacagcatgtcgatttttttttggacaaatccttaggagttgatgattcaaattaaggtctgcagtagggattaaccataggctatttaagacgtacttatctggatctgtcttgccaattctattttttttttatatgggtggcagattctgcttgatttgctaatacatttgtatggtgagctattatgttcctatgatcctatcacatgtttttttgctactaagatgattttttaccgtatccgatttgcttgttgaatgccctgcctccacggtcgaactaatggctatttgttgatttggcaggtggtaagg

SEQ ID NO: 36921 - DNA, 853 bp, Sorghum bicolor
  Intron number 2 from transcript Sb03g031120.1 (locus Sb03g 031120) derived from phytozome v7.0 (chr-ID chromosome_3; pos 59452211 to 59453063)
aaaaaggtacctgtctgaatgagtgattatgcttagtggcagcgactatatgactctctccttgttgcttataatttcgccagaaatttaatcgcattgtgagataagaaatgcttaagtggcataatgcagttagaaagggagattagctttggagaagctcttgcaagattgtagtgccggtacattttgttgaattagcttgataatagtatgtgaatcagcttgttataagggattgatttgtgaatcatacatcccaatcgaagtgctgtccttagctgaccttttgggggttttggtttgctttggcagattgggttgattaacagccggtatttatcacaggctaatgtgtattgaactattgattgaggggcatggaagacaggagaattgaacagtctgagtattttagtctagattagatatttgtagagttaaacggtatgaaaaaaataaaaaatgtagattgatttgactttagttgaatatcagaatgtcagctcattattttagtatacatggaagtaaatattttgttattatttataatcattgccatcaaagggaaaaaacagctcaaggaaagttaatgaatttcattccctggttatcttgtgcgtgaacaaatagttgttttgtgtttgatgtgatgaatcttatgacacaaatgaaactgataatagtcaatggggatgagaatatgaaattccacttctcctgtggcaaccaatatcttcatcatttttgtacacagtgaagtattgcatactcttctctgaaaaacgatcataaaccgtttgctctttcattaggtcttaagagctcttgaaaagcttaggaagaaacc

SEQ ID NO: 36922 - DNA, 404 bp, Sorghum bicolor
  Intron number 1 from transcript Sb01g030380.1 (locus Sb01g 030380) derived from phytozome v7.0 (chr-ID chromosome_1; pos 52818556 to 52818959 reverse strand)
gggtgagttggaattccatcaaacctatgtgacgactaactgcttttgttaaatagtatttaacaatgtgtactcttttatggatctatgatttgttcttttgtgagtggcaataatgttgctatgatagcttctaggcttactagtttattctgactggagatgcatgtggtagaaatgattgaactgaagaggaatccgtttcacatgggcaatgataaatgccttttgatcaatcaaaaaagaaaaaaaaacagatgatcaatgcttttctttctattttggaccttttggtactgcacactacagatgggaattttgcaagtgagaaataagtgccttgcgcttttgccaccttgccttgcagatttttactgttttgtttgtgaaaacttaggtgtttg

SEQ ID NO: 36923 - DNA, 789 bp, Sorghum bicolor
  Intron number 1 from transcript Sb01g000810.1 (locus Sb01g 000810) derived from phytozome v7.0 (chr-ID chromosome_1; pos 768980 to 769768 reverse strand)
cgcctcgacggcgcacgccgtctcccgggtcccaggtatctctccgcctctcgatcgctcccttctctccgccgtggctgtacacccacctccgtgttagcttcgatcccaaaaaatggtggcgtctaagatgccagtgcatgcctgaaatgtttgaggcacattgatctgcatgttttcttgtttgattattgttatgcctggcgggaacaggtgtgcgctcttcttctctggtagttcggttgcggctacgtcatttataactgtgaattgttaggtttcttagaaaaaaaaactgtggttgttagggtaggtgatggctcctttgaacgtttcgaaggaaacgtggtatttgctagaggataggatgccagatggagtactagccattggttttagagactattgtaatttgcaaggttcagtgatgttatcttcagcctcggtaaatccctgctctagattcaaaactaggtataatttgcgaatggcctaatacctattgttcgatgagctccactcgcactctatagttacattttgacagcctacttacagtggtacatagggtgcaatttctggtatgttatgtcaaatctattgtttcatttccatatttttccatcaaataataatgtgtactttgactgaaattgtctgacctgttggaaaactgaagcgattgttaatgttccgcatatttgttgtagcttgtgtgcatcactgtaaagcactataccatgccaaactttgttcattattttttttcttcttcttctacagatttcc

SEQ ID NO: 36924 - DNA, 459 bp, Sorghum bicolor
  Intron number 1 from transcript Sb06g027590.1 (locus Sb06g 027590) derived from phytozome v7.0 (chr-ID chromosome_6; pos 56434226 to 56434684)
caagtaaggaaaataaagaattttttatttattttgaaaacaaattgtttcaaaaaaataaagaaattagtcttttctcgtcttaagtgaaaaacaatgataaatccagtcttacatatagtacactttattattgatgatttgtgtgaagtgctttaaaaaaaactatagcatcttgaattaggcaagtatcaaaaggattaaagaaatggagaagtaggaatactatgactgcatagttagtgtttttcttgtgtctcttcaccattttaggtttttatcatcagtatgacccaattcttgcaatgcaagttaactgttctctgtgatatttatgcctgattatagtttgttgattcttgccctgaatatttctgcatttcatcagtctgtttaacaccttatgtattgatttggactgaaggttttgtcctgaagctcacattggagccacaggtc

SEQ ID NO: 36925 - DNA, 897 bp, Sorghum bicolor
  Intron number 2 from transcript Sb04g002620.1 (locus Sb04g 002620) derived from phytozome v7.0 (chr-ID chromosome_4; pos 2407597 to 2408493 reverse strand)
agctccagctgaccgtcctcctgtcagtggtggtaagcttcccatacttttatttttgggtatcctattagtttaaaacctgctttgtcatggatctattacagttatgtatatgtgcttgaacagtaacttcgttttgcatgtgtaattgtcagtcctggaaaaagttaaaaatcataaatcttccatcttgaactcgtgttgttttatgtgaccaggtggtatgatagtttatcatgaagagttccagtatcacaactgtatttacatagctcagaatttctgttgtctctgaagtctgggcacaggaaactgaaacatcaaactacataactgtggtgtttagttcattttttattgaaaatttctgacatggctaagctatgcatttaatgatgtattgctcaatctgttctttgacattaagatgatgtccattttatgatttagaattttcgttgtagattctaacttggtgtatgaatcccatctagattctagtaatcagatgaaataaattgcaggtgatccaaacaccccagattataggttacattagaatggtcctgcagcttgtttataataatcgtattttgtctctctccagcctgtttgttttagattatagctcatttgtacaaataacaataatccacgtttataatctatggagccaaacagtctatattattataatccataatacagattaccataattcaattgggatccaaacaggcccgtacaatgttttgttaatagttatatatacaaaacaaagatcataatactgctttttatatgttacagaacttttggagtttaattttcattcctaacttcattctttgatgttatcaagatctcctgaagggcatattctttgaggtaaagaaa

SEQ ID NO: 36926 - DNA, 588 bp, Sorghum bicolor
  Intron number 2 from transcript Sb03g009950.1 (locus Sb03g 009950) derived from phytozome v7.0 (chr-ID chromosome_3; pos 10753833 to 10754420 reverse strand)
tcgacaagtcgcagcgctccaaggtcctcaacgaggtgagccctctccttccccgcgtgcatcgtgaatcaccgtggttgaatcgctacatctttgctttctgtggtcgtaggttgttaatttttctcgagggcttgatgtatcccatttcagctattaggatcggttaggtgttgttgtttatgcagaactatatatttggcagggcttaccaaaccttaaatcgccgacagttaggcttgttgattttatatttccagtggctaattactgataaaatgcccatgggagacatgttacagtaatacagtttgcgtttgcgtatgatgatgctgtgctgtgttgtatggagcataactgtttcttttttatgaagaagaataccttttgtgtcacctgttttgctcagtgcgtcccttacttaactgtgaaggttaataatgttgtaagatgttgttgtctaggagatcaatttgtcatgctttgggagcatgattatacaactattggcattcttgtacttgtttaattatctagttctgttccttcatactaattttgcttttgaacttatctttgcaggtccgg

SEQ ID NO: 36927 - DNA, 669 bp, Sorghum bicolor
  Intron number 1 from transcript Sb04g005600.1 (locus Sb04g 005600) derived from phytozome v7.0 (chr-ID chromosome_4; pos 5496288 to 5496956 reverse strand)
cgtgcttcctgcggccgcggggcctcctcccttaggtagactggaatgctggatcaaaaccttgcgctgctttttgcggggtttcagtgtgtttttttgcagtgatgttccggggttcttgatgattaccgcttggccgcgtgtcgtgctgcaaaattgcgccttttggccgggaatttgctcatgtttttctggggaaaacatttagtgctgatttggtgggcaaaccatgtcattggagtggtggggaacagttcattgggatcctagtcttttacaagttgagcagaaagcgtggattatttttgtttcggattttccattcaggaaattgtgcgggaatcttgtggagtttcagttgcttattaaactttatttgttattcctattgcaatgagggaaatatttggagtttaggccctataaggaaacagttgactgccgtcaatattgtcgcatttaactcaaattgcagcaaatatctgttctttcttttggagtttattaaggaaccgtgccatcttcgaaactccaattttacccagttcagtttggtttggaagcattcatctttctgtgacgtccgaatgaatcttgcagtgttcatcattttgcttttgtggtgttgttgcaggggtgattgtggtggagagacaccaccacctccgc

SEQ ID NO: 36928 - DNA, 837 bp, Sorghum bicolor
  Intron number 2 from transcript Sb01g000355.2 (locus Sb01g 000355) derived from phytozome v7.0 (chr-ID chromosome_1; pos 253733 to 254569 reverse strand)
gttccctgatcattaccctgtctcacgcctccttggttagcactcgtatgcctttgtcttctctcccagttactagaggacacggctgctctggctacttccttcaattacaaatgtagtctgtccaaagttgtcccgattaatattttctaacttagaccagcaacatctttaaaaacataacatcttgagtgaaaagagtgatatatcatgaaagttttttcccacactggcccacaatgtcaatcttgtactgtcaatctatatacacttcagtgcttctcctagtgtttctcatgcgttgatgctagctgtagaggcacctccccgccctagcgcctcctgaaggttaatttgtcggtgcttagaggttgtggtcggtctatgtgtttgtgtggcgcatattttaggattgtaagtgtgttggaggggtgtttgtggtgttgtaacttttttgtgtttagaggttgtggttggtctgtgtgtttgtgtggcacatattttaggattgtaagtgtgttggaggggtgtgtgtggtgttgtaagggttcttaccccttttttcttcttaacataatgatacacagctctcctgggtgtttgagaaaaatatgtattttgatttgatggtcaaaacattaaaagtttaccttggataaacctagatggacttatatttacaaccagagaaagtgcatcacatcatcctatatgaagttgttgacctgggacatgaaaaactgcatctcatctcctaccattctgtttttttgcttttatgtgctaatatgttctaccacaggctgtgttgaggtggtaggctgcctcaggtctgaa

SEQ ID NO: 36929 - DNA, 803 bp, Sorghum bicolor
  Intron number 2 from transcript Sb02g033710.1 (locus Sb02g 033710) derived from phytozome v7.0 (chr-ID chromosome_2; pos 68255091 to 68255893 reverse strand)
cagtcggttcgagaagaaagggttctatctcaagggtaaggatgtttttttggttctcgaattgtgatctcatactctgtttcatttccaagttatatatatgcattaacttgcctgttgtttaggcaaagatttgatctgcgtgttccggtgaaatcttacatttgtttaatctatctacgttgggttccgttttgtgaaaatagatgttagttatgattgccatctaaaaaagtatattagtcgtgcaagcaggaatattatgctgagatttgatttgattgaaaaccattatctttctgtcactagcccatgattggtcccttttttaatctgggcagctgatggtcatagtaatttggaattaaatgcctgctgttgcgttgtaaagtctaatcatcaattagattgatagactacagatcagcactattgttaaaaaaaaaattgaggatcctaggatatggattccaaaagcagatattcctgcccaccatctgtgcctttcatcatgttttgaacattctctttccatttcagcgtcaaggtaacttttacagcacaacaatataacagaaggcaatcaagccttggcctgtcgttatattggtactgtattatggatgccatagagagaaactattttattgaaaaataatgaagaagctgaacaaaaccttatgggagagactatttagtttagctttcctcatgtttaccatagtggatcttctttgaataatcttataatcaatatgtgctgtgttaatgaattattttgttacttgctatataatgcaggg

SEQ ID NO: 36930 - DNA, 830 bp, Sorghum bicolor
  Intron number 2 from transcript Sb02g032940.1 (locus Sb02g 032940) derived from phytozome v7.0 (chr-ID chromosome_2; pos 67535403 to 67536232)
aggctctcgaggcccagggaggcgttcctgatccggtgcgatgataatctaatcagcttatccgtgatacttagtggttaattagtgaagtcaactgtcgaagattaatgcttcagatcccaattaacaaatgggttaacttaaatcttccatatttaagttgaagccgaccgaacagagaaattctactgatgtttgaactagcgggtttactgccttaacagcgataatatgctggagccgaagcttcctactttggagattgtttagagcttcgaagtatgatcgatcaagaataattaagattacagactacaaaagcttaactgaatgacactattgttccttttggaagaattggtttgattggacaatgaatatctggaacagctaagctctaattctggtgaggtattgcattgatttaaacttcaagataagtgacttggggagtttttagtttaggaaaaaaaaagaataaactcaaaaccatgctaacatatgtgcacccaacaaagctcaaaatgttgtacttgaaactagaggaaagcttgttttcttagctttattgtttctctgtagacgagttcaagtttaatcgaaggtagctggcagctcatcttcactacgagaccagggacagcatcacccattcaggtggagttcaaaatgcttgtgtttgaaaatatatgtcccatttactatttgtatatgtattctttcatctttggattgtgaaagctctagacggatgactaaatctattgtcggttactcggttcacatttcatgcagaggacatttgttggagttgactccttccgtatctt

SEQ ID NO: 36931 - DNA, 705 bp, Sorghum bicolor
  Intron number 3 from transcript Sb03g023480.1 (locus Sb03g 023480) derived from phytozome v7.0 (chr-ID chromosome_3; pos 46844084 to 46844788)
cgggatcaaccgtgccggaaggggtgaagaggctggtgaggatccactggaactttaatggattctgatctgtaccactttaagtgcagttttagttctttagggctgtatccagtgcaaattacatgcttatgctgtaactactcgagttaaaaattcaaaaatattgttgagtttcactaaactgctcttatgctattatggtcttctaatttggtgattgctgaaaaagatttggagaaaggaaaaaaaaacaaaacctgcacatttttgcttctttaacttagtctgcatccagtgcaattggtctgtgctgagtatcactaaactttgagttaaaaaactctaaagtgagttgcatgcagtatggttttatgagttaatgaaacggtcaatgttctaacttgattggaagattatatatgtttaaagaccttttcattgttgcccacgttagaactgtcctgttttctgctattcctttggtgaaattgctcaacttacattgatatgttacacagctttacacaacctgtgcactcacagattatgaaccttctgctaaagactattaatgaaattggagcatttgctcttttcttacagtttttgtgcttaaaattgttttgcactcctgtttactttattaatataatgctgtttcatgatgatgttctgagttggttgttgccattaaagatttgg

SEQ ID NO: 36932 - DNA, 944 bp, Sorghum bicolor; identical to SEQ ID NO: 36106
  Intron number 1 from transcript Sb02g029730.3 (locus Sb02g 029730) derived from phytozome v7.0 (chr-ID chromosome_2; pos 64822543 to 64823486)

SEQ ID NO: 36933 - DNA, 742 bp, Sorghum bicolor
  Intron number 2 from transcript Sb02g031420.1 (locus Sb02g 031420) derived from phytozome v7.0 (chr-ID chromosome_2; pos 66374676 to 66375417 reverse strand)
cgtccactgctccctcgacgtcatcgacgagcgaggtagctaagcgtctctcacccccgcgtgcgcgccccccgccgaggcatcgtgatccagatctagatggccttctttttagcgggctgtgagtagctgggagttctagttagtttctgcctgttgaaattatgctagtgtttgttgcatgctgtagattgtagtcatttgtggaggagatcacgttcgtttaaattgcgtgcttgttgctctggagttactaattcaaaactgaaattagaagcggacaccaccagtttcaggttagaagaatcaaaatctactcttccagttatctagggcctgccatttgcctgcgagtcctccaaccaaacaggcccttagttactggagtgagcgtttctccaagggaaaaaaaaaaggtactggagtgagcattagaacttgacaatcgatccaacttgtacaaatggggggaaaactcaaatcatgtggcatatgcggacaaaagcatgcacttatcattttgcagacatgcatagaagcttagtggttctagatgattataatggacaaatgcgatggttgattccatcttatcagactagttttaactcagtgattccttggcgtatagaaatatcaatctcctttttctcagtgctgtttggctatcgttttcttatttgcctcgacattcattctgttgacagtgaacaatcctaaaaggagtgcgcctacgttgaat

SEQ ID NO: 36934 - DNA, 868 bp, Sorghum bicolor
  Intron number 1 from transcript Sb06g033480.1 (locus Sb06g 033480) derived from phytozome v7.0 (chr-ID chromosome_6; pos 61442921 to 61443788)
aggctgtcgtctccgctttcgagcggattcccaaggtggtggcttctctgattgatcacctttgcattagtattacccgatcttatttgttcctgtaaaatgccatttatgcaattgcaaggtggtgtcacatgctgaacatgctgagacgggtgaacttttcctgactttttttagataagttttcatgtctttgggctgtgatctgcaatccttcctgggatgctctgatagggtgctttgaatagcagacatcaccaggaaaacatgcttagaataagctttgttaggatgtcactcaataggtcatctgccaccttagttgtagagtgaactacaatgttacttgttgcctgtttgatgtcatttccaatcattagctgacaccaaagttcatctccaacttgatcagacagcttcaatgaacacccttcttccgacccttattcaagtacgaagcctttcctgagttccctttggaaataagttgcttcacaaggcactctttgtttatataaataacatgtaacacatatcccttacattttttatataaaattgccctatgacttgtttgagattttgagctggtgatcatttaatttgttttatctggacaatcatatttcgatttcaatactgtttttgattggcatctggtagtcatgttttaataacttcctaggaaagttccgtacctcctttactcagttctcagggctccaaacagaataggttcggtcatttcttggaaattatgcttagagtatagaattgcctcagtgttaacttttctcatttggtggcactaattatagtcttattttcaacattgattgtttagccatcaaggagggaatttggtctg

SEQ ID NO: 36935 - DNA, 666 bp, Sorghum bicolor
  Intron number 1 from transcript Sb02g002773.1 (locus Sb02g 002773) derived from phytozome v7.0 (chr-ID chromosome_2; pos 2908705 to 2909370 reverse strand)
tccaggtagagtttcttccatttttcatcaaagcttaagatagtgcacttccttattctagtgaaaagtgcattaggttaatcgcaccctttaaaggatgataaaatagaagaaaattttgttttcttgtttggtactagaaggctttgctagtaatttttttttctgaaactagaatgctttattattgtttttgttgtttgttgttctattggaaatctaacaatccacgaatgtactaccatttttctttctcataagcattgtttgtttatactaatctccacagatcaatgcaacagaaacataataccgcaaattttttctgattagggttgtttggtttgctcatggatgtcatttttttccactaatggttttatctagtagaaaatgcagagacgtttggatcctctttcctcctgaccttgtgctttgtcgtgctgaattagttgaaggctagaattcgaaccattatgcaaattgaacagaaggatatttatttttgtacctttaggaaatatattcttctctgtagagactttgccattgtactcaacattcatattaaaattagatgctttcttctgtagtgggaaaaaggttcaaaacatccagttaatctattttatgtgcagagtcctgataggatcagttcactgccag

SEQ ID NO: 36936 - DNA, 1034 bp, Sorghum bicolor
  Intron number 1 from transcript Sb04g021180.1 (locus Sb04g 021180) derived from phytozome v7.0 (chr-ID chromosome_4; pos 49843957 to 49844990)
cggggtggctcgtcggaataccgagcgcatcgcaggtgactccctagtctcttctcgctctgcctagtgctcccgatttcctcgtaggaacattttttttaatcatttatcttatggattggtcgtgggttgtgattattagttgtagaatagctcagcttttgtctggtggaatcgtcagcgagctttgggactttctgaattggctgttcgaattcagttcttttcctttgcttccttgcagtcggcataccttattactacagatatgcggttgcgatagctgcaatcatatgtaaaattcgatctttcaacagcattgtgccccctccttatatataataaacaaaaaagatcaaagttggcgccagttttgtactgccccttaattggtctgtggatcattcttagtatatttttgtgaggcatataatctccacggtaaaaaaagggaaaaaaacattagtgacaaatacggagctaccatcagaatagccttttgcttctcctccaagtgctacgcggttgatggttgttggtagtttagccaaagccaaccatacctgcctgcactgcttgcagagtaatgccactcacaatttctgctgcaataaaccaagcctagtgatgcctgtgccattatgtgcctagaattaaaaggcagttgtaggacagagacagacagttagctcataaattctgaatctgtcaaaaagagatgacaaggaccaagcgaaacatatcgcagaaagatgcacaacatcattaatttggtatgattcgatcatgctcgagtggtttgtcgaaattggactttctaaacctatgttatgttgctaccttttcacctctttaacattctagatatacctaattaccatgttcgtcttaatatagctgcatgatgtcatgatgattggcttactttacaatttattcgtcagctttctgtgtacttggtttatatggaggatattcctccgttcattagctgttacttaggcaagagcattcacatgcaggaagtgctggtg

SEQ ID NO: 36937 - DNA, 730 bp, Sorghum bicolor
  Intron number 1 from transcript Sb02g027750.1 (locus Sb02g 027750) derived from phytozome v7.0 (chr-ID chromosome_2; pos 63019822 to 63020551)
tgccaacctcgtcgcgacgtcgctcgacacctgtttgtctactgcgatcgcttccgcttcctgttgtggtgggtaaagtaaaatgtgccttcgttgttgcgtactacgagctagatacgactggtactagcagttcatggctgatcccatttttggccttttgcgcctctggtatgagaataaatgcaaccacggatggatggatgcattcgagaatatgatctgctagatttgatgattgtgataggatgtagcttttgctggttaaatgacgattttaacatttccactttattacgtttttaggaatttttttttgtgtcatgtaagaaagatggtagagcgattcaagcagctgttacaagttggatgaaaaataaacttaaatgaaccagtgagacattaatatttagcaaaaggaaaagaatgtgccacattaacccatgcaatgatttttccccctgatttttaaatgtacatagtgactacagtttgccgttaggacaaattttcagcattcaatagttctagtactatatttccttcatcctaactttgtatttgggtccatatgcattgttgatgctgtatttacctttgcaagctcaaaagcatacagtggtttttgtttttcttgttcatcgcgctgcttatctatattttctgcatttcttgtgggaaatcctcatttgcagagattctaaagcgtaagtacagccaagcagagtca

SEQ ID NO: 36938 - DNA, 821 bp, Sorghum bicolor
  Intron number 5 from transcript Sb06g024750.1 (locus Sb06g 024750) derived from phytozome v7.0 (chr-ID chromosome_6; pos 53801025 to 53801845)
aagaagaggaagaggattcatcccctcggtcagaggtgatagtctgtgaagagaaaagatcacatgtatttaatgctgtatgtaatgctaccaatgtttgatgctagtacaaaagaaaacctgacatgaattatgtaacgatatagtttgcttcttttgcaggcacctacttatatacgggcatctggagaagaactttcatgtgctgaggtaactcttctctctgtatagcagtcatttgtgaatgtcagtgtcacagatgtacttgctaattttggtacagtgtcatcgtcacttgtcattacataacttgtaagtatagaactgtgacacctaatgagtaattaggtcacttaccttgaacaattattagttctgtccttattagagagagagagagagagagagagaaaagaccagaatcagcacaaataagcttagtgtgtctctgggtgagggtgttcctgccctctcccttgtatttattctcttcttcttaatgaaatgatacacccacagtaacgcagctgatgctaaaaaacaaattaatgctaaaaaaacagtaataaaaaaacagtaacacagctcttctgcatgatcatgaaaacaaatacctaatgagtaactgtatacttgaatattccttttaaaaaaattgtatacttgaatagcccagattcttgttgccaattaatccagtatggcttactgcctttaaataaataaatacagaaaaataccaaggtatataatccatcagttcactctgttttctactgtatgtgtttgtttttgttcaggttacctctgtaaaatcaagg

SEQ ID NO: 36939 - DNA, 895 bp, Sorghum bicolor
  Intron number 1 from transcript Sb02g011430.1 (locus Sb02g 011430) derived from phytozome v7.0 (chr-ID chromosome_2; pos 18991991 to 18992885 reverse strand)
cttctcctggtatgcttctgtagccgtcctttgctagcattttttgcttcgggtgctgcgtgatcgctcggcgtggagtgtggattgccgttctgcgacgtgcgctgctgcgttggcttcgtggagcactggagcgtctccacgtttgattgttgctgcagcttgcgattagggatgatttatgcttcgtgatttgctccatgcgcttgcttgcttcagatttcaactttggctgagtggcccagatgtgaaccctggtgaagccacaggatagcagtttggtcatggttagggccttggggaactgaacttgtactcttttacttggagtaattgattttccatgttcgtagcttgaacatgactctacctctgttttgttgacctttgattaagttagctctggagcctgcaggcaaccagtaggtgtctggtctcttggtcaaggtcgtctttttgttgtaagcataagtcgcaaacgttttttacattcttgtgtgtgtgagtgtgtgtgttgtaaggtttcttaccccttttcttcttaatacaaagatgcacaaatcttccgtgtgttcgagaaagttagtgactatgctagagcagaatgcgggatgcacacctcacattttcagggcgatagtcatctgtgcttagttgttcgattctgtaaatgctttatttaggagcaaatgtacttaaagtagtatgtattatcatgtggccaggtgaatcattgttacctatgcatggatctataggcattacaagtttttttttcccacaaattagaaaccgtgccagtaccatgcttctgtcctacttatgcatacggggaattcccatttcacaatattattaggaggttaatgccttcggtttcctttgtttacaggtc

SEQ ID NO: 36940 - DNA, 776 bp, Sorghum bicolor
  Intron number 1 from transcript Sb02g018870.1 (locus Sb02g 018870) derived from phytozome v7.0 (chr-ID chromosome_2; pos 45770693 to 45771468)
gcagcctcttccaccatgtaagtcgcacaagttgctgtcaagttcgtcttctcttttatttcgtgcctttggggagctggagccctatctatctgtgtttccgtcctttccacagagatcgagaggtgttttttttgtgcttgctttttcctcgagctggccggattagggatttgattgacaactcgcttgctctctctcgcatatgttgcttctggtacaagggattaattaagatattctgttctatctgcttctggtgtttgtttgtgtgtgtgatagagtggtgtgatggcaatcagccatcgatatcttgcacaatccatctttgttgattcaagtttttcttggtttcttatgtttctatgtataattaattcaaacacatggtgaagaagaagaagaagaagaagggggtgagaattgggaaagacacaatatcagatagtatattggttagttagggattttggaaatagttgatgaggtgctgaggtaaggaaggaggacaccaaattaccaaatacatggatatggttgttttccttgtatctttcaacaagtagctagatgagaggctttttaaggatttgtcacaccgactctactatctgcttcattatatattaattaaacaaacaaagctttatcccactgctacttgcgttctctaatgcttatgaaaatgatgatcaattaattgaatcttgcttgtttcatcctctaatatattttcccttttttaatttaggagcaaggaatcagcaagctacgac

SEQ ID NO: 36941 - DNA, 711 bp, Sorghum bicolor
  Intron number 4 from transcript Sb0541s002010.1 (locus Sb0 541s002010) derived from phytozome v7.0 (chr-ID super_541; pos 499 to 1209 reverse strand)
ggtaagtttgtataaatttagctgccacccaaaggatgttggaacacaattatgttgcattgttcacttattcttgggcttatagttttctgctagaattgctgttctgtattatatggtgcatgtcgtgatttcttcagtggatagttatttttggctgtttgtttttactgttatcgaattcatgtaatttcgttgctctctgagtaatgaaattaggctctgccgttgtggaaacaaatgttgtgatttcttagtagaggcataaaaaagtgctaatagttctcattatttttatctttctcacatttatttaatttgaattaacatgtttgtagaaatgtttgtgatttgtgtttctgttcttgagggaagtcataaatatttgccaaatcttatttctgtgttagttattcaggatgcttctggattcaaagaatggaacaaacgataattcaatttgtttaatcactttagctcctttattaactgaactgtaacctgtataatgatgtgatatatgtactaactcttccagagttgcataaactgttccatattcacatgaaataggcctgcagggcaagatgcctgattttttaaaaaatttggaagacagaaattccacttattattttgatgtcctgaagtctgaacatctatgtttcatttccagatacccgaacctgaagagtgttagggagttgatct

SEQ ID NO: 36942 - DNA, 573 bp, Sorghum bicolor
  Intron number 1 from transcript Sb03g008150.1 (locus Sb03g 008150) derived from phytozome v7.0 (chr-ID chromosome_3; pos 8636562 to 8637134)
cctcggccacactccaacaaaggtaccttatcatctcccattgaatagaattctgaagaactgcagacgctccactctgtttttaagtatttacttattcaaaataaacataactatttactttcaaaatcacagttttcaatttacacttggctcatgtcaaaataacattgcaatatcatttcgaaatttacaagaattatgtcaaaattactttgataggagcgctagcttcagcaaggtcctcaagtgcaatcaaaacctaacaaacttaagcagacaaagtgggaaatatgttagcttatctaactggtctaagttcacacaaggaccacgaggggggtgatttggtctggacaagtgaatttgaaagagtgaaaagttaaaacagaggggaacacatatattcacatagctaaacgtcacttactcactaatgcaacagtgttgtttcatactgtattcaaaatagtaaagttcctttttgtttatactgtaaaccgtgactggtatctgattctattctttggatttgcaggtttacgtcacaaagtcattgcaggtactgctgca

SEQ ID NO: 36943 - DNA, 743 bp, Sorghum bicolor
  Intron number 4 from transcript Sb01g042703.1 (locus Sb01g 042703) derived from phytozome v7.0 (chr-ID chromosome_1; pos 65959486 to 65960228 reverse strand)
cgaagagctgtttattctaataagacaaggtcaaggtatttaactgttagaccattttgctacaaatttcatatacatttacggtgtgtttggtttgtggagttcaccccatgcttcatgaggtgatggcatcatgtgttcttccaatgaattttggtggaatcaacccattcctcatgcatatactaattattagcttgtcaggaatgaggtggtgatagatcaactcattccattccacaaaccaaatagaaaaagtaaggagtgagaagaaggtggaccacctcattcctcaaaccaaacacacccttagtgattatcatcaattggatgacaaacaactgaacaagtggcctttttatgctctgctccttccatcgggactatgtagcacataaatgcatgtaaccttttgcttttatgtttgttctcatcggaatatttttatgctttgtattttttttgtttgtaacaaactcaaattctctgcacattgtatggtatcactcatatcgattaagctatatacttatatagtatgctttgctattttttagatgctctttctggataataactaagttgtgtacgtagttctatttgtcagtgcaattctctatattccaatagtttgtgtgttttgtttcaccttttattttgtggatctttttatgaatatgatgatttttaacctatttcttgcttttacttttccagtcagacacaattatccagtgtatata

SEQ ID NO: 36944 - DNA, 738 bp, Sorghum bicolor
  Intron number 1 from transcript Sb0012s019770.1 (locus Sb0 012s019770) derived from phytozome v7.0 (chr-ID super_12; pos 6255218 to 6255955)
ctccgcaggggccagcttcagtacctcgtcaagtggtcggtgacgaccattgctctcccaaatcccaatctttcccctttttgcaatttccccgtaggcgtagcgcttcatcttccttgattcttgcttggacggtagtccagattcttgcgcagttagtaccgtttgagcgtggtttatagtgtttaatacaccacatttggttgatgtttgatgggatggttactctcgtagtaggttgaaagggcactggaaactttcgttttttattggttcgtgcaatgcgttttccttgtctatttgtttttattcaaatatcagcatcgctttgtttttattcaattatcagcatcgctcgtggacgtatctagtacgatgtagatgctaagtcatgaactccacattcaagaatggatgtttggcattgaagtaatttctgtgattttgaacacaactattccattttcttgttaaatagagcgagtgttgcagcatctgctatttggtggccaactttggtagtcattgagtcatgtcttcctctaacttcatgtttgcttcattaaatagattcattgtgtaatgcatagttgctccttctttccttgattgagaactataggtttgaaagctgaattttgtgtatatgcatgtttactgcatatatgatcgctgatactgtattcctaccaatttgatgtgatttaaaaggcgtgggtggccggagagtgcgaacac

SEQ ID NO: 36945 - DNA, 606 bp, Sorghum bicolor
  Intron number 2 from transcript Sb01g016775.1 (locus Sb01g 016775) derived from phytozome v7.0 (chr-ID chromosome_1; pos 16954912 to 16955517)
caaccctgtggaacagcaccaagggttttttctgggtaagcaaggcaaatcttacttggtactagcacaggaaattttcatcatggtggacctactccctctgttcaaaattacaagtcattttaattttttttaataatggcaaaagttttaccgctacttttattagacggtgtaatctatgcaccggtacaaccatgtctccatttgtaaaagaagaaggcataacatggaatttggacataacattttgtttttacttttttcttgttttcaagataatggtcggattcatgtggcagaagctaatactttgcatgaattttgttctcgcaatcttctctggtcaaggacaaatcatccaattaacttgtttgttttttgttagtgtgtgtctaaaactctccgattatgtatatggatcatctatgaggttagccaaaagcaagtggaaatattgataacgattttttttattgataatgaattgaatttctacagagcaagtatttgcaatcattcccgttttgtgagctgattacagccctaatttagaagccaatagttatgcttactaggcttcttcataattcatagggtttcatc

SEQ ID NO: 36946 - DNA, 524 bp, Sorghum bicolor
  Intron number 3 from transcript Sb03g043355.1 (locus Sb03g 043355) derived from phytozome v7.0 (chr-ID chromosome_3; pos 70711930 to 70712453 reverse strand)
ctcatagctggcaacaacaattcttaaaatatcaggtcagtttcatttctatcttttttcaatcatattgattcctcattttttattctaaaggaaatgatcctcccaaatttgtggcagtgctgttctgcactcttctgttaattagattagatttgctgacagcaggtgttttagctcttcatttactctactttggttttaaagatcatgacatgtactgtatgacatgatatagttattctagcttatgtgcatattgagtttttttttgatctttttgctgcaaatttgatctataaagcctttttttggtctgtgtatccactcttatttttgcgcttagtaatttttgaagatatatgattgtgtggagcttccttcacagtacctttaataattttggtaacaaaaaattatgttcctagattaaacattaaagaaaattactgcagcaaagttgcagaatcctagtttgtgatgctccatttacttacttgacagcccctacaaaattgcaggtt

SEQ ID NO: 36947 - DNA, 925 bp, Sorghum bicolor
  Intron number 1 from transcript Sb03g006700.1 (locus Sb03g 006700) derived from phytozome v7.0 (chr-ID chromosome_3; pos 6895943 to 6896867 reverse strand)
cggtatgcgtatctatctggctccgtagtctgtacttcctattcctgagcttctttttatttatatttattttgttgcagtttgttcattttcgaaactgaaaatagtactctctctatcccaaattgtaagtcgtttgaacacactgtaagacgcaaaattttaatccgtaaatagcatcctgacagaacaacgatgtggtcctctcttttcgcccatcgcaatcaccattcaccaaactatatatttgctggctaaatgtggacttgtggaggcttcaggcttaccttcttatccttgacttttcaatcaaatcacaaaggatcagaacaagattgaactaaatacgtgtctctaaaatggcattccattgatctgattacggccattttcagcatgcattcatcgtgtgaattggacgagttcacggcagtcagtggccttttacctaatttaaattttgttcgtctacgcgttcctgcgatgcaatgcttgtggctctgggtaggatacgatcagtttaaacgtacgtctctgtccacttacagtttgaatacgacatttgtgcatacgcatgccagcttttatacaaatgaagaagtcgtctggtgtttgccttcgtgttactggcttggagacttggagagttagtaggagattaggagttgagagatgcagattattagtcttaccagctacgtgttttggttacgaaatcgatgacagctatagtgacaatagtcatctaatttggtcatacatgcttcctgagcacgacaaatgtgtcactgtcagtttaattagtctcttacagatctataggcttggattattcagcaattgtcagagaaaaacttccatcagcttcttgattgatgccattgtttatttactgaaatcaaagtcaaatgcctcttccttgcag

SEQ ID NO: 36948 - DNA, 511 bp, Sorghum bicolor
  Intron number 3 from transcript Sb03g036270.1 (locus Sb03g 036270) derived from phytozome v7.0 (chr-ID chromosome_3; pos 64316236 to 64316746 reverse strand)
ggtgacaaagtgattcttgaagatcccattgaaaggtatgttagataagtgtgaagagtaaatcttttaagaagtctggttgtaaattttctgtgcattggtgaaatttaagtagtgaattgtgtagacaaaaatttacttgaagtatgaggttaggataaataccattaactaatggtaccactctagcatgatcatctaatcattaagcaagtaactgatactatctgtcccgctgttcaaaatacttgggtttttttgacttaggtatataactctatcacccatgagctttgcagaagtctcggctttccagtgaggatttattctgtgtttgtggataatcttatctcacgttaattatgtgatgtcctttagtcatcatatatctgttaattatgtttgtgttgagttgtaggccaatattttatttggtgacatcatcctaagttcaagttggtactaattcattatactaactgttactgtttttttttggcagttggcctat

SEQ ID NO: 36949 - DNA, 860 bp, Sorghum bicolor
  Intron number 1 from transcript Sb01g014595.1 (locus Sb01g 014595) derived from phytozome v7.0 (chr-ID chromosome_1; pos 13915315 to 13916174)
actgccagttctaaacatagcgtaagccttcacaagtttgctatccttgctcgtgttgccgcatacattgtatttttccattttgaagtgacatgattactgggttggaattagtaaacgtatacttgattttgtactttggtatccttgattcgagatatccaaaactgctaactgaatatatttaattcgactcgtcactcgtcaagtactttagtgtttctttgacatgtccaagcttaaaacaaaagcagaatgaacatgcatatcatactacctgaggaaaagcttcagcttgtcccttagtaagaggtttagtttgtttcgtgtatttgatccttcatgtgtatatcattgaacactgctgaataaactaaataccatctacatcgatcacttacacatagttgcctaccaaaacttgtttagctttacaaacccttcatggttggcaaatcatgtcagtcacaatagtgtgtaataatgcaaagcgtatcatggatttctgtgagattccccacaattgcagtaattttgtgctgcaccagcttcttttggacataactaatgtatattgatattagcttctgatggtgctctgttccacgaccaatctttactagtgctgaatttgtacatgaaatgagtataccctttcttgttttgtgccatgctagtttaaaacgtaaagcgatgcatttatgaagcatcttctcactgtagaaaataagcacattttactttacattatacatatattgtttctctggctgttacaggaatagactcattttacgtcaatacttcttgtccttgttactataggtcgtgccaaagagatttctgaagcattttgctgg

SEQ ID NO: 36950 - DNA, 867 bp, Sorghum bicolor
  Intron number 1 from transcript Sb04g031400.1 (locus Sb04g 031400) derived from phytozome v7.0 (chr-ID chromosome_4; pos 61384125 to 61384991 reverse strand)
aggtccacgtacagatcgcaggtcagttctccgctcgttatctctctctctctctcgactgacggatgtgaactatgtcggctcatcattgaggatgcgatgagaggaacgcggatgagtatcgtagattggattctctcattctctgcagtgtgtgggtagccccgatacatcttcttcttctttttctcgggtttatttcaggggtatgtacgtcgttggaacgctcaagcgcgagaggtgttcgatgaattgcctgctggtgtatggcgtcccgttgggtcaatgggtttttggttccggtattggggtttgtgtgtcatctcctttcctcagtggtcagtgcgcgtgctcatgattgttttgtgattgctgcatgagctcggtggcatgtgcgcgtgcgtccgttttcagttactgtccattcagttaatgtgtttgattggtcgttcaccagagctggttcagctgttaattacgacttcaaatatttgcaacgtttcatgaggatgtgtaggaaacctttggtttctgcactttaataaccaggcctgtattattcttttcttgtttgggaataataatgtcagctttaggggaacagcgctgttttttttttcagaataccgtggacaattttttttttgtgtgcagtaatttagagcactgtgggggttatgccctattcgtcaggaaaagcagccaagctgggttttcacttgtctaagaaacaagcgtttatagtttgggatctcctgttaccgtgagtgcttagcatttatagttgtttgccttttgtatgctgatatatgatgccttctgtcgtttgcaggatcgtccaaacctgaaacttcatctactaacgga

SEQ ID NO: 36951 - DNA, 681 bp, Sorghum bicolor
  Intron number 1 from transcript Sb06g032850.1 (locus Sb06g 032850) derived from phytozome v7.0 (chr-ID chromosome_6; pos 60922064 to 60922744)
ccgcgccgaagaaggtgcccccgccaccccgcaaggtaacagcgctcgctcccgccgccaccgtctcctcggcatttggacatacgcgtcacgtgcagtgcagtgatcttgccgagcttcccctgttctctttctcaacaaagctgcctagctagcatgaggagcgatagattttgagttgtggtcggcttgctgcttattcgcttcttagtacctttagcggccctcactgtgcttgatgctgctgattcgtttgatgttttatgctgcctaacccattgtgtcttaggaaagatgtcttttcgttaaacctttttgccacggtttgttaccatctgtcttgagatggacatgatgtcataccaaaactagctcttatcagtaattttttaagtacaacaacagtatagcgctgactcttcaatcagggagtctgaacatgttacaaaaaatatgtgatctttccagcaatgccaatcgactgaaaaagttaatgcattccttgctgtgaaagattttgtgaggtctcaatcatagattggatttaattaagcaggcacctaaaaaaacttcatgaaataactgtgatttcttccattgcccattatatgggttttgcttcattaatttgttttttggtggttattttcactgtggcagggaaggcttttaactggggcc

SEQ ID NO: 36952 - DNA, 857 bp, Sorghum bicolor
  Intron number 1 from transcript Sb06g004060.1 (locus Sb06g 004060) derived from phytozome v7.0 (chr-ID chromosome_6; pos 9204592 to 9205448 reverse strand)
acatcaagtacatcaagaacgtattgaactgcgtaagtccaaaacataaggctttatttaaagagacgacagagacctaatgatttatcatctcgttcgaccttgctagcgatgtcatttgtgaagaatatagtagaacttataacggagaccaacttatacatatagaaaaatatatatattttttaaagaaaattattggactgcagacagtgaacgacgtgctagttggcgtgacttccgcggctctctcaagatattattttcggaaaatcggtgagtgttcatcccataatacaagtcctgcttttgattgcctcgcatatactatatatgttctgacaggtttgtaatatataaggagtccaagtttaattttttatgccaaatcattttatatattcacctatgactttacagggaagcatatataacatttatatactacatcaaaaggttatagacctatatttcataatgcatctaatgatgcaaatttaatgttataaataggatggttcttttctaaaaacttggttaaattaaaggataatttgatttaggacaaacttagctagacttgttatattttaggatagatattatgaccatctgcgttgcacaactcatccggcgggtcctgcaggtgacactgatacaaaaaaggtcatctgcattcggtcactcatccctgtcaatataagatcggcacctggcctacaggtgagaacgaaccaactgtatatgggaacttattttacgtcacaagatcgatgctgcacatacatgataaatcaggaattgctgacgacatacttttcacaacatataaccgtaatattcaggcattagctgac

SEQ ID NO: 36953 - DNA, 938 bp, Sorghum bicolor
  Intron number 1 from transcript Sb04g015010.1 (locus Sb04g 015010) derived from phytozome v7.0 (chr-ID chromosome_4; pos 34204119 to 34205056 reverse strand)
ggactaccgtagcttccgccagatcactcgagatcgtaatccctcttcccagttcccatcccgatttggatttgctcgctcgctgctgctggaaatggatctggcaaaattgcttacggagctggaaataccgacatgcggtttgttgctctggagtctaacctctagtcgcagtagagaattatacggcgtagtgatcttttacctggaagggtgcttaaccttgcattgccgttgcaactgagtgatgcctcgttggttttgcttgccacacttgtggcttcagtgtgcggataccttgatgaagagagtagtgacaatacaatgagggctatgctctcctcggcactaggagccaaacattttgatacctgatagaagtagcatggccaaaatttacttggaaaatcaataatgttactggattgaatctgctgttagccattctgtagtgtttttctctcgtaacaaatcagccaacaatacaggctcatagccaaaatatagtgacactgttaggctaatagcttttggaatgtgattttggaatgtgagggagtgctggacaactattgtcttgttatacatattttatggaaaaagtcatgtagtattgcctcagaggaatcttgatatggagtgattttcatacatagttaacaattgtatggacccaccactttgcagatgctcattattaataattttctaagtatccatccaataattttgtgacatctttgctcagtatatcatatacaatcttgtttgttttatttaactgattacatatgtatcggtggaactttgcagctacttatgtttgtgttaactaatatattgcatatattgacttgcttgagacaaaggattttgttgctgctgctgttgggtttataaataatcgtgctttgacaaatgcaggtttattatttgaa

SEQ ID NO: 36954 - DNA, 905 bp, Sorghum bicolor
  Intron number 1 from transcript Sb03g009730.1 (locus Sb03g 009730) derived from phytozome v7.0 (chr-ID chromosome_3; pos 10475536 to 10476440 reverse strand)
gagtccgcttcatccgattcgccgcctcaaggacggtaaggctagccgaaatgctcggtcgtcttccttgtctgattcgtggtagttgctgcggggatctgggtgcgggatcgagaccgtgatttcttcaggctccccagttttgctagggttttgtctccacggccgggccttgctgctccccgattccatggtcgggggagagagtaccgagcccaaatcccgatctaatgattggcgccgccattcccgcggaagaaagagatgtgagcggggctgggcgtagagaaactaagcggcgcggattggaccatcaatgagtgagcgcggaataggatctataaatcggtgccttggatttctgtttgtgatcctaatcttacatgcgggttatggagactgttctaatgtttcgtcttagccgtgtacagtacaggtgactgatactcaccagcagattgtatatgcttactcattatgcgtcttacatgctttttcctaggccgcctattgtactttgacaagcatgtgttcttgtacaaaatgtcttgcagtcatatcacagtaattatgtcagcagaaattctggaggctgtttcttgagaatttttaggcattacaaatatcattatggaatcacatccataatgcccaaaatgattatcccaggctgaatgtatattgtaacccgctcacaagtcacaatgccaaccaaaactctagtacatgttttgcagtagagatcctcttcgagcacttattcatcatactgcaatctttgatatggtgtgttttgtgatagtgactagaagatgtgtgtaatttatttgcttcactgtttgcactagatgattgaactgaattacattaaatgatctgaaattctgaatcctcactttgcagag

SEQ ID NO: 36955 - DNA, 779 bp, Sorghum bicolor
  Intron number 2 from transcript Sb01g046780.1 (locus Sb01g 046780) derived from phytozome v7.0 (chr-ID chromosome_1; pos 69918270 to 69919048)
gttccctggttcctcgccgagttagtgcttctgaggtactgaattcattgcaatctgtaaatccccaaatgcagttttggctgagatgatttgacggtatgctattagaatacatatatcccttagccttagggggggggggggggggggggggggggggcctttaaaaaaattttttcccccccccggaaaacccaaaaattttttgcccccgggggtttttttgcccctttttaaaaaaaaacccaaaggttttttccaacccaaaaccgggtttgaagggaaaaaaaaattttgagggggaagggccctttttttttggaaaattttcggactttttttttccaaaaaaggcccccctttcgggggggggaggccccttttttgaaaaagtttccaagaccccccccggtcccaaattataagtcattccaagaatcagtaacaagtataacatccattttgacgtaaatgcattttaaaaagtttctttaattgcatgcatctctagctacatcttactaatatgaaagattcttcaccttttagcaatgcctgctgatgctaggtccagaaatatcatattgacaaactctacgtcactttatatgagtatttcttgtattattgtatcattaagtatgactttcataatacttgccaaagctgttagttttgctttgtcctcgtcgacgtttcccatgttatctggacttttcttctcatgtcacatttttttcccagaagaggcaacggaaactgaaaagcgcacaaaagtt

SEQ ID NO: 36956 - DNA, 751 bp, Sorghum bicolor
  Intron number 1 from transcript Sb01g033880.1 (locus Sb01g 033880) derived from phytozome v7.0 (chr-ID chromosome_1; pos 57277009 to 57277759 reverse strand)
agagtattccacctgcaaccgctgtttttctcaaggtacatccgtcactgctgagtgctgactgctcaaatttgactatcctttttcttgtcatgcatgagatgctcactgtatcataaaaccttaagtcaaactatcttaaatttcactgattttatataaaaaaaagtaatgacttctatgacaccaaacacttatattatgaaaatatatgtcaagatgttttagtgatactaatttagtatcataaatacttaatgccatttttttaaaaaattcgattaagattaaaatagtttgacttaagaccactctatctataagttaattcaggttgtgtttcatagggatctagattatttttgtagaaacatttcagatctagattacctcataaaacgttttgggtgatgaatcagaatgactttacaaaatcatttggttatgatcttgcattcttattcccagaatctttttacataaacaatcatacaaataaaaataagcttaaaaaaattcctaactttgtgtggacaacgaacaacttaaatacaatctagtataatttgctgcacttaaaaataacaattcaagaaaaatatattcgctagtgtatagccagggtggagctagagaaaatttgagaaggtgtacttaccttgtaagtgtatatatttttatagggatgtgtatatgataaaaatttaactataatcattgtttttttatttttcagttttctagtgcatag

SEQ ID NO: 36957 - DNA, 863 bp, Sorghum bicolor
  Intron number 1 from transcript Sb02g011005.1 (locus Sb02g 011005) derived from phytozome v7.0 (chr-ID chromosome_2; pos 17690314 to 17691176)
acggtggggaagacagcgcccgcagcctgttcgatgtaattcctttcatggctgacgagacgtcacttcctattcttacaaataagcctcggtttcaattggcgtgtaccgtttttgctttcaagatttgtgatgcaacttaacatatttctctgtgggcagtaacactgcattagctagcttagctcatcctccatgtcaatgacacagcacaagcacagattatgtgcgatttctttggtatggcagacagattcaaagtgtccagttaatcttctaggggctactttactgtctatgatggaaaactttatgttttctagttatgttttgttgcatatagatgcaggtttaggaatgtctgcaagattattttaccatttcttttttttttcttttaggagtaaaaccacactttttgcctttttggctgtccatataaattctcaatcgggacgatgttaagatacaatcagtatagttacaatgtcgatgctcatattaatcaacactacatactgatgagtatttatcgcattggtaagtgtactagctataagcttaccagtattattatgatagattctttggtgtttttttaatcttgattgataaatggtgtctattttgtctccactgatatgtgaagcatatacttcttacaattctctcacagccagccgtactttttctgatagccagcaatgtttttctctcacaataaatcagcgactagtactttcagccacggcttttcagataagcgactagtatctaatttgctgcgacatgatcatgatcacatttaatatgctattttgtatgggcaaacaggagctttcagttctttctccagtcgttcc

SEQ ID NO: 36958 - DNA, 920 bp, Sorghum bicolor
  Intron number 1 from transcript Sb02g024080.1 (locus Sb02g 024080) derived from phytozome v7.0 (chr-ID chromosome_2; pos 58094930 to 58095849 reverse strand)
cagtcttggactccggccgccgccgatcgcctcaagtattcacacctgcctacccccagaaacccgcgattattatcattaattattattattttctttgaaatcatataagtgtgagctgtgttggaacgtgatgaaatcgagcggttgggtattcaaacctgacgtgctgagacaattaaggaccgtgtaattttggcgggattgattatttgatagatgttttggtggtgttgatagcatcgagcaggtgcataattcgaagccttttgtttttttgttgttgtctgcattaggggaatcagtttgtcttgtagcaaaggggtaacggaaaacatggctacgttctactagtgccgggccataagtttgcatgtctcttctggagcttcttcaggattagatcatgcaaaagtgggttactaatcatgcaaaagtgggttactacaaggaaatgatgttggggactgaattctattggacccacttcacacctaatggttacaagatttgtttgaatgcttgtattggtaatgacggaaacaatcctagtttcctagatgatttgattagtatcagctcttttttgaattgtgtattgttggaaccttttctagtgatgatacagatacaacaatgcactagcaaacaagacttgatttacaaataccaaggctacatgcctacacgtatgcatgctctacatatcaagtcctgcatgctctgtatgtttgggaaaccttcaacctacaggaggcatattatcttgaactgtacatgaatgatgaaatggttaccagtttaatatatgagatggcacactagtaccttgaatgcctcatttttttattctagtaattaacttgtcttttactttttttatgcttctcaaatatgcaggggcgttgttgtactgttgc

SEQ ID NO: 36959 - DNA, 965 bp, Sorghum bicolor
  Intron number 1 from transcript Sb03g036850.1 (locus Sb03g 036850) derived from phytozome v7.0 (chr-ID chromosome_3; pos 64918534 to 64919498 reverse strand)
gtgtcagggcctgtcattgggtgagtgttctcatctgtttttcgtgtttagagctgtatccaatgtggtaatagtttgactagaggttcggcaagacaccgaggagggttcaaacttgataaccatgatctcttcatttctagcttgcctttattccaggaaccatctcactgtttaattgtttttatttagttgatggcatatatgtaccatgatcttaaaaagccagagccagtgaagtcaatactcctgaatgatgcgtgtgtggatctattgattaacgattgggaactcagaatatttgaattggggagactgagaatccagatcaacaatttgaaccggcctatttctctaaagtagagctgctccaggattttaattagaacatctggtcgccaaggcttacacattctatcagcggctgggtataaggattatgggtttttggagttgaaacatgttagttatttaatggtgttacctatggactatggtcatataaacatgtgcttcaatttgatcgttcaagttggcacatattaggaaggagcactgaagttgggttgtgtgcatgcaaagtgatatttcataacgcaaatggatcagctgatgtgtcaacatttttgaatgctaagatcaggcaaccagctgtagcttttgcttcaacatagcttgaattcttggaggcctattctagttgtacacatcaatctctatgcttatcggtgccattgcgccatctctttgatggctttgtgttgtccattctcatctagtgaatgtttgtgaaaaaagtcaaattagacctttgtctttggttctgttgttctggatattttgacgaatttgtggttcttctgtcctcaatgttgtatcttgctctctatgctgtacattattattctctattcctctctatggtcctgcttttttttcttattatgaactccatgcactatagg

SEQ ID NO: 36960 - DNA, 547 bp, Sorghum bicolor
  Intron number 2 from transcript Sb04g028320.1 (locus Sb04g 028320) derived from phytozome v7.0 (chr-ID chromosome_4; pos 58406323 to 58406869)
gaatcatccagagctactacgacaaaattgtgagcacttctgtttaagtacttttaataataacatatatgcactaaccaatcaatttggcagccgtattcatagtgaatctagtgtcagctgtattcttatcagtattgaactttgcaatgtcaaagtgtgttcagttatatgactagcactatcttctaaattataaaagcatgcttttgattagtgacctatgaatattccaccaagccctgccactacttctgtagacctgtggtctctagacacttatttatatcagctgtggtggacacatttctctgcctgaattcgcaggtagcaactcgcaagaagtatggcttgccacatgttccatgtcatgtgtagcagccaaccaaaaaggctcttggtttttgcattttctttttgagattttaatgttcttttatttcgcggattgggtgtatatcctgcattttttttgtttaagtttactgaaaacatggttatcatcttttcaggtaaacctggcagagacttctgctggtaaagaggc

SEQ ID NO: 36961 - DNA, 1069 bp, Sorghum bicolor
  Intron number 1 from transcript Sb03g042460.1 (locus Sb03g 042460) derived from phytozome v7.0 (chr-ID chromosome_3; pos 69872885 to 69873953 reverse strand)
ccgccgacgagctcaacgtcgagctcatcaagagggtaagttaagccgcgccacgccacgccaccctgatatcctttccttggtgatcgatccccgtgcctcccttcacacccccgtgatctgcgcacggccttattattgtgattgatcccgtcgagtacagtatcaatctttccgcccatttcttgattcgatcccgggtgggatctggatgcgaccgctaggtttcttgcgctgatttcgcgtgcggtttaggttgcggcgtctctaattttcttgggccggcctgttcttgtttattacgttcaaaataaaaggtatcctttttttcccgtcgtctaattcgggtctttgatgttgaatcttcccgtggaatccaaagattccggggccaaagtgggcgcctttctttgctggttttggtcggatcttgttgtgcgttctagttggcgaattgttcttttctggatctggtcatgtggcttctgtgattcatcctaaaaattgcggggagacagacaagtagtagcagtagtagtaatccaatccaaaggagagccgttatgaaactagtcaaaccccgtgcttcttggatcttcatcggcgtgagctggccttgtagaaatcattagccatggcgtgtattaatggagtccacgccggaattttgtttctttgtggtgggtcaataattgcaactgacgtgacatagtactacttcagtttctcctgctccattgaagatgtaaatgcataactaaatctagaatttggattagcactattccattttctttacaccaagaacttgaactaaatctagaattaccacgtatcaggtgtgctagatgtttcagttttttttatgctttctgtaaacatgttaaaaaaaggctgtcatttgtagagtttactggaactaatgcaatgactcagattggttcactaagcatcacattgtccatcccacacccctcaccaccccctctgtttgggtaaataaaatcttcatgagttgtattttctacatacaggctgcggtctttcactacggatcaataagcttgat

SEQ ID NO: 36962 - DNA, 708 bp, Sorghum bicolor
  Intron number 2 from transcript Sb0015s003030.2 (locus Sb0 015s003030) derived from phytozome v7.0 (chr-ID super_15; pos 227157 to 227864 reverse strand)
gccaagttcgacttgaaaaggtgtacctttggattttttttcccctggagatagtttacctcctgttcttgtactgttgcttatcattttccatacttcttttatgtagtctagtcatttctgaagatggtataatttgtaattagataaccagccaactgcacctttttttctgagctttcgttgaaattgatgtaatcttatttatcagtctcctgatttgtttgagacccagctttaaactgagcttaatgagctgagctgaaatccaaagtcattcaaaatcatgtctgttttattttaaatgaaaaacaagttcaatcggaacaattttgaaacatgagctttgggtccagccccacaaattgtgtcatgtaactcgaaagttttaatcaatgatcaaactgtatcatgccattcttgtgtttctaaagatgccactattgctggttcttgatgctgatctcctcgctacttctaattgtttcaatctgttatctaaccactttgcatcattgatttcagcttttggggactgaacctgaggacttctctgtcaactgggagaactctaaaggtccagcaggacggaaaggcctttcagctccaggaaagtttgtaaaacatcgggaatccagtggaaataaatcttccaagaaacaggtctcctttgcagagcgccctgtatcttttgtcaagtgtggcacc

SEQ ID NO: 36963 - DNA, 836 bp, Sorghum bicolor
  Intron number 2 from transcript Sb01g008790.1 (locus Sb01g 008790) derived from phytozome v7.0 (chr-ID chromosome_1; pos 7594849 to 7595684)
gtagtctgcttgttgtctactaccttcgggtaaatattctgattctcattctttttgtatttaaaaccagattaagaggcactctggaaattaccaatggaactaaaacttttggatatcctggtatgatgaaattgtcaggctcatttgtgtcatttctcatctactatatactgatgtattgcatttgttttatttaatatgcatctctttcagacattgaaattacaaatacgacggttgtatgtaattcaaagcaacaaggattagctggtttagcacttttttcatgcatacagaatctgacgtatatgattattttatattaatctaggacaaaaatggtgcttatggattcttacatatatatatgcatatgaaaaaaaatagaccgaacagaatattcactaaaagcatcttatgttgatgtacttcttttagaaggcatggttaaaggcttcctcaatacctctctttttgcataagaaggtttctatcttcaagctttattgattatttatcatgtttcatgatgaagatcttccatacttttgtttgttgtttaaatctttaaaggagaaacattcattgacagttttaatcttctctttccacttcataatggaagcatgctggtgcataaatacctttaattcatttttcttatactatagaaaagaaataaacatttgaattcagcattattccatgatttctatttttcaaagcctatttttaagggaaaacccctcttttctcattcgctctctattgcatgggtggaagaacttacctgtgtttgctgttctgttagcgttatcggtatttggaggcat

SEQ ID NO: 36964 - DNA, 573 bp, Sorghum bicolor
  Intron number 2 from transcript Sb01g010930.1 (locus Sb01g 010930) derived from phytozome v7.0 (chr-ID chromosome_1; pos 9823867 to 9824439)
aattggagctggttgaggtcgttgctgatcaggttcgtgctctatctcttgctatggttactataacatactacctccatcctgaaaaggatattaatttacttctatctctattcaaactctctatattttgattacgtttatcagaaagattatcaatatgtattacatcagataggtgtattttgaaaatatattccacgacgaatctcggtactatgctagaattacattcttttccggatggagggagcatatgcttgtaggagaggaaaaacgtgtttacatctttcaaattcatatcatactgctcagtggtcatgatcaatcaattaaggcatccgttaattgaacaggaaattatattcacaggtgcaatgcaatgatggcaagaataccttcaaatcaatacataagttctttcttgaaagcatagcattctgaactcaactacccagctgcaaaagagacatgctcttgcttgtttatcagtatgtatacctttctgaaagttaaaagtttaaaatggtactttttttttgtttcttcatcaggtagcagttgcactatctc

SEQ ID NO: 36965 - DNA, 549 bp, Sorghum bicolor
  Intron number 3 from transcript Sb03g033040.6 (locus Sb03g 033040) derived from phytozome v7.0 (chr-ID chromosome_3; pos 61451781 to 61452329 reverse strand)
aaactaaggtaccgattttagagttttcattgcagcagagaagtttttagaatactgagttatgacatcttgtgtccagttgttctctttgtttcattgaggtgccagtaatcatttttcttcatgagatttaacttgatgccatttgtattggtgtgtaatcttagcaatagtgaaaattctgaaaacaaaattgtcatacatgatatggtaaatttttattatgatagtaggtagcttagctcttggtttctgttctagatactgttggtacttttgtagactagtagtttgatgctgctaacatttcatccacacctgtcagaacttgtaactctgtccaaaatctatagtaagttatcttatttgacatgtttttgtttatatattgcatatgttgtcttcccttgaacatctttacattctattgtacgcatgagtgtgcccattattatttttgaacttatgggcccatcttaaatattggaaatttaaaatgtatgtacttctattaacagaattccattaaaattgataaaatgaagaggc

SEQ ID NO: 36966 - DNA, 960 bp, Sorghum bicolor
  Intron number 1 from transcript Sb01g027020.1 (locus Sb01g 027020) derived from phytozome v7.0 (chr-ID chromosome_1; pos 46351603 to 46352562 reverse strand)
acattcaaggtatgatcacaataatagtagtaacaaatcatgaatcattcactacattatcgtctcttgatccataaacgcttaacagttcatagccattaattactggtgcattcatgtttttctgcgactattcatctgcatcagctacttactgaaatattgtttatatagatgatagtggacatgacagttcctttgtttttttacttcctttttctttggtcatggagtaaattaaggttctatttaacatcaaattaaggttctatttaacatcaaatgtccattgaatcgagcataagaaatagatctattatcccagtcccttctcctatccctgtccttatggtctagctgtcgcctatcgactggctgatgtcgggctgcttgggttagggccatccagatcagataacatccataacatcgaatgaacagcagccaggttttctggtcttactttcttaaggccagtctcaatggcccgtttcaatgcactgtttccaaaacaaatctgctgacaaagcatcaatgaaacgaacaatgaaacaacctccacaatgcatgagtttcaccttgatatttcctaggctgggcaaagcatttaattactgcaaaatgattggatcacatgcaagatggtgaaacgatttagtcctcaatggggatttcatcctgtttcaccgcgtgggaaacaacgccagcggagtttcaccatggtgaaactacttccttctctctcctcttcgtttcatgcaaaaagtgcagttttgctgacatggcgctctaataaatgtgcatgacatcctgttgaaacctccactgacactggcctaattacactttttgaatgctactgagaattttgtggacaaggagtgctactgtgttaatttgcatggtggaaatacatgctttccaggacaaattaaaagattacttgatcgccaagaggag

SEQ ID NO: 36967 - DNA, 445 bp, Sorghum bicolor
  Intron number 4 from transcript Sb02g040820.1 (locus Sb02g 040820) derived from phytozome v7.0 (chr-ID chromosome_2; pos 74715961 to 74716405)
tacagccagaggtattctatttatttctacacacttagcctatggttttcttacatgacatgtgttttagttttctttcaatgtttgttatgcttatggtgcgcttggtgcttttaacttctgttccattgcttacatattttaggtgatgatggccactgtttggccttaacccaattaatattgtctgacattaatctttgttttggaacactaaaaacgatcaactttgattctgaagtgtaaatcattaggcagtgagcgaagaatacatgttgttcagcaaatttctttgcccacacgtctataatgctacatgatgtctgtaatgtgaagctgctgtttgatgttacctgtcacctcaatagtatacatggattatcatcctgtttcataatggtcaatgctaatttattgttacagaaagcggctgaaagaggaggct

SEQ ID NO: 36968 - DNA, 719 bp, Sorghum bicolor
  Intron number 1 from transcript Sb02g025963.1 (locus Sb02g 025963) derived from phytozome v7.0 (chr-ID chromosome_2; pos 61010439 to 61011157 reverse strand)
caccggtatatgctgttcttcccaactatgcattttatctcttccacatctctagtttggctggatcgaaatagaagctgacgaaaattgccttatactacgtcacaatgggaaatgattgaacagtaattatgtgtcacacctcatatgggctgggcatattcgcaagaagttagtggcttagtgcctaattgtgttccttgtgttagtcacttagttgtattacttttgtgtatacttgaggctgatgtactgttctaggaaatgggtttctaccagtatttgaaaaaaaaagcatagcattactattcttctagctgtagtctagtttaggacttttgagctactgcattttaatcccttctgtgttgctatttaaacttatatgtatggtttttgaagtgtagtgaacctttggaaacttataaattgatcatatattccttgaaaaagggctcgcctctgtttgcacctgtgggctgtggcccaatcatattgttcttcaggtgtaataaaacgtggcttaaaaatgtaaacaatatgaaagatttctttcaaacagaaactatgtttgattgtatctgtcactaccttacttctacggcctgtgcccacttcctgaaaaaataagtgaaactcatccatgacttctgattgatgtcctgtattctagcttcagttttctgatattatattctttcgttttattttccaggtaa

SEQ ID NO: 36969 - DNA, 1043 bp, Sorghum bicolor
  Intron number 2 from transcript Sb02g030750.1 (locus Sb02g 030750) derived from phytozome v7.0 (chr-ID chromosome_2; pos 65750845 to 65751887)
gcaagacgttgttgccatattgcaggggcctcgaggttggttttcctctccttttacaatcggagaatctctgaacttaacatattttcgttttctttttgtcaatggcccaatgcagctgccagcatgtgtatcttatgtttctgttaaatttaattgtacatgtagtgagtgattagaacatagcacaggtccacgaatttcttcagattttgctgtagtatagtataccaaaatcatgggctgaccaatgagtacccctctgcatctttcccttcatgcaagattatcgatatcgacaaatcagcaatccacatatctgatgtaggaacaggatctatagtttagaaagatttatgagcactgattccctgattaactacacggacacatgataatgctagtgcatatgcaaccctacaaggagagacatattttgttaccctcttagcaggagggacattcccttactgttgcccttgtgtttgctattccttgtgaaagtttcttttttcttaccaatgcaaccattttatattgagcttttcattgagtgttgacctccttttgagtgttttttcttttttctgcctaccactagcaccatcatcaccgtatgaaaaaaaaaacaatcttgatctaaccctgtaatttgatctcaccttttgactgccttatgcactacaaagaatcactgctttgattcctaatcaccctgagaagattcatcagcacatatgacttctgtgaatcctttggctcaatcccactgaatacgaatgactggtaaccaaaaacaaagctgatgctttgctctcagattctgttcttgagaatgctgtgctctttgaatgcaatgaatgaactttacacctccgaatagtacatgtaacttttaggattcactaataaggtgtatcgtacattttacattttctatctgttgaagcttctcatatgataagcttatgtgcacagtcctaacaggagtgagaaatgtccctgcagttattggtggacagcagattggttgagagaaaacc

SEQ ID NO: 36970 - DNA, 800 bp, Sorghum bicolor
  Intron number 1 from transcript Sb05g025220.1 (locus Sb05g 025220) derived from phytozome v7.0 (chr-ID chromosome_5; pos 58437491 to 58438290)
caccccaagaactacggccccggctcccgcgtctggtaactttcccgcgacgctcggatcctctgttcttggcgcttttcagatgtgaatcgcctgcttgtgatatgtagactcgttggatctgttgaggttctcactcgttttgatggttggcttagccacctcaagtttttggattagggtcgtatgtccttgattattttggttgctgaaaatgggtgttctttagatgcgtgttgccgttattgctgcttattggacagctcgtctacatcacaggcttaccgaaatgattcttgaagtagtttcttggattagcgtgttattacaaccgagacatgatgtgcagttacaaccagagtcatgatgtgcaactcatataacccctctttgtgaaaaatgcttgcttcttttagttttgtatcagttcgatgtaggtattgtaatttcagctggttatgtctagctgctgctttcatctgccgtttgatgattaacctatttatggcaggatagttgtttcataacctggttcttattttgctgctcaatggcagcactaattgttttattaatgaatgagtttgtgctcttttgtgtatttatgcctagcctgtgcaacacaaaagggttactgcttttaaaggattatgttctgttaaaaaaattgtaaaatggaccatttttacctatatatgcccaaagagtatgctttttctcaaaaaaatatgacacaacaaaatggccttggtaactctgaacatggttgtgtttttgcagccgggtctgtgcgaatcctc

SEQ ID NO: 36971 - DNA, 333 bp, Sorghum bicolor
  Intron number 1 from transcript Sb01g036620.1 (locus Sb01g 036620) derived from phytozome v7.0 (chr-ID chromosome_1; pos 60239290 to 60239622)
ccgcgtcccggagttctttcgcgtcgccggcgcaggtgaatatagattcatgcgttcctttcaagtttttttttcttctctattttcgtataagttcattcacgcgtatcatatttttttctcgaagtttttgcgattatttttacttttatacgttcctaaaatcatatctagttttcttttcttttcttttgcttggtctactcttagaagtttctagtccgtttgaccatccaaaaataaaatctttgattccctaagtttatataggaatataaaagtgaaacgtaaagagactaatatgatctgatctttgtttgtccggttactcag

SEQ ID NO: 36972 - DNA, 1031 bp, Sorghum bicolor
  Intron number 1 from transcript Sb02g033930.1 (locus Sb02g 033930) derived from phytozome v7.0 (chr-ID chromosome_2; pos 68461403 to 68462433)
tacgacaagttcgacaacacctaccaggtacggcggcccgcacgccttcttcccctgctccgatccctatcgatccctcgagtgctgttcgtgtcatctcgccgcgccggggctgggttagtgggttggatccaatcgggcgggccagatccagcgcaggaggatcggtaggtcgatgtggatccggggcagggtgatctatcctgcgcccgattggatcggggtggttcggtagttacaagttaggcatagaaaccatagctccacatctatccttgtttcttttctgggtctgtgatgatgctgtttcacgaaacaatggaatgctcatgactcatgatcaaggaggatgaattgccttgtctgtacctctactatcgttgcgattattatatgtgaggcgtttcattgttcgcactgttcttaaaaggtggttgttgtatggtcgattgcctgtttggatcacttaagtgtgaggcttatgttataatctgggcttgcctgatccagtggtgatggtatattggtatgattgcctgattggatcacaggtccttcacattgttctctgggacgcctgagcccaaatctttgtgtattggaatagagatcgtgatgtgaatagcctgccactgaattattgtccttgtaatgtaaggaagacaagtattttttttttctgtattactaggatgctactttgacaagggatttctgtcatatccatgggcttggcccttcacagtaggcactaagcatggcaacataactttttttagtcactatttatgatttggaaatcttaagaaatgtaagtcacaatggattctgactgctgctttgcatgtgttttatggtgtgctgtattgaatgttggagtgattattttgagctttacaactatgttgatttcattcatgtaattttcggcttgttatacagtaatactggttagtctattcatgtttgctcaaagttgttttctctggtatgcaggctacaattggtattgattttctgtcgaagacaat

SEQ ID NO: 36973 - DNA, 355 bp, Sorghum bicolor
  Intron number 3 from transcript Sb06g012940.1 (locus Sb06g 012940) derived from phytozome v7.0 (chr-ID chromosome_6; pos 35656974 to 35657328 reverse strand)
atctcggtaagcatggctgtgtgatttgttttcaacacttgcttgttccgtgtaatgcaaagtacactgtagcaacgataagcatcatgctgcagatttgcttaatggactcaattgaatacaactggggagaggaaacatcaaatatgagctctgagtttatagcttgtaaatggcagtgtctcctttattttctttacagattcttcttatgtacatattaatcattcattcattttgaaatttgtttgttactgcggtggttcttcgctcagtacaactttgaagatggttctttgctttcaaacggttatttgtttcgagtgcatcactcacaataccattatgtgttcag

SEQ ID NO: 36974 - DNA, 923 bp, Sorghum bicolor
  Intron number 1 from transcript Sb02g019480.1 (locus Sb02g 019480) derived from phytozome v7.0 (chr-ID chromosome_2; pos 47268369 to 47269291 reverse strand)
cctttaagcctccaaaagtgaacttccaaacaaaagtgagctggtcatattaatatgatttccttccccttttgatattcctttatcctgcacaagtatttgaacctctattctgtagccaatagccatggttgcccatgaagttgttattgacatactaggcaataggagtggtctaaaattcatgatgaaaagcccccattccaaaatcatatcgaaattgtgaaaactctttctctgttgtgcaaaataaaacatgctcaggttcttccctatatcaccattttattttcaaaactttggtttttcttcctaatgtgaagtacatagttaagatcatgctgaatctttaaattattcgtaataaccccattttactttcttcagcagttccatagagttattttcttcctgaactttggtcctagtgatgcttgaactgcaatggataattaagttgtcatgtggcagaactcaaatatgagtacttcctagcatcctgaagttcagacatgaaagtgttttgctctcagcaattgttcactggccttgctatatgcagctgaaataatgttgatttccttgagtttcctcctaaagttttgaagcctagagtacaacaggtttcacaaaaatagttaccaacagtttgtagtagtatttctgatatattgggcagaatggtcgtaatctaatgcaataaaaatagcatggaaaattttctcttagttattagtcaaaagaatctgccattctagtagatcaccttcattggtactactttgtatataaacttgcatactgagacaatctgaactgttccacaattctgattctgtgtaaagctatttacccttgaaactaattcaattgattgtttcaccgaaaaaaaatacaggtttatcacccaaacatcaactcta

SEQ ID NO: 36975 - DNA, 847 bp, Sorghum bicolor
  Intron number 2 from transcript Sb04g024360.1 (locus Sb04g 024360) derived from phytozome v7.0 (chr-ID chromosome_4; pos 54105656 to 54106502)
ggcacaaaaatagagctacaagaggtctattttctttttcttatcctttcgatcagtcatgtgtttcagtgaataaacgttctatgaaatatgtttaagtagtacatttgtggaaatcataataaaccaatagcaatcaaggccatgttgattgaaatctgactatcagcatggaacccaatgtagatgcagtttacgttgaaatttggctctcatcataatataaatcacgtttgaccattttgggtgcttgtgcacaaggtttgggctggttggtattatttctttttctttcttttttttacatttgattatgctttatgggagctatatcgttaagctcggaaacacaatgcttattgacactattttgttctatctcagggaaactattttattctgtggtttaccttttgttagctacaactacaagtgcttacgtcctaaccagttgcaatgacataagtttgatctttgatctgatatacttacaaagatctattcgtacatatgtaacggtgtacctttttcatatttctatattacatgcagtattttgcctatcgttatattgcacatgaaaaaaatctcaaaataggatctatgggagctaacatatatagtgaaattattcaaataaaatagtgtgttatgcatgcatgagactgatctatgataaatggtgcacaatcaaaccaagaaaactttttggtcataccatgcagatatttttagtatgtactgtgtagttgtcatctatgtttcttattatctgagaaagatttttaacataaataatcctttctacctatttctacagctaccaaatctggttcgaaaccagagg

SEQ ID NO: 36976 - DNA, 873 bp, Sorghum bicolor
  Intron number 1 from transcript Sb03g026710.1 (locus Sb03g 026710) derived from phytozome v7.0 (chr-ID chromosome_3; pos 53583043 to 53583915 reverse strand)
aactcatcgagagcgtccgcgtcctaccccgaaaggtgtgcgtgggtcttctgttggatttgtagtataattgctagtgtcgatttgtctgcgacgatggcttaggggttactgcattttttaaaagcttgcacaactcaactgaaggactcgcaggcatttttgtgcaagggtgtcgttaggagacacggatgtgtgttttggattgaaaaaaaaaattctgttacggttctataattgctccatttcttggtgaatgtttaagcttgtctatgaagacggtgttgacttgttgaggaatgtggaaaacaagattgagcagtggctttacaaacggtataaaaatacaattgaatggcagcgtgacctaagtagtttgttgaacgtcagttgttacgctggttcagaggtatctgagcaaaagatctgttagattagtttattgaacaagatgatgacaccccttggttgaatgttgtccctgtggttatgctttttcattgaactttgatctagttgtagaaaacatgaaattgaccaataaactaagacacttgctttaagtgagctcacagtttgcattacgatcgttctggaactgtctgatctgtggcatccatattcaattggcaattctcccgttcagcaatgccttatgcaagcggatccatttaatttcagttctttgttctttgggtaatcattatttgctgagtatgattttgaattgtttgattgcctactgtctttcttggccttctactaggtgatggctaatccaatgtatgttgcactatattaccttctatacacactagaagaattgcgatgttgactaatgtgggatctgttgggacattcaggtacacctgc

SEQ ID NO: 36977 - DNA, 845 bp, Sorghum bicolor
  Intron number 1 from transcript Sb04g002260.1 (locus Sb04g 002260) derived from phytozome v7.0 (chr-ID chromosome_4; pos 2041530 to 2042374 reverse strand)
cccatccttgcgctgtaagggcgcttcgcgtttcttcttgcgttgcttatcttttagctctgtctctcgtagctgaattttgcttcgaggggaggtggaatttagctaccatttgaatgaagcgtcatcttttagcacaatgtgattgtgagctgcctactgcttaggccatagagtggatctgacatctgagtgttccaggaaagggagctgtgcatagaactgattcatcctattcctatgtgattttgatgacagtttgagaacttggttgcagtggaaaactgttctgacaaatagaagatgaaaatgaatgaacagctacattgaagaaatattagctttagaacttttcagcctgtgaaaattagtattctgctggtgtgattattaacatttcaggttgtgggatgttgggattatttgcagtttaccaatctatggaaattagaccagagtgggacttcagggtccagtacctcatcattatattctcattcctgaatgcagtaacgaagaacttcaaggatcattgcttattctaacatccccacaatatagttgaatttaggcgactttggagcttacaaattgcttcttgtttgggatttctagcatcaatagcacaaaacctcttttaagtcattagttagttttcaacaagataagctggggattgtcaatatatcatggtgatacttaacaaggattcactatctcattctgagagcaaaaatagaccacatgcatgtatttaagcattttacatattcagctgtcatttcatgtaaatattactattgctttgatttctgatgtttcacctgtctatttgcttaggtact

SEQ ID NO: 36978 - DNA, 871 bp, Sorghum bicolor
  Intron number 1 from transcript Sb04g037880.1 (locus Sb04g 037880) derived from phytozome v7.0 (chr-ID chromosome_4; pos 67463183 to 67464053 reverse strand)
caacagttggcttcgcttggtgagcttccatggccttgtaatttcacttacataccctatgcattataataattgattcatatggcttatatgtactttatttgtgaaactgaatgaaatgtgctaggcaattaatggtacgtttcaatctctgtaacgtataacttttcgcatgatcgcattgcttcttgggtatgtatgtatatgctctgactttggccgcctattgagttatgttggaccttccttgaatgatgaatccagacacattgcatattgttgtattaagatgaaagctggacttagcttatatgttctatctagcaactggatcaactctgattaatgtgttctgtcgcacctgtgcttttggtttgtttcatacgttacatcaactgcctgtcttccgcaccccatgattggtaggccgttattcatctattgccttctggaagatataactgtaatcatgatacaatcccctcgtgttctgttttgtttacgtatctgttgcgcgacctactcgggattttattctgaatttgagtaggtcctgacatgtcgtttaggcacccttttttgtcgttttttctaaattgagatcatgaattcaatgatcttgaattgataacatattttatattgtccgctggctctgttatgtcaagcaagcagttgacctcttttactaccttgtctcttcccaaaagaaaaagaaagaagtggacccttttcctaagtagcttttttgttcttttgcgttctttttttttgttatgcatcaactgctgattttgtatctttgtcgtctgatgaaattcaattgtcttgtttaggaaagtggtttcttggctctgttggaacaggtttt

SEQ ID NO: 36979 - DNA, 1009 bp, Sorghum bicolor
  Intron number 1 from transcript Sb03g037670.1 (locus Sb03g 037670) derived from phytozome v7.0 (chr-ID chromosome_3; pos 65619400 to 65620408 reverse strand)
ggagccccgtgcaccgcctcatcgagcaggtgggcgtgcggtgagatcgatttgcaattttgttccgtcttctacttttctttagctgcgatgctatgagacattgagactcgtacttcgcgaattggttgtttagtgtgcttgggctttacccataatgctgaaaaagttcagcacatcacgcggattgtttgctggttggaagtggggtaattgtactatgctactatccttgtctcctttatgatgtatctgctctctgatgctttggaacttcgaaggcttggagatgctgctgaaatgggatgtgaacttgtatattagatctccactagaggtctagagctggtagactccaatctgctgtagcatgggtcagctactggcctacttgctttcagcaatagggcattttgaccagtgggactgtatgcaatatgctcatgatttttcgttatctaaagtttctcctgtcaggtgaatgcgatttagattagagtaccatggagtacattttattattaaaccagtttcaaaattcctttttaggaccataaatgacccttgccattgttttgggtggcgaggcaaaattcatactaaaagcagtgcactttgatttcagaattctagctacggatatagtattagatcagcatttgattctacaaattggattaaaaaaatgatactacctccattctaaactataagacgttttggcattttagatacatagctaagagcttttgctttgcacttagatatacactgtggctagatacatagtaaaagcaatgtacctagaaaagctaaaacgtcttataatttggaatggagggggtacatctcttacatgctacagttcaaggcatattgtgttacagctaatgatcatgtgtgtagtcgtgtaattaaatatcacatattcatctgtccacacaatcaaattgtttctacattcacatttgcagcattctattgactactggctgtgggcggatctcat

SEQ ID NO: 36980 - DNA, 964 bp, Sorghum bicolor
  Intron number 2 from transcript Sb03g043810.1 (locus Sb03g 043810) derived from phytozome v7.0 (chr-ID chromosome_3; pos 71065157 to 71066120 reverse strand)
gctgcaggttcaatcatcctccggataggaatctggtgaatatccgcctttccaaactctgattacatgtcatatttgctttgaatcaccagatgttttgtcattatccagcatccttgttatgtacattagcagcactgttataaaccatgtgcggttggaagaagttttatccttgaaccgaaggcacttagattttttccctttctgatgtgtttcagttgcatcacggataacaatgcaataagcaatgttttaaaagcaaagctgtgatgatgtgtctatatgatcattattggtatttaatcctttttccgtgggaaaacatacaaagtattggttccagtaggttgatgataaggttttgagtaaggtgcttgtcagtcttatttgcagtttgaagtttctggtaacccgcaagtatgtcgtctgttgcacatcacacaatttgtaaaaataatccagaaaaatctgtttttaaccttcagggtatcagtatattattttcccttgcctcatccgcctatctgttctattattggcagacacttgaccatttgtcccatgtgacctggtgctgtctgtttgtttaatcttttagtccctgttcggctggccgtaaaagcggctgatgctgatttaatttaaacgttcacatgacctttgaagcatagtttatgactactgtttgtggcaatgacttattgatgagtctgccagaatagcccaattccacattagcaaggttaatagaactgaggcagctgtttgtctcatagtttgctttttagttactcttgtgggctgtgacgtttgtgttttttagtgatgctttacattggttggtgcttccttgcaaatttacgtctttatttactaattgttgtttttttacttcatatcccattttctgttctcaagttaggttgaatctgtttaattttaggctattgcctctgccaga

SEQ ID NO: 36981 - DNA, 810 bp, Sorghum bicolor
  Intron number 6 from transcript Sb01g034020.1 (locus Sb01g 034020) derived from phytozome v7.0 (chr-ID chromosome_1; pos 57431732 to 57432541 reverse strand)
gtagtggcatcgtaagtcatatatcaagccctgtttctttccttttgttttttcgtatcttatttgtatctccccattgttttgtccacacctgtacatgtttgggcctaaccctcatgataaatactagtgctgttcaagaaccagcccccccccccaccacacacacacaccaccttctacaaactgttcatagtcattaaaatgtttaaattactaacggtacagtggcgtattgaagggctggtgacacagggcatttgcctggcctcgctgccatcgaacattgcagttgcagacccttagactgcaggcaaaacaactctgcttgtgcagttgtgtacatggtctatgttacaagtatgttaccatacttaggcttcgtttttttaggaaaaaaaacatgcttaggcttgtccaggctctgccactttaaagatatatgactaatatgagtatatgattttattagcttggccaggaaacatgaactaataatcacctctagtatcttactatcttttatcccgtgttttgcatatacaatttcctctattattattttactagaaatggcaagcaagaaacatctatgaaatgacttcttattcttcgcagtttttatttgaattaattttgacctttttgtctagaaattctttgcttattgttttcagtattgaacctatgctgccatgtacaatttggaatgtattactactaattttgaaagttcagaagttgcaatgtacaatctgaaatcatcttcccattttaatgatactaagaatttggcacattgtctaacag

SEQ ID NO: 36982 - DNA, 971 bp, Sorghum bicolor
  Intron number 1 from transcript Sb01g028360.3 (locus Sb01g 028360) derived from phytozome v7.0 (chr-ID chromosome_1; pos 49477500 to 49478470 reverse strand)
gaaaccagtaagcctccccccgcagcgatcgaacacgggccgcgttgcccccatcccgaggagttggttttgcagcgatttcgatatggggttcggccatattcatgttaggtttgggcaaaaggcggcgcgccttggtagatttggtttcggctcggctcctgttgcaactgattcgctatccgatttgattgactgcttgttggtcctcgcgattgcggtatctgatcatatcgcgtgcccttagtttcggttgcaaggtagaggagaagcaaagtagccacacttcgatgccacgtacctcgcctttcggtagattgcaagcttccttcctcttgcgattgtctgacggaaagtagggggaggactaggaatctcactgccgcacagctgagattataatttaattaggacagccagtttaatcatgaggcattcatattacttgtggagttgggagcttaaacacgatgagtttgcgtgttctcactaatgtttcttattcatactccaggattcagattgttaattgagttctttttgcaaccatgtagcgcacattaagctgtatggcttttgatatctttgtcttataaggcatccttgttctagcatacatgttagaactcattgggtcatttttttttaacttcagcccattgtttgtgacctggaagaaggttgccaatggttcagaaccacgcctcaggggatgcataggaaccctggagccccgtcagattgtcagtggctttaaggactactccctaactaggtgactattgtttcagtattgaaattctgtctgatttaatgctgaaatctgctcggcactcaaaacattgatggatttatgctgtaataagtagaaaagcaattctgcactttgcattggataatgtttagatatacggtaagctcgatatcctctcacagtgccctgagggaccgacgctttcccccaatacaat

SEQ ID NO: 36983 - DNA, 731 bp, Sorghum bicolor
  Intron number 3 from transcript Sb0013s012240.1 (locus Sb0 013s012240) derived from phytozome v7.0 (chr-ID super_13; pos 3820529 to 3821259)
tcgctggattgagcgtcgcggcagcccttgcggaggtaagggcatggggcactgcgtgctgcactccagctgaatttgcaatgttttgttagtttcttcttctgtttaatgtgcctgagcctcagaaaatcaggtgattggcagaccgatcaaaattgtccatgtccatgcaccatcgttgatggtagtgatcctcgttcctcgatcgcgaggtttagttcggaaatcaggcttccgtaggcttagcaaattgcatcatatccatgctgtcacttgtttggtaatctgctgcctgaacgtgatcaggtagaaggtagtcatcttatgggatggctagtattaaggattctatctctattctatggttgaattattctgcaacacaaaattatcagtatttgagtttagctatatttttttgctcttgttgagtgagatcagaattagcattcctgttaagttattcgagataccttctgatgctacctaaaaagtggataaaacaactactaactgtggtggcttagtagtttagttgtgatttatgaccccctacttagtatgaatggatggaaaaccatactatgtgctgtatatgttctacagcacctcatattctgtgcctgcctatatcagttttagtttccctcttaaatcaacctttttttttgtgcctgctcacttgctttttttctgaaaatgttcataatcaacacaggtttacaagttga

SEQ ID NO: 36984 - DNA, 743 bp, Sorghum bicolor
  Intron number 1 from transcript Sb06g005640.1 (locus Sb06g 005640) derived from phytozome v7.0 (chr-ID chromosome_6; pos 14110513 to 14111255 reverse strand)
tatcgcgctcctgggtcgtcttcctcctcgaccaggtccgttcttgccttcccgtctctgctctactcacacttttcacacggttgtggtagcatgtttgagaatggttctttttttttccgccaacatcacgtgacgaattttacgactaatataatggtacaagaatttttttcttcatgtttttggtatattaattcttgttgttgtgattgtgacttactcctgcaataattaagactgtgattactttgatgatgttggggctctccttgcatcaagattatgtgttacattcggctgtagtttccgctctcttggactctggaaagaggtgtgtcaagggattttagaagatctgttccttttacagaactcatgcgaaactcgtgcctcaacaaacaaattaacacatcagactgaaattagctttggcagagactatgacagcttaattatgcgttggatttgtttgatttctgtttacatccatttttttttgtgcctcagtgtttcaacaagcatccattaagcaaataactgcacacttgattcagtccgtcatatacctgttgttaatttcataatttcagcagtgtatgctgtcagctcctgtgtgcttgctgtgagatccctgcaagagagtactcgatgaccataatactggtgatctgaatgagattgatccatggcatgtttattctgcaggtgttcacgtacctgatcctggcggccggtgccgc

SEQ ID NO: 36985 - DNA, 888 bp, Sorghum bicolor
  Intron number 3 from transcript Sb06g033150.1 (locus Sb06g 033150) derived from phytozome v7.0 (chr-ID chromosome_6; pos 61182989 to 61183876 reverse strand)
ttgatcgatctccagggcaggatagttactctttggtgagtccttcattttactgtttgttccgtttacatcctgtacaagttattatataaaccaaacatttaccatctattctggttattgctgcccttctacatttacaactttccggctgttatatattgaacatgctccttacagaatcaagtttagaggagcgcatggctaggaataaatagataattgatgtcattttcaactactttatgcactccttggagttgttcttagcctaatatatttttttcatatcttttattatttgatctgcataagcagggcaccagtggcatttttttagtatgaagcgtgtaaggctataactatggtatttgtgactggggtcatgtaatcctttatttgctcaacattttaaaatttatatgttgagttgaagcatgaaacaatgattactttcttaaaaagcataaatgcagcgatgcttcaacatatttacaggcatagcgccagtagatgtagttaattctgatatttcggtcacaaaccagagttcactagtagatttgttggttgaataatttgagtggtatgtaaatatcagtttttgcctatgttaacgattatatgtcgatttattgataattttgtgacaacaggtaacacaagttaatataaatcttggagaaatatagagtgcttgtgaattcccaaagttttggtattaaacttttctggcatcgattcacaacaaccatagctgttgagatctgttaagggaatactaataaattttgttttgtaaattattgtttgcatatggtttgtgacatacggataagcttcagttattcaatgtagtttttgacgaattcagttttccatgtagga

SEQ ID NO: 36986 - DNA, 537 bp, Sorghum bicolor
  Intron number 1 from transcript Sb04g021420.1 (locus Sb04g 021420) derived from phytozome v7.0 (chr-ID chromosome_4; pos 50476513 to 50477049 reverse strand)
gcgtcgttcaagcaggctcaggttgtcaatcaatcttgtcttgggtgatttatatgtagaagaagaattcgaccatttaccccgaaattgcaatcgcggatgtattaatctcatccatatacagtgtttgtccacggaagaagcaatttaccattagtttctcctgcctgttccacggtttgacggtaataggagcatgaatgtgattattcattacagtggctcgtatacggtgaagtctgtcttcaatttacaatgcttcagatattgggtagtgggtagctggtgtgagtctggtacaacattagatgtagttgaacgtagcaatatagttgagagaaaaccgacaattgattatgaattgcatagatgtattgtactgtatgaatcatccattgtgttcaataactattcccaaatcaaatttgaggaaatgctcacttatagtgataatttttgttgaattattttgcatattgaggttaataggggtgatttgtaggctttagctggtggacccttggtacaagcccggaa

SEQ ID NO: 36987 - DNA, 886 bp, Sorghum bicolor
  Intron number 2 from transcript Sb07g000993.1 (locus Sb07g 000993) derived from phytozome v7.0 (chr-ID chromosome_7; pos 881832 to 882717)
ttccagtggatcctgttgcattagaaataccggtgagtattttgtgctacacattgcggtttctttcgtttgaaatacaccacaactcttcatctgttaagcatgtccttcttgtccagtgtggcacatcagcaagggagaaccaccctgcaaaactaccccaggagggtaattaaactgtattgagtattgactagataaggtgcaatatacctgttttttttaagcttcaccaaagacttatgccttccagatgaaatgacaaataggccatagcacattgtagtctcatcctttgagaagttatggtaatactattgatcgctcacgctgtgggttcagaacttcagatacaatttccataaatgtgtgtcaaattttttgttttcccttagtctctgtcttttggtggattgattatgttatatatatattgctaattccatctgcaaggatctaagttttggggtagtacattcaatttgtcttttttcttagtactagtattatgggaatgcttatctaactaggatgaaagcttcaccttttcttatgacactgggagcaaaaccctatcagggtagattaactttcctgtaacaacagtcctgcatcccattctaggtgcatattgtgatatatggaacctagataagagggtaaggaaagctattgcaacctcaaacgtggataagttcagctgcagtttttattttccttttgtttcttagatttctctgtttatgtctcctggcctttctcttaacccaagtaccatatgcttctagatctactgctgttgaaaatatatcttttgccggttcgtatttcgttcacttcaccagtttcccaaccctaaaacatgcaactttgtaggattattttg

SEQ ID NO: 36988 - DNA, 857 bp, Sorghum bicolor
  Intron number 1 from transcript Sb04g004900.1 (locus Sb04g 004900) derived from phytozome v7.0 (chr-ID chromosome_4; pos 4698552 to 4699408)
gtccgccctggaagagctcgccgccgagcgcagaggtcacccctttcttttttttgccacatctctccgcgtactttcgaacagtgctcccgttccagcttcataccgtgttgttgcttagagctggcgcccccgatttgtcccgttcacctcattgtgtggcgtgcggcggcgagtggagttagaccgcccatattgaaagcggcgtgccaggaaggagatggcgtggtgcgcccgctaacgcaacgggcaacggccatggtgatgtcttcctgtttgctgaaatgcccccaagggaagagtgcgttgcttgcagtgttaacgcagcagcgaaattgcgtcatgctagtcgctaggtgctaggttcacgtgtacaggggcgaggcgcctgattgtagcttcagcgtatatttagagcatttgtcaataaaaggttcgctcatgtgaggaccgagaactgccgttgctaagattgcttctcttaatcaccagggacctggggatttcttcaaatccgtcccttttttttttctagacattttctctaaactgctttgctcctgagctgcatatacatttcgcatcactttattatttgacgcaagattaagaaacaacgataccagcagcctaaaacttgacaataagttattctaaatcattttacaaaggtcagccttctccaacgtcctgctatagtgcatctcattcagacattggtgcactgtaaaaccaaacatctttttgattgggttaatagctgtctgttgttattacttaaattgaagtaaaaactagctttaaaaatgattccttgtttaggtttggcaaaggtcattttaaagaaggggaagacc

SEQ ID NO: 36989 - DNA, 891 bp, Sorghum bicolor
  Intron number 1 from transcript Sb02g007860.1 (locus Sb02g 007860) derived from phytozome v7.0 (chr-ID chromosome_2; pos 9875793 to 9876683)
atctcgcgcgcctgaagcagctgtacaccgataaggtatatgcatcgctgtccttttcttgatttgcgtagctaaggaacttgaaacggatccttggaattgcaaagaaccacgcaatgtcggactggatcttattgttctggaggtgttaattcggtaatgactaatgagaaaaacatgcgtggtcagggaggggagaacctggcgtttataccctgttcgtcatgctcaatagcgtgataatatttgagtcagtggctgcaccgaaatccaagattgttatctgtatctgtaattctgttttcatgggattgtctttgtttgcctctcttatctggacacatgtggcacttgggaagttcagttcgcactaatttcttacaattcctaaagttgcattgaggatgtcacaaggggatcatgccacattaccacttaaaggtttgttattagaccttcctgatccttagtgcataacgcagagagttcctcctcttattaaatcttggtacctgttctatgttgcggttgcaaatttaaatctcaaacactttgggcataaggattactttattttctgccacttcattgcctgagattgtggaggttgattacagagttagtttaagttcctattggttcacttaattaggaagctaggaatattcaggaagtgtttccagagtgttacatgatcaaactgtatgaatgatgggttcagtatgtggtgtctttgatatcattgttttggccttttgggaatgtttctgaatacataagtgattggctgaatagattccttacaaatgctgttgttatgcttgtctcctgagagctctaacaattttttttctcaaaatgcttcagcctgtgggtgggtctgctgagaag

SEQ ID NO: 36990 - DNA, 981 bp, Sorghum bicolor
  Intron number 1 from transcript Sb02g038320.1 (locus Sb02g 038320) derived from phytozome v7.0 (chr-ID chromosome_2; pos 72602411 to 72603391)
tccgtgcacgtcatatcctgtgatagcagcaaaaggtgcagaggtgaagagtgaaactggaatgctacatataacttcacttgcattgttgttcatgtggtggggtgggagtctgggtgcctgggtgttactctgtacagagttatcgattaccactacctgtcgaagttagttgaacgaactcaaaactgtgagtggactatgagaatccttgtgtctctagagcctattttctcgaacaacaatcctatgaaaagattttaggcttgtgacttgtagagaggcacagctgcacattgcacatcggagtttacttccgaactattatccaccaactgtaccttcctccaaacttagtagtttgcataatacattgcctgctctattttgaggcgctggataggtgatagatattgtttctgagcttgtgcatttgttgtactttattcaatgagcttaaactacatgattgctgggaaatgattggtaggctatgctgttccaatttagaactgtgaaaacgaccctacataaacagaacgatctgcattgttacagttgccagattggctactggatctgtactctaaaaaaacttgacctgcaggggggtaagacagcccccgggcattgcattaagaagaagaccttctcacacaggtcgagaaaaccccactggatctgtactctcactcactggttctcaatttggatggatcatgaatgtgacaaaccatacaggaataaggatttgcagattattgctattctagtgttttcacaatcacaaggatcttgtgctctgcttagaacttttagcatataggagtataccgaggagttgttaaactagatatccattaaggttgaaaattcaaaagtttgacattacatcctttggaaatgataggttccactcaagtaaactgttcttcctcattcaaatgcttctttgcttttgcaggtatagagacaacaggc

SEQ ID NO: 36991 - DNA, 990 bp, Sorghum bicolor
  Intron number 2 from transcript Sb01g026400.1 (locus Sb01g 026400) derived from phytozome v7.0 (chr-ID chromosome_1; pos 44421009 to 44421998)
aggatcctgcacgcaagttcatcatcgttgagcaggtaagaagcaccacttcctgctcgcgtaccgtacgtgttccatcgcctcggatcctcgtctgctttctgctcgtccttgtcgttcttgtctttgtgtgccactgaaagttgcgaagttttgccatcgctgtagtcgtagttaagagcacgacaaacagtgtacgttattgaacgccaattggatgttaggatactgacaggtacaaaaagacacagaagggggacaccactagtataaccacccgttgagtgctatctgctgactgtacattctccctctggttttttgttttgccctcaattcaacacgtgggccacttcaccctgcaacctgaacacatcaaagattgataagctcaactgaaatttttttactgcctatctcaggtccacaatagtcacctccatcatcaataaaagattgattagtttccagaagtgtacaaactgctatgagatgctatgcattattccgcaccaatttgatgttacagaagcccgtatatctctagatttagggtctatatgatccgatgaagtgtatgtagacaaagtatatggtcatactaaaccatctaaggtcgtatgtacgttaagtatgcatgcatatgtacagtagtggtattttagtaatatattaaaatgtatgaattttgaattcctttgaaaaatttcgcatggtaagatctagagtatcttaatataagtatatgaacatactcaaaccgataaacaaatatgaatacatacttaatgtagtttattgaaaatgtgagtaattagtgagtacagaaaatgagctaatatgcgagtgtttggatggcgggatgaagtagattgggttggccaggatctccttttaggggatttcagtctggagtacatatgggttggatttatcccagatgggaatatttctgctatatgcagattcatccgatttcacccagttccc

SEQ ID NO: 36992 - DNA, 736 bp, Sorghum bicolor
  Intron number 1 from transcript Sb01g047950.1 (locus Sb01g 047950) derived from phytozome v7.0 (chr-ID chromosome_1; pos 71029310 to 71030045)
gaggacagcaagagccccaagggtgagttctgacttctggacttttttttttccttacagaagaattgcttcattgactacatttttgttagaatggtgactgtagttgattactcatatggtctggaaatggacttttgtttgtgtccatgtgtgttttggagatttaccccaaatgaaaagtgagactgctagccaagggtagccattacagcattttttgtgtttagattttagaacaaactggactagtttaaacctatataattcgaatatcgaaagtcaaaacccattatacctaccaatgtcactgcgatagataggatcatgacagttcacgagcttatgtcaaacgcaatgccgatgttatgggcgccatcagcagtaatgcaatgtagaatgtgtgcttttaccacgttttattatatcaccccaactggcttcgaccaaatagcaagcgatgcccagacagatgttatcaataacggggtgacattttattgccttggtaaactcggtagtcatgttagtttctcttgctacttaaagatgactgattgttagacaatgttgcttttatgaaagaacgcgcggactgctgtttggccagctggatgaagcagtaatttagtttacagtggctcttcttcatcttgcatcattcttttgtttatttattttattatgcacaatgacattttcttttgtactaaaggccgtcataagttgttctcaa

SEQ ID NO: 36993 - DNA, 613 bp, Sorghum bicolor
  Intron number 1 from transcript Sb04g029560.1 (locus Sb04g 029560) derived from phytozome v7.0 (chr-ID chromosome_4; pos 59644137 to 59644749 reverse strand)
cgcccgtgtcgtctcggcaacaatctagatctgaggtgagctccctcccctccccctgatctccgcgctgctcactcctttacccgcgcctcggccacagatccaggcgtctatctcactaggacctgggattcatttcttggtccgctggtaagggggcactagtttgcctagaggcatgttcatcttgttacgcaggatcgtttctttgttgtgactcttgcgtcctgaatatgagtatttgattctggcttggatgctccgatccaccagacttgctgcggattcgtttgctgcgtttagatccactccatttgaattgacgttgtctccactattattcatgcggtggagcatgtcttcctttttcttttttcttttaattatactgtagcagtttattttcaaaagtttctggggttctactgaacctaccaatgtcacaagttaattcccatcttggagttttatctttttttttttattatgccgtatatcttgatatctccacgggaaaaagggagactgatagggaatggagttgatttattttgtacaattgcttgcaggttgtgaggttcttgattgggcgatcacaagaactgtcgctgca

SEQ ID NO: 36994 - DNA, 880 bp, Sorghum bicolor
  Intron number 2 from transcript Sb01g031320.1 (locus Sb01g 031320) derived from phytozome v7.0 (chr-ID chromosome_1; pos 53873432 to 53874311)
gcaacgcccggtactgctcgctctcgtgctacaaggtgcgccctcctctcgcttcgtgtgcgcgttgtcctgtcttagtacttgtagaataccgttcgtggatttaaccgatgcccgggctgccttctgccgatgcccacaaggtgtttgtcgaattgctgcaccgactttcgaagcttttgggcaagaaatcctctgattcctgctcaaaatgtgtaactatccataatataaatcacaacttccttctgaatcatacaaaccacagccaatttttcactttgtcctatatatttggtgatctacatggaagttctttttgtttgctgtgctgggtttaaacaatatgcatttagattaaatgagcaatccaaaaaggtcaaaagaagtttatatgtcatagtttccatgttccccactttagtgaatctgtcctctatttatacctgggttctttcgtgacttagccagcataatttggatcagctaacatctcaagtgtcaataaattgtaaaaattcgtttaatctagaatctaggtaatgtgattttttgtatctatccaggtctgaatggaccagtatgtctgttgactttcaatcagtttttgaaagaaactacttgtttattcacgcacggaacaagcttctggcttatgcaaactgattgtgtggtgttataatgccttattcaaaaccaagagattgagacatgcttttatgttctttgaagctatcaagtttttgtgccttcttttctatgcacacagatgcaaatgaatattggtgtttgcagatgattttgcactgcagtgctttcttttcttgatatttcttcaaatagttttctcaattcttgtttcataggggcatagtgttca

SEQ ID NO: 36995 - DNA, 1009 bp, Sorghum bicolor
  Intron number 1 from transcript Sb02g036420.1 (locus Sb02g 036420) derived from phytozome v7.0 (chr-ID chromosome_2; pos 70827698 to 70828706)
ctgttggttctgtctgttgacttccccccatcgaggtaaagtactcgctcgattcctcttccgtcctccgatccgggcggggtgcttgatttgttatcattcacggttctgattcaattgtttctatcaagttttgtccgaattctttgatgctcgattcattattagtcttcaaatttctctgaattgttccctagcttttatcctccacgcatatgtactagtatactagcagaattgttccatagcttttgtcctccatgcatatactagtagtacccaaaatcttgtgctggccgatcgctcttgtcccgcagcaatcaatcgtttttctttcttttacttttctgataataaagcagatagatcaaatcaaatagttatgatacacataatatatatcatggcatcatccacacttgattaaatccaaaactggtatacacataatatatatcatggcatcatccacacttgattaaatccaaaactggtactggagatgcgactagtgtgcccattgtctaatggaaaagacagagggtctcgtctcctatctcatcggaaggggccgggccttctgatataggttcgaatcctattgggtgcttctattctagtttctgcatctccagtttaatttgatccactgccaggtcagattgccaccactcactcacataacctgcttatatctgttactgtttttgttgctgtatgtttctttatagtatattcatttggcaattgtattgaataatcaggtcggttgctatgaattactatggatgaatactgacttcagggtctctgttttgtctctgttttcctgatcactttattctaaataaaagaacaattaatctagcagtctgcttatgtatatatgcttctaatttactgctaaaaaatcaatctatcaactagtatttttgtgtgactgcgttctctatgtatccttctgctgatgtttgtgaatacagctagctagtcagctggtcccgttgcc

SEQ ID NO: 36996 - DNA, 633 bp, Sorghum bicolor
  Intron number 1 from transcript Sb01g014400.1 (locus Sb01g 014400) derived from phytozome v7.0 (chr-ID chromosome_1; pos 13693004 to 13693636 reverse strand)
tgcaggtgcgttatggacaatctggaagacgaggaatgacatggctatcaacaaaaaaattgtttcgtctcccaaggtgatcatcttcaagacactgatgttgatcaagacatggcgcccacttctaaaaacaaagctggaccctacggcgcacgagatgatcaatctgctagactccaatctacagtagcttctttgttggtgttgggtgtcctcttttagagtgtttgtctggttgatcgtttggtgtcggggtgtcttttttttttagatgttttagctcgggccttagaggttcttggaatgtttcgagttatgtttttcgctgttcaggtgtgcctttttctgtaaaactggaaaccccagtgctcaggccttgggtgatcgttacgctttctaataaagctgggtgaacgcctttggtctaaaatttgattttgctcgacacactttctacaacagccacagtttacgaaggttgggcgtggcaaattattacgacaccaacccaaccaaacaagatcttttatcttccatagcttgtggttattaattaagtacttctccaacttccttcgttctgttctgagatgtcctcggcatgctactgtcttcgatgtaggtgcggtaaag

SEQ ID NO: 36997 - DNA, 725 bp, Sorghum bicolor
  Intron number 1 from transcript Sb03g007500.1 (locus Sb03g 007500) derived from phytozome v7.0 (chr-ID chromosome_3; pos 7833173 to 7833897 reverse strand)
gacggcaagggcaagtccttcgtccgcgcattcgtgtgagtacgaactttacatgctcttccctctcccttccatctcgatctcatttgaaggattcggaggttaggggaaaagccaatggtgccgccttttttgtgggatggacatgatcgggattcggcagagagcacagaaaatgctatgattcgatttttcgaactggtgatctggcctatgtccgttggagggatgacgggatagcccttgtccccacatacatggcttgttcaggcttctatgaattggatgaagtatttgttgaaatcgggatgattttggttggtgccctccaggacaacctttgctccaggcatgcatctcaaccccaggcgttggattggcatgcatctcagccacaggcgctggaaatccaacgcctggtccaggcatctcagccccggtccttgagacttccatatgctctttatcttatttcagattaagcatcaccgtcaattgcattaggccagactatacatgtactgttgtttgtttgaatgatgattattcggttgccatttagttcatataataataagtaatacataattgaagaaaaatcctccctcataggaacaggcgtgggccttaatgattttgttttttgtgttttcacttctttatatacttattttggttctttgcattatgtaggtgggactctggcagcacagttggtgagtttg

SEQ ID NO: 36998 - DNA, 924 bp, Sorghum bicolor
  Intron number 2 from transcript Sb06g018640.1 (locus Sb06g 018640) derived from phytozome v7.0 (chr-ID chromosome_6; pos 48237480 to 48238403 reverse strand)
gtcaccgatcaggaggccgaggatctgagcaagaggtgagatctggggcgtcccccttccgcattccgtgttgatccgctcgatctgtgtcgtttactgcattctactacttattaatccggttccgatctgatctagcgatgcgtatctatgtgtgtgcgcgtgcgtgcgtgctctgttcggatgtgtgctccgaccgatccagtcgatgtctcatttcaaacatagcaagcctggttgctctggttttggcgagaaggccattctataatggtggggtttagctagtagtggcagctacacgtttcaatgctcgcgacaccttcccatggtggttgctggggagcagtcgcttgcaggcggttggttcatgtgaaggctgggccgtgagcgtggggtacggtgcaagtaggtgacgctgctagtgtccaacttcatgggtatcagtagtgtattgtagatggggctagactccaagtttttagcactgactgaaagtgatttcaaggatgcagaacacaagcccccaatttgaaatttggatatttccgactccttgatgtaggctgtagtggtgtcactgcctgtttaacatgttgtttctttttgtatttttgaaagtatacacttctgttttgcattggagaatgttgaaaattttcaggcaactgtgacaaaccttgtgtatgttccttttcgaaattcgtgttttaaatgaaaatgtgtacctgacaattctgtgatggactgcttgcgttggacaatggtagacaaacagctggggatgttctagtctatgcaatttttagcattgcttccaattctatctttggcacttcttcagagataaaatatactgaacactaaccttcctgttgacatattgtagtgaaagaaaattttgctctggctcgaagttgaaag

SEQ ID NO: 36999 - DNA, 950 bp, Sorghum bicolor
  Intron number 1 from transcript Sb01g000380.1 (locus Sb01g 000380) derived from phytozome v7.0 (chr-ID chromosome_1; pos 279218 to 280167)
cgccgccgcggtcggcgtcaccctcggacccagaggtctattctctcatcttcgtcctcagttcatcttctctcgtgctcctgccgtgccactctgctctgttgtttttttttattcggaaaaaggataatgtctctgttttttttttttttgaaaggagaatatgtctgcttttaagaaagccaattaatttaagatagaacaaaccaactctccaaaccactcaccactgtctacggacaattagcatgaacatagtgtcataacaaagctccttcaccggctcattcttactcatccactcaatcaagcgatataccctctgcttcatcttctttctgtcctcctcctttaccaggtctgtccacatctgcagaaagttgatagttgtcatatatcccaccatttctgtactgctacctcggaaggattattattacatctgcagaaagttgatttgtcatatatcccaccatctctgaactgctacctcggaaggatttactacttctaactagttcacattattacgactcacgagtttttggcgattctgcttcacgacatgctgctgtgctaggtcattcgttgctgcagccaaactggttctactaaaccatgttaacaccggtctctttgtattttgcatattattactatacattgaaaaggttgcacactgtgtacttgtctccggcagccttttctttcatttttgttttcagtttcacatcctatcatatcctacagcaaaacactgatgtgacaatgatactatcaccacccttttacttgtgagttgtgttatttttccccccctttgatgtgtcttgatgacgtttgggtttacaaaaaccagtcttttgatgcctacctcctcctatggtctctttcaacgcctgggctgattttcacttggtttctatattgttctgtactggcaggaagga

SEQ ID NO: 37000 - DNA, 1017 bp, Sorghum bicolor
  Intron number 3 from transcript Sb01g041420.1 (locus Sb01g 041420) derived from phytozome v7.0 (chr-ID chromosome_1; pos 64743752 to 64744768 reverse strand)
tcctgctccacctccccttgctagctgaggataaggtaccgttttttttttcccttttcccttttgttttgtttcgcttatactagtgctgtgtgattattgtttttgccctttcttgtattgtgagtgagaatgaacggtcctttgttaactgcttaagctgtagaggatttctttattggctttgattgcattgaagccaatcctttgatgctagatatcatggatgcttgcaaaattgttgtcagatgctcagtgtgtgttactctgtccaaaaagtaattgcttcaactgtgtttcttagttaattatctgtaaatggtaccccctgtgtttgaaaacataatactcaattttgtgtcgccctcaaccaacatttttcctattagtatgtaatttttgtgccgtgaggttggtatcattcgatctgtattcaaaacctttttcttttatgactatactttttgataacacaacaatataattatagaataattactggttaaattctgccataacaaaatgaaacatgccttttttttaaaaaaatggagggggttatgaattgatgtggccctcagtgccaggagttggattttcttataaatttaatgctagcaggttttattcgttaagcaacggacatgtagtgataattcagccaggcagtacagtcctgctagctgataaagcttgcgtttttagttagttctacatgcttcttcgtgctcccttctatcctgcttggttgatgacatgaactacctgtatacatcacttctgttaagagacttctaaatgaatatgacaacattcaccattttcttacaaatttagtgctagcaggattctgttgagtaacggacatctaatgataattcaattcagcctggcagtgcagtcctgttagcatacttaatgaatattgcaacattcaccactggaccttatccaaaataaaaaaccattcaccattggctaataaattttccctatgttatgtgcagaacgtgccat

SEQ ID NO: 37001 - DNA, 676 bp, Sorghum bicolor
  Intron number 2 from transcript Sb01g049230.1 (locus Sb01g 049230) derived from phytozome v7.0 (chr-ID chromosome_1; pos 72225444 to 72226119 reverse strand)
tgcctaccttggtagtaggtgacagtctgaaggtaagtcatgttctggtattgttttccgtactctatactgtgcctttggcttgtggactgtagcaggtcttgtactgctgtaggtactttgtgcttagctgcactgggtgctagtaagttttttttgcattttcatgaacgtactatctagtttactgagtttcaaactttagatcaggtcttacaccacttcgtttacttgtatttccagtcttccagatcaagatcgtttacttgtattgccagtcttccagatcgagatcaattactagtttgagttcacttcttgttcttggtggctaagaatacagagtgcatattcgtcataactgtagcttgtgcttttgaatgctgtaacaggacaagatggaaacaagatgtatttggagcccataagttacttataattccttaagtaccaagcatgcatttactactgattagctattttgttggtgatgacggcaacttattttgttaagcatttctatccctttctttgttcttacgattttcttctttgcaaaatgaaaaaaaaaggctttgaaattcccaatttgtactttagagtttcaggctctaacctgcttaccaagcgtgctagtcctaatgctaatgccttgtttaatgacagattggagaat

SEQ ID NO: 37002 - DNA, 578 bp, Sorghum bicolor
  Intron number 2 from transcript Sb02g008760.1 (locus Sb02g 008760) derived from phytozome v7.0 (chr-ID chromosome_2; pos 12008142 to 12008719 reverse strand)
ggcaaggaggtgagttgagaattaataaggttttctttttcggtgggcacctgccgataaataagaaatttcgaatgaaatttaaataaattcaaattgatttttttaaaaaaatagaatcattttattagaaaaattttctaatctatccttcgtcacaaatttatataatatcaataaaaataacacaatataacattgcggtagtacaacgggctgacggtgggtgagctgcatatgctagtgtgacgaaatatgtgagtgagaaaattaaataattttgaagaaatttagagctttgataagtctagaagatatgatgagtcattttattgttgtctgaagtaattttaaagcgaaacatgaatttaaccgaaaaatctgaccgatataaaaaaaaaatcgaacctcaccgaaaaacgcgaaatttcggtgaaatttcacggaaaaagaaaaccctcgttgagattgagaaacagagactcacgctagctggctgagcatgtctaactgactaactgtggcaaggaggtgtgcatgcagatcaccggggagacggtgggcgaggtgcgtgccgt

SEQ ID NO: 37003 - DNA, 748 bp, Sorghum bicolor
  Intron number 1 from transcript Sb03g004670.1 (locus Sb03g 004670) derived from phytozome v7.0 (chr-ID chromosome_3; pos 4976058 to 4976805)
gtccacccgcccctccgattccggccgtcgtccaggtaagaacttacaatcctctccggactcctgtctgtctggtcagatccaccgatccgctgccctgtttctttttttttattcgcgcaaaaacctcatggattcgcccatgctttccgtttctgctcctccgcgatcccgtggattagtggttccagacttgttcgttaggagttccggatcctcgagaataggcaggttgaactagatgccgcgtctgtcggacagtagtgatgttcttttctgttggtctggtttattattatgatagtagtagaatagaatagaatagaataaaagaaaaggcggaaatactgagactgttgccatgggatgatgatagagctcaagtgccccgttcttgtgatgttggaggcgattacaatttcttgcatgccagcaccgactcaaagcgctgtttgcctttgacgttagagctgtccgggtcctaacaactaggactggcagatctttctgtggttgatgtgtcaaataaacaaggccggtcagaatcagaacgtcagttctacgacccctcccatcaccagcagatgttgggaggccaggtgctggacccgtggaccgtaccgcggcttcagcatgctgtagcctgtagtaggcccccgaggcttctctgcgcccacatacagtattgtgcaatgtcaaagagcctgatggagtttgtagttttgccaggtgccgacagttgagcagg

SEQ ID NO: 37004 - DNA, 744 bp, Sorghum bicolor
  Intron number 3 from transcript Sb03g012960.3 (locus Sb03g 012960) derived from phytozome v7.0 (chr-ID chromosome_3; pos 15792839 to 15793582)
gagactgcatacattggtagattaggtatcacctttttactgctatatcttgcttcttttcaaagtctgccagattgtaagttcattgcttaagtttattgccataagccatccaatttacttgattctcagtacttttgtttcattggaaatagattttataccttatgtaagataatttgttagtgacacccaactcagtggcattatttctaaaaaaaaatctggtagaaacttactgtgactgcaacattagctacactacagcatgacttaactcaaagaacattgctgtttccttctttatcaagaagactactggaatgtcacaattgtgctgtatattaatccatttaatgcctcttactatgtattttattttttatggagtgggcatattaatgcatgaactcatcactagaatgctgctatagatctcctgcatgataactgctcacttgtaacaacagatttctggccctagtgtggcagttacagatgcacatcacattatcatgtggaaatgcacaggagcctgtccttattctctagaagatcgtgcattctataaactggcatgcagaacctaggcatgttaaggaatacccacttgcctgtcctactggaaaaatgttttgtactctttacttactgcatgaaagcatcagttacctcttttctttctcacctttttcatattttctgaaaggtgcattggaattggcatcggctggtattggtata

SEQ ID NO: 37005 - DNA, 1061 bp, Sorghum bicolor
  Intron number 1 from transcript Sb03g041170.2 (locus Sb03g 041170) derived from phytozome v7.0 (chr-ID chromosome_3; pos 68719032 to 68720092)
ctcgcccgggagccgcaattccatcctgctgttcggtaagtccacctctgatttgtttatctatacgaccttctctgcctgtatccgtcacgctggattgaacatggattcagactccggcgagggtaatcggggctctatgttggtcgccttgtgctcgtcctccctgtgatgatttctttcctctactgttgcctgctttgtctgatctgggccctgtctgataaatgataaaaatatgtccccctttttttccggtggaatagcatcttgaggtaggcgatgatacatgaggaatttgagatctcttgatctggaatctgtgttcttggtgtcgggttggtatgcttccttttcgtcaaattcataagaggggcaaaaaaaaaagggaagatgtttactgatttttttatttgattaggagatttgggatcttcgatttgatctcgttacggtctttgactgaactgaacagttataatcccctcatgattcttcacaatcgacctctgggatgcgtgtattgaagtttcatccatccttctgtattgctaaggtctgactttttgggatgtgctacccttctggccacagatctgtcggttttcagattagattatcgttgaagatctcgagaagataccgatcagtaaaatagttagtactattcggtaaaagaaaaaatctgaatgaaaaggcaggagccctgctgctcaattaagactattcggtaaaaaatattatgaccctgacatgatgttatgatcctgacaagtaagctagcaacttgttcccgaaaaaaattatgtaccttccctatctgtagcatgtgaaataaagatgtaggattgttatgcctttttacaactagaaataggcaccctcttcttgtttcttttctgtttgtcttttgatacgagaaaggccatttgtgcaggcgactagtcatagcttccttccaactttgtcatgacacctcgaatttaactttctgccacttataatctctgaatctctctgtttcagggttacatactcgtccaatagaacaattctacatc

SEQ ID NO: 37006 - DNA, 967 bp, Sorghum bicolor
  Intron number 1 from transcript Sb05g008350.1 (locus Sb05g 008350) derived from phytozome v7.0 (chr-ID chromosome_5; pos 15320788 to 15321754 reverse strand)
agcaattgcgacgtccccgcgcaggttcatccaaggtgaggacacccggttgatcttatctctaaaaattggtgtgagctgcttgtttttttttgatagaaaacaaccgaaggcatgcattttcatctatttagtacgtattaagcaaaacattggtgcggcaacagtaaacaacagtagaagggaacagctttgtgcttgatttgttttggtaaaactttgtgcgaatctcagttttcgccttggttttttttttacgagaaacaagggtatattaattagcagcaagctaagcttactagttttcttttctctttcttgtacaacttgctatatgtttgacatgggttgggctcgtacatacagtaaggtagtaaggtacacaaaatcaactaaacaagttttgttttatactttttattagtgagatagctaaagacacaaatttattgatgtatgtggcgaccgacattttaaggtcctccattatgctttgggtcctccattatgtaatagtaagattactcttaactcagtggatgggaacatattatttccatccaggtacaagaagtatatcttttgatatgatagatagcttgtcaaagaatattacttgctaatccatgctctgacaattgtttggagtccaaaatgtaacaaaatattaaaatttaattctaatttttgaattggtatatgcatttttatatacatgcatgtttttaatggagacttcagtcagtttagatgccaaatccatgaaataaattgttgcatgcatgttgaggactaatcaatgggggcttcttatctattagtgaatctataatctattaagaacggttaatattgtgtgctttttgttaacatgtgcagacaggtctgaaacatctaagtaaaatagattgcgtacattatcttgaactaatcaagctccatgctttgattgtgcagaactgaacta

SEQ ID NO: 37007 - DNA, 540 bp, Sorghum bicolor
  Intron number 1 from transcript Sb06g001590.1 (locus Sb06g 001590) derived from phytozome v7.0 (chr-ID chromosome_6; pos 2627681 to 2628220)
ctgtaaagggaactctgctagttgacaaaagggtatgcattaagactttaacaatctggatattactctctccagtcaccaatatatgactgaagggagtatgttacctacattcaagttctatctgtttttacttggcaactggcaggtttggtatagaaatggttgtttggggaccatagttgattcaaatatttatacatttctacacagtgatcacttccttgtatagtgtcaggttttttgttgctatcatgtgattagtgtgactgaactcaagggataccattagctgttgtacaagcccaaccgatcactaatgtatttgggtttctttaattttctcaatgccatggatagaaaaatctacttgccccccctcccccaacaaaaacaaaaagcaacattatgacatttccctaacaaagtatatgctatgatatttatttgtaatgtagatttgaagggtgtggcaatgtttacttcttaacttaggttacctaaaactgagtattctttcttttccattacagattcgca

SEQ ID NO: 37008 - DNA, 670 bp, Sorghum bicolor
  Intron number 2 from transcript Sb02g030070.1 (locus Sb02g 030070) derived from phytozome v7.0 (chr-ID chromosome_2; pos 65165735 to 65166404)
tgcattccatattgcggcaaagcagggccatttgggtgagctttcattctttcatcattatttagttgtggattaggccagtgcgaatttggattcactggcttgcactggcagttctatgtgatcttttgtattggtcattatgcttggagttgttatgtttataaaaactgacttgtatctcattgacttctgcaaatctctatgatcatgaaggaactgtttccctcatctttttccccttcaggaacatagagtattaaaacagtgacactgagtccctgatttccttttgctcagatggctgataaatttactttgctgatctggtctagattacaacctaccatgtctgtctttcttggttttacagacaaattgttgatttctcagagttggcagttttctacaatcttgccatgttgttgcgtctaaatcaaagaactggcaatcctatatctagtgaggagataagctcgctactacttgtctgctcagctagaagtcttcaccataccaattaggctatgcaatttctgatatttgagttagtatgctgtgttgaagagcaaactattatacagttgttatttaatcttatttttcaaaacgtgtgtattctcttctttcagagaaagatgtcatattagttcaattttggtctttgcag

SEQ ID NO: 37009 - DNA, 836 bp, Sorghum bicolor
  Intron number 1 from transcript Sb04g004630.1 (locus Sb04g 004630) derived from phytozome v7.0 (chr-ID chromosome_4; pos 4444029 to 4444864)
aaggtctccctcatccggattgggacgcgtggaaggtgatcgaattcgacccttttctgctgtttctttggttgggagggtgaagaatttgggcttatgttggtcaaaattgtggctttaggttctatttagatgcatttggggacggcaacgcgttgtgagtgcctgagagatcctgcgtttagctcttccgccaggagcccaggaatgtgagtttgagatgtggttctgaacctattgcgtctttattacgtgttaaacatttgtggatgatttggtgaagttcaaaggagtatcgagaaactttagcaggaaggatgcgcttccttgcttcgcagtctgcaattctggatcagtagtacctaggcgttgaccttgatagagctaaagaatggctcttaatagtcggcaaaattgtacattttagatgttacctctattattttggctcaacgccatagatgccgtattgttcttgtgctattctcatgatagctagtggttttgtctcagtgtttacaaggatgatgtctttaccagtctttgccttgacttagtcttagcgaatttactagttttcttggatcttgacatcttgtggaaattctatgccttttccacattttccttttgttgagagaaagatactcaagaatccgttaaaaaaaaggaaaaaaaagttactcaagaaaagtcactttttactgccaaagcaaatttttccttccacttttcagttcaaagtgttgtttgtttcttttttcatgtggaatatgcaaatttgtaattcttgtcattggttatttaggacagtcctcttgctcttgcacaagccc

SEQ ID NO: 37010 - DNA, 634 bp, Sorghum bicolor
  Intron number 3 from transcript Sb01g034200.1 (locus Sb01g 034200) derived from phytozome v7.0 (chr-ID chromosome_1; pos 57650842 to 57651475)
aaagacatatatctgccaaaggattactacactcggtaaggcacctcgtcttaattattgtaagtgggcgtttgcccactacgtgcaacttggcgatctctacctgactacctgagcttagtacactaaagtattatttgctccagaacaggcttatgattggtgttgcttgcttttaacatgttattaaatatgttctttacagattttttaaattattatgctctgtttcctttggtttacactggattgctttacccaccccctgagtttaacagtgaaaataacttttttgaagacgcaagtcttaagagtactattgaagaaaaggaagaaatagaggtttaaagagatatgcaagttatgaagagtttcaagtgtatctaaacactgatgagtgcaaggtcagcagcttagtgcctgctttacctttgagattgatttgtgtatcaattggaattgatttgtgtgtatcaccattcttggaagtaagagttcgcagcatcttgatttgattgtttatgcaggggttctcattaatgattctgaaccattgcaatttttttagtaaaaatactaaaatttgctttctgtttcagggaacctaaaggatttgggttcatccaatactttg

SEQ ID NO: 37011 - DNA, 750 bp, Sorghum bicolor
  Intron number 1 from transcript Sb02g031490.1 (locus Sb02g 031490) derived from phytozome v7.0 (chr-ID chromosome_2; pos 66415473 to 66416222)
gctcgaagccgccacgcgcgtccccgagctcaaaggtccagcctttatggcgctccattgctttgcttttcctccagcgatttggcactctcgttgcagcttgcttgatctatgctacaaacatggtgccgcaatggtcaaatcctttttgctgtttctggaaatcgcaataaagctgcgagttttgagtcgtttggacgaatatgttatccaaggaagcccttttgttattcctagttgggtgaaacctttttatactcaaatcaggaattgagaactcacgagtcaggatggcatggaatgagattactgttcttattttagtaccccctgcgcctctggagtttagacagaccgtatgtcttttaaaagtgcctttaaatattcctggctgatgtaatagccgtccactgtcaatttgttatcatgttttccgctttgcagtcatttcatgggtcattttgcataggcagttcgatgctagtacttcctgtgctccattgcaaaagcgatccttttgggctgcaaaaggctaaagctgttctgcttgatgacgagcatcatgagtctgtactgttgcgaagatagtagaacaataggagtgtaaaaagctcttggagtctcgggtaccagcaatccatgtcaacagttatcactttatcagttgataatatatttctaatgccttcgaataatcatattaactctacaatttgtatcctggtgcagaaaattcgtcaaagataattc

SEQ ID NO: 37012 - DNA, 744 bp, Sorghum bicolor
  Intron number 3 from transcript Sb07g014920.1 (locus Sb07g 014920) derived from phytozome v7.0 (chr-ID chromosome_7; pos 36663735 to 36664478)
tacaaggtatgtagccacgagtttagttagttggtactattgctatatattatatatgttgatgattttactttactttgaggttctcatagtaactaataattgcaattaaacaagttatatcctatcataatgttgtttctatttgtatgcaagttgctacatttaaacaagaaacttagtagatacatactttcccaactaataaacaaatacattgaacatatttgaattatatagaagaggatagtatggaatagctagattttcagtacataactgaacatagtggggagcaaactagagtggaggtaaggaatatcactgtatgaggtcattgtgttttatatttttaaatttaactattgtttttatttaggaaaattaaaaactctcagttatttgtatgttatgtatcacatgcttagtgaggtgtacttgttctctattgatgaatgcatcatgatacttagtggaaacttatttattttgtatatccaatacattgtccatctttgatcctaggaacttattataaatgaagttaatatatatatatatatatatatatatatatatatatatatatatatatatatatatatatgttatcttcatgtgtcttataagtaatggaattacttttaaaatggagtatcaactgcaaataattttgtgttactaatgattttagtatatattgatggctactattgatagtctatgtggtttcattgtagttct

SEQ ID NO: 37013 - DNA, 742 bp, Sorghum bicolor
  Intron number 2 from transcript Sb02g043830.1 (locus Sb02g 043830) derived from phytozome v7.0 (chr-ID chromosome_2; pos 77642183 to 77642924 reverse strand)
tccggcggccctcgtccgaagccgcgctgcgattggtgagtggagtatgttttcttttagcaatttggtaatcgtactattagtatttcgagtagtaagctatatgtcgactacaatgggagattttttttccccctcctgaacaatagcatatgggcatttgctcccatatcatctgaaatagcttatgagcatttgcatcctgttggatagtagccagcacccaccagtgcgggttacttttagggaggtaaacgatgaagtaactttcatgggaaaagttatgttcactgttgcagtttgaacattgaaggcaccatttgtctgctagacatgttttgtttttaataattaattggatttgaagatttgtgtgaaattgaatcatttcattgaatttcttgatgactgcacaaacaagggacgaacgacagtttaaacttgcttgtacaccttttgttaagctacaatttgcttgtttgcagtagcacaaacagcacgacttcatcataggctagttagacagtttattgatttgatccacttaaaaaacaaagttctctgtgtctttttctttgttcagtatgtaatcaaaccaatgcagaatgcctgtgaagttgtttttgctgtatgccttattttcaatcctttttttttgttcatttactatgtagctgcatgcattttactaattcccatcccattgctggtatgtgctatgtggtgtaggctacaagggcaa

SEQ ID NO: 37014 - DNA, 592 bp, Sorghum bicolor
  Intron number 1 from transcript Sb04g025890.1 (locus Sb04g 025890) derived from phytozome v7.0 (chr-ID chromosome_4; pos 55673882 to 55674473 reverse strand)
ggctttggcgtcggcgacggcccgctgttctccgggtgggtgagaattccgcgaccggcgtgtgtttgtgtgtgagggggtggttaggcactgttgctttcccctcaatttggctcaacttttcccgatttttcgtgcggtaatcaatctacctttggattctccagatttttttttttacctcggaagcactgatcagtgatgtctcgggaggttccggttctctgctcctctcatcctctgttggatttgtgctgacgttcgatcgctgtgtggctatggtgtttcgtttgctttttgagttttaattttgtaccaggttctactgtttgggtcgttctgaagaagtcgtgttggttaattggtgtgttattttctctcagtttcgatttcgttttggtttgccttttttggtcagttagcatagggtccgatcgatgattgaccccccaaaaaaatgatctactgttcgcttaatgtaatctgagagcacccgcgctgataaaaaagttagcaaaagaggttgtacagtatattcatttacagatttgagtcaccgtcaaatcctcaataaatatgttcacgttgcaga

SEQ ID NO: 37015 - DNA, 652 bp, Sorghum bicolor
  Intron number 3 from transcript Sb01g020930.1 (locus Sb01g 020930) derived from phytozome v7.0 (chr-ID chromosome_1; pos 23993546 to 23994197)
agatctctactaattcagttcataataagatagaggtatcctctaagtgtaacagataattggatatttactaaattaatatgattactagctatagtcatatttgaattttgcttttatttagtcctatggtgatattgcatattattgcttgtagaagtgtatgctctgtaattaaggtaataatggatgctaattgctaaatacatgtttttttaggactagcgagaataatgagctgcaggtcttgtagaactggatgttgatccttatcatcatgatcatgctgttttcttccatttcatgtaaaacatatcagagaattgtgcactgaaacaaacatgggagagatggaggatgatactttctatcgtgtaagaagtgataaatacttgggacctaggtgtatgaataaaacaatgcaatacttctcaaaaagtgatttcctttctatggtttctggttagtgatatatacttgggatctaggtctattaacaaaacaatgcaatatttttcaaaaagtgatttcctttctatggtttctggttgtttcaatgttatgcctcagttcctgctgacatgcaatgctaacattttgcttttacatcattgcagaaggacaaatattcttactctgatcagtcaacatc

SEQ ID NO: 37016 - DNA, 465 bp, Sorghum bicolor
  Intron number 2 from transcript Sb01g044770.1 (locus Sb01g 044770) derived from phytozome v7.0 (chr-ID chromosome_1; pos 67936334 to 67936798)
tgacagttccaagcagggaagcaggtaaccagtgcctaattttctgtgctgttaatgcttctttaccactttgagtccttgctagtcaatctgtgcaattctctccaatgagaaagcaggcagtttagtactgccaccgttccaaattgtaagttctgacttttctagatacataacttttactaagaatcttgacataatgtatatctaagtataacaaaagttatatgcctagaaaagttagaatgacttactatttagaatggaggcagtaccttttatcttgtgggcatccaatatttgtccacttgattagtgtggttcttctaagtttttgcctttttgttgtgttattattgcatttttttttgggtgtctttctggatttttctttacttgtcttaaataacttgtcccacatctatcgcaggcaagaagctgtcacagagcatcattatcgagaag

SEQ ID NO: 37017 - DNA, 589 bp, Sorghum bicolor
  Intron number 3 from transcript Sb01g019710.1 (locus Sb01g 019710) derived from phytozome v7.0 (chr-ID chromosome_1; pos 21537862 to 21538450 reverse strand)
actctgaggaggattcttcagattctgaagtggaggtgctatcttgttcttctcttttggctcatgtctctggagatcgctttgcttcattatgtcacaatctcataattgattgttgatagtgttttcattgttactgtattctgtgtgctactgattgattttatttagtttttctgatactcttagactgaagatgtatgccatcaaggaaaaggcaaaaaaagaaaaactgatcattctttggtatatgatcatctaaatatcaagaactgagatttgacatcaattgtttgttagatgtttgcattatagtttcacttgctgtcaatacctttgttgtcaattgcaacggtgtttgaaaagcaacatggttttgcaccttttactgtttcccttgatatatatactaataaagaaaaaaattacttgtttaatgacattagtttgcagtttctcttgtgctcaataggaagctagtgtatgaatgaaattttaacttttcatttgatttctattggaaactacttactggaaaaaggacatgtttgcaggttaaggtgcagccaaaaaaggttattcaaccaaa

SEQ ID NO: 37018 - DNA, 412 bp, Sorghum bicolor
  Intron number 2 from transcript Sb07g000650.3 (locus Sb07g 000650) derived from phytozome v7.0 (chr-ID chromosome_7; pos 468760 to 469171 reverse strand)
ttgaggcaacttttagtgagtgctacacattgttacactatatgtccatgtatctctatacatgtcaatagcaatctggtattctaatggcaacacaagcaaagctagttagctgtttttttctcaagaagacgaagaacagtataagaaacccgtacatcaaacacacaagcaagttgcgtatcattatattaagaagacaaagaacaatataagaaacccgtacatcaaaaaacacactccagcgcattcttagttagttacatggtatagtagcatcattctatctttatgatccatagtgtgcaattttacatcggtgcctgaaccaatctatctatctggttaatgcaaggattattgaccttttttgctcttcctgcagctccagcagtgaaaggttcaggtgtaa

SEQ ID NO: 37019 - DNA, 1010 bp, Sorghum bicolor
  Intron number 1 from transcript Sb03g035700.1 (locus Sb03g 035700) derived from phytozome v7.0 (chr-ID chromosome_3; pos 63695521 to 63696530)
ggtgctcgaggacttccgcgcctccaacgccgagggttcgcgccattcgcttccctttactttggctcctgttttagaactttggagcggcggattgggggtgttcgagagagtgtagcagtagtgtggttgcgccgctcggtgcctcggggctagagttggagcttatcccttccaatcttcgcttcacttggtccttgtgctttgctttttttttcccaatttcattagaatagggcaattttcgtcctgtgatcctgtcgtccttagtcattagtgcatttgtattacaacctgctttgtggtttgctgctgtttctcatccgcattgtgcttttatcaacatgtccttcacatttgcagttacatataatttacaccctggctctctgacgctattacgaattcatgttcaagcaaagtttgaatgttttcttaggtttgagatgtgttaagtggtgcgtacaatatttgtaatgtagctttccagtcatacctttcagaattggccaatcttaggttacagaatgttatctacccagtacccacaaactgaaaactgtttcccattgggtcgcatcttggaattttagtgaagattgttgtgatatagctgtacgccttgtagataacatagtaatatttccatgcaaaagtccttgcatgttttcatggctctgtatttgtcggagcaccagcacattgaacaccagcactgacccaaataattgtttaatattaatttaatgatggtagaattctagttgaccgtaaaaaggttggtatagtagtgataatctttcttattttgatgccattcttttctcatatattggttggccctacttcagtttaagcacagcccccccacccacctccatctattatgtaatgcattggaactattgctttctttctttggagttatgttgtgagctgaataaagtgacactcctagactattttaccttgcagtgtacacatttgaacctggtatatccagacaagag

SEQ ID NO: 37020 - DNA, 899 bp, Sorghum bicolor
  Intron number 2 from transcript Sb05g021630.1 (locus Sb05g 021630) derived from phytozome v7.0 (chr-ID chromosome_5; pos 52792410 to 52793308 reverse strand)
atacaaaaggtttgaaaaactattcttgtcttggtcaaactactgttatatgtatcacaaggaaaatctctttcccttatgcttcgtgttccaactataatgttctattccttagagcatctctaagagtacctaaaagagtctccaatccaggaattttggtaagattgatgaaaaaactcatctcaaacaactctcaaacccacctcccaatcttttggcacatggaaaaaaacaccccctcatgcgtatcgtcgccccaatctgaggtggaaggacatggggaagaaaaaagagtcggacagggttcctgatagaaatgcacaagagagacgtaaagtacaaaagtgaatatttaggattcctgatataaaattaccttctaccttttaggcgcgagattttggaaactgttggagttctagctttttgtttcccaatatattttggttggaaaacctattgtttggaagtacttttttagatactgttggagatgctcttacattgtgttaagcatatcagtttttcatgttttcatgaaagagaatttcttctcccatgattaatgcgactgtcatggtcataaaaaacaatgactaaatcctgcacctgtggtctagtgctttgtgttcagatcagtaatgctgtcaatggacattgagtcctcttgaagccttgatatcttggagcttggacactggttctttttgacaaattatattttttttagataatatttgacaaattatatggtttacttcaattgtataccgcctttctaaaccattttgaacagagttagctcacattgcaatggcctaaaacctaacattcaaattgaatttcgggtccatcgcgcagcacttatcccctgatctgccatacgaattatcgcc

SEQ ID NO: 37021 - DNA, 666 bp, Sorghum bicolor
  Intron number 1 from transcript Sb01g017010.1 (locus Sb01g 017010) derived from phytozome v7.0 (chr-ID chromosome_1; pos 17234741 to 17235406 reverse strand)
cagagggctcgtcctataggtttgtgcttatccgtgtcatttagatctcactgcatgtactggatcactgtggcttggttaggtttgtggcattgcgttttttagccgtacacttttgagtttggacttcgcgttggatctgcgttggctacgtgaattaagcagctgctgcttaattttggtgctttagctgctgccttagtggagttgtattgtcatatttgagctgtgaattctggttgcattagaatgcttatgtgcaagcacaattgttaccatggattgtggtattttggtgatctttcttcagcaaagcaaaattggtgttgatgcagtcctaccacaactcatcttctgttagggtaggattgttatattattattaggtatatggatatggaagcacctttcttcttgtgaaaagcggtgaacaaaattttcccgccattataacgaataatgggtatcagatggttgttacctggtactaaatgcattaatcatgatatctgcttagttcgcagctgctgcaacgttacttgttcacatttatttgtattggcttatgcacaaatttctaatgaaatggtttgaacagtaagttttattgatttcttcaatttatttatttcagccaagacagcacacaacagttttcatcccacc

SEQ ID NO: 37022 - DNA, 687 bp, Sorghum bicolor
  Intron number 2 from transcript Sb03g026240.1 (locus Sb03g 026240) derived from phytozome v7.0 (chr-ID chromosome_3; pos 52823302 to 52823988)
gagtgcaaagcactgaactcgcgactcataaacttgtaattttcttattgatttatgtgatattagcagcatattcgatctactgatgaaacttaacttagtatttaatttttgtgtgagctgtcttattataactttatttgtgacttctgagacatacagtggagtgtttgtggtggcaaacgaaatgcctattagagaataataataataataataataataataataataatcaataagtatgcttgtatgatataattgtgtttcttctgcacttatcattcctgcaaaggtcctgactcatatgcacgtgaaattatacataagttaactctatgtatttgatttattggtgctgttctatatatagtttgtattatctgcgaagaagtatgcttttgtctttgggccaaaatgtgttactacctctactcacttatacatgatgttttagacaacaaaagaatacagaaatactgcatgcagttcaatcattctgtctaaaacattacgtacacactggtgggagtattattaatttattactgaacatagtggaccacaacacattttcttgttggaggatattgctgtatgcattattataagccttactatccgggtttccttaagcattgctattgtgtagcttacgtgacaaggcccaggtggaacagttgcttc

SEQ ID NO: 37023 - DNA, 658 bp, Sorghum bicolor
  Intron number 1 from transcript Sb04g021740.1 (locus Sb04g 021740) derived from phytozome v7.0 (chr-ID chromosome_4; pos 50857835 to 50858492)
tgaccgtacacgttttttccctgcattctcgcaagcatcatcataaccaaaaagtttcatttgcagcaagttcgttgctgctctgttgtatggtacttgatatcacgtggcagtggcatgagtcttatacttcattgttttttaagctagctagttattctagtgtttagctgcctttacggtaatttttcaacgtcgttgatagatcatctcccagtgttcaatgttatcaattgcaactgtccttaccactgtctatagttttctcctgaatgttcccagagatcattcttttgccatttctgaatttagaatagaatgaaaagatagatgcttggtctctctatttttggaagatacacaatagtttcatgatatgttcagaggaagaagagggaaaaaggaaaataaaatctgaaaaaataaatgctttaattataaagtcctcatgaggtgatgaaagccaatagtaaattcaaacaaatcagaaaattgatgaaaacagtgaattaagaagagcttgcttttcatttttgctcataataagatttgtctgaaaagcctaaaaacctaaaggtattatggttgatgtcagacgagaacctctttttgatttgatgcaggtggtgtgacctttggttacagtggaagtactggc

SEQ ID NO: 37024 - DNA, 602 bp, Sorghum bicolor
  Intron number 4 from transcript Sb03g041890.1 (locus Sb03g 041890) derived from phytozome v7.0 (chr-ID chromosome_3; pos 69324872 to 69325473)
agaagtggtagcgtgctggtaaaaacttatacaatttcttatttttaagaaaggaacgtatgctacattccacaaaaactaatgctaaccttagagtgtttatatttatccagcctaagaaaatatggtactggaaacttacatttgttttgagtttataaagtgttaagcaatatcatcaaatttgtactaaatccttcagagttgcaacacaaacatatacctgaggaaactatgacttcattttcttcagttatcaaaacgctggaaccatgaatacacatagtgacaaaaaaaagagtaattgcatgcatcagaaattttgagaaacaccatggcttgtttggatgcccatgtatggattggggtggaaactaaactaatttccactccaatccacctcaacacatgcggattgatatgaatacatggacattcaaacaaggctttagaaattgtgtttaacagggtaacacaaacacaactcttttggggagataaaaaaggcaagcagaaaaggaaggcagcaataaactctcacacctatctttgctggaattttgtcaggatcctcccctcttttttttttggaagaaggcagg

SEQ ID NO: 37025 - DNA, 576 bp, Sorghum bicolor
  Intron number 1 from transcript Sb02g042013.1 (locus Sb02g 042013) derived from phytozome v7.0 (chr-ID chromosome_2; pos 75770445 to 75771020 reverse strand)
gcacaggtgtgtatctctccatttgcatcttcgcttttcacctttaattgagtttgaatttcaaagctaatgtcccaaatgtaaaaaagcccttttggaatcaactctccagccatcaccccaggccaatactgactgaccaaacactgaatatttttacagatgataaaagtgatagaaattttaagctaaaaggcacatttaaagcccaaacctcctcccagaatatcatatttccaccactattaaccttagctgataatccctatttaattgagttcattgcatgtatgatcccttccagaattgggatccagttttaccattaacttgaacaaaacacttattcttaacacatttcctcttaagcatacaaaaaacattaatcctcctccttagcctacaaaatcctccagaccaacttctccatcaaggcttcattcatatttcttgtactggaacccccaaacccccaaagtctttagggatacaaatgttctcccactttacatatgcatgacttacattttgatatgcctgcttaaagataatacaacctttcattttgttttgtag

SEQ ID NO: 37026 - DNA, 916 bp, Sorghum bicolor
  Intron number 2 from transcript Sb02g034080.2 (locus Sb02g 034080) derived from phytozome v7.0 (chr-ID chromosome_2; pos 68589330 to 68590245 reverse strand)
cccgtattcttggaatattacgggaacgtataaaggtaacctctgtcatttccaaggtcctgtgatggttatacaatgctttttttttgagtattagctttggtttccctttctcttaaattgcgtattgttagcttatgtttctgttctaagactcaatatgaatgaccatagtttttgaacggcataaattaggatgattactcaggtttagatatgccatgttggctggtagacaaatccaagttagttgaggtagacaatagatgaaaacccagcaaagggccatcaaaagggttggctggcagacaaacagtcagattttggcattactgattttcttattaagaaacgaaatgatacttattttatgggctattccagacaactgagtggcatcaaatcttattcttactaccactaccatatttccaaaattgtgtggtttctttattttttctgtcacgtgttactcatgttttcacataatatcactgagactctagatttcttgttcttagggtccatttattgctgctatgtcctacagtacacatgttggaatcttttaacattttcttcaatattgtgctgtaatgacttcagaaaaagattgaagccatggtcattcccagtaaaagtagtcacgtgaatatttatgaatcagatacatatatcatgtgatccaatgtgaagtgcactggcttgattaccagtctcgaaataacctaaaaaaacatacacgactgtgcccccaccccccctccgagtgtaccctattattgctttgctatatattgatcactactgtttttgtcagtattacttcaatttgtgtataacactggttcaaaaaaattggtactaacacaaccattttatggtctagggagctggacctttgctggtgccacaa

SEQ ID NO: 37027 - DNA, 398 bp, Sorghum bicolor
  Intron number 1 from transcript Sb04g012230.1 (locus Sb04g 012230) derived from phytozome v7.0 (chr-ID chromosome_4; pos 19244155 to 19244552)
tccggctgatttcttcttcttcttctatctaattggtaagcctgggctgattccgccgtgtcgtgatttgtccggacggtgcaaatcccaaatctttcctcgccaccgaattcaaattcaaatctttgctgcgagattccgtcccggttgtctcaagtctatacgcgtctcttgttggactaagtcgcttagttagtcatggtttcgagatcggcttcttaatgttttacagaaataacaacaaaaaaaaatccctttcgagcatcgtattctgcttaataattgttctgttcggcaaaataacctgcttggtaagaaacctgatttgttcttttcctctctcttttgtctcaacaactgcagctgggcaagttccgtcgatagtcgatactgcttgt

SEQ ID NO: 37028 - DNA, 1011 bp, Sorghum bicolor
  Intron number 3 from transcript Sb02g030650.1 (locus Sb02g 030650) derived from phytozome v7.0 (chr-ID chromosome_2; pos 65682857 to 65683867)
accagatcaccaagggcaagactgacgctttcaaggtatggatgcattggatcctctcaatcattgcagagatcggttgacatatacacatttacatgcaatgtagacaattttgtactaggagttagctatggagccacggagctgttcagctgtctgactttcaattaatgacaattctgtgctttttttttgttactagttacaattctttgtcagaaaggaagattagatcgatccgtgctatttgaaacccatgtttcttgtaacgagagtaatgtacttcgcaacaattgcctaagtgttttttttgttgttgaatcatgcttatgttgcttacttaattctgatataagaaattactagtgtcagggaatacggatgtgttcctttcatcttggatttcagcagcacatcacttatcttacttgtatatcggcattagaaccacctatttcattctgctgaatttttttatggtttgttgtctctcttttgccttcctcaataagaaacagtctgtcagttgttaaaaaacataatctttttctaacagttgttcagcctttttcatgacttcctattatcttctctaattaaatttaggtgaaacataccataaaagtttctgtagtacactactgctcatgctgtagcattatcttggtttattagttattgatttggatatatggaatttcttacatgacactaagtatatcatgtgtgcaaggcatatgtggctgcaaggtcctagtttgtttaatcttatggttatcagtcatacaaacaattataaattgatcagagaactttttggtgatcacatgggcactgttttatgtgaacactctcatgatctgtaactaaattagcaactctattttttccgcatttgatctgggggttaattcacttatgttgcatctaattataaaaacatgaatttgctcaattgtaagttggtttatttcagagtctaaggaagcatcttcttgaggagcttgaaca

SEQ ID NO: 37029 - DNA, 658 bp, Sorghum bicolor
  Intron number 1 from transcript Sb05g023960.1 (locus Sb05g 023960) derived from phytozome v7.0 (chr-ID chromosome_5; pos 56864679 to 56865336)
gcctgcgtcctccgagcaccggccgacgaccctgcgtacgcacctccctctcacctcccgcctctgctgttcccgtgggagcccggccagctgcccagggtggccgggccttggctccgccggtgctctgtgttgtgccagcttatctgctgccacagcccctgcttgctttaatcatggcacaggctttcaagaaaatacagtttgaccattggctttgatgtgttgtgcgcttgaggttatcttgtgaaggaacagaagagtttctttgctttatttcccttgctgtatgatgttggttcttagacctgcgccatgtcctactctgatagtctaatatcttcgacttcgatcaatgtcaattgctctgccccttttatcttttgcttaccagattaattatctgcctgaaatgacaatcatgaggccgtgtaatgtgccacttcagctcaagttggctgcagatgtggccaacttttgtggacagtggacctatattgagtatttagttattgtcttattcaagtgctgtgaagtttgatttaggtcaattctgtcaaattcatttctgcatttgtatgttctgcagtctgataagtattgttttttttttctgttgacaggatcagaggagcaaagaccattacttatcataaga

SEQ ID NO: 37030 - DNA, 914 bp, Sorghum bicolor
  Intron number 1 from transcript Sb03g037450.1 (locus Sb03g 037450) derived from phytozome v7.0 (chr-ID chromosome_3; pos 65389149 to 65390062)
agcacgcgccggactccggtgagacgataggtgagggactcagggccttgctgccgtgccagggtttttagcttgtccagaatctccaggcttaactagttatccacagtttcgactttcgacttgtggagatctgcgtctgcaccctgaattgtgttcctacaaaaatgaaaatttgaacttggagattctaggatctgtattttttgtttacactgcatagagcataatagtagttaatactgctgcaagctgttcatatggaacaattttcttactagtgcctcaaatgtcattgtttttgcacgtattccgaagctaccattttttcctggtggcagtgagacgagaatatgaagaccgtttgctaggatttcatgtcactctgcacgaacttgtattttagctttaatctcacgtgatttatttcttaagcgatgctcacacgattaataagtatatcacaatcttcagcagtcaccatagctgacaattgctattctagtcctccaaatctagcatgattggtcgtacaaagtttagtatccaaaatataagaattatttttagataaaaggtaaccacctagatgttttctttggtggaaggtttgggttgggtgtccacacaaccattttcggtgcactgctgttgcgtggcatcccccccccccccccacccacccacccaccagtctatttatcttggcagaactctatttctgattcatcttgattcaatgattcatatccttctcttattcctccgtcagaatgccccacaactgtgtttcatttttgtatctcatacttttgtggaccatcgataagaaagcttgcaacattaacatttctcagctgtctattttatgatatgcaggtaactctgatcagagacttggacactatatcgct

SEQ ID NO: 37031 - DNA, 782 bp, Sorghum bicolor
  Intron number 1 from transcript Sb03g003300.1 (locus Sb03g 003300) derived from phytozome v7.0 (chr-ID chromosome_3; pos 3457938 to 3458719 reverse strand)
tctggtgggagcatctttataaaggctgcatctatgtgagtgtttgtggaatgattttaattctgttctgctttctttaggctaagtgaactgactactgagatgggaatgcaagctgcaagcttagttagttaagtagaatttggaaaacagttaccaattgagaagatcagcagaataaattggtaagaaagaaattataagttggagtttggaaaacatttgatgggtcctgcattcttggccatgtttgtacccagatatagtgggctaagaggcaatagatgaataccactcttttccccctttcagatatgcatttagggtacattagttcatttatttgatgtactgaaataagaaaaaaataattctcagatttctaaattgcaaacaaatccatgtttctagtacttttgggaagcctagggtcaatgtagttactgccagtttgatgctatgctttgaaacttagttctgttgaatcaccaagattttaggatttctctgtgcatagaaacttagggtaagataggatcaccctcatggattgattgagagtatataaatgatgcacatgattaattggttggtgagtcaaacaatagtactggtcataatctcataatgatatatgtaagaaaaggggcagtggaggaatttctttgcaagtttgttttgttgtagatctgcttagtgcttattataacatttgtacttcaggatatttagtaagcgattgcagttttttcacctcttcttatcgtctgctggcaacaggc

SEQ ID NO: 37032 - DNA, 652 bp, Sorghum bicolor
  Intron number 2 from transcript Sb05g004580.1 (locus Sb05g 004580) derived from phytozome v7.0 (chr-ID chromosome_5; pos 5804144 to 5804795 reverse strand)
gagaacaaagccgtgatttagtggcaatcacaaaggtatattgactcaaaatccaaataattttgttcttgaatactattgtttacatgtcaattagggggggggggagggggtatacatgataagctgcatggtttaagagtgaatcttactacttggtccagcaaatttttttgtgtggggaaatagttatagttagttgtccttgggcgggattcttcgaagattcaaaatatttatgtaaaaaggggttcgttgtcggattgctcgaaagtggttgactagttcggcaacaacacgtgtcggtaacttgtttctcgtggaattgttgatgtaacatctcaagcattggtcctatattctaacatagagtttatagagaacatctaatatctgattcaataaccttcatcattttgagtagtgagaaagacataataaaaaaatcattcatgctgtccaatttggtcagttttaaaattagtaacctcaaacttagcttttgctgccaagcctagctgctgttatatgtaaaacagcattagtattcaccatgttttacccattttcacccaaaacggcactgcataacaaatagttttgtgaactctctgtaggaaaaggttaatctctctgaagctctctccaatac

SEQ ID NO: 37033 - DNA, 533 bp, Sorghum bicolor
  Intron number 2 from transcript Sb02g040860.1 (locus Sb02g 040860) derived from phytozome v7.0 (chr-ID chromosome_2; pos 74784167 to 74784699 reverse strand)
cagtggcgctcgagatattactgtgagtctgtgacaggtgtttttgttcattttcttattttggttttcatagcagtaacgttggatgttcattacacaatcatgtgacataggaccacttatgccttaccttatatgagaatccttcctgtcattttagtactctatgcgaggacaccaaaagccccacgttcctcgtgatcaaacaaacgaagggtcctactataaattcttgtcactagatgaccgttatgtcttattcagtcctttcatgctgtcttatatagccaattgtgagcacaaagataaatcttggcttctaaagttctgttccaccgggtctgtgatgatatggatgatcttatttaagcctcaacaccacagcattagttctgttggtggattcctcacagtacataatgcctattcccattagttccttgccatggcagcgccacttacaggcattttaatgattgggtgcagctgattttgatctgacgggacagttagtgtggccaggggcagtcctg

SEQ ID NO: 37034 - DNA, 455 bp, Sorghum bicolor
  Intron number 2 from transcript Sb02g007970.1 (locus Sb02g 007970) derived from phytozome v7.0 (chr-ID chromosome_2; pos 10272737 to 10273191)
ccccgccgacaagcagttcctcgtcacccgcagtacgctagctaactcaagtcgagaattctaagattcgcctcctgtctatctatctactgaactgcggggccgagttgagtttttaatttgtgaatgctgcattattgggcttattggtgggaataggtaggattaattggacaatttgtaggtttcttcccccaaaccagatgtggtggatgggattaaacatacgcttgctagtctaggcaaaatctttgagtaatctggaacataaacactgggaaacagaaaaaattagttggaaaaaacaaacgatgctttcggactactgaatttgcaaccttcgctgtttaataaagcttgtagagctttcgaatatctggctcattgggaactcatgaattttatatgacgaccccccagtgccttgtttaagacgtgccatctcggtcgaggga

SEQ ID NO: 37035 - DNA, 769 bp, Sorghum bicolor
  Intron number 1 from transcript Sb04g034410.1 (locus Sb04g 034410) derived from phytozome v7.0 (chr-ID chromosome_4; pos 64244556 to 64245324)
ggatcttttgggtcagtgtacgaggcaatcagcgagtaagtttgattcttcctacttcatgataattataccatattcgcattattgggtttttgtttgtcataattaactaggacagagaggacaatggaagcacagctacacttttgctctgcaagaatatacatagtaggtagtactgtattgctgaaactgtgtttatgatctgatatatcagctatcaagttcactaatcttagtgtgaataattcgagaagctttcaaatatattgcaatcgatgtaatacttctcattttaggtgcacttaactattgcctgactttcaaaagaatatatcgagcatcggttttcagttgaccttaagtcaagtcttatccgttggattttagtctatcttggaatctttgtttgtgggaatacattctcctggtgttttatgcagagtcctgtgtcccatctgagctttcacttcattaggattctctgtgccagaaacaatatttagttatgtatatattcattataagattggcatgcatatatggatcttttcacaggttgtctgtgatgtcatttcttgatgttggctagcattatatgagatcaatttattattttcataggaactccagagttcacaaattttctattatcaaatgcagccaacaggctatttggtgggaaaacattcagacattttcgatgaacacatacatgctgtgcaacacaatatttcagagactgacttctaacatgtcttttacagtg

SEQ ID NO: 37036 - DNA, 578 bp, Sorghum bicolor
  Intron number 1 from transcript Sb03g023980.1 (locus Sb03g 023980) derived from phytozome v7.0 (chr-ID chromosome_3; pos 47908634 to 47909211)
agcgacgactcgacgccgcacgcgcccaggaagaggtaacccacctccactcaattacatgccatccctgtgcgagaagaaacctgttgctagcgccacgaacccttagtattcgttttgcctggaaatttctctctcctgtttgcttgtataaactgtttgataggttgctccccaattcgatcgcgacaatcctctcaatttaagaggaaaagaaacattttgattgatccagaaacttgtttgggcctcagggcagcttcccattatattggattgttaattttgggttctagccacttgcataacagtagcgcaaacccaacactagtcttttttttagggttctcgtttactgattctttcgattacaatcccaatattagcccttttaggattctcgtttgctgtttgttttgattattaagccgcttgcacggttcattttcacctacttgctgcagataataaattcctgatattgattatgtttggacggttgctgtctttatcttctttatgctactcggtgctcatctaatcgtcttttgtactcctgatgataggctgaccagaaa

SEQ ID NO: 37037 - DNA, 549 bp, Sorghum bicolor
  Intron number 2 from transcript Sb03g029710.1 (locus Sb03g 029710) derived from phytozome v7.0 (chr-ID chromosome_3; pos 57919170 to 57919718)
aggttttctaaacaggtagacaaggtttcttggctcgaattgaagtatcaaattgaaagttgttcaaattcatgacatagaaggaattcattgatatttatatatatatataaaaacttatgctacttctgatgatataaggctttcaactttgtttgtgctctaccagctggctgtgtactttcattcagtaaaataagtaactagcaatctatcatatcatcttgtgacctgcaagcatgctagctttagcatttggcaagttcatcctgtccttgtgactaaggttgttaacaatgtcacctgtatagttagctccaagtctttaatctgcctagacaaaaattgatgtgttgctgtactctctacattcatcgtatttttagatgtatatttgtttgaatcctcacagcttgttttttttttggaagaatatcctcacagcttgtttgcagcgtgttacctctcatgctttaattggtgtatatagaatatttttgtgagtaatcatatttgagcttttccttttattcattttgatgcagatct

SEQ ID NO: 37038 - DNA, 925 bp, Sorghum bicolor
  Intron number 1 from transcript Sb03g038770.1 (locus Sb03g 038770) derived from phytozome v7.0 (chr-ID chromosome_3; pos 66583409 to 66584333 reverse strand)
cccaagtacaagtgcccctcctgccgcacgccctagtgagtccagccacgatccttatctgccgttgtgcgtggttatatacttacatttgctctcgccaagtgcaactttgaggcgtggcgtgttttgtcagcgggtctatctctgttgaattaacagtcgtgaattcatacccatgtgactgtatttgttcaatttcttctttgaggagaggacaggttgactagggttcatagaacaaagtgattaattgggcgtgtctggattatgaggacatgacatttgcttgtagcctcagacttgcgattatagcttactgtccatacaatcaattatatgaaagtaatatcgctacaattctagcattaaagcatagtgctgtgtttcatgtttatttttggtggaaatttaaagtagattagtgggaggtataactgagaaatgctgcattaatccagaaaccaaatgtcagctacttttcctaaatgaatttagcgtgcacataaggctaaggttactattaccttgaggagattgaagatataaagttgagccaccgaatcttttttttttcctttttttttaaaaaaattgtggcttcagctggtgtttcagtatcattattattttgtaatgatgggtagcatttgtttagaattgcaacataaggatgtcactaaacatttcagccttcaatgcaattaggctttcttagcctgctctactttatcatttttctaagtttatctactattaattaaatgaagtcaagattatgcccagaaaatctaaattagtgttcatagtaaatattttgttacttgttatatcatatatgcagattgactaaaagcattagctctcaatttttttattagttgaacctaatttactgtctcattattccttgcagttgctctgtcac

SEQ ID NO: 37039 - DNA, 980 bp, Sorghum bicolor
  Intron number 1 from transcript Sb03g043140.1 (locus Sb03g 043140) derived from phytozome v7.0 (chr-ID chromosome_3; pos 70526699 to 70527678 reverse strand)
tcggcctactgcggaaagtacaagggtacgttccatcctcttctcccctccttccccggtcatgttggtatcctcgctcgttgctgatctgctcgtgatgtcgttcggtcttgtagatctgttagttgttcgttgtttgtgccctcagatctagctgtgttgacgagtatgctaacgatccgtatagctctgggagacccgtttgggtgtaggatttgtggaaattttgtagatccgtacaggcttgtgcggtcgtttggcttttagtgcctactacttgtgtttggctttttaggggtttggtggttgccaaaagggtttaggtgatagagcaggtgatacctgtatgatcggttaatttgatatgggattcgcttattttgtcttgattttatttatacatatagtggttacatctgtttgtgctgtttccgattgaggcacactgtgggtcagattattctttagcttatgtcggtttggtatgtcggttcatgatagaaagataaattctcctgctggtatgcacatgcactggtggctcatgttgtagtttttgtgtgcttgtttcaaataacctgcttgttcaatctaaatattttcctgtcatgccatggctgctaaaatagatgttatatgcatgtgtctaggatagtcgatgctatatgcatgtatataggctaatcagatctataaatggttttaagcttactgtgctagtctaatcttgatctgtgcttccttttagtcatgattatgtttttggtaatacagttatatgtaaagcatgattacggtaatatatttttgtataataaagcagtttttggttaaccagtagtaacttcctgaattaataattaaagtgattttgtattattcaggacggcctttgtacttgttagataaccatgcttatgcttattgattgtcaagtcccactattcttgcgctaaatttttgtgtctgctattttgcag

SEQ ID NO: 37040 - DNA, 914 bp, Sorghum bicolor
  Intron number 1 from transcript Sb04g030200.1 (locus Sb04g 030200) derived from phytozome v7.0 (chr-ID chromosome_4; pos 60225913 to 60226826 reverse strand)
cctcggcgacaacccctacgtccgggttggtaacacatcaaaccctaaccctacctgaatgatctgtgcgcttctccttggcgttgttgatgcgtttgcacagcttgatttggttttcatttgtgatttcttattatgctcgatgggatccgggcctaggttacgtttctgtttaggtgtcgaattttgtgcgcgtgtggcatgagatgttttacataatggcttttttgtgtggttgtcgttgctccgtgtaactaactatgatagatgtgctgttgaacttgggattaaatcgttgaggaagtcttatgcttgcttcgggggcgctgcaaaatgcatatgtagccctagttttggggctgtttggttccgttgcttctcacctcaccttgcgtagccaggaaatggaaagaggtagctgtttggttggtagcctaggtcccaaggaaataccatgctagcatgggagagccaatccggctcgctccagccacgaggtaaggctggcccttgctagctaggcaagtcaatccctgccgcagaaccgaacagcccctagtttcaaatatttcaccccaagagcactctgggaaaatattgctcttactgctgatgtttctgcaagagcagtagtgcagtagggtggttttgccatatgcataatgtagtttaacaagatgataattgtatttaaaccagttatactagctagcaaaaccaggataaattagtttgctaaccaattggttttgccatatgccatacgcatcatgtagcactagttaggtgttatacatgaatggggataacttttcatttaatctctccttattttgcatttgcttcagtatttcatgttaatcctattttatggcttactggctcttgtttttcttttcagttaagagctgagt

SEQ ID NO: 37041 - DNA, 941 bp, Sorghum bicolor
  Intron number 1 from transcript Sb01g010820.1 (locus Sb01g 010820) derived from phytozome v7.0 (chr-ID chromosome_1; pos 9715416 to 9716356)
gcggtcgcggacggagcggcggcgcgggcgagcgagtctctctctctctctctctctctctatgcgtgtgagtcttttctttctccgtcgttctcgaagcttctcagttccgtaacgaatcgctgataaagtaattggagctcttgcccacttttaactcgcttcccttgtttctcccgaattgagctagctctatgcctctttgtgtgcgcttgcttgcttgctttggctgggattctaattctatgcactagtaactggaagggttcaattcgattctgaatttctgatgaattgtttaggtggtttcgtgaaattaacttctccaatatcatttcggcatctttctatgcccgtgccttgtagacatcaaaattcgggttttaatatgctgaaaattgggaattcggggttgagtccagagatttcgggaccacctcagagctaactaactggttggttgggttagacttggggagctgagggtgggggcttctcttgttcagttgaaatggatgcatatttcttttttgtcctgtatgtactagtatatttttagaaataaaactatgcttgtttcaccgcttcactgcattacataatttgttttggctaattttttaaacaaatctatatgctcttgtctgagttcagcacaaacacttgcatttctgcacaacttactagtttgcaaccttctggtgattccagtttccatgatatgctgctcagatgtggatactaattttctttcagttcaaacaaagtgcacagcatttgtatctgacaacttggcatgtttgtgccttcttcgtttattgtgtgctctgtaatcccactgtgaattgattttgttggtcaaccagataaggcatggaccactaacatgatcagtttgtttatgttttctggtcaggcaagctttcaaaggaacttctctg

SEQ ID NO: 37042 - DNA, 888 bp, Sorghum bicolor
  Intron number 1 from transcript Sb05g022730.1 (locus Sb05g 022730) derived from phytozome v7.0 (chr-ID chromosome_5; pos 54926702 to 54927589 reverse strand)
ttagtaatgtctctcgtcttattattatctttgatgttccactaagattacttaggtggtgtttggatccatttgctatgggctaaagtttattagcccttgtgctaaaggtgctaaagtttagtctaagtgagatgtttggaactagggactaaaaagtaaaaaggagaggagaggagagagaaagagagagtgtttgacttttagcctagtttactgtctctttaggggcaaaagattttagtctagtttttgaccatttgcttacttttagcccccctcatttggatcctcatggcaaagaaaaggcctaaaagtgcaggctaaagttttaccatcggatccaaacagggccgtactctaattcaacttagtcatcgtttggtacatctctacttcactggtggggcaatgttttctcacaactaaaactattttggaaaaggtttgcaaaaaacttctcatgatagatttggtggaaggatatcgtaggacttagggtctatttagatctatccatctaaactttagagctaaagtctctaaataagtggtctaaatttttttttaagaaaaaatggtctaaagttagctctaaactttaacccacctcacattagagctttagacctcaaaagtgagctaaaatactctaacgtttagagaagaggatctaaacaggtcctagtattttttagctccattcaatacccacctctcttagagtgggttttcagaagcttcacttgatgaattatttcattttacccttattttaaaaaatagttccaaacagctcagttatgccaaacaatatcttattttgtcaaaagaaacatatttttccccaaagaccttactggtgtggatgtgcgttgggcatgcagg

SEQ ID NO: 37043 - DNA, 815 bp, Sorghum bicolor
  Intron number 2 from transcript Sb01g039660.1 (locus Sb01g 039660) derived from phytozome v7.0 (chr-ID chromosome_1; pos 63132433 to 63133247 reverse strand)
gaagcaggaggtaaggaaatgtgaatcatcatcgaataatgtattactagaaagtcatgagaataaattttatttgaacaatagctgcaaactgggagggtgttctgcatggatatccagtcttcatgggaaattgattggttttgtgtgttcttttttcaatctggtggagcaaagttcgatagcatcaacaaatgtaaatttcgtgtaaacttttgtgttcaaatcagcgtactgaactaaaaagatacctcaaagtcaaagctgaagaaaatgcacttttttttttctgccaaaatagttccttataagttccacttcccgtttttttatttgggcttcaaaaagtttacagctatattctacttctacacttttggatgtcacaaagctcttaaatatgccacatggttggccacagtgtgatgtttaaattggctaaacagcagtttagacaaaaaagtgcccacaaccacatatttaaagtagtcctgttacctttgcaggcttgctcgtaggtcatgaagtagagagtaacttggtttaaatactttatcttttgattttgacaaatataatttggcatgaacatggattttgaaggttatactctaaaatgcagtctcactacattattgactcatgaaaaattctgttttcttattatatgattatgtttagtagaatctatgattttacgatcatagtagttatgatcctactatttacgatccttggagttccgatccgattcagcatcacgattttaacaagcatgtgcggttaatttgcaggatcgtgatagctattggaag

SEQ ID NO: 37044 - DNA, 822 bp, Sorghum bicolor
  Intron number 2 from transcript Sb05g018575.1 (locus Sb05g 018575) derived from phytozome v7.0 (chr-ID chromosome_5; pos 45243549 to 45244370 reverse strand)
agcccagggttagtagaccccgcccctctcattttcactccagcccagagttaatttggctactgcacagataactgatcatggagaagttaaagtatactaatagattttggctaaacacacacgctcccttcgtattttagtcatgataaaactgaacataatagactttgaccattgataaaattgtcaatgagttgctaaagaagaatcgacatcatcgcagatcgaagcactttgaatacaagtctactgcccacaagcttaaagtccttaatatataatttgaatacaaggctattggtacaagcttcaagtccaatgtttatataagttaatatttttctagtaaaagaaaacttcatctaaaaaagaatgcaatttgagcatagtactactaggttacagtatgttgagttatacaaactgcatataaatggattaatgtttatgagattagataaatatcattagatttgttatatgatatactagttttacaaacatatcaattttaaatgtttctttgttttacctaaatatattttgttaagttgtagatatgttaaaaaagaaatgcattttgaattgaattcgttttagaatggaggtggcatgattaacattcagagatggagcaagtatgattaacattttgagtactatccctagttatggagtagcagctagtacgtccttgccgcatcagtggttcagattcagagtcagaacaatggaatctagtactgctactgtcaataagaagttgttgtgtcttttttttttctaatgcagaaacgggtgacgaggaggagcctgtgg

SEQ ID NO: 37045 - DNA, 884 bp, Sorghum bicolor
  Intron number 3 from transcript Sb03g027600.1 (locus Sb03g 027600) derived from phytozome v7.0 (chr-ID chromosome_3; pos 55274008 to 55274891 reverse strand)
acatttaccgagaagacctccgagaaccctgatctgtatgttcctcaatcagttcccctctcagagaacatagtatagctcaattttgctgcattactgaaacatgttcccttaggtagcagacgctgtagaccattgtgagttaatgtatatgctggatttcattattcatagatcaaattgctctttggtgttgaatgtgggtgtgtttgctttggctggaatgtgttggttacgtagttttgtgcattcgcatatcttgttctactcactgatagttgggttgttccaatacttagtttatttttgagtgggatctgttggtttttggttgaactgatccttggaacagttattattgtccagcattgaggattgctgatatgattctttgagtttgttttaagattttaagatggctgcaatgtcagagccctttctatgcgagtttctgtagagtttatttcagcaaatagcaagcatgaactagctattagtatttgcacttgctattgggttgaaaattgaaatacaaatttatgatatcctttattccttttgaagacattatgttcatttgcaatcaaattgctgtttctctatgtcgtgtatggtcatctgtagtggatctacatcaaagtagaatatgcctatgaagttgcattgactgcttctttctgaaaagaacaattcgactaccaaccatttcagtttagggcatatgaacgatacttaataactttgtaactaacaatgatataatagtacagagaacttggcgaatatgagtcactgggaagattctatatttgtctgaatgattaattctttgtaatttgctactgatctgctgtgccttctgtttcattttgtattctgtaggt

SEQ ID NO: 37046 - DNA, 594 bp, Sorghum bicolor
  Intron number 2 from transcript Sb01g049380.1 (locus Sb01g 049380) derived from phytozome v7.0 (chr-ID chromosome_1; pos 72386134 to 72386727 reverse strand)
aacctgaaaagcaaactggtgaggcatttgagtactggtctatgatgtatgtaactttatatgttgttccccctttttttgctattttgtcaccccccctcccgggcacccaaaaaaatatatgacacattaattataatagagaaacatatcaaatggacagatgtactagtttgcttatctgcattatagacataacactaacaattaactatatgttagttcttgtgagtttatgcactccaatactataaataaatagagctatatccattgtacaactcttaagaccctaaacagtttcatttttagaatgtattttgatttacctgcactgtcataatgaaagactaactcttttctctcaattgttaaataatttctgcgaaatttcactttcgtgcaacaataactattgtggagttttgaatctcattagttgcttataggcatgtagacaacattagtgctcatccctgatctgaagacaaagattttcatttgttgtttgtgttgtttggccaattggattctaccgatttatattttgtagcatggacctttttgtccttgtagagttggcgaagcttggaa

SEQ ID NO: 37047 - DNA, 708 bp, Sorghum bicolor
  Intron number 2 from transcript Sb04g038430.1 (locus Sb04g 038430) derived from phytozome v7.0 (chr-ID chromosome_4; pos 67836641 to 67837348 reverse strand)
ctgccgcgaccacgacagctgcgtcgagaagaaaggtttacatttgcttgcctgctctgcttgcgtccctgttgtctgccttgttgtgctcgttagtgagatgggtggatggatcaagccactagcctgcaaatcatcactagcaaggaatttttcattggatgggttttgcgttgccggatgcaatgtgatcactccactcggtatgttattattcttggttgtgatgtcgttggatcctcctcctcctactaactagtggttaactgacaaattcagtgccttacagcataataaaaaaaaatcactcactccaattcgttgctctggcttctctctggttatgtgctgtattgttcatagttttgaagaacagtgtgtttgtctgtcatatggatggtggcaattggtatgccatgccagcatgtattggggtatgaggtctctttaatgaagaacaaaagttattagcatatacaatcaaaggcctcaaactcataacagtaaagtttgcatttaccatccatgaaaagatatataaaaatgaaaatagtgatcaacaaaggatgagcatgaggatatggtatttgtattgctgtattggtatcccccacaccaactcaaatggttttggacttgtattcacctgcagttcctcagctgatatgtctcttgcttaatgctttgatttgttattctctgctaggt

SEQ ID NO: 37048 - DNA, 428 bp, Sorghum bicolor
  Intron number 2 from transcript Sb03g045470.1 (locus Sb03g 045470) derived from phytozome v7.0 (chr-ID chromosome_3; pos 72729045 to 72729472 reverse strand)
gaaggttagatagaaatggctgtcagcaacagtgttttttcatattaaaactgctagagcatcttcaagagtctttctaaatctcacgtgcactctaaaaaaccattcttgtcttctatttttagttagcgagaaattcagaataaaagatttggataaccatttagaaaaactgttgaaggttagtcttttatcaaaatctttctattccacattaaggaaggattagaaagtttcttactctaagggaaaacagtttttttatcataataatatcaaattagcaatatcagcatcatcctctctctttttttttttttgtttttgttgagtcatgcaggatccctgagctcatcttttggcatataccaagcacggcgtacgtgaaggtaggtccaaaagccaagtcagagataaggaagccctgc

SEQ ID NO: 37049 - DNA, 509 bp, Sorghum bicolor
  Intron number 1 from transcript Sb05g002800.1 (locus Sb05g 002800) derived from phytozome v7.0 (chr-ID chromosome_5; pos 3011829 to 3012337)
agcaggcaggatatcctgaaggtccaggtgcgtttgtttgcctgtcttgtttgtttgtttgtttgtttgtttgcttcttctcagttcttccaggtcaagcaacttcacttcacatgcattccatgccatgctgcatgagaggttttatgtacacatggcaactgctatgccaaaacacatggtgctttggactagagtagaagaaaaattcaaacttcacaaaattatttacccacccattaacatggtcttatgtctctgcatcatgtcatctttggtcatagaggcaacttttgcgccgtcatgtgcacgttttgaaagatccttctattcatttttcttcaaatgttccacacaatgtatatgcacgtttcaccccgcatatctgtcttctcctaatccttttcttttttttttttgcgaattctcctaatccgtttctgtgactctctctatctctctctctgaccacagaccctggagctcaaagttcccatccactgcgaggg

SEQ ID NO: 37050 - DNA, 541 bp, Sorghum bicolor
  Intron number 1 from transcript Sb07g005400.1 (locus Sb07g 005400) derived from phytozome v7.0 (chr-ID chromosome_7; pos 7507785 to 7508325)
tccggccaaccgccgcgggcggaggggccactcaggtacggcggcgcttaatcccaagttcttgattctaccaagtattggttcgcatgcgtgatctcttcgatgttatttatagaggatcgcgttactgttcggcttgatcctcgatccatttgtttattgatctatttgtttattggtgagttgcattcctggctggtttcgatagtcttccgttttggggatcagggtggattcagcgtgatgggggtgtttgatgtccgtgtccattcgatgaatttcgctccttttgcccacccaaagtggaagccgtcttatgcagcggcacaaatattcagatagtgattcggggaaattcgtatgtagtatttatcaccataggcaatccagtactgaacttttgagattaatcagatagtgatttggggggaattcgtacgattcatcaccataagaaataccttaagctgcagaacttgccttttctgttctattggtattttcagcctttgttgagacctaccagatttgtgagaagaag

SEQ ID NO: 37051 - DNA, 645 bp, Sorghum bicolor
  Intron number 2 from transcript Sb01g005100.1 (locus Sb01g 005100) derived from phytozome v7.0 (chr-ID chromosome_1; pos 4195982 to 4196626)
gcacaaccatttgaggccgaacatcaaggtaaacttcttcctgaatcagttcaatgtttttcgttctgagcacatctttcggttcaatgttgatgacacaaccaatattattagaatttggagaagtctttagaagtgtactttgaccatcttacaatatatcatcagttgctacaaaatcaatctgtatttaaaaggtgtttagggtgtgaatctagctaaatacaaattttatctacaaagcatgcatatattttgaataattgttggtcaaactttatgaagtcgtactgcagtgctggacatttctttattttgtttggccgattctctgaattttttatcttagtacatttagtaatattagaacggtcataggtcaaacatgcattatatatgggcgcagtaaattctaggagttactagtcagccttagtaaatttctgttgtgtaatagatgcatgggaggagactgggatagagattaacttagccagccataaaataatatttttctctcacaatgaatcaacatcagtatcaacatcagccccaaaaacaaaacaattcattcatccattaaccttcttttatttatggaacctcaaatgcatgcagaaagacatttggagtgacgaggaagac

SEQ ID NO: 37052 - DNA, 536 bp, Sorghum bicolor
  Intron number 1 from transcript Sb0010s003120.1 (locus Sb0 010s003120) derived from phytozome v7.0 (chr-ID super_10; pos 392390 to 392925)
aggactctctacacacttgtaagagtgtgattgtcattgcatcttattgttggttaatacttgtttcttgtgaagataatctgtagattcatggtttctccttttatttggctcaagtttcatatcttagctataaatctatactattagtgtacctagttgatatatatatctttaagtatcttctacatccgtgatgatagtaaaagacaaaaagcaaagaatatgttttcttgtgaactctcatcaagcttttttgtatgcatgtctttaggctgataatactaactgaccttgcaattttcgatcatacaacgactaatgatcatcctttactaaatattgatctcagtgtctttatgtaatttctctatgcatattatctacctatatatatacacactcgtgtaacaatgcaaagaaaatgcactaatgcatcaaagagaatatgtcaattggagagacctgattccatatagtatatctagattggctaacctagttcatgtgtcaatccatcatcgttttgctaggtc

SEQ ID NO: 37053 - DNA, 883 bp, Sorghum bicolor
  Intron number 2 from transcript Sb06g022670.1 (locus Sb06g 022670) derived from phytozome v7.0 (chr-ID chromosome_6; pos 51898504 to 51899386 reverse strand)
tcgacgccgctggtagtggcggcggcagcatctctgtaagccttccgttttacttggagctcttaatttccagaatcccgcaccacatgtcgttctagtatatctccgagtttatccttcctgtgggggaacagaaatctgcccatgggataacttaacacagtagtattagctgagaatgcgttaccttcttccagcaagtatcagagtaggtgtcccctactagcactttcatataaaaaaagaaagaagggtagagagggaaatgggacagtgcgattcacctaggcactagcattctcctgattgccacagttgttttctgctaaaaggttttttgatttgtcagtgtgtttcctttaaagttttacagattgcaatcagtgttgtgatagaccatctcaacaattcaaacattttttgttgggtagtaaaatggtttgcctgcttgaattgttgctgggattcaagatgttgactaacctgtatccttgctcacccctcctataagttatataactttggaatggttatgccatctgcagtttgaacattgcactatagatcatggagatagctacgtactgctcatagtatctgagctgcttgcctatttatttcgatggtaggaatgatttgccacaatggcacacatatctacaggccttgatttctctcgctgtacctcagaaatgtacaagttgttacctgaaatacaacctctaaatgtttgcttggacaattgaagatcatataacctaagtgtacaagcatgattctgtagcgaaattagaaaaatcttatttcatcaatatcttaagggtttatttaattttcttttagtccgtaactcttattttcctgcaggtaaaagttattcagg

SEQ ID NO: 37054 - DNA, 727 bp, Sorghum bicolor
  Intron number 1 from transcript Sb02g041540.1 (locus Sb02g 041540) derived from phytozome v7.0 (chr-ID chromosome_2; pos 75327732 to 75328458)
atccttcttctcctgtctttgcatcgtaatcactcaaaacgtttggatctgtgactatcagtcctagttaagattacagtagaagaataactgaagaatattcagtcactatctatgtctgccctgccaaaaaaatttagatggacattatttctgcttgccctgtcaaaaaaaccagtcactatctctttgtgttagcaatcgatgcttgtaaatcactagtttgcaaatgattttgtcgcataggcttttgtttcaattacttttgtagatagttagttttaaattactatggttgcaaatgcttgtacctgacagctaattatttttgtttctattaccagtagatctggttgtattctatctgcaaatgatagcaacaggaaattcagattcactaaactatacatgacgcatagtgtctatacaagtcataggctgtatgtatgtgttttatcttacaagtcatagattgtatatatttgtttttctaagacaagatggtgactgaaaatgctcttgaccaactgcattttgccaagccgtactagaactgaacatagtaagcagagcagctaagtactactaataactactttatctagtaaatctgaacagagcacgcggaggccacgtcgattcagaacaactctgcacgccaattcattcagttaatactacctatgtttcttgcagggataaagacccacgtcctcctggtggtttc

SEQ ID NO: 37055 - DNA, 468 bp, Sorghum bicolor
  Intron number 1 from transcript Sb01g047380.1 (locus Sb01g 047380) derived from phytozome v7.0 (chr-ID chromosome_1; pos 70457101 to 70457568)
gcccgcgcctacgtcgccttcgacgtgctgtacaggtatcagtcccctcggatctggcgcccctctgtcttcctagatacgcaattggcggggatcggtttctgtgacgggatgcctttacttcggcgtgaactgatatatggacatgtgttgctgtgttggtttatgggactgagtaactattggcctccagcactattttttttatcagcataaattactccaatatattcaacacgcgatctgcctaactcgaacgtgttgagatcgctaatggcatggtagtgatacagcagttctgttattgttcaaatcaaactgttcaatgcaccagaaattttttcatgtattaaggttgaattagaactgtgttattattgttcaaatcaaactgttctaatttttcttcttatgctttgataaaataaccggctgtatttctttgcagatatcttaaattcttgggtt

SEQ ID NO: 37056 - DNA, 809 bp, Sorghum bicolor
  Intron number 2 from transcript Sb01g047380.1 (locus Sb01g 047380) derived from phytozome v7.0 (chr-ID chromosome_1; pos 70457607 to 70458415)
ataaggtaataaatggccagatcattttagcagtactctttaataattgataaacaaaggagaatttttcgtatttatacttatttgttgtgtgttcaacagcttcccttttaacaaaggagggcattacctatttttttgcaatggaaagataaaaaatgaatcgattgttatcacccgtgtcaaagttgccctctatatgtgtgcatctttcaaagaggaatcttaggtttattatggtgtggtttttatctttctccaatctaaggccttgtttagttcactccaaaaaccaaaaagttttcaagattccccgtcacatcgaatcttgcggcacatgcatgaagtattaaatatagacgaaaacaaaaactaattacacagtttagctgtaaatcgcgagatgaatcttttgatcttagttagtctatgattggataatatttgtcataaacaaacgaaagtgctacagtatcgaaatccgaaatcttttcggaactaaacaaggagtagtgtataggcaggggcgaagtgccttggaggagaaacttggtgtctcccccccccccccctatctgtactgaagaaaagatcatgaaaagcagtgcatgcatgtcttggaattagcccctccttggtttctgttcaccctcccccgctgtgtataggaattgcattgtgctataaatttaccctttatattcagatgctctctagtgtgtgtatatttgctgtatattgtcctgtattttaatgctatatagtgactccagatattgttttcattgtacagattattaggcgtgcca

SEQ ID NO: 37057 - DNA, 626 bp, Sorghum bicolor
  Intron number 2 from transcript Sb06g023260.1 (locus Sb06g 023260) derived from phytozome v7.0 (chr-ID chromosome_6; pos 52419094 to 52419719)
tcggcgacgagcgcatcctccgagaagccatcaaggtaaattaattttgggttctccacctctgaagtccttttcttaacccagggttggggattgctccaacttgttcactctatacatagtttcttctgtgggtatgtgaaattgaccgttcaatccgactcttacacctggatagtttggttcctgcagtttgagtttcaaattcagtacctgtgtagtcgtgtgtatggccgtacgcttgcaaagtttatcctggaaaggggaggggagtttatgcaacagtcgaaaacttcagtgttgtttcaatgtagattaactcttgattaagcttttcagtggccatgctttaggcgaaactaacaaaattgaaacctactaggcggctagacttgatatttaggcgtactgtttaatacttcactgtcatttggcagtcgaatcaactttgggaatcagaatgctttgtggaaagggaaattgcagaggtggtttcaggaagagtagctattcatcaaacaatactaatacgttcttcagtctagaatttacttttcttgcttgttgatattctaaatgcactgtccacaggagccagtagcattcttgggtggcgtgtttgctgg

SEQ ID NO: 37058 - DNA, 950 bp, Sorghum bicolor
  Intron number 2 from transcript Sb03g044130.1 (locus Sb03g 044130) derived from phytozome v7.0 (chr-ID chromosome_3; pos 71328951 to 71329900)
gcgggccggccccgacggcctcaagctccttgaaggtattgcttcctcagattagacggttcttcttgtttttgtttgggtgatttgatgcactacttgtagttttttttaggatttgttcgtgaagtgccggctaatgatattaggatctcaatgagtgctttacaaattcataaatccatagttcaatccgcgtcgtcatatgttaggcccttatggcggtagcgttgatccctcttaagtcttagcctttgccgattgattcactgtgttgctggcccagacatttaggaaatttgttggctcagctgctattatgctcagattgattcactgtgttgctgcgctggtgctgtttcaattaacaaggatggcttttgtttgcttgttttttagtcctttccttttctgtatcaaatgttttacgcttgtttcagtgctcttttgtcatagtcatcagtgtcatgggtattcgctaaaaaaaatctgatagcatattgaagctgttactggaatttgtttgtgttgggtgtggtgcatcctttctaccagaatccgtggcattttttgaagaatcagcagtcagttgttactaacaattcaggtggcttatattgctgatgtatcatctggggactggtttattgcttcccagtttctttcttcaaagtgctattttgattgctcacttgttatccatatttagtcatatgcgagatgcaggttttcatacttcatgaatgcctgttgtgttgtgctgtgactataggatttcatgaatgcagattctcgtatttcaaagtgttgtatgtttaaattttattagtattcagagttcaagtataggatttcattgtactgtgactgtgagtacatctaggtttctgccactttgtagctgttaatgaacagtgaaagtggtactaattgagtgagtgttgttgttacag

SEQ ID NO: 37059 - DNA, 785 bp, Sorghum bicolor
  Intron number 2 from transcript Sb01g031160.1 (locus Sb01g 031160) derived from phytozome v7.0 (chr-ID chromosome_1; pos 53735747 to 53736531 reverse strand)
cgccgagaagctcgacgcctcttcccagttcgtaggtcggggaatctctgccctcgcctgcctgctcatcctctgcacccacggccacctgggtattgggattttggtctcaacaccaaaatatgaccgctgttgcttagcacacgacagctgcttgaaattgttgctggagtacctgactgatgcaaactactagtactcgtaattacaaaaccgagaggatattttgttgttgttgttgttgttgctgtatatagtgactcactggttgccatagctaaaactgagctgaaccataataatgctgtaataggactgtttctgtcacaaaatgtgtcgtgggttgaggaatttaggcagaagcgtgaaggaattttcatttagccaatcttaccttgcttcagctatctgattagactgcatgaatctaggaactaggtgtagcgggttgaggaaaagtccataaaaaatgaacaaatactgaagaacccattctacacgtcattgtcgcttgtaatttggagctaccatttcttctgttccttgtaatggtatagttgaatctgccaggttaattttttggagcttttgactcctccctgtaattattcctacactgaacttcctgtaattttgttctgccttccttaatgaaacagaagcagatctctgttaaaagtgtgcctcattaaaaaaaaaacagactgtttaatctcctattgatttctgaattttgatatattattacaggagacctcaaggagagtttctacattgggcctatt

SEQ ID NO: 37060 - DNA, 663 bp, Sorghum bicolor
  Intron number 1 from transcript Sb04g036330.1 (locus Sb04g 036330) derived from phytozome v7.0 (chr-ID chromosome_4; pos 66105071 to 66105733)
cacgcgattgtcaaaaagtacgtccatcctgtgcaggactttctcgcgagcatcttctgtcgttgtatcatgccctctcatcgataggcgactcaaaccaatggtttaattacagtagactttatttattttagttaacattattagctcttgaaaactagtggcataagattcgtaagtgctcccttattagctctaaattataagttactttggattttctatgtacatagcttttgatatgtatctagacatagtagatgcatagcaaatgctacatacttaaaaaagccaaaatagcttctaatttggaatggaggggtattagtcatatgatattggaagttgaatggcaagagctaatgctagttagctaattagttagttagtcattagtcattgtcgtcataagtttcatgttttatttattcaaaccagatgttagtttttgttgtttgccaaagattctctctgtcagcttgttttgtagttatacatcatttgcagtaactcatgtgtaccagaaaagctacacatcatttgttaatagctcatactagaaaattaaaggaacaatcaacgagcatagtaatttacaactgcaactattatttagatgtgtaattgtgtgttgatagatcctattcgaaccaactaggaaac

SEQ ID NO: 37061 - DNA, 990 bp, Sorghum bicolor
  Intron number 1 from transcript Sb04g002520.1 (locus Sb04g 002520) derived from phytozome v7.0 (chr-ID chromosome_4; pos 2277214 to 2278203)
ggaacacccggtcatattgctccaggttagcaacatactaaatcctaaagtcctgagcttctcttcttcctctccaaacgtcatactgctaacatgtttttttggaaatattaaatcaacacaaaaaaaatatatatgaaaacgcactctaggcgatttcattacctacaaggcatcaagaagtgcatatgcagttaactttgttagcaagaaatcagccaagttgccaaggaccataactactttatcctaccaaatgatcaatccatcatccctaaaccctaaaccctaatcctcaaaaaaaaaatttggccgaggttacaccatgtgagtattcggaatgcttgagacaagcctcatctatctccctgatacacaattggcaaagtacatttgtaattgtctataaatttgctacggagggaaagcatcatggtatggattgaaggctacttctttttgcagggtagggttttggtgccatgatgcacttgaaaatgtgctcaacatcaccggatcatctctgtgttcaggaaatgaaaactgcaaataaactagtaggggtgttttgtttgtagaatgaggtagtccatcatcgtctcacacttccgttattgtctgatttgttgaatgtaatgatgggttgatcaatcatcatctcatttctctaaattttgatgaattgaaccattccactaaatttgaggaattgattcatgatgcctcacctcataaatgggttgactgaccaaatcaaacactcgatatataagtcttttaatctgaataaccgcttgaaagaaacaaaatctctctgcttcaactgtcaggcgattagcatcagctttacctagcacatacaaatcacacaagaacgttgacaagtttttcaaaggtggcatgtgatgcatctagcttgaagtgtacatggtcttttttccccccttggataacaggtgtgcatggccttggttgcagagtacctccgtg

SEQ ID NO: 37062 - DNA, 898 bp, Sorghum bicolor
  Intron number 1 from transcript Sb04g018090.1 (locus Sb04g 018090) derived from phytozome v7.0 (chr-ID chromosome_4; pos 42353707 to 42354604 reverse strand)
atcgtctgggaggtaaaggaaaataaaaagagaaaaaagaaccatcttttccctgctttcttgtctgtacttttcctcacacatcttgtgctgtgagattcttgatgtactttttcccactgttcttgatcagatctccccaagatctaagcaactttgttcttattctggattagtttatctgacatatcctgtgttccatatttttattctacggagaagttcagattcagattttacttttctgtataagctaatttgatctcgatgttagcctcaggaaattgtttgatttattttttgcggcacagcttaggcatgttcttatgagttacgcaacatgagcacacagcatcaaactattcaagaattttgactgaaatcctatatgtatttgacactggttgccattggatgttgctggtggagaagtcctagttggtagtctcattcaagcgtaataattggtgttgagttggaatacttcatggaggttggaggggctccacatgattctcatccttatccaatactgtttttttttttgcccccttctccatttccttgctggatgatcttatctgcttgaagccccatccttccctttccaaatgcttgattaccaatttggctgcatgtccattgagtgacacatgtacagatcctatcttatttttttcgaactcatattatgatttgactaccatagtaatctctaacaaattgcacaggggtctcactgaaaagataagcataactcccaattagaaaccatattccatgtacctgtccagttttactggacacgtgtaaaatttcctactcttgctatttctatgcagcatatgtttgactttgacaactatttttactcgtggacagaacttctgttcgagag

SEQ ID NO: 37063 - DNA, 1056 bp, Sorghum bicolor
  Intron number 1 from transcript Sb01g000880.1 (locus Sb01g 000880) derived from phytozome v7.0 (chr-ID chromosome_1; pos 835464 to 836519)
ccctcaccgtcggcaacgcctggaaccacgccaaggtacgaggacaaacacgctgctgcacaatataaacttcactcactctatgtttagtgtctactgtagtaataacctaatctctagctgtgggcaaatgtgtacattcgttctactagtagtacacaacaaaacagagcaggccgttgccttgttcgtcatttccgaaccagtagtagtagcaactacgcatttggggaagcatatagtaaaaccgggtacataccgtgatagtgttactgttcttagacagggcattgagccatccccctgttgattcaagcattgtccatcccaacagttttagttcagcgtgctccgagtagttttaagcacagttttattatcggacctttgcaattgcaacatgacattccgatcaacaattttgtggtttgttcattcttcggttgaagcagcagtttcatgcgcaatataatataaatgtctgcagttcatcatgcttggattttgtttattctgtgaactcgaaattaaatgggatcatgtgatctatttcatctcagtaatcatatgtacatttctctataccaccttattgcaaggacactgaaatcgggattgctttgtccattgtgtttgaattaggtacctaagctatcaaaattaggtgatccatgagctttgacaggtttggcttgctgttcagtttctatatgggaccgtttagctccagtaccacagcttgggtgaatgatatgagctgatatacccattagttttccacttttcgtcactaagttggagctacctgtgaacattagcactcgtttagttcatctctctcatgcctatgtctattgcaattttagttttaatttcccgactgcagcttagcacctgctttcacctgaactatacttacccactaaggtctgatttttagtattcgaacctgacaatcataagctgttacctgctgtgttgtcaagagctgtacactgactctggcgtatttctacaacaggacgctggtattgctggcctgaacagcaagactca

SEQ ID NO: 37064 - DNA, 573 bp, Sorghum bicolor
  Intron number 1 from transcript Sb02g039600.2 (locus Sb02g 039600) derived from phytozome v7.0 (chr-ID chromosome_2; pos 73658389 to 73658961 reverse strand)
aaggtacggatgcagatatagattgcagaacacccatgcggccatgccgggtgccggctgggcatcggctgattctgattccctcctatttcctcgcatccgcatatcgatcgtgcgctaggaagagcagttctgtgcttcggctaatcggctcggcggctcatttagaaaaaaatgagataaaaaatatcatctatgcaaatgtgatgtttgactaatcaaaatattttaagaaaactatttagcaaactattgggtaactttttttttactttttgctaaagaaatgaaaacaaagagttgttttataaaactcgcggagatgctctaagatcaagattctcaatacaattgtactacttgaaattgtcttctatcttttattatgatcgagattttagaaacggtaacccaataatatgttgcctttttttttttggaaaagtcgctgatgtagtggttgttttttgaactttattggagatgatcttagatccatatccatgcacagattttcgtagttttgttacttacgcacaccgtttttgttcctttttgcaggatttgccggcc

SEQ ID NO: 37065 - DNA, 906 bp, Sorghum bicolor
  Intron number 2 from transcript Sb04g002650.1 (locus Sb04g 002650) derived from phytozome v7.0 (chr-ID chromosome_4; pos 2448742 to 2449647 reverse strand)
aattgttcgtcaaggttgacaaaacagccactaaggtatagagcattcgcaccttgtcacctctagttgtagtgcactttgttgtaatcttcagtagtcagtttatgcgcagcatgtgtatccagtgagatttgtacaaacctgtcctgctgaaatcatatttctggcagagacgactagtggttcacactttgcaccactagacagtggcattccatttaatctgcacatctactgtatcagtcattaccgacgaaaagagctcttcctagttcaaacttcaatctttgagaaattgaaatggtatatcgttaggtcttaggtggtgtttcacctcagtgtacttctagcttaaagtggagacttctcacagttcacagcttctgtgcaaccaatgctattgacttttaagattcatgttttttgcacgttttcccttgattttaagttggagagatcttagtgtttatggtatgatggctcctgcttgacaacagagatttgcaaagttgcagtgaattaagatgttctatgttatagccttcgattgttctaccactgctgtttgttattctggaagcatctgaagcttactccgagaattctaattcataagaccacctgcaatctgcagatcagaatcagattgcttttgtcttccaccaaagctgcatgttgataagtctagaaattcttattgcgagtagtaatttgaggttattacacattttggctacttatgagctggtgtgtattggttgcctttttctcatgatttcctattaatatcttttaatactagacttgagaacctggttaaaaatttcttattatgcagaaatttgatttttgacattatattggtgctgagtattaacaatcttgatctctttttacaggaaaatc

SEQ ID NO: 37066 - DNA, 582 bp, Sorghum bicolor
  Intron number 4 from transcript Sb06g027250.1 (locus Sb06g 027250) derived from phytozome v7.0 (chr-ID chromosome_6; pos 56159654 to 56160235 reverse strand)
tgaaacttgtacggagtctccctcctcgttacaaggtttgttgtcattgtagagcttgagacaaagtactatgctacgatttacactatcaatattattttgccacagcaatcagggtttgatatgttaccatcatgcccattttagcaagttttagaaatctgtgatagcctgataggcatggcttttatgttagcatactgctgtcataagggatagttttgttgctaactactttttcagaggtggtacatgggcctggaatttctcttttagattgaattataaaatgattacatctgtgttgcgcataaaacctagtcatggaatggttagaaaattggtaggtcatgtacatagctgctttacatttcataaaaaatctttgattttactggcaggaatgcaatctaataagacagatctggaagtttttttaaaaattttatttaatttgtttcttccatctgttgtgtgccgtgctctctctattgtttgttatattgtgagaaaatttagatagccatctgaatcttaactgttataggtggacataagagttgcccctggatcacacgcaac

SEQ ID NO: 37067 - DNA, 732 bp, Sorghum bicolor
  Intron number 2 from transcript Sb01g043740.1 (locus Sb01g 043740) derived from phytozome v7.0 (chr-ID chromosome_1; pos 66868195 to 66868926 reverse strand)
ctttgaaccggtatgatctcacagaaccatttctgataaatagaagttgtttgtttgtgcacggtccaaaaccgtgaatatttttcagacacacggaatgttactctgacatggacattgatgttggaatttatctccaatttggggtttctattcagatttttcttttaatggcaaaagatggtgcagaattggcaaaaaaaaatggagtaattgataaacaagagcctctttcgtaccagggtggtctactgccaatgtagctgctgctaagcatagatcaaagaagattcttagattaaccaactttctggggtgggagcttatgcattttcattcctgcttaaaatatatcactaattttgattcgttgttcgtcttggttggctgagcacaaatttaactattggtatctcagcttgtgcaaaatcagactttggattagttggtaacacaaataccagaaacatctgtggggccactatgcaaagaaattttaaacttaaaattcataaatgctcataaaatctccttctcaatttaaatctgaagttgatataccgatttggcagtttgacgtgccatctgaagagttaaatgctcaagccatctggacactcttttgtcacactatctgtaaggcagaatgcattccttttgataaaatgtagatgacaattttgcatgcattcaacagtgttcgaatattggattgctattctgacccccttg

SEQ ID NO: 37068 - DNA, 557 bp, Sorghum bicolor
  Intron number 2 from transcript Sb02g038020.1 (locus Sb02g 038020) derived from phytozome v7.0 (chr-ID chromosome_2; pos 72322071 to 72322627)
cacttaacttctgcttctggccaggtataaattcacgcaaaaaaagaaaaagaaaagccataacgtcttctgaacatgtagaaatcagaatgaagtgctacagccctggtatagctgtatgttgggaagaaagaaagtatcaagtgattaaggatgctgtcaactcatagtcaattagtcgtttgggctgccaacataatcagttttttctcttgaaatgcttggtgatattgtgtacacaataatacatatagtacaaaacatgggtgtttccaccagtaatacttctgtggctattcaagattttcttaggccatggacctgttcggtttgctgtggggtttccaagaagttggttctttgcattttcttcagatactttagttattacatttttaatttgtttttttgagttattctctagacgccacacctatgccttgaaattactatcttctgctgttgagctgcagtaggattttttgtatgtattttcattcatatttgtttccttacgatcatgatgaatttgccattgacagataaggacttgagct

SEQ ID NO: 37069 - DNA, 872 bp, Sorghum bicolor
  Intron number 2 from transcript Sb06g016043.1 (locus Sb06g 016043) derived from phytozome v7.0 (chr-ID chromosome_6; pos 44460593 to 44461464)
ctacaagtatgtttctgtattttcttcttatttttccctttatggttgtgcatatcttctgtttatctttgtgtcaatttagttatcacgtaatgggatttgtttttttccgaaatcataattttaatatgtagtttgatctaacataggagagtttagcatctgttggttatgttccagttgcattgtttactgattcaggtatggaatagagcatctccagttcagggataccaatttctagagacatcttaagagttcattagccttgtctataaaattttggttcattcatataatatctttctttgctttgtgcaagtcatttctgtacttttcagtaaggctagatgtggtccgtctcacatccaagtgggatttcctgaccggactgtccctgaacgtatatttatgcttctttcaccgtattcaaggacgcctagtgtactatttaactgaacaaaggcacaaagcattgtttccactctaccattaaatttcaacccaacacaatgtaatttcagtccattttgcaacatgaagttttttaagagacacattgacttgacattctggttataactgttcggaatgttatttgcatcctgtaaatctgttgcattagtaatttttattatcagcaagtggccttagtatgacccttccctaccatttcattgtgttgtgtgctagctttggcattttttgttattcttctgctatttttcaccaagcatgttacatcagctttcttcgttactgaatattgagtccatacctgagttttactctctctgcatttatccttttggccttgttcttaatgatccatttcagtacaacacattttttgtgtggctgcaaagttatta

SEQ ID NO: 37070 - DNA, 740 bp, Sorghum bicolor
  Intron number 4 from transcript Sb06g025370.1 (locus Sb06g 025370) derived from phytozome v7.0 (chr-ID chromosome_6; pos 54302949 to 54303688 reverse strand)
tttaggtaagttatgcctatagacattgctttcttgagaatacatgtagtgttgtggtcttacttcttagctgtcactgtattttgcatatggtgttttatttgaaagaacaggaatgtcacatcattttgaacggtgcaatattttttgtcctaaattaccttcttgtatgtatctctgctggcctgcccatcgtgcatcccagagtcgcatcaatgtgttgtatttccggggggaggggattgatgcaatcttgttatcatatctttcacaccaatgctaagaatatcaggtagttcatcataagactactgtagcattagcaaaatggaggcactgtttcagagtaaaaaatatttgtgacagcttggtagatactgtatattgttcagtggcagccaggctatttatattatttctctttgtggtccagagactgtttcagcttgcaattgctagattgtaattgtacaatccaaggcttatagatttcaatacctgattacaacaatctacaatctagttttcaccagcatttaaaatctacaatctactaggtgcttttcacaatctgcagctaaaacaatcaaacccttacattttgtctttctgatacacttcatgatatatattgtttggtgcacttgcagttttcatattttgttctctcctttgtgtgtgtttattgtgtctggtcaaatgtaggtggggaagataaaactatagcttttttaaagagg

SEQ ID NO: 37071 - DNA, 977 bp, Sorghum bicolor
  Intron number 2 from transcript Sb01g048470.1 (locus Sb01g 048470) derived from phytozome v7.0 (chr-ID chromosome_1; pos 71482780 to 71483756 reverse strand)
tctccgacgtccttggtgcgcagctcgtcgccaaggtacgttatgcatacgcagctaagacatcctgaagtttctgtgtaccagagcgcgtttatgtagaattaaaaaaaaaaggagcgcgtttatgtagcagcactacgtgcttttgcagctgcagcgtacatatctgcttacggtaaaaaaaaaggaactgctgaatatctgaccgtttatgtagacttttttttttaaaaaaaaggagtagtgtacacagatcaaggaactgctgaatatgtgaccgttaatgccaactcaccaaaaatacatcagatagacagatagttttgttatgtatggctggtttatctgattatctgactcatctgttctgtcgatggaaagggagagtacgtagatccggacgaagtattagtcctagattcaccaatcatcgtggatatatgctaataatcttctactcttgttcatatgtacagcttacaatcgaaattactagcgtgagctcactatgtttgagttcttgatatgctggatgcatgatagtttgatattttcttttgttcaagattcgcgtaacaacgtcgtgccaatggattcaaacaagaaaggagtctattgtgatatcatgctaattatacttgtccatgctaattatactccaaccgtgaccttcaaagccttataatgaccacaaaaaagacgacacacttgtcatgctaattgtacatcaactaaccaacagttagtattcaaaaaaatcaacaccaatgggacaaccaacgcatactcctatattttcgcagcagtattctacagtcaattgatttgtgcacaagttttggcttcattcagcttatacaagcatgcgactgtgcagtgttacacgctggctatagaaatcgtcctgaaaactattcctgcttgctggttaccctgtgacaggccactggagagaacgcggtgagggcgcccgctga

SEQ ID NO: 37072 - DNA, 618 bp, Sorghum bicolor
  Intron number 2 from transcript Sb02g009590.1 (locus Sb02g 009590) derived from phytozome v7.0 (chr-ID chromosome_2; pos 13724136 to 13724753)
tcgtgctatcaccaacgagggagctcgctcagcaggtaagccagtgaatgctgttcttttaattacaatactcgagcatgtcatgcaaatcttggtaagtgcaggttgattgctgtggtgttaaataagttactttagatctttagcttcaattttctagcagaggattgtacactaaagatagcacgagtgacttacattacatatgcttctactatgtggcacccaataagttgtatcactgctcgtgctgctaacttattgaatgatgatcttcgaatcttttcttatttgacaatcttttctgtaataatcattacttacaatcattctcagttagtttttgagcttatgctgccgtttgaaatttgtagcctgatttttccaagaagattctggcatcaatagccattttttttcttgggaaagagggcataataattcttttacccttttctacaaaaatgcacatgccatatcctgtttggtgtgtgggataatggaaaaactattcatattaatctgtaagcttgatcgtgattcgtgaacaccaacaatatggttgaatttgaacatacaagaatgatttacacatttctgtatcgtgccagattgcag

SEQ ID NO: 37073 - DNA, 334 bp, Sorghum bicolor
  Intron number 2 from transcript Sb02g035755.1 (locus Sb02g 035755) derived from phytozome v7.0 (chr-ID chromosome_2; pos 70113890 to 70114223 reverse strand)
acagagtaaagcttctcaacgatttcaagttacaggtttgaccactcacagcatcaaagatgaactgaatgtactatttcacagtttctatgataataatgatgacatatttgctgcatatttgtacagttcatggtagctaattaacaaaaaaaagaatcttctgcatatatccctgcaacagtttggattttggaattatagatgttatcactttacgtggaagaagaatgccatatgtcaacaatttggtatgagcgctactagttcttgttgtaatgttccttttctacttgtaggttgaagaagctgagactattgtgaagcttactga

SEQ ID NO: 37074 - DNA, 945 bp, Sorghum bicolor
  Intron number 2 from transcript Sb03g024590.1 (locus Sb03g 024590) derived from phytozome v7.0 (chr-ID chromosome_3; pos 49105699 to 49106643)
ctctgttgtacctgaaagattggcacttcgttaaggtatgttcccagtgccctgctcacttaatttcgctgagcaataacattgcctagtattttttggtgctcctgcagtctggttcatcagttatgcagatcaaatgatgcagtgatttagtgttgacgtgtttgacttagtgggtgcgacccctccagtcttcatcaaaaaaacttagtgggtgcgacacttgataaacatgtagatgcactacattcttaggtttatggtaaatcaaaacaaacagcgagtcactttactgtatctcctaatttttgctaaaacaaaaatggtaataatgtagtattttaccatgatcactgttatatttgtttctatacaacgtgcttaggtgaagctggaatatctgacagagatggtataacgtgttactttataaactaacatatgttcaatattattttaagttggaggaaaattgtggtgtgcagcatggtcttctcgcaagttgtatgcccactgattttatttcttcttttttttttggcatagctcaaacgtattaattggtataagtataattggctagctacaaggttttgttcctacattgtcaacattgtcttaatccacatatgactatatgagtactaagggccaagttgttttcttatttaatttttttaatactggagttctggattatatggatttcgccataacttctgtgttatgcagttgatcctcactttgaaaacaacaatgtttgtgcctatgtttacaactacaagattgagtaatccttggagcacaatattattatgcagatggcgcctctttctttttgcaattgatattccaattcctgctgtaacagcaacatggttgtaattgcttttttaacttaacttttcaggagtaccctgattatattgcatataccacaccaac

SEQ ID NO: 37075 - DNA, 1044 bp, Sorghum bicolor
  Intron number 3 from transcript Sb01g032260.1 (locus Sb01g 032260) derived from phytozome v7.0 (chr-ID chromosome_1; pos 55139829 to 55140872)
catatcctggtgagttgttatctagttgctgcaagaactgtgattgctcattcggtgttatggggcatcaattaggggcccaggggccacaggatcaattagagggatttgatcagttaagagataggattagatttgcgtcaattagagataggattggatatggtttgttatgatttgattgggccttccttaggtggccaggattcctctctatataaagggaggtgatgtaccaaggagaaagcaatggagaaagaacaaacaatccaattcccccaaatactctagtctccctccacgccgactttgccccatagcattcggttagcctcttgcgtttggctgttggatcaaacgctgctgctgatggataaaaatgtttatttcattttcatcatctgtattcaatgcaataatttaagtatatagtctttcgattgtggaacacatgtatatcataaataattatggttactctggtttttgttttgttagagttagatacaagatgattctgcatatgcatactggtttatggtatccaagaaactgtattatgtaccagttgagcttattttgtcaaatatacgacctttgtacagggtcatgaaatttactgaacagaaaggtggtatttgttgtacaacaattaagttcattgtgttaatttcctttctgataggctggtgatgattagcacataaacatattaggctcccaccctgtagatggcttttgtctggtagtattaggtgatactcattagtcattactcaatgtacttcagttacacttatcttcgttgaaaccctaatttctgtgagattacagggtaaagtattatctgtcctgtgcttgtttagttctctacggtcacagccaacagccttcttgtgatggagacttttacatcttctagtgatttctgttagtatggtttgtttctgctgtaagccatgagatgccatcaatgacaaactgcaatgaacatgggctatcatactaggtggcttgcaagttggaggtggaataaatttggag

SEQ ID NO: 37076 - DNA, 937 bp, Sorghum bicolor
  Intron number 2 from transcript Sb02g008730.1 (locus Sb02g 008730) derived from phytozome v7.0 (chr-ID chromosome_2; pos 11978975 to 11979911 reverse strand)
caggtgatcgctttgacgagctgttaaaccaggtgcaagagaaagtgtcttctgaaatcaatgatatgctaatgaaagaatatagtgaggaggaaatcaaacaagctctagataacacaggggatctgaaggcaccaggggtggatggtatgcctgctcttttttataagcaatactagaatattgttggagaggatgtggtaagggaagtaaaggcctttctaaatgggggcacaatgccaaagggctggaacgaaactacagttgtcctgattccagaattgcagaatcctgaaagattaaaagaccttcgaccaatcagtttatgcaatgttgtgtacaaaattgcattcaaagtcttatcaattaggttgaaagtcatcttgccagaggttatttctttgaaccaaagtgcttttgttcctggacggcttatcacagataatatattgctggcctatgaactgacacactatttgcaaacaaaaaagtctggatcagatggttatgctgcagtgaaattggacatgagtaaagcttatgatcgcgttgaatggtccttcttggagaagatgctgctcaagctgggttttcatgaaaattgggttcaagttattatgaaatgtgtttcaacggtcacctaccgtattaaagttaatggtgaattatctgatgagattattcctaatagaggtcttagacaaggggaccctctctctccttacctgtttttaatttgtgctgaggcattctcatgcctgttaggggcagcagaaggtaatggggagttgtttggagttaagatatgccagcatgcgccgagtataaatcaccttttgtttgcagatgattctgatgaatggagtgcaactcatctgcaaaatattctttctttgtacgaggattgctcggggcaaacgattaataaggataagtc

SEQ ID NO: 37077 - DNA, 662 bp, Sorghum bicolor
  Intron number 1 from transcript Sb07g020730.1 (locus Sb07g 020730) derived from phytozome v7.0 (chr-ID chromosome_7; pos 53611432 to 53612093)
ttgaaaatttggtaagtgggtcatgttaaacaccatataaataaatgtctgcaactgttacttaagcatgctgggaagatctaattgtagtgtcacctaattattgtattgtcacatgttgatttacaaacaagtaaatcataagccacactgtccaaattgtattttcacacgtagagttccatgaacataatgttgtttactatttctgttgccatccatatacagtgtcattgcccgtgttatggactacacctatctgttaatgcttcatgtttcgtaggtgaattttttcttccagtttttaagttgaatagtagctgtccaaattttttgcccgtgttatggctgcacctatgtgttaatgcttctaggattttagttcaacttgttcttccagttttttagttgaacagtagctgtccaaatttttgaaacatcgtaattcaagttgcatctaatggaatgttggttctcaggacaattttgaagaacttgatgcatttgatttgttcaaggagtttcactacagcaagaaaaaaaatgctacaccccagctgtacaggaagctattgtaagataattttcagactttgatctttgtaatgcttttcttaattcactcatatcaaccatgtttgttacttgcttgctagactcag

SEQ ID NO: 37078 - DNA, 677 bp, Sorghum bicolor
  Intron number 4 from transcript Sb02g002910.1 (locus Sb02g 002910) derived from phytozome v7.0 (chr-ID chromosome_2; pos 3082991 to 3083667 reverse strand)
atcacaccctgagactaggactccctttctaaaaggtaatgtcaatgaacatgactttttgaacatctaagctgaaatgtactgaaggtgtgttgttagttagccgatgttagtattttaccacattatctttttctcgaatgcctaggagagttgtgtatcatttcattgtagaagaacaagaaaccaagtacaaactctgccacactacaccacgccacacagaggaaattaactagtgtgccactgactatagaactaggacttacctgaacagccactgaactaaagttttgctacatcgtcatatagtgtttgacagtgacacacttttggtttatgttagttgctataataaatttctgaagtattatggatttttacttgcactggcggagctcaaaggggacttaagagggggccaacagtatttaaattatagctgatgtgtaaatctttattacttcctaagcattaaccatagatattattaaaaattcaattgtcaagggggggccatggcccactttagcctcaatgtagctccgccactgtttacttgtatagtactaataaactttgtttcctggatatgttaccattattcttcactccctctcattccatcctttctttttgcagcttacattcccatatacctatacccactcttgaac

SEQ ID NO: 37079 - DNA, 745 bp, Sorghum bicolor
  Intron number 3 from transcript Sb04g031350.1 (locus Sb04g 031350) derived from phytozome v7.0 (chr-ID chromosome_4; pos 61343120 to 61343864 reverse strand)
cttcctctgaaatattttatctgctgtctataaatgtaagtatattaagccagcatgcatctcctatgaacctagtaatctgatgctctattttaacttgacgtaaaacatttatcttgatctacccaaaagcacgcatgagaaggactgcatgttctatggaagactgaaacagtatggtagagtgcaatccacccacatgatgtgatacctggtccatccttcaattacatattttgttcaagacactaccgcatactataaaccttagatattatcatatatatatatatggttgcattgcatatattaaaatgatctccttaaccaagcataaactataatgaatgggtaactattggtgaaacaaaatgaacttttctttaaaaaacaaaacaaataatctatcaagtgaactgccaaataaaaataaaggctttcaatttatcgcgtaactgtcaaacattaaagaatttatcttatgggttatgggcttatggcccagagtgtatcctaacattgattgctttactgggaaaagaaaaactagaatgcagagtaagatgtcctatcagattatactcgaacaagatagttgagatggcaaaatggaatggccctactcattggatataatatttttccagtacccattatatttcatgcaatattgtaaagtgatatcaaaatacaatatctatgaaactatgctgtgtttcttagagtataggtgtattctctggca

SEQ ID NO: 37080 - DNA, 669 bp, Sorghum bicolor
  Intron number 1 from transcript Sb06g019610.1 (locus Sb06g 019610) derived from phytozome v7.0 (chr-ID chromosome_6; pos 49174828 to 49175496 reverse strand)
tcgtcgacggcatcgtcgcgcgcgggtatacgcaggtgagagcaacactaagagcacaggcaccgtaatgtaaaattgggattttgcgccatttacagtttacacacttaaataccaatagtgaatctgggcagttcatgggtacaacagaagagaagtagtgctacactatttagttcgaggtttcagggtccagaaaggctaagtaggctatgagtttttgagctgtttaggccttgtttagttcccaccaaaatccaaaaagtttttaagattcctgttcgctacgaatcttgtggcacatgcatggagcattaaatgtagataaaaaaataactaattgtacagtttacctgtaaatcgtgagacgaatcttttgagcctacttagtacctaattgaaacaatatttgtcaaatacaaacgaacgaatcttttgagcctacttagtacataattgaacaatatttgtcaaatacaaacgaaaatactacagtagcgaaatccaaaaagttttcacaactaaacaaggccttactcatagcggtcaattgtttccctatagttcttacatgtgttttgagtgcttttgctaatgcctgtgcttcattatcaagtatatataaactaaactgatcacttccaaatgtttcttttttattgaagatat

SEQ ID NO: 37081 - DNA, 1036 bp, Sorghum bicolor
  Intron number 1 from transcript Sb06g022200.1 (locus Sb06g 022200) derived from phytozome v7.0 (chr-ID chromosome_6; pos 51426616 to 51427651 reverse strand)
ggcgaacccaaggatccgagaaggatcgcgcgcaagtaagcgccccttcctactcttcttctgatctgttttttagattttccggcggagggcaggccggcatatttgtctgcgcagtttctatgggagcggtggattttttagtttgttcatctcgtgcgagaccatcgattcgttttgtgtattgctcatctgtcgggagttcgtgaaggttttagacaggttttgagacgcgattgttttttttgttcttcctgtcattgaacttacttttcacgcccgatactgctgttttcggttttccacattttttttatattgtttgatagaagcgtttcgtgagagagtttgagtttcgcataagttgcgatttggacggcggagccaggactctccaccagggtattccgagaataattttcaacaaaacagcacgaactaaaagcactcgtagaactagacattttagtaatacccaaatacaaatttattttgttacagaaaatatgggtattccaaggataccgctgctgccgcgccccgtaggttgcagctatggatgtttagtgccccctgtcacgaagatcgagaacgtgatatcccttaatctctaggattcggtcctgttgatcgcctgcttgacattaaaagcatgtgtgatcctcaacctgcccacgcaattactttatggcaatgcagcaccccagatacgtgtcaatgcataaataactactactattcgagatgtcgtggtgattgtgccttgttgtcatcattccaactattactgtaggagtactactttgtggcaaatggtggccagctttttgattgaatgttgcatgtagcagcgggagaccctaagtccccccccccccccccccccccccttaaaatattgtcagacaaatttttgttaatcaaggatttcctctgtttccttcaaataataccgggagtatggaaaagacactaatggtttgctagcttttggtatttagatatcagctggacctttgcaagagggcagttgagg

SEQ ID NO: 37082 - DNA, 700 bp, Sorghum bicolor
  Intron number 2 from transcript Sb01g006900.2 (locus Sb01g 006900) derived from phytozome v7.0 (chr-ID chromosome_1; pos 5867984 to 5868683 reverse strand)
agcaaactgttcctcgtgctcttcgaatcttgaaggtttgccctagttataaaaaaattcattctgttttgtaacactacttctgactagaatggcacacttggtagaattagtttcattattcagtatcaaaggatcacaccagaatttagggttcaaattaggtcactaatatattactggtggcagtattcttattgcagtctgaccggccgttagtattaataaactagtagcccttaaatataaaaaagaacccattattcggtgtgactgaatggtgcctgcatgtccggttcatgttgttacatcaaagggatattgtctgctatacctatacccataatactacaacatgccacttaatgtatggatgctgacaaagactgccttgtcctatatatttcgcacataccagttggtgggggtcgggacaaatttcaaggtaggcaggctgtcatgaattatgttattgctttatggggcaaatggcacagaaagataattgcaccaatcaggcccatgactacatggaccctggccataccatggtaacgtgaggccttaattgcgatcgcccaatctggactcttcagaaatcataaaaatgcagcttttcttttacttaggttttattgttcccttagtatttttccttttttttggttgtgcaggttgcggagctgttaggtttcccagc

SEQ ID NO: 37083 - DNA, 501 bp, Sorghum bicolor
  Intron number 1 from transcript Sb03g012320.1 (locus Sb03g 012320) derived from phytozome v7.0 (chr-ID chromosome_3; pos 14206621 to 14207121)
attcaggttatctcttcaccttgcgatgtatgaattcgacatctctattgctctttttagaacgaatgttgaaatacggagtatctcacaatgtttttttaataaacaaaatgtgtcatgtatatagtgctcaaacaaaatttagcctttattttttttttgttttatgattaaggacatagaagaggaaccgtctatactttgtaaacttcagtgaaaaggcaggatccttatgatttgaacaatgctagttgtcaatattggattaattcttctatgatgctaaatatattcttagtacaagtagcatatgctgattattgaagtattcaactatcaaagtattagtatactcctctatagcaatggcattattgtagccaggaaatgtcgtcttgtcagacttggttgtggaatttttgttgtagcttccatgtttagtgtctcgaaaaaacaatatttgttttcatgatccagtagctgttgtttctccagtgcagg

SEQ ID NO: 37084 - DNA, 1040 bp, Sorghum bicolor
  Intron number 1 from transcript Sb06g013960.1 (locus Sb06g 013960) derived from phytozome v7.0 (chr-ID chromosome_6; pos 38686122 to 38687161)
cgtcgtcgcctgctacggcctcgccttcagcggtatgtaaaattatggttatttgtgtgcctgtccggcggatggaggagcttgcttcttgtcgtctaggtagtatgtaggtactcctgggctgctacctcttccaaattttggttgacccccgtgtacaggtctccatgtttacccagagttacgaagttactttactcgttgttatttggatcggagtttattattattttttcatcaggcctttaattgctgtaatttatctgagtcagattgctgtcaataatttacgcctggagtctagctaataatttacgcctgatgaagtctagcctttgacccatgatgatatttagatgttcttgagttcagttcagtttaatttgtgttcagtttagaccgaagttcaattgttcaaacgtttgtttcagaagatggcatataaaaaaaatttctgttatttaggccttgtttagatccgatttttttttgaattttgacactatagcactttcgtttttatttgacaaaaattctccaatcataaagtaactagtcttaaaagatttgtctcatgatttacagacaaactatgtaattagtttttgttttcatctatatttaatactctgcatgtgccacaagactcgatgtgacggagaatctttgaaaagtttttggtttttggggtgaactaaacaaggcctcagtagtgcttccaggatttcatgtactcctaccattcaatgagcaataaaaatccaacaaggatttaattttgtttcacatttgttgattcaaactagtttttgttagggtgatgctgtgatgattaccttatatattgttgatatttataaatttattggggaaatttcactcgttaatatcacattgctgtttcattcagagggttggtcacagtaaatactttcctccttttgcttggtcacaataaatactttcttccttttgctttgaatggtatattcttgttatcaatgactaatcttgtggttgcaggggggtttggaagttat

SEQ ID NO: 37085 - DNA, 707 bp, Sorghum bicolor
  Intron number 3 from transcript Sb01g045210.1 (locus Sb01g 045210) derived from phytozome v7.0 (chr-ID chromosome_1; pos 68362769 to 68363475)
caagtttgtaggattgcttgccactggccttacaggtattgtgttattttgctttgctccacatcattatttagccagtagtgatattatggtacagagcttgttttagatgctgtaggctatgagaaggccccccttttcgttgaattgcaggttctagatatcaattttgtgaaagatcagtggaaattgactaatgatattgctcgcactaaatagaataggacaacataagttgggatttatagtggagttttggccatcgatgatttttgtttgattgaattaagttaactctagcagctgagtgtcgaaatctcaagtatttagagcttcattcatcatgaatcatcgtatggttgaacctttaacaaaggagttcaaggcttttcagtttcacaaggaaactgctagtttgagactttggacaagagtttgtgttatgattttggcacgtgctattttaggaaacaacggatgtcttgccacttttgtttattcttcccatagggatatgacaacaagtagcgccctttcttaaaatctcaattgatctgttactgtgtattttcccttgaggatgcccattaatacacgttggcactggttaccaccttgctgttttcatatattgcactattgaattacacaataatacatcttgatctttatcagtaatggatatgttgtattattgttcacagctg

SEQ ID NO: 37086 - DNA, 651 bp, Sorghum bicolor
  Intron number 1 from transcript Sb04g028990.1 (locus Sb04g 028990) derived from phytozome v7.0 (chr-ID chromosome_4; pos 59040285 to 59040935)
ggtacgcaaacaattgtgcaggcattctatctgatttcaactctaatagctgacgcatttgtgatttgagtcgataggaagtttagttctttagagtagtctcgaatgggatgatagcttggatggatcagatttgggggaatttcccggatctcactgaatgacatgtgaccaaattgggtagacatgtcgctaatatatgaccaaatgcagtttattgatttgtttactaatatgaccaaatgcagtttttgaagtatggcagttgtcatggaattacaagtctttttgtttcctctgattctgataggcttaggttcgtctaagttttgttgtactggtgtttatttctatacaatcaatttaataagttttggagacttggacttagttttgctgtatgtgtgtttatgacttttgtgactttttgagtattcataaaagcagtccttatgtgtgccgactcctattgaggtcagaatatccagtattaatctatattcatatcttatccacttttcttcatttttttgttcctgtggacaatgtaagggatgatatatgtaacatttcattcttgttcattgaagctaattccatcttattaaaactgcagccagtactatacatctatctttgttggcaaccctc

SEQ ID NO: 37087 - DNA, 920 bp, Sorghum bicolor
  Intron number 2 from transcript Sb01g013910.1 (locus Sb01g 013910) derived from phytozome v7.0 (chr-ID chromosome_1; pos 13051865 to 13052784 reverse strand)
gacggaggtgagggtttcctggtacaagcgcaagcggctctcatgatttggttgtcgactgaaccttcctgaccttgagtttatcataacctcaaattaaccatatcaattcttaaggtttgatcgacatgtgtctgtatatgaactaatgggatattcttttttttttatagatttttgaatcataaagtaatacgtgctcagtatgatgtgattataattgcaactgcttaccaaattacaacctcaatactgaataatgcacttcagtaagaagaccccagcacatttaaacctaatggcaaatttgacacaaaaaggaacgaatctgcaatgttttctctaggataaactctaatttaatatcctctactttcatgcaagtacatgtttgacctttttactacaaaagcagctatttaccttctcaaatttgagaaccagtgcaattttcatctttacagcggtattggtagtggtttgctcatggcatccggctgggctagatttgcttcgtcggcaaactaactagccatgtcagcaagctccctcatataatgattcacaaggattacagggtaaaagcatagataattttccttcatgtcttatgtgttctctctacttttcctatatctgaatgctaagagggatccacagcaacattacaatactactttgagaactatattgaagagttagttgtacaatgctttggcttggaaaatgggtattaaaaacctgcttttctagaggatctaatcaggagttcaggactttaatgaaactaaaaaggggcaagttggatatttctagtctttatatgtcattccttactctgtttcaagcaaaaatgagataaaacttacagttcccctatttcaggactggtttaatcttttcaactctgtttactagtg

SEQ ID NO: 37088 - DNA, 808 bp, Sorghum bicolor
  Intron number 1 from transcript Sb03g013350.1 (locus Sb03g 013350) derived from phytozome v7.0 (chr-ID chromosome_3; pos 16440694 to 16441501)
gctctccgacggccgcctcgtcatcgacttcatctgtgagttcattctgagctagctcctcgttcgtcaccctcatccaaacctttatttcacgatcgttagctgatatatagtactacgatacgtgcttctttcccgccacgcttggaattcaactttaagcaaacacagtaaaagtttttttttttccttcaatgttttaaactctcagtcagatcccagctggtagactccatactaaactgttcaatcaagtagggccgctagctagtgactgcgctactatcttctaaaaattatatattatcatatagaaagagttttgaattaatgcaacgctaagaagaaacaaatgactttttgggatggaagtggaggaaaagtggtaacgtgtcaaggatcaccataacgggatcacgaaaaagagatttatgtcggcccaaaggtacatgcatgtacatgcctgcagtccagtgcaaattattgttgcagttatcgatcactgctggcctcaattaaggcccagcgattcacgctgcaatggagccgtcggtgttggaaaccttctatgacgaccataccacgacacaggccagcgtcggtggtctgatgcgttgtccttgacttaatgttgctctgttatttatttaattattaagtagatatttagttctttgccatgttcttttttacatgattttttttaccatgtcacagtatattggagaggatctgtttggagctgatatgatatatacggttttcgcatgcaggtgagagcctgcacacgccttacctgagcccatac

SEQ ID NO: 37089 - DNA, 971 bp, Sorghum bicolor
  Intron number 1 from transcript Sb05g022660.1 (locus Sb05g 022660) derived from phytozome v7.0 (chr-ID chromosome_5; pos 54751356 to 54752326)
ccgccgtcgacctcgacctcgacctcgccgtccaggtcggttgcctacttgcctctccctccctgactccctccctctgcttcctgcccctgcgtttgcttccgttgggaagaaagaagacgagtgactgatgagcgatgatgatccaaagatcaaaacgattgattggacagcacagcagcaaaagattcaagatcgccggcccgttttggtcagttccctgtttttcacagaaaacaaaaatcagctataaaccagatcgtgtgtcataataattccatgatatgcttggcggagagagggcattgggctgacagtgacatcccttgtgttgtgggccacgcggtttcttgatcttgaatctaaatccggagagtcggcttcccttctctgtttgattgctgtctcaactctgaattattgcgtgatccatcccaatttcccatgatacaaaaattctagatgctgtattattattatgctactagtaattgcaattgcatctggcaagtcgacgatggaatcttttcatgcgcagtgtggtctgccttttttccgctcctaatgaaagagaaaagctgacacaacaacaacaacaacaaaaaaaaaacagagagtatgttgccatgtgatgagaaaaacactttggatctgtttcgagtaacaaggaaaattggttagatgattcagcaccccccaaggccaagtcagagtacgaaaacgtcagcaagaaccaaccgtcgttgactggaaactgcctgctgctcggacatccatttccatatttttcccccttctgttttcttcaaaaacgcgttcggcatgagtcgtgatcttggaaatccgtaacaaacatcagagaattaccaaacctcacgcttgttgtctttttgaatttgagttgtgtgtgtgattgtgccctaattaacaaccagcgcctgaatcaaaacgcatgcaggtggagcaggctg

SEQ ID NO: 37090 - DNA, 805 bp, Sorghum bicolor
  Intron number 1 from transcript Sb03g043990.1 (locus Sb03g 043990) derived from phytozome v7.0 (chr-ID chromosome_3; pos 71233579 to 71234383)
gcgggcagagtttaaccccaagagcccggattctggtatgcgtgatggatgttcgcctttttttggctccttttctgaagtgatgttccgatctttatcttcttagaatgatttatttactgtagtttcttgaagatctttggaggtaaagaacagatgagcagtcaattctttatgtgaaagggaacttttgggtttgtttattcatttattgggctcttgatttcaggatttgacagcgaagtgtggtgttatcattgcattaaccgctttttgtaggggtggatgatcttgaacgaaaacgattactgaagctgactgattttgggttcttgtaatgggaaaagggagtttttagttgttactaagttttgttcttgaaagtcgaacactttataactgaggattctgttctacacaaagtggattgctctattgactgtaggtcttttacttcgatgtttggttaagttccttaggagtcagggtgcattttttttcccctgtgaaattgcttaataaatcctaaattttgaaatgacacatgatctttgttgcctaaaatcaaaagcctacttcatagtctcttgaatagcttagctggaatcggtgtgctttaatgtttgtttgtccaaaagtcaattgctacctcttgatgaattacagactacctataagattgttcagtgtttctttttcccccttcgcttatttgattgatctcttggctgaaattcatcaaacatgtatacaaagattattattttcatgaataacttatggaacttaattgcaggtagcaagg

SEQ ID NO: 37091 - DNA, 835 bp, Sorghum bicolor
  Intron number 2 from transcript Sb04g006940.1 (locus Sb04g 006940) derived from phytozome v7.0 (chr-ID chromosome_4; pos 7039434 to 7040268)
acctgaagcggcggcctgctgcggagaaagagaaggtgagggagtacaattcttctcgctcctattggaaattggatagcttctgagctgcgctgacctttaagctactcataaaccacacacttggaaaattgatgaagtacattgcttatttaatttgaacctggaatacatactgtttggattgccaatgaaaatagctttatgttaccagattaagcttcctcatgcgcgttggaaccacatcaacttgttaacctgtaacatgtttttgtatatatgaaaccccttagactacaaataaacatcctagttcctaatcagcagaatgcagaagtgcagctagagtcaagcttgtatagaactactaactttgtatgcaccgttcgttcactgtgtcttgtgaagatttttgcattggatttgtgacatttgtgaaatgttacatttgttacccatagcaaagcaattcaactttgatgtgaacctctcatagaatgcagaagatgattactcttatctactccctccattccaaattataagtcattccaagaatcttggagagtcaaagcattttaagtttgaccaaatttatatgataacgtaataacatttatgataccaactaagtatcatttggttcttcattagttatattttcatattaatatctatttgatgtcaaacttgagatgctttgactcttcaggattcttggaatgacttataaattgggatggagggagtagttatctggctgtttgatgctattggagtcaggggccactttagtcgatttgacaaaaccattttaatatcttatgcaggtagc

SEQ ID NO: 37092 - DNA, 984 bp, Sorghum bicolor
  Intron number 2 from transcript Sb02g028450.1 (locus Sb02g 028450) derived from phytozome v7.0 (chr-ID chromosome_2; pos 63634492 to 63635475)
gaaggcggcgggatacaacccctacgatagcagcggtgagtttgcccgaatcgaccaagtttaagcctgattgtttttttttcttggttaaggattcccgttctgttgggtcaatttgtatttcagcctgactgtatggtggcttgttttttgagattgatatatctgttgccacaaagcaatgtaaatacagcagaagatttaagttgtggcgttataaagatagcccaatggataacttgctgaaactttcttttcctccaaactttggatttttactcctgacgcccaggattaaggggctgtttgctttgaagcctcccaggcagagctcacgccaggcagtgaaaatcggacgcttgggagaagctcctgcgccaggcaacttagccagactgcaaagcaaacaggataaagaaaacaaagaatatcacaactgtataagcaagaagtttgagaataagcattataatctccatttttttccattaaggagtagagtacccatttttccttaccacatggatccactaggatgggccttctttattttgacacaaaaataatgcaaaaaccatttttattatttttttcagcttccattaaatataatccaggggcttgtttatagggttttagagatgtaatacagagtattggctatgaaaaactctataccagtgctgtagtagttttacttgatgaattggatgtgtcaggaaatattttctactttacagtttatacacttatggtaacctggatttggattcatgataccatgtcacttacattccctgactagcgtctatttctgggcttctggcccactaggtaccaaattataaattcgagttacaagtatagttggtggtgttgcagtcataggattacatagtccacatgtataccttatgactttctgtcaagttgtgcatttcatatgctacagtattgattcgtctccctttgttgtagggactg

SEQ ID NO: 37093 - DNA, 967 bp, Sorghum bicolor
  Intron number 1 from transcript Sb04g031550.1 (locus Sb04g 031550) derived from phytozome v7.0 (chr-ID chromosome_4; pos 61511085 to 61512051)
acggcgacttcgatcctttgcctgtcggcgatctggtggggtttgcctcttctttgttacctttgttaatttttttcctatgattgacagtattatagtgatccgagttattccttgtgctagtcatgtttttataggtggcttcatgcttgctgtttatgccccaaatgcgctctcaatattcctaatcgtgctagtttcgtactgagacctagcaattcctgcatccctgaatctgatatagtggtgttttggtgggttccctttaagataatgcagcgattgctgatatgttaatatatttgatttgagatctgttgccttgttggacaaactggtcattttttatgatacttgattttctaagtttagtacttctaagttgtagacccccttactctgagtggaataaacaaacgatggcttgtcttgtgctatgttgtcaaataaaatacgtgagtgcatttctggtgcacacttgtgcatgatctcttatgctctgaacctgatacagttgtgtttgggtgagttccctttaagatcatgcactgattgctgatatgttaacatatggagtgttttggccttgttggacaaactggtctttttttatgatacttgattttctaaggctacttctgagttgtagatccccttactctgatggaataaacaatcgatggcttgtcttgtgctatgttgtcaaataaaatacatgagtgcatttctggcgcacacttgtgcatgatctctcatgcaaaataagatccttttgttctggcagaaataaacctgacgtggttgttacttttatgctccagtcaagcagttactcccaattttgccctcctgattaatatgatatcctcagtcttcagtcatgaggcaaagcttgtaacttggtatctcaatcaacataattgttgttgtaggacagcgaagatctcagactagaactggttctgca

SEQ ID NO: 37094 - DNA, 978 bp, Sorghum bicolor
  Intron number 1 from transcript Sb03g042610.1 (locus Sb03g 042610) derived from phytozome v7.0 (chr-ID chromosome_3; pos 69986897 to 69987874 reverse strand)
tctgcgagcgcctctgcgcgcagttcccctccgaggtagcccccttctctccctgctcctcaacgaggctagtgcgcctcgattcgttgtggttgcgcgtgggaatggtacgtctgggggttggatcgggcgtggggcagtgatttgagcgcgggggctcacctcgactgttcagttcgatttatttattttttttttttgaagtggctagggttgcattagtgtagagtgatgagatgtggtctatggtttatctaggcttgaattagaacgactccctagagctgttgtagggttcatagtgaatttgaactggagtaacttgcgcgtttcgtctaggggtcatagtgaatttgactgagggtgattttctgcctaagtttttgaggcaatttcacagttagaagctctactgatgttagtgcataatgggctacaatgacgtgttatgcctgtgggctcttttccttatcataatctcagggtgacaatatttgtagcccattctaaggtattcagttgcttgaatcctatgttctcacaggacatgctcacccctttttcttttcttaaccttataattacttgaaagtgtgggttttaattttaattcaggttcttgatgtggttcatgggtcttcatgtgggatgaagatcaacgcaacttgaatgcgtggttttgggtttaaattttcatttgggttctcgatgtggttcgtgggtcttcatttgggatgaagatcatcaccacttgaatgtgtgtttagggcttcatgcatttgcgttcaatttcttagcggatgttacctcactgattaacatgaaccctgtgtctgctttactattataaggacttcttttcaattagttattcttgctcacaaaaaatattattttggttttttttttaagttaagtccatttccaccatagcactgtgcactaaatgttcttgctctacctcctctgcacagacca

SEQ ID NO: 37095 - DNA, 976 bp, Sorghum bicolor
  Intron number 1 from transcript Sb01g041000.1 (locus Sb01g 041000) derived from phytozome v7.0 (chr-ID chromosome_1; pos 64295902 to 64296877)
tctacgcagaggtatgcactgcaccggaatcatgctcgcagcttgctgctactcgtacctacttccaagacaaagttaccatggttgctgaagtgagatgatcactggcggttcgaagcattattgtgtggtcatgcccctcctttcagtcataaatgtactagaaaaatggtttattgctctttcttggtttcttggaggtttacatgctgctttagttcgggatcaacgaataaacctcaaagacatggtttttttcccgacagaacctattggcttgtctaaaactattgaatggctgatagattcggcagatacatgtttgaagggctctagtcctctgttccatgtcaaatttgtagcttgtctaagctaaaacatagtgctttaatttccagctataatcaaaataatagaaacaaaataactcgctcaaacacccttgatgaaattgactaacgttttggagctgaagctctgccaagaatagcttcacttccatttaatctggatacttgtatccttgactgaggattgactactcaactgatctataggatgccagttgccacttctcccaatgaaatcgggtccttgtggatttggccactaaattacgacaggtcgagttgttagtgctattattactgaaaagttgtatgcattattattgaaaagcatatgtatttatgacatgacagcgactttggcgcaggcgcgttttgtcagtatcagatggtgatattagcctatcgaccactgccgttcactgtattacatcacacgtacttggagcgtcaatgcttcaacaataattgaattgttaaacaaagcaacattaatcatgaattcctgatcaacagaacagatggcagatttcgaaggcaatggcagaaatctcagattaattgcaggcttccacttaccttgtttaccacccgactggcgtacgtgcaggtggtgagcgagctgactc

SEQ ID NO: 37096 - DNA, 853 bp, Sorghum bicolor
  Intron number 2 from transcript Sb04g027760.2 (locus Sb04g 027760) derived from phytozome v7.0 (chr-ID chromosome_4; pos 57641066 to 57641918 reverse strand)
agtgtgcccctttggctggctaccgtggaaatctggtatgcatcccctttgttcagtagcttgatgttaatatctgaagatgtctgtattgtgacacagctgtcagcttgagttgggacctactagaatctgtttttttttttccaaagacatatttgaattgttcatgtaaaattgctgtggcagatgatgacctgactcttcacatttctatctattacataatgcacaaacctcagttgaagaaactaatacatgacatgcagtttgctttaacttcattgactatggaacttattgggaaaaaatgcaaagcagttctaaacttggaaactaacatgactgatctctgatctataaacttctcattgtgtctctgcagtcatcttcagtttaaatttcactatagtcactgttcttggccgcatgcaagttgtggcgcaaagtatgcacaccattatgtgaccctaaaacaccacaagaaaaatccatctacattttgatggaaagtaatttcctaactgttcatgtttagctgcaattttggtagttcaattaattttgtgctaccaccaaaatggcacatttgtcatgctatgaatctcgtgtaatggtccagtgtaagttgcacaagcacagctgcaattcattgccaattttagctcttacctgagtgactggcttaggagtccaagtggtggtgtcatgtgtgaactctggttcttatcaattttgttcattttaagtttcttctgtgtcttcctaacaagtgcaaaaacatgaggagactaccatatttttaagcagtttagtgcttatttctagtgattgattggcaggtgctccgtcataa

SEQ ID NO: 37097 - DNA, 496 bp, Sorghum bicolor
  Intron number 2 from transcript Sb05g001250.1 (locus Sb05g 001250) derived from phytozome v7.0 (chr-ID chromosome_5; pos 1325626 to 1326121)
aagataagaaagatgtaatgtttttaagaatctatttgctctattagtaaagcatagacctcctagcaaatgacaaaaatataagccatacactacacatcaaacaaacatatatatatatacatatagtgcaaacatttaggtttttattataaaaagagaaatgtaatagctcatatgagcacagacccacctaattgcagtagctactaaactgtatttgatcaaaagtagggtaatatggtgggaatgtcaaccacgcaccgagttctttaaaaactgacttattctcagcatagtcatatgcatagagacacaaaatagaaagttcaggaaatttgagaagaactctgaaacaattatataaacttagcttagctcgtgatgaatttactgtgattaatattctgttataatatagtgtatgattattacatccttttcatattaacatgtaacagggattaccaactttgcctgagaacgagattgagtt

SEQ ID NO: 37098 - DNA, 824 bp, Sorghum bicolor
  Intron number 1 from transcript Sb06g011780.1 (locus Sb06g 011780) derived from phytozome v7.0 (chr-ID chromosome_6; pos 32263283 to 32264106)
acctcggcgacgccatcgacgtcgtcaaccaggtacgtaacccgctttattttgcatgccaaactcgctcgcacggacgagaatcccagaaaaaactcttcagtaactgatgtgttctactagtattctactgtatatgctactacatacagttcttttttttttgtcaaatcaaaaggtatatacaattcatactactgacatatccactgtcccttcctctgctacagaaaggcacaaccttcgtcgtctcagcattgatacggattccaacaaaaaacaaaaagtgcaacgtacaggatacagaattgtggaaatgtggaaacgccttaaaatatacttagaagctttcattaagaaaaaaaaattgaagccatacaagcccatatttttgtaaaaattcataaaaatttgacaagttaaaaattactagctagaactacgagcacatctatggtacagaaattttactagttctaaagttttgatctaaatgaaacagctagcgggcggaaaatggctcggaaagtctgttgttttcaatatagccctcattcgaaatgcagaaataaatttcgtaaaaattagtttaatttcacgaaaaaatacaggaatagaaaaaatttcctacggtccaaatgatgccttgatgattggtctacgtagagagcaacatatatacagtgtatatctatatctggcgctaatttgcctttactctcttttttaaggttcttaactattttatcatgctcactgctctgtatcctttgcttggctggaccaaagttggactggaggttatcccacgagaagccaagcga

SEQ ID NO: 37099 - DNA, 1011 bp, Sorghum bicolor
  Intron number 1 from transcript Sb04g033530.1 (locus Sb04g 033530) derived from phytozome v7.0 (chr-ID chromosome_4; pos 63428389 to 63429399 reverse strand)
acgccgcgccgccgatacggcccgccagaaccgaggtgagtagcttggctagccaattcgcccccgcttcgtgttcacctgcaagggtttgagctttctgtaggaggaggaggacatgcggctggggttggttggttgcttgtggttggatggataggtctggtttcgcaaatcccgctactggtttgtgctctaggggttccttcgcgtaggaaatcgagcagggagggtatccaatcgacctctgagactctaattggtctaatttgggccatagttagcttagatctagttagtgttttaagtcgtaggcaggacaaaaggcgatttcattccttgatgatttagttagcagcttgacgagtcctatgccttcaatagcttaattactacctctttgaattaaaagtgacgaagcctattgctgtgagggtctgagctttctgtaggacttaggtggtgaggccatgcgtctggattggttgcttcccttgttgctgtttcctgttagcttattccggtactgatttgtgttctaggcgtagagctgtaactgtgtcacgggagcatggagtattgtaaaacaaactttgaccggttcagtaggaagaattttattccttattgctgtgttgcttagatcttgtgtggaggtttcctttttagttgggataaagtatgttttctttgctcgttacatgatggtttaatcagcaacttgttgagcactatgttagcaaatttcaacaatgggttgtgctctaggtgtcccaaggataaaaccaagcaggaatgatcaagggggaggggatccagttagtttaggagaaatttggttcataggtgtgaccttagatctagttggtcttttcagtcttcgctgggacaaaggcgatttcattgtttgatgatttagttagcaacttaatgaattttatctgtcattgaaaactgacggacctgttgctccttgtaggttaaggttgcaggcttgcagcttgggattgtgaa

SEQ ID NO: 37100 - DNA, 964 bp, Sorghum bicolor
  Intron number 1 from transcript Sb07g002050.1 (locus Sb07g 002050) derived from phytozome v7.0 (chr-ID chromosome_7; pos 2201201 to 2202164 reverse strand)
gcgcccgcggcggcgtcgccaaatccaaacccgcagtaggccgcctctccttgagcatctcattctccctgtaaattttctgcgatttttttatacatgtagaaaagctcatctagttagttactgtacgaagcgaggcttcgttgctctatcattttttttttcatatgaaaaacactgcgtctgcttgctgcttatagtttgtttttctttcgtttactagaatagactagatagatacaaaaacagcgccctctccttgagtggactacactagcccattggatttgtatgccgtcgtcagattttgctgtgcccattggagtagctgctattctgagaacagtggtgagggatgtatttattagtagattgggagaacatgagaaacctgaatgatgaacaaacctcagattaatatcgagttcgaatttgttcttcaaatggaattttgtttctgtcggtttctgcaggcctgaattagtcaagtcatattttgttcttatatgtaacataatccgtaattggctcacacagatctggtggggctgcaaggagagattccccctgacatatataaatttactttgcatggtgtatgtgatactagctgagttacagtgttctattagataaatgatttagtaacctaagttttacggcctaaattcacattactagtatttacagcaataggaaaataaaatacagagtggtaccctagtattagtacttacacaaaaggtcgagggaatagaccatccattactgatatgccaggatgttgaaagttgatctaagtagctaatatttacagcaaaagcacagtcaggatttcaaatatttcctcaaaatatttaggagtttgttgttttcctctgctgatgcttttatgaccattatccatgacctcgcatgatctgatgcagacggaaggactggttcgcagactaaacgtaaaggc

SEQ ID NO: 37101 - DNA, 877 bp, Sorghum bicolor
  Intron number 1 from transcript Sb02g025180.1 (locus Sb02g 025180) derived from phytozome v7.0 (chr-ID chromosome_2; pos 59906669 to 59907545)
cgcagttcatatcttccgacctctcccccatcgaggtaattatttatttgtttattattcattcacgtcaaaacttagatcgatttcttccttcttttagtaatacgtatatatttttgcttaataatcaccgagagaaactctattatccttatccatctgcatccataaacagacagattaaagaagatgatcttttcatgtgtcgtttttttgtaacttttaatagtggttgaggattgtgatgtgtcattttggaagctaatctgctaatgtcaaacactaagacgaaaatgttatgttaacttctgaaacgcgaaaccttattactagctgatgatggttacctgtacggttgtgcatcttcatcagacgtgcatagtttgaactatctgaaaacagtgcatcagacttagcgttgattttgtcaaaggattacttgctattgtagtggtttcttcagtcccaatcaactattagtacctgctcccaatgctctgacctttgcattattggagcaggaattttcgttcctagcacatgcctacatttcaacgctctggtgcactttcaccggacttttaggttgaagcatccaatcatttcacgatactgctccatttggaaccgatgatcaacaaaattaaattaattttacttgtatatattcttcatgtgactggttttgcaagtttccagtcgtcatacccatgagacatgagtagtatacgtagctctgtttcaaatttaaatactaatctctttctttcaaatgcaaagactcatgtgtttgtttcaaattcaaagactcatcctgtactgtacgtcttctccctctgcagtctggctgctgcaagccccccaccatctgcggcta

SEQ ID NO: 37102 - DNA, 914 bp, Sorghum bicolor
  Intron number 2 from transcript Sb01g048230.1 (locus Sb01g 048230) derived from phytozome v7.0 (chr-ID chromosome_1; pos 71267880 to 71268793 reverse strand)
attaggtcttcttccctcctcccctgctttccgctttgttccctcagttttttcgggtttggtttttgacttagcgcaattgaaaattgctattctaggactgccaaacatgtggctttgctaaaataggattcctaacattgacatcgctaaaacaacattagaaacgtttgcactttgttttccatgacatttggtgtattaaatctcttttcttatctaaatacatgtatttctcttctctttggactcttttatccttctgtcatttggaggttgattacgtacgggaatttcatcggtctttcatctggccaccgatcgattcatctcccggtacgagtatgaccgcgccctagtgatgccgccggccgcccagctgccgcccctccttcccttccaatctggcgcatgccgctcccctgcctggtgccgatgatggatggagagcctccacttggtgtcgatggaaccaacgatcctggtgcctcattgcatatgcctcattgtttattaatttttactatatatgaacttgtgcacttcatatatgccatgcccagccaaggcaccggcaccagccaaggcactgcccagctaggcggcgacggcaggcagcaagtcagtcacggtagctgcccagccagccagcccagtgaagaacgacctatgaaattcccgtatgtaaccaacgtccagatgacagaaggataaaagagtccaaagagaagagaaatacatgtatttagatgagaaaagagatttaatacaccaaatgtcatggaaaacaaagtgcaaacgtttcgaatgtcgttttagcgatgtcaatgttagaaatcctattttaacaaaggcacatgtttgggagtcctataatagcaattttctccgttggaacgggactttggtgcagg

SEQ ID NO: 37103 - DNA, 957 bp, Sorghum bicolor
  Intron number 1 from transcript Sb01g034440.1 (locus Sb01g 034440) derived from phytozome v7.0 (chr-ID chromosome_1; pos 57900420 to 57901376 reverse strand)
ccaagtcaggaccgagtaattctggtagtttctctcactttcacgtatatcagtacagaaagttaattacctgaggaagtatgaaattcagctatagtttggagaagcagttttattcacttcatgtgaaagattactaaggtttagaaattacagcactttagggtgataacagactgtgaatttgtgaacgcacaccccacctagcatatttcatcatgaccttaacattttagcttcaaatccatgccatctgtgagcattgtcttcagtcaaagttaacgctatgcatattattatagaatttcatcagtctcacctctcatggtttaaatttaaccatttacatagaggttggtgacttggtgttgattccgctccagaaggatttaaaggaacttctttgtgatgattaaagttatgcatgtttcatagtttgtttatgcggtagagctgggtaatacttattctgaataggggactcgcttcagtcttgtttttgcatggaacatatgctagtgttttttctcctgaaattgtcataataaaactcactgtagttgctcatatttaggaactacgtgattcccactgagagttgtataattttggttgatttacattcattctcctattgaaccctgggtgtaaacattcttgcttttgcagcaggatatattaagaaagaagaaatgtgatatggagcatatacataacatgaaccgactctagtctagcgcttgaatgctcgaatgaacttatgcagcaggcagcagccaagtttgaccttgcccagtcatcattcaaaactggcatgcttaaataaaagatataatgctgtgatgttttcaaattgcaaattctattttttatctcgaatttagtttaaacaaattaatttatgtttacgcaacatttttagctccattttggcgccaacagtggttcacataggtt

SEQ ID NO: 37104 - DNA, 728 bp, Sorghum bicolor
  Intron number 2 from transcript Sb04g029490.3 (locus Sb04g 029490) derived from phytozome v7.0 (chr-ID chromosome_4; pos 59579532 to 59580259)
agttgtgctttcagattctgattctgactctgaaggtaacagcacattcagttctaatgatacattgtctgttattctataactcatgaaacgctcgagtatccttttattacatatatttgtgattgcactcttgacattatgggcatgccatgtaagacacgtttgctattctcttgcacaacatttgttagatgaaaataggcctctaggatattcaaggtaggacaaagtaccttatgttatcataacgatcatttctttgcaatgcctgtcagcttttcttggcaggcttcatacacttgatatattactagagaaaaatcgttggcacatgaatagataccattttttaactgtcatttgttttttctaattgcattgtacactttcactgtcttgtcaccaacaccttaagtgtgaacactgatattgctttgattgcaaagtctactacaaactacttttgaattatgatcgacaggtgtgctgtgcgcatatcagcttccaggtggtaataatgaactgtacatatgatgtatttgatcttcagtattttgttaagagtaaaataaggaactcattacatgagtaaaatcataaactctataatatagccgaatgttactgcacatgaataatttgatgcatgcttgaaacctgcagtactcatgtagtgctgcctgtttctaggttttgtagaagcgctgactcctgttcactcgaag

SEQ ID NO: 37105 - DNA, 686 bp, Sorghum bicolor
  Intron number 1 from transcript Sb02g031220.1 (locus Sb02g 031220) derived from phytozome v7.0 (chr-ID chromosome_2; pos 66209643 to 66210328 reverse strand)
tcaaggtgggcacttcccttgtgctcttctgtctttcttactgtacatactttctcgttgctgctgtataacgaatagttggattgttgacaactgttttgctaatatgtttccaaattattttttgagtggtctgtagacaacttgattctgaagttgagacaacaaagacgagctgaccattgttgaatacatttacttttgtctgttgtgtatcacattattattacacagtctgatcagcattgttgacatacgccacgagtattatgctgtttattagttttgatgtatgctataggcctctacatatgcatctgcaatttgtcatactggtcgagcactcttgggggaagggggtggggggggggggggggttaccatggggtttctgtttacctcccaacttaaaggattgtttggggaaagcacatgttgcacacacccaggtaagggccatttcctgaaggaaatgccgaccaggagaaatatatgactctttacttcttcacacagcgtttagtttagagtgttttcgtcatatgttgcagtctggtttgtgtaatacttgcaaggatttgagtcaagtggtttaatatgctgaatgcaatatggcatctgttttttttttcacttgcctctataatatatggagtgattttctttctccctatttttctgtcagg

SEQ ID NO: 37106 - DNA, 743 bp, Sorghum bicolor
  Intron number 1 from transcript Sb06g026920.1 (locus Sb06g 026920) derived from phytozome v7.0 (chr-ID chromosome_6; pos 55901945 to 55902687 reverse strand)
ctttgggtaatatagcatgcaccagctctctgccttgcttttatgtctcaattctcaaaagtattctcttactgcttacataaggccatgccttggcccgtagttgtagccattgaaaacgtggtgcttgggccctggaggtatatgacgtgatttctggaataaatttttatttattatgtcacctttttttgtgcctttaactagaggactgggcgcaagaatttgtttttaaaggattccccccacattctgaaggaattaaaaatagaatggactaatggagatggtgcaggcattttaatatcttgggtgaagtactggcattgcctttattattatgcactgtataaacaggataagtagcatctattcaaacacgagcctggtctttaaatattgtatttctcatcgtaggttgcttgcattttttttctttttacaataaggattcatgtatgtgcacataccgaccgaagatggatattttttttccttgtaatttaatcatgcttagatttgtagtaatctctgtccttttacccttgccaaccgataagggcagtagatatttgtttttactttgatttttttttcaccaccaccatatttcattgccagaatgttaatgataatgtcatttacaggtatctttttaaaatttaaagaatttgttgcagcaattctcactgtgtatgtgcttttcaggatcttcggggacatcatttactccccacataata

SEQ ID NO: 37107 - DNA, 954 bp, Sorghum bicolor
  Intron number 2 from transcript Sb06g015870.1 (locus Sb06g 015870) derived from phytozome v7.0 (chr-ID chromosome_6; pos 43906113 to 43907066)
tgaattctggtaaatgctcggaagcttacctgcctatttaatcatttaccgtacaaatgaatgggcaaaagttcaatcaatcatgatatgatgtgtcttgacatctatttgaagaacatggagttctgtgaattctttttgctgcaactggttcaattttttggattattatatattgtgttaggatactgcttctaccttagtatgtgcttagaaaaaaatcattgttcttagcaattctcatttcagaacccacccgtgatctgtgaagctaataattggttggataaggtggcaagttactacatcttgcatagctggagggttttgtttcaactatgtgatttcttaagcctgtcaaatattcaaatatgaaagaagctattagagagcttctgcatttccatattcaataaacatatagagaatctagaatctaaaaccaaacaatatgattgtaacaacatacaagaggtggatcgcctcttgcttcttgttctaactgaaactaaaattttgcattaaatcattgagctaatgtaacaattcaaattaatcaaatattaaaatgacgaactgtgtttgtaaacctatttatcatgaacaaattgttactaatttttaacttgcacatagagtttgcatgtacatgcagtcgtagatcaattcacagaatatcctttagaggtgaaggtggaagaacataccgctacaactaacaccagtgtaatttctaaaattgtagttagcaaagaacaaaaaggtttgactgtgcataatcatgtctgactgtactagtagtttatatgaaatctgtttttttctctgtttatggtataaacagttgtatcgggtagttaggtgccaactatctgcttctgaagggaatgagataactttgttgtgtgttactttgaaggcatcgaagaacggttttcttcacttattgaatct

SEQ ID NO: 37108 - DNA, 515 bp, Sorghum bicolor
  Intron number 3 from transcript Sb02g036430.1 (locus Sb02g 036430) derived from phytozome v7.0 (chr-ID chromosome_2; pos 70842526 to 70843040)
gcgccaagtgtgctcggagcacccgtgctgccgtatgtcgtgaaaactttttcatttgtcaagagcatttactattattggggattggggacgatgtgatgggggtgttaagtgcatgcaacatgagccacttgtacccatggctgcttgctggctttttgagtttttgaggtttcagacatgctgctatttggttggcagcattagttaggtggataatatgttggtaatatcctgcttctacatgctagtgccattaattaacttatttagttatgttaatatgtcaaggatgtcatgtcacatatttattgagaccatgccaatgctatttactgaagctgacaattatttacatagagaatatcgattgcatattgaagaggcttccatttattatattaactgaatagtgggagtttaatcatatatgttctcttcaaatttagttcatgttttgatccctgattgaccaccattggcgcttgtgcttcataggcaccaccgagtccagt

SEQ ID NO: 37109 - DNA, 876 bp, Sorghum bicolor
  Intron number 1 from transcript Sb02g024540.1 (locus Sb02g 024540) derived from phytozome v7.0 (chr-ID chromosome_2; pos 58906268 to 58907143 reverse strand)
ctccgcttggccacgccttcccttctctcttctcggtgagcccccctttccccttcccgctgtggcgtcattcgatttgagcaggcttagtgtcatatcatcagcttgtttagttgcttcgtgcggtttctcttgctaatttgcggtgccttggtgaacccttgccctttgttcttagtgcgcaattgctggatcattttagggggattaatgtggttgcggttgtacttgtggagaaatggcgtggcaaaactaaccaaaattatagtggtctttagtcggttacacgccatttcagagaaagtgcaaaactaacctcatggaaattaagtgaactacaaagctactgtctaggagctggctcttttgaaggatataccattctgcctgtatatgttctcaaggatctttattttcttttcgtggtatatgggatgaagtgtgtactggagtacttgggccttgtttagttcaccccgaaaaccaaaaacttttcaagattctccgtcacatcaaatcttggagcacatgcatgaagcattagatatagacgaaaataaaaactaattgcacagtttgcctgtaaatcacgagatgaatcttttgaacctagttagtatatgattggataatatttgtcaaataaaaacgaaaatactacagtgtcaaaatccgaaattttttcacaactaaacaaggccttggctttatcatgagttgatactattgtgcgcacaatgtgtgagctcagcttatgagattacagtatacagtattataagtattgtttctggtgaattattttgtaaaacgttatattcaatttcgaaatttggcacgtgtcaatgttttgtttcgatattttgcaggagtgga

SEQ ID NO: 37110 - DNA, 622 bp, Sorghum bicolor
  Intron number 4 from transcript Sb06g030250.1 (locus Sb06g 030250) derived from phytozome v7.0 (chr-ID chromosome_6; pos 58669471 to 58670092)
caccagagcctgttgctgctgcatctcttggacaggtcggattgctttatcattcatgtcatgaattgattaaccactcttagcagcattttgtatttctaaatacggaagcagagcacagttgcatacagtcacgtgcatttggatagttgagctattagttatctgactgctattgcatcctctctgcattttcattgtttcaacttcgaacaccagaactgatgtgcaactgaacctcagctttgcacgttaatatttgtttctggatgttcccctaaagggatgaaaataagtgcacttcaaatttaggagcaactaaaagtattgtataatggaaatctgaacctgtatgaagtttttttttttgaaggaaaacctgtatgaagtttgaataccatattacatgtttctttaaaggaacaacaaatgagtaacttcccagagctgaaatttgagacaactaaaggcacaataggatggaaccctgaacttccatgataaattcaaatattagtcaattcacacttcttagcatggataaccatggaatttcatctccagtgatacaatgttccatttttcttatttttgtaggtttaccaggctaggctccgctcca

SEQ ID NO: 37111 - DNA, 635 bp, Sorghum bicolor
  Intron number 1 from transcript Sb02g008430.1 (locus Sb02g 008430) derived from phytozome v7.0 (chr-ID chromosome_2; pos 11224050 to 11224684 reverse strand)
aaccagtggttcaccctggtgtttgaggtggaaaggtaactcttattgctttgttccacggtttttattttttatgtaactaggtgaactccccgtgtgttgccgtgggatttttttaaaaaaataaatcattacatacatagcactattatatggtattcagtatatatatttgacttgcatgttcttttattatattaaatctagtaaaatattgctaaactaatagaagaaaaaataaatatttaattacgttatagaggaacaggcgatgaaacaaatagtgtatatatatgacttgtatgttaatagattaaagatttaaagtatttcacgtgatgtagatgacatggagatttttttaattaatatgggatgacatagacttagtggggaatgatgtggacaccttgtatgaagagatatagcatttaatggatcacatagtgggaaatgaaatggataccttgcatgaagaggaaaatcatctagtggggtttagctttataagagtatatggtatgattaggccaataatacataggagcctttgggacttgaaaccactgcggagactgaccaaaagcgattatatatattgttcatgcaggttcgaaggatccactcttcaggtt

SEQ ID NO: 37112 - DNA, 549 bp, Sorghum bicolor
  Intron number 2 from transcript Sb04g003130.1 (locus Sb04g 003130) derived from phytozome v7.0 (chr-ID chromosome_4; pos 2937022 to 2937570)
tgaagattaacatctacttcccaaagctgaggaaggtgagcagttgtttgtgtcgtatgctaggtttgatccactgtgtcagttatttagtcagtacccaaggtgagcagtatggcttgatattcgaattgctcacttgcactaagttttctatgtcgcatttgattgttgagtagtgcttctagttatacactcttccaagaagtggaaaaacacagatgttagattacacagacagtcttgtttgcaatttcatattaacaccaggttatcgtacctgtatcgttttgtagggtgtgaattgattctatagcactgctcttttccttcttcaaatgagtgaaaatataggcaggtctaaaaaggtgaaaatagtaacaaaaagcattagttgccgaaatctaaagaaatgttatgattgcattgtgcaatacataggtcaagatggaggcctggagggcatgcattttctatttaaatggttggttatttagtatgccaaaacgaattaggcttgatttctctttaatcagttatgtgcttttacag

SEQ ID NO: 37113 - DNA, 883 bp, Sorghum bicolor
  Intron number 2 from transcript Sb04g022350.1 (locus Sb04g 022350) derived from phytozome v7.0 (chr-ID chromosome_4; pos 51827622 to 51828504 reverse strand)
atagatcgcagagtaagctctgaccattcagtatgctcatcagctcatgcctatgtttagcgttactatttcagagtttattacagaataagtatctatagcatcactgatgaaatttgtggacttaggatctcccattcgtctccaaagtaatggtagttacattcagtgatctagtcatatttctgaaacataaggtttgatatgcatgtttcctgtgtcccgtgctcctaacatatgatacaaataactatttttttttctcaaactcgcagtagagctgtgtatcataatattaaggagaagaatataaataaccattggatatggctaaaatctgacattgtggaaacactattttatgcctagttcaggttgctgtttgtttgttgtgtagtggagcttgtaatttcacttgtccaatatagtaataatgacatgttgttgattagccttcatcaaactttaatgatttgaacttggtgttgctgctattttcgtttaacttgtgtcatactagtgttcccaaaaattagctacagttagtaatgtttctattgaaaatatcaccaaatgtccctactaatctttgagtgtgaacttgcctacaacagacgataaattcagattaatatatgacagacttttagctgttggtagaaagttttgctgttgcatcttcaaccctacattgcagagatactacatcaagactgtctcctatatttgttgatggttatacatcatcctttgttgttggctttgaatggatgcatgccaatctccagttacttgtgaatgtaattgttaaatttcttatgctttttgatttctaactgagcttatgtttgttcttattgtcattcttaattgtagggtgtat

SEQ ID NO: 37114 - DNA, 676 bp, Sorghum bicolor
  Intron number 2 from transcript Sb03g035540.1 (locus Sb03g 035540) derived from phytozome v7.0 (chr-ID chromosome_3; pos 63604504 to 63605179 reverse strand)
tttcggctgagcggtctaaggatcctaatcggcaggtaaatgacatctgtactggatatgtattcgcgccaaagctgtttgtggaaattccttagtgacgcactgacgctggaacatgcacaggtctaaaatatgcaatctaatggtcaaattctgtcgacttgacatttcagtcacactgtattactagagtctgtcttagcactagttagtagttactaggccatgttaagtagtattatacttctgtttgaacaatgcttattgatcttttgcacccgaccatgaataaaaaacaccagaattagcaacaacagaatcttttgtttctattgcaaaagactttacatctttgtactgaacaattcaaaatctttccaagtccatttcagtgcttacaaaacaaagctccaaatcgatagacttcatttctactttgtgtggcaatattaaaataaatctattacctctttatagtttcaattaaaacatgtcactttctgcttgatttgttataaatggaagagggagaagatgcttgttttgacatcctttgcataatcatgaaaaacatttatcacagtatgtcagataatgtaattttttccccttcacctatgtcagtgatcaaattatgaattgattgatatgccatccatttcactcaggttggagc

SEQ ID NO: 37115 - DNA, 370 bp, Sorghum bicolor
  Intron number 4 from transcript Sb06g019860.1 (locus Sb06g 019860) derived from phytozome v7.0 (chr-ID chromosome_6; pos 49438525 to 49438894 reverse strand)
tggcagtggattcctatcatctttacaaggtatggctcataatatattcttttcacagaatatgtatcctgtattttagtggagtttgaaagaatttcaattactgtaaaactcaaatttagtaataaagcgtctgtttcacaaatttttgttttgtctctagtctgtaatgatacttgtgattggtaataaagtgtctgtttcacaataaaaaaactcaaatttagtcaggggtctttaattctacaagatcaagtatgacacacggtccttatatatatgaactaaaacctatagtgacctataattggaaaggacggagtggtacatttctgacccataatggatgacttgtcaaaaatgtaggaag

SEQ ID NO: 37116 - DNA, 757 bp, Sorghum bicolor
  Intron number 3 from transcript Sb01g035670.1 (locus Sb01g 035670) derived from phytozome v7.0 (chr-ID chromosome_1; pos 59277050 to 59277806 reverse strand)
ctgttcaatcagtaagtagatacagcaacttttgctttctaacccagcatttctgccaataagttgccatcacttcctaaattagtttaatcttcatatcaaaattatgatacttggagagaatctaagtgctgaatatatttggatggtacaaaaattcaatcttgttatttttcatcttacgtaattttttacaaagttgtctgttctccttttgtttattgatagtcatactattatgttatttggtccacccctctttagttttttatatatagtgatataagatgagatcacattaacgtttacatacatgttcagctactgcaaccctctttaaaaatatgctgtctttgatacactttataatacttgtattcatttattgtaacttgttttgtctttcaccaacttgaacttatatatgtaactaataagcaacttcgactgagcttttggagtaatgcatctgtacaaagttacagactattgagatattgtacacttaaagttgttcccatagcaaacttataatggtatactattttcataacatgcagctaaatattttctttatatatcaacggtcaaagtttgtctgctgaaatttttagacatcatatatttctgagtagagggagtaaattctgagacaaccttgattttgtttcttcagtgttggcagcattcttatttactgctggaaatatataatgtttcttgtgttttttgcagttcttttcattactggattcaa

SEQ ID NO: 37117 - DNA, 528 bp, Sorghum bicolor
  Intron number 1 from transcript Sb02g010030.1 (locus Sb02g 010030) derived from phytozome v7.0 (chr-ID chromosome_2; pos 14569495 to 14570022 reverse strand)
cttccgtacttgatacgatatctattaaaaagaaggtaatctaatctatcatgtttgctcgcccatgctattgtggttcattattcatgcatttgacaaaaaatatgtagctcctgtatttagccactgtttacatgcaaaaatatttttctaagggaacagattctacatttaatagttgcactgctaatgtactatattacatagccatgcatgtataaaaattagcagtggatgtctgtaatcatcactgaatttctagcaccattatttttttctcaaaccagcttagagctgcatgtcattatattaagaagaaaaaatgttattaaaaaacaagccccatcaaagcctcacaaacacagcacaggccccacactcacacagcacaaagctcgtgaatttgcaactcgctctcagttagttatgtgtgtacttttatccctttctgcaatgttctaattaaatgacagtttctacctgttgcatcttggtttgaattcattgcagctaaaattgtttagtcga

SEQ ID NO: 37118 - DNA, 772 bp, Sorghum bicolor
  Intron number 2 from transcript Sb03g009820.1 (locus Sb03g 009820) derived from phytozome v7.0 (chr-ID chromosome_3; pos 10586497 to 10587268 reverse strand)
aagctagtgaggcggatcatcgcgttgaagtcagcgtatgtacctatctcaatttctcgatataactatatgggtattcttaactaaatttccatgcgccattttgttcattttaagtataaatttcttgttctctttgatggtacaaagcattacctcattcctttttgcacccactacaccaagatgtgatgaaatttggaaccacaccctttgcttttgttgtttcataatgtagcattggtgttggttctggttcgggattaattttgcaagtatgttatcttattttgcaaaacatttgcggctgtgctttgaactggaacctgcaacacaaatatttatcctctctgttccaattacagaagaaggcagttattgaacagagataactcatgcattctgattgggaggatcaaacctaatgtgctgtgttttgttttgtacaaattttcgttttgcataaagtagtaggaacttttgatgccaagtatgtaactatagaaactttctttcattattacaacgatgcttctcttctggcaaggttgcattccctgtgacaaaggaaactgtagcaagatatcatcatgcatttaagacaaatcttgtatcagctgctgtataatttttgtgcccatgcctattcctctattatctgggaattttgtttttccttgtggatgacagttgttgttggtggtgttgttttttttaatacaattgtggtcatgatctcatattgacttgcaggcgaccaagaagattgctg

SEQ ID NO: 37119 - DNA, 393 bp, Sorghum bicolor
  Intron number 3 from transcript Sb03g007790.1 (locus Sb03g 007790) derived from phytozome v7.0 (chr-ID chromosome_3; pos 8182558 to 8182950 reverse strand)
ttcttgtcaggagcaattgtaagttttttctacttataaacatagctgcattttttctcctttgcatatgccatgcatttctagtttcaaagcattgtaacttgctatcttcaatgacaatttattattttttcttcaatgatcattatttttttttcagttttagatggaccttgctctgtgataacatttgaatttgtacttggagcaaaaattgtagttctttttcttataggaaatatgctcttactcattatgtattggaactttaataagaaagtgttgcatcgataaatgaaatttagtttatatataaacgtgaacaattaatgtaatgggtgacaccattgttttgcaggccactttttgccaacagcttgctaacaattgtag

SEQ ID NO: 37120 - DNA, 942 bp, Sorghum bicolor
  Intron number 1 from transcript Sb04g000620.1 (locus Sb04g 000620) derived from phytozome v7.0 (chr-ID chromosome_4; pos 441191 to 442132)
ggcatcgttgcaggtacctatccttgtctaccaacaaccgtattattattattactcatatagtatttcttttcttaataattattatatgttttgttcatttcttgtgcactttttcggcctggcctgggatccacacacacacgtactgcaaagcgcagacacgtaggactaataataatgcaaattatttggataggaaaatcttgtggtgtcttgcgttacaccgtgtcgccatcatgaatctggcgcccatgctttgctgggccaaccgtttcttgtgtgtccatccaaataatagcataacattataagacagtacgtgggcaaccaacctacctgttgctgttggtactcctatattagactagactagtggttgatattcatgtgctacccatgtgccgtggttgccttgcagcactggcattacccaattaagttagttagttgtgttaggctgggattattgttagggctgtcttgttttatattttttttatatacaataaacaggggaaaagggcggccttgtctgcttgtatatcaccattgaattgaattgaattgaattgaataatggagcagtataatgctgccaacctagctatggatgaatcaatgaacgatatactcctatgctcgatcgacaagagtacaagacaaagtataaacccaacaccatattctacattatgcatgcatccgtatattctactgtatagtccggtatacatatacacaattatacattgagtccagtttcattaataccaataatcaaactaaaacaagtacttagcttagatattaattatttaacaagatactacacatatggtaatggataataataataattaagccgctagcttatggtttcattgatgtgaacgatcgagtgcagggtatcccccggacggtgctgctggacaccaagac

SEQ ID NO: 37121 - DNA, 731 bp, Sorghum bicolor
  Intron number 1 from transcript Sb04g028015.1 (locus Sb04g 028015) derived from phytozome v7.0 (chr-ID chromosome_4; pos 57952373 to 57953103 reverse strand)
ggatctcccaagtaagcttctgtgcatctcttccccttgttaacaatgttatatttctctgcacaaatctttaaagagctatgaaaattgtttgttttaagataagcctaggtttgctacatgatgctcctttctgtacaagtaacatgagacatgttttgatactatgaatcttagtcaatcttcaaaaacttttacatgcatctgttacttcgtctgtatctttgaggttttgtctactagcaatattgggcattatacaacattcttgtagatgaggtaaaactggtcctagagttaaataccattaacatgaatagtaaggtatgcacaaaccaacataatatatgctagctgtcctaatgtatttaccatgttttgtctcggtgttaaagaaactttatgtgatcacataaccagctctgagcctatacgaacctgtaagttcttgctgagctaatgctttcagttgcatgttgttgtgctgtttaactgattcaggcttcagatatcaaagttaagagtgcatgtaggctggacatagattatatttgcacacatgatgtgtaatgcatcttatcagttaaacacctcggcttcaatattgaagcctaagtttgggatctttggtcgtaactagtaaagacagcatgaatcttacataaagttacttacaaaatattctctctcttttgtctccaaaaagaactagcgagtactggagagaagga

SEQ ID NO: 37122 - DNA, 578 bp, Sorghum bicolor
  Intron number 1 from transcript Sb03g009490.1 (locus Sb03g 009490) derived from phytozome v7.0 (chr-ID chromosome_3; pos 10205066 to 10205643)
acgccgtccaggagaagggcgagcgcgccagggtaagagtgccgtctctctgatccgtgcggtttctttgttaggttaggtttatagttgtttcgttctgcggcgcttccccagcttgagtgatggcgtgatctgggggaattatcaaacacaagaaaccttagtggcgctggcgcctagtcttcctagggtattttggttgctgttctcttcggaagctttgctggcgcaagtgcttcagtacttttgtgcggttagtttcagctggtgttctgtaaatgggtgtagttccgtgcttgcctgccactcatttgggaacttttaactatttttttgaattattggaagatctctctctctctctctcttcttcttttctttttttttactgaaaagaaatttaggtgagcggcaaaggaatacatgatgtagtttacactttagctcgtaaaatgaataggtgtgtgggggagcgtccacagcgaatgacactttgatctgtggaccttctgattcttctgaacggagaggctgtatttgctaacaccatgtccttgcaggcatcgtttattggggcc

SEQ ID NO: 37123 - DNA, 963 bp, Sorghum bicolor
  Intron number 3 from transcript Sb01g034870.1 (locus Sb01g 034870) derived from phytozome v7.0 (chr-ID chromosome_1; pos 58301030 to 58301992 reverse strand)
gctgacggagctttatcggaagtacagggacaaaggtcagttcttttgcttgctcctgttcttgatctgttgtttgtgcttgttaatggtatgaaatgtgaatctctctggggttggcgtgcacaagtgggttcaacaagtgttctagttagaattggggtagtgcacgttgatgctcgtcggaatagtggttattgtcttctgtttgaattgaaatttctgtttgaagtggaatggcaaaaacacacacataaattttcacctgaaaaaagtgtgggattagtcttgcccaacggagattttacattgtttgccacacagcactcataccaaaagctttgtttacctgtagatcatttctgccactgtttttcgacatgtatgggttttatgcagcttacattagataggcagctggtacaacatgcatacaatttcattgcattcccttatcaaatcggagcgatcttccgttttctggagtgcttctaacttgcagatacgttttgaggatcagcgaagggttctgaaaggaggctgtgagaaccctgttttccaaagaagatgtttgtttccatgaggattgtttccccaaatttcttggacaactaaaattagcttcaacttaacattttcctgactgagccaatatgggcactgttgagtgaaattaaatcaaaactgcatggagtttaaatgacgctagaatgatcaccatttgttgttgcttaaacatcaagtattgtacccacttacacttgcagcaaatttgctttgttttaagttcagtatatatggctatcaagcaagcccatgtctcttgtgactatgcctctgtactttgattcagtctgttcatgctattccattgaactgatttttattctttagatctaacagaaactgattttacttccaaacttgtcagactttgagatattggcattcccctgcaatcagttc

SEQ ID NO: 37124 - DNA, 657 bp, Sorghum bicolor
  Intron number 1 from transcript Sb06g030480.1 (locus Sb06g 030480) derived from phytozome v7.0 (chr-ID chromosome_6; pos 58883406 to 58884062)
gaggaggagcacgctgcaaggcttgtcaggctgtggtaacgatcagaactcttagggttctttgttttctttttgggattgttattaggtacttaggtttccgttccctttgtctggtgctgaaattacagtcttgcactttggcattgtgaaattaagaactcgattgatgcgtttactgctctaattacgtagttgtaacggcaaaaccgaacagattccaagttgttcctagctggtattcaatgcagtagtaagaaattgttaattcagtcttgatgtacaaaaattgggaagaaccatataatctggaaaaagatgcaacataattcataatatggaaaattaaaagttgagaagaaccatataatctggaaaagatctaatggagatcatagtgcatatacttcatattatggaattcagtactttgatcaactactagacggggcagatagggctcatactgaacctgaaagaaggctgatagtttgtttgattaaattgtataccttggaaccacatgtaatgtaaccaggattggccttgaagtatcatcgaactcactaggaactcacaaagttgtttcattggatgaccactgaatacgacgattttgtagggaagctgcaaaagcattgtctcaaaggcacacgg

SEQ ID NO: 37125 - DNA, 877 bp, Sorghum bicolor
  Intron number 1 from transcript Sb01g010820.2 (locus Sb01g 010820) derived from phytozome v7.0 (chr-ID chromosome_1; pos 9715480 to 9716356)
cgtgtgagtcttttctttctccgtcgttctcgaagcttctcagttccgtaacgaatcgctgataaagtaattggagctcttgcccacttttaactcgcttcccttgtttctcccgaattgagctagctctatgcctctttgtgtgcgcttgcttgcttgctttggctgggattctaattctatgcactagtaactggaagggttcaattcgattctgaatttctgatgaattgtttaggtggtttcgtgaaattaacttctccaatatcatttcggcatctttctatgcccgtgccttgtagacatcaaaattcgggttttaatatgctgaaaattgggaattcggggttgagtccagagatttcgggaccacctcagagctaactaactggttggttgggttagacttggggagctgagggtgggggcttctcttgttcagttgaaatggatgcatatttcttttttgtcctgtatgtactagtatatttttagaaataaaactatgcttgtttcaccgcttcactgcattacataatttgttttggctaattttttaaacaaatctatatgctcttgtctgagttcagcacaaacacttgcatttctgcacaacttactagtttgcaaccttctggtgattccagtttccatgatatgctgctcagatgtggatactaattttctttcagttcaaacaaagtgcacagcatttgtatctgacaacttggcatgtttgtgccttcttcgtttattgtgtgctctgtaatcccactgtgaattgattttgttggtcaaccagataaggcatggaccactaacatgatcagtttgtttatgttttctggtcaggcaagctttcaaaggaacttctctg

SEQ ID NO: 37126 - DNA, 596 bp, Sorghum bicolor
  Intron number 3 from transcript Sb01g036280.1 (locus Sb01g 036280) derived from phytozome v7.0 (chr-ID chromosome_1; pos 59915006 to 59915601)
gcttcaaaaagtggtatgcatatatgggcatgatttaaaaaaactgttttttgcttatcttttcttttctgaagcttttatttgttacaaatgtattcaccattctatgtttgcattaactttctcaattacaactcccaacgctgtgtctacctgctctcatagcagcaatggaaaagatctatctgaagcatatttgaacctaccattttccaatttacaaagttctactgctatagagtaccccagatataaaacatttttagacttactcatgaacctttcccttagtataagtcattatacaattctgaggtatctgggtctagtttcttcatgttgcactcccagtcttacacccccccccccccccccccccaaaaaaaaaaaccggagggcaccaatgtcattctcttgctctttaggccctgttaatttctgggtcatgcaccgtgttctgtatacaggatatgacacatcacacatgcatatcaaagtagtttgatgagttccgggcacatgcatattcaagtgctagaaccatcacataagaaatattgttttattccttcattgtccttctcctgcagagcatc

SEQ ID NO: 37127 - DNA, 897 bp, Sorghum bicolor
  Intron number 3 from transcript Sb02g033640.1 (locus Sb02g 033640) derived from phytozome v7.0 (chr-ID chromosome_2; pos 68211788 to 68212684)
atttcccaaatttcatcagagaaggtgaataatcgtattactgatcttgtcttacaagttatgggccatagaatatgtcatattcttcataatctgttgttactattgcagtttctatcagataccatttacaactcacttttcttgattgaatgtgattatatattttctagatagattgggtgtaattctagggaaaattaaaagtatgcaagcaaataagcatcatattgtctactaccaaaacaaagtttgcaatcatgtggtgtagaagttatttctcatacatgtgacatcttggatgttgcttatatcaatttatgagtcacaagagaatttgggagtaccgcattgcccaagtttatatggttttgtaatttaccatgtcacctttgatattccctagttttatctttctgtttatgaacaatgtggaaaatgacacggacatagtgtctgtaccactgtaaattgacatgagtgctatcttgctgtctgaatattgaaagaaaaattacaagtacaactatttttgtcgagggcaacactgcaacatagtttttgttagcaagtgcatcgttctttgacaaataactaaaggattataagtacagatcaaattttctgtagcggcacagggcatttgattctggaaaactttatgagtgtattattttctctcttaagcactacataatgtttgtttgtaggaatggtagtgcaatacaatgcttttagtgacttcattaatacacttatttgtctgagaataaccttcatcaatgaactctcctgggaacattctagctccaaactgaatagaactgtaaagtttaaccatgtggcatctaatgcatttcaggtttccaggtcaaagtagtgacaacagacaactac

SEQ ID NO: 37128 - DNA, 677 bp, Sorghum bicolor
  Intron number 2 from transcript Sb04g034130.1 (locus Sb04g 034130) derived from phytozome v7.0 (chr-ID chromosome_4; pos 63978123 to 63978799 reverse strand)
gcaggggtcgccggcatccttttcactgacgtaagttgctcaccttctcgtccgtttgttagagtactctgggaaactgtacaataacttaggctaagctgctctgatataaaacagccgaaacagccaacaagattatttctagttttgaattgctgattgcttgagcaactgtaaaaaggactcaaaattttcactgaattgtgggctttaccctggttagagggagcccttccagaaattctctggcgccctggtgggccgcgcagagggggtttggaaatagttttcaaccagcaattgacgcgcctcggtaatacctcatgagctgcgtcattgccccaagcgcaaagatgagttgggacgttcgcccacagcctacttttatacatcgctggagacgcgcgttcgctaacataggcgatgtggtactaaacggaaccgacctactactactatccgccggactcgacctgcaacgccaagtagagctgccgatttggggttttccttttgtattttacgccctgctaatcatgggcctagtagctaagccgagattcacatgggactttaatgattttattattttagagaacaaaaggctgagtaaacccttgctttgctcgtgattctttgcagttgctccgtgtatcagggaacagcgacctccccgt

SEQ ID NO: 37129 - DNA, 984 bp, Sorghum bicolor
  Intron number 1 from transcript Sb01g001360.1 (locus Sb01g 001360) derived from phytozome v7.0 (chr-ID chromosome_1; pos 1270347 to 1271330)
cccgtcaccttctcgcgctgcccccgcttgactgggtaaatctcctcctgctgagaaccggctctgcgcctgactgcctttgctctcgctctctgaacccgtctgttcctgttcgttcccatagttccagattttcaatggggggtttccgtggtggtgcgaggtggtcttttcgctccgtgcgtcgatttacatgggtttattgtgaaaatcagtggtttcaggggaacgtccttgaaggatgttctgctaagtggtttcagtggagcgcccacaacctgtttgtcgaattgctctggagttgttcttaacgtagcgtccgctaataccctatccaatcgttccccgtgctctcctcgaaaagacaggagcggcggcggcgagcggcaggggcagctggaatgggactggctggtgcgactgtgcgagtagcaggcgccaccaatgcgagtgcttcccattcccttctcctttgcccaagcaacagtggcgtcgacggaacgagcggcagcagcgactgcagcaccggcgcgacttgtagttgtagcagctactacaggtcccaacagcagcagcaagccagcatacgtgaccaccagtagcaagccagcagccggcaagcgttctccttgttccttctcttccccagacagcccgcaagtgctctcactgttcctctattcctgactttggccatcttttgtttgcaaaaccgctaaatggttagcggcagctatagctgttcttagctgctggggaaccactcggctatctagcttagccggcgatttaaacattactttttattgaatatatgctctgcagttcgtctgcaagaatagcccatgactagaatatgaatatctgctttgtactctttaactctgtaaaatgaatagagttttctttatgttcatttgaattattgtgttctactatgtgacaacattaagtttcctgcctcctaggaatcttccagtcgac

SEQ ID NO: 37130 - DNA, 705 bp, Sorghum bicolor
  Intron number 3 from transcript Sb03g026600.1 (locus Sb03g 026600) derived from phytozome v7.0 (chr-ID chromosome_3; pos 53408967 to 53409671)
gaggagaggagctaccaggactcggacgagaggaggtatgcccagtggcgaatctaggattttagttttgggtatgccgcacaaaaaatttcaatacaattcggtacatctattttagcaatttggcaacaattgcaacacgatttagtatatacatgcactaagtaacataataaggcttaaattcaaggattaagttgaaaccattcactaaatacaatataaatagttcaaaaaccatatcgataattaaatatacctacgttgctattttcagactgttttatttgacattttgaatcgacataaatgctttattatgttcgctttactgaaaagtcatggctaaaagtactattcgtcgattaattgtgagagaaaagtattgttcattcgccgaaatagtacggctcatgagacatatattatcttcgtcaaccagatcaaccacacttcaactactagttcaacctgatcagctgaacgattagaaggttcaactagatcaggggaacaattagatgcaatatccaagtttctcttcgtaactgtacaaatattaaaaaacacattgctaaataactaaacaagatggtgtcgaggaatgtttgttctttttttttcttttaacaaatacagcatatatacaataaagtagtatatatatatacactaatacactactgctgtcctgttttgcagggt

SEQ ID NO: 37131 - DNA, 507 bp, Sorghum bicolor
  Intron number 1 from transcript Sb04g034110.1 (locus Sb04g 034110) derived from phytozome v7.0 (chr-ID chromosome_4; pos 63969712 to 63970218)
ctggatcgcggccgccaaggcccagctgcgccgaggtgagttccatgttgttgtgatgtgtttatttctcgtcgtagctgcatatggatttgggtgctacacacaagctttggcagatcacaatggcagggcttatttgatgtccgtcattgcttagaagcataactatggctgaagatttgaagcagttctgcattttctgtgacctgtccaactgggtaatctgaactaaaatttgagcatcttactaatttcttggttgaacttccatgttatctgctgcaaagtactgagagcataatgtaagtgtgtctaaagatgacctgatgaatcaccctgttctttagagaaatgaatcagctaaatagggcagagtttcatggacctccattatactcctgcctatcttgaaatgtaggagtgatcaatctgtaagtcaaacttcgttcaaaaaaaatctgtaagtcaaacctgacaaactccgtctgctccgtgcaggttccagcc

SEQ ID NO: 37132 - DNA, 887 bp, Sorghum bicolor
  Intron number 2 from transcript Sb04g036800.1 (locus Sb04g 036800) derived from phytozome v7.0 (chr-ID chromosome_4; pos 66605515 to 66606401)
tgctggacctggaccgccagcccaccaggatccaggtgcgtctcatgcccatgcacatgcacatccccttttttctttcttcctttctcgcaatgtatatatgcttacttgcctcgtaagtagcttataattagcatggcgcgcacgctgcactctctagtctctacacaatacacacagatcgacacggttcatcgactccacacacacacgtgaactttgttcattcctagctagtacattttttaaatttgaccagtacaaatatcgcatccttgggatgtgatgcgctgtatactacgccacgacttagtttagattggtatacctacacacacgtgtcaccatgcatgcgtgcacatctcttcatgcacacgcactattccaaaggtcctgacaaagcaagcaaccgtcgccgactctcgcgaaagcctagctagttcggcaacgacacgaacatatatagctgacatggtactttgcatgactgcatgcatggttgcatcacaaataaaagcctaggccttgtttagttctgaaaaaatgtcggatttcgacactgtagcattttcgtttatttgtgacaaataatatttaattatagactaactagatcaaaagattcgtcttgtaatttacacctaaactgtgtaattagtttttgttttcgtctatatttaatgcttcatgcaagtgctacaagatttgatgtgacggggaatcttgaaaattttttggttttcggggtgaactaaacgaggccctagctagtattcctacgtacgttttgcatgcgcactaaacaatcaacgtgaccaattaactgaccgcgtggtgtgaccgatcgatcaggttcccggaggtggcggagctcgtggacgtgtgct

SEQ ID NO: 37133 - DNA, 799 bp, Sorghum bicolor
  Intron number 1 from transcript Sb05g021020.1 (locus Sb05g 021020) derived from phytozome v7.0 (chr-ID chromosome_5; pos 51517189 to 51517987)
aagggcgactaccacaggtatacccattaccgccagcagatcttgccttttattctgcgtacatatctgcctctagagtctagacgatgcgatctgtttatggagtggccgaggagtgaggttggtggatgtacgcgcgatctatatgcgatgtctgacggagttgatggattttcgcttattatatcaggaatcgttgtgtttgggatttagattagcgggggttttgggtccttatttattgctggttattatgatctgtgggggctgcacgatctgatttgggccctttgtatatggactatgggaattgtggtttggagaagtcaaaacataagatctgcagttgttggtttggagaagtcaaaacttaagctctgtatgcagatgtttcttgtggggatgacaggggtctgagtgatgattacgtctaaatttaatgagtgatcctttttttttttgtttggtgggttacatacactcttgttatttgtggtggctagtcaccaaaagatagaaaggggaaagggaaagcgattgtggtgcctgtgacgttattgagtgaggttgttttccttttatttctggtgcatgctgaggttgcctatcatgaatttctatgaatttgtctgtatgatacatgatgatgtgctgtctcttatagtagaagattgaaggatacgaattcatgatctatggattttttttgccccctactgcacatatattttggtatctgatttctcctaacaatgattttgcaggtaccttgctgagttcaagtcaggtgcggagagga

SEQ ID NO: 37134 - DNA, 702 bp, Sorghum bicolor
  Intron number 1 from transcript Sb04g029410.1 (locus Sb04g 029410) derived from phytozome v7.0 (chr-ID chromosome_4; pos 59502648 to 59503349)
tcggtgagtgcaaatctccagcgccttattacagtcgatcacatcgttgctgtctttttttcttccttttataatgcctgcattatattcgtctatcttggcttgaaatcaaagactgttctgatgcatcacgcatgatgaaaacacatgcttgtcgcattggattggcatgaaattttgtcttagcgatttggcacctagatgcagggatgaatatctagctatcaattacgatgatatggatccatatccatcagtttggcaaaatgggaaactgatagctattgacaacgcctgttcatttataggccaatcgatcaataaacatgaatgaaatcaaattggaaagcatttgatgatcaacaaactgtggttcctgatccttcacttttaaattgttgagcgatcgatcccactgacaaatcatgcgtacggatcagatgtgaaacggatgttcacatcgaggtcaggatgtggtcatctggtatctggttttctacaaatctagccttgaacagtaatggttcccccggggcaaggcatgcaatgatgaatgaatttaacgctctaatcaggaggaaaaggaagtaacattatattatgcattcacattaatgattaatgcctaatagcatatagctgttgttgtgctgatcaggtggcgaaggacgacactggccgcactatacccaagttcggcga

SEQ ID NO: 37135 - DNA, 763 bp, Sorghum bicolor
  Intron number 1 from transcript Sb06g019640.1 (locus Sb06g 019640) derived from phytozome v7.0 (chr-ID chromosome_6; pos 49207960 to 49208722 reverse strand)
ggtggccgcagagccttctagctggttccccgaaggtatgcctcggattcgcgtgctaaaccctaacttggtagtcttgaagctcttgcccctgtgtgtacgatggttctctgcgaagaacatggtataagggttacctggacatcggtcatgatcgtatgaaaatgagatcggatcgtgaagaggtgaggcagaagactcagaagaggttatttgatgtcttggtgttgatgggcattgggcaggaattgagatcttctttggctcgagatctatttgttactgcagtagggttggtttatgacgaactgaaggcagtacctgtgcgtctgtattcttccggtgtcctctgcgtcagcaaatttctaattccgctgaattgagctcttggtctctaggagtcaagaattctatcagcaattatgtgtttgtcagaacctagagcctagaaggactgtcttttgactctcctgtccttagtggacaaaattgatcctggatcgtgatcttaaacagatgaatgttttattttctctgtacaatgtgtttaatgtgttatagatatagttaatttccatgcattttgtgtgcatgttgatattgtattttttctctaaatattaaataaggtgttgatgttaaccacagtattaatctgtgctcttgctgcatgtttgcttggctataactattagaggatgggttaacatgttttgttttctccacagctttcaatttctacaagtggagtttgtacgaagcc

SEQ ID NO: 37136 - DNA, 950 bp, Sorghum bicolor
  Intron number 1 from transcript Sb03g042320.1 (locus Sb03g 042320) derived from phytozome v7.0 (chr-ID chromosome_3; pos 69722176 to 69723125 reverse strand)
gcgtggcaagttcaggctcggattcttccagccaggtaacctctgtcgcccctgacctcgtatctcggacatctgcgggttcttgctgtcttttggtgaattgaagctcagttttataaatttatttatattgtatataggtatatacaatataaataaattcatattgtttgtacagaagagaaatgtgtcggtacgtggagtacagttaacaaataaataaaaatacaagtttttttatgaaggaagctaataatcatatttattcgcgcagtatagatgcaactccaaattccaaatactttagatgagcatttcaacgagaattcaagccagcagattttcctttttctttcagtgggaaactagttttttttttctcggtgaacattatttgaactttttagttctcgatagtaacatttgagaaggaaataaaacaaccccttaaaaaactaggaaattgtagcacacaagaaaaatcacgttagtcaacattctctttaccatagtagtatcacttgtcctcactgctaacttttctgaaccttcacagatccagaaatcttagcctgttgtcatgtaccggaacggaaaaatcgaaggttgggaaagtttgacaaacagctagcacaaagacaaaacaatcaactgaaaatcatctaactttctagaagcacacctggccgtgttcatattttaatgtctttcccgatcatgcggatttagcacttgacttgttcaaagtgtttggcacaaagcgagtgcaccgccactcatcgctccgagaaatcagcctcaaaaatagactgtacttctgacggacaattgtgattatcacgtgcaaatttcttttaaaaataaaatggtggatcatcgttcaattcatcatatgcaactactgttctgtgcaaggtgcaacagacaactcgacccagcgctggtacctg

SEQ ID NO: 37137 - DNA, 501 bp, Sorghum bicolor
  Intron number 2 from transcript Sb04g027530.1 (locus Sb04g 027530) derived from phytozome v7.0 (chr-ID chromosome_4; pos 57448078 to 57448578 reverse strand)
aactcggctttgggtttgtttctttgattcgaattgatttcatttgaaatggtagttatacttgtgaattattggcatcatcgtcgacagctacaggatgtaaagcttagtgatgcatatagatgtaataggaaaggtcaaatggttaaatataacaccgtaaatatgaaatatatctccgcaattcattttttttcatgcaaccatatgatctacattgcttggacatggaaaatattaaacaatacaattttcgcattgaaatggggtgtgcaaattccaaaaagtgccttctggagtaattgtgattatcttctaagttttacatatttttatgtgacaagaccttaaaccttaacaataataatatggctatttgcagttttgcacaaacatcaataataaattaatacttttgttggcaaaccccctttactatttacatgttcattgtaaattcatttatcatgtttttcagtgtcactggagaaaatttgcacc

SEQ ID NO: 37138 - DNA, 903 bp, Sorghum bicolor
  Intron number 2 from transcript Sb07g015150.1 (locus Sb07g 015150) derived from phytozome v7.0 (chr-ID chromosome_7; pos 37935713 to 37936615)
ggaccaacgccgtcggattcgacctgtcacccggggtaagcttggtgttcctcttgttattagcttcgaatcaaattaaataaacatgtcaaaaaaataggaagatgacggttacggacctgaactgtgatctgcatgtgttgattagctaaatatttggaatatagttgctactggttgttttgttggtgtttaatctagtgttcgtttagttttagtttggatttctgaggggctagggacttcaggacctatttgtttgtcaactggattgttcggggactacttgtttctttaactcaataagttttatctgtaggggcctcggcccctccagtttcatcaaaaaagaaaagaaaaagaaagccatgattcaaatttcatttctttgtggttccttaagtttttctgtatcctaaattgagtcagtaaatgcattgttataactgtctggtgagtctggtgtcttctaatttttcatcaattcatcataaaaaccatcaaactgcaactggaaaatttaccccagggcctatcatcactcttcttttgttccgcctgtcccatcaattgccaaattaattatttacttactactttaccctttacattcaacgcatgaaagaaatgctgtgtttttatttgcctgtatcactgttgcagtctcttgtcctgcccttttttggtttgagttattatcattgatactcgtaaataagagtttgaggaaataatgtagggataggattaaagaagctaaaaaatgttcttttccccattatttaattttgacaagtgtgcacacagtggcaccgtattcttctaacaagttatttagactagtcttgtctagcttaccttttatctttttaattttaccttcaggcttcgtttgcccgtcac

SEQ ID NO: 37139 - DNA, 753 bp, Sorghum bicolor
  Intron number 2 from transcript Sb01g042880.1 (locus Sb01g 042880) derived from phytozome v7.0 (chr-ID chromosome_1; pos 66161395 to 66162147)
ggcagagattgcagggtgcgtgcggcttctctttgtggggtttatactatctttagtattttgctacccttgatagttaatttggcgttcagattccgtgcttagcagtgccgattgtgatcgttttggtaaatggtagtagttgtgaattattttgcaaaactgtgttaactaatattttatttgcagagaactctgttgactcaggaaattttttgcaaaattgctacagtagctcttttgtttgtatatagcaaatattgtccaactatagactaactaggctcaaaagattcgtctcgtaaatttcgaccaaactgtacaattagtttttatttttgtctatatttaatactccgtgcatgtgtctaaagattcgatgtgacggggaatcttgaaaagttttggggtggaagtaaacaaggcccaaatatctctgagaaaagaagtgatgtaacagtttgaagtttagtatttgatatttccatgaatacttaaagagtgtatgtacagaagcaatacgcacagatgtatgtctaaagtactttcaaaacattatagttttgctagttgttttttaatgaagttactatatagatttgttaatggcaatgtagacagaaaaatacatgttttaacgtaacaaccacattttgagaaatcgacatctcaatgttgcttgaaataaacatcaacagcttttcacaaattccaaatatctgtaaatacttactgaatattgcaggcaccctc

SEQ ID NO: 37140 - DNA, 1050 bp, Sorghum bicolor
  Intron number 2 from transcript Sb03g008170.2 (locus Sb03g 008170) derived from phytozome v7.0 (chr-ID chromosome_3; pos 8648423 to 8649472 reverse strand)
aactaggcaagcattctgtaagagtaagaaacaaagtaagtttctaaatcactcatgcaacaatgaacttatctcaaacagcattttatatgttatgatattacttattgcaattctatgttgattttggcatgacaatccatgggttaagtagcacacagttacatgtcctgtgtgcataacaatttttttgttacacagaactttaatgattcaagtaaattggttttagtattactctccaaagttgtcattactcaattaataaatgtgcatagctagtggcagaagagtgctttccagaaacagcacctcactgcaagacttccaccactgttgagtgctctttcacaatatacttctgaatgcaacaacagtgacattctcaactcagacgtctccacatttagagaccatctcttgctctaataaacaattaaattaatatagttctttataaaaaatagtacaatattcatattgctctcaccatgtatgatgcctgaatatgctatgcactagtattaagatggaagtgaggaacatgcacttagcactaattttcttgttcactggacataagctgtcctaaacttttgcgtagactgcttgggtttcttaatcagcacggtgtacagcaatttacctttgtttagttagtaatgccccgtttgggttgccctgttaaagtttaccgcccatcacatcgaatgtttggacacatgcatggagtactaaatatagactatttacgaaactaaaaacacaactggagagtaatttgagagacgaatcttttaaacctaattagtccatgattggataataattgtcaaataagacaaaactgcagtacctgttaacctttaacaccccaaaccaaacaccccctaagattctgccgaaaagttccttctatattaacagaaatggtgcacagtatcatgcccgttcgttaaaaaaaaaagattgtgcctaaaagaaagccttgatagaatctaatgcacctctttcctccatgcaggttcacatctcaaagtcattgcaggt

SEQ ID NO: 37141 - DNA, 1050 bp, Sorghum bicolor
  Intron number 1 from transcript Sb07g001010.1 (locus Sb07g 001010) derived from phytozome v7.0 (chr-ID chromosome_7; pos 914421 to 915470 reverse strand)
ccaacctctccacctacaaagagcagctccgcgaggtctcatctccccccatcccccatccccaccctctcctcgatctggctgccgttttcgctgcgattcttctagttcggtccgttctagcgagtatcctcctctgcggctcaggattcgcgcgcggctgtaaccggattcctggactatggatgttccgctctgattctagtctagggtttaatttgtttgattaagtttcattccttgtcgaattagtgtatgcgcaataagattacttgcaggtttgctcggttatttgcatctcgtattggattcatatagtataggaataggaacgcgcttagccttaccttctaaattagcaacataatcatttaccttacacggtatgggatataggatgtagccatttaaggtagtaatagttcagccatatccatgcctctggaattgcgactttactcctggatcctaataactagcagcaatgcggcgttatctttatgcctatttttaatttatatatgcattttatatgttaaattgttaattaggctatttttttgatggaaaccaccatttgttatagacttcatgttatgcgtttttgacatgagcctttgttgttgctctcgatgtttagaacatggaacctcactcttgttcagaccctatgtctctcatgtctcatctcgttcttgtttttgactagtgatttcattttgaggaatgatattcttcaatcagatacggtgcactattttcttcttctgtctggaaactgccaataattgctatattggcgccacacttgacttgttggtcactgattaataatgaagtttgcattagtcaagatccttgttctccccattttgcactgaagtttcatgctaattccttgtctttatttttccttaccaaatctatttttactgtgaaacgtttcttgttttgtctatgtgtttgagatagtaaatccaattcatgtacttacagatgtctcttatgtacgtgagtttcaggttaagaagctcatcaaggagaaaaagg

SEQ ID NO: 37142 - DNA, 689 bp, Sorghum bicolor
  Intron number 4 from transcript Sb03g010350.1 (locus Sb03g 010350) derived from phytozome v7.0 (chr-ID chromosome_3; pos 11201831 to 11202519 reverse strand)
ctgaacgaggtatattaattgtgttcatgtttcttgttatatttgttgcatgttcaataatgtgctgtcatttctaatttacatggactgtgatttataattttgaatttcaaagcgttctcttccagcaatgttcagaatgatgctttgatcaatttgaacatgccaaatggtgtgtacttgtgtgtaatgaattgaatttaagtttgcgatgtgagaattcctaagagtctaaataactgcttggtatcagtaccacagcatggaatgaaattttctcagtctgacttatgggaaacataataatttttgctgccagaattacctttgaagatttttatatatataaagattgccacaatcgggtggttaacatctaagtttccaatatcatataactgatttagcagaggagtatacacatgaacatgtctgtacatctgaaatacattcaacctgaaatggctggttgtacatcttgagatttgttttctggaactactgtatttgtataacctgtagaaagatcttttccatatggttaatgagtttggctgtatttaggtgctcattattctgattctggttccagtgacatttggactaagctgcatacataaaactctcttagaataattgtcttttttggggtacaagttttgagcattcatccacatgtcactggcagg

SEQ ID NO: 37143 - DNA, 521 bp, Sorghum bicolor
  Intron number 2 from transcript Sb03g010350.1 (locus Sb03g 010350) derived from phytozome v7.0 (chr-ID chromosome_3; pos 11202872 to 11203392 reverse strand)
gctcggagagatcgtgaccaccatccctacaatcggtgagagtctattctatgcttttcagtatacattgatcttctatatcttttgactcttgagaatgcaatactatagctttatccacaacaagcaataatgatataaacaatgcttgttattagtttggatctgtttcaggattagtgaaaattacccgagaatagagaaagaacattagcaaatggatctagccatctgtgaagctccctttgaattagaccaacacaaggaacacactgcattacaatagtaaaactatatgaatcacgatttttccactgcagctaatctgtcaaacttgttttattgctgcatgcttttacttggctagtagatgcggttagacagttgtttgtgtcattatgttatatccatcatgtatcttttgtttttgtgaaatggacaagaccgcaacacattactgtagatagaaggagcaaagctgacaaatattttgacttctattttgtgatttcaagggttta

SEQ ID NO: 37144 - DNA, 696 bp, Sorghum bicolor
  Intron number 1 from transcript Sb02g040210.2 (locus Sb02g 040210) derived from phytozome v7.0 (chr-ID chromosome_2; pos 74230467 to 74231162 reverse strand)
cccctccgccgccgaggccttcctcaagtactgtgagctccccgccgtcgaattcgcttgctcgcgagtgttccggtcgatccgtcgttccagggttctttcggtagccgcttacggggtttggagcttgcggtttttggggttggtttagtgggtaacttttttggattttggtcttcctttctttttgcgaattatgacgaaccttgtggtttccatgttggtaattctgctaaatgggtgggttcgagtactgaagaagtgatcttgaacgttaatcggtggtcaattgtctgacttcttgacgaaaaatgggtccttctcttatcggttcttgctttcttgggtgacgaaaaattcaaagaagtgttagttatagctaggcagatgctagcgaaacgactcgtgcaaactgatatgttgtccttcacaaaagttcatacttcgaggctgtacgtttgatagtttctgcaattcgatcatatcatccttctttggcacctagagtagacaaaattctcaggaactggaaccaagcctcgtgcatagtacaaaagttaaatgtgcagtaaacggttctcgtgttcacattgttagttcagattgtgtttattggggcactatatcgacctattggttcttttggcctttgttttgctaggtatcgtatcaggaggtacaagtgtggagacaaga

SEQ ID NO: 37145 - DNA, 702 bp, Sorghum bicolor
  Intron number 3 from transcript Sb06g023990.1 (locus Sb06g 023990) derived from phytozome v7.0 (chr-ID chromosome_6; pos 53117574 to 53118275)
agaaagctgaacctatatttaaggtacttttgatgtctatgcatgcaaattaaaacaactgatggtttgagtagctacgtttaactttttttcctgatagagtttcttcttgaaattctaatgaatttccttttccgacttgttgttgctaagcttaggatatacatgttcatggcttggtggcaacttgttggatatcttctataatttcaatttgtgcacgtatgaactaaaaagtcatagacatattctgtttttgtgttattgaaaatatatgactatatgagattgccacatcgacagattgttagtctttttgtcctttttgcgactctgcagtagtaattagtaagcaacggaaataatgaatgccacattggaactggagtcaaatgttttgtttgattcattatgcaatgaccatttagacatttagtctcactcctccggtagtggagtagcaatttactgttctagaaaaaaatagagcagtagccagttacaactgcctatgtgtggcatcatcctctctaaggaatataaaatgtttttacagatgcatattgtatgccacatttgtggttactagcttcagttaaaatctttgcatattgttatgctttacaatatacatattttttgttgctacttttagctactactaattgagcgataaaattgatgcagcttgcaggttttcag

SEQ ID NO: 37146 - DNA, 1031 bp, Sorghum bicolor
  Intron number 1 from transcript Sb03g004550.1 (locus Sb03g 004550) derived from phytozome v7.0 (chr-ID chromosome_3; pos 4799588 to 4800618)
cctccgccttcaccgccgcctcatacaacctcaaggtatggcccccccgcttttctggtcggtggtgatactcccgctagatctccctagtcccgatgtcgtagtgctctgtggctatttgctgagtcgaacgcgggttccaaactttgtatcgttgtaggtcatcacttcatcaggcgactagtttggttagagaacttttaactcgtaatcacttgttgagatttgcaaattgcaatcacttactggttgtgtattccatatgttgatgggttcgtaatccaaatgggatggatgagcagagaagaccgaccattttttctgagccagtttcaattgagtgagcatagtcaactgatgagctaattgcatgcagcccacaccagagactattgtgaagtgtagtttgaacgattatcttctgatacacactaatatgacaatgctagtctgttagataaagggtctactaacacatatgggaatttaaaggttcttctgatatcgtttgtttctgccagaaactaaacatattttattgatagactgtgttttgagataattgtacatggacagttggatagcttcacccactgtttcttgtttaaactaagcacatccgagctgtacatggttccctgtttctcccatctaacaagttacctatactctttcactctttctcagccaaattcatttgcataagttagttatactcttcaccctttctcagccaagttcgattgcattgtataatgctcaattagttattactgtgatttagctttaccgagtatcagttatctattggtatgtgcaaaataggcatccgttccaggtttattgacttataattaagatctatttatataattgaaacatgtctgcgcactgtgtttctttgaaagaccaatttaactgtttgtcattgatggttcaaaacttcaaaatgatgacatcaataacctctcctttattatatacttacaatctttcttatgattgatagagtgctggtatattggagccac

SEQ ID NO: 37147 - DNA, 903 bp, Sorghum bicolor
  Intron number 1 from transcript Sb02g025090.1 (locus Sb02g 025090) derived from phytozome v7.0 (chr-ID chromosome_2; pos 59805455 to 59806357)
gcgcttcgtttcgaggtgagtcgatgcttctgtttgtgtgttttgttttgagtgcgtgttcgattagcttagatgagatgagaagaaaacctttgccgttccattgttgcggcttcccctaagctgcttggtggaagttcgtcagagctttacgttgctaaagcggataagctttgttgataagccgttgggtggaatatatgattctaataggagcggatagttattccttattcgtactagcttctgctactacagattcacaactataatgctttgtaatagaagattgcatgatccttgacttgtccaaattgtcggagttgaccaatactgtcctaggctagacacgtgttattcagaaatcttctctggcttttctttttagagaaccagaatttgttttttttcctatttatatagttgatgattggtgcacatactactgcacaattggaataatttatagttagaatctttcagtgtttcttcttacacttcagtactttattatctcaccgaggtgacgtcatagtggtccatgtaaaaggaaaagggtaacagtaaaaagttagagaagtgtgccacatgtaaatgccacatggcacatgctctcagagtggcacggtacagatgagctggcgtcactgccgtcccccaacaatctagctctgagctagctgacgttggattctgcctatgtggaggggagagaggggcagagccaaatgctgtttatgggacccaccatctcttctctcttgtctagctcaccatcttcggtggataaaattctgtgggatgtttggttgaactaagcccttctaattgagaatacaatgttaaagtatttctatttgttttgcagatattaggaagattcaatcgcgcccgtgcagctcg

SEQ ID NO: 37148 - DNA, 1036 bp, Sorghum bicolor
  Intron number 1 from transcript Sb03g035670.2 (locus Sb03g 035670) derived from phytozome v7.0 (chr-ID chromosome_3; pos 63676239 to 63677274 reverse strand)
cgctaatcggctacatctcgcgcctcgagtcagaggtaaaagtctcgttgcggtggacgcgcggtgtttttggtttgcttggcttggtggtggtgtgcggttcttggttaggtggcttagtgcttctactagaccggttgtttcgaaggcagccgagtagggttgcccggccaagaatctgggaaaacaatggcaagattctgtcgtcgggggaaatggaggatttaggggagggaaaattgattttggcgtttctttctcgttgtcctgctttttccccattattaggtacgacgatgagtcgcccaagagtgatagaagccgtttttatcaattatagttgttggtatttctgtactcgaaacgattcttctatggcttttgcagtttgagttgcagggttgtagttgctcaagttattctgtttttcgtcgtgtttcccagagtttcttttggtataggccgcgatgatttgcgttttcaactgctgtagctacggcagctagctcgccatgtgagtgtgagctggtagggtgcagttgtttttttctagcatatcgcaactgcatttttacgaactatttttggagtgattttcttttatttccaatgctgccgcagaaggtggatccatcagttcttaatcctatgcggaggcctcatttttctgtagctgaagaagctatgcgcattgccggatgatttgtttaaaataatgacttgccacagttactgtgtttacatgaatctatttaatgttttctggtatcagttacttaaccttctttacatattaactgagaaaatgacgttgtcttcccattgataatgtgatgtgttcctttctgttgccggctggtgaaaaaaattgtcttgttatgcactgtagtgtttaactggttgcttctgcttatcttgttaggcagcttaaactttgcatgcttgaatctctcgaaagatagagtgatagacaactcatgtttgccattagttgtttgattttttaattcggtgcaaatcttttttctgcagattt

SEQ ID NO: 37149 - DNA, 903 bp, Sorghum bicolor
  Intron number 2 from transcript Sb06g015980.1 (locus Sb06g 015980) derived from phytozome v7.0 (chr-ID chromosome_6; pos 44335206 to 44336108 reverse strand)
aaaaccgcaatttggtatgtttcccaggtactttgctattttctgaaaataatataaaaaatcataagtagtttattttaaatcagataaatatgaaactagttccatttttccttttaaagatgttatctattcgttagttactgaacaaataagtttcaaataactccaaatagaacaccaatgatagataacattttttgaaaaaaaaaactttgtattggtttcacttttttcttatttcggattaagataacttatgaattttaagagattaaaccagttttttttagagaaaatataaagctagtattgaaactagttagaggactaaatttgtccggttttaacaattggagggttttcggtacccaatttttgtagttcaacattcaaaatagagctaacgtggaagttaaagggtgaaaaaccaagtcaacctaccgagctttcttctatggttaagtgacacttgagcctgttgacgtttatggaagtcatgggcccttggaaaatgtaaattttttatttggctcgtcattataaaccgatgttggataccagatcggcttgctcaccgaggattgtcacatcctgaaagatgcccactatgtgactaggaggaggagactattcaacatctactcactaattgtgtgttctcacgacaaatatggtgcgacatcctttcgcctatggaaatggaggaagcagtaccacaacagaatgatcatagctttgctgattggtgggccaagctcattcgtagagtcaagaaggagtacaaaaaatgggttaattcgctgatcattcggacaacttggctgatatggaagcatcgcaattcttgtgtatttgatggagctactccatctgttaatgaggtcttgaggcagtttagag

SEQ ID NO: 37150 - DNA, 877 bp, Sorghum bicolor
  Intron number 4 from transcript Sb02g027280.1 (locus Sb02g 027280) derived from phytozome v7.0 (chr-ID chromosome_2; pos 62496669 to 62497545 reverse strand)
agaggtaatattttctctcttactaaaacggtgttgtgatgttactttccatgtcattcgacctaactactggctaatttacttaacttcttttgtttcccttcagatatgaacttgtgtagtttcttggccaccttggaattctaatcttccccattccaattttaatttgcactattactgcatgttgctttctttgggcttcgtattaaaccttggttagtcagtgcatggctattcttgtttcagggttttaaagatatatatgtcaatactgtttgcacagcatgccacacattatttcgtgtttgggatgcgcttggtacactgaaatctaagtgttttaattgatacgcttacccctgattgtcccacagatgaaaaaaatcatatagggatgaaaggggttggtaacaaaatttcctatattgaaaacaatttccagtcggtaaaaaactcactatattaactagctatattttcagtttaactatttagtgacgacaccaatactgtgctgagagaaattagaaaatcaaaagtctgaatacagtaatggtcggaaacggttatatccgatatcacttatatggagataatccctggtaaatggaactttccatttctgttttcaccaccacataccaacagaccaaatcaaagccataacttaagggctattacatgatagggtccacaaggaatggtatagttcatgatccctcacatttatttcctgaatcataaacttggagcttggttcaaatcatcaccatgctgaaaagcactgaagtgcagccttttttttccttgtaatatggcatactcaatatgcaaacttctgttttctctgatttttttttcagaggcacccaag

SEQ ID NO: 37151 - DNA, 711 bp, Sorghum bicolor
  Intron number 2 from transcript Sb06g022840.1 (locus Sb06g 022840) derived from phytozome v7.0 (chr-ID chromosome_6; pos 52067307 to 52068017)
accacgtacgtcctagtcctacacataatcacatatatttattctcctgctaaagctctactgataatgacgggacatcctgccaaagaataaattaaatgctaatggcttacaggcatatggctggccgctctgccacgaacactggcctaatcttgattaacaaatcaaacaaaactattgcgatgtttctcagccgttggcttactagctagtaggaggagcagatagaactgatagactattataacaaactggaggctcaggaagtcaggataaggctcaatgatgatcacttaattagttaagctgatcagcagatgtcacccaaattgattatttgtatacagttctttaatcagtacgctactcacacagccagtgacattttcagccacttgattaaaaacacactgaaacaaaacacgcagcctaatctcttcccaacaaccaccaccctccgacctaacttaaaaactgtaatcaaatacctaaatgttagcatgtcgtcgatcatcttactgtttctgcactgatcaaaagcaccatttgtaaattgtatataatcatatgacaacaattggtatgtataaaatcgtaacccacttgaacagtctgaaactctgaatgtcttacatcgactgctttgcttgtcttgtcgtctgtgtgattgcagtggatcttctgggtgggtcccttcatcggcgccgc

SEQ ID NO: 37152 - DNA, 497 bp, Sorghum bicolor
  Intron number 3 from transcript Sb06g021500.1 (locus Sb06g 021500) derived from phytozome v7.0 (chr-ID chromosome_6; pos 50745710 to 50746206)
ggtgagtgaaaggaggtgtattgttaatggctcagagtcagggaaattaaatacatgcatgattccctgaaaaacgtgttgcgaatttttcgaattgcatagagatgatttacatgctttcatctaaaccattcagataatcttgagttattcaagaatttatgtgatcgtggaacttgttcttccatttattttggtctgtcactctttttgatgattatcatattggggaagataacgatttgagttgcttgctgtgatcagttgaactgtatgcccgtatctcgtttccaatctcctcttttgaatgattccaaaaaaaaaaatctcctcttttgaaatccttgttaagaaacattaaacagggggatatgcttgaattgggatcaaggaaatcgtgagatatttttattgccatatatatatatatattgtgatggcttggcgaggtcaggtcttaaaaattttctgaacttggcgtgcagctcccgcgcaag

SEQ ID NO: 37153 - DNA, 854 bp, Sorghum bicolor
  Intron number 2 from transcript Sb03g028180.1 (locus Sb03g 028180) derived from phytozome v7.0 (chr-ID chromosome_3; pos 55929518 to 55930371 reverse strand)
tgggacactgtctttgtgggaggaggttgctgctggtcagttatttctatccttttttaggtttggtttatcctgttctgtatctgcaattatcttgtactttcatttcacatgcttttgttagtttttatgtattgaaatattaaacagtttcttatgttcatgtcagagagttttgcgctgtttttgtggtgtgtattaatatattcaacagtaccttatgtgcattggttcagaaaaaaatgtgaatcacttagcaatcgtttaaatttctcttttttccttgctagtctgatagttacctgaataactccttttgaccaggaaagcaccgtttaccatggaatatttggatatatataaactaactaacaacctatcttgtagaatgaataacaagactactttactaggataggattggaaggtatacagaacctgaccatcagattacttcaggtcctttttatatattgcatttctgtaaagtgtcatttagttctgcaatatttcaacaaaccaccaaaagatacattcgtccttgtcttttagtcagtactcagtagtcactcactttcaagtttttcaaagctaaaaaatatggggggtttatcattctctgcttacacaagtgcttttatgagaagtctcagagcggatggaggaaatttgtttgtgttaagtaacatattgggttattcattcaatcatgacttaaaccaaaatcaattttgatttatttattgctatcttctattcgattcatcaatttatctctgggtaggcaaaaacccttactctgaaatttttgactgacagacgatcaacttccaacctggagaaagtgtaaaatc

SEQ ID NO: 37154 - DNA, 839 bp, Sorghum bicolor
  Intron number 1 from transcript Sb01g041660.1 (locus Sb01g 041660) derived from phytozome v7.0 (chr-ID chromosome_1; pos 64952646 to 64953484 reverse strand)
acctccggttcagattcctcgccgccaagtgtctcgtaagaagcccgctgagcaccccccctcctcccctccacccgccgcccccccccccccctctctttcccgccggttcattccgtcgagcacgccgcatgcgtgtcagtatgggccccgcgttctgctcctcgctgtttggatcgcggggcgtccctgggtttccattcattacccgcagctctcgacatttcgtcaggcgttctgggctagtactttggccaaacaccttgcgggcattttcagctgattgttaaaaatactgagattcgcttgattctattttgggtgatgcttttgagtgtggctgggcatttgcttagatacattgcgcccttagtgtcatcaatttcgttttgggcctgtagtggaaaccttctaaatgttcacacgctgccttgatttatgtttgccactatacaaattgattgtgtgtttttgtattctttttttatcagtctcctgctacttagagctagttagaacaatgtcaggacttcttagatggaaaatggtcaatagtgccacatggaatgagcagcatgtttctgatgtatttctcctaatcctggaaattagagcaacgagaagagcatgtgggcatataagatggtgtgacatatgatttatataaatgtatttttcatatatggatttttaactgaaggcttcagttttccgtttctaggttagtctagattgttaacttagcgagagctttgtgcttctgctacaacttcaacttcacagttttgtttctttgtttattaggaggagttgaaagagtggcatcagtgtttgttgat

SEQ ID NO: 37155 - DNA, 602 bp, Sorghum bicolor
  Intron number 4 from transcript Sb03g026180.1 (locus Sb03g 026180) derived from phytozome v7.0 (chr-ID chromosome_3; pos 52689915 to 52690516)
gcattactatctcctggtgagtccattattgtctcacattggaaatgcgtcaagtaccagaaatgtgcttcctcagaattttacttagttcataacttaaaacatgttggtttcagtgtcttagtttactttaaagttagttgttcttcacaccacaaatcttgcaatagaaagctttgttgaattgtaaattgcacatactagtatgatgagtcaccgatatactgttgtatgacattgtgccgacatcttgcagttgcataatattcctatgtgcctatttgcgtaagcgcctaagcggttaacctattttcacatctcatgtctttatcctttaaaagaggagccactccattctaatgatgtggaatgttgattatattttttagcgcaccatacctgataaatagtatgcctacattatatatctaggtcaatattctaggttctgtttcattttacattttgaatattgtcacaaatataagtttgctagacaacagttttgtgttcttttgatgggatcttctccatttctaaagccatcatcttgtgtgtaaaacctagagtttttttcatctttctgcaggacttctgctact

SEQ ID NO: 37156 - DNA, 979 bp, Sorghum bicolor
  Intron number 1 from transcript Sb03g001770.1 (locus Sb03g 001770) derived from phytozome v7.0 (chr-ID chromosome_3; pos 1598696 to 1599674)
agagctcactcgtcgccggcggccggcgacggaaggtgcgggtttcagttctatctttttctacccctacctcttctgttccataagcgagcgcttttggtgctcgttggattggttattcttcgtcgctgcgattcttgattctggcgttggtttaatccgacggcgcgactaggttcatctcttcttggtttccaccaagttcggctccttttagttttagggcagtatgatgctcttttactggggttctgtaaggactaagctttggtttgattattcgtttggttgggtgcttggatgctagtagttcactacttatttttggggtcgattggagaggggatcagataagctttgctcgtttaagaaatctgactgaggtttcactaacggttcgatgacaaaaatcaacccttttgttctgctcagtcttagtctcatcaagctttgtttgagcagaactggccactgtaggttgtgttaatgacaggtacaacactttgctaagttcactagggattagagtacaattcgtctgaaggttcggacaccagtgtcatgctaatttggaaattctatcctgcaaacatgacttgacatggaagaacggcatgcctttagaaacaggacgtaaattgcctagtgttattgcaaacacattgtatcgttctgaccaggaatcctgttaactgattggagttatataggatcagattatgtataataaactagcatttcccactcaatgccagtgaatagtttaatgcaaaacaagtacatctactgttcctgagcctgtctgaatcagatatgtggattgctatcaagcttattcctagaacctggtaggaatttatacttgctacaattagaaccacatgttatactctaataatgtttgttggtacttaatgctgaattttcagtgtgctctgaaacaggatttttccaccattttattgacaaagaaagaaaa

SEQ ID NO: 37157 - DNA, 634 bp, Sorghum bicolor
  Intron number 1 from transcript Sb05g004200.1 (locus Sb05g 004200) derived from phytozome v7.0 (chr-ID chromosome_5; pos 5118520 to 5119153)
cggaggaccataaggaactgctccgattactcgaggtgagcatggcccgggtgaaccttttgctttcaccctaggtatcgtgctctgttcccgttgtgttcatcaatcgagcgtgtcgagatgtaacttgccttgcaattatttatcttcttgcctagcaatcgtgctctgttcccattgtgtttgcccaacaggcatgtcgagatgtaccttcttgcctagctatcgttttggtcatatttttctttttacgaaacctgcattagccggtggctcatccggcttggaattggagaaaatggttctctgtagattgattaatctgtgtggttttgagtaggctggaacagtcaaacggaaatagatttatgacctagcttgtcactgacctagattcggatgcatgaaaaaaaatctgatttgttggttgatgaggccatgtgatcctgaggagttttcgtggagatattgattgcattgcaatgttttttttggagattgtttatgatgtgtggcctagttgttagctcctttagctcaggacaatatacaaggttttccctttcattagagttggagttgcttattcgtttgtgcaggaagccgaaacgtggttgtccagggtggatcaatc

SEQ ID NO: 37158 - DNA, 856 bp, Sorghum bicolor
  Intron number 1 from transcript Sb01g040140.1 (locus Sb01g 040140) derived from phytozome v7.0 (chr-ID chromosome_1; pos 63521350 to 63522205)
caggtagatcctatctctttctagtttctaccattatctgtatcccctttgacttcatgttcatgttctattaccgcgctgtgcttattacttcctttagatgttctttgatccctgcatatcctctatagttccaaattgcccatcctctatagttccaaattgcccctggtgagtggtggctatcgatttccccagagggacaactggacaagggattgattgagttgcttgttgaaattgttagtagttgggcgttgtgctccactccactagtttatcttatattcatatatggatgaatcgaatccagatggtcacggcatgtttatcatgctatttggacatttggacgcacatttatgtgtactgctcatccgttttgcacacttcttttccacccgttgaataatgtctggcgagatttgcatgtgaaacatgaatttatataagcccgggagaaacagatcatgtagactcgctaactctattggttatgtgttaaattgcaaagtgcttcagagattatgtaggctggattactacaaaagtatggacaagtcagaattcacgaaagtatataaaaaagtcacgattcacggagatttcacctgctccctgggcacctggacttggatgttcttctaaaaatgaaaaaaatattattatgatttatgtgcatacaaatggttttgctctttcgcttatatcaatatataagttcacggatctctgaaaacggcagtccatttatttatttttatgtactatctttgttactttggtgggccatatttatatctaacttctgcagactaagtgtgtcagttatgttttctgtggttcaggaaaagga

SEQ ID NO: 37159 - DNA, 868 bp, Sorghum bicolor
  Intron number 2 from transcript Sb01g046840.1 (locus Sb01g 046840) derived from phytozome v7.0 (chr-ID chromosome_1; pos 69965616 to 69966483)
tccagctcttccgcggtgacactgtcctgctcaaggtacggatgagctctttacctcgccaactcttatgtttcgattagatgattacggggtcttggttgtggtgattgtttactgtgtagattacaactccgttgtgaaagctgtgacctttgtcgctgttattttgtaatcttagtcatagatttggggaaactaaatgcttggttggtgagatatttataactattagtcgcttacattttgaaagtttgaccttgttgcggttttctatattggttgaagggttgatttgtgatggctgatgagaattgcagtacttggctttgtttgttcctggtttgttttagtcattactcatggttcgtagctgttgtgagaatttaatagggtagggttcctgaccctgtagtactgtaattatgtgatagtgcataaatctatgttttcctcatgaccaagttaaattgtgtggtagggcttgtatcctgaccaatctatatgcagctaggtatgccactgtgcttttggacatgttatattgtttgtagttttcattgttcggaaatttgatgctttgaacctgtagcataaattattctggtcctgttgccatcctgctgtacatgtactgcataaagaggaaggctttttctatgatgctatgaggtttgttgaattgcttgttatagctacattacttggaacattacgtattatactctatagtttccccatacaattgttctttgaatttgggactggcatgaaataatatgtggtcaccaccacttgattcttgtctgctgacattttggatcacttcattgcagggtaagaagagaaaggacactatctgcatcgtgct

SEQ ID NO: 37160 - DNA, 726 bp, Sorghum bicolor
  Intron number 3 from transcript Sb07g006040.1 (locus Sb07g 006040) derived from phytozome v7.0 (chr-ID chromosome_7; pos 8585066 to 8585791)
ggaagttagctgttgttttgttggctggtggccaggtattctaggactcacttaagagcatctccaagaggctctctaaaatttagtatctaaatcatcatttggagagtcatttgagtataaatcactttctatatctttgtaccctcaaacagcttttgtatatcttctgcgcactctagagagccattcttcctttccatctttggctagcaagaatccagaatagaggatgtctatatttggagatccaattaaagaggctgttgggggggtatttttttttcacaaaaatttctgttcctttaaattaggaactccaagagactctttatatccttcataattgttagaaatagagattttggtgaaaaaataccctccaactgcttctttaatcggttatccaagtatagccatcctatattctggatttcttgctagccaaatatggaaaacgagaatgactctctagagtgcacacaagatatagaaaaactgttggagagtgaaaagatatagaagatgatttttataccgatatctctccaaatgatgatttagggagagagttttagaaagactcttggagatgctctaagattgctatctggttgtccatgttacgtactacagtatggtggaaaacactcatatactttgctctttgtttttttatatcaattgtggacaggggactaggcttggcagttctgaccctaaggg

SEQ ID NO: 37161 - DNA, 979 bp, Sorghum bicolor
  Intron number 2 from transcript Sb03g013140.1 (locus Sb03g 013140) derived from phytozome v7.0 (chr-ID chromosome_3; pos 15990215 to 15991193 reverse strand)
cctacgttcctatccctgctcaaggttgccacttctctctttctcttcttctcatcatttcttgtcatggtaacaacgactaatttgtgaatttcagtaaaaaaatggtaattattgtgtgatacaatcaaggcattgattttcacaaaatgtggatgccactacctgatcgaacaatgcaaaggggatggtgttctgtttatcttccaacaattaattatgttcgcagaaaattctttggcataagaaatgcaactacctacctgtttgacattagcttaaccagctttctgcctttcttaaagaaaggggacaaataataaacatgccagtcaactgtactcggtcgtccacctaaatttgttattacattgacataaacatgattatcattgcattatccgaacaacgttattttcctttcatatttacagtcgtcgtcctcattgcattgcattattttgctaagaaaagctattctatagaaccagcatgctaacaattcttcatgaacatgaggttttacgtatgatctctgttttgtctctcctgaatccttattacttctttgagtgaatttctgtatccttattagatatagtttttgacacgactatacttcactgaaaacctgtcctggtgtgtcaaattatggatccagaagagccgagtgaattgattgctgaatactgaactctgcattgtgattgccaactattttgactgtggtggtactaagggttttcttgtgtaccctgtggtacaaaaatcctgttccactgaacatacaagatactattttagttattttccggctttggttccatggaaacataaagatatatatatatatatatatgagtgaagttaagcaaacattcatcatgcttactagtaccacaaaaggggtttgcttagcacatatcattttttcccctatgcagttgataactttggacctagccggcccccagcccca

SEQ ID NO: 37162 - DNA, 668 bp, Sorghum bicolor
  Intron number 2 from transcript Sb0010s003450.1 (locus Sb0 010s003450) derived from phytozome v7.0 (chr-ID super_10; pos 569797 to 570464)
ccagaggtcacagctctgatgaatcatgcaaaagagaggataaagcaaagcttcaatatacaaaccaagcagggcctggtcaagaaaattatggacattattgagaagcgttgggtgaaccaaatggatcatccactgtatggggctgcactatatttgaacccaggaaaattttttcctcttctaaaagctaatgacgatgccactattgggcagttaagaggctgttttattgaagtgcttggaagaatgataccagatgtggaaacacaaatgaagatcaataggcaggccattgagtatgaagagcaacgtggtgatgccttctcaaacaaaatggcaaaggaaagctatgacaaaatgagtcctcgtaagtgctgttaaactcagcttgcaaatttcagcaacttaattgcattccaaactcctaatatgtgttgtacttttcatccagttgattggtggcgttcttatggtggccgagccattgaactacaaagacttgctaagcgcatagttagtctttgtgcttcatcatccggttgtgagaggtgctggagtaccttcagtcatgtgagcatcctcataaattgtgattaacaaattttatttagatgcatacaatctgattttttgttttgcttcccatctgttttttttgtttgtag

SEQ ID NO: 37163 - DNA, 608 bp, Sorghum bicolor
  Intron number 4 from transcript Sb06g000380.1 (locus Sb06g 000380) derived from phytozome v7.0 (chr-ID chromosome_6; pos 368405 to 369012)
aagattgagctcgttatttcttctcctttattgaggtacagttttgcatcacctttttttatttatttcttgtcctgcgtctgcgtcctcttcttgtaataataacctttctaatgtttgacaaaaaaaggtacggtgttcttcactgttggagaagttttcattacttcttaaaaaaggggggaaatatcagctagcttataaaagcagactagattggttcaaaccgattttcatttcccttgaaccacctctccgctgtctatgtcagtttttgcttagcgagagtttgataatttcatcagcatataattgtacatattcagcttacagtaccagattccttacaactacaagtgcaggcccttattgttgttaagtgttaactcaaatactctgcgtttctggttctagatgttggagtcaaattatgagatttgcaagtgtattcttgcgtgttcttctgccctctctagtctagcccaacgacatgaattcactcctggttcagacttagtacatactctgattgagggtgcattgcagctgtacgatcaaaataactaaagggcggggactcactatatttcactatgttctaaaggact

SEQ ID NO: 37164 - DNA, 725 bp, Sorghum bicolor
  Intron number 1 from transcript Sb06g020636.1 (locus Sb06g 020636) derived from phytozome v7.0 (chr-ID chromosome_6; pos 50071107 to 50071831)
gatctcgacgccgacgcgcagcgcgccgcggtacgtacgcgctcccatctcctccccgctcaccgcttccccgccgcgcgctcacgggtttcctgcgcgattgcgtgtcgatttggtctgcgtcgccgccgggtggatgggaacgaacgctggctcccggtagtttcggttcttggtgacgtgcgcagtttcttgggcagggttcttggagaatttcgggttcgcgccggccctagggtccggaggtggggaggctatgtactgtgctcaggttcttggctggagaggggatgagcgaggacttgttcttccctgtgtttgttttgagaatggcgatggttatttaaggctctcgcattctttagagggtttagggagtccagttcttgagttcttggtgcgcgtctggttcccgattcccgaatttgtgcgtgtaaaatagttttttctctgacttggccatctggggaatcgacacatgcaatgagtgcttcagaggtcctgcgacattcccaaaactacgattttgaattggtttctaggagggttttatttttggagcaatgatcatactttctttctttctttctttctttttctggatcaaaccttttgtattctaaattcttccccggcccgataggtagatgtgacaaagcctgaaattctgttttcttttgaaaatcccaggacaagctgaaagcagtgtcagaggaacttggaca

SEQ ID NO: 37165 - DNA, 620 bp, Sorghum bicolor
  Intron number 1 from transcript Sb01g002090.1 (locus Sb01g 002090) derived from phytozome v7.0 (chr-ID chromosome_1; pos 1795785 to 1796404 reverse strand)
gacgcgcttcccatccaggtccgtgcccctcgttttttattcgttttgacttctgcgaatgattgattcggaggtcatcaccggctcttgcgatggcttgaatttgatcagatcttgtattttttgcgctgatttaagtttgtttctgcctcctgcgctgctgtacatgacaaaatcgccatttctcagtatcaccaaaaaccccacatgtaaggccttgtttagttcactccaaaatccaaaaactttttaagattccctgtcacatcaaatcttgcggcatatgcatgaagcattaaatatagatgaagacaaaaactaattgcacagtttgtttgtaaatcgtgagatgaatcttttaagtctagttactctatgattggacaatgtttgtcaaataaaaacgaaagtgttatagtgtcgaaattcaaaattttttcggatctaaacaaggcctaagcttgagagcgactgacaaccatacaactcgcctgtcgcgtcatcataaaaccaaatggagatgcttcatgatgatcccttaagtagagcactatatacagaacataatgttgtcaacatattggctttaccatgacttcccaagttccaattggcaggaa

SEQ ID NO: 37166 - DNA, 640 bp, Sorghum bicolor
  Intron number 2 from transcript Sb01g036560.1 (locus Sb01g 036560) derived from phytozome v7.0 (chr-ID chromosome_1; pos 60189120 to 60189759)
agggtacgagatgatatacgttgttgatcactcatcagaccatatatagcttttgcatacaattccatgaaaaacttagctaaattcaaagaataaaatgatgagaagaatgagatccctactctctagcttttgccttttaatttccatgtagttatatatatcccctgcatgtcagtatcatggtgtagctagctagttgcatgcgtaccagacatatgcgtgctcagtttgttgcaccgcttgcgcatgcaatcaccgatgcaccctctgatccatctttttggcgatgtttctgatgcgggttcccggcacacgtcaaaatatattctttatcgcatcggttttgtggcttgccaatagacgcaagggccgctttagtctgtgtgtgtgtgtggcgcggctttctttcttttttttaaaaaaaaatgttctttaggcatacttggcatggttgcaccaagtcaattgatccgacaatgatagccgcgacgatgcgtacgtgttgacgattgattcattatctgcaattctgcacccgatttgtgtagcattgattattttaatctccagcctcttcctaatttatttgtgtgatggattgatcgtctctgcggcgcatggtgtgtggtgcagctgg

SEQ ID NO: 37167 - DNA, 1032 bp, Sorghum bicolor
  Intron number 4 from transcript Sb01g043580.2 (locus Sb01g 043580) derived from phytozome v7.0 (chr-ID chromosome_1; pos 66733255 to 66734286)
tccgcggaagggcttcttccaaaggttacattctttgcttacctatggatgatatgatgttacagggctggttccagtgttggaattattcttttggagctagggtcatgtttccattaatccaactgtgtttgttttatttttcttattttaatttagattgctcagcaattttttgaaatttcagttaggactggaacatatagtgcatatattatattatacagtagaaggattcaggacatgaaggtaagaagagattttgttcaaaaagaagataagaggaattaacctgcaactttctaatagtgttagacttgttagtccttactggtttcactatattgctcttttattttaatgttgaacaaatgactagcatagtagttatggtaaaaattctcatatgacagacatgtctagggtaaaaaggagattctgatagaagtaacctggattgatatgatcaagtttttctttttgagtttacatcttctgctgttcaagcaatctagttcccatgcttgcgagacctaactgatgttctgacagaagtaaacctgcatcttctactactgtttgagaaatttatagcatccatatgtaagaccaaaaggaggtgctgtgatacaaataacatgtttctttcaaagaaattgtagaacctctggattgagcttaactagcataatttaaggaactatttagatttaaatagaagattggaataatcccacacctataggcacaggagactactggttatgggcgttgatatttaccctactgaatccagtattcatcatggtggcacctgaagtaattgctgaattgataaaacaacacctgctcccaccactttcattgcagtccctgcatgaatagatgctttgtttcgttcgacttgcttctcatgtttatgctgcttagttcatcctttttctactgcactttggatgtaatgatcaaaaggcttcatttagtgtttctaataattgatgcagcccaagaaagaaaagcaacagggcgaaa

SEQ ID NO: 37168 - DNA, 1013 bp, Sorghum bicolor
  Intron number 1 from transcript Sb07g000430.1 (locus Sb07g 000430) derived from phytozome v7.0 (chr-ID chromosome_7; pos 256381 to 257393 reverse strand)
agcgccgggtctaccaagtctggaaaggcaaaaacgtgagtttgccatccctccctctctctcttcccccctccctagtacagtaccgacacgagcttctttcttgggtttccatgccacacatcggtccccggattgcctactgtgctagtttatcctcgatttgttgcttcgcttgcatccgtcgtcagcctaacatcaccgaccgtgtgactgcctgccgctccagagaggagacaagagggcttatgtggtgtggtggactggtggataagataagatgattagcagttcagctcgacggacggctattgtttagtatctctttgtttatatgctgggatgggattgtccgccttgttaattgttgatccattccgctttctcatttttttatccccttattattacagtggtgttgcagactccagtgaatggatgaataaactactatccacgctcgttttgatttaggcgcgccttggcagcctatgtgaaaccataaccttcccctgtattgttttgttttacccctaataacataatcccaccacctgctagtggtaggtattccatgatatgctagtatggtaggtccaacacctcaccattctgtgttttgcatcttcttacttagtgctagctaatcccaaataattagaggctcaggttgctcacaggaaaatgcccccaaaatccctgcacatacataggatttaggtccataggattcagcattcattttcttcagagttcagactactactacgcggtttttccttcaccatggattggaaggacccatgatagttgtaaatgtagtcttttgatgcctcgacaagctaacatgttactaacaatgctgacctactcaatctttaacaacttggtatgagattttcagtatgttctattctgctgatgctcgtctaactgtcttcatttgattcactagcttctgttatatacactgtcagattttcagtattttgtttctttgttcagataatact

SEQ ID NO: 37169 - DNA, 625 bp, Sorghum bicolor
  Intron number 1 from transcript Sb02g008830.1 (locus Sb02g 008830) derived from phytozome v7.0 (chr-ID chromosome_2; pos 12335897 to 12336521)
ggactgactggcgtgcgctcctcttcctcgcgttcgtaagtaaccctagaccagagattctcctttctctgcatcactatctgaatcgcagccttcatttcctcgtcgttcggttaattagccggagatttgtttccgtctgattcttccatttttcggtcgcggcctattccgctgaacatatatatatatatataaatccgttttttcttcacaaacaaaccacacccccaaaattatatcttacgtgctgtttccgcaattcaatgtgggttttgctgcaaaaggagtcgtggtagatagattttagctgagagtggtgtggtgctttggttatggggagcaacaatacaatctccacccaaatcagcccccagcttcaatagtgtggtgcttggttatggggagcagcaatacaatctccactcaaatcagcccccaacttcaatttctggagcctgtcatggttgtcgctgaatgagggggggggggggggggggggcgggggtcctcatatagtcaaaactagcaattctgattgtttatcttctctatgtagatatttgtacatcgtatagatacattaaacatgttctcatttttggttttgttgtttcagaaggtc

SEQ ID NO: 37170 - DNA, 871 bp, Sorghum bicolor
  Intron number 2 from transcript Sb02g014900.1 (locus Sb02g 014900) derived from phytozome v7.0 (chr-ID chromosome_2; pos 29016888 to 29017758)
gggtaccggcaaatcaagttaggactacatcaccatgttcatctatgactgatgaggaatggagaaagttggtggatacgtggtcagaccctagacacaaggtatggtttttgccaatattaatttctgcgttgtaacccaattcatttgagatattaaaacctgtagttgtattattctgtgtgaatgtgtgcttcattcagttctaatgttgatgattataggattagtttttttgctaaggatctggggtgattttgatatgagcagctactattgttgtttattttctgtacaacaataggagcaaagccttgcatgctttgtttttttttctgaaatgtattgagctatgttatcaatccattttgtatatatttgcttatcagattcagtgctttagatctatttttcagataattaagattcaatgctttagatctaagacaaaactaaagtgaaactatgctgattcagaaaccagaattatatggctgaaatttgaagagggtttgcttgcccacttgacaacaatttaagcaaatgtcattgtttcagaacactggcatttttattagacaccattgattgcctacttgacagttaaattattttcccatttgaaaccttttgctggacactaattggattttctcggttacactattcattgtgtactgtagtattgaagttttattataaagaatggtatgctgaatgctaagctatattgctcttaattgaagatgtgcaatagtacaaaattagcattttagagctttaagttagtagtgtatgaacctgatagttctcatttttgcctaattagctatattactgatgctacataattgtttcatgtctaggaaaa

SEQ ID NO: 37171 - DNA, 752 bp, Sorghum bicolor
  Intron number 3 from transcript Sb03g008680.1 (locus Sb03g 008680) derived from phytozome v7.0 (chr-ID chromosome_3; pos 9363613 to 9364364 reverse strand)
ctttatcagaaatcactctggatacttgtaccaaggtgctttacttattgttctcagttgctctgctattagctcttgtgaatattaaaaaacactttgcctggcaatataatcttttatattttcctcgtctcttctttgtttggtttgaacctgaggttgaagcattttttgacaactaggtctttcatgttgtaactagaatatccttcatcactgaaatgatataaagccctcccacacattgatgtaaaagaaagcatggtttgagcagcgttgccttttttttctttctttttttgctgtacacggtaagagctggactatggtacacttaggcaccacctcctccacacaaaagctcatcaaacttggaactcaccatgacacttaactaatgtacaatttccactttagcacagaaagtagttttttagaagagagtttcctttggtgttatagaaagcgactgtaagcagtttaatgaaaaagactttatcaaacttttcagtgtgcctattggtgtcatactgtcatttgttgcaagcaccagcatagtgtttggttcgatatgggatgctttgtgttttgaatggttcaataaagtttagcggtggttaaacccatagtttgttgtcttagttagactttggtggtcctagagattattcttgaaacataatttttgtttgacttcttctattgataaagtcacagaagacactttattggttacaggttacctctcataa

SEQ ID NO: 37172 - DNA, 764 bp, Sorghum bicolor
  Intron number 2 from transcript Sb06g017345.1 (locus Sb06g 017345) derived from phytozome v7.0 (chr-ID chromosome_6; pos 46604296 to 46605059 reverse strand)
aaagtctaagcttacctacaaggaagctttgatctgtgagcaacaagctgcagcaaaggctcaacagttgccaaaagagctgatggctcctgttctccggatgattcagcacagttgggccaatcttctttctgacctttttctcatttagtgatgttattgtgattctagactgcaatgcttgtcatattatttttatttcttaatgctgcacactgttggtctttatccaagttgaccgagcatttatgtgttttcttctaactaaagctacatggagctgatattatttgaaatatatattatccatggtttgaatattggacaagtttagattccgtggaattctttatattgcacattttcattcattgcactgacaggtcttactggggcgttatttttcttttgattgttcgctgttaactttgcttgctaaatttcgtgacatattgctttccaagatgtttccttgaggggtctaatctcagatcattgtaataaatttctaaatgaattgtaatgtgtcaagcaaatccctacgtatagggcaacaaacttagtcacatatattgcccacttagtaactctgaactgaaggtgttttccattgtactgtcacaaatcattgatctactatgtgaagaggaaaaaacttttgttacttgtgttatattgcatttcttaaatgttcttttaatggactggatttttctgctacaatttcaggcactcttagcttgactgatcttgtcgacaaagta

SEQ ID NO: 37173 - DNA, 400 bp, Sorghum bicolor
  Intron number 1 from transcript Sb03g006250.1 (locus Sb03g 006250) derived from phytozome v7.0 (chr-ID chromosome_3; pos 6395259 to 6395658)
gtatggattgcttctcgaattcttttcacgttcattcatgttcctcctctttttttttctctccagattttcgtagtctgatctgatgaacccgtgaagggttcttggttgcttagattagactagcattgcctaagacgatgtctaagttactgttgattgatacgacgatcaaaattgctcagatacaagcgaccaaaccaaacaaaccgttgattgcgtgattcttgtcgatcattattatctccttttgcatggttcgacttagatttttttttatggtcgttcgacttagattttggatgaacagagttagacagacagaagggacggatcgactaaccttgcttgatcttcacgtgcaggatttcgaggagtatctcaacttgcagtcgcgaac

SEQ ID NO: 37174 - DNA, 426 bp, Sorghum bicolor
  Intron number 1 from transcript Sb05g021720.1 (locus Sb05g 021720) derived from phytozome v7.0 (chr-ID chromosome_5; pos 53080511 to 53080936 reverse strand)
atcaggattgttacacttgtatccacgacaaggtacagttcggatacgaatacaacaagtgtgttcttctgcaaggattgtcggaagctgagaatttgacgttgatgtctgactacaaaggggtacactcgtttttgcacttaacacctttattatgttctttgattattagtttattactatttccattgttgcgctctttgattattattttttccattgctattttgtctgcttatgctgtccgatttttttttcaatgttatgctgtctgattaacctgattgtttttatttctgttgcagtatctatatcaagttccatatattcttaaaaactgaagctgggtctgttttcacactgaataatagtcgattttttttcctgtctgcattttgtccaggctcattttttcagggatttgga

SEQ ID NO: 37175 - DNA, 564 bp, Sorghum bicolor
  Intron number 2 from transcript Sb06g023370.1 (locus Sb06g 023370) derived from phytozome v7.0 (chr-ID chromosome_6; pos 52524858 to 52525421 reverse strand)
gtctgaaggtaagtcatgttctggtaatgtttctgtactctgtactgtgtcttttgggttgtgccctgtgggttgtaacagtgcttttcactagctgcaaaagactgtttctttttttttttcattttcatgaacacaaaatctgattttctaagctccaaattttagatcaagtctttttttttacataccaccagtctactttcattgccactcttcaagatcaaatgaatagtgtttgagttcaattgttggtgactatcgagtacatatccgtcaaagattcttaactgtccttgcgcctttgaaaactttaattggacaagatggaaacccataagtgcttatagttcatttagtaccgaacatgcattaagtgctgattagctattttgttgcactgcatttgtatctgttcacttatgctgacaattttattctttgtaaaatgtgaaaaaaacttgaaacttcccaattagtacctttgattttacaggctctaacctgcttacaaagtttgctcgtgctagtgttaatgccttgtttaatgacagattggagaat

SEQ ID NO: 37176 - DNA, 302 bp, Sorghum bicolor
  Intron number 1 from transcript Sb03g024540.1 (locus Sb03g 024540) derived from phytozome v7.0 (chr-ID chromosome_3; pos 49065386 to 49065687)
ggagttgctggtccttctaagaaaagtgagtcacaactaaatattttcgtattttctttattctaaattactcaaaatttatgcataaggtttgtgctacaatatatttttatgattgatgtttaatgtttagtaacacaagatgcagatgcttcttgcgatccaaatgtgtttgaaattgattttttgtttcttgtgctcttcagtggtattcaattaaatcatacatgctattttctgctcccattaagctgatctttttttttctgttgtttgtttgatcctttttaggtgttggtagt

SEQ ID NO: 37177 - DNA, 756 bp, Sorghum bicolor
  Intron number 1 from transcript Sb04g005185.1 (locus Sb04g 005185) derived from phytozome v7.0 (chr-ID chromosome_4; pos 5052311 to 5053066 reverse strand)
gcaatcgccaccgcgccgcgatcaggccactgccggtactctctctctctctctctctctctctctctctctctctctctctctctctctctctctctctggttcgaaattccaaacacgacgcgaatgctctgcgtaatttccatgccgattttcagtgaggcgcccgcgtccgcagtgcgatcgtatatttctgtgtacgcgcgcggcgcgcatgccatcaatccattatggattcctgtaacagagcatagtttgggggaaataggtgcttcatttgatcagatcagctcgtgattgtgtagtgagcccatgaagtgtatttaacgtactaatagagagggttcggattcggatggctgaggcgttcggtacaaaaatctcgaatggaaaatcgggactgctaggttctctgtatggagagtttgctaatgataagggcatttgcttgatgttaactatgtgttaggtggttgtccttcattttcgaaaacattaacatcaagtgtgtggctggattgtttgatttccatcatctaaaagaagaaaaatgggtatgatggtaatcctaaatccatttgatcattctatactacaggtgaccatatagatgctcgcgttgctgttaggaatacccctgccaccatgacatttcgattcaatgctgttcttcttattgatgagctttgcaaaagttgttttctcaatggcttaacaatttttctgatttgtattttgtttcttatcaaacagatc

SEQ ID NO: 37178 - DNA, 868 bp, Sorghum bicolor
  Intron number 1 from transcript Sb02g021130.1 (locus Sb02g 021130) derived from phytozome v7.0 (chr-ID chromosome_2; pos 52350700 to 52351567 reverse strand)
tctactctctcgccggcgatctactgcacaagcaggtcgcccatattatcccatccatctggatctccgtgcatacagagttctgagaaatttttctgatttcggtgctatttttgatgtggcattcgtataatttttcagaatgtcaggctgtttttttcccttccagttttgctatatcatgctcgggtgaaaaacttcaataatttattgttcacgtgacaaaatactcttactagtatcacataagttccaaagatattattctaatatgtgagattttagcagtacatttccgaatgtagtttcagtctccaggtggctgtgtaaactgccacaatagttttgtttccctgagaaattggtttcattagcatttatgtgtttttcggtgatattagaatgcacaatgaaggcttcctagttcctatggtattattgaaattattatattataggcacaaagaagcgataagcttagatgatttcacaggcactatttttcttttatatacacagtacacttatgtttggttattatttctaatccaatgtgttcagttcagtacaacataactgtatgttttcttcggtaatagtaatactaagagtccaagacattattgtacaggaaaacacgatgctttgtctattgatacagtttattatgtaggaaaaacatgcatcgtagtgcaaacagaagatgctctgcttagatgccttctacttttcttgactatgctgtctatctctaacctttagcaaacatgaatattcgttttgttttttcccttgatggtaataattgcagtccttgaatttgtttatttcagagtatatatcctgcaaagatactgaaactcaactt

SEQ ID NO: 37179 - DNA, 696 bp, Sorghum bicolor
  Intron number 1 from transcript Sb02g044050.1 (locus Sb02g 044050) derived from phytozome v7.0 (chr-ID chromosome_2; pos 77856049 to 77856744 reverse strand)
tgcccgtcgtcaccggtgtcatcatcgccagcggcgtaagttctgtttccgacctccatatctcccctccctgtcgtatctatctatccatatgatatctccttctcttgaatctttttgtgcgcgaggggtgcgggggtggcgagatccccaattcccggcacacggatctgtgcttatagatctcgccgcgcgcggatctcattattcagtcagcatttagcattcctaattggattggattctaattagtactgggcatattcaccaggattgtttgggatgtagccacgcacctctatcttcgcagttttttttttaccaattcaattcaataataagacatgcaagcaaaataaaggggcggcacactctagttgtacttttataggcagccgtgtggacactatagccgtatagcgcattcttggttgacattgccattatacataaaggacaatcttcttattaatcgatcactcttgaattatgtttgatatgctactgatctaacaattcttctcctttaattgatgatcacctctaataagggtgaagttggtcttggtctcctaataaaactaaataaattgaagcaagctttgagctgagtgggccatcctcttggttaagcaagtattcctattcaaattctttgcagggagagcccagctttaatctgtttgggttcatcat

SEQ ID NO: 37180 - DNA, 764 bp, Sorghum bicolor
  Intron number 2 from transcript Sb04g037120.1 (locus Sb04g 037120) derived from phytozome v7.0 (chr-ID chromosome_4; pos 66803360 to 66804123 reverse strand)
cggcttcctggacgcaaagcagatcaggtcagtgcttgctagttgctacctccacaatgcagcttaaattgcttccctcgcattgacacactgtgtgtggaactgctccagttttgacattggttacgcgtagtattgccacctcgctagttccacttccaaacctaggtgcttcaaaatcgatcgtgatgcagatgatcaagagtggatgccaaatgatatgtctgattggatattggattgcagaaacttgacattaagagcaattgctatgcaaggaaaacttgtacttacagtgtactgctgaagtgctgattaagtttaagttttcatccatacatactacgcatttgtgatgccaatagcaggacgttctttgatttttttatacaagcagaatcttctgccacttcaaaagatgccaatagcaggtgttctaatacatcatctattgtgatcagaaagaattcgactaacatcgatgttgtacagctgtttgttgaaaggctgattgtcacttctctagtttattgcgtgtaccagagtgggtactgttgcttgacacaagcaatccagttcatgattattgtcgagcatgtgtgctgtgtcattttaaaaatgtgagttgagtttatctttcctaatatgcatgaataactgcaatctattttttggtctgtcagtcttttgttgcgttagagatttatattcagcttttgattcctgggcctcaactttttgcagaagaggtttgatcacccgta

SEQ ID NO: 37181 - DNA, 1063 bp, Sorghum bicolor
  Intron number 3 from transcript Sb04g020490.1 (locus Sb04g 020490) derived from phytozome v7.0 (chr-ID chromosome_4; pos 47790893 to 47791955)
aacagcccgcgccactagggcgcttcacttctctggtatgtttattagtgatgttgtcggcttctcttgctgtaatgtttcgagtgctttgactgaaatcaggaagtcttacacttgcgattttgtggccttggtcagaaaattttcttcattatatataagaagcctggataaatgtacaattcatgatgccttgtttttttttactggattttgaatattggatattatccctagttgatcatttgcaaagttaaaaaaagttgttttgccttcattaggaacatatgctgtcaagagaataaacctgcatctaaccaatggtactgtcctttagagaagatttaggatgaaacagcagtagtctaaggatctgcttaggctatttaccttgtatgatactcaggatttttcactcttcgaagaacaaataatatttccgttatctaacatattatttctccaacttggatttataaggttctgtagcaaactgctatgctagactgcaaggagagtacaatgcatgaatagttgattttttatgccaccaagatactttagaaatgctacttgtaagtcaagactttcgatgtctgacttaaagttctatcatgacttaaacttggatttataagtatttgcttcacaatggaattatctgcaaggatgaattccatccatttccactactgcttttgcaagcccgaattgatctgttatgattgtaattggacacattttgtatgcatgaatgcttatggactgaatttgttatatgactgaacaaaagaaatgcatggatgctgatatgtctgctaggcttttgagaactcatgttaaggttgattcgtattcttaactagtaactcttgttgattatagtgaacaaagaaattacttcagcgtctgaatattccaatgtgttgccgactatttggtgcttctattgatattacctcgtctaattgtaacgcaaaactacaatgaaaattcgtcctttggtgacccatttgcttttactataggtaatagcaccattgaaggtgctattaactggctt

SEQ ID NO: 37182 - DNA, 868 bp, Sorghum bicolor
  Intron number 1 from transcript Sb04g024630.1 (locus Sb04g 024630) derived from phytozome v7.0 (chr-ID chromosome_4; pos 54390640 to 54391507)
gctgcaggtatgttccatcgcccttttgagttctgcagctttgctacaccacgccaatcagatcatgcagttttctagtggacatgaggatcacggaattactgagacttcacccaatttcttcagcctacaatacagaaggtttaggaattaggatatactatcagtgacatgatcatggcaccaaaactgattgattaatctaaatatctaatatggaaattcataatccttacactcatagaagctagttaatgtttccaaacaaatcatagcggctaactgcatctttaataaccactctgcaaagagaaaagaaccagcaacttatcaaatataaccatctacctatatcatggttttaggcttcgcgatgtcaaaaatctgatatgcccatgctgagattggtttagttatatgtgatcattattgcaaactgcaccttaagagtatgcgtttcatttccaactttcagagataactcattgcataacagttgccaacatagcagcaaggaacatatttgaagaatcttgcatctcaagtttgtaataagtagaatgtgcagaactaacacagttttagtgtgtcatcaactgcgttaacatctaatatctatgtaagcaatgaagtcatgattcacacatatgggtaagaatcaaaaataaacacgaacagcagcttccaaaatagtttttttcttaaaaaaaatcatgaaccgatgtaatgtctctgccaatgttttgttttttttttataatcctgagaatacagggtgccaacatttataaagaataagaagcatctaatgctatttataagcatctacatatattaacctgtgctatttcttaggttgcttcgtcat

SEQ ID NO: 37183 - DNA, 733 bp, Sorghum bicolor
  Intron number 2 from transcript Sb01g003630.1 (locus Sb01g 003630) derived from phytozome v7.0 (chr-ID chromosome_1; pos 2934023 to 2934755 reverse strand)
ctgtcctaaggtaacccttccattcccttagagcgtggttgtttgtgatggatgaatcgagccgctgttagctgcagggaaagtagtactggtacctgtagttatattagtgcataatctcgttcgccacattgtttagttgataaaggttgatagctctcaattttaggccttgtttagttcaaaaaaattttgcaaaatttttcagattccccgtcacatcaaatctttagatgtatgcatggagtattaaatatagacgaaaataaaagctaattgcacagtttggtcggaattgacgagacgaatcttttgagtctagttacttagtccataattggacaatatttatcaaatacaaacgaaagtgctacagtgtcgatttcgcaaaattttttggaactaaacaaggccttacaatgcagcaaacattttttataactgattttcttggttacctgtgtctgattttctgttgtgggtttattacaatttcacttctacttacacacttacattgaggtgaaacttctactgtccattgagccttatgttttgttgctttgattctctcgtactattgaaaccagttacaatgtgtgcaggcatattttgacttgcattgcgatattagatcttaattatgttctgaactgtgcctattgtagaagatatatgacatttgccttactttacaggataaggctatcaagcggttcttggtgaggaacat

SEQ ID NO: 37184 - DNA, 756 bp, Sorghum bicolor
  Intron number 1 from transcript Sb06g027330.1 (locus Sb06g 027330) derived from phytozome v7.0 (chr-ID chromosome_6; pos 56236491 to 56237246)
gtgaggtcgagatcccctccgcttaaaggtgagcatacaagctccttcttcgcacttagttctttcattgattgctctgtgggaatggggttgctaaatttagatgagaccaacgttaatgctatggattagcttcagtgagctgcgtggataaagccaactgaaacatcgatttatgtttagattctgttactgccttgttcaattttgtcgggcaaaacgtgaaattgtatcaggcttgataaattactccttttcgttggtgaataatgatacatttatatgaacgggtctgtttcttattaacacgtatactatactgaatcttgtctttttttttggaatgtctacattgccattctagggcagttacatttgctaattctccatgctttattttcatgatcattgaaggatatccatttgtagtgaacaatattgttttaattctccatgctttagttcagttctgttatcttgtttgatgttttgtcaagtcctttacctgctcataaatgtttgaattgttttaattacatcctgcttaacaatattgtgtttgctgttacttggtagggagtgacttcacagtttttacttatgttgtattacagtctggttgttgaatgtctgttgttactagtcctgttctatgtttcgtctcaaaatgttaaatcttttttgcatgtatttatgacttcgccgactgttctccatgcaggctattcaactaaggagatcatcagacactgttga

SEQ ID NO: 37185 - DNA, 760 bp, Sorghum bicolor
  Intron number 2 from transcript Sb06g026100.2 (locus Sb06g 026100) derived from phytozome v7.0 (chr-ID chromosome_6; pos 55159934 to 55160693)
gagggaagttgaagcaaaggtgcaagtaaaaagtatgcataacgtagcactgcaagatttactttgttttatcacacaattcactgtcatgcatattatttcaaagcattctgttgtttgaacggttgtaatgttgtacagtttactagtaaattttttttagaatagtttactagtatatgggacattgggattaccacattgtcagatagttcatctactctatgatcaaatttgttattaataatggctcctagctggtttgtaggtgcacaataaacatgcctgtccatgctgcttcagtggaaaatgtttggtatttggtagatgatgcttatgatccgtagtctaaaaagcatgtgccttttgaaattcatgtgtacaagtcattacttgtcagaccaaaataattgaaccacttgaatactcgattagattataagctaagccaagaatggtcagccccacaaaatgagcttcatattggacattacagcacacaaagttttttatgttgcagtcctgtttcattcctagcttccaactgctattttttcccattaaatgctgtagatataaattttcttattgtggtatactccttgagattcaggcatttgcactaattccaatgatgcaaacattagttgcatttcttctttatgctctgtcgccattatatttgacttctctcccacaattctttaagtggtatatgcttaattagcatgattatttttcatgtagttttacgggggat

SEQ ID NO: 37186 - DNA, 890 bp, Sorghum bicolor
  Intron number 1 from transcript Sb02g035200.1 (locus Sb02g 035200) derived from phytozome v7.0 (chr-ID chromosome_2; pos 69664804 to 69665693)
gcggctgtgctgtcaacacccacctcttctccgtaaatatctcgccatgccttcatatacttctttttccttttttggctagaagtacgttcatgctgtgctaactgctgacagagtgagtagctatcatggaagatgttcagttttgtcatctaataccgagctacccattagggggcctgcaatttttggacagtagctgtaaatatggatgacgccacaagtgtaactggataattgaacatgaaatgctaatttagagaaataaaactgaggaagagctagatcttcgaggacaaatcattgactgctagctttacggatggaatttaacgccctgctctgtactgatatgtgcacaagtttgatctattttcaggttgattatagtacaactactatcaattactgtgctatgctacaggttctcaatttgaagataatttatttgtaatacagaaattttatattttggacgctttctttgagtgaagataaattcacaatctccaagcgtatgcatatggatcatgtactggggtagatggtagaggcagaagttttgtgcaaaatttattttattggtttttgtctgggtcttgtacgcacgttaataattgtttgtgcagaggcaactatatgtatcaggcagttgggttgttgggatactagttatcaacgtatatgttagttttttttgtctgtttgtgttgatcatattgttggagaaaagcagatgtttgtcatattcagaaaatcccgacttggtgctagttatccacgtttctacctgcgttggcttgaaaaatgttagctgcacatcactttttagtaataggctgcatcttttgtaagtaacagcttttgataatgatctgtagattaacgac

SEQ ID NO: 37187 - DNA, 968 bp, Sorghum bicolor
  Intron number 2 from transcript Sb05g015560.1 (locus Sb05g 015560) derived from phytozome v7.0 (chr-ID chromosome_5; pos 33562421 to 33563388)
acggcggtggcggtgtccgacccgttgtctggaaggtccccactcgcattctcttctcattgtaattgtgaatttcggttgagagttctgcatttcctagttgcgctgcaagggtttagtgttgatatttgattgggggtcttattttgcaaatttagtaattattagtttgaatacaaattgttcatagtaatgttaacaagatgtcctgtgtttgtgagccaatgtcctttgtgcactgctttagactgtaatttgatggtgagagactgagcttgtgacgtaaatgaggaaggagaaaggttcacatcattgtttcattctgcatagctgacttatgtgtatagtcaactttttctggctgaattgggacatggagatagagttacaaagtgtgtagttttttaaggttacaagagggtagggatctgcagggctggtggttgtttggtaaatggggaatgaacgatacttgttggtctacgatgtagttcatcgtgcacctacattttgtgaaaatcacccactcaaaaagtggtttctaacttgtgtaggaaatgtaatccttgaaatggtttcatggcctttttcagtgaaagtggaaaccaccaaaattctcaataaattgtcttattcttttaccctcctgggatatatcttatattcaatcttgtcctgtgtttgactaccatcagtgtccatttgaatttgcttaaactgatgttctgattctgataggtgtgggtttaccatggtttgctttgcattccacattgatcccagtttatgtatcatgcattgttttgtaaatggtcatgattaagcatgcattcttggagcttctggcagtatgtctgtacaatttacatcagtttttgttatctaattactctctatacgagaaatttattctactatatttatagtgtgcagcttcttttggggtatttgccaactgatcgttcctt

SEQ ID NO: 37188 - DNA, 947 bp, Sorghum bicolor
  Intron number 3 from transcript Sb04g009230.1 (locus Sb04g 009230) derived from phytozome v7.0 (chr-ID chromosome_4; pos 11261748 to 11262694 reverse strand)
tggccaggtacttgtccagccactgccaatatttgtttatcttatatgacttcactccaaagttcaaaagttcatttgtttgtttgtcttcggaatatcatttttctgatagatatgtagttattggcttgacaacttcatgcttcaatggatgcagtgctcaattattccaattgcaaatgaattttccattcagtgatttaaccagaattgatttatgtgataagtggtttagactggctttttgttgaaagaaaattcaagcatttgatgaaagttgatgtgcaacttgtccagcttctgtacaaagaatggtttctgacatctctaagggctcaatcccctccaatccctatggggaatgattgatctaaaggaaccctaagttggtatctatctgtattttgacaagcacacctttatagtacaatctaaaaattgttgcgaaatttctgttgactgttctagtgctgcatgtcttgtgcctgttgactgtgctagtgctgcatgtcttgtgccttcgtaaattttcctcatggcagaatgactgagtgcatatgcagatgagtgctacttttgttttttatatatatttgtcaatggtagtgtgcatagttttgtcgtttccacaggaaagtctatgctctttttctttcatttcctgacccctgtaatgtgttaaattttatgtgccaatgttagatcatcagtgttttgggcttttggctatactccccagtgtggtctttgtccttaactccttcaatacattgtttggcatcctataatatactattttggcattgcaaagaatttctaattgttcttcattgcagtagttttctgacatttgccctagagtgaaacaattgtactttctcacatctattgtcatcttattctcatatataggagaggcccattctttgaaggtggagaagatcttg

SEQ ID NO: 37189 - DNA, 559 bp, Sorghum bicolor
  Intron number 1 from transcript Sb03g034360.1 (locus Sb03g 034360) derived from phytozome v7.0 (chr-ID chromosome_3; pos 62560394 to 62560952 reverse strand)
ccgacggcgacttcccgggggaattctgcgagccggtaacttgtgtctttcgtatactgtcaattcgtttgaattttttcggcaaatttagcctgttattattagctatagtgtcatcttttaattcttcaacagctcaacggaaaactgtgagaagaaatggggacgcactggtggtggatatttgttataattttgtaggagtgcagtaccaagatttcagttttaatcgcccggaagaaagaaaaaaaaaagaaaacatttggattcctgttaattagccactcaattttattttattttttggaaaagaattagccactcaattttggtccttcggaatctgtaactccataaagttgacgtaaatagtaacagtaccaaaagtagaaaaattcaagcacaccagtccaatccaaactgagaattgtgcaaagtttagcctgcaccttttcctgtatgtccactaattaatagagggaaggaagcatagagaactcgcggtcgctaaacatgtttctctgaattctgcgcagtacgatcaattggcggagctgga

SEQ ID NO: 37190 - DNA, 897 bp, Sorghum bicolor
  Intron number 2 from transcript Sb03g031330.2 (locus Sb03g 031330) derived from phytozome v7.0 (chr-ID chromosome_3; pos 59712084 to 59712980 reverse strand)
ctcttatacctggtattttaccctcctctctatttctgtttactgctactctattgatgcatacacactgttgttattggacggtgtgcctatctggtggccatacacccagatcttcagactgcatactgtagatattttataataaaaagtgcattgtagtgttctcagcatgctttgttgaatataagtcctctgatgaagcagcatatcaatattgctaaatatcctggttctttgggtgttcagtttagctttgggcctcattggatttatcatgtgcctaggagtaccttccaaaaattaaatggttgaatatgatttaacatagtgggttttgatatttgttatcaaatagtaaaggcagactattcatatccaatgtggttgcaaaaatatgcattgtactagctagtataaatcacacaaaaatggaatatattgttggcctgctttgtcacactcactcacacacatgacggacattgaagaagaggagatcagatcacacacacacatggacactagtgaacgatgctgctgaactaaggctgcagttatgcctctacctttcagatatagaagtcctagcaaaaacacacgagctcaactgagggccatgctgtcctctagactctagttgctactattctacctgctactatcctatagacaggcagacacggagctgtccgtgttcctatgcacgtatgtggctatgacaaaaaggtgggatcactgagatgagagagcagctgattatctaacatatatgttgttaaatgataatgatatttttcatttatgactctttttgaacttcttacacatataaacttttctaaaactagagcctcttgtatgtaggctctgccaatccattattttctactgaag

SEQ ID NO: 37191 - DNA, 537 bp, Sorghum bicolor
  Intron number 1 from transcript Sb07g004670.1 (locus Sb07g 004670) derived from phytozome v7.0 (chr-ID chromosome_7; pos 6064928 to 6065464 reverse strand)
gagacgtacgtcgtccgtgcatacaattgcttgatgttgtgtcctaaaactgaattttgattaatgattgattagacccatattgttttgaatttatttctaagttgtgtactatatatatgttcgaactgcttaatcaaatatttccctttttttaaagaggcaacatttcactctatttttttgtccatctattttttttgatccatttccctctaactaccgaatagtgaagtttcttccatccagacttatatatataacctctactcacatgagttagaataacttacgtctagagtttgattctaagattgtcatgaatagctatgaatccttatcaataggccttaactcaaatagaaacagaaaaaaaagagataaaatagattcctaagctgtccttatcttttatcttttctactattttcacgtacaattctttctctcgtcgttttttctcagatctatacgattttctcatggtctgttttttaatttccgttccattttttctccagctcgtatccatattag

SEQ ID NO: 37192 - DNA, 1016 bp, Sorghum bicolor
  Intron number 3 from transcript Sb07g020200.1 (locus Sb07g 020200) derived from phytozome v7.0 (chr-ID chromosome_7; pos 52271770 to 52272785)
ctgattctgattttgagtctgccctgctaaaagaagtaagaatcataaccttcatttcatttgttttcctgcatccaggcccatgatgttgtattgtctaatccaatgcaaaattcatcatgtttcttatatctccattctactgctttaatgttatgtctagcatatgtgtaatattgcccaatcatggttaagctagactgttgcattagaaatgattctgcaggtatatcagggtgacagttattgtgtattagaatatgaccttccatctatgcgtaaaacatggctgctggctggtagagcctataagtctgattatatccgataattggtagtttatcagccagtaattcaaatttatggatgaaatttgactgaaaatggggaaaacatgagtttgacattttttttttcaatttaagtctgatatattggtatgtatagtttataggacctcgcgacatattgctgacacgctgatagaattaacgctacacatatctaaagcttaatataaagatatgtagctctcttacgtgtctgataaaaatatctaggctttgatttgaattgtcaaacatttacgttatatgtacccccaactacatacccaaggctaggggtgcaaaggggtaacctttaggtgcacctccaaacctctttagttcaaatatttgtactacttcttaatttttttggagaagtagtataaatatttgaactaaagaggtttagaggtgcacctaaacatcactcatttgcacccctacccaaggcctgaacataaagtttgtttcccaaaaaatctcaaaagtgcactggacctgtatttattcttcattttaaaattatgtcatttttacttttttaccctttcatagtttcatgtagcagttgataatcaaatgtgtgtttcagcttgaacttacttttccaaaaataacaatatgtattgatctatctgttttctgatggagcttggttgacctgttgacttcagaattctgctcttg

SEQ ID NO: 37193 - DNA, 600 bp, Sorghum bicolor
  Intron number 1 from transcript Sb02g000280.1 (locus Sb02g 000280) derived from phytozome v7.0 (chr-ID chromosome_2; pos 156280 to 156879 reverse strand)
aatctccgaggataccgcccaccagattggcgttggtacgtattattatgccattctatctctgcatggagagcgccctcctcctgctgcttcttttcacaaaacaagtcaacaacaaactcttctcatgatcagagtcagaggtccttatttacaagggaatccttcttcacccattcactgcatgctttgctcttccatggatgaaatttcttctgctacataaatatatctgtattagttaatattttatttattattattcaatttacaaagtggaggaaacaaccatgtatataaaattgtaaatatatatctgtattaataacaatcaaataatagtactagtcttttatttattattcatcaatttacaaagtggaggaaactaccatgtatgtacacgtgggtttgccaaacccacagtaacaattaataaatttatttatgtatgcatgcatttataattttttttaatagttaattaataaagcatacattattatgtatatttgatttcatttgaatcctaaaacctttctgtctgcctgctattttctttcagatccttggtatcaagttggcttcgtcctcacaacc

SEQ ID NO: 37194 - DNA, 717 bp, Sorghum bicolor
  Intron number 1 from transcript Sb03g030610.1 (locus Sb03g 030610) derived from phytozome v7.0 (chr-ID chromosome_3; pos 58821143 to 58821859 reverse strand)
gccgtactacgcccaaggctaccaggtcgcgcaaggtacggaaggtcctaatcgcgccttacgatgcgaattctgtgctgcatctctgttgattccttccatagaattgatcaacggaggcgttcgtccgtggagtcttgtgtggttgattcctcgagtagatcttttctatcgcctaacccctgtgctcactaggtcacatggcattacagtgcaagctcaaaatttaggtgttgtccttgtcctgctcagctgtcttcctgtgtatctgaacctgcagttcctttccttctgcatcctttttgctcatcccaaattagaggtcatttgagatcggtagctcatggagctcgagggaaactgaattgatatttttttgtctttgaactttgaagtgttctgtaattttgaagtaaatgagcaggaaatttgatttgttggaacaatcagatagatgcagggtagttcattttcaaataggttcagcaaaggattacataaataattcaactctatttcatccaaaaaataataattcaactctacaaataaatatataaaatgaataattcagtttataattttgatctatgttcaaaatggaggaagatacagagtcactaactacactggaactttgacttaacttggctaattatttttgcattttggtgttttgtaggttatattcctgttgttgaaggaaggcctgttaga

SEQ ID NO: 37195 - DNA, 624 bp, Sorghum bicolor
  Intron number 2 from transcript Sb03g041110.1 (locus Sb03g 041110) derived from phytozome v7.0 (chr-ID chromosome_3; pos 68652094 to 68652717)
cgctgcgccatcccaacattattcgcttcaaggaggttggtcgttatggacccaaacgtttaattgcccgcttgatcatttcctttcgcttttttttttaatcactgggtgtttgatgccgttttagtgttattagggagcagcttcaaagggtggcggataaaggacttttcaaaatatatatattgtagttgataattcgggacgttgctgattcctcttaactgcatatagtgggggaatcttttgattggtgctgtttaattaggtgccaacttttgctgttttcctccgtccctttccttttaggctattccccttgtgcttcttacgaatttggtatgcgatttagtgtcagggatgcatccactttagatactcgttaggcagtatgttttctgcctccgattgttcacacaaatctcaaaattataaggtgcagagtcttctatttgaactgctgtgagttttaaatggatgaagaaaagtagaaaacagattatgcctccactctgtttgcttcactagtatgttttctcctccttttttttttctctctgaatcacagggttttaattgttttgggaaaaacttctgcaggtgatacttacaccaacgcatctt

SEQ ID NO: 37196 - DNA, 600 bp, Sorghum bicolor
  Intron number 3 from transcript Sb05g009053.1 (locus Sb05g 009053) derived from phytozome v7.0 (chr-ID chromosome_5; pos 18170089 to 18170688)
acagatccgacaaggttgcaatcagcaatcagaaagtatgctcctctaatcctccctttttgaacttccaaataataattgcaatatctctttgagattattgtagatattttgatttggtgtggttatgcctactggctgcagcattatgtttgttcaagaagcatgattcaaatattgaaaatagctttgctattcttttggatcctttttgttttgccacttttgtttctacaaacagaccaagaggtatcatgtcttcctgttgtctgttgtctcatgcagattattccataatgatatacctctgaaactgaactagtgagccttccatggcgatgttgaattgtatatataaaatttgagtacgataacaaactcacagattaagccacatcaaatccaaacattgctgcatcatatcacaattatctgacccttcacaaaatagtttttgacttttttgtgttcgcttagatgacctcagccattttttttacaccctagattttgcttagaatatgttcattttactagcatttaatttctggtactggtatcctagattcattgctgacatttacaagactgaggagcggg

SEQ ID NO: 37197 - DNA, 892 bp, Sorghum bicolor
  Intron number 1 from transcript Sb07g000420.1 (locus Sb07g 000420) derived from phytozome v7.0 (chr-ID chromosome_7; pos 249349 to 250240)
ttaccaagcaggtcgacgaccgcggtgtccataaggtaagattcatgtcccttcttcttattcgtatttggagttgcgaatttttcatgtgattttagtaattggagttgcccgctcaggaattcctagttcggttccggtgccttcctctcgccttacgtttcttgccttgtcacacctcagctcgagctgcttaatgctaacaatatatatgttctttgctaactcctgcggaaataaataaaattgtttcctttatttttctttttccatttctccaactgggaagaaagtctttaatgcttaattccaagtagaagtctttgaatgtgctgaaataatgtcaaattctgctctgcgcctgcaataaagggggtcaaaattttgcatcctgcgcaatgaatcagttaggccttaaattaatgttgtgttccgtcgtcctttccccatcagaggggatggggttggttgcccatgttgccatcatcttgtgctaagtgtgaatcaagaactggttattgactttatagatgctgttagactattcactattaaagtggaaattgtattctctacgatgggcttgacttagatatgctctaatcctctaatagtcttccttagtggttgcttagtttgtagtccatgctattcttcctgtttggttgaatacttttctttcagcatgatgctgacatggtttataaaccaaagaaggctgtggctgatagaaaagataaggcacggccacgatatcgtgttggcagtgctttttgatttgtttcttctagcgtactgtataaggccaggagttactaatgctatgtcatttgcatactctgttctgttgctagcagacttgctttgaagatcttgatcaccacaagagaat

SEQ ID NO: 37198 - DNA, 829 bp, Sorghum bicolor
  Intron number 1 from transcript Sb04g003670.1 (locus Sb04g 003670) derived from phytozome v7.0 (chr-ID chromosome_4; pos 3487151 to 3487979 reverse strand)
cagcccgctgcccgccccccgaggaggacgcagcggtacgactcgttccctctcccctctactccggcgactgttgagcggtctgcgtgtgcgcccgatcacgtgttcttcgtctttttcttttcttttatttattttaagtaattcttcagtgatacagtggactttatagtacccgattggaaccgcttcttgcttcttgtctgtgattcatggaatcgtgggatttggatgaagtttcttagttaccacttggtttcttaacctgctgcctgtcgatggttttgatatttggattcagtatttctcttcagaatgattttattgagttcccctacctccaaaagccgtttaatttctagttgaacaaggtgtggtgtggattaacttactagttactactacttacaactgcatctgtctgatactgattcatatagggagttggctagttgttattgtttttttttccttgaaacatggtactgtgtttcatatctgcagagtataactgattgtgttagcatttctcgttgaggtcaactaattgcaagtttgcaaccatatatttcaaaatttggctgatctgaaaaggctgtaccatgctactgcatcaaacttctagttgtttagcttccactaccattacttttgctaattatatggcacaaatgttataaaaaaaagtacttaattttaatgtaaacacgccaatattgtttccatatacaaagtctgtgcctttcctgcctatggaaaatccatgtgacatgctaaactatagggttgagaggctaattttcttgctgcttggtccatgcagattgcc

SEQ ID NO: 37199 - DNA, 557 bp, Sorghum bicolor
  Intron number 1 from transcript Sb02g015545.1 (locus Sb02g 015545) derived from phytozome v7.0 (chr-ID chromosome_2; pos 31166490 to 31167046)
tcttcattaaaagacggttagtatacacttttatattatatgtttttgccttagtatttgtctcttttctttttctcaaataggatgatacttcagatctttactggtttcatgagctattagtcttataaaattgctcactgtcttgggatagagattttccatttgattggagctctttgcttctcatataagtagataactttcattaggaacattatttctgaatgataatgctactttttcttgataatatctataaggaagatggccagttagatttcagaattactcatcctttattctattgcaaattagctaacttaaatcatttttttttattatttcatttctagtaatctacaagttgttttactgttattactatgttaaaccatcttctacttgaatttacaattccaacttattccttgtccagtgtgacttgataagtgatttgtttccaagcattgctgtatcattgattgtatgaattctgatcccaccataaatcatacatcattttcttttcctgatcttcaaacaatgatttacag

SEQ ID NO: 37200 - DNA, 862 bp, Sorghum bicolor
  Intron number 1 from transcript Sb06g016670.1 (locus Sb06g 016670) derived from phytozome v7.0 (chr-ID chromosome_6; pos 45738831 to 45739692 reverse strand)
gcaactacatcacctacgcgctcgccctgctccaggttcgacctcgacacacgcgcgcctaccctctgctgctgcttgctcctttgcttccaacgccgctcagcctatcctatccatctaggattctaggcaaaggaagaaaaacaaccgcgggttttaattttacctacccccggatgatttaaaaaaggctagggtttttaactaagtgcgggttcggtgagcatgggccgcgcggcgagggtctggagttcgtctcgatggtgctcctgcggttagggcttcgaatttgaattatttactgttctagggctcgtgcggttagggcttcgaatttgaattgttttactgttctagggctcagattgcggttaagcttattgccacaatggcgaggaagagccgtagcaaccacctgcaagcgttggttgcggagtactattaatttcgttattttattagattatacgttaggtaggagtggtttattggtttgcatcatttgcatcatggttgcacatggtggatgtgtgggggtctctgtgtgcagatgcatcttttactgtttgactaagatactcagtttggatttttggattgaatttactaatgtatgaaactttcacatggcttgattgctatggattttgaattaggtactgttcattaacgactctttgtactgttcctgctagttgtgataatgttatgcttaggttgatttggattttgcaacattagtctactatatactagtctggggaatatccatatgtctcaattgcctagaacgtctattgctgtttgtcctagatcatatattaaatgttttggtttcttgttcctcatccgttgcaggaca

SEQ ID NO: 37201 - DNA, 743 bp, Sorghum bicolor
  Intron number 2 from transcript Sb03g024550.1 (locus Sb03g 024550) derived from phytozome v7.0 (chr-ID chromosome_3; pos 49075085 to 49075827 reverse strand)
cactatacgggtaggtgaaaatggaagtcattcttatttatttgatttcattggctatgacctgagatttatttggaacaccaacggttatcaacgtttttataggtagattctttgaatcaattaaccacacaggtttcttaatcttaagttttggaagcttctgtcaggcacctatggtatgacttcatttgagtgcacatctttgctcctctgtgcgaagctgtgacgttcccagctctgtcatgtggccatttctcttcttttctgggttgaagtgcaggatttgataattcctcccataattttcttagccaccaatgcgtagaatctacttaaatatttattaattaacaaccaacaaaaaaatatcattagcgtgccctgatgaacagatttggcttatgcatgctctgtttgatttatgtttctgaacttatagttatacatatgttgatatgtggagaacttatcaaaagttcgctacttgagctcaatggattgttctgttagtaaatggtagactatttagcgagttttcatcattcagtttgtgtcccttgttacacttacatacacagtcactaataattgcatccttttttttttacaaaggaaggatattcacgattattgcatcgagttgatacaataaatttatgtgagttcacttctggctcctgcctaacacaaagctgcatatttgttttcttattttaggattgctggagcaatcaacatat

SEQ ID NO: 37202 - DNA, 493 bp, Sorghum bicolor
  Intron number 2 from transcript Sb02g022933.1 (locus Sb02g 022933) derived from phytozome v7.0 (chr-ID chromosome_2; pos 56205952 to 56206444)
agggggttctaccggaggtatgggtttcctctgatcctaaacttttttttggcacttaaattgagcgttgctgaaatggagaaaggtcaaacttattgcctttgctggtacgagagacttgtagtcatgtctttaatcctttagttgtattagctccgaaaatttgtgagctctatggcacgatcatgataacatagtctaaagttaacaaactttgatctcgctgtttgcacatacttacttgttctaccatcattgatggtatccaatcaatgccaactaggcacttgctatgttatcaagaagcatgcagttcaggaagttgcttctttgaacgagctactaaatgggagttttttttttttaaaaaaaattgtgttcgattcatatccattttgttcatttcttttcttcattcttttaagtgtttcttttttctgcgctaataactctgagtgctgtttgatgcagtaagtaccagtataagggaaag

SEQ ID NO: 37203 - DNA, 428 bp, Sorghum bicolor
  Intron number 1 from transcript Sb07g020330.1 (locus Sb07g 020330) derived from phytozome v7.0 (chr-ID chromosome_7; pos 52753377 to 52753804 reverse strand)
acaaggtgaaatcaaattcattaacttgcattattgttaacttggaagctgaatagtgtagttttctttcatctgttctcaagctttttttttcactacttagcacatgcatttttttgtgtatatttttaatatgacttagtgttggggtaattaatcaaataacagccggtgctgtttcgatgagtttctggtttgcatagatttgtcaaccaccctaaaacatgtggtcacgatccagttgtcttcattctgcccatgattcatgaccaattgattaagtattagctgttaagttaccatggaagttgaaacacatatttttgtttcttgccccttgtatgttattatccaatttatcttgtcgcacatgtatcacttctgattctatttgacattatgattatgattttttttcttggtgcagc

SEQ ID NO: 37204 - DNA, 685 bp, Sorghum bicolor
  Intron number 1 from transcript Sb05g018376.1 (locus Sb05g 018376) derived from phytozome v7.0 (chr-ID chromosome_5; pos 44953858 to 44954542)
gagctcgtgcaggtaatcaatcggcggtgtaacttcttttttgcgcctctcttgctgccgctgttcttgtgtgagtgggaacttagttcaggccgttgaggctagtatgctctacagtttctgcaattagctaattgacttgggcatatactgtaaaccgctgtgtgagttgccctttctatatgcctttgtgttccatcagattatttctttttactttagtggttgtgtgcgaactgccaaagagtaactagtctgtatgtgtgtatgactttgagtaccaatttagcataatccttttgttagcgtaatttgtcagccccccttttcagtatgattatgatgagtttatataatgatcttagttaagccgttgcatgccctttgttatttttgtttctacatattttttccacgtggtcagtaattattttctacagatctcagtttaaaaagcaagtcctaatccttttcttcaatcaagaacacaattaattggaaaaacaaaaaacttgtgagcgaacaaaaacactaatccttgataagcatttatgtgaccaatctaccttatttgtatcagtttgctggtgtttgtgcataaatcttaatacttctcatatagtcacacacacacacaaaaaaaaaccttcttctcatagttttgctctctttgtaaaaaaataga

SEQ ID NO: 37205 - DNA, 929 bp, Sorghum bicolor
  Intron number 1 from transcript Sb03g025820.1 (locus Sb03g 025820) derived from phytozome v7.0 (chr-ID chromosome_3; pos 51938781 to 51939709)
gcgtggcggcgcgtcctcacccaggtgagactcctgcctgatcttttcttcgttcccgcgctttatggttgtacggagatacggtggtggcctcaaatcttcgatctttggtgtctgggcgggattgggggctgtgttgttggggctctgcggatacgaacaacgtctgcgtatatcttgatggtatacatggctatcttgggagctaactgtgaggatgtctctgctgacgaaacatgcaggctactgattttggacaaacaatgatgcagtttgcgttttgtatccgttactactttccgctagtaatagaaaaaaataacttctttttactttagcctgtatctgtatgagaatttacaggaaactctagatttaagtccagatgtgtcatctagtgtgttgttctgtgtcctgggacactatttgttaggacataacagtaataataactaaaaattgatccatttgattgatggatattgggatctactgtaacagttgttgctcgcaatcttaatcagctctgccatattgtctacttgtcgtgctgtgtctagtgaagctaattcttaggacggaacaataagaactaaaaactgattgcaagtccatttaaataatgaatatagagatgttctgtaataattgttgatcataattgaataatctgcactgcgtctcatgaagctaattcttaggaagagcagtaagaactaaaaattgatggcaagtccttttgaataatgaatattgagatgttctgtaacaattctgtaatcaaataatctgctctgcgatattattgtgttctatccatgatgatgtatacatatgaatgttagttgctttagctgatccaggtttgtatgtgtgtgtgttgttctgtcgcagattgcaaggcatcgaccaacaaaagcaatctacaa

SEQ ID NO: 37206 - DNA, 984 bp, Sorghum bicolor
  Intron number 1 from transcript Sb01g007560.2 (locus Sb01g 007560) derived from phytozome v7.0 (chr-ID chromosome_1; pos 6509340 to 6510323)
tcgggacgtgcagggccccgtctcgcccgcggaaggtacgtgggtgcgtccccctgctggtcccggcgccttcggtggggtttggatagcaatgcggttcgtagcgctgttgaatgatgccatgcgggcgtgtgatccttgtgccgtgcggtgcgtgcgctggtgggcagcgtgttgtggaacgctcgtgaattgcggatgcggccatgcgggtggtttaactgggacagtggcggtgttgtatgcgagcattgcccatcttagttttttttaatacgtttgccgaatttgcaaataaactcaaaattatttttctcagaattcagtaaaactggggctgttctaacggccttgcacagaacagtccaacaccatgtgtataatgcaagttcaaagaattgtttctgtggtgaattgagaactctaatttgtttgtggaattgtggaatatgataaattggtaactagcagaattgtatccatatatttaggctattaggcttcctttcttctgaaggtatttgagacactgatgtggttctaggactagtgaatcagaccataagaaaaggatcaaccagttggtgcagaatattctgtgatactctgtagatataactagctggtgtagctgcaaataaagcacgagacaccttgcccttaaatttcaactatacatatattgctgcaggtaatagaaatgtatgtgccataaacagtataaaagaaatgtctgtgccatatgcaggtggctgcgcaatgattttcatgcaattataactgcttcgatggcctttagttgagaatgtaaattacataccatgtaggtaaaaatttaagatcctaaaattatgtcttgcaatacagggcttccaagtgtgctaaactccattggctcatctgccattgcatcaaacatcaagcaccacgcagagttcactcccttgttctctccagagcacttttctcccctgaaggcttacc

SEQ ID NO: 37207 - DNA, 623 bp, Sorghum bicolor
  Intron number 1 from transcript Sb02g005190.1 (locus Sb02g 005190) derived from phytozome v7.0 (chr-ID chromosome_2; pos 6037453 to 6038075)
ggaagaaggagaagaaaacgacgaggacgatcaaggtatagccagagctctgctttaattttgttttctttttcagccggatagatctacttaaatgaatacagcatcattctactatcactcaagaacaagaaatagtaacatattctcttagtgctttgatttgttattttttgacgttctctgtgggctgggatttatccatactgaaatgctgcacgaataacattcaaatatttttggttagccctttactttctgtttttttgggtactacctggattatgaactatggttgatgctccttgattgggtgacactgcgaggaaaaacacctagaacgtgatactttccgtgctggaaatagttcttgtctgtttatcatactagccatgaacatgtgatttgatttcaatctattgtcaataagaacacaaatgatagttttctgagaaaaggagataatgcataatcttctgtgttcgtcaggtacccattatttctttgctagcctttttctgtcatcacttaggaatccaattttagcttcagcattaacgagaggtggctggagttgaacttaacatcctgatttgattgtttcaacaattttggatgtaggg

SEQ ID NO: 37208 - DNA, 953 bp, Sorghum bicolor
  Intron number 1 from transcript Sb03g046630.1 (locus Sb03g 046630) derived from phytozome v7.0 (chr-ID chromosome_3; pos 73741670 to 73742622)
aattcaaccttttccagaaggaggtaatgatggaacttctctttgtgcattatttctttcaggttgtaacatatactatgtttgtgaaaagcaaatttcacttggaaaaatgtccgacattttgggattgtaatatataccatttcttccccatgctcctacagggagacaaagatacatatgctagcacatctgtagtgttaggacttgtattcagggtgctgcgatgttaccatattatatgaatcacaaaaatgaagtgatgtggttagcatactttgatgtgcttgagttcatgatggacaaaacttgaattagaaatttgctggcttgcctaatatgaactatgcacaactaatgcaataagtgcttgtttgcttgtatccaggctggtgcagtataggctcttatataagcttggacagtgctcaaagctggcccaatgcagcattagctagtatactagatttggtcatgttaggctagctgatgggccacacaaaagtgaaatattcttacctactccacgtctccacccctactagaagataagacctctactagaatatggaggtgactacatacaaccaaacacaatgttaccaaatgcaacctggttatgcaagacaaacaaacaccaaggcattgcatacatttatactggcttgagttatgatgaataagatctaatgttggctaagactaatgcaagcagccaagcaaccaatcacaccctaattgaattagtaatatgagtcttcagcatttataattcagtatatgaaatcatgaaggcttataactcctgttagacaatttgagaaactatatctttgtacttgtacatttcagtaatgaaacaatgtgtggcatgacatggaaggagctgatttcaatggaaattgtttttgtatgcagctggaaagattgaaaactgagaatttgtctcctct

SEQ ID NO: 37209 - DNA, 676 bp, Sorghum bicolor
  Intron number 1 from transcript Sb06g014950.1 (locus Sb06g 014950) derived from phytozome v7.0 (chr-ID chromosome_6; pos 41668439 to 41669114)
gctctgaggtctggttcttatcccataatttgttctccagtgtttcacatatatcgcatatatctcatgatgatctttttatttggattagcaaaagacttagggaagaagaataagctatatgttcgtagcatgcatatgatcctccctctccctccgaccctccctttctcaatctctctctctctctctctgcaagtataagaacacatattatctatgacatataaggatgacacagtcagcaatatattaaaagaaactaaaattttcaaattaattaactccttattttaattcaaagaaacataattttgttcatccaccaactttgatttggtttctctgtgaaaatcgccagttgcagctgctcaatggctcaagagccccaccttttgtgcctcttgttcaaagaagagataaagcttttcgccattataaataaaatgggttcttcagccctctgaacacacaatgagtttctatatgatattaattcaagctatcacttaaatggttgaaacaaacatccaagtcataatatttatgatttacaaaatcgttatatttgaattatgctgtggattagatactcacacttatattcactacttgagacgacaggataattgggctcgaacgttgcatttggcattccagtgcatcggagtgatat

SEQ ID NO: 37210 - DNA, 534 bp, Sorghum bicolor
  Intron number 1 from transcript Sb02g034590.1 (locus Sb02g 034590) derived from phytozome v7.0 (chr-ID chromosome_2; pos 69125892 to 69126425)
ggtaatgctcctcagtaccctcttttcttgccaaaaacgaagtgttgttcaacggtaaaaagtaaagaaagcggcaaagtgctagtaccatttttttcgaattgagaggtgtacggtgttgctcatcaggctcagcgttcactatttctctttatctgtatatatgtgagaagaagaagagttgtcatacggtctgtgtattttgggtagctcggagatttgaagttgtattaggtgaccgatcaagtagttccaagcagccaaatgtcgctgatcatgtcaccctttaaagtttaagggcatgtttggaccacgggaaaaaaaaatcctatttctgcgtttttctatgtgatgaaattgactgattcctgtgaagttcttacgttccaaacagtccctaataaattctagatctctatggttttgattcttttgaattcctaatggttgttgcttgtggtgtcattaccactcattaatattgatctccgtatgtgaccttacctgcagctgacggtaatagccgctttgggc

SEQ ID NO: 37211 - DNA, 826 bp, Sorghum bicolor
  Intron number 1 from transcript Sb03g033690.1 (locus Sb03g 033690) derived from phytozome v7.0 (chr-ID chromosome_3; pos 61923513 to 61924338 reverse strand)
tgtgccgaggcgtggtttaggatcaagggcgataggtatcccctcgctccatcctgcgctggatcatctggatcctgttgcaagctttctttgatatatatgtgcagtgatctggggatgggatgcggggtaggtgtttgcgctaattccgtagccagccagtgctgcaagcctgtaacgaggtacagggcctgtagtggcgttgtgactgcacatacggtgaatggtgatgacttaactcgtaagggagtattttgatgtgaatagttgtagggtcatacaagtttctcaggaaaactctagaattcccatggggccgctggaacaatgcagttattttactgcacctacaccaatactagcatgcctttggctggatcgactatttatttatatctgaagccgcagccccgcaggttcaattgttgaacatccaattatactcattgaagcaaaaacattgattacctgataaggtctccttttttttgggtgagaaatgatggcgtagatgaagcaaagaactatattcgtgtactttggttgctgggcttgtacttttcagttttttgtatcggtgatctgtgactgctttaaggctttatgtcactctcatgtgcaagctgcttgctttttcacacacactgtttactgttataaaaccaactgattcaccaaagtttcgtagtttgcagctagcggcacttcgctttatttatcatctttattctttcagtctcatattgatctctcgttagatctctggaacttgtgtcaagtgaccaagaattttaaaccttctgtttccttgcaggcgctgtgaaat

SEQ ID NO: 37212 - DNA, 965 bp, Sorghum bicolor
  Intron number 1 from transcript Sb04g006650.1 (locus Sb04g 006650) derived from phytozome v7.0 (chr-ID chromosome_4; pos 6660874 to 6661838 reverse strand)
gagggccagctcggccgcgggcttcactccccgaggtgatctaaaactcctcttgcccagctcggctgcgcgttcaagaagattcgggatgctcaaataacaagtcctctttttagatatcagaagttagtgtaatacagcattgggtaaataagtgatgaaccatgatgttccgtgtatagtagcacaagcatgattctcgaggcgaaagcattactacatggtggttacatgattacacgacatgtgtggattttgaagcacaaagcagtacattgtgtgcttatgcagttcagtcaataatgtatatgctacacattaaccaggataaaacatctctgatataggaagactaagaacaaaaagataagaaagaaagagcccctgtgattttatcattaagtgaaccaagaaagacttatggaactaggaacaacataactcagcagttattgaaagaaacatttaaggtcatgagggaatgaaaggttaggatcctttttaggccctctttggatcgatgaagccaggagaagccactttttggtggcttcagcttctgggcaaaatggcttcagcttcactgtttttgttttgtttttggcttcgaaagttgttcttgtgtgtgcacattggcagggattctgattaagtcagtggaggagctccaacaaaagtcctgccaaagagagccttagcatggacactgcttcttttactgttttgagttttgtatttatattttataataattgaatattttctactattaaaaatattaacattttgcccactcaacctaatgaaactttgtctatcaggtttttgttccttggaacttaaccattaatgcttgtttccttgtccttatgccagtgttacttatcaaggacatgcataaaattattgaaccatttcactaaatgacaggaatacttggagcaacgcagaactggtcagaggat

SEQ ID NO: 37213 - DNA, 612 bp, Sorghum bicolor
  Intron number 1 from transcript Sb03g010210.1 (locus Sb03g 010210) derived from phytozome v7.0 (chr-ID chromosome_3; pos 11047422 to 11048033)
ctgcactacgcataccattcagctgtgcgtcataggtacttttcatctgctgtttgacaataggatcaccatctgtagtaattgcattacgattttagtagttgtttgttaagaagacatacctgggtgtacataatgagctagactgtcataattttgattaggattcgaaacttgtttccttaattatttggtttaaaaagccatagcaatcaaagtatttttcaaatatggatgcacttgttattctgagcagcttttatacaatcaaaaagctttcttgtaaaacatgtcctggcagttcagcaatggacacacttatgtaattggcatggctcctactgttttcagtatcatctatgcttcgtgtataagtatatgacttcctgtgtttgataatttagagaatgttttttgttaacttctatctgccatgattctcccttttagtttcgagattatgaccctgggttctataattaaactgataccctttttatagaatttctgtgtttgaatcagcatgctattccctgcgctatgagaactattgtgccatgtagttccttatgatttttgttattttctgcagttttgttggcagtcacctac

SEQ ID NO: 37214 - DNA, 745 bp, Sorghum bicolor
  Intron number 2 from transcript Sb04g004246.1 (locus Sb04g 004246) derived from phytozome v7.0 (chr-ID chromosome_4; pos 4042367 to 4043111)
ataaatctcacttggaggttatgttttgacagtctctacttgtactatcatatagtgcatgctggtaaaccatgtcagtttttagctgatgtttctatgggtcattgatgtttttaggttttgggtgtgtttttgggtttggggggggggggggtctggatttcatgcactggaacaatctattcctttggtcagatttaggtgttatgttacttttctttctgcactactagtgtactggctaaaagattggtgcttataggactttgtaattgcaattggtaagtggccattcatacaatcatgctttaattacttaatttgatgatttcatttttgtgcttcactatcaatgctgattgcaatattctgttattgctttctatcttagtttactgatgactaatgaagagtatttggtgtcctgatggtttagacttatactcaatgtccataatggtaaacattttgatggagcagtaatatgtagaagtttctgtgtgttccttgctttgcaatgtccataatggtttaaacattttgattgagtactatgtcagagcattagcatttctttttagtgtctttatttacatgctctatatgctgataatgtttcttttagtttcattggtcatttactcttttaactctgaatcttcacaattgaacacttatcatttgtaaacccaaactcgatgatcatattaactgttccttccgcagataattttggatcagaaga

SEQ ID NO: 37215 - DNA, 766 bp, Sorghum bicolor
  Intron number 2 from transcript Sb04g030240.3 (locus Sb04g 030240) derived from phytozome v7.0 (chr-ID chromosome_4; pos 60283469 to 60284234)
aggggaaaggaagggtcgccgagctcgagcaggaggttttgctcaatctctaccttttttctccagtcattcatcttctgtctgaacctgatctagggctaaattcctctgctcctttttgttactgatgattactgattgttttggaactaggacctctcaagtaggtcctgttacttatctcctgtttctatatcatgtagtcagtctgtaaaaagatgaaaaaacaatttcatttgtagacatccaactttcactgctgaacgaggtgctttttaaaagttgagtttggtgcttacatgaaattattgcagcattgcttagactggtaaccttaagaaataagccatattttaaatggcccattgaaggcataattgtgaaacaaatcatcactcctgggctctaatgatattttgatatccctaaaacctttttgccatgttggtattcaataatttgaaattttatacctctgttgtagaaattgtatacctttgtgcccaatttatattgaacgattagattctctgttgtataaagtgaactgtaacaaatgatactattccaatgaaggcatgccaacacctattcaagtgtctcgttgcttctcattcggtgaaattttgattttgcatccaatttcttgtttttctcgtgaaaggttatttgttatcatagcactttagagctccatttttttcggcttccgttcattatcataatagttatttaattgtgtattcatctgcatatctgcagttgc

SEQ ID NO: 37216 - DNA, 401 bp, Sorghum bicolor
  Intron number 1 from transcript Sb04g004240.1 (locus Sb04g 004240) derived from phytozome v7.0 (chr-ID chromosome_4; pos 4033035 to 4033435)
gggatctggtaagccatccagagactttattcttcgtagcatgtgacagtagcaattgattcatggaatccatgcttcctttgggccccgggtctgccagaaatttgcaatatgagttccttttgagttcttgaaaattgtttctttgaaataagctgctgacctgatacttaaaataaaaaaataaaaattcaaaattcacaaagtacttcacttaccaaattaatgcagggacagagcttttcaaacaattgtcagtttgtttaaccctgtattctaggtatttttggttgcagtatttgctattgaactttgttcttctgcaagatccaagaaaatggggcattagcaaatgtagactgatgtaggatggttcttggatggatgcaggtggatagaat

SEQ ID NO: 37217 - DNA, 890 bp, Sorghum bicolor
  Intron number 1 from transcript Sb04g023490.1 (locus Sb04g 023490) derived from phytozome v7.0 (chr-ID chromosome_4; pos 53187640 to 53188529 reverse strand)
aggccgatccgtccgatctcagccggctcttcgaggttagggctcgtttcctcccctctacccaatgttctctcgatcggggttccaacattgactcttccatcgtgggttactcttctacttctggtatcgtagaattgactgctcaattgggagttgagcatcgtatccatgtgtttttttttcccgttacattacgcactcagctgttgccatatggtgccatggtgggcgagcagcagcagccgccgctgcggcaagtgcgggcgtgctgctggcaatctggcatcagagcatggtgtacgtgagcgcgggctgcggacggtgagcacaactggtgatggatggcgcttgcaaaatgttcgatgaaatgctcaaaagaacacagttcatcttatatatttctatataccacaaacggaacggtacacagggatgatcccttcccttcaaaccaaacacagtggtgtggtcatcccattccagaaaaacgagatggaaccatctcgtcgcccccaaaccaactatcgacctgattgttgtgaatttacattaacgttcaatgccttgcccggggcttctttgccaatcgtgcctggcagagaagatagttgcattgctgcagttttagtcacaagagatattttgctagtcagaagaggtacatttgtgattcacaggaaaactaaatagagtgctccatttgttgatgcagttttggtcatccatgtctgccacccgagtattagctgtttagatcatcagtatgttattatactgttttcatgcttgtctggttcaccacactcggatgtctcaattctcaactaaaaaaacttactgaattttgactttgttcatgatgttatcaggaacactacaacaatttg

SEQ ID NO: 37218 - DNA, 530 bp, Sorghum bicolor
  Intron number 1 from transcript Sb06g005951.1 (locus Sb06g 005951) derived from phytozome v7.0 (chr-ID chromosome_6; pos 15118869 to 15119398 reverse strand)
tcgcgtcagccctaaacaatctggtaattgttagttttgttacgttctgaaaacggaagtgcactgtgctgtttttaatctttcaggccgatctgcagtatttatgttgaatccttaatgaagatgtctgatattatattattgatcatttacctgacagatatgactctgttgtaaagtaaaaacatgattcagctgattttgataatttttctgagtttatatgctttaccatagttctgttttttcaatttgcataacgagtttcaattttctttttctctcatctgctgttctatgttcaatcaagcccttgaagtactgttctattctgccagcctttattttacccactgcatcatatgggtcacacaattgggcaagcttacaagtttgaactatgagtttaactggattttttgctggtcataaactgctcttatcactagtctcggttaaatgaattgactcatttaaccttttttcttcctgacctttacaggcagagttttataggttaaagaaagagt

SEQ ID NO: 37219 - DNA, 999 bp, Sorghum bicolor
  Intron number 1 from transcript Sb01g035310.1 (locus Sb01g 035310) derived from phytozome v7.0 (chr-ID chromosome_1; pos 58838956 to 58839954)
gtcagggatcgacggtttcttcatccgttccgttggtgagtcatcccttgctttctggtgtgtggatttccttgttccaagacgcagtttttgtgcccactcggatccaaacatttctttcttcgttcattcagtctgttgtggggttcgtgtgccacgtggtgcccccacgaatccaaccccacccgtccgcggttggtttagggttttcttggtgctgttcttcagcgcgggagatcgatcgaacgatctcggtaggcgccccccgcgcggtactaacttgttggtgcccaagcccaattgaggtgggcgactggaggtggagggtgaggggtgcagtttcttttgagaaaaaagagagagcttggatttcatccattttgagttttccactctgttacctgttttcagtaactcatggagccaaaatcagcagaaacctattcacgtatggaataaatcgtcttttgcctcttccttctcctttcgctgccttcctactaaagaaaatagtagtgggaagaaaggcatgagatatgtttgaagaagtgggtaggagaaaagctttagtagtttatgttgccggaggcaaagcttaacaatttcgatccttcctgttacatcttggtcctcataagacatgtcaagagtttacttacttgactcattaggaacatctgcacaaaaattcgcagttttatatgtttcttggaatgatctgttcactgcaaagataattattatagctgcttatctggaaagtttttttttttaaaaaaaaaattctggctactcaattgagtcttctcggctttattttatatggttctgatcataatttctcatcgacatactcctagttgtattgggtggtctagttggatcatgtcagttgtgtttcaaattttatatgattatctgtctagtggagctttgtgctcagatcttggaaattttgtcggttttgcagttgggaggcgatacatttaaccagacgaa

SEQ ID NO: 37220 - DNA, 865 bp, Sorghum bicolor
  Intron number 1 from transcript Sb03g006670.1 (locus Sb03g 006670) derived from phytozome v7.0 (chr-ID chromosome_3; pos 6866557 to 6867421)
tcgccagtgtgctccccggacacgccttcgcctcggtgaggaatccgcagcttctctcgtccgactcaactcaccgagtaaaatttgccttccgttcccgcggtggattcacaagtgggtgtttgatcattgatcgtagggaagataggaacgtgattcgagttgagaagtctcggttgtttggaaatctgaatttgtcgaacgtactgtacccggtgttatggttcattgcagttttttaatgtctagaaatgatgtagatggcttttggccagatgtgaacgtgattcgagttgacaagtgttttttagtgtctagaaatgatcgtagggaagatgtgaacgtggttcgaatcgaagtttaggttgtttgcaaatctgaaattgtcgaacctggtgtatccgatattgatggctcagtttaatgtcatctatatggctttcgggtgctgaactactgaagtcatttgctggacaactacctatttatacttactgaagtcatttgctggacaaccacctatttatactcttctagtccatagcccttagtcttccaataggccttttgaagactcactggtcactgcccatgcttcttcagaaccaatacagagttcggcgacaagcctacaagctacaacggccgatacagtcatacagattcctttaacaaatactagcacatatggaggtgttccagttttttttttcttggaaattgatgcgatgcagacataaggaactgacatagtttctcatatgattctgattttcttgatctcttgtttggacttataaatgatttgttctatggttgtatttgattgtacctttttccatttaaggccagagcaggagtggag

SEQ ID NO: 37221 - DNA, 980 bp, Sorghum bicolor
  Intron number 2 from transcript Sb03g044670.1 (locus Sb03g 044670) derived from phytozome v7.0 (chr-ID chromosome_3; pos 72020561 to 72021540 reverse strand)
gtggagcctccagtggatcgcactcggccgaaaaggtacacttgttacatttccctctcaaagacgtggaatatacgaacatggaatatacagtgtacgctaaaaatagactagtctaaagtattgcatgatcagtggtaccagtgtcccagcaaatggtgcaaaactaagtgaatttacttgttataccactctttggaagaagtgatgctagtattccactaacttactgcatctgtcagctcttgctacgggtttagtctgaattagcatttttgtatagttgcatcaatgtattgtccccaataagatatggtcaaacaacattacccataaattaacctcaaaaaataaaaaaaaaagaaatttacagtgttttttttttgaaagaatgacagcactaacataaatttgaaacaacaagaagatttctgtccagtgtgtactgctgcagtagtaagctcctgttgttttatctatatagaatgatttgcatgattgctacagtggtcacagtgtgacttaaatctctctcaactaaattgggaggtactagattagatcttctggtgaaaattgtcttactctgtcccccaaaagtgcatttctagtttatttcctaagtcaaactatctaaattttgaccaaggttggtaagattatcaaaattatgacaccaaataggtatactgtgaaaatatatttcatgatagatctaatgataggtgtcttaaatcttgatagtcttctctataaactcgatcaaacttaggatagtttaacttcggaaaaaaatagaatgcactcttcttaggatggatgccagataaactccttttctatatgttacagtgagtgctgcattggttttgttacagtggaaactgggattaaatgttgttgcattatcaattgctactaactttgtttttttttttttcaacttttttcattcaaccctccttttctctttagatttg

SEQ ID NO: 37222 - DNA, 578 bp, Sorghum bicolor
  Intron number 3 from transcript Sb07g000220.1 (locus Sb07g 000220) derived from phytozome v7.0 (chr-ID chromosome_7; pos 69729 to 70306 reverse strand)
attgcgccattcccacatcccggataaggattcaggtacatctcctgctttccatcactctcctactgcaaattccatttcttaatttttatatataaatatcactgtgcttaaattcgatcgaaaacgaaaacactcatgggaccatgtaaaatatatagatatagtccattcacaaacttagagcgaaaatatgctttgctttcttttcattcctttcaggttcacaggcataactgtagcttgctgcaactagcaagtttgattttgtcttcttctttgtttttaatgtccttctggccttcaagcatgtaatgtaagctggcagttcatttctgtaacattatactgttatatgtggttgcatggtacatatattagaatccaatgtatagcattaaccgatatccacattcatttaagcatgggtcaactaattgcaacagtcagcatgtcccgattcttatcctctgatgcagaaccaatctttcacaatccctcctccgcctcagctaaattcttcatattctttggaaacaacaggttgtgcatccagccttgggtttgactctttcact

SEQ ID NO: 37223 - DNA, 792 bp, Sorghum bicolor
  Intron number 1 from transcript Sb01g041090.1 (locus Sb01g 041090) derived from phytozome v7.0 (chr-ID chromosome_1; pos 64372661 to 64373452)
gtgcttgcggcccgccgatcgccggcgctcctcaggttggtgaagcgcctttcacctcttcgcgtggattttattttattctgtagcgattgtgtggatggataaattgacggaacgagttcgatttgattccggcgttttggcgtcaattggctagcaaccttggtagttgaaccggccatgcgttgtgggggtggtttagacgttggtggtgtgggagagagtacagattggttagcaagctgaagcgtagggtgtagctgtgtagggcatcgagctgcttttgcagaagaacgcccttgatatgtgatcatgtgaagggagcaggtgttaacaattacgttttggccattttggtcttagtgaggagttgattgattaatccactgatgattgatgccaaaaaaaaaaacttagggtagttcagcttcggctgcaagcctgcaactattgctgcttggtgctagatatggtaagctggttgaaatttagttattggcatagcagaatttcattttggaatgatagctactcatatgtttgatttggctttgacgccttccaaatgtacttgtttaagcttgcccaggagtccaggacttaattttggatttgcttctgctccaaatagtaattattttccattttatggcagttgtttaattgactgactttgtcttaattgtgagtattgaaggaactctggtttcattgtactgttacttcaatcgagtatatggtggtacgcaaaatgtgaatatttgtttttccatgtaggtgtgtgcgtctggc

SEQ ID NO: 37224 - DNA, 1020 bp, Sorghum bicolor
  Intron number 1 from transcript Sb07g002630.1 (locus Sb07g 002630) derived from phytozome v7.0 (chr-ID chromosome_7; pos 2844512 to 2845531 reverse strand)
ttttagtaagagtaacttggagtcaataccagcagcccattttaggatgatttgataggcacacctagtgccatgtttctgtttgaaataccactagatggtttgcaatgacttctgttcaactaaagcaacagcttcttactgacagaattggtagtactcactgggaattcgaagtcacagttttgttacaattgcccctttccctgaaattagctcctactgagataacatttatgggctgtggctactacggatggtctcaatgcatagcagtagatagcaaactatcaacaattctctgcacgttcacatctttgcaatttttacctcatgttcctgttacataattgttagataactgtcttctgttataactgttacagttgttacataattgttagaccgaatggccaccaacttcaaattgtcatagcctttatcacttataacattcccttcctctgtccagaaaaaaaaaacacaaaaagtgctccctctgttgtttattttgtgacactagcatatttggctgaaacctacaatttcattttccgcccccaacagttgatggattccccaaatgtgagaaatggatacgcaatgacattgttgacaccaaggagtcgaagacaacttcatggttgaagagattcatagggcgtgcaaagaaacctgcaataacatggccattcccctttgtagaggagaggctatttgttttgactatacaagctggagttgaaggtttccacatttacgttggtggtcgacatgtgacatcttttccttatcgaccagtatgttcttaagacatgtttatccgctgttccttttaaaatttatttttgttatgatatctagagtagacacttaggggcaccaggtgattattttcaggggttcactcttgaagatgcaacgggattatttgttaagggtgatgtagatgtacattcagtttacgccactgctcttcctatgtcccatcctagtttttctcttcgacaagtccttgag

SEQ ID NO: 37225 - DNA, 258 bp, Sorghum bicolor
  Intron number 2 from transcript Sb06g001130.1 (locus Sb06g 001130) derived from phytozome v7.0 (chr-ID chromosome_6; pos 1577044 to 1577301 reverse strand)
agataccaagcctggcggagagacccaccggtatgtaccagtaccagtctttcttcatccaccgttaaatttttcttcgcccaccgacagctagagagagctgaataactttacaaattgaataattgtctgtaaactgtttattagtgccttcaaagattttttttttcttaggatcagtcctacttgaaatagatatggatggaagatgaaatgactttgaattgatttttatttctgtgtttgcttcattccaga

SEQ ID NO: 37226 - DNA, 408 bp, Sorghum bicolor
  Intron number 1 from transcript Sb03g013460.1 (locus Sb03g 013460) derived from phytozome v7.0 (chr-ID chromosome_3; pos 16814013 to 16814420)
gaggttcttgcttcagctagttttctattttctgtttttcaaattttgatgttaaatttcatgaggccagaaattcagagcatgcacaatgaatgacagagcaatcaatgtatgtattcctagtgtctaacactgcaagtagttagctcaatttcctaaaaaaaaaaagtagttagctcatgctctgcagtagtagtaacctgcaatgagcaatcaatgtgcagcagtgctctggaccttgatggcctttcactcttatatatccctgatgaatatctgctcagttactttggcctgtcctacgaatgttttgtgaaaaatatcttattcttcaataaaagttaatgtactaatatttctgaatgacatgcagggcctggttgctcatcaattgggtacggcgctgct

SEQ ID NO: 37227 - DNA, 825 bp, Sorghum bicolor
  Intron number 1 from transcript Sb06g018670.1 (locus Sb06g 018670) derived from phytozome v7.0 (chr-ID chromosome_6; pos 48254002 to 48254826 reverse strand)
ctcctcctcttcgtctccgagctccgtacgcgtctcgctttttccttgttctcttctcaccccctgcgcctcgatctaggtccctgtacccgtttctgagatcggctggttaggtttggccgcgttggtgatgctagatggatgctagtataatgaccccctgtcgcattacgattccggcgttctctccaggatgcgtcgagatctggtgttgtggttaccggattggcggagcgggtggaaccgtggaattgatctcgcgtaactgggttggcgggagtggaattgagtgcctatttcgaccgcgcaaaatgttattttaatgtgctttgtattgccaggattcaactcatttcacgagtagctacgaagctcgggagattctgctgttaactttcgttctgttttggttagtgaataaggcgttgacctgacatgttatataagcttttagagaaacaacagctacaaatggcaaatttgcatacataattattggtttcgtacaaaatttgaggtaaaaggctgtttctcttgtgcttggttgctttgttgtcgaatgtaagggccagtttcatcagaaattcagaagcagatttacctagtacccacatgtttagttgaagtaaatgaggggctctttcgctctcattgttttagatataaggtttttagtgtgtggatattcgaaaccttgggtttgctttcttttggttttctttaccggatgaatagtataccagcatgaaggttaaccaaagaaatcattctacctatctactactttatatttttctctgtgcacttgtgcaggattatatctcc

SEQ ID NO: 37228 - DNA, 585 bp, Sorghum bicolor
  Intron number 1 from transcript Sb06g029100.1 (locus Sb06g 029100) derived from phytozome v7.0 (chr-ID chromosome_6; pos 57787964 to 57788548)
ctggtatgtacctacgtcgtgcactcattcttggcttcgcctacaaagaaaaatctgcagggcgatcgacgatccttctcttcggtttcactattgtcatttgttttctactactagtataagtttttttcttcaatcataatacggaacaagacgctcatgaatgtgcaccaactctcggatttcgaaattcaaaatacactttttccaacgactttggaacgttcacatcaactataccaaagttatttgaaaattctgaattttgaattttgaatttcgaaatggagaaaataaaataattatttaagactctaaactatttcgagtgaaaatttggatacatcacgtcaacttcggaggtcgtccaaaaattttaaattttaaatttcaaaatttaagaattataaaaacagatttttggtactctaaataaattaaaataaaagcctattaattataaatttgggacaaatattttatagcacatgtttttttttaaaaaaaagaaaatttctagcacgtgttttgacattgagcatttttgcagctgtggattctggggaacccaatcaaagtggaagg

SEQ ID NO: 37229 - DNA, 586 bp, Sorghum bicolor
  Intron number 1 from transcript Sb01g003740.1 (locus Sb01g 003740) derived from phytozome v7.0 (chr-ID chromosome_1; pos 3013086 to 3013671 reverse strand)
ttcatcgggcccttctccggcgacgagcaccacaggtacgcttacccgttgtcttcccttgcctgctgctgtgcgagaactgagcacccaaaccctaacttaactatttctattcggatctgatctgactacaagtgtgtgcgcgcgtgtattatgcctactagtttcgattgtttcgcaaaaaaaccttgtcgggtgtagatgtgtacacccatgtccttaaccgggtccgctcctgctacgaagtttcctagtagaaatatgtcctgcctttgttgcttcctcagtgggattacactagctactggtctgcctttttttgttggtagatctgttagcagtaccttaataatctttgcgtgtgcgttttttttttctagtaaaagtcaagtactgatgctcatggggaaatttgtttcagggtgacaaggatagctttctcaggtcagtgaaggaagacatcttcttgccgcggtagagctcctgacggttgctgggttgtgctacaagtatctaggggtggatttggactgggagatggtatactgaaggaaaactcaaaagtctcaagtgagcttgcttcaag

SEQ ID NO: 37230 - DNA, 621 bp, Sorghum bicolor
  Intron number 1 from transcript Sb03g038090.1 (locus Sb03g 038090) derived from phytozome v7.0 (chr-ID chromosome_3; pos 66032190 to 66032810 reverse strand)
tgtcacgaggggacagacaactgaccctactgaaggtaatctcctgttgtctttgccttcttcagttagagcttcgagctatacagttggaaattgctcctgccaagaagaaatcagagacactttgccatctaactggaaattgccatgaagctttgattcaagcaggccttgttttctgttgattcagtcattgtttctgactgcataatttgagcgcacaggaagttttgaacaacccatttttgcttctgatccttttggttagctgttcacaaaccacagtccagttccatgatgtgtacgtaatcaagtgttgtacaccattattgttgaacctgtaatcagcaatacttgtgactaatcaaagcacttcacagacagtacgtgatgagaaatgtggtctctttataatgcatatcatgttcaagtaggcataggtatcccgcaaaaaagaagaagaagaagtgggcagtataactagagactggttcttgttgacatctattgaaatgtgtatgcatttccattctgcatgactcagatactccgttgctgctgagtattgtctctcttatatttgcagtgagcgctctcaaggcaatcaaaagcagtctggtc

SEQ ID NO: 37231 - DNA, 743 bp, Sorghum bicolor
  Intron number 2 from transcript Sb01g017290.1 (locus Sb01g 017290) derived from phytozome v7.0 (chr-ID chromosome_1; pos 17793335 to 17794077 reverse strand)
atccttctttcggcgtcggggcaagtgggattgtggtgagctattctcttgtggactgcatcttctcaatgtttaatgtggactcatttcttgaatggatactggctagtactaactaaatattaatgcttaagtagatggtattatagcactttgacataccataacttttgagatattgcaagtcatgagctgtcgaagaaataggaaatgtttgaaataaataagtataccaacattcaagcagaaacagatggtaattaatgcatatatatatactcccaaattaaatgagtttgtcagttatggtaatcttgccatctcatttgactccagcatgcaaatgtttcagtgttactactatgtatatgttgaattgttagaacttagaagaggacaaaattagcagtatagctcttgcaatgtgatttgttggagatttctgtttaaagactgagccaaaaggtatttattgtactttggcataggagagaagaatatgtcctttggcattatatggtatttggataggacaaaattatcttgttgtgatgattttatatttttatagaagtacaatgatggatatgtgcatgtacgagttgtagttacaattcaaatgtgatggtttcatatgcactttacttcttgatgacacacatatcagggtggcacatatgcagcagctgcgaaaaggcagtacagtatatgtgttatacttgtacgtactctgtctgcaaagg

SEQ ID NO: 37232 - DNA, 1035 bp, Sorghum bicolor
  Intron number 3 from transcript Sb02g022800.1 (locus Sb02g 022800) derived from phytozome v7.0 (chr-ID chromosome_2; pos 56052469 to 56053503 reverse strand)
tacccgagcagcatctaaggttaggaggatacacaaacgtctgatattctctatttatttggccggttgatcttgaatttgttctttgtgatcgaatggtatatgacaacgaattatgcatagactggactcgccatcgttgtagaccataggctaggactttcaggtggttaaacgcatcatagtttgtggttacggttgtttattcggattaggaggcacattgagtctgtgtagcagtaagcagtgtctattcagctgagaatcatggtaatttggcttttgtggtttggtgtgctcatgaccacatgttgatactggcttgaatttggtgggttcatagctggctgaaggagtaattcacttagtgaagaacatcaagttaaaacttttcactgttcatcacgtctcaatggtaccaactacacgtggaatttacattatttaatttcattagtttttagtaatactatgttcacaaatgtaggcatttctagcagtaaaggaaatgccacgctcctcatcaatcataaatattataagagagcaaaactgctgtaaaattaacagtgagggatgggaatggtggaatatgccagaaatgtttacatttgtggaaactcttgatgctaaaattaaaaaaatgcttacccttatggttgaaaggagcatatagttgttccatgcaatgtttttccagttctctaccagttattctgttttatgagatgtccatcgatgctgttttgcatcagttcttagttgtgctgccaccatgtattggatacagtgttgccagtccaagcactgatatttagagaatgtctgttgcctttttgatacaatacagaatggttgtaaacgtacagtgtcctatttagaacatggggcatggggctcccacgtcccaatgaaagtttgaacttgtagcttgatccaatgcttaaccctttcaaaaattccctatacatagcctgcaatgcctttgctcatgctattctcgtgtatatgtctacaggttttattggagtacag

SEQ ID NO: 37233 - DNA, 605 bp, Sorghum bicolor
  Intron number 1 from transcript Sb07g004330.2 (locus Sb07g 004330) derived from phytozome v7.0 (chr-ID chromosome_7; pos 5466319 to 5466923 reverse strand)
cagaggtttcttctcttgctttatagtttatatactgctgggtttcacaaattgtatgcattctatttagtgcctttgcttgcttataagtatatgtggattactattatttgttactaagtgatgtggattattattcttcaacttacaaagatggaccttgacaattcttttcccaattttaatgtatgtactagccaattactgtctgttgtctactgaacatattgatgaaatgaacttttcattttttttttacttattcatgtactgtttgtaactttgtataagatacttcaactcagtattcaacattcatgtaatagctattgttatactttttatcgctcatcctttgcattaactttaatgggagagttcagaatgttctttacatagtcttaacctatatttttaggtattctcatgttctatatttgattggtaaccagtactacatatattaaatatttttggagtttcagtgctatatcatgtttctacttgctctgtttaccaaataaataaatcggtgggtggtggctatagtttacgtgctctccatggttcagacttcacttcttttaatgttttcctcaatatag

SEQ ID NO: 37234 - DNA, 747 bp, Sorghum bicolor
  Intron number 1 from transcript Sb06g016460.1 (locus Sb06g 016460) derived from phytozome v7.0 (chr-ID chromosome_6; pos 45265288 to 45266034)
gccttcctctgcccgctcgccttcctcctcgagaggtaacgtgctgttgccaacaagtgcatgcgccgccaacgtgtgtgcgtgcagtcaggaacgaacgtacgcgcgtgatcgtgccaaatgaacagtcctgaccatcatgctctcacatttgcgctacgatagattctcgtcgacagtggtagaatgtgtgtcccgctcgtctatcaaatttgtctgctatttctcacaacaaatcagcaaacaatactttctctcgtgacttctaagccgagcgaatagagcggtacccatcatggattgcatatttttcttgaaattcaaagtacaggagcagccttttgtctttcgtgttactttattctcaattccttaaaccatacattatttagacagacggacagaagagagaggactagacaaacaattggtcatggccttaatttggacatgtccactttcaatactttgttttcatacgagtattattactgtaatctctactaataagcaagcgccttgtgcttcctgtcctgcaggaagaaacggccaccactcaccatgaaggtggtgctagggttgttcctgtgtggtctttttgggtaactgttgacatcatttcttctttgggtgattttagttttggccagttgtaaactctactctgtgtttcacttacaagcttgttgacacaatcacacaaataatgcagaatcgcaataaaccagaacttgctagtgcttgcca

SEQ ID NO: 37235 - DNA, 987 bp, Sorghum bicolor
  Intron number 1 from transcript Sb01g043460.1 (locus Sb01g 043460) derived from phytozome v7.0 (chr-ID chromosome_1; pos 66623433 to 66624419 reverse strand)
gcgccccgccaccgcgtcgccgcgggtcgtacaccgtgagaatcccttgccgcagtccccctcccgctttgattattgtcgtatcagttgtgttgtggctggatcggagtatctccgccgggggggcgttggtttatagaattcgttgacactatttggtttccgctcgcgccaaattcaatgatgactggaaatgcaggtttttatttcatggttacatagctagggaaatggataccaatagggattaggcaattgcacttgttaccgggggttgcacttcttttctttttttttataacatactggggttaaacttcaacgttctaattggtgaaatgtatcggattgtaatcctatctgagattctgaaccaagcttcataatcccactggcactgccatgttgcacaaagagttgaaatgagccttgttcattatagtagcagtgattggaacgctttgtgcaattgtagccctaccatcagtcaggtttcctagatgggatatagttatttgcagttttcttaattacctcagcaattttatttttgcaagggttgatctatgaaataggcaccttttgttacaaccttttatttcattcaaatgggaaatgtagcaattgccttgcctagtcatggactagctggaatctacactttagaacttttttttgctatgctgtgtcattgtgctcatatcatcgagcgcagtagttttgctcttatatccttgaattccacttgaaataattgattcatcagccatttaatttggggtgttggctatatgtaattgtaacttgaagtcatgaccaagcctatgcacctatttgcccttttgttatctacaccaagccagcttcatttcaggaatcatgccatgggctaccattttcatccagattgtttgtgatgggtccaatatttctctgtttttggtgtctgcaggatcagatcttatcgtacatagacaataacaacat

SEQ ID NO: 37236 - DNA, 563 bp, Sorghum bicolor
  Intron number 1 from transcript Sb02g040810.1 (locus Sb02g 040810) derived from phytozome v7.0 (chr-ID chromosome_2; pos 74712144 to 74712706 reverse strand)
ggctcgctctttcttggattggacagctccactcagtaagtctcgtcccttttccctcagttcaaatgggtactggatcttgatttcctgtggtcgcagtgtagcttattcctccaatctagcgccactgctctagcgatgtgtatgatgaataaaggtctctacttgtaaaaggggaatgaaaatgaaaaagattacagaaatacctatcggaagagtagtatgtgcaagtctcatgtatcgtggcagtgtcatctaatttctctacattgggttgagaaatcaaacttctttacaagatgcattcacaagaaacacctttggatgtcattcttcttaagttcatctctttcaagatttttacctagctcaaatttggtttctttgttctgtattctgcatattaataaccatgatcgcagcaccatttgcttcgcatatccacttcctgggttttattttttcattttgttatcacactaaatttgtggggctaccattaaacttggacctaatactgtcattctcctgttacagatcgctgaaagctacggtgctcaaca

SEQ ID NO: 37237 - DNA, 972 bp, Sorghum bicolor
  Intron number 1 from transcript Sb01g040290.1 (locus Sb01g 040290) derived from phytozome v7.0 (chr-ID chromosome_1; pos 63657946 to 63658917 reverse strand)
ccttccgccgccgagttcgtcaagtccattaaaaggtcagctctagcccccgcgcccactccccctcaatcccatgggtgaaattaggttcatgtgagattcattcagttcgtgggtgacgagatccgccgcgaagcatattgcgattggttgagctctagtggcctgtgtggccgaagtagcgggaggagggaagtaggaattagatgcacgaacgggatttcattgccgtgctcttcgaaatgcaagccaacggtgtttgcgagcttgtagggtcagtgggtctgtttttgcagagcttaacctaggtttggtatttggttggagaacctatcgtctatgtaggttcgagctggatcacaggtaattcctttttgagccacttctggatttcaggattaggttactttgtcggatgcctttcaagctgcaatatgatagagacatctcacaatgtgagatagttttgcattgaggtttatcatatgtaccataccgtaaacctgattgattgtgtgtatgctttatctttagcatatgtagacgatgccagagttggtagaaaataatggagtacatccattgggcttaatgcagtgagtttaattttttatttcattttaactgtctgtttcctgtttggggtcagagtatggcttgaatttcccaatagtgcctggtacaaaaccaaggttgacttgagttgtggtataatcacaatagctgagtatatgttactaattgatcttatgttactaatggggcaagaagaccagagttgtgaataaacgtttcccgaactaattttccaaatgcagctgtatgcagtggagttgcctcattttcttactagacttagtagctattaatatttgacatttatgtaggtcatttttcaaaatgtttgaaattaactagttatgtttcatgcatacagctttattgtgacattctcaaacagagctcctgatc

SEQ ID NO: 37238 - DNA, 684 bp, Sorghum bicolor
  Intron number 3 from transcript Sb04g037460.1 (locus Sb04g 037460) derived from phytozome v7.0 (chr-ID chromosome_4; pos 67097111 to 67097794 reverse strand)
ttgctgttaagcagttgaatcgtaaaggacttcaggcaagtgttttcaccatcttatgttttcttttttttttccctagaatatgtatgagaactgcatatctttgtatcaggtagaaaataattagagtttacaacacaggctgccatagtttttgccagttctcaccatcttttcattccataccatttaaaactagcaagctagtctggttattgttgaatgcacttgaagttattaaagtatagctacatacaaatgctattgctgtcgtcgtcattctgtagaagatctatgagcagtcttatttggacctagttatggattgtcaaactcagcatagcggaaataaaccaaaatttttcagtcatcattttttcttgaaagaaaccatcaagtaggttcacctgcttcagggaatgcacactaatttattttacttttcttgcatttacagttccatgctcattgttctaggtttagtgagtcaactgttgccatatagaaaagtagaaaacgctagtagacaaaatagaaagccaagcatacctcgaaatcctttcaatcccacatgcttgatgagtcattttgaagtcacttatgctggaatctaagtcttgcttcctgtactgattctaataaaatatgatctttctccaggggcagaaggagtggttaacagag

SEQ ID NO: 37239 - DNA, 740 bp, Sorghum bicolor
  Intron number 2 from transcript Sb04g037460.1 (locus Sb04g 037460) derived from phytozome v7.0 (chr-ID chromosome_4; pos 67098138 to 67098877 reverse strand)
tcagccccccccaccgccgccgcaagataggcaaggtttgttgctgctaaaggcctctcgctttttccatgctttctgctctagttctctttattatgcttcgtcgtgtcctgtccgttctcaccggttttcgcggagatcaagcgccggttccaggcttggggttaattaaggttgattcggttggatttaaggttgttcgtagttcctggtttgattcttagtcttagggttgtttcatgactgatgctggctgctattgcgctcccctcccctcgtccttgctgtcttgcgctgctctcctcgtcacggctgcagacctcttgcgcatgccatagattctgctacttcagtccaaattaaaggcatgatttttgtttggcccggcgctgtctgaatttgaggtttctttgggctttgtactgattgtcaaaggctccctttttttatcaaatctgttacagttgaacagccatggttgctggctacagagccagttaggttctcacttcagctttcattcaattgtgaatcagtaatcatgtcaatttatctccacttgctgcatctaaaaaattacaaacatttttaccatctgaaaaaaaaaaatctgaacttggttgcctgttcttggcccacaccacctgttgccgaaacattattctgcatgaccccagttatgtaatctacatttgtgttttatgagggaatccctaatttattcccactgcattgcagca

SEQ ID NO: 37240 - DNA, 848 bp, Sorghum bicolor
  Intron number 1 from transcript Sb04g024160.1 (locus Sb04g 024160) derived from phytozome v7.0 (chr-ID chromosome_4; pos 53863266 to 53864113)
ctgctggcgccaggagcggcgtgatcaggttcgaggtacggtgtgggtatcatcgctattctatactggtttgatgaagagtagcgggtgcattttgattggcgatgagccgatgaatgatggctgttgggtacattgagaacttgcagaattttgggggttcgctatgtagttactacgatgctgttgttttgccattcacccctctctcattccatcactgcctgagaaatcttacgggcgccgctgatccatagctgaccaatggtagagttgtgtatgttagaatacgggggtttcaggtttggatcactttcagttggtcaattcgttcctacccaatttttagcacgcgaagcgtctccctccaatttgttagctcgggactagattgttagagtcaccctgataggctggtacttgatgaatgttgttagtttttatgttaaacttttgatatagtgcaattccgttattcagtatctccttcgggtaatgggtttataagtttatggcaaatgcagcatttagatttacccttaaacttgtgctctgcttccccttgaggttcaactaggcttcctagattctttagatggctatttgcccaaatttgtgcagccagagcgctgtttgcttttgtcatggacatgtgcagcatgtgcatttttctaattttttttttttgatcaagattctgaagtatacgcattcaactattatagtgatctaactagttttggcatgaatttatccatctctttaagtccaagcgatattggaagttgattaactcaacatacaatggtgcaggtacttgttccacccagtacaaaggcacttaagtg

SEQ ID NO: 37241 - DNA, 777 bp, Sorghum bicolor
  Intron number 3 from transcript Sb01g042500.1 (locus Sb01g 042500) derived from phytozome v7.0 (chr-ID chromosome_1; pos 65776391 to 65777167 reverse strand)
agttatcccactcagccggtaacattgtgtggaccactctctacgggcttgtttgacacagctcaacttcactagtaaagctgttttttcagaaaatagcttcatgagtgactttctagataaagctgagctgttttggaaaaagtgtttggcaaaatagcttcaccaactacttcatacatagatgagagagagaaatgagagagaagccgcaataagctacttttttccagcttcatcaaacttatgtatttgtgagaggaggggaaaaacagcttcacccatgaagctgttttggaaataagtgtttgacaaaaaaaaacagctcacaacagctcatgaagctgttgtgagctgtaccaaacaggccctacatgtttaggccttgtttatttgacaattatgaatcctgcaagtcggttctatgtcgagaagatgagaccaacatgtgaatccagtgtttcggttccatgccattaatgtgtcacgcagacggattaattcaaattttggtgaatttaatctcaagtgacacaatcattaagtttagctatctagatatacattttggggaagaaaattgggtgagcgacaggttcattccgtcttgcgtgcgtccatcagcgagggggtcgcacctgagatagaatagacccatcgcccacttaatttttttccccattttaggagtttgaacatgatggtaatacgttgagccaagttcaaggatcagtggcacattttactaaaacagaaattttctctttcgatgtaggg

SEQ ID NO: 37242 - DNA, 432 bp, Sorghum bicolor
  Intron number 2 from transcript Sb01g042500.1 (locus Sb01g 042500) derived from phytozome v7.0 (chr-ID chromosome_1; pos 65777234 to 65777665 reverse strand)
cgacggcatcgtctacccctgggagactttcaaaggtaggtgaccactgaccatcggatcgaatcacccaaatgacataacatgcatgttttcatgctggtaagtctgtgggcagcatagcagagccgcgtgcagagcaaaatcgtcttctctgccactgccagtggtagtaataaattagtaatcgatcgacaggtgaagattaggtcttgtttagtttccactaaaatttaaaaaggtttcacgtcacatcgtgaagcactaaatataaacaaaaacaaaaactaattacacagtttgtttataaatcgtgagacaaatcttttgatcctaattagtctatgattggacaatatttaccacagacaaggcttcatcgattccgctgttctgatgatcatttaatttgctttgcctccatgattttcaggc

SEQ ID NO: 37243 - DNA, 860 bp, Sorghum bicolor
  Intron number 1 from transcript Sb03g039360.1 (locus Sb03g 039360) derived from phytozome v7.0 (chr-ID chromosome_3; pos 67054360 to 67055219)
aatcccaccaacaccgtcttcggtacgcgctcactcctccctctgcctttttgttggtgtcacgtttctctgaatgcttagagatggtttaactggatgtacagattaaactctgaaaatcgttatctctctttgctgattgattacggcgctttgtagcaacaaaaataggaacatggtagtacgaagataggacttgcacaaaaatttgacaaacgtgtaatttggtgcttagttgtgcttatttaagcacctgttgctattatagggcacttagattcagaagtttgctgttaaattcgcgatagggtttcaggtgatagtatagcgatactattggtgaatactatttcgtttgcagagcttattatttgtcaaaattagataatcttaatctgttcttgtttgcatgctgttaaattgttgatgactgaagaaataaatattgtataattgacgtaattttgatgtttatccatgctcgtttgttgtggcgaaattaagatgatgtgtccttgttgtaaattattgttgcctgaagaaataagtaacagacagtattttgtcctgctcgtttgttgtgacaaaatgaagaataaagagttcccttgctataaattttttttgttgctctgcttgccttttgttagtaccttcgtatctgagaaacgcggtaaaatggtaatggcatattgcgatgcttgtttttacaatgttgtagctgtcccctgttttctgttacaaccatgtccagttgtccacaataagttgaactaattagaagagatcttgctcgatgccttatccctaatgctggccacttgtacttacacaatcttgctgattccactgtaatgcag

SEQ ID NO: 37244 - DNA, 822 bp, Sorghum bicolor
  Intron number 1 from transcript Sb04g032450.1 (locus Sb04g 032450) derived from phytozome v7.0 (chr-ID chromosome_4; pos 62398008 to 62398829 reverse strand)
agtaaggcttccttaatagcccgcactgtttgtgtttggacgattttcagatgggttagtatccatgaatctgaaattctgaatgctgctgccgtctgcatctccttgggtttgctgttcctggaactggtttggtttgttgactctagatagcagtcagggtcaggcaatcataaggctttcatactctgtacggacagcacagctgaaagggaattttcacgttttgtcatgcaaatcaaagactcatcttcttaactgagcttcacttgcttacctgctcattctttgttagctgagctgctaaacttgttttcgccgttccaaaaaaggcgcttccatcttctgaattcgtgacgcacggttccgtcctctcaaaaccatggttgctgactagaaaaacactctcggaactagtattatgcattgatagtgaactagtattatgcattgatagtgacgcctacggtggcacgcctggaggtattgtcgagactcgagagtctccttactctataggagtttggttaaaaaactttctagaggcatcgttgtgaaaaacctaatcatcctcctagtttacatcgctgttcttggtgatgtgcagagtgacgtatgacagccgatgtttctgaggatcgttgctattgtgtttcttccggtggtagttttgttgttgcctcttttgtgaggttattttgttttgctttgccttttatttattacaaaatgtttcttctctattcatatatgtccgacataatcttgctattctctattcattattctgttatttcagtgggagggaaagttcattacact

SEQ ID NO: 37245 - DNA, 387 bp, Sorghum bicolor
  Intron number 2 from transcript Sb02g036390.1 (locus Sb02g 036390) derived from phytozome v7.0 (chr-ID chromosome_2; pos 70799543 to 70799929 reverse strand)
aacttactgttgtttcacatttaccagaagatacagttagtgaccactttaatgattttcttgatctcatacttcagacttgttttgttcagtttgtttattacatccacaaatagtttggcatgtcatgttactttaaaccttttaagtgtggatatcaggtgaaagaacctgttgtttttaaccttaggacttaggacatatggatactggacaatcagaaagtgttgtttcttacagcagtataggtgtcaaggaactagttctcttatcccttgatggtttgagtttgatatatctgaatttatattgtgatcggaagaaacatacgagctaatagtttttggatgttttttcagaagctacgagtttggtgttcttcaccaa

SEQ ID NO: 37246 - DNA, 612 bp, Sorghum bicolor
  Intron number 2 from transcript Sb04g023300.1 (locus Sb04g 023300) derived from phytozome v7.0 (chr-ID chromosome_4; pos 53057835 to 53058446 reverse strand)
cttggctgccggacttacgtgcaccttcttggtgagttcacctgcccagctgctagtctctgttgggacaacaacattgtctgtgattactcttaactaacatcacaagaagcattctgaggattgttaataggttaggcaactaattcaagtggtaccactgtccaccccttgatgttttttctttggattggaaaagtagatcattaaaataatctttgcatatgttaaatccagaattgaagcagtattgctgtccctaagtgccttttcttttagaaaaacaacttttcaagtcttctcatatgacaatgttttgcctttataagttataacttataacaatctgtggatgcattaagtcgattgttgaagtagtttaattttgaggcagcaccctgcaactagaaagccctcattctttatcacaggatatattcattgtaataatctagcatagtatgaagaacacatgaaaaataaaatgcaatttctgttctttccgaggttgcacttgtgccctttatttatacctgcataatcttttgcaattcccttttatttttgcaatttcaaacactaatgatattttcatgtttattattgcagtca

SEQ ID NO: 37247 - DNA, 790 bp, Sorghum bicolor
  Intron number 1 from transcript Sb05g001790.1 (locus Sb05g 001790) derived from phytozome v7.0 (chr-ID chromosome_5; pos 1948237 to 1949026 reverse strand)
gggaagaggagctccgtctacaggggagtcaccaggtacgcacgcatctctcgccgctgcatgccttcgattccggccgccgcccccggatcctgcattgccgccaagttcgcttctctctttgattctttccaccgcaccttcactcacagccgccaccggagttcccaattccgatcgcatctccccactccagccccactctaccggcggctgcgcttccccaccaccaccaccccaccggattgctccctccatcccttcccttccttcctccaccctgcgatcgccttggaccacgaaaccttcagttgcacacatgcatgtcacacccgccgccgccgccagtccctgctcgttccaccgctcgtcgatcgaacacgccacggctggcggggctcctctgctccccgtttctctttcgtcgctgctgctgctgctgcttccgccgctccccaaatttccaagcatcgctttcagcgagtcagaggacgatcgaaaacaagtcgttttctgatggcaagcagagtagagtaggaaaagttggttcatctgcaaatattgctgctgccatccatcttgttggtgctgctccattaattttctcccttcatcttccttctttctttatcgagcgctgtatatgaagaacttttttttttttttttggaaattttaatgcctctcatctgcttgctgctcaccaacattcatagcattgatacgcgtggcgctgcatgtcaacacttgaacaggcacaggtggacggggaggttcgaggcgcatctct

SEQ ID NO: 37248 - DNA, 965 bp, Sorghum bicolor
  Intron number 1 from transcript Sb03g028110.1 (locus Sb03g 028110) derived from phytozome v7.0 (chr-ID chromosome_3; pos 55889961 to 55890925)
gcttacgtcatccccgagatcaaggtgagcagccatcgcgcgatcacacacagacacagctatactagtagcatcaaaaaaatgataaaccctcggccgtccgttcgggccccgacggccaagatcgtctgatctggcagatcgtcctgccagcccaggaggatcctcgcgcctacaggctgggcctggcatgaaggcacatgcgggcccaccgccacttgttgctcaattttctttttgattttttggaagggctggccgactccatcactcgaataaagaatttcgcggtatggaggtatcgccattaatggttgacagatttaggtaggaccttggctttaattcgccgcgcagcagcccattgctaattgctgctagctcgaaacgatctgtcctgccgcgcacacatttaggattacgtgcaacacccatgtaattggggagccccaccaagaacaacttgcgcgcctatcgtttcctactactgagctgtgatcattatttgataattgtatggctgtttttgccgttagctgctaggtttgtgcagtgcccttggagactaggagtagtcgatgcgtagttttctataattattatggaggaaatcatcagcacgtagttttctgctgtttccttcaggtagttggctggaaagttccatataccagcaaatcgcggcgaaattatgttcaatattgaaaaaaacccatgtcgtgatgtgatggtaccatgctatttaatgttgactcttcttgatatttcagcattcttgtagtcgtacactcgatcgatgctcattattctgagtgagattttgttgatggaaaaaactgttagtttaatagatcgtgaatgaagccgaccagtaatacagtaaatgaaatgcgaagtatctgaagagtgccgccgattgtttggtttcaggtcgaggagctgaagaagcactacggattgcggtt

SEQ ID NO: 37249 - DNA, 714 bp, Sorghum bicolor
  Intron number 2 from transcript Sb04g010370.1 (locus Sb04g 010370) derived from phytozome v7.0 (chr-ID chromosome_4; pos 14184339 to 14185052)
gcgccgtgacgacgtcaaggccatcgtgctcactggtcagatctctcgtctctcctcttcattatttaatttggtcttctatcatcattagataatatatctccctgtatactgcggagtggggatcgtgttttttttttttttaaaaaaaaatatgccgccataaaaggggataataatattattacttgtacgagccattttaatgtttggtgctacccacggaccacgttttgatatggacagtcgtggaaacgtcgctttcctagttttctatactattttctgctcaccccagtccaccttgaactgcttacttacttgccggttgtgctagcctctggagatatcatcttgctcaagtcggtagaaatagaacccaagttgtggaaacaagaaaacagggccgttgttttttacttgatgcttgataatagagctttgcatttaaatgctccctgacaacactgggcagaaatttatgtatttgctctaccttcctagtaaactgaaagtatcctgataccttttcaagtcattcgacattaacacacatttttgaatccttctgttttcttgtttaatgtggtgtgctgccaaatccatggaatagactggcatgcgaaagagatattttgtttctgattcttgtcattgttctggattctgaatcgcctaggtgctggaggcaagttctgtggaggatttgatatc

SEQ ID NO: 37250 - DNA, 986 bp, Sorghum bicolor
  Intron number 1 from transcript Sb06g020820.1 (locus Sb06g 020820) derived from phytozome v7.0 (chr-ID chromosome_6; pos 50226951 to 50227936)
ccgtagctcgccacgagattagggtgagagctctactttctgcctcagtctaggatttggccaactggatttagcttaggttgtgctggttttacacaagctcatgtcccaatagatcgagctgctgctgctgtctaagttttctcgttgatgcgtgttaacttagtttcaggtgaatttgatgcaagcgcggtgtaattgatgtgtctatggcttaagttgtgactacaacaaatttccctagcattgaaaatgagtttgtgtataaaaaatgttgagctgggagcttatatgatccacattagcagacagcggaacttatgtggttaagcacaatgagcctattgagatggcatagtctggttttactgtgagcccaaggcaggaagtttcttctggtcaaagaatcttttgtttggtgtggtatacgagctatgactggaaacctgatttcatatttatatataggtctatggctaccatttgcatcgatttggttttgttggtatactttaggaggtagtttcctatataatttggaatcactccattttactgcccgcttgttcatgcagtccaattccatcccttcttgctttactgtgaattgaccttatctttccatctattttgagcatcattcgtgtttgcatttttaaccatgtatatgcctgcccaaatattcaaaaccaatgctaacatagcagcactctgtttagagttcagacatgtcaaggaatccttgaagaagtaaacattcatggttgcattttgtgaaggtagtaatataggaagagaggaaacgtaatagacgaaaaaatatggattgaacaataaaacaaggggataataatggaaatatttttaaatgcagttattgcatttttactttcatttttcttaggaattccttctaacttatcacattgcttcgttcatcttgctgaacaggtgaggtacaaacgctggttgtggtggaccagatt

SEQ ID NO: 37251 - DNA, 929 bp, Sorghum bicolor
  Intron number 1 from transcript Sb02g041950.1 (locus Sb02g 041950) derived from phytozome v7.0 (chr-ID chromosome_2; pos 75672598 to 75673526)
cacctcaacggctccgtccgcaactccaccctcctgtcagtgctccgctccgcccccacccatctcccctctcatctcatccctctcctcccaccggttcttgacttttaccccttcggtaggggtagcttacctcctctgggttcttgattcgatgctagagcagcgccaatccatgacttcagccaatccttgggcaacatctgtagtctgttccatgactttgtgacaaagtttgggagaggagcttgctaggaaattggtggctcgaatctgatcttgtttaccagcaagcaaatatgatttgcttgcaaactgtgagattgtaggcattgtagctttttaggaagcagggcatacacagtagcagtgtgcagtcatatggactcattatcattagattatattagctgactgctcatgtaggtgagaatctttgcctgttttgacaaaagaaaatttctgatgcagccttttagttcacagatcacagatgacttgaccttctggaaaatgaccttattacttgtatgagataattgaagataggtcttgaagtctatcgttccggtcaataaatgtgttatttgattggctagttcaactaggacagtatatgtttacagagatgttctgtttccttttttatatatatacaaaatgttcagatcctttagtgagtgcaatgctagttcacaggttagtccttttttttttaatatgtaattctaggctctagctatctatatttcgactaaacagcttacttatcatgtaaaacacctattcgtccgcttatcatattaaagttttaccaatgttctctcctgcctggatatcatattatcattattaacatagaaacttgacctttctagtgataaatttgaacagagaacttgcaaaacagctaggttgtgacaaaggag

SEQ ID NO: 37252 - DNA, 746 bp, Sorghum bicolor
  Intron number 1 from transcript Sb04g022990.1 (locus Sb04g 022990) derived from phytozome v7.0 (chr-ID chromosome_4; pos 52635046 to 52635791 reverse strand)
ccagtccaggcgtcgagttatttcttctttcgttggtgagcaatctgtcccataccatgcttggatcattcccttattctaagacaacacttgatttttgttctcgatcaagtccaaatatttctctctctgctcagcttgtcgctgatttttgtgtgctgcaaaatgccctactattcaatctgaatccatccatctgtggtttgattaggatgttattcttttcctctagtgctcaagatcgacatttatttgggactgtagtgctttttgtactcaattaaggtgcgtgtgtggtttatggcccagaagaatttgaggttctaatgccctaaatcaagttgtcccctgcttttagtagaggaaagaaattgtttgcagcctggttgattaagtttagcttgttatctgattattcagagcgagctgttttgctcttgtagatgataagagaactagaaagccataggcatcaattaactctatccgggaccaaaaaaggaatagagaactcactacctttatgattcttcctgggttcatcatgaccatgggaccttttatgataaaagtccatggttgtgcaatagtgatgtatcaatgagtgtatagaaattatgtttttttttttgctttaatactccaattgtatcagtatgtgcagtataacattgggacagttgtgcctctggctctaaaatggtctgcaattgtgcagtttgaggttcccatatctctctttggaa

SEQ ID NO: 37253 - DNA, 1027 bp, Sorghum bicolor
  Intron number 4 from transcript Sb02g042960.1 (locus Sb02g 042960) derived from phytozome v7.0 (chr-ID chromosome_2; pos 76703637 to 76704663)
attgctggtcatacgtgaaacgaggaaagcaggtaatggcatgctttcattccatgttttccaaaattctctgtcaatttgcatttggagacaagcgctggaaatgattacgtatttaacgtgtaatttacttgatcatttgtatgtcatcatgttcaagcttggacaaggcactgatcaaatagtcttattcgttgcatttgttgaatggcccaaatgtatgcgttctcatttttcctggttttggtgaaaaccggacctccgtacatgtattctaaattgggaaaaatgtgtaattttgtaccgcaatgcccttatctgtatactgtttattctctgatttttggtttcgacaaaatattttttacaactctttatagagttctaaacttttccatacaacataccctcctgtacttttttttagttgctctgttacattttattttcctagcaaattgttttgcattgtttctgttctggcacattgggatggatagacaccatagctcgcaaaactggcttttttctcccaagatatactaatactgtaacacatacctattttttttttttagaaaggacagcaaaagctttgccacagattttattagaagaagaaaaaacaaaaggcaagtgccggcccagttttttgagtggaaactaggccaaaaaaaccaagacacatcttcgaacgacaaaaccacctaacaaactccatggcactacaccctcaggctacaaaaggccaacttggtctaaactctaaacatgaaacaaccaacaacttgactaaaccacttgctacactaagaatatgcacaacacaacataccaggaatacaacacaggaaaacatcacagaccacacctgacaagtcaaaggaaaaaaaaaagagagaaaaaaaacacagccacccaatcgaacattatccctgagttgccagcagcttatctgtacaattctaatggatctttcttgtaacatttaggaccaattgctgcctgatccgaagactttcccttc

SEQ ID NO: 37254 - DNA, 1024 bp, Sorghum bicolor
  Intron number 1 from transcript Sb01g034910.1 (locus Sb01g 034910) derived from phytozome v7.0 (chr-ID chromosome_1; pos 58375128 to 58376151)
ccgggcactcgcaggccaaggttccgtgcggttgcgcttctccacgtctcgtcttttttcccccccttgcctttctttttttgtgcctacctgtgcatagatctcgtttgttcttgttgcctactcccgtatttgagattgccggttgtctgcctgcatgttgctcggcgtttagctcgttcgggagatgatcaagttgatgatggcggatcgaacgtggaggacaaccaacgtcctctccagcggtttccatgcggtattaatggcttctaaatcctacagaatgactctcgcagttctattaatatctatgtcttccattccctattaaaataagtgtgagccaggcaaccaaacctgtcgcattattacataacttttcctttttttattttctgtactaaactaagtatgagccaggcaaccaaacctgtcgcattaccgaatatggctgacatcttaaaagggtgcgctaaagacagcacgtaaatcctgtcaaaccactaaatgctaacttactgcttgtaggcagctcagtgttgttagatgagaacaagataaaagttggataccaggcttttatttaagtttatccaagctggtcgtgaatatttgaagggcaaaatctatgtttcattagttatttgttcatcccatgatgcagatgtcgagagacattcttccattgtctaaaacaatgcttcattagattgttcatgtgcacatggtaatgttttagataaacataaatcagttctttctacttcagttaactgttgttgcttaacctgactctttgatatgtttctattgctatctgttgctccttctatttacttggaatccttatttgtatcagggtgcccaaactacgtgtgctagtgagcttgtttcttctttatcttgggaaattctcttgcaaagggtcagtaactcggtataaaggaagtcttttttatgatgaatgatatctgtgttgcattttcttgacatcaattgttgttttcagattggggatttactc

SEQ ID NO: 37255 - DNA, 558 bp, Sorghum bicolor
  Intron number 1 from transcript Sb05g002940.1 (locus Sb05g 002940) derived from phytozome v7.0 (chr-ID chromosome_5; pos 3158508 to 3159065)
cggctccgggaggcgccagatcctcgccactctaggtctgtattctgcctccgaaatgcaaagcttccctctttcttgttcagcaaccagaaatttccaacttttttttgctctagactagaatttcttgctgtgtttgctctctttgtcgatttctgttgcattgcttggatgggatggggtccagtaagggtgatgtgtgcagtgcatgtggtgtcccctttctttcacaatgaagacaagtcaaatatccgttacctcttctgttcatcattgtgtcgcattcatcactgtgctttgtacaactattgaagcgattcatatgtttttatcccccttcttcctaccaaataccaatatttgtggttgggagatttttgttttcctcgtcagattacctaatcgacctaatcctttggcatggtttagttaaacttgttatatatatgttggccatgatttaggcctgtttctcatcacttagtagcagttaaatcaagttacatagaaaatgttcatttctctgtctgattggtgttcttcaaatgcaaaagggga

SEQ ID NO: 37256 - DNA, 784 bp, Sorghum bicolor
  Intron number 1 from transcript Sb07g004120.1 (locus Sb07g 004120) derived from phytozome v7.0 (chr-ID chromosome_7; pos 5218623 to 5219406 reverse strand)
gggttagtgctgcactatgcttcctggccatctctgtaaccttgcaatttttccctttcattcaagtgtttattaggtgcatttattctgctgtttcttatagtttctatcaaatgctatgctgcttgatctgtttaggaaagtgtacttcaagcgtttaatttaatacctttcttgttttaataggatgctctgcctagacatgcctttgctttctattttctggattttatttagaggggatgggcggcgctactggataagatactctttacctttagtgacggtttgtgctaattactgatgctgcattgcatagatcagtttcgttttgcctgtcgagggcagcggaagcacgccgtttctggaatgtcggatttcggatttgaaagtggttatgacgtgtgctacgccgttactggaatgtgggatttggaagtggttatgatgtgtgcttcagtctttccgtttcttgtttcaacgtagaatgtgacataaatagaagattcagttcatatggctgcgtatgcgttactgttgtgaacggttatcaagggaagccgttgattttaactgtttctgttgttgaaatattgcatatcactggcccaaagttgactgcgtcttcattctctgactataattgcatcatttttgtttcaagatgataatttggcgttttcagtttcatcagtatgctcttaaggtaagctataaagttgtgtagaatatgctgatatgattactgtgtttttctgtgatcgcagatacgactattctggct

SEQ ID NO: 37257 - DNA, 954 bp, Sorghum bicolor
  Intron number 1 from transcript Sb03g043310.1 (locus Sb03g 043310) derived from phytozome v7.0 (chr-ID chromosome_3; pos 70676563 to 70677516)
attcagcttgtctggtgcctctatacaggtctctacagaatcatgagcctgctgacttgcacatctgtggcttctcttcccgcagagcaatctatatgtctgaaagtttgagataaagtgcatacctgttcttaacttttgatagtggcatatataactcaaaaagagcaattaaagtttcttaaatcttaggaatgtaataggagctaataatatccaaccatcaaatcagcagaatctaataggatatgagttggtaaggaatattgtctttcaagcaatattttcctcttgtcagatgtgaatgcaaccttgacctgagtcaataaccagtaactatatcacaagttgatttaacgaaactatattagtaaacagagaattaattaaaaccataataaatggcctttaaaaagtgagattgtttttctctgaatactcatcatttgatctgtggtctgtcaaatactcaaatatcttaatcttggttctggtttttgcaactatgcgatatgcatgttgctactgttttagtttttgttggcaaagacacaggtatgggggcagattttcaattacttagcctgcttaaccatggcaggattggggtacatatagagaaccaacaggtctgctttacagctcaatagagataggattgaaacaactaaagtagagataaggtgctgacgtatgcaccaactgctactactattgctaatctgaaaatagctaaactgaaagtaccccaggcatcctaaactcaaggcttactgcttcagttgtaacatagctgtttacttcctcagagaatttatattggattagaaaagaacgactgtatggagattcgctgtaatgatgccattactaattcatatcactactttgtcgtcatgttttttcttgattaactgaattacatttacttggcagtctaggaaacatagaaga

SEQ ID NO: 37258 - DNA, 827 bp, Sorghum bicolor
  Intron number 1 from transcript Sb01g002830.1 (locus Sb01g 002830) derived from phytozome v7.0 (chr-ID chromosome_1; pos 2324231 to 2325057 reverse strand)
ccatctcacgacgctacccggaagtcaccttcaaggtatcacttcctcctgtcgttatttttgttggcttgaatgcgtccgtgccgcccgaattaagcactgccctgacgagcatttaattttaggctgtcgcatcgtattcatacagattatgttataagcgtcatattcatacagagattatgtaatgagcaacatcacgttgcagtattcttgcggcttatataatttcatacctaacatatgaatcttagattactatgttgaaagagattgaggatatataaactgtaactgtgacttttacttggacagtacaatcactgtgacaagaaaatctacattaagattgctgactgtcaatgcttaattgtggcaacccatggattgagagatctagtacgaatctgaatgctgacaatgatgttctcctgattacctttcctcatagccttagcccttagggcgtgttttgttagacctgttaaagtttagcaggttgtagcatttttattttatttggcaattactgtccaatcatggactaattaggctcaaaagattcgtctcgtaaattacatgcaaattatgcaatttgtttttttatctatatttaatacttcatgcatgtgtccaaacatttgatgtgataggagttaaaagtttaccgatgcaaacgaaacggggccttataggaaatggtttagtactagtccatctgaatgacttcactagttcacttgcataccattttcttttcagcattttatttctcacaaaagttaactgcagatttacaatccatccatccaagtaaagaggagact

SEQ ID NO: 37259 - DNA, 949 bp, Sorghum bicolor
  Intron number 1 from transcript Sb04g033895.1 (locus Sb04g 033895) derived from phytozome v7.0 (chr-ID chromosome_4; pos 63806217 to 63807165)
ctaccccgctctttttctatttgatagcaccatctgtaagttccattttgtttcaagttggggttgcatttaaatgtgtgggaatatggtaagtataaatgatgctcaacgaataatattcctgtttaactatgataattgtgaaagcatcacatagttgtcgataaattttcatatttacccagaaatgtttttgaagtccaaatgttcaaagcatagttatttacatggatctgaggcagtatgtgttttaactttgaaattgtttgacaaatattctagttataatttatcaatcggttctccggacacaattttctgcaaacatgactggttcattgagttatcttgtgttccatggctaaatgcctatattggagtaatcccattcccatgtctatgtaagtcactcctgattctgctgaaggataacacacttatgcatttagtttactaggataatggtctcgatgattcatggaggaaatttgcctctgaatgatccagaaggaactgagttcttccttttttttttcatttattgatatggaatgtttaagcagcagaagtactaaatctcaactgactggaacggctatttctctgtttctagtcaatgtgtactatggaacgtaccttgaaccaaagttgctattaaaattttggatgcctctggaacgtacattgaacatttcttactgggttctgatgtcctctgaagagaacagctaaatcatttttataagatcattaaaatagcaggttatattgtcatgtttcttgctttctctttcaccaatgacattattcctcatcctcgaaaatgaacttgcagttatagtactgaatggttcttagttcttacatggtcctatgtgttgattgcactagtttcttggtgtgactttattaaagatgttcaagtttgacgatttggtttatgtacaga

SEQ ID NO: 37260 - DNA, 918 bp, Sorghum bicolor
  Intron number 1 from transcript Sb01g018220.1 (locus Sb01g 018220) derived from phytozome v7.0 (chr-ID chromosome_1; pos 18907901 to 18908818 reverse strand)
tccgccgagcgccgccgcgtgctccgggcccaagggtgagtgcatcaaagacgcctccttttcttgcgctcagccaagaacatcaattcggttcttgctcatctttcctggcaatcttggccggaaaatggagaagcgtgatggtgttcttgtgcgattagggctcaagtttagggtttctttgagaaaggaactacctttctgcgtttcgaccatttgcttcctttgcttgcttggtttcgcaatagacggctaattccttgcgcaaaacacaagtattggtggtatggttcaataatttcccgtttgttgcttgacatggacactaactggtagttatgtaatattgtagaattgattctgttgattccaacaaacacaagtgccagttcattgtgtttataacctaaatttatacatgtgtttaagaagtatgcatatgcatttgagttgcctaggaacatttctagcatattggtatattctttagactttagctgagtgattgtatcctgtatggttcctgaaacagtagtagcatggttagtgattagtagtgcctagaaattggtttatcttgtttgaattatatcttaaagtgaagtacaacatcactgtttaactgtgagtgtaagagtaaaccaatgacagattcaagctcaagtgaacccttcagatcactaaacatgaaacgattgtggacgcacccaaccaggataaaagcactgggcttcaattcttggggcaaggtcaaacggcaattcatttctctaagtccacaagaatagctaaattttgagaacttctccagctctaaagatgttaacatttaacaaacacagtattagacttgtcacctttttccattatattacttatacaaatgccttccttgtagattgatacagcaaattatcg

SEQ ID NO: 37261 - DNA, 741 bp, Sorghum bicolor
  Intron number 1 from transcript Sb05g022310.1 (locus Sb05g 022310) derived from phytozome v7.0 (chr-ID chromosome_5; pos 54070876 to 54071616 reverse strand)
cactaagaccatctaaggtgaggtgccatgttgctcccatgcttcaggaagtggaagtaagtgatataacattcctctctctctctctctctctctctctctctctctccctctccctctccctctctctctcttacacacacacacaaatttgatgttttgtgagaaaactaataatgcaattataaagatatagttatatacacattatccaaaaagtatccaatttttagtaagagcaaccgagaaagaacaaataatgaaataaccgagagttttgttgtcaaaaccatcaaaataagtttgacatgatttgaactgattttggagtttttttcatgtaagtggatatcctattgtgtttctttgcattatctgtaaggaaagcaaatccagtattattgggaagcatgaaagtcagacttccatagttccattattgttaactggaaaattatgacatatatgaattaatctggagtgtactcgtgctgaaacacttcccttttttctgaaagaaaatattatttgctttgagaagtaatgttataacataacaggtaacctataggataggattttattttaagaataaacctgtagtgggcacaataattaaatattaataccgtgtcattgtattatcatctaggaaaacaagtttttgttgtcaggaagagtacatgtttgttgctatgtttgtgatgatcattcatttggtacacaggaatactttgcgaa

SEQ ID NO: 37262 - DNA, 456 bp, Sorghum bicolor
  Intron number 1 from transcript Sb02g032070.1 (locus Sb02g 032070) derived from phytozome v7.0 (chr-ID chromosome_2; pos 66823361 to 66823816 reverse strand)
gacgctccacctccgcgttcctgcaggattcgcaggttctaattttcgtttctactccattatgcatttattcttttcttttcccgatgattagacacggcacacggttttcaaaaaaaaaaacatttcccgcccccatgtcattgtttcaaaataggaatatattcttcggagggcagcgtcttcttgcaattgctcaccaaacttacccacttatttgtgtaggcacaaagacaaggtcaaaaattgtgagaattctactacctgtgttggcaagcatttttatgctttcgtgcattttacttgtttggttttgcaagaccagaggtacattgatatatttctcttctttttgtcagatatatgttatcacaagataaatgctactcacttctcacaaaaaagaaaaagatcaatgctagtcacatcaatttttttcagataaaaaaagaagca

SEQ ID NO: 37263 - DNA, 1033 bp, Sorghum bicolor
  Intron number 2 from transcript Sb02g028020.1 (locus Sb02g 028020) derived from phytozome v7.0 (chr-ID chromosome_2; pos 63249770 to 63250802 reverse strand)
gtactaagatcacgctcttccttaaggacgatcaggtatgctaactgtgttcagtcttttgagatttgttatgtaaaaaatatggagctgtttgtgatctgcagctgtgatagttcatggcttgtgtgctttgctagatttattatatttgggactctagattagcaatttcctttatatataccatccgtcccatgttgttgccctgtggattatcatttataatatatatgataactcagctacatgactaattgacctgtgcttatgtttaattgttgatggggattatgcgttacccgtagctcatctaatctacatgttaaccagtaaactcttagttggtaggtcgtcctatgcttcattttggtactttcagtgttggggtacagaaattcagcattttcttttgcaaggctgatattaatttgagactagcacctatatagagtgatgctcgttggaacataatctgtgaactaccattgtcttagattgacacgttcatctttacctgccccatgatattagtgttgtggcattgtcactgtggttacagcattttatgcctagcataattcgaaatgtaaaaatgacttgtaatgggggtacatattttctgagagatttgtgccttaatttcctttctgggatacaaatttgctccataatgtttataaacaatcaagtaaattttgtagttgtatactagttattttgaggttccacttggtgattcagctatgacttatatgtttgtattcttctttgtgaagcctcgctagaattagtaattcttatttttatgcttgttttgctatattagtcatgcagtatgttctttgttaagattacagtacaagtttcatgatctcattctcctgtcaattaccagactgtttctttggtaatatgtttgcttgttctgtgtaaagaagtgatttgttgtaaagcctgctggttttgattgaactcatctttgaactttctgtttgcagttggaataccttgaggagcgtcgcctcaaggatct

SEQ ID NO: 37264 - DNA, 890 bp, Sorghum bicolor
  Intron number 1 from transcript Sb03g032820.1 (locus Sb03g 032820) derived from phytozome v7.0 (chr-ID chromosome_3; pos 61278990 to 61279879 reverse strand)
gaagttcctgtttctccccccgcaattcctgtaaggtctgactgttggagccgtttcatcttcttgctatcgcggcagctccactgcaaccctttggcggatctcctggggccggacgttgaacccagcggctcacgctcacagtacgttttttttttctcctgttgattgacactatgcaactatggccttgtttagttccctctaaaaagcaaaaagttttcaagaatctccatcacatcgaatctttcagtacatgcatgaaacattaaatatagacgaaaataaaaactaattgtacagtttacctgtaaatcacgagacaaatctttttgccacaaacaaatgaaagtgctacagtagcaaaatccaaaatcttttcgcatctaaacaaggcctatgtgtgttcgactgctggcactggttaggtgttcggagaattgtgaattgagattatagatgggccgtgcgctggtcttgaagatgccacgcacaatttgtgtatgattgaaccgtcgaaaaataaccccaatttcttcattgtgcaatttgtccgaacaaggatatctatttgcagttttgcacagatagactgtacttaaaatatgctgcttcattgttcaacctatctatgtacttgttttaatggatttgggtgtgtcatggtacagttgttgcatagagttgtgtctctactgagggattgaaatggcaacggagtttggatatttttagtgcataccatcaaagcttttatgatttgagagtttaaagtttgtatccatctagggaaaaaaagaaaaaaaaaactagtgcagattttgacactttattagctttgatttttcattgcaggagtacagctccaattacagaaaaggggaaactga

SEQ ID NO: 37265 - DNA, 804 bp, Sorghum bicolor
  Intron number 1 from transcript Sb04g008120.1 (locus Sb04g 008120) derived from phytozome v7.0 (chr-ID chromosome_4; pos 8923387 to 8924190 reverse strand)
ctccgccccagctttctcgcccgcccgctcaccaggtaagcacgcttaccacctccggatcacggtcttatatcaaataaaaaaatggtatctgcaatgctggatcgtcacactgcttggtgcttgcattttgcatgcaagtcaaattctgttcttcatctgcttgcattctgaattattattagaatagcagcagagtgctagctaatattatacaatatgaataactctttgacatatgatggcaaaatatttttgctctgtcagcggagcggattaagatcttagaaagttcttgacaattcgtcgcttgacatatatgagtaaatcgacaaatttaattttgggttcacaaactaagcttgcagaggagctgatcaagttgataagcaaaagtatgtggagtctcgtttcagagatttttatgtttcaaacaatcaagacctctatacgtttgcaagcgtacgtttgtggtcaacagttcttccctaaaacacaacagttaaatgctaaataactaaactctttatttcaagtagcagcatagctaagaagtagagactttgcatatggaactgacaccgcatgaatgcacctccattattcattctgtttgatctatgatcttgttctcacaaagtcgttccatttgttcctggtgtatgtttgtttcttcctttgttcttgagtccagttcagttgcaatgaaagtgaaaagttctcagcgtgtgtactcctcttgttcctttctccttgttcttgtgtgcaggcaaggcaaaggggtccccagcagcggctacagag

SEQ ID NO: 37266 - DNA, 832 bp, Sorghum bicolor
  Intron number 1 from transcript Sb02g041160.1 (locus Sb02g 041160) derived from phytozome v7.0 (chr-ID chromosome_2; pos 75023429 to 75024260 reverse strand)
gcagcactcgcagcggctcctcgagcccgacctccgtgcgtcccgtgatcccctcccctgtcccgatttccttcccattgcgttttttttttctcggcgtcagcttcgccggtgaattcccagccgtctgatttctttcccattggggtttgtttgagctcttgagaattttctgtcgtttgattgaaggacattagatgcttctcgctgtttcctcttgttactatatcgcatagtaattaatttttttctgtctgaatttcacaccggtggaaggactgcatcaaagcatctttgtccactgttgtagtgtgttgctgcggctggtgtttttccttaactgatgatgtctgcaacttcttgcttcctatgtacactgaatttctcatccagatagccactttcgttcacattttcaaagacgtttactgttgaatccatttaaatgtgcgtagccttcaacgtcgtatttcaagaacaacttcgattgcctgcccaattttgcattttgaaggattttcctggctggctggctctgttctgtagcggggcgacttatggagtgtacctgctcttctttatgtttctcggaaggcgggaatgaacatactttttatgcagcagtgctctggcaccccctcccctttcgagctcactgcttactcccgcactttgttttgtgaattttgcttaaacaataaacctcgtcttgcaaaataatcactcactaacaacctttgcttcaaaccataatggtttatctagctgaatggtctgatctgatcgtttgctctaatactctgcagctgtgcaagtccgactgcagcttgcc

SEQ ID NO: 37267 - DNA, 793 bp, Sorghum bicolor
  Intron number 1 from transcript Sb01g011610.1 (locus Sb01g 011610) derived from phytozome v7.0 (chr-ID chromosome_1; pos 10438274 to 10439066 reverse strand)
ccctggacgccgtcctcaaggaggccgtcgacttggtaaatactacactggctttgctcttgttggggttggggcggttcttggggctgtggcgtactgtgcggacaaggctgccgttgggtatatgtatgttggttcttggattagcagtagcacggggggtgtttcgtttcttagttatttgcgttggtgtacacaatccttcgttgcttgattcatggtgtgcctgtaaatgtaagaggcttgggttgctaattcttgttctgctggtgcgttgggtggcgaaatcgggatggtttcttgtttaatatttgtaaaaatgtcagaattctaggtgacgaactgtaattaggttgtatatattgcgattactaattttagagttccgtgttcttgctacacattctgatcttgacatccctggccttgcttgtatgaataagttgcgtctttgttttctactctcttcctgatcatgatatccctttgcttatatgaatatgttgattgttgacgttttgcttttatttttttttgtcatgccatttttttgtatctttttactaatatatgcgtatagttttgttccattgggaaatcataccttggaaccttggtttggttggtagttagcaggttgacgggcaagtataaactagcattttactttatctcttttgttttgatgtgtgtcatggtaatcaaattggatgttttctttttaagaaaagaaaggtcttattgcaattattttgcaggagaacatcccacttgaggaagtttttgagaatct

SEQ ID NO: 37268 - DNA, 970 bp, Sorghum bicolor
  Intron number 1 from transcript Sb01g049180.1 (locus Sb01g 049180) derived from phytozome v7.0 (chr-ID chromosome_1; pos 72192786 to 72193755)
gcgggtgcgtcgcgagcccgttgacaggtgtgtctgtgcgtgcgtggttttgcacggtgccagacatggtgccgttcctgaagatctttttccatccacaagcaaataagtttagcttttgatgacattaatattaatattaacttttggtatacatatatcgtggttataaaaattgctaatttctttctcccgttgcaacgcacgggcacttttcctagttatttaaaacaagttatgttgcagtctatgattttattttttgtacttgtttatttcttctactaacgtggagctactttttagctacatccttatttgctgcctttggtttccttctctatggagggaggtaacttattccttgatatatcatggttctttaacaaatgagaactactctatttgccatcggttgaaactacagtattatggttgcactgctactacagaaaacaataactcagcatgcacactagtgttaagagcaagagattttcagtatactttgccccttgatttctgcaactttaggttgttcgaaaagtaaaaaatccccatacactaaatatgtgcataaattgaggccatgctaacatcccgtatttttctgttatcttgaaatattgtgctgatccttttgagttttgataacagtaagagttagttataataatgtgggtatccttgtataggttattcctgatgttgcagcgtttccctgttgagtcaaaaggtcgtcggaaaaagttgaatgaggtattttgctatccgttgccttccgctatagaatatgtcttgatgacttgtttgtttaacattaaatacatttctcccttctacgcaggttggctatgtgaccgccatttgctttggttgcttcttgaccagatgcataatggtaaatcctatgtagtaccaatttggttctgaaataattccagtaatagttagcatgtctatattgcag

SEQ ID NO: 37269 - DNA, 944 bp, Sorghum bicolor; identical to SEQ ID NO: 36106
  Intron number 1 from transcript Sb02g029730.4 (locus Sb02g 029730) derived from phytozome v7.0 (chr-ID chromosome_2; pos 64822543 to 64823486)

SEQ ID NO: 37270 - DNA, 782 bp, Sorghum bicolor
  Intron number 2 from transcript Sb02g007030.1 (locus Sb02g 007030) derived from phytozome v7.0 (chr-ID chromosome_2; pos 9033697 to 9034478 reverse strand)
tagaaggggaaactggagtagtaatatcgtatttggtatgatgcatctagtttacatcatcttttttttttacttagtactatttaaaaccaatgtgactttctattctttagtctattttttttgttttctccttgctcataattttgatttattctcaagcaaaatagtagatgtattttcgagtgtagggattccatagataaaatgcgcataagcattggccaagcttgttcctatgctggtttacacatgcgcataacaaaatcatgtgggtacgtaccactgtgtgtgagtacgcttgtggatcttaccttgtattagaaaagtaagtcattactctatttgcttattttagtagtatttttttccattgggctttggtgattacaacattcttttggatttcggcctcgtcacgctccgccactgcattcatatattatagttgcatccgtccttgatcaactaattttctggacaacttaccccacttgttagttgttacaagataaacattacttgtaaaaccagtaacataataatgaatagaaagaggagcctacttgctaatataatcatgataatatcttcagattttgttgactgctattgttgtcagtatttctaatgcttttgtggtttgttcatttatttacgtttactattgtgtttgttgaaaaaaaaatacaacactttgtatatgcaaataacccaattcgactttatttaacaatcatcatgtaggtgttggtaaaagttgtctccttttacggttctca

SEQ ID NO: 37271 - DNA, 578 bp, Sorghum bicolor
  Intron number 2 from transcript Sb01g009540.1 (locus Sb01g 009540) derived from phytozome v7.0 (chr-ID chromosome_1; pos 8290889 to 8291466)
tttactatagccaatatcgtcgaacaatctcaaaagtaagatctgcgtcttcattccatttatacttgataacgcacctttacctatactctgttgttataatgttttaaagatggtaacataagtaaggttatacaattatatgaaagattatgtcactgcatcaaatataaaggggaaaagacttgacaaaggaccattggcaaatctttggaagaagaggaaaaaaatcgatcatggtccaaccatactaactattcagcagtatgttgtattgtgaggtttcttacttccctttctcatgtaaagccactgtgggaatctttatatgttgtatggctgaagtcaaacttaacacgtctcccaaattggacgagtaactgaactgcaagttggaattatcatacatatcattcttaatactttcgtcatagcaagctaatgacattcctattgtttattgttgtgacatattatacatttcatgcaattatgccctccaattattttgatgagacttctggttctttgtggatttttttctttgtgcaggctttgggtgcactgctctgctttat

SEQ ID NO: 37272 - DNA, 820 bp, Sorghum bicolor
  Intron number 1 from transcript Sb05g000820.1 (locus Sb05g 000820) derived from phytozome v7.0 (chr-ID chromosome_5; pos 672086 to 672905 reverse strand)
gagtgctggataggtaaacttgtagttgactatatatttccaaatttcaaattagttgaaaaatacagtaaatgaactgcttttcaccatttgagtgaaactgtgtctttcctttttgtgaattgcatttctgagcatattgttaattagaagtacacaacaaagtcttttagtcccaagcattggggtaggctggagatgaaacccaacatgagcaccaacaagaagtcaaaagaatagggaaaaacttgtacaaatatacacaaggcatcaacagtatagtaatattattaaaggatctagagccatgttcatggttcattcttgtagatagctggtttccatgtgcttccatagttccatccaaggacaatcctcgtgtgtattcaatccttccaagtatcttttcttttagtatattaattgctaatttgaagtaaatcacaagaaggaaactatctgacacctcttttctcaaaagacactgttaaagtttccaaaaatgatattgttttgctccatagttttagatgaatctattcaccttttaaattaaatttaagagttggcatttcattgtaaaggaagtgaaattttctaatgtaagatactgcatctattggtcgtggtcatggatgtataaacttatttattagtcctttggatggttattttgtcatgaaagtgttaccagactttaggcaacggtggtaatttatatttgttgataggtttgtacttcattactgttattgcactcgttgtagctgcgttgtgatatgttcatacgtctattcctttcttttcagatcctttctct

SEQ ID NO: 37273 - DNA, 1063 bp, Sorghum bicolor
  Intron number 2 from transcript Sb06g032470.1 (locus Sb06g 032470) derived from phytozome v7.0 (chr-ID chromosome_6; pos 60609096 to 60610158 reverse strand)
gccgcaccgccgtccatcaggggatcggccaccaggtaccttggattgatctccatgtgttctactctttttcttttgtctttttgtgtgggcgcgttcggttggttagggttagttatgttctcttgcttctagtgggatgatgagttggaccaaatgaagctgtgtggaaaacttgttagaattttattagattgacaatgaagtgtggaggcttgcacaaactagattggacactgcatctgtttttttaagcaaagactgcatctgatttattcactgcaacataatattcagattctagggaagtgtagttactgttgtaactgaactatataggcaactcgtgtttctttagccagggtatgtgaaaatatttttaaccttttgattgtttagaagctgcttctgtaggtcgttttctggatgaactagtttgaggacacgcagctgctggtgacctgcactttaaatgtagatgatacagggtctctcttgctttaattgcattttaaacattgggagaactgtgagtgtgttgtaatttgtaaatctgcaggttatattgtaaattgtaaaagaattccaaacttgcatgcgtattgctgatttccatataccattgtcatgtaagattccacatacttagctaccataacgaagatttgtccaggtatttgaattgtagttgttggagttcatgtatgatcacatatttggatgaatacttgtctaggagatagttatctggtttatatccctgactgcaaaatctgttcccgaaaggtgttgctttgtatagtataattgtccatggcgccctggtagtattgtagaccaataacactgctctgtcatgtcatgcttctcttgcttacttcctgtggcatctacactgatatggtttgtattaacagctggaagaataaacagtagtgttactacttttatttgttcaatgttaccttattctttatcattgctctgacaagccgacactcattctctcatttgtatatttcacgcagacatactctgagacaaaaggtcataatttcacact

SEQ ID NO: 37274 - DNA, 934 bp, Sorghum bicolor
  Intron number 1 from transcript Sb03g027290.1 (locus Sb03g 027290) derived from phytozome v7.0 (chr-ID chromosome_3; pos 54783621 to 54784554)
gcctccgtcctgcgcgcaccggccgtcgaccctgcgtacgcacctccgtctcccctcccgcctctgctgtaccgtgtgagccggccagctgcccggggtggctgggccttggctccgccggtgtgcacggaaggtgtttgttgaaattgcccagagaaatgtgcttgcagcttttaccgtttgtcccgttccatctgtgctttagagctggatcacggatcacctcgcctgatgtgttcagtaaaaaatgactctgttccgagtccagtgagtatactgaatatttagctattgacagccaccgtgatctctcagacatattgctatgacagcacaatttacatttgatgtgggatgcatagtttagtacgtttattatttgataaaattcttcttgttggttataagataagagaacagacaatttttaaaattggaattctatccttcacgaggttctgcagattgatttagtttgacagagcttctctggggctcatcaccagttgaatgtgtatgccgctgttggttttgtagcaaaattcttagcgaaaatcaatgtaacatgtaggaacatgaaactttgtaaagtcccctgtaagtatccgttctcttggctatgtgttactttggttttttttttttttttgggtatgcctatttagtattttgtgaccttcccaagaaactatgctcagattgttactagccaagcttttttgcggtgcaaatgttttgccttccttcagtttgatttcatgttattgggattcagtgcagtagtttaatacataacctttttctgatttgttgcaatgatttcaagtactattaaactacacgcagtttcttatcacctgactattctttagtgccaagtttgtgtctaactgatgttcttttccccctaaaatcaacattcaggtgtagtaag

SEQ ID NO: 37275 - DNA, 818 bp, Sorghum bicolor
  Intron number 2 from transcript Sb01g002040.2 (locus Sb01g 002040) derived from phytozome v7.0 (chr-ID chromosome_1; pos 1754829 to 1755646 reverse strand)
tggaccgtacgctcagaacactgctcaagccttttcgatgtcgatttgttctgtttcaatatttaagctctgtactgtgcgtgactgctgatggttctattcatgttcattgtttcaatattcactgatatttatccaatctgttggctgtatttttattgtaatataccagtgtgttgttaacttttgtgttttcaatattttataagctctgtattgtgctttatagatgatgtttcatttcttgctgcactatctattttaggccttgtgaactgcttatgttcagatatttaccccttgtaggaaatgggcttatccttttgtcatcttttaattaatgtactggttctctaggtattgtgttttatatagtatctgttaatagctatatactacatccgtcctgaaaagaatgcaaccatgggttgcgcaccacaaaaaggaattcacgtttgactaagtttcttgttgataatattcacatttatggctttgaattaatttattatgaaaatacatttcataattaatctaatgatatttatttggtatcataaacattgatactcttttatctataattggtcaaacttaaggtactaaaacgcgacactgctagaattgcattctttctgggacggaggttgtactctagattgtaatctactactgtgtttgttaacttttgatttgcttgtctgtccctaatattgtactaccatatgatgcacatgttgaatttccttgctgttcttatatgctattataaattctttgcaggcaagtctacgcttacagattcccttgtggcagct

SEQ ID NO: 37276 - DNA, 818 bp, Sorghum bicolor
  Intron number 1 from transcript Sb01g002040.2 (locus Sb01g 002040) derived from phytozome v7.0 (chr-ID chromosome_1; pos 1755745 to 1756562 reverse strand)
acgagcagcagctgccagcgacgcgcgcagcccaggtaaatcgactacaagccggatgcatgtcggcggctagtttcttctctgtcccctcccttacgtctttactgtcccttattgcgtactcgaattgtttgtctggtcacttcgtaagattattcggggatccagcagctacaataggtcaaccttggctggtttgctgatctagaagaagagcaaagcagcacgattgctggaatatagggcgatttttgtgttcctgctacgctgcaactgcttttagaatacagggcaattttgatcctcctgctatgtccccgtatcatgttttctgaaaagaaaaataccttatctccatatctgtgcatacatatagtatgctatgtgatcgcctcaacccgagttgctattatttgattatttcgtgcctgttacttcgattgttttttacagaacatgttgtcctgattgtagatcttagttaaacgattttgcaccttgtctgcaattagatacatgttttccagtttactttattagcttttgtgtttacaatcctgtgaagtgtggtgtaaacaatggaataatgtatcatgacaaataatgattgttgaaacattttattaactttctgaaattgctaagaatttccatgtatctttggttcctgacaatcatattggttaattacttttgctactgatgtcaacgtcaaagttttcagtttagttttgttctcatatttttgagtaaattcttactagtacttttgaaccttcacagcaggaataaatattgttattggtagtgtgatattt

SEQ ID NO: 37277 - DNA, 405 bp, Sorghum bicolor
  Intron number 3 from transcript Sb02g002120.1 (locus Sb02g 002120) derived from phytozome v7.0 (chr-ID chromosome_2; pos 2160497 to 2160901 reverse strand)
tgcgtgaaagggctgaggatcaaagggaaagagtggtcagtcctattagcctattcactctacagcccttagatgtgttgttattattgagtttcttcttacagaatagaggatgaacatgaacttctgggaaaaaacattattgtatggattattgacttaggcaaatgttagtatgaagcagccagggtcatacatggcaacaagcaaaatttcctcctcaacttttcttttccccttgagaactctaagcagaagaaaactttgattatgtgacaatataaagaaccatctcactgacaagttggtgtcactatgttagtcacatttctttcatttcgtgctgattcgtttcaactcatcctgatccaacagtagtgatttctgtaggaacgcatacggcgc

SEQ ID NO: 37278 - DNA, 651 bp, Sorghum bicolor
  Intron number 1 from transcript Sb04g027980.1 (locus Sb04g 027980) derived from phytozome v7.0 (chr-ID chromosome_4; pos 57927584 to 57928234 reverse strand)
ccaacctcccaatccacggtaagcgttcaaataaccaggtactttttccatccagaactatcattttgctttggagtagcaatttagttgcaactggcaaaggcgaccacaatctgttttctgtatgtgcgcgcgggcagtgggctggtggcctccgcgtactgccatttactatcatcgcgtaaaatttcttcagggtgcacaaatcttcagatgtgtcctggtgattatttcctattacgtaaattctacagttccaattgttagggatacaagcatcagcattttttttgaacattaaatacagcaggggaggcccccactgtagagattttgtacaagcatcagcattgtcaccagaagtgagtgagtagggcctaaaatgtgtgttagaggttctgttttgttttcaattgaatggaatttactttcaggtgggctccttgcccccaattggtttgttgggaaaaaaaaattgtgtgttccagaggtgtttggtcacaagaactgaatcacttccttttgtcacgagttaaaaagatttatttactttgttgattatgttctttatattttctctggatgactccaaagaaaatactctctatccgcagaaaaaaactctgatatttgatgttatgctttgcagca

SEQ ID NO: 37279 - DNA, 1007 bp, Sorghum bicolor
  Intron number 2 from transcript Sb04g025450.1 (locus Sb04g 025450) derived from phytozome v7.0 (chr-ID chromosome_4; pos 55189505 to 55190511 reverse strand)
tgcccgaagctgcactcgctgcaactgcgcaaagagtatccttccaagccaagagttactttgttttgtgtattcgtttgtgggggttagtttttgagtgatgcttgatgtgtaaaaaccaattcagggctcgttcgtttgacctggaacagaggccaggaaccattccggccaggaatgatattcaaatttatatatctgtgaacgagtggaatgattcctagccgggaatctccctaaccgaacggcccctcaacgattcataacattatgcatttgatgattctttttttctctgcctaagggttcggtaggaagccagtgcatactcgattggtatttctgaggtgatggtgaaaggaattgggcatgtctattgggttcgatatttatgatatttgtttgcaatttgtgacctgagtggctgcacatgcgatgctactgcacaattatttttatcctgtgacttccatgatgattgagatgaagcataaaatcttttgttaggttagcattgtgttgtagcttcatatttgcaatgatctaggcaatggggttgctttatggatgcttcagaatcaagtttcctcttgctacacagtgtgtaccaacattagtgacttggctctgacggtatggtagttttgatgcattccctgaggctagggccagcagtgaactctgaggcacccatgatattttgtctattttttctaatcaatgaacttcgtcttaataatcatcatttgtggcattgtgcacacattaggttcaaatggtttgaattggtgataaagcaatctgctggataactaggtgtgactctgtttgtggattattgtggtcttgagtgaaactcgaactcctggaggttcagtgtttgttgtttaatagtgcagagttgttggcttacatcccccacccttattaccattcttttgttaattgtatgttggcaattggttgaaattactcagttctgtgtcttcctgagtgtgtcaatagat

SEQ ID NO: 37280 - DNA, 670 bp, Sorghum bicolor
  Intron number 1 from transcript Sb03g037840.1 (locus Sb03g 037840) derived from phytozome v7.0 (chr-ID chromosome_3; pos 65775107 to 65775776 reverse strand)
gttggacgtggtaattaccacctacaagataagaggtatggaaatcattctgctgttgccatggaaccatttattaggttacaaatcatcgaaatgatttccgaattttgatgtttagagcatcatataggtgacatttctatgtgcgatcctatcagtacgtaacttgttttataaactttccctagatctttcattaaattaaacaaaataagaaatacttcggctatttttttacaagtgtttgaaaccagcttatttttctatgtctacccttgtccctcggatgaacatctaactacttgttttaggtgttttaggttgtttgtggtgatccaagggtgtagagtgctgcttggttccaagcattttaaaaatagtcacgcccaaaaatatatatatgattaagaagataccttcttatgaatatgatcatcttctggtagctgtgccgctagattgaaaaactaatacaaatatcagcaaaatatgttaatgcatatagtcgcggcatcatttttttttctgcatatagttttcataatcctatccagtaactgtgcgagagcccttatgcagcccttgtatttgcatacaaattgcttattgcttatgcccattctccttttcatcagaaacttctctttgtaatttgggatcaagcttgtgg

SEQ ID NO: 37281 - DNA, 720 bp, Sorghum bicolor
  Intron number 2 from transcript Sb07g001640.1 (locus Sb07g 001640) derived from phytozome v7.0 (chr-ID chromosome_7; pos 1910491 to 1911210 reverse strand)
ctattcgaacaatctactgaggtgaacattcctgctgggacaaagctataaagctacctgctaaacatggtggttttcatttgcatatacaatggctatttgatactagaagtagtatacaaatatgcttttttcttgcaacctgtaaaatatttcttatagaagggtctggatttttctactgtctgagacacttagaagcatgaagaaaagcctaacatgaaatcgatctacaatatgggtccaaaagttcttcaaaaactatttgtctagcatgtcacactaaatgtacttaaaagattcaaaaaatatcctggcatttgcatgaccttgcttgcatagctttttttttactgacattatactttttcctggcctttagagtgatgattgatgaccttttttctctttcttctagcaatatgcgtatgaacttgaacggccagacgattgatatcttgccaaactaaatgtatgaagtatgagctattagtttctgcagaagttgctgaatgtcaatacagataaggttacaccttactggatatttaatgtcttaactcaaaaacagcctgcatttttcacatcattaatttgttgtaatatacctgtcagctcgtgtgcatgacagtatgagtaacagatcctgtttttctgcaaacaagtagtagaacatattcttatttctttgtcatgaatcaatttattgttacctgcaga

SEQ ID NO: 37282 - DNA, 947 bp, Sorghum bicolor
  Intron number 1 from transcript Sb03g046470.1 (locus Sb03g 046470) derived from phytozome v7.0 (chr-ID chromosome_3; pos 73581096 to 73582042)
tcatacaagtttccgacgacggccacggcatccgggtatgctcgctaaaccctaaacccctgaaaccgacccccacttttctagcgtcgagtagttgtaggagtgtgagtgtgactgttagatgctattgttgccttattatgctatccctgagtacgttttggagcggttggtggattcaacgaattgccaagcatgaatgaggaacgaaccattagggacagttggttctgtgctttgatatatttgaaatgttatgtatgtcaccaaattgcaaacaatattaagagaacaaaactataaggatataattacccctgttaggctgaccaggatgtgaatgactaataaattacgatggcacgattcaatttgaactggccccgctggtccagcgaaaatatcaggatacatcaagttgtgtcacgttacatcagattgcaccatctcattttgatcagactagtctagactagatgctagagactcatatcgccaatgtgaagactctgcaccattcactcttaaaccacacactctttgtctttgccggaagtctgcagctccacagatttgctttgtccctccttttggcgagtaacctttgcaccgtcgtcgttcctctttggacatgatgttgcaacaattttggatgctactcctagtcctataagtcatatttgaccacaagaggtttgttgccctcgaggggcctgctgcctatcttaggataagcatattcattatgtggtctgttaagactttcaagatttgttgcattttgaggggccttctctcaattataggatgtaagtgcattcaatatatgctctgtttatattttcgttgtttcatctaaaacatccaactgaaaatgtacttataagtagctaatttatttccatttcacagtttgaggatttgcctatattgtgtgaaaggcatac

SEQ ID NO: 37283 - DNA, 544 bp, Sorghum bicolor
  Intron number 1 from transcript Sb01g030086.1 (locus Sb01g 030086) derived from phytozome v7.0 (chr-ID chromosome_1; pos 52322524 to 52323067 reverse strand)
aggagctatacaaagtaaggctgctgatccattcctcacttgcatgtgtgtcatgctacagctgcatctgtttagtttcctgatttgtgttttcacttctctttctgtgggaaaagccatgttcctgttcgagtgtgtgcgcgcgcgcgtgtgtttttggttgcagctgctgatgtgctttggctgcagcagtgtctgcaactacaagcccagccagcactgttgaatgggacctttttttgctgttgacagagtcttcaaattctaaatttatgctggaaaaatttatctaattttgatattgcttgggttccaatattttgcaacatcattactttgaatcacgtctattggttgcctgtagttccaaaaaaaaagatagataactatcagtatatgaacacttctcatgactatctggtgaatgcgattcatattttagttgtgtttctgtgagaaaaagaatatatgctattacaaagtaaatgaccatgggaagaatttgccaggtaacaggtgacggggaagaaaagtatcttatagc

SEQ ID NO: 37284 - DNA, 857 bp, Sorghum bicolor
  Intron number 1 from transcript Sb04g037400.1 (locus Sb04g 037400) derived from phytozome v7.0 (chr-ID chromosome_4; pos 67048113 to 67048969)
gcgcagcagctcgacatccccatcgtcctgctctggtacccccactttccttggattggattggattgtgtctgtagggcggccgcggtaacgttagtttgtaatttctccgacagagcgatcgtgttcgtcagttcgtgtatgattgcggggttagcggattttgtttgttggattactaggcagtcacttctgaagtgcaaatttagcaccttgggtgagtgaaaaaggacaattttgtccatttgctcatagcttcacttacatggcctagtttggtgtcattgcggttgaggaatggatttcgtcggcgtattgcatggaatgataaatgcatgtcagtggccttttcatgaatatacctttttgtctgttcctgatttccatttctatctgcttgtttctactatactggcagtagaactgttatttatggctgagggaaaaaatatataaatgttagaccaaacttcatttgttttttttcttcagtgcatgagttgcagcctatggttacattatgctctcctgtagtctctttaccatgtaaataaatagcactgtcattgttcaattttgatgttcatgtctctctgtctctctctctaaaaagactcatatgtagaattcagcgaaaatacttcaactataccttttttttcatttaacaagatgtgcgagctatcgtttacatatcaatttcaaacaatcaaccgtaggccctttataatatgaagaaatatgccaccgatatggaactgtattttgagtgatttctatagttgcgtctgtcaaaacttttccctattatctgtcagctcatagaaaaattcatactagtccctgtgttatgaagg

SEQ ID NO: 37285 - DNA, 1065 bp, Sorghum bicolor
  Intron number 2 from transcript Sb01g040250.1 (locus Sb01g 040250) derived from phytozome v7.0 (chr-ID chromosome_1; pos 63619521 to 63620585)
gcccaacaagcgcaagcttgccccccgcaagtctggtgcgtgaaaaaaaacagaatctccactctccttttatcggcaacattgttgctgttaattagaatcgtcaattaccaactaggtctccttatttactttctccaattaggtagaagtatgctagtatgcttgttcagagtgtttagaatgaagacacgagttgaatctctttcctttgtggttaatatgtaagttgaaagattgaagcagaattatacccatatcaagttatcaaaggaatttagttcacccaatattgatgcatagcaaatggacctggaagattattcaacttcaactttgatgtgccgacctttccttgttttttcttataatttcacttaatacagtacatctcctttggattgtgttttccatccctgaattctgctggaattgaaccgattactgcaaatttttggtcaaatctgtgggttccaaaggaggcctaagagtatgaagaacaaacctgaacttgttttttttttatttttttgaaaagttaacttgttattctttagtgcacaatccccaataaaaaactttcctgttaagttgaagttctctgggtttccctgatactgatggatgtttcttgagacagaaaatttatcagagttactgttagtgattactctactgcgagcattttttataagctactagtccctccttttgtatcgccttttggtagtacagtacaacttaagttatcaacacagtattttcttgtcagttgttctcattagctttctttcctagatttcctgttaagttgaagttctctgggtttccctgataccaatgaatgttcgttgagagaaaatttatttgagttagtgataagtgattactctactgcaagcaatttttttataagctattagtccctcctgttttgttgtcaccttttggtagtacagtacaacttaagttatcaacagagtattttcttgtcagttgttctcattagcgttctttcctccctttgcagttaagattggcagacccgggtataaagtaaccaaa

SEQ ID NO: 37286 - DNA, 690 bp, Sorghum bicolor
  Intron number 3 from transcript Sb02g029810.1 (locus Sb02g 029810) derived from phytozome v7.0 (chr-ID chromosome_2; pos 64877315 to 64878004)
aaacatctaaaaaggtaagaaactttaaccattgttttcttttcttgtttcccgtttaaaattaacacctgttattatgaatgggcccatctgttatccgtaactattttgcatgaacactgcagatatgcttttccttatcgatttattcttttttactcaaattgtctgatatttgaaggttaagagaagtatagctaatgcccccaccccaagcacatacacaccaaaacacatgcacacaaccaaaaagcaaacagaaaagaaatcaaaaaagatttcttcctagtaaaaacacaaggatcctagttttgatatttttcagggatcctttcatatgattttatgcaaactgccaatgcctatttaggaatcatttacacacttcctgttgatctgggttgcacctggccatcctaaatatgagagtggcacttcttcttcaggtgccttttggattctgttattctatttttactctgttgtgtgccactcaattgttgatatagattacattagtgtttttctgtttgccagttgccacagtagtaatttgttggtttattttcacttgaaatataagtctgtttcacctgtatctatgaaatgctttgcccatttgtatgtgtactgtttaaatggatgtctttacaatcctttttttctctgtagcaggagattggcactggt

SEQ ID NO: 37287 - DNA, 812 bp, Sorghum bicolor
  Intron number 1 from transcript Sb01g039450.1 (locus Sb01g 039450) derived from phytozome v7.0 (chr-ID chromosome_1; pos 62872052 to 62872863 reverse strand)
tcaggctgctttcaaccccaccaacaccattttcggtgagaactacacacgaacaccagtagactgttatattttcttcggtcctcaggagcctagctacaagatttatgtggtctcgctgacttgctcacaccacagtcacagatcgatcatttgtctacgtagatcgccgaggttttcgtgacaaagtccataaccattttcactaaattgcgctatagcctacgcggcggggtctctttttttttagaaaactaaattgcgctatagcctacggtggggtcttttttttaagaaactggaggggttgtttaacacccctacggagatttactagaattaaaaaacaacaaaggagtctacaaataaaataagctagcaaagctaaagagaactaaggcagaaaaaaaggggtcaactaagacccagaaggaaacaaaggtcttctgtacccgcgtgtaaaaaaaaaaggttttctgtacccgttcatatatttctgccgatttccctccttgttttagtggagtgccttttcgttttccgtatatatgcaacctgtttagtttccgtgcaaacgaaccattcgttagaaaaatcaaaacaactcgatgaattatgcatgcaaaacgtgcaggagcaataccaagctaggccaaaacttgacaatcagttaagggcagcaaacgtattgggcttgcaaatcaaattactgctaagttatttacggttcactactagactgatcagattacatacaatttttttatttttttgcagaagtcaaacgactgatcggtcgacggttcagagac

SEQ ID NO: 37288 - DNA, 483 bp, Sorghum bicolor
  Intron number 1 from transcript Sb07g020490.1 (locus Sb07g 020490) derived from phytozome v7.0 (chr-ID chromosome_7; pos 53181605 to 53182087)
cccacgccagggagattcagatccaagccaggaaggtattcgattcgattgggttttagttttacgagtagatatatgcatactagtggctggctaggctctaattctctgggttgatggaatcagatactgtatatacatgctcgcgccttcaattttagcctgtgttgttatttcttcaaaggagaattaatctgaatctgtccaatttcaaagaataatcatacatatcctctcaatatggtcgtgttattcaaaagtaaaatgtttactttgtttgctccagagctgctttcagttatgctgtattagtttctctagggaaaatttaatttgtgcgctgtatttttgtgagtgcatttgcatctttccagtttcatattgaaacatgaatacaaatccagtccatatgattatttcactcgaggaaatgtgacttggtttgcttgctgttgctgacttgctctcggtcctccttgtcag

SEQ ID NO: 37289 - DNA, 659 bp, Sorghum bicolor
  Intron number 2 from transcript Sb01g027840.1 (locus Sb01g 027840) derived from phytozome v7.0 (chr-ID chromosome_1; pos 48464391 to 48465049)
agcggcttcaggactcaagatttttgcaatcacttgtatgtattattctcgatcacatttttcttactgtcattgtttctcttcacagcgaatttggtttgtttctatctatataataacaagatatagaacaacttaaacttgattgtgacactatgacccacacttccgaaacgaaccagttcatttgcaaaagctagatgaggttctcctcattatgtagacttgcagaactacaacctgaaagatgcaccctgctcttagatattgcagcacacggtaccagtaagcattacctgcactgcatgtcatgttgcagtactgtatgatttcaggctccagcttagcaatctgcagccccagtaaacaaaattttaaaactgtgaggtaccttaccaattcttttcattgctatatatatgctgtcaggatcttctgtgttatgtttagctacttatgagatatgagtgcagatggaataaatgctacagaaggaattagattccaataggtccatgcaaaactcgttgatttagttttaccttgcagtccaatttttcattgcaaaacattaaattggaacagctacttttatacggttttgattttgcccacttttttcagttggtggctggtttgctacccttgcggttgcagga

SEQ ID NO: 37290 - DNA, 835 bp, Sorghum bicolor
  Intron number 3 from transcript Sb05g002130.1 (locus Sb05g 002130) derived from phytozome v7.0 (chr-ID chromosome_5; pos 2295538 to 2296372 reverse strand)
ggttcctcaagtaagtactgataatctgtcttttccttccctagataaataaactgcttagatccatcagttgattgcatgacttttcaccatgaattcatgacagtctcctggcttagagccttgatcttctgtactttctttatgaattatcagtgtagatcatctaataaaaactagtatcagatgtgtattgtgtagacttacatatcatttcttcaatttatctgttaatatgtggtacaacagactaatggaaagtatcacccgccacatagtaaactcagaagttcttgttaacttatttaacatttgaagcattgtactagtttggaaatttatgcttggagaacctttagtattctcactcatgtgagatttgcaagagctttaattgacctgagctctgttctttactgtctcatagccttgaggactgaaaccatctattcatataaatcaacctttctttattctcgagcttactatctcattggtttcttgcgtatgaccatgatacttgtagtttgctgaacattgaagacaccaatgggtgtgttagttttcaccttttttggaagttttaatacaagaaaaaaacaactatgtttgtcccaccaaatactaagttgtggttttgttgctaatgtacttagcattgctttgatctattggttatgttggcaataataatggtatatacattgggagttatccattacatttcatgttccgctgtattcttttgaggaaaaactcgccttcttaatactgttttcctctcatcattttttacaacaattttctcttcctgtatcctgtatgtctttataga

SEQ ID NO: 37291 - DNA, 708 bp, Sorghum bicolor
  Intron number 3 from transcript Sb03g040235.1 (locus Sb03g 040235) derived from phytozome v7.0 (chr-ID chromosome_3; pos 67841799 to 67842506 reverse strand)
cgctggtatgtctcattaaattataatttgtgattgtatggtaaacattttggataaaaaatattagaagcccaataccatgctgcttctgtttctttgtgctcctgcatcttgacatcttctctctctttctggataagtggttagctacaaaaaagatctttttaggtgaacatgtcagaccttttcagtttagtttctgaggaaggcttgagtaattgcattgggatcaattcataagcggtagggccatacattaaaattaaccatcaggattttgatgtgcgcaattactgatcttggtatacaagcatgatttatgagccttttctttagactagttaagtgtgagttgacctacatcctgatgtctctcttcttcttatgcactgagttatgtaatatacaaatttgtacaggcaacatgttaaggccacctaaaatcttctagtatgctttttaaaatttcagtatcctgccataatagaattttgtcgtttccctttaggttacttaaaccattcatttatatatttatttaatctttttcttaggattgcttcaattttagatgcttaatatgttttatgccaccttggtctgctagattatggaccactatgttgcttaaagctaccaacacttgcaatttttcttttgggcctctttttaggttgacaaacaaggaccggttgtacttagtcctgc

SEQ ID NO: 37292 - DNA, 644 bp, Sorghum bicolor
  Intron number 1 from transcript Sb06g016140.1 (locus Sb06g 016140) derived from phytozome v7.0 (chr-ID chromosome_6; pos 44564187 to 44564830 reverse strand)
gtctgctgcgaggtccgactgtccgagtctccgaggtaattaaaattcaaacccctttcaaagtctatcgagtttatggtaaatgggcctctgtccgatcccatgaagttggcttagtattgatggcacaaaaccccccatattatgttgatgctgctgagtgacctagatagatctgttcatgaaattatgaaggtttccacaatgatccacatgtttagctgctgctcaaagaaaaggtgcataggatcaccactcgtgtattgtatctacaaaaattttagaactaaacaaggccataattcagctattaacggcttgtctgttaggaataagtaatcatatcagctactctctccgtcctaaaataaagttcattgtgacttctaaaatgtatattgagatacaatgcgttctacataatgactatgatttgatttggcaaggtttattaaaaaggaagccatgatttgaagagaaactctataattggaataatttagggtacatacgtcatttgagtgttcccgtaagctgtcttaaaatttttagaacacactgtattacaggacagagggagtatattttgtttgtcatccttttattttttttccttttatcataggaaagcacctcaccccaaa

SEQ ID NO: 37293 - DNA, 1036 bp, Sorghum bicolor
  Intron number 1 from transcript Sb03g044910.1 (locus Sb03g 044910) derived from phytozome v7.0 (chr-ID chromosome_3; pos 72210336 to 72211371)
catcgcctcatcctctcccgcagcgcctacttcaggtgagctctagaatgcagagccttggcttggcgctcctgccgccttggattcattggggattgaagtccctgttgcgatctgatagtctacaactgctccgagtacgtaattggatttctatgtggacatttttgtcttttgggatgtctccatccatttcctgtgaaatttccatgtgttttgatccctgttaaaatgtttaatctaagaatattgtcaagtgattaggattttttttttcagaaaaaaaattacagcctgcaatagcactcctattaaaatcttatactcttacagaatacgttagatcattttttttactcttaatctgtatatcatagacatagtgcatccttcaatgttcagtttcctctcaatttccatctatgccactaatcatgactgaagctcaaattgatttaataaaagtcagtcactactcactagatagtgtttctgttgagatttcaaggtcagaacctgtggatggaggcataagcatcaaccaatagagtgacacatgaaaaatgaaattgcagtgtcctccctttggtggtcctatcagattggtgcacacatatttccctcatcgcttttaggaaaaagttatttagagacctctcttctatcatatatgatatcctgatggttatggtccctgcatctttgcttggtacttgaatgggactttggtcctctgctcttgtagttaccatgtatatgcattgcttgcttatcacttagccaaaataataataataaaatatgtaaacttatatagaattatgatagaactatccaacattgattatgttccattgcctataatcgttctctgtgtgtttgtctgtcaacacataagtcactctctttctgcagccaaacctttaccttttgctgtttccttacatcatttccctactagcacatagaatgttcgtgtaataataaaataagtaaaattcttaacaacttctgtataataatgattggaaggaat

SEQ ID NO: 37294 - DNA, 817 bp, Sorghum bicolor
  Intron number 1 from transcript Sb02g041060.1 (locus Sb02g 041060) derived from phytozome v7.0 (chr-ID chromosome_2; pos 74943107 to 74943923 reverse strand)
gccatcgccgccgagtgggagtaccaggtcctcatcccatccctccttttcacctgctgtatacttgaaatggtccgacaacatcaagttactttagtgcaatggaaatctctacagactgcaaatttcgtgttgacttaatggcttattcatgcatatttgcaagtaatttcaaatggtttggatggaataagtatctgattagcgcccgattcatcctctagcttatcagttagtccatcccggagcagtagtgaattatgagagttttgtgaccattagttctgcatgtgaaatgaattgagtccagcctttttatcttagtatccagaggggttaaagaatgacctattttgatgatttctccaggtctcgaattctggagtggcctgtgcatatttgcatgaacttcaaattattttgatggagacattctagttagctccttactagaccgtgatctcgaggttttgttcatccaggccagtagtgaagtgcgagctagatagtgctcacttagtattcctcgtctcatgtgcaatttgggttgatatcactctatctggtgggtttgaaatgtgtacactcaaattacacaagtttggctgggagacactgctatctgttccttttgtttcttctgggtgcccattaataatcaaccagagaagttgcagcaagttgctttgttttctggtctaccaccttgcatttatatatctcaattatcttatttgcagatgttatatttcatttattttcttaatttccatggaatagataccgaacctgattatcttgttatgataggaatcag

SEQ ID NO: 37295 - DNA, 849 bp, Sorghum bicolor
  Intron number 1 from transcript Sb04g009890.1 (locus Sb04g 009890) derived from phytozome v7.0 (chr-ID chromosome_4; pos 12584632 to 12585480)
gtcgccgtgcctttctcggaggatcaagcaaacgggtgaggcgcatcttccttgttccacttatttcgttttcctagctcgcttcgggtagtgtcagtaccctggctatcagtgtgtggttagcacatttttggatttcgcatgaagttttaatgagaactagattggcctacgtaaggtcggatttatagagatcagacaaaatcgaaagcagtgtggtggtagactggtagtgtggggctatgaagttgggatggatgtcgatttgcgttgggaaacatgtgctttcaactacctggtgtatccagaagttgaaaaaaaaacgatggattcttttgatatgtcaccagaatgtggaacagacactagtgaggagtcgcgatgcaaaaagtgtattgcagtttgttttatttgggctctgttagagtttgtgggaattcctaacctcagctttataattccaaaagggaagatattgcataagtcagatttgatgaattgctgacacataatatgtctgttgatattgagcaatgtaatgtgaaatttgctatgtttagtatgaagtaaattaattcgtatgttcaatcagtaccagaaaccaagtagaatgaatttcctataaacatagttcacaagttgtccttccagattagaagctgaagcgagtcttgatttgacgtgcgttttgttagtttttagtcttaaactaaaaaaaaaacaaaaacaaaaaaaaacaaaacaaaacttttctaatgatgactgaaatgccatgttttttcttactatcttttctcctttccttgaccactcttgatttcttggctttcagaaagtgagattgttcgg

SEQ ID NO: 37296 - DNA, 755 bp, Sorghum bicolor
  Intron number 1 from transcript Sb06g030100.1 (locus Sb06g 030100) derived from phytozome v7.0 (chr-ID chromosome_6; pos 58511071 to 58511825)
ccgctatccttagttgaaggaagaacttcacccaggtattaagtttcctactaagtttgttcgttggttttgcttgttcattagtgtgtgttgacctttagtaaggagcaagtaaattctgttctgtggcttctctttgtgtggataagaggtgatgatagctggtgttttgttagaaattgacaaggaaggcttcacacttttttcttggaagcagcaagaaggcatcacactagaacttgccaaatattgcttgtttctctcttggttcctgctaggttgaaacctgaaagcaataaggcatggcttcctgggtctaacacatgttagcttctcagttgctgtgttcttctgaatatgactcatgactgtttgaactttagttaatcatggctcaaaatttgttgttgccttcttactctggatgactgcaaattgctacaaggatacaaaacgaataaccaatcatattggcttctccagtaagtctggaataacacttctgaacccatgtttatgagaatctatatattgtcacccgaataaagcaatcacaaataaaagtaagtgatcaaacatttgtatttttaaatgagcatatctttgttaagagtatttttctaagaccatatcttctttcatgttcattcaacactagacaacctaagagtatatgctgaaccttcaagttgcacgaatcgttcagctagtattcttgttttggtaaatgaattactactttatgtccgacagac

SEQ ID NO: 37297 - DNA, 989 bp, Sorghum bicolor
  Intron number 1 from transcript Sb02g042010.1 (locus Sb02g 042010) derived from phytozome v7.0 (chr-ID chromosome_2; pos 75765785 to 75766773 reverse strand)
gtgctcgaggccgacatccagcacgccaactcgatgtgagtagtagcgaagctcgcctttcttctcgcgttctgttcactcacttgttcagctgagaggacagagatcgtctgttactgtcctttggccgtgttcccaggtgttctgagctcgcacactgcgcgtacttactgctagtacctaaccgcagattgctctgctgatttgttttaggacagaattgcttgggttatttcaggtctggaatggaatctaatggattacaaattagatcatgggacatggctattcaccttttcgttccttgatcccaaccaaaatctctagattagatatgatgcgttgttgactatgacacctatataagaatgggacccaaacaaaacttttatgcagctatatacaacacttcacttttgtagttttcttgtgtttgggtataattagtatgtgtaaatgacttaagcttgctgccagtagcttctcgcactgccacctgtcagcaaatctgttacttttttggctaaatctccttttgttggtgaagctctgctatatgggagcccttttgagttgccatttcagaattcctattgttgttgtgtcaaattcatcttcgtttggcctggaagaactgtattttacttatagcactgggggaaaaaaatcctctttacccatgcacttccactcgagtggcatactggcatctgttgtctcttctttattgtcatcatcgtcatttggtaaagatcttgtgtctgcaaatataccagccaccatgagacctaatatcatttggctaacaaggctttaatgatgaatttagctactgttcatgatttgtttcatggcctagtcgtatgagcattagttggcctggcaagtcatcatttagattctctccatggcttcagtacattacccaacagttcatcactgatcattttgtttctaaaaatacagtgcttctgaatttcggagggaat

SEQ ID NO: 37298 - DNA, 378 bp, Sorghum bicolor
  Intron number 3 from transcript Sb01g032420.1 (locus Sb01g 032420) derived from phytozome v7.0 (chr-ID chromosome_1; pos 55313391 to 55313768)
ataacatacgccaaattgagctggattctatacaggtgattgttttaggcattttttatcacttttctctttcttgttaagtagttaatgccattcatgctttgggcaatcaaatgctgatagaatctcaacctgatttgtggaataactttatgttgaattgatatgatcattctcttaatcaaaattttatgctgaatcaccaaccagttgttcaattgtattgaagttatgtgtagacaatggacctgggactcctgagatttcatagcgctcctgaaaaagaaattactagtggttattgtcttggcattaagaagttctgtcttccttttgtttgtaggattacattaaggaaagtgaaaatctagtttctct

SEQ ID NO: 37299 - DNA, 678 bp, Sorghum bicolor
  Intron number 1 from transcript Sb04g037230.1 (locus Sb04g 037230) derived from phytozome v7.0 (chr-ID chromosome_4; pos 66917148 to 66917825)
gggctgctaacagtatgtgcagagctttttatttacacctagtatgaatacatgcatgcaatatattggtaggcaaacagattatttcatcaaaatgaatgaactttaaattcctgatgagaagctagctagtttgtactagctctcttcaagtatgacctgttgtgttcattatatagaacatatataccatgcatgttcatgcatggttaggaagaactcttcattctagtgagttttgacgctcgtgcttttgatgaccatgactcaatttaaccaagttcatgtgtagataatcaaagagtagtaacaaattcccacattaaagatgcaaattatgataatatatttcataatgtgtctaattaagcttatttgatatcatgtttgttctataaatttggttaagcttataatagtttgacttagaggaactgaaaaccatttatatttgaggacggatatatataatacatggaatcaattgccacatgataaatagtatgatctcaatttcttgatgcacttcactatgttcatgtatatactgtataaatatagctacagtttaggcgatgcaattgtgcttatttgcttaaaaaaaaggagaaaaaacaacgtacgtgcgtccatggtgacttaggtcaagcaagggagaagaagaacaagggcaaagca

SEQ ID NO: 37300 - DNA, 699 bp, Sorghum bicolor
  Intron number 1 from transcript Sb05g021040.1 (locus Sb05g 021040) derived from phytozome v7.0 (chr-ID chromosome_5; pos 51535416 to 51536114 reverse strand)
gcggtgagtgatggtgtttggatactgctgcgtgtgacatattcagttgttttatctacaacctgttttttttttactcagttcgtttccgattgatatgatctgcacattttgtcgatgttggtcattgttaccttggtcatccattccatcatggaacagattttctcccttcctgaataaacgagatgtaatggaaatatggaataaattaatgcactgaaatcatacatacatgagatttattcagaatcggaaagcagacactaatgcatgcagtcaaatctcgattctactaggaaacgaagcccccgtcatcatacacatacattagtaacagcgggtgtgtttttagctaggacgacaatcggatccatgagattttcttacagtgccgaacctgactgacgacgcctattcagctattctttatcactgtgtattttccaactttgcactggtctgcagtctgctcaatgcacaaagaagaaaccgttaataagtagacaaaaacaaaatagtagtcaattaatggaactgaacttgttggtttagtcccaggatgcttgctaggtgccttgcttcagtttcttcatcaggaagatggtaaaacatgcataagccctgattagctgatgatcctcatgcatgtctgctaatgcaggtccggctggaccctggctatttgaggataggagt

SEQ ID NO: 37301 - DNA, 552 bp, Sorghum bicolor
  Intron number 2 from transcript Sb02g009470.1 (locus Sb02g 009470) derived from phytozome v7.0 (chr-ID chromosome_2; pos 13558560 to 13559111)
ttgaaacggtataataatcatccctcgtaaatcttactggagtacttcacctttatacttatattgtaattatgttctgataatcaaatataatgtcttgtgtttgtatgttcttctgtaaactctaaacattggttaatatcttaagtttgccagatagtatgtaactatgaaattgggtgctattttggctacatatgtgcaccgttttcttctaggggaaacaaatctctttgtggcctcatcaatgcagtgtgtttatagatttttcaatagtatagcatacactatgggaatttttgaattgtgtttatataagagcatctccagcagtactacctaaaacagactacctatttctctatttaggtattaattttccatcctaatccacctcaatacatgtgcattgggatggatggtatgttgcagccaaacaagccttcagggttattatgccaaagtgattaccaggttatacttcagattgtggtgattatgtaattatatatttgatgcagtggtgaaggaaagcttgaaaagcagttccgc

SEQ ID NO: 37302 - DNA, 475 bp, Sorghum bicolor
  Intron number 2 from transcript Sb03g032900.1 (locus Sb03g 032900) derived from phytozome v7.0 (chr-ID chromosome_3; pos 61317261 to 61317735 reverse strand)
aatcggtaagtacttccataaatttgaatttactctttgctttagtttcccccgaggatttgcagttcatttgtgcaatccttgtttagattaccccatgtacgcactgaagctagcttttggaattctacttagtgtttacttctcagaagtagttactatttttgtgcaattcttgtcggtagctgtttttctatggtcaaactttgaggttaatgccacttgtccataacctgaatgcacacaagggcatccggtttatattttcagttgcagaggttgaaattcccgttactagttactgtttcttactggatgactctaaaaacgtgcaaactgacgcatgtccttgtgttttccttttttttctcctttatccatattgtatattttgtttcttccttcccctttccctgacctttgaaccatattttttttagaaggctgataacaacagatattcaactggggagga

SEQ ID NO: 37303 - DNA, 931 bp, Sorghum bicolor
  Intron number 1 from transcript Sb01g047240.1 (locus Sb01g 047240) derived from phytozome v7.0 (chr-ID chromosome_1; pos 70329990 to 70330920 reverse strand)
agtacccgctcgtgacacccggtgattcctctctacacctttagttgtatatgtgctcctgagattttttatatagatctaggtatttgggtgatcagaggagtatttatctatatcttttttgttttgatagattgttaatgtttgattgaaatgttctgtagtttgtttagcatcgatagatctgtcttctgcaactctggatttggcgttatcaagtaggtgaataaatttattgtacatgatagttccctttcagaagatcatcctaatgcatgagaatggatatagaaagttttgaaacagtagggctaggctgccattaaggaatataactcattttttggtaggtctctaaaggaacaggttgaaactaaataatcagttttgttgtatcatcttatgccggttcaccaaggattttttttcacttcatctataaaagcatgctcatgatatgagtcttttaattgaattaacactcccaagtcccaaagattaatggaagtgtcacgctagagtttgtaaataagattgtagctagttttactatttactcctggccactatttttaaattttctctcctgctttttttagtttggaaatagtgcaatcagaatggggaacagaatttgtcccacaaagaatactgtggtcttagtcaactaatactttcgattggttttcattgagcttgggcagcagattattttttttctaaggctgcctacttgagtactatgcacctagcatgcatttgtgaatggagcttgaagccatgggaacttgctactttaatcttgtcagggtttacaatagctgtttgttactttcactcatttacttatgtcataaattgttgacagctagtggaaatgtattagtttatgaaggtaacttgatttccaaattgtttgcagacctcctgc

SEQ ID NO: 37304 - DNA, 1016 bp, Sorghum bicolor
  Intron number 1 from transcript Sb02g033760.1 (locus Sb02g 033760) derived from phytozome v7.0 (chr-ID chromosome_2; pos 68290773 to 68291788 reverse strand)
gcgacccctacgtcgtcctccagtacggcgcccaggtccatgtccatccccgctccgctcgccttctccctcttcctctgccatctggtcccctttcttccccccccccccccccgcccacagcattgcttggctggatcccccgtgatcgacgggccccgttcgcagtgggcttgaggtggggattgggtgtcgggattgtcgatcttcacccgatctcctagtcctaggtgctcgtctgtctctgtcgtcttctatgggctgcgaatctgcccctgttacccgaccagccgttgacctcgacgcaaagggttgctctactgtttttcaacgacgactgaaacggggatcaaaatcctggcaatgaactttcagttctagcttgctcatgaatttgcgtaaccaatgtccctgcgaaagggctatcctgcactttggggaatgttgaactgaggggcagagcaccacaccccgtaacaacttcaccttgaatgaaataagaaaataataactgctaataacatttcttctgaactagggattgatcctgcacaagtttgcgagaagagaatatgaattgaacctgtacttaagcagtatctctgtgatctgcataatgattccaggatcaaaatatttttcctggggcaattcaagatattttactaacatggctttttcttagtgttacccctaggctgacgattccaatgaatatatgaattatagtttgacgtttatttatgtatgattggcttgtctggtgtcaagtcaaccactcatgtcgactgttgctgaatgcactattgccaactgaatacatgatagaatgcactactaaacagttttgtaggattttgaaagctcttgttctattttatccagttgacttcagttcaagcgtcatggatgcccattgaatttatggctttctgttcttgttgttcgtgtcatggaagttctcttttgctgttgttacagaaggtgaagactagtgtccagaagaagaatcccaa

SEQ ID NO: 37305 - DNA, 983 bp, Sorghum bicolor
  Intron number 5 from transcript Sb03g025460.1 (locus Sb03g 025460) derived from phytozome v7.0 (chr-ID chromosome_3; pos 51190844 to 51191826 reverse strand)
actttgtacctcgccgcaccgttgcttgtgagaaggtatctgttatctatatctatatctcttataaagataaaccccactagctatttctcttgccatgcaaagtgtccacatcagcatccactagaacattccactagtacattcaactatctcgccatgcaaagtgtccacatcagcattgactaatacatccaactaacacatgccattatatcttcattcaagctattcacattagcaaaccacatcatttattaacatatattgctgcattaccaacactatacatatatattcttagtgattaatattctaacatatttatattacttcttcataccagcggcaacgcgcggggaatcctcctagttcttttcatgtttgaactaatccactagtgggttctatattgtgtatgggtgctgtagaatagtttgcaatgctcagatctattgatttgttataaatttaaattcaaatttattaataacaatgaaactcaaagtaataaccgtttcccagttagatggacatgtatccttgaaccttctgattcttgtatgttcatgcattcaatcaattacacttggcaggctggagctagctcattagtttatgcctttgcccttaggctatgcttagacatgagtttaatgacagcaccttgtgtattgtatttgtcatgctaagcattggctgtgtcctgtttgtactatatatacaattctcatacatgatgcgtatcaggcctgaaatattatttactttgaccatgactttacattattattttgcatatatgtatgttaatgttttaagaataaataacataccttgaagatgatctgtgtctttctttttctgctgccatgaagatgaatggaaatagaacatgtctctgattggaaaatgacttctaagaactgttttacttggcatctgcagatcctggaggaagagaaagttcatcagagactgac

SEQ ID NO: 37306 - DNA, 262 bp, Sorghum bicolor
  Intron number 3 from transcript Sb01g005450.1 (locus Sb01g 005450) derived from phytozome v7.0 (chr-ID chromosome_1; pos 4489264 to 4489525 reverse strand)
gagggaggcaggcgcggccaagaaaagcagaactggtcagttaaagcatttggaccacgcttctctccctttctctgtcttcaggcatcaaagattgtagctaccttccttttattttgccagagctcctcttttcgataaactgatttcattggtcgttcaaatagtctttgtctatgtgttttttttaccagttcatctgattattctttgttctgttgttccttaatgacttgtagaccggtcgtcgaagcggagtagt

SEQ ID NO: 37307 - DNA, 593 bp, Sorghum bicolor
  Intron number 1 from transcript Sb02g038370.1 (locus Sb02g 038370) derived from phytozome v7.0 (chr-ID chromosome_2; pos 72657067 to 72657659 reverse strand)
atctccaagggcaagaagggaggcaagaagaagacgtgagttatctctcccccttatcctcttccgtctgcggatcggaaaccgggagtttaacattcagagatggttagattttgctcttatggaccttttggtgcgcagatgaccattcattactctgtaatgttatgacgtcacatgatttctttgagcgaggacactaggcctgtgatatttgttgtgcccatctgttcaatgctaaacctcggaactgcttgatagttaatttttcttagttgtgtcgggttgggtgcagcaacttttgattgtgactacctgaaggatagtacagaactgctgaattttatccatcgttacacccattctaatctgaaattgtccctcgaatttcactgcatctggtgtcgatgtatataagctaagttctgatgtttttggccactttaaaatcctttttggctgtactgaacttaatgatgcatggcactcgttttcagctgttctttggcctcctctggccggctgacccgttttcttggtgtgtctgtttctcttgccttgcagcgtggatccgttcagcaaaaaggattggt

SEQ ID NO: 37308 - DNA, 305 bp, Sorghum bicolor
  Intron number 2 from transcript Sb06g015440.1 (locus Sb06g 015440) derived from phytozome v7.0 (chr-ID chromosome_6; pos 42781246 to 42781550 reverse strand)
ctctgtggaggatctaaaaacaattctggagtcaggtagttacatataaccgaatacacattacaatcttttggtattcttataattaatttatcttctttctatcaaaagaagacatctagtttggcacatgcttatttgtagaatgctgataaggttgatcatttaccaagtgtttgttaatatgtttttccgtgctgaaatgatcactgcacaccaatatgctcttatgatatgatgctttctgtgtataattaatcaaatttcttcttattgtagttggtgctgagactgacagtgagaag

SEQ ID NO: 37309 - DNA, 598 bp, Sorghum bicolor
  Intron number 6 from transcript Sb03g045720.1 (locus Sb03g 045720) derived from phytozome v7.0 (chr-ID chromosome_3; pos 72925276 to 72925873)
tcacttgttccgacggagaaagttcatcctaaattgtaagcctttctaagtgcctgcctattagatttggctacttggttctgtttgtttttgcacttatctttataatacgagagaagtagaattgattttccataaagttttagatgaggacataatctcacattttaagaaacagtcttcctgtatccctgttctttttatgtgcttgcctgatatggaacttagcactttagcagtagtatgtacagaagatataattgcttatatcatttatattttattgatgtacttcctctgatcacaaatataagtccatccagggttgtcatgagttaatgttttaatatgcgactgccaatacctacaaatttatacacttagcactagatttgcattaccaaattctttaacttaataagacaatatatgtttaagattaagatattgctaatcaaagtgtcatattggattggagaccctgtgatctgagaaagtagctcagagttgtgcatgctctctgtttcctggtttttgtttagaatgggattgaaattcttctgatttgcaatttccatgccttatcaattctgttcag

SEQ ID NO: 37310 - DNA, 792 bp, Sorghum bicolor
  Intron number 1 from transcript Sb02g003550.1 (locus Sb02g 003550) derived from phytozome v7.0 (chr-ID chromosome_2; pos 4000718 to 4001509)
aaagcaggaagaagaaagagagaaaggagatccaggtctggatggtctgttggatcaatgtctaatggttataggcgttggttaagagaaaaaactaattttcaatcgattgacaccgagacacttcctttgcgttttgataattggtatccccaagtagggagcgttggtccttatctgattagctcacttttgattggtgctcgcatcgctgggatttttggtaaaaaatgggggatgttggctccgttcttctgctggtgatgctcaaatgtgcatctcactgtttatatgagtatgttattaacacttggtttgactattagtttgttctcatgtaaataggaaactggaatgctctaccccgtgatattagagaattcgtgactgatgaaagctttttaagcccgtgcgccttctgctggtcaacctttttccaagtctggtgctagcaattgctatgtcagtcgaggcatgccagattagcactaggtttgtggtagtactggaagatgatgagtcagcaacatgtttctggcgtgctgactcagaacatattcattgttgcacaacaggtgccatgttctattttgcaggttttttttcttctttttatgacagcagtttcttcctattggaagcaaccgatatgactgttttcggaagttgccattatgattagaattgtgatcttgtatgatggccttgctattttgattaatgcgtgttttgactaatggtttgtcactctgttcaggaggatctgtggtggtctgcttttcctattgggac

SEQ ID NO: 37311 - DNA, 1030 bp, Sorghum bicolor
  Intron number 1 from transcript Sb03g036820.1 (locus Sb03g 036820) derived from phytozome v7.0 (chr-ID chromosome_3; pos 64896604 to 64897633)
gtgttggcggtgggcttgaatcacaagtattttctcatgttttgttggattttcttgcttcttgttaagaaatgttttttgctacaaaaagtttcttcaataccaccttctcatacaagcctttgtggtatatttcttggattttccttggttcgacggttttgttctctttgagtttaactcacttcatcttgttttgtcaaagtttattattggattgttgttttgtttcttgaaaaaggataaaattaattaattctcttaattagttagatttctcatttcaactaagttttcaacaagttattcttctcccatggtctttaatcaatctttgcttttgacaaactatcgtaaaagaacttcgcttttgatatatggtagagttctaaatttttagtcttttattgttttcctaaaatgattgttttagtaacctttccacaagaaattatttccaaaagtctaaataggcttttgttttctatattggatttaattcttaggttattttttggagaggttagatctatatatggacatgttttttagaggtaaatagttagccgctagtatcatttatttgttggcatcagagctagctcgtaaactacagtaccagatttttatttgcatttttgttgggggtccttattagacccttaactactagcatggtttgccaaaattgtttattatggactatcagtgtgttttgtaaaaaaaaaagttttgtgatacaagcatccaaatccatggagacggcctaatcacttggcattatattctatacaagtctaaattaagtgtcttggtatagatctttggaacgatataacacaatagtaggtcttgaaagatcaagaatctaaacagtgatgtgctatattttcattgcagagcctttgtatgttttgtttgatgctcttttgcactaagtttcaaaataaccttttctactattgacttttagaatgggcaaatttaacactgaaagtgtcgtcactttaacagaacgacacacctgaga

SEQ ID NO: 37312 - DNA, 886 bp, Sorghum bicolor
  Intron number 1 from transcript Sb04g007150.1 (locus Sb04g 007150) derived from phytozome v7.0 (chr-ID chromosome_4; pos 7257186 to 7258071 reverse strand)
gctcgccttctaccactactggcggaagatctacggtgcgtggcctctcctccctctctccctccgtcgtcgctcccggctctctctccccccacctctcgctttcgcccatgtgttgcgtcgccgagcatgtgtcccccccggtcccggactcccggccccgttccgtttgattgctcgctcatctttttggttgcgtctccgtgatctgttccctccctgtccgctagctttccggcgcccctctctctctctctctctgtctctgtctctctcctcctgcagaattgcttccctgtgcatgtctgtttgcggccaggggctcagcttttgtctcttgttgtcagcacagccgcagcgcagcgcagcttctctctctatccaattgcgcttcccttccctcctctccggctctccggcgctttcttccttctccagactcgtcactcccagtgagagacatgtcaataatctcacctcggttgctgctgccctgccatgctgctgcaagctcttgtccatgtccttcccctgctcgatcctgcccctctgcctcttgcattcaatggagctgggctttggatcatgagcggagcacatgggagaaaacaaccagcgcagtatatacaattccaaagtctttttatttctttcttttttttcctcctccttcttcttcttcttcttcttcttcttcttcttcttcttcttcttcttcttcttcttcttcttcttcttcttcttcttcttcttcttctttggtttctgtgttcttggcaattcgcggttcgtcgatcagttagttggcaatggtttggttgattgatcgtcggcgttgtccacatgtgcagggccgaccttcttgatctggttcgggccgacgccg

SEQ ID NO: 37313 - DNA, 832 bp, Sorghum bicolor
  Intron number 1 from transcript Sb06g002860.1 (locus Sb06g 002860) derived from phytozome v7.0 (chr-ID chromosome_6; pos 5713089 to 5713920 reverse strand)
ccggcgggtggagcccgcgcggcgggcagggcaaggttagtgctgtcgtcttcgtcccgctttccttccaagaattatattggtaagaacagcttaaatatgcaagctttccgtgcaggtaaatcatgtgttgacatattgctgttgatgttgctgcttgctggaaatgtgagcaaacattgaacgaaatcaaatcgatctttctattacagctcagagtaaatttgacatgaatttagtctgtggcaattttccttctgtataattttgtggctttcccttcccatgaacttgtgacaagacattgtattagtgaacaccgcgggaagcataagacagtcttttgtcattgatgctatgacaccatttactaaggccttgtttacttccacccaaaaacccaaaaattttcaagatttcctatcacatcgaatctttagacacatgcatgcagcattaaatatataaacgaaaataaaaactaattatactgtttagttgaaatttacgagacgaaatttttgagcctacttagtctatgattggacaatatttgtcacatataaacaaaagagttactgtatcaatttgcaaaaaatttcccaagtaaacaaggcctaactggctgtgtttataagtaagtgctttcaaaatttttattcggcaataaggaaaaaaaacccaatattagaaatggacacattttgttttccagttctttcagtaattttacaaaattactgtcactctcaaaccatggtgttgtaaatattatgtaagcactcattatgctgaattcatctactgatgttcatatacatgtagaatccgt

SEQ ID NO: 37314 - DNA, 957 bp, Sorghum bicolor
  Intron number 3 from transcript Sb01g042735.1 (locus Sb01g 042735) derived from phytozome v7.0 (chr-ID chromosome_1; pos 65995522 to 65996478 reverse strand)
ggtggatcaactcgtgcaagctcaacaaatcagtatgtttaaattcgagtaaagtccatcaccggtccctaaacttgtattaatatgtcatcccagtccctaaactcgtaaatcgaccatttagatcctcgaacttgttcgtctgtatcgtctcagtctctaaacctgtttagttgtgtcatctcggtccctaaacttaaaaatcactcgtttaagtcctcaaatttgttcagttgtgtcatccgggtccctaaacttgattttaagtctcatctgggtcaaaacaaagtgatctaaaaactctatattaaaaataattcataactttttcatatgtactcgaatgaagacaaactttatatcaaagttgtagcccttaatgcgttctacaactttatagttgaaatgttttttatttaaagtcgtttaatatcacaaaatttaattttaatttttaaatttctagatctaaaaactttcaaaaaatattttgggaccccaaaagatttcaatttaaaaacttttcaactacaaagttgtagatcgcattgcttactacaaatttgatataaagtttatcttcatttgagttcatttgaaaaagttatgaattattttcctatatagagtttttagattcgccctgctttgatctggatgtgacttaaaaacaagtttagggactgggatgacacaactgaacaagtttgaggacctatatgggagatttctaagtttagggactaggttgacacagccgaataagtttaggtacctaaacaatcgttttgtgagtttaaggaccgggatgacacacgcaaataagtttagggaccggtgatggactttactctttaaattccttgcggtacttagcatgtcatgcacatttccaaattttctcagatggaattttctttttttttatttttccttttgtttgtccatccatcagcg

SEQ ID NO: 37315 - DNA, 996 bp, Sorghum bicolor
  Intron number 1 from transcript Sb05g006180.1 (locus Sb05g 006180) derived from phytozome v7.0 (chr-ID chromosome_5; pos 9390930 to 9391925)
acctgcagctggccaacgacaacagcaacgtcaacgccgctgttcctgtggaccactgttgctccggtgatggctcttccgccgccgccttgtcctcctcccatcgtaacgctgctgctgctgctgcagtatttctcatatttttgacctgtggttttttcacgggttgttttggaggcatgcgtgggaccgacaacacaaatttcaacactcatatcgaaccgatcctactatatctgtttctctactattcaggggtcctggtgtcgcatcacttgcttgtgagtaaagaacgaccacaccactgcaaaatctcggctatggcgtgctttgttgtggatcaggtgtgcgacatctttgatgtggagcaggtgtatggtttgctcgtcctgcgatcatggttgaagtttattgcagatgtcaaggagcttgtgacctctgtgtattccatcttgacaaggaaatcggtgatggttagacttcttgtgatgctgttttctgctcttgtttttggtgctttagatctggggctcaataattggtcaggcatgagaagagcgagggacagcgcaattttacacaattattatgatgagtctcatggtaggacgttacttgcatttaatcatgacaaggatagcacagttagagttgatctcagaatgacaacgccggtgaatgctgatggctctggacaggatcagaaagcacttgcacattggatctcagatcataacagagatcggtcaggcaaatattatgtcacagacaagcaaaaaagaccacagaagcctcatctgtcagaacacaagacaatcaaaactggcgtggtttggtggattgtcatagcttcagctatctttattgtggtggtggtctgctttgttgctgctctgctttggtacaagtgtaggaacagagggcaacaaaatcaaccccaagttcaacttcaactctgcagagtaaaaggacctaggccattcgaatacaacgagc

SEQ ID NO: 37316 - DNA, 936 bp, Sorghum bicolor
  Intron number 1 from transcript Sb03g008380.1 (locus Sb03g 008380) derived from phytozome v7.0 (chr-ID chromosome_3; pos 8889366 to 8890301 reverse strand)
tctaccccgacccctgcggctggtctcccatccaggtgcgtccctgcctccctgcctgcgctttccctttcgcatcaatctatgctgctgtgctgtttgatttcctggcccgcgtatgttcatcatcatgttcttcagatacacgagagaagcttttctctttgtttgttttttcggctttgccagtcctcgtcacagaccctttctcggtgctcccctgctcccctgctttgagctccaatccaaaaccgtttgcgaaagcaggatcaagtctgtagcgtccatatcgacattggttgcttgtttggggatgcaggactagtcaccaacagtcccttgtcgaatttttccatgttcaaaaccttcctcgtcccacttgcagaatttctggctttcggtagcctctgttcttcacactcgtccctgttcctcactgctgcttcaagattgtggcgctgtttcgttgcttgcaactgcacattcagttcactgttcgacgagacctctgcttgatgcctttacttgaaaatggcatgttcccctcaagattttcacatacagtactctactctctaattttagtagtatcttgttccttttgctcgctgtcatgtttttttttcgcgagaacgaattcattcctgctattatgtttctactccatctccatctggttgttactagtaaagttaagacaggaccgaatttgtaggtggaccattatgaaatgtcaccatcttagatcatcctcatctacatgtcttactgccaatagttaccactcggcgtactgttcatcttgtgttacttgccgtgtctgcaagcgagggacactcagagtgcagcgagcttgtctgcctgttaaaattcaattcaatttctgtggattaaccaactggttctttcttggatgccaaaatccgtgcagggagtgtc

SEQ ID NO: 37317 - DNA, 618 bp, Sorghum bicolor
  Intron number 2 from transcript Sb04g006420.1 (locus Sb04g 006420) derived from phytozome v7.0 (chr-ID chromosome_4; pos 6445997 to 6446614 reverse strand)
cccccattcatgtatacacatttatatgctactcttctttcatgtctttgcatttgttgctcatggtcatctgcatgactagctttgcacatgtttcctggtgaaatggtctgtttgtatattcaatgattttcacatgaaattagtgtgctggtaagtttatcttgcataggaacttaatttcacatagatgcatagccgcaggtgttttgacattatgagtttaattgactacaatgaacacagaaaattaatttgttaagtatgtgtgctattttttcttctgataaaggattgaacatgttacttgatcttcttttctctatttgttaagtgcactgttaaatttgctgctatgcacacaaattctctgtgaaaataatcatatttgttcttactgattttttaagtttgattttgttttgtcttgttgaaatttgttccttgaatacatgttggaaattgtttgtatttgttttgctttattattttgtgaaataatttcctctttattgatatcgaacttcattccattctattattgggctcatatattattatgtttctcctgtatgtctaaaagactcaaggttaccaatactcgggtacatttgctgc

SEQ ID NO: 37318 - DNA, 558 bp, Sorghum bicolor
  Intron number 1 from transcript Sb04g006420.1 (locus Sb04g 006420) derived from phytozome v7.0 (chr-ID chromosome_4; pos 6446736 to 6447293 reverse strand)
cacctgcccgcccgccgccacaagcgcaatctccggtgggtttcccgttctcctctggattgttttctttcttcctaatttgatccagcttgtagtgaatttgttttcatcatttctttttcccgattctgaaccgtccacttgttctttaattatttttttcctctttgatttcctgctcccccaagaggctgctattgtggaggagaacgaggcagtggggatgaagtagcttgaactcaaacctgcagtcctgcactgccctaatgccctttatagtttcaataaatttgacactacctgtgttatgtaatagtagaaattaagtagactgctatctgcactattatttatttattaaacaaatactaagacgtactgtatctgcttattgggttttttttctgggaacaatgccatatcagtgtaaacgtcccaatatctgtattcgtatccgtgctgctcaggcacaaacattcactgactattgtctaattcttgcattgggaacatggcatagcagcggtacaagagtgaagaaagaagcatagaaaggaa

SEQ ID NO: 37319 - DNA, 791 bp, Sorghum bicolor
  Intron number 1 from transcript Sb06g023830.1 (locus Sb06g 023830) derived from phytozome v7.0 (chr-ID chromosome_6; pos 52871975 to 52872765)
ggaaaggtaaggcctcctacgtcctagttctaaatcgaagttattttacatgtagattgtagttaaagggaaaaaaaacgtaaaatgtgggatgtctgaattttgtgtattgatcagctaccgatggagacctttttaccacatactgcaagcagcttttagatatgaaattggctaagtattggtctctccttggagtaattgaggcaaatgatattctagacccactttaattggtcaggaacgcgagttgcattgttaaaggaagttttgtggtaggagttggtgatcgtgatagtgagcaaaaatgcaaaataatttagtgttccacagtcatgaaattctgatacatgccacttgggagttccctagtcctgaaatttctgatagggacaactggagcttgatgagtaggctcaagccagaacaacattattgttgaagtgattccttgtattctttttacttcgagtcgtgaataaattcactcctattgttggcttatgcttaggcaatccaaaaggtttaatggaactttgttgggtagctcacagaaaaggagctgaagaatagaaaaagggtagaaattgtctctgctagatggtaatctactaatctgaggactgcagaagtgtttgtagctagaacaaaacaacatatataattagggcatgtcctacaataatatcttggcagtggttttcccattcctattaagcattatctggcgttgtacaagtaggattcaggtgtccttcgaaactaataatatttttcctttgaattccagt

SEQ ID NO: 37320 - DNA, 452 bp, Sorghum bicolor
  Intron number 1 from transcript Sb01g015900.1 (locus Sb01g 015900) derived from phytozome v7.0 (chr-ID chromosome_1; pos 15500682 to 15501133 reverse strand)
accgaagtagtcgcaaacgcaagggcgaaaagaaggtactgctccttccatctcaactttcaagtgtgcatgtgtttctctttggttatctgctcaacacttgtgattagtaggggggggggggggcactggtctatttaattcaatcacctctacaagagaacaaaagttagattagtaacatgctttctgatgtttccggtgccaaaaagttatgtgcatggcatatacactttcttccatgctatgcaagctgaatcaaaaatgttctaaacaaaacaagtctatctgagatggttacgcagatgagaagaattattcaacggttttcatatttgtactgttcccatccataaagtatgttaattgaaaatgaaatataaatgaataatcatattgttagaactttacttacaggaaccagaagcagaccctattcctgttcctgttcc

SEQ ID NO: 37321 - DNA, 779 bp, Sorghum bicolor
  Intron number 1 from transcript Sb01g015240.1 (locus Sb01g 015240) derived from phytozome v7.0 (chr-ID chromosome_1; pos 14742818 to 14743596)
gcggccgcccccggctccgctcctccgctcggtaggtggggcttccttcgattctgccttagacttagagtagctcttgcgctcgccgtatctcgtgtggttgtcgctagaaccgtccctgattccattcccgtgatctggttttggtcatttgatggatttatatttgtttgttgcacctgtaggtgattattaggtgttatttgtgcgttttgatttaggtttcctttcccctgggacggatcagggcacatgtactgtggcgatgtagctgtttcaatagcgtagttgccaaacttttgtgtatgtgctatatgaacccgggaacccgctttgcagcagagatttgttccgtatttctgctgccagtagtcaccctacagctaaatcttttgatttctgaattctattggtcttttagatgtttctgacacccttttgaattgaaagcccatgcactctagccttcggcattgcatagttgcctatttcatttaggtgcgcgatgcactaggagtccaggatagaacccttgcagcaaacttttgcttgtgtttctgctgcttgtcaaatcctggtatttgtgtggctgtgaacttacctggtttcttctgcctatctaatcatgttattattgtgtccgcaaacttagccttgttgcttaatacattgtcacatatttatcaggttttgtcaaatgtacatatcatcaattctgattttctttctttggttcctgtaaaatatgcagttggtgaaggtttcttgaagttgagaag

SEQ ID NO: 37322 - DNA, 807 bp, Sorghum bicolor
  Intron number 1 from transcript Sb01g013090.1 (locus Sb01g 013090) derived from phytozome v7.0 (chr-ID chromosome_1; pos 12121150 to 12121956)
ccacggcgcagcagctcagtacggtaaactttcgtcttgttctgcgattgcgttcgtgggtgtgcgcgcgcggcgattgtgtcggctagggtttagggctttgcgttgggtcaggatttaggttgtgggatgctgcgattgtatgccctaactggttggattttagataatccgggcgggttagagttttcaatgatgggaagttgcatcttctttgctgaaggaatattcaatcttatgctgctttgctgggaatcaaagaatgttggattggttctgttcgtaactgttgctgtagtttaataacctgccattgggaatcaagcttggatcttgttgggattgttttctatattgttaacaaaatattaacatgtcctaagtcctaacagctagacacaatagccctcttttattttgtttcttctgttattgtagtttaataacctgccattgggaatcaagcttggatcctgttgggattgttttctatattattaacaacatgttaacatgtcctaagtcctaacagctagacacaatagccatcttttattttgtttctctgttattgtaagcacggtgtgagatgttatacctgtagtccttttatgtgcttgttgcagcttgacgattgtctatgcctggtgaatgttgatttcaagaaattcctgttgataacttaatattaaaatgtatatttattcctgtattgtgtttggtagtcatctgtatggtgctgtttattaaattagttattatactactacaggtgttagcttggaaagtccagaggtttcatttgtt

SEQ ID NO: 37323 - DNA, 658 bp, Sorghum bicolor
  Intron number 1 from transcript Sb05g026580.1 (locus Sb05g 026580) derived from phytozome v7.0 (chr-ID chromosome_5; pos 60558516 to 60559173)
agtttcttaaccatccactggcacgttgctgcaaggtatagaaccgtggaagaagatgatatatactataatgatttcgcttccatttctggtagattctgtttttagtttgactttgaatatttgattaggttacctaaactaaattttcaagagaaaaaaaatgagaggttccaaaaactgaacacacttaaagtaggttactgaactgctccttaataaaaaaaaaaagaaaaatctttttttgtaaaggtccaaaaatgcatgacaaagtttctcaagcatacatgttgcatttcccttccatcaaatgcatgaaagtagcgtgctttattacaagtcagaatctcagatcaggttgtgtggtgcgtcgtgactagcaggcaacagtatgaaagtacgtacgtagcactatttttgtgtggctgacaaatctgacacagacaaaacgtacaacacacatttcgcactgttactgtcctactcatcatgcaacctcaatcattcacatctttattttattttcacctccgctgtgatccaaaaatttctcaaatttcagtttttcaacgcgttggacttggaaccaattcatctaacttctccttcctacgtgcgtgcaggagatcttcgtcgtgagctccgacgagaagcgcag

SEQ ID NO: 37324 - DNA, 818 bp, Sorghum bicolor
  Intron number 1 from transcript Sb04g027810.1 (locus Sb04g 027810) derived from phytozome v7.0 (chr-ID chromosome_4; pos 57696412 to 57697229 reverse strand)
ggcttgaggcgtccatcctcgcccttgaagcttaggtcctttctgctgcctctctctccatctgtatcattctctgattgaatgtttgaaatttgaatgaatggtgaatactgcatacctggatttcagagttcatatttgaatgaatatacactacatacctggattccagaatcgtattgtgtgcatgtcttgttggcattgtgcataatttgaagacactcgtatagctttagtttcatgtcattcgcacggtttatagagggttttttttttttttgaagttaaggcttcgctggagcgttcaagaaagaaattaattgaaattggtttcaaatagggaaagtggtggaaattaggaaaacgcaaccataaatttcacatgaaccgtgtaggaatttcatgtagagaaactgtgtccaattctcaatagactatactgcagtgctcctatggaacatagaaattttacatgaatcatgtagtgtaggaatttcacaggaatccctttatttttgtagaaaaaataggaaacttaaaaaaaaacagtattccaaaggggggccttaaatggttggatttgatgcaatccctgtggctgtgattacacacttaagcagggagatgaatgtacagtaatcagaatgttcacacaagtaattcaatcccataatcaaccaaaacgcccaagattctacttggacatcccagacttgcaatcaaaatttacaacttctctagaggctgcagaatttgccaatttgattaatctgatctgaaatggtttttcatctttgcagctgctactgtctgacgca

SEQ ID NO: 37325 - DNA, 928 bp, Sorghum bicolor
  Intron number 3 from transcript Sb04g010000.1 (locus Sb04g 010000) derived from phytozome v7.0 (chr-ID chromosome_4; pos 12950155 to 12951082)
cagtgctacaagatcgcgtgcgaccgccagtgtcggtcctataattttgggccctctggcgaatttatcgtgacgacctctctataaactataaaaatcttataataatataagttaattttattcataagaagaaagtaaattgaatcatatatagataaactgcacttcttgtcttttcattttttcaaagcccctgacaaatgtttcttaggtaacactctaaaattctaacatatgactttatgagtacaaagtactagagaaaaattagataagaaaaaaaacctagttcctaaacatttgggacatgaactaattcagaatcagaatcatgattcacaaatcacaaaaaataaaagggtagaaggaaagaaccagatcacatgtcatagccctcgtcgagccttgccagctggtcatcaccgttgtcatttggattttggaatagccctcgtcgagccctgccagctggtcatcgccgttgtcgtttggattttggaagactagaactcaaacgcaaaggtttcagtattatccactgcagctggtgatcacgttgtgaactagtgatcgtgttgctgatgtcgttgtgtctctcctcgcggtctcgccgtctcacgagaagtctaaaagtcgtgactcgtgatggctatgtgtggtagcatgtgtacgggcattggcggcttagctccttggctcacgacttttttttagtgatagacctgctgcatcgtatatatgtatgtactaataaataaggactatagttaaaaaatatgtggtattatatatttaggattgggcccctattccgcgagggccctcggccgtcgcacctcctgcccttcccttagggccggcactggcgaccgcaaaagagccaaccccaggttctgcaagcctggcgtcacagtcaccatcacgg

SEQ ID NO: 37326 - DNA, 943 bp, Sorghum bicolor
  Intron number 2 from transcript Sb05g004510.1 (locus Sb05g 004510) derived from phytozome v7.0 (chr-ID chromosome_5; pos 5670279 to 5671221 reverse strand)
ctggagtcaggtaaaaagatctttctgtagtagtgggcatcatagatttactctatgtcctgttgctattaaatgacatgtccagaatgttgatattgtgttaatgagtgctacaaggttaagcattaataatgtgattcctccatggttttactcttatcaccgtatataagtcataagaacctaaattgatgtagtatatgtagttattagcattcaaatccttgctcattattagtctaatagatggtcctgcacataattttcttcttcgtaggacttcaaacatttgaaaaacgaaatgtcaaaattgatgcctattttctgacttggaactatttcctatcagtttaatgagtgtcatactcctgttttgtttctgcactttctgaaacattttccatcgattgagaaaatagtggtttcccctgtatctttaagctccctataaataatagttgtgtggtgatagcactgcagattacttttcttttagagttaactgtcttgttatcgcacttcattttcactgaagtatgaccctcctaaattctactgttccatgaacacgaatatactcttggatgactatccaaattgatatatacctatttatgtatgcttaaatgctgttatgatcaacctaagctccttttttttctgtagctccagacgagatcaataacccacatctttttggatattttgtagagacgtttgaaaattcaattattatgtgtttaggttctttattatgttagaattagaattatgttagaatgtcttaacgagctctttttgtcactacttggttgataagttccagtcagtagcttatgtaactttcacctgtcatttcttctttattatggaggcagtacatgcttatttgggaattggaattttatttgacttgttttcttggccactgatttcagggcaa

SEQ ID NO: 37327 - DNA, 621 bp, Sorghum bicolor
  Intron number 1 from transcript Sb07g002860.1 (locus Sb07g 002860) derived from phytozome v7.0 (chr-ID chromosome_7; pos 3043832 to 3044452)
gaagagcaagacctttcaccccggcgacagcatcagttagtgatcacctctcacctctgtctctgtgtgagcacgcatgaaagttttttttattctaaagagcatatgctcccacttctttcatcactgaatttatattaaaaaatattccctccgtccctaaatactactatttctaggagaaaattttgtccacaaatactgctatttctactagcatactcagtccaccagcccatttaattctcctcggaacttccgtggtccaccagcctatttaatttcttctagggagtagtactttggcgcatgataattgtttgagtctgtttagttggcattaaatgcagctcattggaaccagagaaccatggcttaacgcgtatgattaaatggtggaacctaaattaattgagggtagaatggtcttttgtttgccatactaatctgtctgaaatttgctagaaatagcagtatttggggacggagggagtatataaacacatatttcaatatagatctcaattaaaaagtatgcaaatatatatctcaatacagattatacaatggtcctgtgtcctggcagcgttcacgtactcgccggagctgcacgacgtggtg

SEQ ID NO: 37328 - DNA, 714 bp, Sorghum bicolor
  Intron number 1 from transcript Sb02g039890.1 (locus Sb02g 039890) derived from phytozome v7.0 (chr-ID chromosome_2; pos 74019775 to 74020488 reverse strand)
aaaggttctctctctgtttctctctctctattgatggatttgatacattttgtcgcatagggtctattgataatttgatatcctgtctgcttgctttagtagtttagtttcattctcgtgtgactgtgacgttagtccactggattttttttttcgtatggtaggagtgagacctcgctcgcaggctctgcatccgtaaacctgaagtagtttttcatccaagagctgcgtcaatttctaagccgaaaatagcgtacttaaaattcagctagcagggggtttcgcctgcaaactgcagctttgtcggttatttttgttgagtaagtaaaaaggaatttaatcacaatagttaggagccgaaacacacagcccctgggctgcaacttcgtcacctcaccggatttttacagtagaagaaatacaagcagaacattaccgtcccttttgaacagagcagagaactttgcaacaaaagcagtgacttcggcgttctgaaactgaaacactgtagcctcgctcaaacacatccagataacacatgaatgtataatagaaggaagaaacgccaatcgacattgacgtttgatgatgattgatgagttgagcacccatcaatggcatcaatccattgcgcatcgtttatacagtactagctgctaactgtgtgactgtctttcaggggtcgagtcggtggagataaacaggaagcagcag

SEQ ID NO: 37329 - DNA, 642 bp, Sorghum bicolor
  Intron number 1 from transcript Sb01g050470.1 (locus Sb01g 050470) derived from phytozome v7.0 (chr-ID chromosome_1; pos 73562935 to 73563576 reverse strand)
tctgcacggtactcccctaccttgctcccttttcatatggtttgtactttgtggttcctggattctttctgtagcatctcgtatttggtattttcctctatgtgtttaaaccataaggctgtgtaattgcctcactcaaatttgatccccgtatgaggatcctgttggggacaaccccacctccccctccttttttttaaaaaaaaaaatctctataatacattcaaatgccgctctcctgcgttagaaaaattaatatattagctctttggaggagtacgaaaatagaaactcatcttctttgaaagtcccagatggctgtttggcagaattttttattattcttaatgctcaacattgttacaaattttaattggaaactggttgtctcttctcattacctggacctggccctgaaaactggtttgttgggccaatctgtactgtggagtgaccttgcattaggacttcttgtatagggaacttattctgcaagttcgtactttgcctttggttttgccaggtatcttaactggttttggacatgtttatgtaatataatgtagtttatgtatcatgtactccttccatattgttgtatactaccagtcttttagcttgtttgttcatttattcatgcag

SEQ ID NO: 37330 - DNA, 637 bp, Sorghum bicolor
  Intron number 2 from transcript Sb02g030090.1 (locus Sb02g 030090) derived from phytozome v7.0 (chr-ID chromosome_2; pos 65175496 to 65176132 reverse strand)
aggtactctattgatctataaccctctgaagctgtctcttcagaagtatcgacagtatttgcttcctcttgccatacttagttatccatggcccatggggtactctagcttatcatgctgtcatcaaagaatgacattgtgttaataagaataaatgagaaaccagtcacttctaatggaaagacagtttattactgctgttctgaaggcatgtcctgttaaatttctgatgactgtcatatatttcaataatctttaggcatggtccaatatttctagcatatgtcctgatataatcaagtgcatgataaatcatgtcaagttcttcatgaaatatgggaccattgaattttcaattgatcatatgtaattatctccttcatatcagaaaaaatggactttttagtcattgcctttgatttcaacagttaagacatgtgttgcctatttgcttcagtataaggattttttaactatcgaaacttccatatcactcaatgtgtccctatgcaactgttatgaaaatacttctgtacttgttctaatatttaacaactgtgtcttttaggaaaaaaaaataacagcatatttccttttattagtcaggctttcttcaaaaggttgcaagctcacactt

SEQ ID NO: 37331 - DNA, 401 bp, Sorghum bicolor
  Intron number 1 from transcript Sb01g020020.1 (locus Sb01g 020020) derived from phytozome v7.0 (chr-ID chromosome_1; pos 21959842 to 21960242 reverse strand)
ccagaggtacggaattaatgcttcggcatgcgcaatttttctttatcttgagcattcatcatgggtatgggaaattattgttgtttttgcttttgatttgaaacatgcattcgtctcaatggtgcattccgtgttaacaattattacttaaatgggtgatctggaatatggacaggatgcaagtatatatcctaagtaattttaaattcaaaatggctaatgaagataggagcatatactcttggaacatgcaggctgtgataactcctaaaagtggaatgcatttgccattttgtttaaaatgtttggttatgttatgtttatttatttatcggtagagctgaatttttcagtacctgttatagattttgaggcatttttctgtctgactctgtagattg

SEQ ID NO: 37332 - DNA, 966 bp, Sorghum bicolor
  Intron number 2 from transcript Sb02g018670.1 (locus Sb02g 018670) derived from phytozome v7.0 (chr-ID chromosome_2; pos 45447939 to 45448904)
tgggcgttgctgttgttctcgctgggcaagtccaggttggtgtttcccacttcgaatagttgacatagcatgaaggattactgtctagttcactacgcaattacatgatcaagccaagcaacaaacttttttaatgcactttgaaattttactatcagtggtcgtatcctctgtccttagatttcttcatacaaagctagtattaaggtttacaattttgctcactgttccagataactactcctcccatcccaaattataagtcattacaagaatcttggaagtcaaagcatatcaagtttgaccaaagttatagaaagaattaaaaagatttgtgaaatcactatgaaaatataattaatgaagaatctaatggtatttagttgatatcataatgttaatatcttatcatataaatttggtcaaacttgagatgttttgactgtccaagtttcttggaatgacttataatttgggatgaagggagtactattttatgctaactggaatttcttgttgtttttttatcatccacaagcatactacagctgtgttttcagtgctccatttctttcaataactaattgttcaatatttcgcgcaattctccgtgtcatatctatttgtccaatgatagtgttccaaaaatcattttatgttaactgctttcttaattccacttcacttctggatcaaagaaatgatactatcagaggcagagcttagtgaggggcaaagtgggccatgcatttcaccactttttaactgctaatgaaatactaacctgctgtccttctcccttctccttgcatttcatatcatattgttcccctctcctttcatgcccaggctctgccactggatcctacgttggattataacgtcaatctaacaacctgttgagtcttcaagagtcttacccacttacggtattgtccaaacctgcaggttgagctttccctaaag

SEQ ID NO: 37333 - DNA, 765 bp, Sorghum bicolor
  Intron number 2 from transcript Sb04g003700.1 (locus Sb04g 003700) derived from phytozome v7.0 (chr-ID chromosome_4; pos 3555157 to 3555921 reverse strand)
atttgcttgggtactgttctgtagcatctttttgttatacagtttttatgcaatttgattctttttttgttcctgtgcttccagtcttattgcctccatatcttagtctgagcttccagtatatcctgcactgatagacgtaaacaattgaaaaatattactttgatagtcgtgaggtttagctttgatttttttcatcatatttatcttccaaatactacacttaatgtaccttacctggtgaaaaagatcaaagcttattatatatcactttcttttagctttcctgttctgttcttagggattgatccttgtactgtcatcatttaatcaaaggaaataatgctcagaggtagagaaacaagttttagatatttcaaactgtcatgctttaactttgtgcaatgagctattggtgtggatactctattctacctggttgaatgatcaattcatccagttccccccctctggagtaagatttgtttgtcgggacaggcagttttatgctacgagtattttaggtagcagactatgaaaacaggtcctgaaccctatttaattttctagtttttatatcttcttgaggtatcttagctctagtttaggtagcactgataaacagtctgttcttttgattggaatgcatgaattgttaatcggcagagccatttggtattgttaacatgctgagctagcacgtgactattaaatttcctttctcatttctcaggtcctggaagaaacaactggtgacagcaaaag

SEQ ID NO: 37334 - DNA, 941 bp, Sorghum bicolor
  Intron number 2 from transcript Sb01g048670.1 (locus Sb01g 048670) derived from phytozome v7.0 (chr-ID chromosome_1; pos 71631539 to 71632479)
agagtagcttcaacaacagcgtgtcagatcatcaagtatgtgtgactttcctcttgcatgcatgtgacctattgttgtccgatgacgtttgccgaaactgctgtgtaacctttacaattattagtttttcccttttcccgaagaaccacatttgcatttattagtaagatggggctctttttgaaaagctcacaaatgctgaatgaacctcatgcatgtctactattgccctagattgtcacctactagaactggtaatgggtaatctagtgaataaatatggaatggtattattgtggagaagtagtttccaatgagtcagtggcaaaagcaaagataagagtgccatttaaggaatatttccaatgcacctgcataattagaatttgcttcgtgaatcagtgacaaaagtaaagtgaagtgcctcagcaacctgcatggattagcaaaaccgtcaataaaagcgataaatgatgcccttgttaatcacaagattttttgcttctcatatcatgaattcatgatacagtattttgatggcacttgctcctttgttgtgtgtatgtagatatcagattagttatatgttttatgcatataaaactatatattttgtaagtgtgttgttctgctgaagtaacttgatgtatgtgagttttccccagcctcccgttatatcattcgggtatatatttgcttgtgttgtgttgaaattactaatatctcgtgatctgatttgccctgagtatttgactgtggaattgcaaggacagaaacatctcacttctttttttttttaaaaaaaaagtggacatgaaaatctagaaagcgttctttttgtctgcaagattttttcccctttcagtgtggtttgctagataaaaaaaatagtattttgttttttgttcaggctgttctggagacagtagctgtcattacac

SEQ ID NO: 37335 - DNA, 994 bp, Sorghum bicolor
  Intron number 1 from transcript Sb04g025020.1 (locus Sb04g 025020) derived from phytozome v7.0 (chr-ID chromosome_4; pos 54885125 to 54886118 reverse strand)
gatccgctctactccgtctacgccgccaccaaagcgtgagttctccggtttcctgctctcgaattactgcttccttcgtatcctttgctattattaacagccgcagttgtacatgaagtagcttaaattggctcgattttaggatagatggcggtagtgaaagtaagattgactgattgagaacaaaggagcacgtctttcttgcctgtctgtacttgcctacttggtttgggaactattatagttatagcaacactaggatcggggattagaggaaacgccttcggtgtgaattcttagcttgcgtgttggttatgccagattatgatgcaatcatagggggagttagttagatgtccattcagatactagaattagttggggtactgaaattacatcagtctaggattacttgaaatgtccagatctgacgtatgatccttctccttaggggaaatgaaaagatagctaactgcaatcagtaagctacacataagcaaaggactaaacggttaggcatactaatttctgtatacatacatactaagaactaaaaataacttttgtgatgttctgttgagttggtctaaaatttccattctgcttgcaactattagagctcatggaatagttgggctgtattatcctgtgatctagtacatattggatgaagatttgaaaactgataaacaatcaattattgccatgtaacatagatgcacgcaacagctgtaaaatgagcaattcaccacctattttgtttgtgtatctttgtgttatgcactacatacttagctgaaaaatgctaacatgatggaatctttcacatcacagggggtgactgcatgtgttgtgagggtttgagtctgtacagtgtaattctttttaaaaaataactgtaattaggcagatgcgcacattcccttcaacttactaagcgcatgctaaaaataatgttatctatatttcccaggtacgttgaccaattctcaag

SEQ ID NO: 37336 - DNA, 919 bp, Sorghum bicolor
  Intron number 1 from transcript Sb02g002776.1 (locus Sb02g 002776) derived from phytozome v7.0 (chr-ID chromosome_2; pos 2914870 to 2915788 reverse strand)
gccgcccggggacccgccgccgccagattccgcaggtgatcatcgtctccatcccctccactgtttgctggtgcgcatcaaagagcagtggccgttacgaaatggaaggagaggtttagggtttttatttattttaaacttgttagcaagagaatattacagaggaggttgggacgctggcttgagggagagggatttacttctactaggcaaaaactgcatttttttgagcacatagagaacatttcttcttctttttgatacattacctaatgatgagttggagttacaattacaagaagccacatctcaaattgcaagctcgttttccaaaaaaaaaagttgctgtggagatgatatgcattacatagacatggtttggttttcttttctttttcaccccttggtcctaatgccatctcaaatgtgctttctcgtctacctgtatgaaattctgcttgttcaagaactaactctaggaacctcaatcttatcttttgatcctcttttgttgtgccctttggggggacccgatcatcaaacccaagatggaaggaacttcccaacaaatccccacctaatactcaaggattctggagaaatcatcggtggctgactggctggcaagctttgcattcctagtactctgtatattgttttgtatttggcttcttatgcctcaccctaggaaaacaaagggcacgttaccaagaacactttacacatttacgaaactaaaaacacagctagagagtaatttgcgagacgcatcttttgagcttaattagtccatggttggacgctaattgtcaaataaagcgaaaatgctaccgtacctgttaaactttaacaaccccaaccaaacaccctaggatatactagctgtgcagctcattacttctttcttacttttctctag

SEQ ID NO: 37337 - DNA, 891 bp, Sorghum bicolor
  Intron number 2 from transcript Sb04g022780.1 (locus Sb04g 022780) derived from phytozome v7.0 (chr-ID chromosome_4; pos 52387076 to 52387966)
ctaatgtgagtagttctctctactcgccggcccaatcgtagacatccgtacatatctgcacccaagctgtctcttctcctgatgatgaagctacgtgcgtggagtagttctctgtttcctcttcgggacttttgaacgaattaatgaacggtataggactagtaaaaacattactagtactacagatttttacctgatcggcaagattttctatggggatggaccgatcctgtccctcctctgttcaaaaagcgtcgaagaaaggtctcttcagtcttcattagggcctgtttagactgggaacgaaaattttttgggtgtcatatcggatgtgtcggaaggatgtcgggaggggtttttagaaactaattaaaaaacaaattacataactcgtcaggaaactgcaagacaaatttattaagcataattaatctgtcattagcatatgtgggttactgtagcacttaaggctaatcatagagtaactaggcttaaaagattcgtctcgtgattcttaactaaactgtgtaattagtttatttttttatttacatttaatgttccatgtatgtgttcaaagattcgatgggatggatgaaaaatttttaggtggagaactaaacagggcctagtcataactactccacttgcgtagtactgatttagacaagtgcgttagtattgctggggggtggagaaaaatgaccgtgctctgataagtgcaagcagtgtagtatgacgtgatgaaatctttgactgcaagtgcaagcagaaaatatacatagtactcctatttcttattctgtatgaatatgatgaaggcgctatgtctgagataataagaatggttttgcaggagctaaccgttgacatcgtgctcactgactactg

SEQ ID NO: 37338 - DNA, 804 bp, Sorghum bicolor
  Intron number 1 from transcript Sb04g024490.1 (locus Sb04g 024490) derived from phytozome v7.0 (chr-ID chromosome_4; pos 54241643 to 54242446)
ggagcccactccgtgacatcacatcaatcgtaaaggtggacctcgtgtcttaggccaatcaccacccttttgtgttctgtctgcttgaatcttgcaattctcagtttatatagccagcaatataaatgtgcttaaaaccagataaaggtccaatgctccctcgacactcaaaccagctcacttaagagtatacttttatcttacatatgtcaacatatctggtacattactatattagttaagtatacttgaagacttgggccttgtttagttcaccccgaaattcaaaaaatttcaagattccccgtcacatcgaatcttgcggcacatgcatgaagcattaaatatagacgaaaataaaaactaattacacagtttgtttataaatcacgagacgaatcttttgatcctagttagttcatgattggacaatgtttgccacaaacaaaggaaagtgctacagtagcgaaatcccaaattttttcgaaactaaacaaggccttggcaactttctatcgaatgcttggaccttggatataggatcttatttgcagcagcctaccaaacccatgttgcctctcttcctcgcttctgagatgcccattcattgaacatgacataataaattcaacattcatgatgctattcaggatatttgcaacttcagttctgctttatctgtagagtgcgcatattgttcttcagtatacagataaatctagatgcattatgtatcccctgagatatgctgctgtactaattgcaatttacaggctcttgagaaaagaaatcgcctagaggagg

SEQ ID NO: 37339 - DNA, 593 bp, Sorghum bicolor
  Intron number 1 from transcript Sb01g013450.1 (locus Sb01g 013450) derived from phytozome v7.0 (chr-ID chromosome_1; pos 12443572 to 12444164 reverse strand)
cctccgatttatcaggtaggcaggtagacacagtacatgtgtatatgaatagcatcgagataatttctgaagaacaccagataggcaaaatcattatattgttttcgtccaacaactaaggccttgtttagtttcaaaaaattttcaaatctttagacgtatgcatgaagcattaaatatagataaaaataaaaactaattgcacagtttgtctgtaatttacgagacgaatcttttgagcctagttagtctatgattggacaataattatcaaatacaaacgaaagtgctacgatagccagagccaaaaacaatttgttaatttctgatgagggggacatcagtatgtttcatgaatcgatctaccaaacacagagtaactaaggtagtgttttgatgaggggcactatcagtacctatgttttctttattaaattccatgtatgtctgtccaagatattctctcacaaggacttgttgtttcgattctgatttgacagtgtggtgtggggcacctgatctgcaattcatgctgcatcaggctcaacaaatgccccctatgcccaaagtctgccttcgagcgctgctttggc

SEQ ID NO: 37340 - DNA, 731 bp, Sorghum bicolor
  Intron number 1 from transcript Sb04g026150.1 (locus Sb04g 026150) derived from phytozome v7.0 (chr-ID chromosome_4; pos 55926097 to 55926827)
cgatcgccaccgagtcgcgcggcagcgagggcagggtatactactgctccctctccccaccccccccccctccccacccccccccccaccccccgggtcggatccgcccgcggatgatttttgtgtgtagcggttggttcgttcgaatctgggggacttccccccgtctctttcaccccaggacccaacagacgtttcttattttcctgcgtgtgacattaatataccgttgctttattagctgtgcgcagtccattttctcaatatccttttgcagagtgatgattagggtttgacctttatttattgaaaagcattggcatcccttttggttggctggttacaccttgcgccggtgaagtataatatggggtttaccagatccttcgcttgggattctaactcttcattctgttcctgtctggttatccatgaacttcactccatttgagtgatttttcctgtgttctaaacgagggttcatgactgattaagcttctaatgatggtttccagcttcagggtactgtgttagtgcttgcgagcttggttagtaaacgaggattcatggctgattttgcctctaactatcataatggtttgcgccttcagggcactgtggtagtgcttgcaagcttggtagctggctgcagtgtaatggaaatgtaatgatgcattttgttttcagtttttgcaggcttcagcccacgcaaacgaggataagcggtgggt

SEQ ID NO: 37341 - DNA, 737 bp, Sorghum bicolor
  Intron number 1 from transcript Sb05g000300.1 (locus Sb05g 000300) derived from phytozome v7.0 (chr-ID chromosome_5; pos 113485 to 114221)
ggtggttgccctcacaatcctgctgcttatcgtaggtctctctctctctccaccatattattataatatgggtaattaaaatggggtgaccgactccatgccctggatcatatgggagctgatttgggcagtggaggaagaggctatagtctgattaaattaagcaactacaggagagcaagccacagttacctaatttatgcatggggggagaaacagtatcgtttatagctgtataaattagccaatctttggagtttgtgaacaattatagtaggtgtgcttagaaaggaagaacgtagtggaaattttgagccttggttcattcagactctgaggtgccattgtgccacaagttccaagacttcaacggataattgagaattggccccatggttttatgagcaaatagttagtgtgcattgtaaattgtcctggctcgatgatttgaacatgaggtctctgatgatggcatgtttatgttatgaagtgaagaagggttttgctttttgttcagagaagagatacgttgatctactccctccattccaaattgggtattataagttgtcatgtgtcatgctctacatattatctgattcagccatgttgcttctcaagatctatgctttatcatacaattcattgcattagagtggtgagtgctaagcaattactttgtctgcctctctgtttccacagcatcttgtctgaaatcctcgaagccaaatactata

SEQ ID NO: 37342 - DNA, 708 bp, Sorghum bicolor
  Intron number 3 from transcript Sb04g017400.1 (locus Sb04g 017400) derived from phytozome v7.0 (chr-ID chromosome_4; pos 40250903 to 40251610)
gcagtgaccttgataacttacctcggtttgtggtggtaaggctatcctttttctttggtcaacctgctgttcatgtaattttaacttggttccatttcttccctttcaagagatgttgaagggcatgcatgaaatgaataaatgttggcatcctatgatacctgctatcagcatcccatattcacacatctaggctattcatccatcttgtaaggccttgtttagttcaccccaaaaaccaaaaactttttaagattccctgtcacatcgaatcttgccgcacatgcatggagcattaaatatagtcaaaaacaaaaactaactacacagtttgcctgtaaatcgtgagatgaatcttttaagcccagttagtccataattggacaatatttgccacaaacaaacgaaagtgctacagtgtctgaaaacttttcattttgccaactaaacaaattgataatccttgtatgtgcttttagtttgtctatcttttcatattctcagttctgcttgcatttctatctatctttttgctattataagtataggaactaattgagtttgctttatccctccaatttcctttctaaattggggtgttgaccctcttaaattgtgtctgccagtgtgtcattggtccataagtaaactggctaacacaaagaaagttctgtgtcaggttcggtatatttaaccctgcaatagtgt

SEQ ID NO: 37343 - DNA, 720 bp, Sorghum bicolor
  Intron number 2 from transcript Sb02g043150.1 (locus Sb02g 043150) derived from phytozome v7.0 (chr-ID chromosome_2; pos 76898996 to 76899715)
gaggctgggcctaatcgtgacaagtaagacctcaactaggaaatgtgctaccactaggtgtgatttagtcatagcatctggtatcttgtgtgagtatttttctactgtttgttagatataatcccacatttttagatctgtattgagcacagcattatgtagattttgtgacacaaatcaaaggtacaagcatccctgccaagctgaatgtttgaaatttgaattgcaccactcagtgccaagtttcatacacacactctctctagttttctttcagattttcctgttatgctctcaatttgattgatatgcatctaaatctttgaacaggagtgtacaattaaattacaatacacatccttatgacttatgaggtcaagctacatgtttaagattggggttcaatggtgatggtctatgctaacacttttttaaaaaaaaattcttgttatatacttatatgccaagatttatgctcatctgtgcataccttatacattctgtaatgtcataatatgggtttgcccccctcatgaactttttgttgccccccctcctcttcaagttttctgatttcatcttttcagtgtactcagcatctattattcaccattacattgttgtacactatggtactactatacactactggaagttgctcataggtaactattgtacttcccaggatagggaagtccattgctgaagctttgcaactat

SEQ ID NO: 37344 - DNA, 836 bp, Sorghum bicolor
  Intron number 3 from transcript Sb01g046880.1 (locus Sb01g 046880) derived from phytozome v7.0 (chr-ID chromosome_1; pos 69999110 to 69999945)
atcttcctgccaggtatatttgattagtgactgatagcttgcgtcagattgcatactattaatgggttttgtagtgttcagcaacaacattgttttctggaaattgtaacgctgaataagcccctttaggtgatacaggagctccccacccccacaacacaaaggtcctggtattgctcatttcaaatagtaatatagtattcgatttcacacactttttttaatgagttacaactacaacttgacagtgaagatcttagttattatggttagctagatttattcgtatctaccaaaattttgacacgagatctagtcttgtttacaaaacacacaaggcacacttatcgcagacagagtgagggaattttgtgtgtcattttcccctatgtcgatcagtagcttggttataaaagaaccatgcatatgcaatgcacatattatattataggtgcatcggtggtgactatataggagtgaaataagcatcatagtgttataacttataacttaggtgaggtgatggtaatttcggagcacatttttttttcttattaattgtttgagaaagataggaatcattatatgctttgaccttcatacaataaggctattattttcttcacagcatatgcttaagtagttaagtttattcctgtaagatctattgcgggttactatggctgactattttaaactcatgaaatttatttgtttgaaccttgataatcatttgttttaaacatatcacagcagaactttagtgctctttgttaaggctcaaaagttaattatctggttatgtaggaaggtcatccataccgtgggcccaaaat

SEQ ID NO: 37345 - DNA, 727 bp, Sorghum bicolor
  Intron number 1 from transcript Sb02g035230.1 (locus Sb02g 035230) derived from phytozome v7.0 (chr-ID chromosome_2; pos 69696937 to 69697663 reverse strand)
tcggggaggtagctgccgctcgcgtccctgaacgaacggaatagagacagaatgacacacgggtatagttgaagatgaagttaggcacagcggtgcgaaacaactttttagtggcatggtggtttggtcaatctttcgtaatgacatacaggtaaaaagctccctaaaggccctaaacaaggcctaatttcgaacggatgggctgctcagcccatagtccctgcattggaatctggggatgaccatgtccgtgtccctgaacgcccgaaatctgtctccgtcaatcatcaaagtatcaaacaaaacaaggaattccaacaaaacaaagacagcaacaatacaatttatatataaaaaaagaacagcaacagtacaatacaagttgcaggcacacgatcgctaatgtagcactttcatttatttatggcaaatattatccaatcataaactaattagtgtcaaatgatttgtctcgtgatttacaaactgtataattagtttttattttcgtttatatttaatacttcatacatatgtcaagattcgatgtgacaaaaaattttgaaaacttttttgtttttgggtgaactacaaggcctatgttgcaggggaaacttgcagatccaatcatggcgggatctcacaacggcctcgactctgaactgttgcgcgcgctgacctaagggcgacgaggcccgcgtggaggagctattggcccgagaaaacg

SEQ ID NO: 37346 - DNA, 1013 bp, Sorghum bicolor
  Intron number 3 from transcript Sb06g021750.1 (locus Sb06g 021750) derived from phytozome v7.0 (chr-ID chromosome_6; pos 50948346 to 50949358 reverse strand)
ccttggtttcaagacgcccagggaagccattgaaggtcagtgtttcttttcttgttcagccaagtcgctggtggttctgttggcttggtagctcatataaagctacgaactaggttaatgattcaccagttcaataactcaggctgtttcaacttgtatgtctcttagacagaactacatttagtccattcttagattatggctgatccaaaatcttagatagctttcagaaaaatataatatgatttgaattaagctttgcagcttgggaatggagttaaatagttagttatgaattatgatccatgtctatagctattagggttctccaatggtaggagtcagagctcttatgccattgcaatgtgttctttattctatacattctcatgtcatctatgcaagagagagatggagtagctgtgtcttccttgcatcggggcatgcaaaaagagcctagctcttctcctcgcatactagctcaaagctttttttggcatctcgctccgtcacgtggcattgtagatgcccttacaattagtacttggaattggaaatcatctagtttattagactgttaagtatgttgcccataaagctatgatgataaaaggaaagcttgtttctcttgctatgtttaagagcttatgctggctaagtctttcttgtatatttgatgttagtcatgccacactatattatattgtcatacatcactagtagtgtgaactcttatcatatgctccatggtccatttgttgggtgtatgcactgaatattaagtctgatgcaatttgtagtaatttcaaacgatgaatctctctgtttgcgtagctgaggatgtcacattttttttcattttgacagtgatcatatgctccatggtccatttgttgggttggctgtaaccttatagattattttaggtacttaattttagatgtgctctattagttcagttgtgatttatgtttaccttatttctttgttgcaggaacctacattgataagaa

SEQ ID NO: 37347 - DNA, 969 bp, Sorghum bicolor
  Intron number 2 from transcript Sb05g024270.1 (locus Sb05g 024270) derived from phytozome v7.0 (chr-ID chromosome_5; pos 57412143 to 57413111)
tcgagctctacgaccaatacctcgcactgcagaaggtctggggcttgccaatgccggagctttttgttgaagctgtttttgctgtctgactgtgctgcgctagattcgttgatgataagcttgcgctgtatagggtcaggttctagtgcgtggattttgacttgtgcggcccaggggtatgtactagatggttgctctttgctaggattttcctctgagcttatatttgaactgtagttttagatgtcctataatatgactgatgaactggcacggttttatttcattaagtatctagttggcgtggctgttgcgtctcctgtatttgtcttggcaacagaagtttgaaacagaactcaaaaggctgaacatggatcaggaattcaggataggatatttgtaatatgattcaggttcttttgtccattgaatttccattcaatcatacaacacctgagttgcatgcagatccaatgttcacaaaaaatgacttacagtacatttgaagaaatcaattgcccatgaaagtcaaatctacgaattcatacagaccctgtactttttatggagctctctttcagatataccttgttctgcattacattcggcaactattgaattgcagtgaacgtgtatatattctttcaatctttagttggttttggttggcctttaactgttttcagactgtgctcttagcaatttatcattcatgataacaaagctaagttgcaaattttttatgatccttatgattcttgttcatgtggtgcacacctgcccctttaaatggttcattctaaactgcttaagacatgtgcgatagttagatacagtagctgtctatatatgcacttgatgaacacaatttattcagttccagaatgtaatatggtggtaacagaacgatggcaacaattcctaattatgacagatggcaggaggttgaacggctccgagctgaaagaa

SEQ ID NO: 37348 - DNA, 729 bp, Sorghum bicolor
  Intron number 1 from transcript Sb02g039910.1 (locus Sb02g 039910) derived from phytozome v7.0 (chr-ID chromosome_2; pos 74029644 to 74030372)
ctacagaagattggccaagttctatcaccctggttggtttattcacctttctgaattttcctaatattcagcaattctccctactgtgttcgaggcactatctgattttacttgtgtttccagacatacaattcgcacgctcctgtgaacatgattaataacttcttagttgcttcatgtctatcttatcactgagtttttcatttaccgcaagcccacaacacaatttaaagacagcgcatcagtgtcaatggtacaaactagtgtgcggtgactatttgatcctcattttcatgttactcatcctcctatggattcagtgataaacatcaaatgcatttagaatggcaggtccacaaatcaatatatttctccgtctatagatatgtgtcgttgcagttgatgtttctgtatctggagctgtgctgctagggtattagagttctaactttatggtgaaataatttgcagattcctccattcaaaattattgaatttaggtaattatctttatgtatcattttaagtcttcttggctggggagtatgcactaataactaaagtcaaaactaaccaaaacgaatcgagcaagtaaagcctgtggctgcctgtagtttactgatagataaaaatgaattaaggaagaaattggtgccgtagttatacaggtgcagctgtcattctccttttattccatctgattatgtgttatctgttatctcacagttt

SEQ ID NO: 37349 - DNA, 646 bp, Sorghum bicolor
  Intron number 1 from transcript Sb04g021810.3 (locus Sb04g 021810) derived from phytozome v7.0 (chr-ID chromosome_4; pos 50950972 to 50951617)
aactggatcaacggtacgctagctacttatcttgaagttggaatgatcaccccctcctgctgccttgcgccttgctcttctaatctctccctgtgtgttttcagttaagctacccatgcgttcctcgtgttgtttgctgtactacaagcgattaacttgtgtcacagtctcacagaccatggatacagaatgctagggagtaggaatggagaatcatatatgccagtgatagttatactaatttgagctcctcttgtcatccctcatgccatcatggggatctgattgatggagagctagctcatgtttcaaaaaatcaaaatcacgcctgtatcttggaaaagcagcaaggaaatgcagtcatgtaggagaaatcaaaattagtcttttctaagctcggttgttcacatggagcttgctgcatgcagtttttttctttgtccttgtccccagaaaagtctaagctgcaagctattgagctttgacagtagctggagaaacgacgaagacacttgcagctaatcaaatccgtgtggtggttaaatacaataatacagatgctctgtgtttgattaagtactactatgctaatggttcttgtgattacgtactatacggtcgctgcagagactttgttctagctaac

SEQ ID NO: 37350 - DNA, 780 bp, Sorghum bicolor
  Intron number 2 from transcript Sb01g022040.1 (locus Sb01g 022040) derived from phytozome v7.0 (chr-ID chromosome_1; pos 26990012 to 26990791 reverse strand)
gaagcttctcaaaccgacatccgtgtccttggtaacttaatttgatgtaacctcttagctcagtttttgacaactactatttgcttctgctcaatgcttgtgtgtctttagattattgcactgatgtgattggaatatgagtaatctgccaggaagcaacagattttgtgttttactgaagtatagttagtcctgttgctgcacaactttgctctggtaaatctgatgtttggaagcataaagtatgttttgctactatcacagaggcctaactgatattgcatttggaccttttatgaaacatggttgcacttagcaacgctaggcagaagatgcacttttgaaatatagtgttgcactgttgctgtcgcagttgttagtgacacatatgtgctctatatgctgtcagatatccgtatctcttaatggtcatgcctaccaatttgattctgacaaaaatcaatcaatctattagttacagaacaagcagagaagtcagtgtacatggtctcttcttgtactgaactgggactcagctacattcaaagagttctggtaaagtataaaactgtgctagaacttttgagctccttaattttcatgtactactttttgttacttgatttctcggcctatcttgcaatagcaactttaacactgaaaatgattgctcatggcaactggcaagtatgaattgatcaaattctcatatcatctgttgattttatgaagcacaattcttaccttatctgtatctaatttgttaaattcactgtttag

SEQ ID NO: 37351 - DNA, 460 bp, Sorghum bicolor
  Intron number 1 from transcript Sb06g006001.1 (locus Sb06g 006001) derived from phytozome v7.0 (chr-ID chromosome_6; pos 15122258 to 15122717 reverse strand)
atccgccgaaggactgctcagcaccctccgccccggtgagtgtcgattccatcccgtcgagaacacggaaccctgttgctaatggcgatttgcttaagcacggtcagctgtttcattaccgttcaatgctgtgtgtactgttcttaaattgaaatgagaggttcatagttgtagttggctagcttgtgcccatgattaggggtgatatgctgttgacgtttatcccccaaactcaggatttttgcttgctttgagatggcagttgttttctcagctagatagttttgacatcggaccataaaaaaaaaacatctttggtttctgtgatgtcatatagcattttcaatttcatggactgtgttctcaaatcaaacatagctatttcttgttctttgcaaattcataactgggctgctggaagcagaaatgaatcaaacttatcccctaccacttctgaaca

SEQ ID NO: 37352 - DNA, 688 bp, Sorghum bicolor
  Intron number 1 from transcript Sb04g001700.1 (locus Sb04g 001700) derived from phytozome v7.0 (chr-ID chromosome_4; pos 1436525 to 1437212 reverse strand)
ggtccccgccgccaccgcctcgtccgccgactcaggtgcacttgcttggctcgctcttgggcgcttcagctcagtccaaggagtaaagttttttttttttttttttgtcatgtcgggtgtcacgtagggtgtcgcatgagatattctgatactaataaaaaaacaaaaaacaaattacagaatctgttagtaaaccgcgggacgaatttattaagcctaattaatctgtcatgagtacgtgcgttagtgtagcactttattataagtcatgaactaattaggtttaaaagattcatctcgcaatgtagtcgcagtctgtgcaattggttttttttattctatatttaatactccatgcatgtgtccaaacatttgatccgataggatgtaaacttttgggagaggaactaaacaacatatgacgttttgacatgctagtgtgtactactactgtcttctgttgaattttgggtgtcgtgaaataggtgaaacctctggataggtgataggtcttgcttgtattgaaggaagtttaggttaggtgatgatgttgaaaatggaacagagaatgtgttcccttgaaggaatgactatttatcagttttgagtgtactgacaaacggaacttatgtcactctgactctgcaaccttttgatttgtcttcacatgtagcgaccgtttcagccg

SEQ ID NO: 37353 - DNA, 977 bp, Sorghum bicolor
  Intron number 2 from transcript Sb01g045580.1 (locus Sb01g 045580) derived from phytozome v7.0 (chr-ID chromosome_1; pos 68658089 to 68659065 reverse strand)
tccccgcacaactgcaaatactaccaccgaggaatgtaagtctgaaaacacaaaaacacaagtcctgaaaattacatagttttgggaactattgctaatctctggttaaattgctaagaatgtactgtgatacactcagttttatcactttgctattaatgtactttgggcttaaatagtgaaaatgttattttttagggtttcatgtcagatggtgggcgaagaatatgggataacaccacacattctttcacctgagaattaaactttactctcattaatttgcatttctgttacaactggacacatatgtgaagtagacttgtcatgagtaatgtttgtgatcaaggtagttttacatctaaattgcattatgagaaaataatactcccattgaagtttcctttctaagaggaacggtgaacagatatgtatggttgtataaccttgcaactctaatgtctctgtctatatgaactatgaaggcattcttcgttcgctcccagggtgtctgacaagaaaagttttgtagtgtattgccatcagttactgctgttatctgattaggctccatttgttgtctctttgttagatttttggttgtaaaatagacaaccttggacattatactgataagagagcagacgccccaattgtttgaagtttcaaccatatctgataatttgatttttggtttttttcaagttatgagttatgacaagcttagggaaatgcaaggcatgcatagagcaagacctgtttgtgaatttgattgttgcattaacattcactaacaagtcacaagattagatcctttttccttgaagtcaggcagtccaactttcaacttctcataatcatctttggttttgcacatcctttttgacaatgtaatttactaatccatctttacctggcactctgatgttgttctttttacaggcatccaacaggtacaccaaagtccgggtagtcct

SEQ ID NO: 37354 - DNA, 737 bp, Sorghum bicolor
  Intron number 1 from transcript Sb03g010880.1 (locus Sb03g 010880) derived from phytozome v7.0 (chr-ID chromosome_3; pos 11864045 to 11864781)
cccggatcttgacgctttgctccatcggcttgctggtaccgatctctactagtaattgactgattgcaatagttatctccctctgtaaaattcacctggtatacatcagtagacatggaagaagataacagggcaggctaattagacactactccttgtttagatgtgaaaacttttctttcgtttgtttgtaataaatattgtccaatcatagactaactggggtcaaaagattcgtctcgggatttatagacaaactgcgtaattagtttttgttttcgtctatatttagtgcttcatgcatgtgccgcaagattcgatatgacggggaattttgaaaactttttggattttggtgggaactaaacaaggccttactcttgtctgtcagcttctttaccagcacggctgggatgagagcgcattcagggagatgccgaagctagaagagctgcagctgctgctggcctccccaccagagccctgtttctaccggagcaatgaagaccaggagcatgtgtccagtttcttcatgctcaccccacttcccgtcctccagcgtctctttctccgtgtacgtaaagctccctcaatcagtcccttccttgcccaaatcgaactgagtttgcacctcagctctgatctgagaaaaaaaaatgtgtttgtatttggaactggcatgcttaccagctgaattccattgtgcgcacgcagctccccagcgatcctggatacgg

SEQ ID NO: 37355 - DNA, 792 bp, Sorghum bicolor
  Intron number 1 from transcript Sb0011s012840.1 (locus Sb0 011s012840) derived from phytozome v7.0 (chr-ID super_11; pos 4347716 to 4348507)
cagttccttctccaaaagcagctacttcttgccaggtacatcatccttcagattgcccatgtccattgcaatgtccactgccccatttatctattgaaatgaagcatgataacacctttaattgcgaaacgtgttttttcttgtattacggaattcaattacttattgccgtgttctgaaaatgcttcgttcagaaatgtgacaatatttttgagaacttcaatcctttcgatactcggtgtctgcgaattggttgtggacatatactctgttttcctgctgccacgcttcataatttcctgctgcgaacagttaacacattgttttgctgccaacaagaatttccctttctatctttccaataattgttgacgaagcgtacgcaaaacaactggcaagccctgtcctgttttcacaacccaaggatgcacgacttgcttcatttactgatagtagcacggatcaaaaaaatcgaaatggtaaggtttattttcaaggatcaatgtccataacacaagaaaattcagcccaaccaagaacgtttactggcacaattacatggcacagaaatgctaaactgacacaataacatttgtgtattctgagttctagctgtagcaggtatgaagcacaactttgaatagtacttctcaagccattctgattatgtgatataaagaatcgatcaattcacggacataaatctccagtgtatccatccatccattgttctgaattttcagcactcctttttattctcttcgttcaggtgttaaagttcgactggactgc

SEQ ID NO: 37356 - DNA, 908 bp, Sorghum bicolor
  Intron number 2 from transcript Sb01g041040.1 (locus Sb01g 041040) derived from phytozome v7.0 (chr-ID chromosome_1; pos 64316290 to 64317197 reverse strand)
ccacatcaccacccgcaagtccccttgcggtgaaggtatcgagctatttcctagcctctgctgttgaaattgtttgggttggttttggttaatttgactgattgattgagtttttagtgctttcattaataggaacacatatgtatacattcactagtataaataggtgcttcaccattaaaatgcttgtagtttgcacaatattatgatattgctatttttatgtttgaattagtttggtgtttttgaatatcattttcttctaaatagatttatccctatcttactattgtaacatgtaaaactactatatacatccggtaccctggtaggcgatttttgtgttttccctgttctctgttcctcattattggtcattttggcttttggtatacgcctagatatacacaatatctcaatgcacctagtagaatctagaaaagcttcaatgggctataatttgaagcagaggtcccaatgcacctcgttttatgttaccctgttttctgtgtcaaattctggtgggaatggaattcatgccatctcaagtacactgtagccttgagtaacttcagacttcgtattctggatagtaacacctaagccagtttgacacattttagtacgatttagttattggtgattccatcttctagaatgtggagaagcggcagtctagaatggcaggccaaggccccttcttatttttcaaattcttgaaaaaacaattgatttaagtgaacaaattttgtcaaatagagagtccttacatagattgcccacctctgcgactgtcatcaagctcttgcattgcacatggaatataatgggatattgataccatacttttgttgtcaagtcatgaatttggctgatcgcgttctaatttgttggtcaggaacaaacac

SEQ ID NO: 37357 - DNA, 722 bp, Sorghum bicolor
  Intron number 1 from transcript Sb01g044400.1 (locus Sb01g 044400) derived from phytozome v7.0 (chr-ID chromosome_1; pos 67509897 to 67510618)
gggtaagtgaggaagttctacctgacctctagtccgtttgcgcaggaggtgtttgaggaaatgcttttgaggtttagtcggccgcgttgtgctgtgccatgtggaatcgacttttgtacttttctggtgctaagctaatccgagcactgcgttggtatgctgcacattttgttgtacctgccggtgtacgtatctgattacaaagaagggacatggttatggttatcattgtttgtagtagtatgtgcaagtgctgtactggtggctgtagaattcagagggtagttgttacctctaacgtttcaacacttgtctgatgaatactttatgggtgttgctatggtacaccaaaataagtaaataactgtgcaccatccatttagtttgatctagatggatatggtgacttattaccttctaagaggtaatagaataaatatggaaataaatattttagttaaatttgattgaatcggtcatcttctgacatgcatttcttggctaatcactattaaaaaaaatgaggccttgtagttttttccccatgaaatgtttcctgcactaaataccatatacctcctaatgtctgtcatggtcgtctgcatctgctgcttaaatgttatgtcctgttgggggtatacagtagattctgaataacgaaaataggatcaactaaactatgatgtttgtggcataggtgaaagttctcgccctaacagatc

SEQ ID NO: 37358 - DNA, 625 bp, Sorghum bicolor
  Intron number 1 from transcript Sb03g008570.1 (locus Sb03g 008570) derived from phytozome v7.0 (chr-ID chromosome_3; pos 9146341 to 9146965 reverse strand)
cctccctcatccccaaagaacactactcctccaaggtgagatgtgtattcgatttaatgcatatttgatatcatgggttaactgttaattaacccgctaaaaattagatctctatcgtatccaaaaggtgctattagatggactaatttttagcccaaattaatctaaacatgtctaaatgtggctttcatgagtctgaagaagattctcctattccgcgtaataattggtggtcgaagctaataaattgctagtaatagctggaatttgtatctgcttaccttgtaatagttctgacctgcaaggtagtcatcatcagtcccttgtctcgccacatgaaatattattaatgaaagctatatttattggcttatacgagaacacagattcagtagttttcgtggagaatgttgatttaccacttaccagcagtagtttccctttttaagaaaaaaccaacagtatttaattcttctaaagtgacgtgtgcatgtgtgtgtgtgattttgccccgtgcgagttttgaatcttttggtcagttggtctgtaaaaattctgtgaagattcagaaaccagcaatgtacatatatataatgttagtatacaatgtatgcacaagtgcagg

SEQ ID NO: 37359 - DNA, 1038 bp, Sorghum bicolor
  Intron number 1 from transcript Sb04g037430.1 (locus Sb04g 037430) derived from phytozome v7.0 (chr-ID chromosome_4; pos 67073449 to 67074486)
gatcgcgccgagctcaccactgagcaggtcagtgcctggggttgcttacccgcttctgtttcaactgttgatacttgctagcttccgcgtcctagtgtttaccatctctggggtgcaggctggtttattgaaccgcattaagaggctaggacgggtaaaagtctgtaaaatctgttgcaatgttatttgaagtagatcaaaatttctactcatgtcagagttattttatgggaacttgcatcctaggctgaccttttgctgtggtcatctacggagtccatagagcagctgctagagccacccttttgctgtgttaaaatgatggatgcacacactccgggcttaatacactatcatgctagtgaatcagtccatacaaatatcttaggctatctagttcttgtttacctgattttgaggcagttgggtttccagggaaaatgtttcctgcttacataaagctggtgactgcttactgctgcatttatatctgtatcagttagcagatgaagttttaactttggcgggaagagttagaaataaccactggaaattgcagacggttgcatcacattatgtttatatttcttggggcaaatcttccttccatccatgtccagagatggatatttgttctaacttccaaccaattagaaactcttgatatgctacttgacatcatatctttataggttataatattataaactgagtgtctgataccatcaacatttagcaaatttgtcgcgaatttgtaaataaaatgtcttgctaattttgatactaggtgctgaattactgagactgtctgtttttgctgttggagtgtatattacacttttctagcattggcatagtagttttcatgcgttagcatgccttctttctagtctaggatgcatttcataaatttgtttcaagcatcagtggattgaggaagtttttgttgcattatgttagcatgaaggaaaagtatttttttttaattaatttttgtattgtggttttgtatatcaaggttctcaagcgagatattcc

SEQ ID NO: 37360 - DNA, 815 bp, Sorghum bicolor
  Intron number 2 from transcript Sb06g027880.1 (locus Sb06g 027880) derived from phytozome v7.0 (chr-ID chromosome_6; pos 56701898 to 56702712 reverse strand)
tgccatttgaaagattgtgggaaaaattctttgaggtaaacatcccctgtttttttctgttggtagattcatgcattttatcatagctcttgcaaagtgaatgcggtattgtcttccataatcggtattggtctatgctatacactaggctttcaggagaactacctccaagattcaaacattaatgtttgtagtagtataacagtttgctttcagtacaactaggccttggcatgcttgtatgtgtgcctgattgttactcatttccttgtggcatgtgtgtctctgtacagctgtgctgcttgttgtgggtgtaggttaattcgttttgctctttgttccctgcacacaaccggctttgtatctcatatttttctcctatcttaatacaatgatgcgtaactctcctatgtgtttgagaaaaaaaaaatcaaatttcatacttctataggaaggatgtaaattctagaatttgacaatcattcaagataacaagtaagattgatcttatgtttcgattaaaaaaattttgttcttatttgaagtcctacataactactatagcctgaagccactctttgtatgatgttgtaagatctttattgtgcagacattgcattactatttaggatcatttattgtaacttcattttgtaacagctataatttaatgatatgtcctgagcattttgtttaaaggtacaatatgggtattgccaaggcccgttaatctttgaaggaatcataatccatcgtgtgataatctttagctcaaagtctgtttctccatgacctcttgttatttctgtagggcc

SEQ ID NO: 37361 - DNA, 839 bp, Sorghum bicolor
  Intron number 2 from transcript Sb04g002670.1 (locus Sb04g 002670) derived from phytozome v7.0 (chr-ID chromosome_4; pos 2463499 to 2464337 reverse strand)
gagcgcgtcgcggctggcgggcgctggattaggaggtgaggccaccgcatttcgtgatgtttctcgcgctttcgccccgaccccatggccatgcttttaaatcgaaatgaactggaggagaatctggtgtcgttggttggggctgtcgttgttcctgaattctaagcagctccgcgctcgctagtagcacgacaattcgagaatgtcacggtgcggtgccatagtgctgtgtgcgacagatctaagcacgctagcacacccacgttttcctctagaattttcgtgaatctgtagctggttctgttggctgtagcttccatctagcgtggttagaagtgaacaccatggactcacgcctttccagtggcaagacattataattttcagtacttagatgtgtaagatgcatgcttcggagaattgtgtttttacaatttgatttgctgtcttacaagcagccaaggtctggctggagttaccggtgactctattaagattcttcccaattttatctctacaagactggttacatgctctgcagcacctcaataagacgaaatttatttgcagcacactcgttttagcagctcaacagtaattaagaacaactcacgtctattattacatactattcaagtttcaactagtaagagctcggtctacactgacagtattggaacactgtttgtgcactgtccgtgtcataatatctctatgattcaaatttgaaatggaaaattcttgtttcttttgtctgctaagtcatttttttttactttgtgtttaaataacctcatcctgtagatccgagggctggaattctggaatctttggttcaa

SEQ ID NO: 37362 - DNA, 835 bp, Sorghum bicolor
  Intron number 1 from transcript Sb04g024870.1 (locus Sb04g 024870) derived from phytozome v7.0 (chr-ID chromosome_4; pos 54774119 to 54774953 reverse strand)
gctcgccgtcaccgcctccgccaagcccggccaaggtgcgcgtccatccgtactcttgttccattattattcggcgtgccggcggcgggctcatatatagtatcagagcactagctaattaaccccatttttttctattactacttgtgccgcgaatataatttctgccatccaatgtttagcgcttttcaaaatagtgttatttagacttttcaaaaaaaaaacaatattgaaacgtaccgtaggcagctaattgaccccatgaacaaggattgatcatgaatgctctctcttaattagtaatctttgttggataacttctttttacgaaaaaaaactcaaatgacattggtgcatatgaaatcagagaatatgtttcaggtgctcgtctttctgttgatttcttgctgagatcgacagctgaactatgttcttctgctgcttacaatgccgccgcgaaagaaacgacagagagagagagaaacattttttaaaaatccatcttaccgccggccagccggccaatagtagaatggacacacttgtgttcatctctaatccgagtgctctcaagggccaaaaagtacaataatctcttgttaattcgacttattgtgcgtgctaatttgtgtgaaaaatgatgcattatctcttaaccaaatgtttagatatacctactagttgttggattctacttcctctacataagtcaacatgctagtatagtattttgaaacctcgcaatgaactaactaacgagctaattaaaaatttacatggccggccatgcgcatgcgcagtcctgcacgccggcgtggactcggtgacggtgacg

SEQ ID NO: 37363 - DNA, 701 bp, Sorghum bicolor
  Intron number 1 from transcript Sb04g028050.1 (locus Sb04g 028050) derived from phytozome v7.0 (chr-ID chromosome_4; pos 57993874 to 57994574 reverse strand)
gccggcgcggaggtcgtcaacggcctcttcctaaggtataaacggaaaacccaatgcaagatactgaagtgaatgctgtcatactcatgcaatgaaattggcaggattagagtatctccaaaatctttgcaaatctcactcttcaaatcattatttacactttttctatctcacactccaagagtcattctcgccttctatttttggttaataaaacatcacgaataaaagatgactatatttacatatctatttagacaagcttttagaaggtaattttttactaaaatctttatttttaacattcaagtaaggatgtgagagtcttctagagttgctgttagaactgcattttgcttgtacctattagtacaaattgatttactttcctagggggaaaatagttcttaattgtgcatgcatgtcagtttagatacttagtttatgcatgcatgtcagtttagatacttagtttgtcacaacatttagggaatttgattcaattcaagtcgaacgaatcaacagtgcacatgggaaaatggatctgcatgcttcaaattgttcgctagaaagccaactctgaaatattgaattgaatgtcagttgctgtgcaacaagtgaacgcgtggtgagacttgatctatatgatctgattgttttgctcaggtacgaggcgcccaaggagccgaacggctcgtacg

SEQ ID NO: 37364 - DNA, 639 bp, Sorghum bicolor
  Intron number 1 from transcript Sb06g017110.1 (locus Sb06g 017110) derived from phytozome v7.0 (chr-ID chromosome_6; pos 46388369 to 46389007 reverse strand)
cccatcgccgccgcttcctcgcggggactcgggaggtacgcttcttcagttcccgtactcgattggctgaattcggtgtggcgtcgcgcggttgcggtagttgtagttcggctgtactagtgtttatcagaccaattaggagatcagacaggtgatgttttctttgccttttcccctccttgtagccagtacatagggcttgttcccttcccccccttgattctcatgattcatggctgctatagtaagggtcgcgtgatttgcaatgaaaagccggtgccaccatgatgattacaatttttttttcattaggactacacaaacagatgtacttattccatcgtacctattatcattccagaattgaactgtagaagaaatacagagcaaacgagcaaactacttatcttcctgtttattttgctgttgtttttattgcaataatactgcgtatatactttgatcccagacagtaattgactctgatgagttgcacgttcgctttctgaaaggcagagttttacttgtttaaaaaaaaatttgagttgcacatttgtttatgctattccagacacagcaagtatggttgtcatgaggaactaatactaagcacatctttcttttactgctaatacagca

SEQ ID NO: 37365 - DNA, 318 bp, Sorghum bicolor
  Intron number 1 from transcript Sb03g039660.1 (locus Sb03g 039660) derived from phytozome v7.0 (chr-ID chromosome_3; pos 67338552 to 67338869)
acaccagtaagttctccattttatctgcatatatatctatatcctaatcaggttgagtttttttttttaatgtaatgagatcgactttgcattggttcgtgataggtgtagttattattatgtctgatggatctttgattatggataagatatgatcagagctagacctgtaaacaacaatactgaaattttatcataattcgtagctgcacatgatgagtattgttcttcctgttactattggcttattgctgctgttattaaacttgatatgaaactaatcgaaacatcctactacgtgcagctcttatcccccct

SEQ ID NO: 37366 - DNA, 718 bp, Sorghum bicolor
  Intron number 1 from transcript Sb04g029560.2 (locus Sb04g 029560) derived from phytozome v7.0 (chr-ID chromosome_4; pos 59644032 to 59644749 reverse strand)
cgcccgtgtcgtctcggcaacaatctagatctgaggtgagctccctcccctccccctgatctccgcgctgctcactcctttacccgcgcctcggccacagatccaggcgtctatctcactaggacctgggattcatttcttggtccgctggtaagggggcactagtttgcctagaggcatgttcatcttgttacgcaggatcgtttctttgttgtgactcttgcgtcctgaatatgagtatttgattctggcttggatgctccgatccaccagacttgctgcggattcgtttgctgcgtttagatccactccatttgaattgacgttgtctccactattattcatgcggtggagcatgtcttcctttttcttttttcttttaattatactgtagcagtttattttcaaaagtttctggggttctactgaacctaccaatgtcacaagttaattcccatcttggagttttatctttttttttttattatgccgtatatcttgatatctccacgggaaaaagggagactgatagggaatggagttgatttattttgtacaattgcttgcaggttgtgaggttcttgattgggcgatcacaagaactgtcgctgcaatggtcgccaagatgttgccatccccatggatctcggcgtccgtgctcattctgctcctgagcctgcacccgggtgtccatgccttctacctccccggcaccttc

SEQ ID NO: 37367 - DNA, 717 bp, Sorghum bicolor
  Intron number 2 from transcript Sb02g032550.1 (locus Sb02g 032550) derived from phytozome v7.0 (chr-ID chromosome_2; pos 67295253 to 67295969 reverse strand)
gtggtaagtcgtgattatttcctattcaggttatgatattggcttcatctgtactgatcatttggtgaatgaatctgcattgttttgagcttaacgaggagtgtgtttattggattcacatcatctatgttctgtcatctgatcctgttaatagttagatattgatgcttaaattctatgtatgattgaaggtcctaaattcagtattgcttctatgtggacatggatggtaagataccacagcaacattgctgtggtccatgaagtgtgctgatcttcttttgtgtgtgtgcttagcaacagtgcatatgtaatcaaccagtgatgaatgtagacataatgcctggcggagaagtgttatgtgcatgcttcttggaagcacttactataagatattgtcattaactgtttgaataatatcaaatggataacaactagcattgattttggtcttattctgaaatatagttgaccaaaaaaaatactaagctcctagtgtggcagtaatgaatcaaaatatacatgtctgctctattgagttgctctagctgtgagtaagcactgtaaatatcacttgtcaatggacacatgtgcctttttttttaattcctgtctagctatgcttcatatgagtattcgttcttctctggtagaatgacataataccccgtttttacttcaggaaaaggcgtatcaaaattctgtgcgaggcatttg

SEQ ID NO: 37368 - DNA, 892 bp, Sorghum bicolor
  Intron number 1 from transcript Sb01g036540.1 (locus Sb01g 036540) derived from phytozome v7.0 (chr-ID chromosome_1; pos 60146162 to 60147053)
cctggcgcccccggctctgcctctgcctcccagacgtgagtgcctcttgtcttcttcaaccgggggactcttgggtcttggggttgggttttcgtggaatctgggccgtcttcctgctctgttcttggtggggtgaggcgctttgtgctgccccgatggcgggaatcagaatgtggtagttctagagcatttgtccgttggatcaaattgttctccagagtaaataaaaaacgcttaaatcgactcgttttgactaatatcgcgcacattttggatgttgggcgattcagtaattgccagattttctgagttgacgatcaattgcttcctcttggttcttggtcattgggattcttatttgtttcgtagattgtgatgtggacataagaggggttggtgtaatcggatcgctattttccgtgaaatcgtgcattggtgtctgaattggttcatatcaagcgaatgattgccatctcttcgttttctttttcttttcttttcttttcttttcttttcttttcttttgggggtgggggagcttattggaatgagaaatgccaagtctcatgatctgtaaggcccagagacgatttgatcttttgcaaggaaaattttcaggtttcttaaaacaacatgaagactgcctacttagtaagattctaatcattatgtaggtgctaggtggcgaaattaatcaaacttctgctttgtttataccattattcggtcaaggtgtagttgcagtagagtgctcaagaaaacagtttgctcatgtttatcagagtatactgcatagcatgttgttgacagtagtctatcatcttattccatcaatatgatagttcactccaaatataacatttatttctccatgtagggctttacaagagta

SEQ ID NO: 37369 - DNA, 687 bp, Sorghum bicolor
  Intron number 3 from transcript Sb07g019900.1 (locus Sb07g 019900) derived from phytozome v7.0 (chr-ID chromosome_7; pos 51361775 to 51362461)
tacaaggtatattgccaagagtttagttagttagtactattgctatattatatatatgttgatgattttactttactttgaggttctcatagtaactaataattgcaattaaacaagttatatcctatcgtaatgttgtttctatttgtatgaaagttgctacattcaaacaagaaactcagtcgatacatactttcccaactaataaatagatacaatgaacatttgaattatatagaagaggatggtatggaatagctagattttgagtacataactgacctagtggggagccaactagagtggaggtaaggaatatcactatatgagatcattgtggttttatattcttaaaattaactattgtttttatttaggaaaattaaaaactgtcaattatttgtatgttatgtatcgcgtgcttagtgaggtgtacttgttctctgttgatgaatacatcatgatacttagtggaaacttatttattttgtatatccaatgcattgtccatctttgatccaaggaacttattataaatgacgttatatatatgttatcttcatgtcttatatgtaatggaattacttttgaaatggagtatcaactgcaaataattttgggttactaatgattatagtatatattgatggctattattgatagtctatgtggtttcattgtagttct

SEQ ID NO: 37370 - DNA, 834 bp, Sorghum bicolor
  Intron number 1 from transcript Sb02g032370.1 (locus Sb02g 032370) derived from phytozome v7.0 (chr-ID chromosome_2; pos 67118202 to 67119035 reverse strand)
ggtctgccaggagtacgccaagacattctacttgggtaaacgagatcgaaattcccgctgtgttcttgttcatctgaatacagtctagtttaatgactaaggccttgtttcgttccatcaaaaaccaaaaaattttcaagattacttgtcacatcgaatcttacggcacatacatgaaatattaaatatagataaaaatacaaactaattgcacagtttatctgtaaatcgcgagacgaatcttttaagcctacttactttatgattagacaatatttgtcaaataaaaattccatgcacgaactaaacaaggcctaaagcatcggcattagccacaaaggttttgccgtgatcgaggcacatgcatgtgtcacaagtactagtgtgttttccttgcaagctgtttaaacaaagtaaaaaaaaacaaaccttttgtcctaaaagtacaataggcaaaggatgaaaaatatccttggtaggagcctgaaatgactgtccaagtccaacacctgtctttccaatttgcttactgaatcggctagtatacttaatttgattaactatgacaatgattgtaagaaaaaatgacagcatgctcatgaaaagtaggggtgactttccacatgagtatgaacacgatcttggacacatgcattgagatgataatcatactacatcaggatcaatactattctgccagtagttgtagttgtggccaccacatgcacataccgaataacgaccagtcagcttcgacaatcagtgcgcacatgcatgtgcctgatcactgatctgatgagatgccgctgttcttctgttgcagcgacgcagctg

SEQ ID NO: 37371 - DNA, 859 bp, Sorghum bicolor
  Intron number 2 from transcript Sb06g032540.1 (locus Sb06g 032540) derived from phytozome v7.0 (chr-ID chromosome_6; pos 60700102 to 60700960 reverse strand)
ttgaaggaaccagtgggagaaaagggagtggacaggtacctttaagatctgacccccatttcttgtctccgctttttaaaattctcatctcactggttggttgcaacggcccaagaaatgactatacaaaaaggataagaacaaacttgtgcagcttttgttttagcataccatacctgcagtttagcttgagagcatgtgtgatgtctccagtacatagtgttctgttcatcttttttaaattctgccatggacttgtcatattttgctcgttacattggtaaatgggatcacattaataaacggttgcaaagctgcagattttgttcttatcctaccacgtagctgctgcatgttgtgaaggatatgaccacgccgggtccatccattgatttcttggttcttttttcggttgtaaagtgggcgcattgcttgcttcattattttctgtttggtaaacttatcatgaagggtgtggcctacattggtgaatctctgttatgcttatcggttggacggccattttggcaccggcgccacttttctagaaaaagtaggccctaataaacgctaactaatttgatttattgtctacctaatagatgaaatcgctacgagaaatcatgatgcccattgtaccactgatctgttaccttgattaaatttatgctgctgcgcaattgtgctttccaatcaacgcttgttattgggaataactgtccttatagcggtgggtcaagcacattagtgcgatcttcggtttattgcaccattagatgatgcaactacacaccctgatagggtatttggtacttatcatgaattggtcagatttttgtcgcagggcccaatcagaagc

SEQ ID NO: 37372 - DNA, 626 bp, Sorghum bicolor
  Intron number 3 from transcript Sb02g023540.1 (locus Sb02g 023540) derived from phytozome v7.0 (chr-ID chromosome_2; pos 57164396 to 57165021 reverse strand)
gccaggtgcttgcttgcttgcttttcaccagtccttctctgttttttttttgtcggcgcgggcttattctcagacgcacgctaacgtacatgtttggttaattaagctccggtgttgatgtcaatgtgtcctttagaactgtactagctttcatgagaagcatttcaaataatggagcctatttgtccaatgattcaagtttggaagagaagctctttcttgttgttgcatatatttgttgggaggcggatcattaaattttgtaggctatagattgtcagctgattcggatgtgatacgtcagcggacagcgaagatcaaagtggtgtgacatttcgtcttaacatccactgatgaagaaaacaatgtggcaaccaccggtcaaattgtgtcactcatccattgattcttctcgagacaaaacttgaaactgaagttttgatgagcatatgatcgatcaacaaacaatacaccagttttgagatcgtccgcgatgaatttcgctagcccactagtttcagtcattcatgaattacatgcatggttcagaaagttacatgatctgacgaccgtatatattatataactgaattctggtgaacgtgaagatcgttgccatcaagaag

SEQ ID NO: 37373 - DNA, 775 bp, Sorghum bicolor
  Intron number 2 from transcript Sb01g010050.2 (locus Sb01g 010050) derived from phytozome v7.0 (chr-ID chromosome_1; pos 8893721 to 8894495 reverse strand)
tcgaccccgacaggtggcgacctcgtgctgtacaggtaattgtggtttttagtcatttagtttgtttcctttgttacttacggtgcatcttgctataagaagataggatttcgtaaagatgcttgttctgagttatccaattgtacgtggattgggagtataacagactgtcacataggaattgtataactgtctagttatcaaggccagctgacatgttacatgccgctccatcgcggattaacttgtgtattttatggatgcctgtttacatccttaaatattattatgtgggattagattaaatctagagagttgtttgagggagatggccatatcatataggaactgtgtgtcaattgtgcgatgccaagagaggaaaaggacaaactattctagtcttttttgattgagatggagtgactgtagttcacatatgagcaggggcgaagctacataaaaatgaaccctggtgcactacttaaataacgtacacaactttatttgagatatatggtgaaaataaggccattcaatagcaaaaaaaaatatatatattaccatggtgcctgtgcaccaggtaacctcaacgtggctttgcccctgcatatgagcaattataattgtgagttagaattgcttggtgagccagactgtacttctaacactgaattaattgtttcctgtgacttggggtattggagaaatgttggctaattaccgttgttttctggaaataggcgtattgcagaagtaaaggagaaggaacggagaa

SEQ ID NO: 37374 - DNA, 677 bp, Sorghum bicolor
  Intron number 1 from transcript Sb05g018443.1 (locus Sb05g 018443) derived from phytozome v7.0 (chr-ID chromosome_5; pos 44973224 to 44973900)
gagctcgtgcaggtaatcaatcggcggtgtaacttcttttttgcgcctctcttgctgccgctgttcttgtgtgagtgggaacttagttcaggccgttgaggctagtatgctctacagtttctgcaattagctaattgacttgggcatatactgtaaaccgctgtgtgagttgccctttctatatgcctttgtgttccatcagattatttctttttactttagtggttgtgtgcgaactgccaaagagtaactagtctgtatgtgtgtatgactttgagtaccaatttagcataatccttttgttagcgtaatttgtcagcccccttttcagtatgattatgatgagtttatataatgatcttagttaagctgttgccctttgttatttttgtttctacataatttttccacgtggtcagtaattattttctacagatctcagtttaaaaagcaagtcctaatccttttcttcaatcaagaacacaattaattggaaaaacaaaaaaacttgtgagcgaacaaaaacactaatccttgataagcatttatgtgaccaatctaccttatttgtatcagtttgcaggtgttttgttcataaatcttaatacttctcatatagtcacacacaaaaaaaaaaccttcttctcataagtttgctctctttgtcaaaaaataga

SEQ ID NO: 37375 - DNA, 618 bp, Sorghum bicolor
  Intron number 1 from transcript Sb01g037630.1 (locus Sb01g 037630) derived from phytozome v7.0 (chr-ID chromosome_1; pos 61189449 to 61190066)
agaagaaaaggaagtggctgctcagcaacaggaaggtcagtgcccggtccccgtcctcccattctgactccatactcgagttgggttccctttctcttccacctgagggctcgttcgtttgccgtgtattgagcccctggaatgattccagctggaattgcttcagtaatttgtatagttttcataatctggcattgttcctgggtcaaatccaaggtaaccgaacgtagcctgaatgtttcttggtgttcaagaactgcacgaatgccaagtttgtgccttttgacttctgggtggggaaagggcttcacgcccaaatgccaggaggagggcgaagaaccgtttggatctctgaagctcgctgtgcgcgtgccttttgtttgtttcgctcaacagcagcttggttccagcgcattctgtccggccggtggcttgtcctgttttgttttcgtttgtttttgttttgtttgttccccccgaaacaatgatctcatctgagtggtcaatcctgctctgttaagacggaagaatactactgttgtttgctgcggtgaatctgatgtttccgttccgttttggccaggtgatcgacaagtacctgcgggaggcgaggaagat

SEQ ID NO: 37376 - DNA, 637 bp, Sorghum bicolor
  Intron number 2 from transcript Sb03g034800.1 (locus Sb03g 034800) derived from phytozome v7.0 (chr-ID chromosome_3; pos 62971368 to 62972004 reverse strand)
ctggtacttcaggccgcccacgcacctttaagaaggtctgtactagtcatgcaatcagtaccatccacatgatgagtgctacttttattccctgtgacccttttgcactcctacaagtcaaaatggatttcttcatcacttgctttggataatattaaatacagctattgatttctccaattcatatttcatgttgccccatggaagatcactttctagaatgggtacagagattttataattttgtggagtaattatgttggcgtggactgtggaagatttgtgctatgcccttattgcaattaaaatttagcttggcgatcatactgttccaaaagcattatccattctttgtcgttgagcctttttaaaaaactctgatggtgctagcataatttagctattgctttgctcaatataattcatgcaatgcatacaataaaaaaatcatgataaattggttccattaatcaatgtcattgtaaaactttcatcagctaggcatacgtaattaataaaaaactcatctatttggacatgacctagctgcaaatttgactgtggcttatatgttcttgctataatagttggtttgttttaaaaattaaatagaaggaggaagaggaagaggaggaac

SEQ ID NO: 37377 - DNA, 913 bp, Sorghum bicolor
  Intron number 1 from transcript Sb03g034800.1 (locus Sb03g 034800) derived from phytozome v7.0 (chr-ID chromosome_3; pos 62971973 to 62972885 reverse strand)
cggccgccgcaacttttccacgcccgaggagatcggtaacgacgcgcccgccccccttcccgtctggttccgtttgtaggtcgaattcgatttcatgtctggagcgtgccacggtgagcctaggcgtctgattgatctgttaattccggggtgagctagttcttgaccagttttgcgtggccgagcagaattcaaaccgtctagaagtagcttgctgcgagttgccgcttagattcctgcttttagtctgtgccgcgaggtttccatgtgattcgatggtgtctcgggtcgtaggaggaacgatgatttgttgatctatttgttcgatttagaggccgagttatctgcttgcacgtgcagtttggttcatatttgtgtttcaaaaaaggtttagttgcttttattcatccaataatgatgcagtaggacaacttgatactattctgctcttgattcagatgtagctttatttctccttcactgtcagagatcttcaccaaaaagggtttgtgtgaagtttaaacgcagtgataaatcaattagcactctgtatctggcatcagataaagcttgttagaggccggatacaggaaggaaatgctacacttagggcttgtttggttgttatattggcctgggcaagcttagtcaggcagctcgcttaaccacaggcataggaaaatggacacctgagatctttacctggtgcaggcatatttcccatgctgcaaagcaaacacgccctcagcctcttcttgttttgttaatttctacctggggctggggatatggatggttactttgtgtggttgtactactaagagcatcttttttgggcttgtttctgataatattttttaccctccaaataattgcagctgctggtacttcaggccgcccacgcacctttaag

SEQ ID NO: 37378 - DNA, 1051 bp, Sorghum bicolor
  Intron number 2 from transcript Sb01g011930.1 (locus Sb01g 011930) derived from phytozome v7.0 (chr-ID chromosome_1; pos 10843031 to 10844081 reverse strand)
atttccagctgaattcaattacaagaagatcgagggtaaaatttcctcagctttctttctttttcctccctaattcttcacaatttttttatcttcagaaaggtgttgtgagttcactgtacataacttccatattttattcttgtgcttggagcatttgaaacttattccacctttttttaataaaaatactgcaaaactgcaaacttatttgtcaaaatccagagtcatcatgccctcagaaattgacagtgtctgcatatcaattactcattggtgccgggccctgcgcccctgcggccctgccacaaagaggaaataactttccatgtgcactgcacgaaatatttgcaaactagtacaaaggaaatagttcatttaagcttacatcttgcacaagatctgatcaaaaaaccacatgtgccatcttcactcttcaataaccaccacagtggccaattgggccccattttctctggctgtttgatcaaatcttccatagcatgtattctgtggatttaaaactcactcagaattttttttagtttagtcaacaaatgtgtacagtgtagtttactaaatgctccagttcagaggagcaccaaaaccatgagtccgtgttgtgttaatcagcgttctggtgtgaatcctttgagtttgtggtgtgctcgctagcatacgggaatgaagtatcttcggcgatttccgcacaaggtctgtcaggctcatatggaatgctgtgtttctatgctattgatatgcaggcagcaggtccaccctgcttgttttgtcaaatattacagaattatgttttttgatcaaattgtttaaaatgagtatttgtacaaaattttaaaaaaaatgacatgtgttttattatgatagttttacaataacagtgtagtgtttgacagttttgtcagtcattgatttgcctgataccttaatttacctcattgtttcatatccaagcttccatgcaccactgagccatgcgttttgtttaatgaatgcagtacttgacagcccagacactgatctgttaaagcat

SEQ ID NO: 37379 - DNA, 528 bp, Sorghum bicolor
  Intron number 5 from transcript Sb01g008690.1 (locus Sb01g 008690) derived from phytozome v7.0 (chr-ID chromosome_1; pos 7505727 to 7506254 reverse strand)
ggaggctttccgtttggacccagcgaagtggggaggtaaaatcttgtatagtctagcagcaatacctattctgttaccatgtcatatattcatctttctgaacatatctctatgcaatcaagcctctattgcactaaagctttagtaattttctcctttcctggtttgggtaatgcactaacagtttgcactaaagatgatgggaacaatctgttttacctgtaagatattaagagagtgcctaacagtttgaatcaatttagaaatgttacaaagtttgcaaggagttcagagtacatgggatcagttgtgagagaatcaattactgtatatgtaaggcattgctccatcacaaaccaaaccacttgccaccgtcttacctacatatagtgtgtggccaatcttctacattattatatatgttttccaatatttatcttttgtttctggccatatttctcttataatgttagctgccctttcaccaaaattttcttaactcatgaccaattccaacccgtacagtga

SEQ ID NO: 37380 - DNA, 893 bp, Sorghum bicolor
  Intron number 4 from transcript Sb02g043730.1 (locus Sb02g 043730) derived from phytozome v7.0 (chr-ID chromosome_2; pos 77517807 to 77518699 reverse strand)
tgctttgagccgaccaccacgccttgtgggcacaggtaatttctaactgtgcttttggaaaaaagaaaagtagtttgttgaattctgtatgcaaagagaagaaattggaatctttccttggttcattctgtttgtgccgtgtgcaaccgtaggatgccagttgcttcccgtgagttgcacattcattttgtatgctgattgcctgtcaaaagtgatttcttctattgtccaaagtgcagtttaacgaatgatcctggaatttggtaaagttttgttggttactgtctgagaagcctgttaattaccctggccaaatggaccacaaaagctatttgcaatgtacatgtgtgcttgttgcgcgttcacaattcctttttttcctgactttgtttatatacgagactgtagtactatgattttcatcgctactttgactttgcttttatagtaaaaaaaggttacttgatttcagaaagcatgtatccggcatgcaacatagcaagaattactgtatagttcagttcattttagttgctgtgaccatacaatgcttgtttatcatgtagatgttcagttcacaaatctttgttttctgattctctatatgtaggactatggaatacttctcattgttaggctggagtggaaataaattagtattgtatgaaagagggcttttttttaatcctgaggtttatcatttcaaatatctcaactaagtggtggttatctgtacattgtccaccaatctaaaattttgctcattataccgttttttgaattgaacattctttgatgtaattatgttgttgaatattttaagtcggtttcttcattactctgtaaactgttctgaaactcatattactgctactctatttaacagcttctgc

SEQ ID NO: 37381 - DNA, 893 bp, Sorghum bicolor
  Intron number 1 from transcript Sb02g037100.1 (locus Sb02g 037100) derived from phytozome v7.0 (chr-ID chromosome_2; pos 71493344 to 71494236)
ccgatctgttgaggagcagccggagcacgcaggaggttagtctaggcacgtatcgcctctcaccctctcttgcccccctagacggttcgatccaatgtgcttctgttggctgatcgggttatgcggatgccggatgcgtgtaaattgagctgaattccagatttagtcccatttattcggattagtagacgccataatcatatttccttcacttccgccaaattttgcacttgatatcgtcttgagttggtggtgaaatgcttattctgggtttctaactctacctcgagcgtgacggtggtcggtggtggacatttttatgcggtcgtgaggaggactgaggaggccacggggccaaaagtgtgagagtgacgtggtgatggcctgatgggaggccgggggcaggatgtctggatgcgtgactcatcaagggtctagagaaagggaaggattggagaaacggtttagataattcgagggcgatgtgagtgaggataggcggccagccacacttgcaatttattttatgtgcgtcaacaagctgcctaccagttgattttccaaactggtttacatatgtttgtctgattactgacctaaccctatgctttctactcctatttactattgtgacttttgacttgaggaattagaaagcacagcccaatttatttgtacagattgctcgcagcaatctgttatgttctgttctgttctgatatttgtttataaaatgctcaataaagatctgctattaattgagaagagaatctatgaattgattggccatgaagttgcattttttttttcatttgcttgaaaagaatggagcctttcttgttgttttctgaatgatataactgcacactgtagttgaggggaaagcattgaaa

SEQ ID NO: 37382 - DNA, 803 bp, Sorghum bicolor
  Intron number 3 from transcript Sb04g033590.1 (locus Sb04g 033590) derived from phytozome v7.0 (chr-ID chromosome_4; pos 63524020 to 63524822)
actgcccaagaccaccgccccgtcggtgaacaggcgtaaggacttcttgttctttctgtttccgatccgatccttggattcctgatcttctctgtctctctctcacccctcttttttttgggtacttctgcattacttttccgaaccaagggtattaatcactacgctaatcaaaggctcaaagcaaacagcgtgatgtgtggagggggtgaactcgggaaagccgtgcaacgcactgtttgttcctgggagcacaaacaccgccctagtttcccgtacatttttttgttgttgttttacagttttttgcattgagtagaggggaacgcagacgccagaccaccgtgttcgtgcagtctgctggaataacaataacagtttttttatttgtgcttaaaactggatggatgacaaccccttcttattgcgtgcagtgttagaatacatatacaaaagctaaggttaaattacatgaacatttttcaccatgtccatgcgtggaacatacatagggggttactctatttaaaaatataggaccttatcgggatcgatggaaagcctagcgcgcgagacatacaatcatgtcttgttgtaggcagaggttgcccatatccatcgctcttcatctgttgcaaacagtcggcatgcagcatagtggagtagttgctgctagctctagataagcgtacccattctgccatgtttcctatggatgtgcatgctgtgtgctgactcgaatctaaccctacaaatctaactttgcagctccggagaagcggcagagagtcccgtcggcatac

SEQ ID NO: 37383 - DNA, 760 bp, Sorghum bicolor
  Intron number 2 from transcript Sb02g019520.1 (locus Sb02g 019520) derived from phytozome v7.0 (chr-ID chromosome_2; pos 47441046 to 47441805 reverse strand)
gataccggagcttatcctctgcaggtctgttccaaactccaatttatgtaacacagtggatcaactattatcatgggttatgccatatataccaatataagttatgaaagcttcatggtgcaatagtctctgttacctaactgaatgggtttgcatttgggtttttcttttttgtttcattttgtttttgcaaattctgttgtatatttcagttttctaatgtttctttgctgatgaaaagtcgtcaatataggtatagtgtctctttattgactcagtttttatatcagattaccaccctctgcttcatttgttttgttgttctttctctttattttcctaggaacggtttgatgtacatcatgcatttacatacatattggtgttcctatgtttgtgtctcgtcaaatatatagtttccctgattcctttttttggtaccgtgtttaaggggaacgactctgcaaaggctactctattactcaccgtcttgcctttctggtcactgttgcaactggtgcttttaagagaatgaacacttatagaattcaattcctctattgcaacaccatatttgttttctggtcatgttatttctttctttctcggagcccaacttatttgcagattctaacctatttctttaaaatttgtttatctggagaataaagatgactaaatcatcatttgatttggtcaattaatatgcatagcaatagttcatgttattgttgataaataactctacttcaacacagtg

SEQ ID NO: 37384 - DNA, 799 bp, Sorghum bicolor
  Intron number 1 from transcript Sb06g028080.1 (locus Sb06g 028080) derived from phytozome v7.0 (chr-ID chromosome_6; pos 56936598 to 56937396 reverse strand)
ttactttgaggccatctccacaccggcgtctcgaggtgcgtatcaggtgttttaggacttttagcttaaaaccccttttccctatatggattcaccagaaacactagcttaaaactcattttcattaaatggaattattcgtgcttggtatactagtttaactttctgcctttgtcccaacccaaaagttgtcattattaactcagcaatatcccctattccacttccactggcatcctgatgttggtcttgtcttacatagcagtatttttcatggcgagttgagcaagaacaggctgcacctgcattttaattgcaaggcgcagcatttctgggttacaagtgatacaatggttgtattttagtttgcatttgcttttgggccgctcaaaggctctgattcaccgcattggacgctatgatgtctttttattattaaggaaaccactatttgttaatgtctgccacttggcggctctgccttagtatgaaagatttcttttaaaaaaatttaatagagatttggtgaggagggcttgatagagacaaataaagtatggagattttctaggacacggaagacaaatctgatagatagaatataccattcgggtgtcctgattgcctatttcagcgacagtcatgcaattgtatttctgcagaatctcttagattagaatttccttttttctgtactcttctacgcatagatctactccacctatttttacttcttacttctttttgcattattttctgtgcagcagggtcaagtagaaaagtataatcacccgactcg

SEQ ID NO: 37385 - DNA, 680 bp, Sorghum bicolor
  Intron number 3 from transcript Sb02g042030.1 (locus Sb02g 042030) derived from phytozome v7.0 (chr-ID chromosome_2; pos 75784267 to 75784946)
agagtgaggttagcccaacattttccatttagtcaagctatttaccgtccagcgcttcttcttagatgatgtgataatttgctcacctcgactctcgactccatttttttttaacagcaccttgacttggtacccacatatgttttggatgactctaaatgtatttgaatgcccatgctccttttgttttgtttgattatgctgccatgacattctgctctgcagtcatgtcattctggaattctggaacacactgccattttttcttcactttagtctatagaagtgtcactggaaagagtatctaatatctgtcgtgctttggagagaagaattaatgctgtgttatagggaaagggagtttactctaaatatattttgtcataacttgttcttaaattctcaactctgtaatgctgaatgcactttagtgatcttacaaaatgttgtcgatgcatgtgtgaaagatcatgtaattcatcatgtttgtaatatactcgttgttatgtttgtaataattgacatcacggcaaatcttactttattgatcattcttgatgatacaaccatcttttgaatattatgtgtgatggtgatgttggtttggctgtattaagaataacatattatttaaccataatgcagggagtggtattcgtggcattttccagagctagtca

SEQ ID NO: 37386 - DNA, 529 bp, Sorghum bicolor
  Intron number 1 from transcript Sb02g004760.1 (locus Sb02g 004760) derived from phytozome v7.0 (chr-ID chromosome_2; pos 5507187 to 5507715 reverse strand)
gcggccccggacgacggaggttgcgccgttggcaggtcagcgtctgcgtctaggggttcagtctgttttctcctgtggctggcggggttggccggggttggtggcggaaatgcagcgcctgtcagtctaattatctctcttggaggaggcgtttttcagttcggaattgcattgagtgctctagaaatttattcaggggcgaccctgtccttgtgttgaaggcggtttaggagatttgatttccaccgcccccgccgccgccccttactcatgagaattactctatgccagctgacttgatgaactgacacatgtccatagggtttgtgttttgaattggtgacatagagtgacgttaggaacttgtggcagtagatgctagcagaacagaaccacacgacttgttctttttagacataagaatgcacctcaattttcctatattcttctgcagtgaaaacttagttcagtttttaaaattttcttatcagcaggacaatttttgagggcgaacaagatactgtcactg

SEQ ID NO: 37387 - DNA, 517 bp, Sorghum bicolor
  Intron number 1 from transcript Sb02g012940.1 (locus Sb02g 012940) derived from phytozome v7.0 (chr-ID chromosome_2; pos 22497426 to 22497942 reverse strand)
agtctctcccaaccatcgccgtcgttggaggccaggtgctgctcttctcaatttctctccggtcgtccatactcccatccggatgctccctcttttcgaaattattaaaaaatatttctctagattttgtgccaagtcaaataatgttaagtttgtccaaatttcatagaaaagaacagaaatatttatgtcaccaaattatatcactaatatgtcacccaatatattttcataatttacttatttggtgtcatagatgttattacacttttctataaagttggttaaatttaattaaaattaaagataatttgactttgggtgcttctaaaaattatttttattttagaaccgagggaatttatatatagtattgatcacttgttgtcttgttttgaggacagcatgcttgttatagctaataattctgcacggtccggtttactgatctaccagcaatatttttttaatccgtgaaacagagttcgggcaaatcctctgtacttgagagcattgt

SEQ ID NO: 37388 - DNA, 723 bp, Sorghum bicolor
  Intron number 1 from transcript Sb03g027890.1 (locus Sb03g 027890) derived from phytozome v7.0 (chr-ID chromosome_3; pos 55586547 to 55587269)
cgcgcccacagccgcgtcgcaggcgtttgcctccggtgagcttactgcagtcttcctgcctccaccattgagctctgcaacctgtactagattttagaactgatgtgcatcaaggtccctagctctcgcttcgattttgttcttcatggttgcatctgcatgttgatgttgctttcttggatagctttctctgtgagcgagaccgaggagaaagcaacatgagtgttgcgccttttcactttttcctgtccattgaggcagtgagatttagttccgcaattgctccgtcttcacactcaatattcattttattcgatgcaagatattgatcttttttgcaattcaaaatgttttttttctgatttatatgtatgtaagtaaagctataatattgccttgctttgattgtgggtaaaattggcgttaaagcttcccatcaggccatcacataacgctgatagaaggggtatctgcttagctgtactttgtaaggttgcttgatgacgatttcgttaggttcgttggatttagaccgcacaatgctgatgcatcctgaatttctgttcctaatattgttttatcctgtatattgtcctgactctcccctggaattaggtgtcgaagactgatgacatgctacaattatttgcatttctgctgatatgctgtgaggattgtgttgtttcagattgggagtgattgacaaggcacggagacatttca

SEQ ID NO: 37389 - DNA, 788 bp, Sorghum bicolor
  Intron number 2 from transcript Sb01g042110.1 (locus Sb01g 042110) derived from phytozome v7.0 (chr-ID chromosome_1; pos 65445205 to 65445992 reverse strand)
atcctggtaaatttactctctgttgccaaaaaattatgcatctgtttttaatacactgcgagttttttctttttttaaacaaacattccaagtatggcacgatgatacgggttcatcattgggtctgattgagcgattggcctttttttaaccaattgctcttaaaagaaatttcgactctaagcctacgtgcattttgtatacaggaccgacccataccagtcatgttgactgatgattgcctaatgtcattttattttcattgggctttgatactattgtttggaccaacctgcattagcggtgtacaaagataagcttttcataacagtacatgcgagttgcaacccgctttagtaaggttggaaaattgagatgtatatgcctgcttgcattcacctgttgcaccttagaagagcgcccatgtcttttaggacactccctcaaagtaatacaatggtaattctcaaattcgaagtcacagaatttctgccttttttattttgtgtcgtctcagagtaacacaatagtcattctcaatttacaattccatgcattgctgcctttccatattgagctgtgacaagaaactcctggcttttgcatttgcaatgcagtgagaggaaaacaaaattctagaacctagacctctcttcctccatatttttggactggcccacactgtgaatttctttctcaccttgtaactgtttgatatttttgttctggcaaaggaagaaatagctcatgagctttcatatcttgtatattcaggtgtttttacagaa

SEQ ID NO: 37390 - DNA, 923 bp, Sorghum bicolor
  Intron number 1 from transcript Sb03g044470.1 (locus Sb03g 044470) derived from phytozome v7.0 (chr-ID chromosome_3; pos 71810642 to 71811564 reverse strand)
cccgcggtgccgacgccttccagaagctcgagaaggtgagtgtgagatcctttcccccccacgcgcccgtgcttgcttgcttgattgtttgtttgtttccttggtttagtagaaacttcacctttttcatgggagccgggggttgttggagaaagatttcagcttgcctttcttctccgttgctccgatttgttcgttcgtgcttgtcgtacgcgatcgtcggtcgcggaattcggcgagtaatttgagctcttgctttttctggttgtcgtaattgggagttgttagcgtatcatatcacctattcagtactgggcacccgctgggaaaaaaaaggaaatccttccttttccttgctctgagttgaagagaacaatcgattcttttatgtcctgttatgagtcgtaagcatcaatcaaagagagaaataatgcaaatgatgatctcaacacgtaaacaagctttgagttgggtgccaaaaaaaaagcagagatgaactaatcccctgcttttcttgtgagattttaaaagccccacagctccatcatttatgttcatactttatatgttgtccgtgtcacaagaattcgtaatccgtaaggacgaatggaaaagtcaacttgcatgcgttcgtattgaattggagtacctgctaattatcttctccggtcttttcaaagaaacgagttgttgtggatttttcttttcttttcttttctttttattttttaaaagagaaccaagtcaatggattgatggatcagtgaatagaaagaaatcaactaaatcccattgcttgccttgcgcaactggtcgatttttatttattttaaaaatatagtattatcatttacgatctttgtttcttttgctactgtgtgcgtgcagattggttcgggcacgtacagcaacgtgtacaaggc

SEQ ID NO: 37391 - DNA, 794 bp, Sorghum bicolor
  Intron number 2 from transcript Sb02g022990.1 (locus Sb02g 022990) derived from phytozome v7.0 (chr-ID chromosome_2; pos 56300373 to 56301166 reverse strand)
ctctgtagtggcgacgggaggtactcattaaatcacgtcagttttatgcatatttgctactggtttggtggcttattttaggccttgtttagttccgaaaactttttggttttcgctaccgtatcactttcgtttgtctgaggtaaatattgtccaatcatagactagctagggtcaaaagattcgtctcatgatttacaggcaaactgtgtaattagtttttgttttcgtctatatttaatgcttcatgcatgtgccacaagattcgatgtgacgaggaatcttgaaaagtttttggtttttggagggaactaaacaaggccttactaccaaatactccctgtgattcaaaatagatgtcattttaggattccttctggtcagttcttttgtaactttgacaccgtatgggaattgtgtacattgacaatgtatgatagatagaaatttctatgtttatttaactatcacgaaaaagtacttatattatttaattatgtttattttaaatgctatgtttttaatagaaatttctagtctgagtatcactttgtttgttaaagatgttgatgtcttgctcagaactctcaatttactgttgggtgggtggttaatccttgtagtgtaagctggcaatcaccattttcttctgttgcaatgaaccgtgcgaagagttaaatgtttgcactgtggtttatatgtgcccattcttcaagtgaaggtcacaatttttgacttgtttctcctgatgcatgggagttctttcattttcaggcacagtggagcacggagga

SEQ ID NO: 37392 - DNA, 546 bp, Sorghum bicolor
  Intron number 1 from transcript Sb06g014743.1 (locus Sb06g 014743) derived from phytozome v7.0 (chr-ID chromosome_6; pos 40795339 to 40795884 reverse strand)
caaggcaaggaaattgaaagccaaccttttatttttccatgatgtaaaatgtcttccaagggccttctttatggcagattcttgttccctaaacattttctgtgctggaggtggcaaagtcaagttgttacttattactagttactagagtaactatccaggtgtgaaccaggaaagcattaaagagactgagtttctgaatttcaaaactgaaaattttccttgtaaacagaatcagcttggtaaaggttcaatcaaatttatgtgtaagtttaaaccaaaataatcttatcttttgtcatacttctctgtcaccactaaattgaaccatgatttgaatcaagtttcacactcatatgtgctctttaataatgcgttttcgtcagaagcattcacatcatgacttgatttgtggatttatcaagttctctatgtttcccttctgttctgcattgcatatataatctcttgttcttttattctaaaccttgtctggtgatgtctctggcagatcaaagcaaagactataagctcagtccttgaggt

SEQ ID NO: 37393 - DNA, 897 bp, Sorghum bicolor
  Intron number 1 from transcript Sb03g002780.1 (locus Sb03g 002780) derived from phytozome v7.0 (chr-ID chromosome_3; pos 2663326 to 2664222)
cttccacgccacgcagccgctcttcgtgtccggaggtactactcttctccacttgggtgctccagtccactggatcgtcccttcgcctcacctggatcgtcacttcacctcatcttaccacgtagatcgtcggtcggtcttttctgcgtgtcttttccagcttcggatgttatgtttttcaagtacctatattaattcctaataaaattcctaagtttcaatgtcaatcatgacacccggatctttggactcagttcaacttattttgatcccgcgttcagcctaacgtgaagttaatgttcgaatcacttgtcataggacagttgaaacagttttttctataaaatgtgtatctagaacccagctacattgaatcggttggaatcaatcaagtccaccaacattgggatctcggcctttggaagtctccagcgttgtgattcagctgacttctgattctgttttgtgttttgtatgagaattctgagaatgaactcggggacctttaggtcgttttctgtggcgggcaaacgctttgagatgctttattctcaataaagcaggggaaacctctttttctaaaacaaaatgtgtatctagaattaatgattgatgctattttgagctgtgtacatctgaagaaaatgcatgtgatctcagttttgaggtttttgctgtatgtgatttcggtgaggtttctgttttccatctactagggaagttgctctgtggtggcaatctagctagttcagatgagggctgtgtggttaaacatgtacaactctggagcgttagcttcctctttactgtggtggcaatgtagttaggttttttgacatgtcacgattgaacttacgaatctactaaggtcctagttgctgtgatggaatgcaggtg

SEQ ID NO: 37394 - DNA, 558 bp, Sorghum bicolor
  Intron number 3 from transcript Sb03g027270.1 (locus Sb03g 027270) derived from phytozome v7.0 (chr-ID chromosome_3; pos 54766607 to 54767164 reverse strand)
tgttagaattggatatctttgagttcttacatcaggttagcttgatactatttggatggtaggtttgctttcctctttccctaatattaccataaacctcttcttatcattgaatgcagatccaacacaaatatggtggctcaagcaatgcacaggttgaagttggttcttttttcaccttcttattgatttacataaatgataactttagtttgtatggtatattttgttgatgattttgagtatagtgttttagttgattggatagttctacatactcttttcatatatttgattgatggatgtcaaaatcatcacccctttttgttagattgttggacattttccccattacaaaacataatcagaagtaacttggcttcatgcttcacatgaaccatggggtccttggaaaaggtcaatagtagtttgtccacatataacacttagagacatttatgtatatattttttaattctagcaatgcgccaacttttgatgatttaactaaccggttgttgtccattctttatctaggttcctataagatccaaaact

SEQ ID NO: 37395 - DNA, 925 bp, Sorghum bicolor
  Intron number 2 from transcript Sb01g003360.1 (locus Sb01g 003360) derived from phytozome v7.0 (chr-ID chromosome_1; pos 2691402 to 2692326)
ctcttaagcacgaggtggagccctggcgatgaggttaggattgcaaaattgtttattgtggtgtgattcgatccgtgcttacatcatggcatcctgttgcctgattgcaccgaccctctgcttgatttcaccatgggttcattcacaccgccagagagagttacatctccttatatgcagctagtgggttactgcaacataaacacctccctttcgaatcttaggtttcactagtcatattatactgataccttgtgaaattcattcaaactactatgatgattgtaggttcaacctcctgaacaaatgtcatggcatttttatatttataatctagtgctccagctgttccaaagtacaaggcaagatgcattttaagattcaaactttgaccaacaacaaagcggttacattggatttgtatttactatttagaaatactttctaatgatcttttttttttgttgccacacacggtatattatgagagaaattagctgtcaaagtacgatcttgatgactgccaagttaaatcacaccttatattgtgatgcagggaatataaagtttgccattactgccatttcaccaaagaatggaaaaaaacaggaagcccagtgaggccatgtaggtgtattatttctgtttgatctaaaattttcagtttataaatacttgcagatctcttggagccatgtttattgcccacttccttaacacgtgaaactgaaccatgtgcccgatcgatttcatggtctcaactaggatttgcacctaactctgggtatacatacctttgacattctaaatgatcttctctaggtgtaagttttatgtgcaagttcatctgttcatcctactgtacttacatatgtttataatatggatggctaatgtaggtgtttgctggctgtttgcactgcgg

SEQ ID NO: 37396 - DNA, 624 bp, Sorghum bicolor
  Intron number 4 from transcript Sb07g003460.1 (locus Sb07g 003460) derived from phytozome v7.0 (chr-ID chromosome_7; pos 4150941 to 4151564)
aggtcatctcttttcctatctttctttctttctgtatagaaaatgaactggaatacagtgttgctttattgcacctgggtggacattttgtttgcatctactccctccatctcaaattataagtcattccaagaatgttggagagtcaaagcatctcaactttgaccaaaattttagagagaattacaaagatttataacatcaaataggtataatatgaacatataattaatgaagaatgtaatgatactaatgacatcataaatattattattctaccatataaatttggtcaaacttaagatagtttgactctccaagattcttggaatgacttaccatttgggatggagggagtattacatataaaacatgtctgttagatgggactgttctcattgctctcatataaaaactaccagttttagctcatgattatggctgacctctagcagcagttgtttatagcagtttggactagtatgtattatatagcactggcagttatctgtcttcaactggtagtggacacaagtgcaccctgggcatttttattgttttttctagtctgaaatttatctatcctgctgatgacatatttctctattttaatgcaggttttga

SEQ ID NO: 37397 - DNA, 832 bp, Sorghum bicolor
  Intron number 1 from transcript Sb02g028800.1 (locus Sb02g 028800) derived from phytozome v7.0 (chr-ID chromosome_2; pos 63959396 to 63960227 reverse strand)
ttcgaagtatgctccattcatgtgatgccttttcagtttctctttttgcaacaaaatttctaaaactgtggggatctcccccacagtttttgctgtaaaaaaaatcggtttcctcttgtaaaacatggatttcttctactgaccttttttcttgagaagtatgagcatgaacaatgatttataacttgaggtaccattgggattgaaaaggactaacagttagtgaaactataggcatgtttagtgtacaaaagctgtataaatgtatcgatgttacacagatcttttaacacaacatttatttgtagcaattgatgatatttcataaaattaacagatggtccaagtatatttttaaaggattttcaaatcctataatacgcccaataaaaagaaatgtagggagtagtaataggtcacaacacctgcatagagtacataaagataaactgtcaattatttgcttaccatcattgcataatctgtgcagctgattttgtttttgttattaggtgaagattgacacccattggttgcatatatattccaacaaattaatcaaatgcaattgctatatttacgacacataggacgcataattagcctgtgcatatgctgtactgtgttaatgggcagtaaatgacagcttttttcccttttcttttgttgtgtactgctgccgatgaacctggtccttttatttttaaaacaagtaaccattacagactcttgtttcctttttcgttctttgagatatttaaaaccactcccacagtttcttaagtacggtaacaatcataacatactctttccttcatatttgcaggttttg

SEQ ID NO: 37398 - DNA, 424 bp, Sorghum bicolor
  Intron number 1 from transcript Sb04g026040.1 (locus Sb04g 026040) derived from phytozome v7.0 (chr-ID chromosome_4; pos 55860319 to 55860742 reverse strand)
gaggcccctactggagccggagccctcctccccaggtcttgcttaactcccaccgtttcttgtttcgtcttcaggaatctccctagtttcttttgacgtatgtaatcggaaatgtgtttttggatcggagccgaaatcactggcttgtggttgagctgggattagttcggttgggttggattagagataactcagaagttcgattgcaattgaattggaacgcaaggcatgatgagttcttgcggtttgctcatgaggagaaagaagaccgattttatgcgtagatggatttgtttttcttggtttcgttgattttggtgttgtttaaggccgtatgcttctgatccctacatccatggacatccctccctcctagcaatcgttctgcgttttttggtctgatgcaatgattacctgatagcag

SEQ ID NO: 37399 - DNA, 875 bp, Sorghum bicolor
  Intron number 2 from transcript Sb06g033900.1 (locus Sb06g 033900) derived from phytozome v7.0 (chr-ID chromosome_6; pos 61828573 to 61829447)
gctctcataaaggtaaatgtttagttattttgtgactgctatgggaaaacagtctttgtgcctgccctttttagtgtatggttgatcatgttcatgtgttatttgctcttttgtgttgtactccctccattccgaataataagacactttgacatagtgtatggctaagtgcatagcgaactagaaaagccaaaacatcttatatttaggaatggagggagtacattcggttagcataaaaatgttggttttacttgctgctatgttattttcatggttagaccaaacaagaaacatagagaccccaagtgctttacatttataatcttttattttcagaagaagtggaaaagttccttcgattaatcttaggatataatataactattgggaacttacgtccatatggaagtaatatccattccataggtgatattaaccttgagttttaatgtgcacaaaaatatatgattattttgttcatgaacttcatccctttgtcatgctataaattagctgtttgtgggggcgcctcaaaggaagaggagactatacaagagtaattgtgatgaggcgcggatcagttgttaacaaactcatattggataggcaagtgcatatgcacaacatttatcataatgtaccaatactggaggcgagtctcttacaaaaactgtgcgcactcgtcagattggtgctgtccaagtactgtatttgtgcttaactacaataatattggttgtttttttggtgttgatgctgtcactttgatgttaaattgagaatattatattattgcatgacaatgcttgtggacctgtttttattttttctgcccagaaactgttggaagaggagaaggaactagcgaatcg

SEQ ID NO: 37400 - DNA, 864 bp, Sorghum bicolor
  Intron number 1 from transcript Sb01g040350.1 (locus Sb01g 040350) derived from phytozome v7.0 (chr-ID chromosome_1; pos 63692096 to 63692959)
agagaaagccgcgaaaatcagagaacgcgaagaaggtacattgcccattgcagctgctgatttgtgtcttctcgttgaattgtgcaggtggagaatacaatttctgttgagtcgaatgttgatagataagcgtcttgccttcttctgctgttcgatccacttagtttgtctaggtggataccatgccattgttttgtgttatgtacatttttctggttattgctgatgcccgataataatgcacttcaacttggataaggaggtggagtaattctgcaaccaagcgaaccaactaggtagctaaaatcctaccttggatagcagtccacagtccacacgccaaacttagtctctcccgacttaaattgaactacatctgtttcattttttttgaaagggcctgcagaactttggtctttaaattttgttttgggtacttgttcatactttgtactacatctgttacttcatcaatactccctccgttccaaattgtaagttgttctggctttttctgatacatactacgtatctagacatagtgtatatctaggtccataagaaaagccacgtatctagaaaagccaaaaacgacttacaatttggagccaaaaacgacttacaatttggaatggagggagtagaaatgatggaacgccaccccttttttggtatgtttgtctttatgcctcatgtctagcttttaagataagaaaatatgtatatgtatcctttcattccaacaaataggtacctgtttgctattcagttcaccttttttcttgtgcctccagttaaaatagttattttctttgccaaacttttgtagccctcttcaaacaaagagaaacattggcaggatcc

SEQ ID NO: 37401 - DNA, 650 bp, Sorghum bicolor
  Intron number 1 from transcript Sb01g011025.1 (locus Sb01g 011025) derived from phytozome v7.0 (chr-ID chromosome_1; pos 9907836 to 9908485 reverse strand)
gtcactgggaagaatcttaaagaggtatgggtatagtgagtgcttgcttgctttagtattttgtagaactctcgtcacagctactgtgaagagatgttattggttctaactcatgatgcaagagataaattaaaatttgagaatttccatgtttcatatgtaagttgggatgttaatttcatggttcacctgtttgccaagcaagcatttttcatgtaggcagaagttagcaggagtatttgattaaccacgtgatgggctttgtcttcacatgtctcaatgctgttgtagtaatgctatattgtcatttaatactattggactaaaaagaaacatgttgcgatctaagagtcaaagcataatttcctgctgttgtgattttccccttgtgtgtgtgtgggggggggggggggattgtatttaaatatctcatagttagcccttgaaaaaaaagataagtatgcccctttagatattcacatctatcaacagacttttagtttgatgtttaagtctatgagaaaaatgatcctctgtgatatgtgttttcttcatgttttcagcatattcctctgattttcttaacctattacttgccatacttttacatggacggtagatttgctgccaggagtacagtgagacaataa

SEQ ID NO: 37402 - DNA, 979 bp, Sorghum bicolor
  Intron number 2 from transcript Sb01g008650.1 (locus Sb01g 008650) derived from phytozome v7.0 (chr-ID chromosome_1; pos 7468431 to 7469409 reverse strand)
tgttaaggcccccattcaggtatgctgtaaacttgttttctgtatctcaaatctaccagccattcaaataaaaaaggaacaaagaaatatttctgttattttggttcctgataactgaaacgggcattaccctatatcttaaaccacttgatcttatttacagtcattttgtggctgctgtgctgtgcagtactaactatttttgaaaaggtgccatagaaaggaagttgtaaattttttccctatgtttaggaaaccaaattaagttttaaactcacacttgtgaaatcgcattgtatgaatctaaattaaccaaaataacttagtcaactaagattatgaaaagcagtaccggcaaacaagattgttgcagctcaccttaatgccaaatgtaattttggtctgctattttttaagatgcacaaacatagaacctggaatatctgttttttctctctctgtgatactatactcagaatcatgaaacttgtgctccggatacaccattccagtttgtggaaaaacataggtctagtacattttattagaatgtcactacaagaggagtgggcatagcgctgatacttgagttgctgaggtatctggtttagcttatttggaccaaaaaagcactgatcttcattatcatctggggttcctgttatgctctttttattttgttggtccctacctccaccaccaaaacgaagactctgctccaggactcacggtccccatagccagagtttgctcaaatagaacttaagtttgccttttcaggttgggtcatgctcttttaggccttgaagttgatccctaaaccaagggggtcccctccattccctcccaacccctttggtttggggatgaaatgaacaaggctctgcgtgttcaagaagaaaaggtagttctatataattgattaatttgatttgcacctgcaggttttcattgcttgtggtttagggaaaggaaaaga

SEQ ID NO: 37403 - DNA, 155 bp, Sorghum bicolor
  Intron number 1 from transcript Sb01g008650.1 (locus Sb01g 008650) derived from phytozome v7.0 (chr-ID chromosome_1; pos 7469495 to 7469649 reverse strand)
gttacaagctggttagtaggtttcttttcaccagttcttttaaatccttgtgtttttatgttctgacatatatatcttaattaatgtagctaattatgcattggtttgatttcaatggctttatactatatgttgtttttaggtcatactcacta

SEQ ID NO: 37404 - DNA, 1035 bp, Sorghum bicolor
  Intron number 1 from transcript Sb06g017510.1 (locus Sb06g 017510) derived from phytozome v7.0 (chr-ID chromosome_6; pos 46904200 to 46905234 reverse strand)
caccgggggcgcccacctcgccgccgcctgccaaggtacatcacgcgttcgcctctctctctctctctctctctctctctctctctctctctctctctctctctctctctctcgtgcgagtgtgagtgtgtatgtttggctgtgtgcgtgaggtgagggtgtgtgtttgctcggatccagtggtggtttggcgagatcctagtgtactgtctgtgcttgccgatttggttcttgactcttgagccttttgcgtgcgtttatgatggtatatatatttcggtgcgagttctcgccttccactgtggcgacgaaccgtacgtactgatcaagtttgttcgaacttaattttgcttcatgtcgtcgtctctttcgagtcgcaagaccgctactactagtgggcatattttgggtgagattacccgttgctccgtacgcgcgcggctcctggtctttgtagaccttttctctttggtttggatttcgttcgttttgttctggatttcgaaaaaaagtttgttcgtcttggttccccactctgggcttaattttccccatggatcacctgatgttttgacccgtttctgatgttttttttttgctaaaaagtatttgtgcttatcaagcaggtctgcgtttctttttcgcctcttcctttttgcgttcttgtctgcttgttcctgttgcgtgaaaagtttcctggcctgaattttgaacagagagagagcaactgccctctgggcttctggcttttgcagcagcaggccagctgcacaacctgcagcagcgctgcagcctttcaggatttcggcaaagaccatcccattcttttgcccgtttgttttcttggcccgcacgaaatagcgccacgtcgcatgcttttctacccgaaagacgatactgcccttgcactaattatctttccgttgttttccttttgtggacgtgaaattattgcatctctggactaacgccgttaaactctcgtgctgtttgcctgcaggtccgtcacctcccgccgccaccattcccgtgatc

SEQ ID NO: 37405 - DNA, 734 bp, Sorghum bicolor
  Intron number 3 from transcript Sb01g038160.1 (locus Sb01g 038160) derived from phytozome v7.0 (chr-ID chromosome_1; pos 61748507 to 61749240)
caaaagaaaagctggattcaacagtgatcagtcaggtatgtggatttcagggtcccaagtaatttgcaccagtgctgccatgcatggttgattcattttcttttccatacaacttatttgctcctgctaaatgtgtcccaccaaaataagtttcctgacccatatggtgtagttcgtagtttatatgcttggcttggaaatcccatattctaatgtgcagttcttgagctgtgccctcctctggtttggttaccaatacaagtacttgcattttgaagcttgcaattgtgatcaggatccccagaatttaatttgttagttttgttcaaaataagatatattgcatatttgtatgtatcagaaaggctgtaagggcatgtacaatgcaagatgcttagacatatgtgcttaaggagaaagaatgttgtcatactcctgagcatctgcttgttcctacaatgcaaataaatgcttaggtaggtttaacctccttgttaacacacattaagcattggtgctaacttaagcatcttatccacacctttgaagcattgggtgctatgattgctgaagaaaaagttttttttttgttaagcatctcctctaatcatctcttccattgtagctctaagactgcaaaggattattcctttgaattgcagtatttttgtagtcttgtcaattaagtgctatgttctgcctgctgaataagttctttttgcagccggctatat

SEQ ID NO: 37406 - DNA, 538 bp, Sorghum bicolor
  Intron number 2 from transcript Sb02g041460.1 (locus Sb02g 041460) derived from phytozome v7.0 (chr-ID chromosome_2; pos 75276128 to 75276665 reverse strand)
tccgccgtcacctatctcgcacttatccctggaaggtagaagctcagatctccactgtgttggaattctgtatccagaacaacatcttttactagttgcctgcttgactcctagtttgccctatgtttcctagttaccaccgttttgagtttctactgaatggctaagttgtttcttagtcaccctctgaggtgaaatacttgttcttctggtagtatttgactgttatatggagctactgatattggcaaccagaacatccatttgaaatgcaggtttaagctgctgagttattgtaattgcaataattagtcagtgtgttaaattaatgacatgttggtcagttggtttcatggtttcaccactagatttctaggatgtattcagcattgcatctggtttgttttggcctacgaaattaatttagcaaatattctctaaagaaaaaaccaccgaaccaaatgtgtgtcttgaatactcagctatttgatttttatttgcaggacgatcccttttgcttggaacctgataactgctg

SEQ ID NO: 37407 - DNA, 446 bp, Sorghum bicolor
  Intron number 2 from transcript Sb01g045510.1 (locus Sb01g 045510) derived from phytozome v7.0 (chr-ID chromosome_1; pos 68610811 to 68611256 reverse strand)
ggaggaaagagtttggagcagatacaatactagaggtgagcttctagtagctttttgttgttagctttgtatttgttttgatggttgtcattgctcgatgctctgaggtctcattgcttctgtttgtttcataatcataagaaaacaaaaatactagagatgaggctaatgcttttgggttagttggtacaataacattatgaccatacggctgcgattttttattggttcataggttgcatagtgttagtgtaggaaatgcctgtcaccatcttcaactagctgtttttgacatgcaagtgataaatggtgctaatatgtctttatttgcaaacctgcatctctaatctcaaatgcaccctttatgtttcatgaatcgtgaaaagctataactgatgcttatcattgcaactgaatcctgcaggacttcagttttgaagagctag

SEQ ID NO: 37408 - DNA, 864 bp, Sorghum bicolor
  Intron number 1 from transcript Sb04g004870.1 (locus Sb04g 004870) derived from phytozome v7.0 (chr-ID chromosome_4; pos 4687811 to 4688674 reverse strand)
tccgtgtgctcgacgtctcgcgcaaccagctcgaggtaacaaactgggcatcttcatgtatattaaggtcgatctactactactatttgtttagagtgcctatgctagtgccttctgtctatgaaccatgaaatgctgtttgggctgatagttgtggatgagcgttgttatgcgattgtttgcacatatttcactgtttttataagatacatattccactgtcatcctttttcgaaaaaaagaaatccacctttatggcctgcaaatggattaaccggaccatgtgatggctgattggagtttaactgtaaaaagaagtgaatgacttgtttttcttttccaacagttcttgtttgatggatgtgtttgagtgatttttttccccgaggacaaggagcaagtttattttgggtgaaaatcatgtaatatttgggtgacaatagctgaatttaaatgttcgtgcaaaaataaagtatcagatggcatcaggctgaaactgtgttatacctgacgaaactgctacatcacgcaaatatgattatatgattgattgactaaagtgtgtctatctttgtacatattagtttaggccctgtttggttccaccaactaaattttagttagctaaaattattttagctactcttgggtgattaattttggcacatcatcatttaaaaaacgacaagctaatgttatctacaaaatgctcaccatctttctcaagtactaattaaccaatagactgaagggttttgagttgtaatttcacaacaggatttgttacatcctgttaattagtttttgtcccatgcttgattgattaataaaattctgtttcaatgtcattgtaggttattccag

SEQ ID NO: 37409 - DNA, 735 bp, Sorghum bicolor
  Intron number 1 from transcript Sb06g021670.1 (locus Sb06g 021670) derived from phytozome v7.0 (chr-ID chromosome_6; pos 50868825 to 50869559)
cgctcgaggccgcctgctccttcctggactcgcaggtgccactcccattatctggacggatcggtttctttttgggtcctagtggagaactccgattcgcattgcctcctccacgtctctgctaatggtattagttgttctacagtctcgtgtgcacactgcacggtgagcttgattggctttgtaatctcgaagtgggctgtgaccagtcgcgcctacttagtactttgaacctacttgtgtatgcgtgatactgtaactgtaagcagcgtcagaatgtaagtctgctatcatgtccggttttctacttcccgtccacattgttcatcgaagatgggatttcctttcagctttattgtattttataggtggcatcgtggagtgataggattgtaggaaggtatctgggggtgaattaatctctgcacttgattactagcttcctttgaaattagctttgtcaattatcaaataggtttttcagtggtgaagtaaccgctgttagtttcaatgtttcttgatttgttgttcatttgtgtgattccagttccagcatctcagattgcttaccatatttatagtgaacttacccggttacccatgctgcattatcagcttctgtacttttaattatgattaatgttactgataatgatttggtgaattgtcagtaaaataaagtgtttgcacattttttcaggctattgaattagaggctgaagcttaccccttact

SEQ ID NO: 37410 - DNA, 595 bp, Sorghum bicolor
  Intron number 1 from transcript Sb06g029107.1 (locus Sb06g 029107) derived from phytozome v7.0 (chr-ID chromosome_6; pos 57797508 to 57798102 reverse strand)
acgcaagcttatctctaaatcaggccagttggaaggtactactttctttgtgaaatgttaatagtagtcgctctttcgtcaaatcatgtcaagtatctgctcaagctaagctgtttatcttgtccatgttccatcatatcagctgtattgcctcatgctgtagaacagtagtatgccaaatggaatgtcaagaataggcagttgacttaaaaaaaaacttaccaagatttgagagggtatagccttccatagtaatagtatcatctgaccatgttagcaacttatttatttaaatgctctgccatgttatcatttgtttaattccagtcagttttttttcctattgcatttgaatttatgtgcttcatcctaaaatcactccataacacttttcttattatataaacgctgtacatgctgcatttgttctttgactatgaatcactgactcatcttgttgatgcttctcagttctcactcttctcacttctactatttaaatattgcctgatgagattcaacttcatctgtatctcaaccttttctgttgtggtttgtaggctgttctccagctttcagccctctgattatttgt

SEQ ID NO: 37411 - DNA, 889 bp, Sorghum bicolor
  Intron number 2 from transcript Sb03g032700.1 (locus Sb03g 032700) derived from phytozome v7.0 (chr-ID chromosome_3; pos 61132298 to 61133186)
cagttgccagatacctccagcttgacagaaagaaggttaggatgattcaaaataatttcatttctggactatgcaattcaacatagatgctcatcttgtactttattttatctaaatcactactaagatgtcaacaggttttgggtccatggaacttaaaataaatccagattttactttccaggagtagaaagcataataattctatagttctgagtagcatgcttgcctgccaacgtgtcacaatcgtagtattttgttttatctgataattccagcttccagtgtcatcaatttctgaatttattttaggctgcatgaaatcaacgcacctttgttctcatttaatttcaatacatgatccgtaaacagttgaaattttccaatattattccattttttagtatattttcagcagtaaagtatttcataactcgtaaaaagttgagcccataaatgtgatgtttcatttaatatatgatctggaaactggtcctgtgattgttctagctagtagctagctatcacaggaaaagcaggaccagaacagagccaaacagattggttcaccaatattgggaggtcttgatcaatttttgttttttggtttccatatattccatatattcttcttcttgggaacttgcaggtttcctatttcagtagaggtgttcctgttttaatagagatgacactttaaagtttaatactgaagtttcatatattgtttcataatattgtctcatttgatttttttgggggtaaaaacttatgttgttgtcactgggcagactctttcctgtagttcttttcaacttgttaatttcctcttgattaactctttgttcctttcgtgtccagtgctgccttcctgttaatcttgcagcac

SEQ ID NO: 37412 - DNA, 801 bp, Sorghum bicolor
  Intron number 2 from transcript Sb03g007810.1 (locus Sb03g 007810) derived from phytozome v7.0 (chr-ID chromosome_3; pos 8230537 to 8231337)
tggaggccccctgcgcctgctgtggcagcctcaaggtcttgtcctctttaatcacgctatttttattttgggccgaaataaatgctcttggttggttatgcagcagattcatgatcgtgctacggtgattatgcaactgtttctgacccactgtttctcaggagttcctaaaataatgtgttacggttcctgtggtcaaatgaaaagttgatcttttttcagcagaagacgtagttgttgccacttgttactagagtattatgtttggtctctttatattttaaattgggcactagttaatgtagttgacctagcatgagaaattgttgacttttatggttggggttagatgttgtaggttgtgcagttaggacttaggagtaccatgttaacttgagggtcattgtggacaagagctatgaaccaaatcaactgtgtttgtctcaatgtggcttggaaggcactatctagtatgttatgtagtgggccttcctatttgacagtgatgtaatagtgcgttgaaagatataggtaaggggaaggtgttggtgttttcaaaagataggggtatggagggagctatctgtttgagtgtgaccttcacacaatgtgtggggcaactacccaaattgctgaatgcaaggcgagaatgtaggtggaatggtgttgatcttattgcgcgttcttgtttctgatagtggacagattaccatgctgtgtgaggaatgaactaagaagatgtatttttcagtaagctagagtgattgaaccaaattaaaatattagtttctttcttgcagt

SEQ ID NO: 37413 - DNA, 1034 bp, Sorghum bicolor
  Intron number 1 from transcript Sb02g007590.1 (locus Sb02g 007590) derived from phytozome v7.0 (chr-ID chromosome_2; pos 9567333 to 9568366)
cgctcgcatccgcgacgaggagtctcgccgctcaggtatatacctggcgatttttgtcgtgttgttgctttgattgactttacgatttggggtagtactcctgaactgttgcgcgccacctgttcgacgaatcgtggagaaactataattgctcatcatgtgctgcctacaatcgtgattctctttcacttcgacagagcgaaacatcggtggattgcatgctattttgacggtcattgtgaactcatttaaaaagagaaaagagaatggaacaatgtggtggtcaggtttaatacttgataggaactcggactacatgttttgagagattatccagttatgctcgcaggttgtatatgacctggcggaagtggaaaacttctgagtgtattattgtaatgtcactgtggatactggaatcctagatttttgtgattcttttggttcaaacaaggcggcttagggtttacagattcctataaaaacatatggcagcttagcttaaacagagaatatataggaacatgtctatattagtacacagttgtcttctgttgttgtcctgttacttattttctagtagatcgatatttgtgttttgttgtcagactgccattttcacattgtttgctgtttcagcagaatgtgttggtttattgtgctgcaaaattttaggaacagaaattgttcttatgtttttttaaggttgagcatgttttaataacagctgaggtacaaacttgattagcaaaatatttacctgtgcagatggcttagtgcaacttttgttatgtgctttgacttcattttctagtcatgtattcacattgaaagatgttaaaatttctcatgagtcatgaggtaaatgttgatgacatatctgctaatgtttgaaccatgccgtactcttttccttggaaagctttgataataatcactaaaaagtaagcttcttttgctttagatattttctatgttagttgcaatgtaatttaacaaagttatgcttgcagatcctcttttcattgatccat

SEQ ID NO: 37414 - DNA, 747 bp, Sorghum bicolor
  Intron number 1 from transcript Sb04g029880.1 (locus Sb04g 029880) derived from phytozome v7.0 (chr-ID chromosome_4; pos 59913206 to 59913952 reverse strand)
accgcgcggcatcctcctcgtcggatcctcggctggtaggtttccactctttcgcttctccctgatgaggcgaaaccctgtcgcgatccgtaccttttcttttcagttcatggaagcgtgaaaccgtcacactggcagactgctgtggtaatcagtcaaattgaccaaacgatttcgctcttctgaagctctgtttggtcaaattgaattgtgcaaatgacaaccctcttggtactcattcggggtagtaagcaaatagtagctgttgatgaatttgctgcgttgaaatagcaagctcaaacgtttatcctcatggaatttctgcgcttcagtcagtatactccaaacttgaatctgtaattagcagtttcatctaatttcttttagggatctgaatttctgtcagattccttaagaaaatgtagtggcaaaaggtttcttgtcaagtaatctacacaattttcagcaaatcctactagaaatgtaaagtagcttggatgtcagcttcctgtatggctgtatgtagtggttgcgattaagttgatcctatccactgcaattgtcagcgagctagttgatggagatgaacaagatggtttagtttgcattgaagaataaatatgtggtattctggatacaagtcttctcctgtcattaatgaagctgttgtattgtgcttaggcatgtatctaacaataattccctgatgcaggggcaccaattgctggatctgcagttgataaagtg

SEQ ID NO: 37415 - DNA, 694 bp, Sorghum bicolor
  Intron number 2 from transcript Sb04g028130.1 (locus Sb04g 028130) derived from phytozome v7.0 (chr-ID chromosome_4; pos 58082215 to 58082908 reverse strand)
ccgaccggctgggctcgcacggcgcatcgtccgtagtatgcttcttccatgccatgtctgatgtctttgcttgtttgttcagttgtttgctttcagttgcgtgttctagtaaattgattgattacttgattgtcgatttaaattacgattctttgcttggacctttgaacgttaggtgtgaacctcccttttgtaacaccgttgtttacgctttaattaataaaattcctgcaggggccaaggcccctccagtaccctcaaatacgttaggtgtgaacgtaaatatcccatccgattctctaaattttcttcgacgttatcatgtatgtcagtatgtgtgagatagtgactgttactagtactacttcacaaggttcccgtttgtttcataaaaaaggcttctcttttatcacagagaaaacaacctcataaacctatgccctgttcgcttgactttgcactaatgcaatccagaaaaatattcagatagtgactgttacctctaatttgacttgcactaatgcactccagaaaaatattccaacttgcactattacttcgttgtttgaggtctatcataaatatgagtttaccacggtcatttttagtaattttatagaaagcgctctctataacagcactcatggtttggtgtgcaggccgatttcattgagcagcttcttcgtgcccggtt

SEQ ID NO: 37416 - DNA, 933 bp, Sorghum bicolor
  Intron number 2 from transcript Sb05g007400.1 (locus Sb05g 007400) derived from phytozome v7.0 (chr-ID chromosome_5; pos 13156957 to 13157889)
cggtgactccaccaacgccttccccaactcggtcggtgtgggagactgatacggtctcagtgaattcgaatttgttctataacaagagttatttttttttcttctctcgattctgttcgggatgaggtaaatgtgttgatgaggtgttggttttgtcgggatctcatgagtcagatggacgcatttcggatggctctggatgcacgggtcgactgtgtggaggtggatgtttcaaggtcctctgacggtgtgctctttgctctgcatgataggtaattgaactgccactttgctggtgtatcacaaacactttgcttttgtagaacgtgaacaggcacctaaatggaacatctggcaaaattcccaagatcactatctatcatatgtgactctttacccactgcaattgctatttagctgattattagttggatgacacaaccatttttcccaacacccatttacatagtttggctatttattgatatatgctgtcattgtttattaaattggcaaactattaagtttggttttataattatgagaacacagttttatctgccaattactgtcttcaatactagtctgcatcatgaatgatgcacacttcagtttttgtaaggggttgcaggaagcatgtcattacagtcttatttagtgttcttagttcttattacctataaggctataaccgtggagtgcatggctatgagatggtttggaatcatctttgtggaatgcatggatttttaaaatattttggtttagtacgatcaagacatcaattagcaccaaccaccaaaatgctactgaaaatgcaatcaaatttgtgacagcacatttcttaggaaaaatcagccagtgcttacttttctttcaaacaaacatacctggacttaattcacaattgacacaggcagggatctacaaaag

SEQ ID NO: 37417 - DNA, 1007 bp, Sorghum bicolor
  Intron number 2 from transcript Sb05g006450.1 (locus Sb05g 006450) derived from phytozome v7.0 (chr-ID chromosome_5; pos 10420564 to 10421570 reverse strand)
gactccagggcggtaagtagcgtaccatcttctcatcatcatatatacattcttttcattatttgttcatacacaatacaatggtccatttggataattttatatcttctgatatttgtttgatcttgctatattcttatatgcttagtgtctacagccaccgttacccattttcaccatttgtcattttatatatataaactctatgtgcatatagcgagaacaagcactgcgtgcacattcctcagctctcacctcccgtgcaacagctgaccctacacatattttatttaattttatccctcaggcgttttttctgtccgatgtgctaaccaaaacaattaatgatatttccttaaacgaaatcaaaaccaactacaactctatctactcctcgcatcttgatttaattatttttttaaaattatactctccaccagaaccatttgtgagagatagacacacacacacacagagagagagagagagagagtatgtgtgtgcatggggcaagacccaattttttcatatattctatttcagtatttattctcctgtaaaatgaaaacaacggattgttgggttattaaaaggtcacacataacttccattttggtattaacttgtgcttataccattatgacttgcgctgctcttggtaatcaagaatactttagtactttagatgaagctggattctatggtttctaaatgtattgtagtttcatgaaattttacaaacactaagattcatcagttgcaatcaaaattattatatatcaattatttatttgcataaattttggtgctatggaattattagcgaatgcacttatcatgtttcttttgcgatctatgcatttattgtgtgggggatatatatactttgtatactagtgttatatctgggaaaataaagctctaagaggtaacactatttagcttgctgaatgttctccatagtttatgcaggtttctggtaagagtggctgtaactctaagataag

SEQ ID NO: 37418 - DNA, 1005 bp, Sorghum bicolor
  Intron number 1 from transcript Sb01g010130.1 (locus Sb01g 010130) derived from phytozome v7.0 (chr-ID chromosome_1; pos 8974257 to 8975261)
tcgacagaagcgactcaccatcttccgcctcgacagtgagaactcatttgcattgcctatttgtttgttactactatgattctagtttgtttttttctcctcccatggggttgaccatgcgatcggtttaggtttggtagaattcgaattgggggattggaagtgggaatatgttgggttgtggagtgcaaatgtcagatcaattgtgtttacttaaagaggtataaaactggcacagaatcgagtagttgcacactttcacttttagtgatgcaacaccgttagaattcaattagtgaatttgtaagtttagaaactgtattgagagttttgaacttcacgttgatcggtcaaattttctcttcatatggtagtattaagcaactcttttcatctctagtcagtcttcacgtgcctacatgcggagcccattaaaactctggtacactgttgttgaaattcccttttttagatttagtggcattagtattatccatgcttagcctgatctagttcttcaataggtattggtttccctgttctacctttttaaaacatgtgcatttcataattgtgagaacagaatatgtttcatggaaatccatctctttcagaactttttttctggcaggcaatgtgtgactgcatccgcatttgtaatttgagaaagcttttgatgtggtagacttcattttattgaaactaatggtagggaaatggcctgtaccaaaaaaaaaaaaatcaagaagaaaaatctaggcattgtcccaagtgcaggcagagaacaatacatatgtttggttaccaacatttgatgcatcaatatcagaatataggttgctttgtgccggtatatcattgggtacctgttaatggaatttactaaggttgtatagcaaatgtaagctgacaaagaatcaaagataagagatattctagactatgactctgacatgtctctgttggtcaggtgggcgagaatttgttgaagtgaaggaatttgga

SEQ ID NO: 37419 - DNA, 905 bp, Sorghum bicolor
  Intron number 1 from transcript Sb04g030440.1 (locus Sb04g 030440) derived from phytozome v7.0 (chr-ID chromosome_4; pos 60435087 to 60435991)
ctcgcggagagctctgcatcatctccgaagaggccgtacgctctgctccctttgcttcatttttcttttccccatttctttgagtctggcatttttttttagtattcccgtctcccttcctgctaaaatttccactgataggaccagtgccggcaatacttcgggagcttggattccttgttctatttttcctttgaactctgattaggataactatctacttcagatagcatatatgtctggtgaagtagagagtagagactgcgtaaggaggggaaacaacctttgaactgaactgaaaaggagcaatttggggagtcattgttaatctgcagttttatagtgaaatttaatcggcgaggtattagtgccaaaatcatttgtactctccaggattggaccatcgctttttcaatccggtccggtggtccgtggtcttgtactcttgtagcctcacatcactgatgaatatcaagcaacagtgcctgaatgatgttctttttagactatacgaaggctgacaagcatgcaaccactaaaaacaatgctttctggccggagaaggcatgtaatccgaatttttaggtgtgcatgctatatgatgaactattccaagagtacgaaaaaggagttttggcattttccatccaacaatgcaatatattaggctctacataatcttttggctacgacatacatggtttttcttttatttttacttggtagacaatacacagtgtgcacttttctgtttttgcaaaatcagatgtggaaactttggtcatcgagaacatgttcttttgcttgcaaaacttacttcagaatcagaactatgttctatgattttgttatttgacaagtgctctgctagttacaatttctgtaatctcgccaggttgctcctt

SEQ ID NO: 37420 - DNA, 776 bp, Sorghum bicolor
  Intron number 1 from transcript Sb03g005860.1 (locus Sb03g 005860) derived from phytozome v7.0 (chr-ID chromosome_3; pos 5952707 to 5953482 reverse strand)
ttggccgtacaggtccactatttaatttctctgcttccattccatgctgttgaatattaataatgagtgtttgacaggacttctcaggttttgcggctcctctgaaacagctttgctcctctaactcctataaaacattattcggtaggactcttgtggaggagtcggagagaaacccttctaaagaggcctttctatttttcaatatttaacaacgaaatggatcggagaagataaattgggtcttgccggttttaagatgatttttctattttgtacctaaaaaaataagctgccggtttgatatctaaaattcataatgaattaaatattttaatgaaaaaacatgtaactggtatgtatcttttttcttcaaaaaatgttatagacttctctacatctatatataattatttggaactaatttatttatgtttctattgttttactgcttgcaatcatgtttaattattatttatttgaaataagtaagagccaaatgactcttttttagaatagagccaaatgactctagaagtctaaataaagcattatcatcagatacataacgagaggaaaaacagatactattttcagatttctccaatttaaaatagattaatcatgaaatttcggagatcaatcaaaccatatttttatcattatcttttgaaaatagaaaaccatctatacattatatatccattgacatgcttatgatggcaggtgactttcttgaagtgtggaggggtggcgttagggaccgctctccacca

SEQ ID NO: 37421 - DNA, 685 bp, Sorghum bicolor
  Intron number 2 from transcript Sb04g001270.1 (locus Sb04g 001270) derived from phytozome v7.0 (chr-ID chromosome_4; pos 1083378 to 1084062)
caaggcctctgccaagcagcatatcttcttacaaggtacatctatctactcatctctttatgtccatgcatcactctatccttttttttagagtaaaggtttctccctttattgatcataaagcgttcaagacagttaagttccagcgaaaaggccttaaaagccaacaacaccactaccggaatacatttttgattactttgtgtcaccatcgagtcttcattcgtgtgatgaggagaatccaaacagccccgtcccaaaaacgatttcccccccattttcaaccttggaaataatccccatttgagcagcctgtatagcccacatcacccctttccaaaagggggaagtcatattatcagcacagcacaaaacatttggtctgttagtcctatgtacttatgggctacaatcttttttttgaggttcatggtctacaatctttgtccaaatagaattggtttgtaaatgatacctatagatccaggactcaacaacgccatactaagacttcttaaatcagggattccaagactccctaactcaacagttgccgaaagaaaaccaatgaccattacttaattattactgtattagggagagggttataggccactgctattctctgtctatcccagctgctccatttctgatcatcctgctggactcctgcagggctcctcag

SEQ ID NO: 37422 - DNA, 685 bp, Sorghum bicolor
  Intron number 1 from transcript Sb07g009990.1 (locus Sb07g 009990) derived from phytozome v7.0 (chr-ID chromosome_7; pos 17891050 to 17891734)
acttcaacccaaagcctttggacgacgacgccaaggtaatgtccggacgaacccgtccatgttgcttgattatcgacagcttggtgaatactggatatggttgctggaactaactcttgtgattaagttaaattttgcagtaaaacttagccagaaagaaagtggtccaaacaaccaagcagcataaatgatagtgtttgtgtggttgtcagttaaattttgttctcttctagttctatttaaatttctgccaatgctattggataaactagttctacttctagaagaacaatgtgcttttgcaggaaggtatattttgtgttgtttatgatgttctattctatgcaaggctttgtacaaacttgttataagaaggcttataattgttaattaaactatcctgctgtttcttctagattgtggtaaaaataagaatgtgttcttactaaacttctgcatatagaaaattagccggacaattagggccagattatagaagtttaataactgaatatggttgtttggtttgtttatctactattctgccccaaacattcagcagtagcatatgtttgtttcatcatgatgaattgaacttcagccctattgtacatatttcattctatcaatatttggctcaaaattgtttttaaatttgttattatctatatcacagctgtacatt

SEQ ID NO: 37423 - DNA, 1015 bp, Sorghum bicolor
  Intron number 1 from transcript Sb07g002560.1 (locus Sb07g 002560) derived from phytozome v7.0 (chr-ID chromosome_7; pos 2809230 to 2810244 reverse strand)
tcaaggaagtgcgtgaggaggtcgccaagtacaaggtgaataacttaagttttttatggcacctgctgtttgcttttacctgtcaatgcggccattatttttgaatagcttgcgagatgtactacgttttttagcttgcgagatgtactgctcgtcactgcaagttaattgctcggaggtactcgtcactgcaagttaattgctcgtagtagtaattctgatttgctgctcgtcactgcaagttaattgctcgtagtagtaattctgatttgctgctcttcactgcaagttaattgctcggagtagtaattcgatggcgcacagcacaaactttattttttatgcaaattgtctcgtatgtgtgccgtaggtgtggagagatgtcacatctaaattcatatcgagttgtcagtgtgttacttgggtcagttcacctgattgtattttgatacagcacctagtttactgatagtaggtgtttaggtctggggcacctgtagatggtagtcagttatgctattctcttatactctttgaatatacttgcaaattgtttatgctaggatgttttgaaaattctgtattcacattatcatttcacattctgttggtagcttagctataaaagtttgtattgtattgtgatatcgcttgttgaatttgccagactatctttgatggaggcataacaagtcagttttttcatgttccatatcttgtctatgtgttagacattatgttgaagtatatgtgttgcaacacttctttgatgttgtttgctgtttagcttgttgaacttgccagactatctttgatggaggcataacaagtcagttttttcatgttccatatcttgtctatatgtgttagacattatgttgaagtatatttgttgcaacacttctttgatgttgtttgctgtttagtaatgtcaaggcatagattgaatagtaatgcaaattcttgttttttttctacaggttggggcccctgcccgtgttggtctggttgctcc

SEQ ID NO: 37424 - DNA, 917 bp, Sorghum bicolor
  Intron number 1 from transcript Sb02g025950.1 (locus Sb02g 025950) derived from phytozome v7.0 (chr-ID chromosome_2; pos 60994650 to 60995566)
ctctctgtctccttccggcatcaacggccgctggcgtcgaccttcgctggaaggccgctcctgctgacggctgtgcggagctccggagaccctggagaagtggtatattctgctttcactgaattttaatcaacgagggtttacggattttgtttttggttgccttgattgggggacattgttcacaaactcttctttgaatttcccgatgaactgaagaacatacgtgctgtgcgtttgtatctgtgtctaggataggttgattcactcgattggatgtggcgaatccattctaggctgaagctgttagtattgatgtggcgaacaatcatagtataggttgtgccttttgtgggatgtggatttggacagtacggtctcccctgtttgtcagttcaggaattgacagctgatgcctttaggttcagacagcaatgagcacataatactcccggttgctacttgctaatcattggagctgatttatgcgagatttatcagtatgccctatgttctatacctgcgctcatatagtgtgaaaagatagggatcattactcattagagttgtgctactaaaaatgtggtagctaatagttggtgtggacttagggcctgtttagatcccttcaaaattccaaaggttttacaagatttccaatcacatcaaatcttgcggcacatgcatggagcattaaatatagtaaaaaataactaattgcacagtttgcctgtaaatcctgagacgaatcttttgaacctagttagtccatgattggacactgtttgccagtgtcaaaatccaaaaagttttttggatctaaacacgcccttactagtaatatggacatgcatgtagtgaagctataaaaggattttgcagtgtgacgggagttgagtcaccctggtgcttgattg

SEQ ID NO: 37425 - DNA, 645 bp, Sorghum bicolor
  Intron number 1 from transcript Sb01g048540.1 (locus Sb01g 048540) derived from phytozome v7.0 (chr-ID chromosome_1; pos 71531497 to 71532141)
gaggtggctaaggaggaaggcaacgtgagacgtgagtgctctattccctttctgccctgttttgaatctgttattgctactgcgttttagggattttggtgctaaatgtggttccaacttccaacttccataagcctcatctcgtatattctgaatcggaggattaggtttgtggagttaggataagaatagtttttggttagctagatatattggggctgatgctctgatcaacgaatgcggattgatttaggtatccttacaccatttgatatcttcaaactgcattccattactggtatctgcaggcaacaaaatgcttgaacctataacagccttcttaggaacaaaaagaacttcatttgcccttattagcttctagctgatcttacagtatccatgatccaatgtcgattgcagtccgcaaaagttattcctctgttgtggcattcagttgagacttgggtttgtaccacgttataagtgaaactatataagttgaaataaattgctaacatgattgcctaataattgttttctttcattgtttcatctataagacaatttcttcagatgcgatttgtacttttacattttacaggatctccgaatagaatatctaattttcctaataatcagaaccaa

SEQ ID NO: 37426 - DNA, 852 bp, Sorghum bicolor
  Intron number 1 from transcript Sb02g024980.1 (locus Sb02g 024980) derived from phytozome v7.0 (chr-ID chromosome_2; pos 59645498 to 59646349 reverse strand)
cttccccgaccctccggcgccgccgcacagtcacggtactactcaactctccgcgccattgctttgatgttttatatggatgcctgccttccacagaaaagagggatttgaggcctgcttggttgtgttccagaacttgcccaaataaaactaagacagacccctgtaaattttggctatcgattggtttactattataaaaaaaaccggttctatctatggccaaaatcacggcaaagtcactagaaacttcgatcgaaaagggattgctgctatggtcctgttcactacagtacctttccagacaagcgaacagcctctatgtcatggcactcaaaacaaatgcttgtctacattttttttgcccaaaaattggcaatttttctattttagtaagcccaagtttaggtttgtcatgattgcagttgggcaactttttctttaacccaaccaattaggctctctttgtttctgtttaggcagcgaaaaggttcaagaaggcgctaggcagtgacccactgcctagagcttaggcaagcctaggcattcccaaggtgttttctaggcgttagtatatacacacatatatgtttaaattcttgattatatattgccccaataatttgcattagctcaatatttctttgaatttcttcgcgatatcgcttgatgtttagattgatgagatatctgatgatctcatcagaaagaatttgggttttctcttgacaccaaaaatgactatgagtgcaatttggtaggagaaaatgtaaacatttcatctaatcctgtttatcagacaataattctcttgccactggtgagcaggtgaccccaatacatcaggggtag

SEQ ID NO: 37427 - DNA, 920 bp, Sorghum bicolor
  Intron number 3 from transcript Sb01g048720.2 (locus Sb01g 048720) derived from phytozome v7.0 (chr-ID chromosome_1; pos 71673149 to 71674068 reverse strand)
gcagaggttccagagtggtctggtccatcatccaggtgtggttatttatgcaagactatttatcgaattggatcatgtaaatttggtgtgtcaaaatttagtttctgaagattgctagtttcctggaaacaatatttgttcatttttatttttttttaaattatcacgaccactatgatctactccctctgttccagaatttaatatgtttttgccttaagttaatctatgcattactagaaaattaagcaaatcaacaaccaaactaactaattagtgagggggtaagttagccttttgccagactccttatttggttctaaaattgcttggataccattggtgctaagggagaaaaatactagataactaccgttagtaactaaatcaagggacatgtgtacatgctcttagccgtcttaggtgagtagggctaagcaacaactaaacatttgcatggacagttctgacatgttagtttgattgatggtgaaatcagttcgttctggtgtttccaaacttaggatataacttattgtactagcatctatacaattttttagcattgatttaggatgcactttgataggcataagaatttttttccatttcaaacattgattacccgtccttactccttagattcaaaaaacaattctttaatggtgcagcgttcagtgtatgagcttcacatatatggtttatgtatgccactctactagtctactttaagatgaaatttcttaccgtttggagtttcaatgtttcttcttattcgtaaatattacagtccatgtaatttgtgataagttatcatgtggtatgttaattttattgtttcataccgtcattgtctttggaccctttcattaattagcagtgctcatgtttatatatttttaattatttctgcagcagtg

SEQ ID NO: 37428 - DNA, 630 bp, Sorghum bicolor
  Intron number 3 from transcript Sb03g025910.1 (locus Sb03g 025910) derived from phytozome v7.0 (chr-ID chromosome_3; pos 52138322 to 52138951)
ttttccagtacctggttggtttcatttcccagcaacaattttatcttaagtatcagcagctgagctgttttgttgatctcttcttaaacctttcacacataaaatgcaagttacatttggagagacattaacaatttagatgcaatggtttttagattcatttcttcaagatgagtacatagtaattgcatacttacatttgttagtagcatggttttgtggtattggtgtgtgtgtttgtaagggctctttctcttttttcttattataatattaatgatatgcatatctcttgcgtgtttgagaaagaaaaagcaccactaaatcatttgttcatcacttgaaaagtaaatgccgatatctcttttagtggttgtgaagtacaaaggtagctggcacatttacgtgccaagaactatatgcatttttgcaggtgtaggcataccatgtaaacaacaatgttagtcatgcatgtaaaggaaagtttccactcatctgttgatcaagttgcagatatatcaacttcagttctgtagaaattgcatactttgagttatttatatagatctgtggctttattttaaaatatttttctattttgtcaccatgcaggcttcatcattggcaaag

SEQ ID NO: 37429 - DNA, 680 bp, Sorghum bicolor
  Intron number 1 from transcript Sb03g033415.1 (locus Sb03g 033415) derived from phytozome v7.0 (chr-ID chromosome_3; pos 61737420 to 61738099)
gcgcttcagctggagatactccattaactggtaataattgttctacgttcttaacttttccagcccgtgccaatcatttgaagtttagtttgaattgagtactttctggtacaagagaaaacaaatgaagggctctagtccagttggctagagaatcctggcggcaccccgcaggtcttgggttcgactctccatgggatcaaatttcagactgggttaaaaaaatctcctcgtccgctccacaccaaagcacaggtcttgagggccggcccagttctcacatgggcaacgatttccgctatgtgagggtggggcaggggttcaggggttttgttggtctacatgagaaggtcttcttcttatcaggaatgctcgggggcggcttagcccccgcaggtcgagtttttaagagaaaacaaatgatgtatttgtagcttctttcatttagcatagtgaatctcattaaccttgaaatgttttagtggtttgctctgaaaatgtctgaggcgggtccaaattatcagtggataccagctgctgtatttttttttagtaattgatgaattgaaacatgcagttttttttttacttatgattttcttagactggtttgtaaggtaacttttatttttaacatgtgtattcttgaaggtgtgttttctgataatctttctttggat

SEQ ID NO: 37430 - DNA, 961 bp, Sorghum bicolor
  Intron number 1 from transcript Sb01g028840.1 (locus Sb01g 028840) derived from phytozome v7.0 (chr-ID chromosome_1; pos 50282089 to 50283049 reverse strand)
gggcgcgccacgaccccaccacgcccaaccgacaggtcagcgatacccaggcacttgattttgagacagaattttgggggttttgatgcgaatttgtgaacgattttacgggggattcggaattaggctgctctttcgttaggttcgtctgttcgatgggggcagtcggcactggaacaaataaattctgttgcgaaaaaaaaaaaattggacaaacaaaaaactcgtcgcctgagagattcgaactctcgcggggaaaccccatgtacttagcaggcacacgccttaaccactcggccaaagcgacgcttctggtagaccgtgtcgctgtggaatctccctttttcaggaagaacaagaacaggggtaaggactggtgtaggcttgtagttgtagcactagaagtctataactaaggttgccatcgttggttgctatggatgtatcaaggtagcgggcactgcttcctgtaggagggactgccattgatcaatgatcaaccatcatggctctcgagtccaatctggtatccttagttgattgcaaatttacagagacacttgaatttgagaaaatggcagaccacgagatgtttgggagtactatagtcctacaacttcagctttcgtactagttcttgtgttagactaacagtcgtgtggtgcatgatttaccttgagctgcagtttctatttctggcctatctacaatcttgctagggcgtcatcaacctatatactgaatcgatgtgtttctaacagtaaccctgcatccaacttctgtgctagataagcttttcttaagtgttaatctgaatctctgagcaaccaaagcattgtttgaatctggcatcggaacttgtctctgaataatcgcataagctaaagtagttaagtcaatcaattctttgaagcatgtctgacaggaataagtttctgacgacatacttgcatgtagggca

SEQ ID NO: 37431 - DNA, 1034 bp, Sorghum bicolor
  Intron number 1 from transcript Sb06g017890.1 (locus Sb06g 017890) derived from phytozome v7.0 (chr-ID chromosome_6; pos 47311123 to 47312156)
atccgaggctgacgacctcgagctgaagatcaaaggtccgcttgtcccctgtcctgctggggtttatttcgctctgttttgacgttttccagcgtttctcctcggttgatataggcgtatttctggtttagatttgggggatttcggttatttatttaggtttaattacttgaatcttacatgaagggcattaggtctgcaaaggaaacaaggcatatcatcaatttcatcattcaaatcatcaatttcgtcattgactctggtcatcattgttcattgacccactgatgaaatcctttcatttgcatatgtggttttcgtgagtagaaacaagttagaagctacaaccctatctaaacctgcaaatgtaactaaagattcagctccaggtatacctttctcagtgaccatttacttgggaagcttactttagattagagtgtaaaggtacactattatagctgcactatcgaagattttcatctcccataccaagcactgtagtgtgttccttctccagtagccagctaacctgttctggatgtttccaaactgttagaaatccagctctagatttgtcagtcttggtgatcaattacctgggaagcttacaattgacagagggtagtctgtcaagaattcatcagatgttctgcttccaagccacagcacctctagcagtttcccttcttcaacccgctaccatcttttgaacattgccaagcttaatgtgtgcattgttctctgaatttgatgcatccgtgaatatactagcctaaaaattcatggtagtgtatcctgttttgtgtgtggtcatagaggcacacacttattcaaatctttgctgcatatatatttatcaaaacagaattagggcctcagattgggaaagaattaacaagaaactgtttggtggcacctgaaacctgctgtgggacaatgaactcaagagataggacattattgccatcttaatgcattgttcattttgcatagcagagtatcaggaaaaaatagacttctgcaaagaaaag

SEQ ID NO: 37432 - DNA, 874 bp, Sorghum bicolor
  Intron number 1 from transcript Sb03g032670.1 (locus Sb03g 032670) derived from phytozome v7.0 (chr-ID chromosome_3; pos 61115724 to 61116597)
gaggaggtgagcttgtcccacgaatttgctgtgttgtacctttcttgctcttcagacctcgatttcttgctttgctaccataaagtacttaacattatttgtaggggagaacatttttactggtgctgcatgcaatgatgatatttagcagtaaatgcagctgtttagtgagggaacggatctagtgcaaactcatctcctgtgcaaactgtgcaaactctaatctggaccataggatgttgatccaaggggcatggaaagattgggtaattttgcacttaaccgcccgctcttaatcacacttttacaaatccctccttccacctctctcatgcgcctccttggatcaatatcctacggtccagattagagtttgcacagtttgcatgggagatgagtttgcactagatacgttgccgtttagtgatatcctgatgattcatgtgctatgacaatcaatataaggccttgtttagttcccaaaattttttggtgagggtattgtaacactttcgtttttatttgacaaacattgtctaatcatggagttactaaactcaaaagattcatctcacgatttacaggcaaactgtgtaattagtttttatttttatctatatttaatacttcatgcatgtgccgcaagattcgatgtgacagggaatcttgaaaagtttttggttttttgggtgaactaaacaaggcctaaaaaaacaaaattttaaccatgtagcattgctggttttcctttttaacattattcttcctgaccatcagtgaaaaaatgctaataacagctcttgctactaaaatggaacatttattgcctgatgtggatgcctgatatgtttttattgaaaaacaggtgcaaggt

SEQ ID NO: 37433 - DNA, 1002 bp, Sorghum bicolor
  Intron number 1 from transcript Sb06g033075.1 (locus Sb06g 033075) derived from phytozome v7.0 (chr-ID chromosome_6; pos 61117626 to 61118627 reverse strand)
gctagtgctacctgcctgctcccttcagttctcaggtactagtctctctccatctctatccacatcttcttcttctccccttctctaaatctcggttcccggaccgtttctgtgattgctgcttcctcttcctttcttgctctggatcatggtcatggcatcctgctgctacaggacaaggccgtcgtcgactaactctcgtgctctttcatcggatgcgacgagagagtccccggcaatctcaagccatgatcgccttttttctctttcgtggccgtgtgcttgagaaaaaagcagaggccgtagttttttttctctccaaagctttgtatcaaatcaaatcgaggtattgctattcaaaaagtaataaaagcttctctgcataaataataaataaataaattcatgatcgtctagcctaggtggagacttgttcgtcaggttttctttgtttcgttccggaggaggatttggtgtatattcccaacccaaaacgatgagctgcgctcgatcggtgttcctttcctagcatcaaatctttcgtcatctcaaaaaagaacagggcttattggattggtgtagctgcacatccaatctaccacatgttcagttactgcggcaccattgtttgccctgtactgtaagacagaggcagggtgccctgcggccacaaacgtttcccttcacagcggggacatcttggtgctcatcaggtcatatcgtggtgctacaatataacaaggtgttcctgaatggggacagtgatgagagggcactcgccggttctcgccatccatctctctgaaccaaccgtgcatcagatccgtgcgtgcccagtgataggaaaaaattataatgaccagccatgccctattgtcttttttcacaattgctatcgcaggagtcagtgacatgcagttacaggcttacacctcttatcttacacattacaatgcattttttgcagagtaaaagttccctgcagattcctctgacctgctg

SEQ ID NO: 37434 - DNA, 710 bp, Sorghum bicolor
  Intron number 1 from transcript Sb03g045180.1 (locus Sb03g 045180) derived from phytozome v7.0 (chr-ID chromosome_3; pos 72442431 to 72443140)
ccgaggcaggtgtcgccggcgccgatcagctgccggtaggggcgccacgccaaactctcgttctctcattgccgtgattccgctctcttcctcctcgtctgtcgtttgtgttggccgacctcggggtgggcatggatcggctggtgccctcccgccccggccccggtggccggtgcgtgtgcctgcgtcgcgatcggggttgtccttgcgggggctcagatttaggggattccggcaagggggatcagatcgatctcgctctaggtcgctctcgttttctctctctgattcattcgtccccattcgtcgtcccctgggttccaatctgaaggttacagtacttagtatggttcaatttctccgcgacaaacgtttcgcttctgtttcggctacaatggtggttggtgttgatggagcaggaagcggaaactagccagccagcttatgcgatttgttttgaattgaggatcactaatgttaagcagacgtgggcatatttctatcaccaagttgttatataaacaaccatttagttgcatatattaagtatgagccgtttcccttgttgattttttgggttacataataattaatgagcattgtggcactattactttagagcactgctttgaatatacagaccacgattcttctcaacatttcctaacggctgtcgttctgccttgcaatttcagcggaggcagtactac

SEQ ID NO: 37435 - DNA, 709 bp, Sorghum bicolor
  Intron number 2 from transcript Sb05g002890.1 (locus Sb05g 002890) derived from phytozome v7.0 (chr-ID chromosome_5; pos 3112718 to 3113426)
tggcaggaagccgctcaagttcgcgacgtgctttggtgagtatggcggaactggttggttcggtccatatgctcatgctccggacgtccaattttaggatgtatgctaatatgttgtgccttacatgtttcttactcctataataatggtctctggtatgtgttttgtttgagcgatcatggtcatgagatgctttggccttgttcacgctctgcaaataacagctaatggccgaaatgtgcatatgtaaacagattctcttggttgctttctcaccaaaagacaatacctactttgcatgtaaacttgtggagctttattgtgcctacgccttcctgatactcttttgcattcattgagtgacagtatcttttgccggtacctgttcagtttgtagctcaaatactgatgtcaagtttcaaacatcaggtttcataatttttctatttacccaaagtgaccgatgtctcttttctcgttcattgagtactgatacagcaacacctatttcaaaactttggatcttatcctgttttgtccaaaaagcctaattcagtcgtcacacgctaatttactcatctgtttgctatcgggtggaagcacacacatctattttgattttagcacaagtgataagtgcttcaaaggagaacagcggtgaattaatttttttcttttctaaacttcgtgttgcagtgcactatagagc

SEQ ID NO: 37436 - DNA, 953 bp, Sorghum bicolor
  Intron number 1 from transcript Sb03g042670.1 (locus Sb03g 042670) derived from phytozome v7.0 (chr-ID chromosome_3; pos 70023234 to 70024186)
ctgcgacggcaccggccttcacgggcaacctgaaggtgagttcttgaaagatccccatccgccatcgttcggttcgggtcacactttgccggttccggcgcgctgcggcgtgcggcgtcaacaccacccatgtccaccgaccccatccccaagcgccgacgcaggaccctgcgtgggcgcgttgcgtctccagcccggggcttccgccgttcaaggaactcttcgttcctccgccccacatccgcccatcttcaatctcctccggggggcatggatgatttaccgccgtgctgttctggctcgggggcccggcgtctgtggcattcagccctccattttgcgtttagtattagattcagttctctgcagtcaatagctcaaacactactgtacatggatcttgggttaacgtgactgcgaatgtttgtcattttattgggcatccttttagttgattgaattgattgtagcttgaaccttcgatcctgattatctaccattttatctccctttgcttgtggtgttctatgtttgtgtgaataagctattggcattttatctctcctgagagatgaaacgggacatagtattgctaatcattatgtgattttgtaagcttcctgaaccggccactgaattattttcaacatatttagtaatgtgctgacagtagaagcagaaattgagtacctttttctgtttattttgtcaattaaatgataaaaaacaatggtgtgttatgtgtggccatgttgcatgaacaaagaagcatacatgtttctttatttttcatctgaaaaggaaaataattctgcaagtagaatcttgagtaaccgaaatgttatttctgaacctgcagttctgcaccatgttgatgtcaagtactagcactgatggtttctttcttgatatgtgcagaaagcacttgcaggtctgagaagaatcaatttaga

SEQ ID NO: 37437 - DNA, 285 bp, Sorghum bicolor
  Intron number 2 from transcript Sb03g045110.1 (locus Sb03g 045110) derived from phytozome v7.0 (chr-ID chromosome_3; pos 72377255 to 72377539 reverse strand)
ccctgccgaggtaacagacctgttttctcccaaaataaactacatacatgtaattactgttctcaattgtatgttagtaacatgaaaagtattttttttacaaacacacaatatcacttcctttaccattgggaacgaacatataaaagagatagtactttgtatgtttactaaatgaatcaaatcttcgcaaaaaaatgtttatagagtctaaaccacagtagtactaattttgaattgatttgtgcaggatcttgaactagggaagctgttgataagacccgg

SEQ ID NO: 37438 - DNA, 698 bp, Sorghum bicolor
  Intron number 2 from transcript Sb04g022820.1 (locus Sb04g 022820) derived from phytozome v7.0 (chr-ID chromosome_4; pos 52414808 to 52415505)
atcttcaaagagagtttcttgatcagggagacacagtcagtgatttacttctaaactcttgatccagtattagtaatatagtagctttgttgtccagtttctgattcttttaccaatcaaataactcaagagtcaaattggcaatggatggtagcagtctagttctggctactagagggggaaaaactatcccagtctctttgcataaggagatcaataacctcaatactggtactgcttgccactatttagataatttgataggttgaaatctttcgtcaaatcctgtcggtgaaagaataatacaatgccaattgccaatgcagcgacaaatggggatccttccaaacacaagtcctacctttccactataggcagtggtagtggtagcagtcagtatgtaatagcatgtttgggttcagatgtagtttgtgagttaatcttttgaatagatgttttggacatctgaatacctaaatcctatatgaggaaaaaccatgaatcatttggtaaaagatacttagccccccccccccccccccctgtgtatgaaacacgcctatgtgtgaccattctcccttgatattagtcattactgccatttgtccctgcattgttatttcgttaagttgtgttttcttctgaacacctgaccatggttgacaggtgctctgtctgcctagcagactatcaaccgg

SEQ ID NO: 37439 - DNA, 620 bp, Sorghum bicolor
  Intron number 2 from transcript Sb04g005830.1 (locus Sb04g 005830) derived from phytozome v7.0 (chr-ID chromosome_4; pos 5694374 to 5694993)
gagatcagtaaagttgagaaggacagtgccatcaggtgtgtttcttatgcttactttacagctgatgactggatggaccttctgctgcccaatgtgctactttgatctgttcttgtttctgtagactgtatgtgagtagttgccacttgatgcttgctatggagactagttcagcttgtcttcgtggactatgctagattccttattccctgctgtaattatacttattcgttctcggctctcttgatttcagtagatgtaagtattgttttggaccgtgaccgaatggagatctctcctttgtaatgttatgcctaaatgtcgagcttttaacatttacaatttctttgttttagatgtttacatagttttgtgtataactcatggtgtgttctgtggccatccaatccaatggtataactgttatatatttgtgggtaacctttttgtgtaactcatatgaattgcctatctgaatctcattttcttcaggtcatcagggtgctattacttttttttatttgttatctgatttttgtatcgcggagataataatgtcgtatgccatgtggcgtgtccttacagagtaacacgggaaggaaaggagcggaggaagcgtt

SEQ ID NO: 37440 - DNA, 682 bp, Sorghum bicolor
  Intron number 1 from transcript Sb03g011030.1 (locus Sb03g 011030) derived from phytozome v7.0 (chr-ID chromosome_3; pos 12195917 to 12196598 reverse strand)
ttcttgctctgtctgaagctggaatcctctaccaggtaagttgatcccgatgattaacagttccagcttattcagacttggagttctagtcaggttacccctttattactatgtctataggtcatcctttttcttgaagtgtttgcgttatgatagaacagtggtttattatccttttaacttcttataaaaagaaaacaccccagttttctattacttttctggggtattcttaatactaacatgggctaatcaaattaagctgttcaccaacgagcagtagttgtagtcataaattgcagacaaatttttacagaagaagtcgtgcaaaagcaaaagtaacaactaacaaaagatcaatccacagtaatgaaagtagcagaagagcagaaaatgtccagatcaggtacaactttgtttgtgagtaaggcataaagacatgattaaccacaagctgtaatatcatgtaaaatcaaaagatgaccggagcattctgctttctcttttaaacttgaaatcatgttagttgcatttataaactataaaatcataagatggatagcatagaaagagtgaaatattggccagtaaaacgaacacatccaagagaaaatttctgccaaattaattcatttaattgcaatttaactctaacatgtctacacttctcagttacagctaa

SEQ ID NO: 37441 - DNA, 896 bp, Sorghum bicolor
  Intron number 1 from transcript Sb03g044280.1 (locus Sb03g 044280) derived from phytozome v7.0 (chr-ID chromosome_3; pos 71630301 to 71631196)
ccggggccatcatcatccggcagcgcggcaccagggtcctgccctcttctcttgctcccgtcgattcccttccccgttactgctttgcttcctttactgtttggattagtaacacaacctaggctcttgtctgcgtggatactggatactaacttgttgactggctctgctgggtgacatagctcatctgactagcgtttgattgctgatcaactgctgctgctgcaggttaagattattagatagactctaaggctgttcttaaaaaaagaaacttgaattaaccctaacttgtgccttcataaggatgacggattgagaaatgttagaatcttatgatgtacatagaatgcttgtcagtggggcgtcacttcacgcattggatgctaccattgtgcattactgcatttcccaactctaatctaacactctgcaaatgaggaaatattgcagtttcttgcatttctcagataacaggacacaaatgtgttcaactgcgcttcccaggtgtttcagaattgctagcaatgtaaccttctaacctcaatgcactgtagagccaactggtgatgaacttactctgcacacttggtcagacatagttgctcaatactacgcgtactgtaagatggtcaaatgtgcgtgccttgcaaaagaaaattcatgaactaacatagctaacatgtcttatgtttggtaggtccatctttaagagcttacttaccgccacgcctccaatattcaacatatctgtatattatggttactgtatggtgtataccattgtgtcctttgcatagagttcattttggtccacatttctgttccttgccgcttttatttttcttaaatagatcttttggacatttcaggtctatcctggaaataacgttgga

SEQ ID NO: 37442 - DNA, 922 bp, Sorghum bicolor
  Intron number 1 from transcript Sb01g034010.1 (locus Sb01g 034010) derived from phytozome v7.0 (chr-ID chromosome_1; pos 57412164 to 57413085 reverse strand)
gctctggatctccggttgatttgttgttctgcaaggtgtgtaaaagaatgactccgactagttccgcctcttgtgatctgctgcttctctgtttgatttgacagcctgctgtcttcttgaccctttgtggcacctcagtgattgggtagtggctagtcttttctttctgtttgggtttagcggctcgcgaaggaaaatcagtaaatttacatttgttccttctcaatatgtcacggagtcttcaaattgagatccttaactgatgacccatgatttcctacatgaaattgtgatgtgttcaaatacgtgggtctgattttcttatttttgaaccaggaaaaaacagcaggggaaacccccactgtagattttattgaaacacaaaacaaacactgagccaaacaaacggaaaacacttcagctatgccctagcaaggctagaacaagaagtaaaacaaagaaccactaaacacaggaatcaacccgggagagaaaaacagatcgcttgtctataggcttgaagtcgagcttcatctttgagagatcattgatttttgttattgtcgaatgatactttggattttaatagatgtttgtttctctcaaggttctgcaagagcattgattgctagtttaattgttataaacattgaacacaaccaagagaatatgatgaaaacagagtaactatattagctggcaaggagtgattaaggtttctgtacccaaattctctttgtaatctgtttcaaatatgcaacatattgctggcttttgatgaaatcttgatctagaacttcatggatttacttcctagttcctactttttcctattgttgaggaactttgtagtccatattgttttacatagatatcgactaaactgtcttatggaatcttaatgttaattctgttaggtggt

SEQ ID NO: 37443 - DNA, 780 bp, Sorghum bicolor
  Intron number 1 from transcript Sb03g042070.1 (locus Sb03g 042070) derived from phytozome v7.0 (chr-ID chromosome_3; pos 69489380 to 69490159 reverse strand)
cggcgacgagcccaggaacaaggcctcctcttctggtaggttctcctggccgacctcctgatgctttgttcatctgtgcgattggagcaggatctagtcgattcgcgtgtgtgaagcggtcaacgtttgtagactgggtgcggattgaaattattggcgctcggtgatgagattgttggccggattatgtggcctttgcatcgaggtcgtgttggttactgtgcgatttgtgatgcaagggtgtaatacatgtctcactggatttctaattgctatgtgtcgtgaggtacgcgtaggaatctgggtatgttttgagctcgatggttgttcttcagggtccatttggagtttgagacatttttggtgcacttcgtgattgaaatggacttcactgcagtagttgtactgatctcaaattctgtatgtagaaattgtggagctcgattgctgcatttgaattttccagccagtctttcattcatgtgtcaattgtttaatcagcaaattgagggatttgatctctgtacatttcagtggaaagtacatcaccaagtgctacttctagtgaatgcatatattaacttttggctatccaatgttggcattttccttgtttctttccgtttacatctgatatatacattattaagattaggtagttctttgttgatgtgtcttaaaaacgtttggtattggtacaaaggccatatttgaatttccctgtagtatgtattgcgctggtgaattctgacatctcatttctgcatgcaggaaaaggtg

SEQ ID NO: 37444 - DNA, 597 bp, Sorghum bicolor
  Intron number 2 from transcript Sb01g005870.1 (locus Sb01g 005870) derived from phytozome v7.0 (chr-ID chromosome_1; pos 4889086 to 4889682)
ttggacgagtacgcgccgggtttcttccaatcattatgcagttctggcgtatcttggttctttaaattggtggttggtgcattcattacctatgtggatgatgcaagaatcattttttcatatccgagttaattcacttaaaattgttaacagaaaaggggtgaattatttaattggacttcttgaccatatcatgacaacaatcctaggtgtgtactaatcaatgttagttatccatccttggctgaatcagaatcgcacttggtaattctttatgcactgtttgtgttagttttgatttggactgcaaagagcgtattgtcaggtaattgttacctgctttgttcaaagcttgcttaaatacttgacttcattggtgcttcttgaattctgagaacaaaaattcttggtgattatgcaatcacaagagcttcaaattaactgatggacataacttagtaacgccaaagcttgccttctgatatacatatggaggacataatatttgtgccatacttccctcattaacctgttatgacttatgcgtatgcatcattttgcttatgagttgccaactggggaaactgcagaaaggcg

SEQ ID NO: 37445 - DNA, 917 bp, Sorghum bicolor
  Intron number 1 from transcript Sb02g029725.1 (locus Sb02g 029725) derived from phytozome v7.0 (chr-ID chromosome_2; pos 64814990 to 64815906 reverse strand)
ttgaaggccacgaccaaacaaagctctacacacttgtaagtgaccatagtagattgcaggatcctgatatgtagtgtgcatgtgttttcgcattgcattgtgtaaggtgaaacatgactttgattgcaagaaaaggttcaactaaaaagtttactctcatgtgagaagagataacgcatactataaccagagtagttcttagagtgatccatgcacccaaactttaatttatttttcatgtattttctctttaagaaaaaaaatacaacatagacatacttagaataagcaataaaacttgcacaaatgttggtttatataaatatgtataactttcaacaattatgaattattgattaggttgaacagaatgttgttttgagaacaaaaaacagagtatctcactgaatggtatttgttggttgtacaaagaacgccacactgaatccttttgctgatgaaaagctcatgtaccctacatactattttagaatatgcttctgcaccctatcttgcttgtactctctggtatgcccttacaagtacattcgttgcatggcacgctctcatgttactgcctctgcctgtgaacattctttaaatccatggtaaaaaaaaactaaggaaagtcacagataaattactcccacacccgtacagctctagcttgctcacagacacattgtgcacgcacaacatatgctgcacatgcagaacatggctgtaagtgctaaacaacttgtgctttatcgcgacttatggctgattttggttaaaaaaaattcaccttccagtaaggtcatcaaaagcactctcttttttaaacccctaccatttgctctctagaattaagtcttggctcctttataacacatgaaatacaaatgctaaagttcaaacttatctcttctaaggtt

SEQ ID NO: 37446 - DNA, 951 bp, Sorghum bicolor
  Intron number 3 from transcript Sb05g003130.1 (locus Sb05g 003130) derived from phytozome v7.0 (chr-ID chromosome_5; pos 3475596 to 3476546 reverse strand)
aaggaaccattttctgcctcgctattgcttacacggtgagaataataatcctagtctccttgtaggtaaataactaaacatgcatctatatcattgattgaactgctcctcctcgtattatttggcatttttctggatgttaaattatgtctggtggagtaatatggttttatccatcagtaacaaagtattagcatgacatttttttttaacaagggtgccaataacttttggatttgcaacgaatttcactctgcccaagagccagagcagaggcctggggctctaaccaatcccaatggcagaggccaaaagaaggcaggggctttactggaatgctgccctctcacggctcaagcagacgtggtctgacttgggggccccagcttgactcgaatcacactaaaagctttacctaactgtatgtctgcttaaactgtaatgaaagaaagaaaagctccccaatttgccatgttcatgctagaaaatatttttttggataatggaacaaagttccagtctctaccattcggagatagtacacaactgaaggttcggatacaaaatgaagccataaggctcacacaccaacaggagacggggaaaaaaagttcagccctgaaaaaaagcgcaaaaaaacagaggaaagagctaagcctcaatgcggttcctgaatctctagccaactttcgcaaagaaaataagagcaaagtctcttattttctgcagccttccatgaataaaggttgttcctcctatttttttttgagtaagaaggttgttcctcctattatgttaggattattcatttggcattgctttaagtaatttgaaaccatagatataataataaaatggatgttatatattaggctacagttttgtttggttttttgtcaataacagatagtgattcaagagttattaaaaatattatgctaaattaggcag

SEQ ID NO: 37447 - DNA, 774 bp, Sorghum bicolor
  Intron number 1 from transcript Sb07g004450.1 (locus Sb07g 004450) derived from phytozome v7.0 (chr-ID chromosome_7; pos 5646120 to 5646893)
ctctcggagttcctttatcgcgtgctgtgccagctgtgagttcccgtgactgattcgatggcttagctgatggaatggtagttttagttcacaatgccaactttcagtggtattttaggagggccaattaaaacttttgctggtattttacggaggtcacaacctttcgatgttaggaccaattttcccttttatatatggtaggtgcaaaatgaacctttctatcacaattcacagcctgtgctcaacaatagccaacacttgaacaattcagcttaacatattaacatgtttcctatggctaaaaagtatggttgcatgatttagtagttctgatgagttattcgccatgtcaattgaagaaacaaaggcatgcttcaccagaactattcctttgttttataaaatctctcctttacaatggtaagctaaaacaatcaacatcattcatgtataaagctcataggaatttccttaatcatatggattaagtaagccactaaaattacatagactatggcctgtttgtttctatagataacagcaatatgtcacatgtgagcaaacgtgagatggggctgcgtcatgcgtcatgtaattcaaatattaccttttgtaggcaagtgcggcactaagacatgaggtggacacaacgtgttttgattggttttctgccttcccggcttaaagtgagatactaaaccgaacatgcctacgtatgagcaaactaagaaacaagaaacaaagggactggaccttgatcttggggtgcag

SEQ ID NO: 37448 - DNA, 803 bp, Sorghum bicolor
  Intron number 1 from transcript Sb05g003140.1 (locus Sb05g 003140) derived from phytozome v7.0 (chr-ID chromosome_5; pos 3490947 to 3491749 reverse strand)
tcgtgggtggcgccccgcggactattgatgtgcgccattaacagtctttcctgaaaactatccttgtctgcacttgcgattatgctttatttcctgaaaactatccttgtctgccagacttgtctgcacttgctgtctttcttggaaacgatccctgtcttcacagcgctgatggtttcttgacaactaggtggttcttcttgagggccgtttcccagccgtgacggctctcagcgtaaggacaagaggactgggatataactggacgaggattcatagttgtcaatccgtgtctcagcgttcatattccgagtgccacggaccattgctgcaccagatgcaaggtacgattgtgcgcgtcagttctttgattgctctgtcatactgctgcaattcttgattctctgcgatactgctgcagtttttgattcctctgccgcggttcttggattcgctgttcaggaatgccgaattctgccgcggttcttggatttcctgttccggaatgccgaattctgccgcggttcttggatttcctgttccggaatgccgaattctgccgcggttcttggattcgctgttccggaatgccgaattctgtcgcggttttttattcttcagcaatacctgattgttttgtcatagtatctgttcttagattgtctgtcccgaaatgccgattatgccgctgctctatattcttcagcaatactgtactacttgttcttattcgtctgccataccagttttgtattctgtaccgttgtgcagttcctattatcgttttgattgcctccaggtgg

SEQ ID NO: 37449 - DNA, 965 bp, Sorghum bicolor
  Intron number 2 from transcript Sb02g038950.1 (locus Sb02g 038950) derived from phytozome v7.0 (chr-ID chromosome_2; pos 73104065 to 73105029)
caagtgggccgagaagctccgtggcggcgcctcaggtttcgtgctgttttctaaattttgtttgctcgattgtaattgtttatttatttatgcatttctcggatttgtcgttgatgctctgttcggtggaagtggatgctgtgaaagatttatacggttctgccattctgcatctgtaaaaagatgcagaatctgattctactgccttgttaggaaggaccatatagtacatggtggtaggtggttcgatttctcaaagtgtaaaaagggaggttagctttaagatgatagatagatgtttcaacatgtcgcactgtcgtgcactgagttgatacttgctacatagtatggatgtgccaacccgaatgtttgacttggtctggtgttgatggtatattggtatagcactctggatgctttaatggaaggagtgggttctgtagactttatatggcgaagggaacgtagtaatcaaattgggaatgtttgcgtgggtatgatcttgcaatctggttggattccttagccaactgtcactatacttgctacgaaggatggattgagaataatatggtccttttgtgacctatgttaatgccaggctgctgcctctctgttcttttttctgtagaagtactctggaattgaagtgtaattctgtccttacttttgacttctgggtttgtatttcttcaaattgaagaatccatcttccatgctaaatctaaccgtactggaatggaaatgttctcttttatacaatagtgactagtaacctctcagtcagtatttgttacgctctttagatttctttacattaagctttaacgaggaaaaaagcctgaacataaccccaggggtccgaagaaatttgtggatggaaacatatgtatgctttattaccttgttttgtaatggatgagaaggtgaatagtcttgagcttgttgttgatcaggtgacaaag

SEQ ID NO: 37450 - DNA, 937 bp, Sorghum bicolor
  Intron number 3 from transcript Sb02g020300.1 (locus Sb02g 020300) derived from phytozome v7.0 (chr-ID chromosome_2; pos 49260503 to 49261439)
ggagagtacttgcatccacacagtaggttaattaacttgctgaatgtatgatctataaataccaaagaacatatagactaacttcgctttattcccagcggtgaccatactgtcaaaataattgattgccaaactgggaaatgcttgaatgtactgtttggacatcagcgcactccatgggtggtacgtgatgtaattcttattgtattttgtttccttatgtgcttaaaccacttctaaatagatactcaaatagtaatttgtttgtaatgtgttttagtgaccaacagtttaaacaatactaagttacagttgtaaaaaaaacagtttaaacaatactagtttgtcctctatgtttttatgctgcatattttctaaatttatatttttaaaacaggcgtaagtgtctcagatttgatgtatatgttaagggaaacaatacatcttgacaaacaatgaccaatagatataaaaaatgtgcaaggggcctttgaggtcgtcgtcttcctccaaaaacacactgcttgttggaaattgaaacacgcaccgtttgctggagattgaaaaatacactgcatattttccatttcacaacaaacttactacttcagggaagcattataaagagaaactagagatttgtttctcaatttgaaaagtatcatttgtcacagaccaatatcattctgagtatgtatgtattaaagtggttttctgttgcaggttagattccatcctcagcgttcagatattcttgctagtggaagtttggattgtgaagttcgtctctgggatgctaaaacatctcgctgcactgcagtactagccttctgtaatcattcttgacaagccaattgccatagtaactttttccctatttatgggtatttctaaagtaacacgctctaatttttattaacatttgtttcacagatag

SEQ ID NO: 37451 - DNA, 1036 bp, Sorghum bicolor
  Intron number 1 from transcript Sb03g031380.1 (locus Sb03g 031380) derived from phytozome v7.0 (chr-ID chromosome_3; pos 59787897 to 59788932)
aacctcgtcagcaacgtcaaatcaatcaactacaggttcgtatcaccctcgtctcctttacaaaatttggattacctaaatctgatgtagtcagtagctagtaggcatgtctaggtttcgtttgatctcgattcagatttgtgcgacggagactctcatatacggcaagtatcttgctggtttatgattaaactctagttcataatatagattcacagtgtagggtcgacattttagttatgtgttgttgattgacaggcgaggataaaatagttttggcactagaattatggttagagctgcagaagatgctgagtttggtacggcgagtggataaggaagcaatgagacagtgaaattaggatttcgcaaccaaatattcaaagtaccagctctttcgagttaatcactgtatatgggggtctgaacgttcagcgttctgttgaaaaataattgaagctctttgttttgtgattgagagttcgaacttcacttcatttagattatgcgagtaacagatccaaagaaagttaagcaaatgcagaggagttgaatattacctttttttttgttgaatttagaaacaaatcaaagaaatgagcagatgagagaagttgagtggtatcatgtgttcatgtgcctcatactcatgttctataccaatgacattctattttgagctcatcctccaaacatatttttaaaacttcaaatgcatagttgtccaatttatgttgaaagttgttacactaattccagtatctaataaatggttagtggacatgttgtaactcccttagcaggctatgcttgtcacctaaaagctctgaaagttttcatgtgaagatttgcttttctacttcctggtcaactagatactgaattaacatgtttgttactatcaatcttttcatagctgcatctgccttcttgatatttcatttataacgttttacccttttacaccaagctgacttaaggacattttctgtgcctttcagccggacattcttgtcaatcattagtggagttgttg

SEQ ID NO: 37452 - DNA, 1009 bp, Sorghum bicolor
  Intron number 2 from transcript Sb03g008320.1 (locus Sb03g 008320) derived from phytozome v7.0 (chr-ID chromosome_3; pos 8809514 to 8810522 reverse strand)
acgagtacatcctctttcggggaactgatatcaaggtatatggaaccatctacagggctcctgatgtgatattactttcagtttcgacgattgtgtgttgttcaatgcacactgtcgatggtttcttaacgttggtgcttggtctctgcttaatggccattacattttgtgttccaattatgcattttggcccatcagtttgagggtccgatggatgcaaaagcaatagtggaattgtgttctcaccaaactaagccaaactcacgtggtgtccatgtttctatttcacaaattattgtatttgcattcttttcctgtatttgtgtcattaaaattattagaataagattgctgatttgctataaagtcactaagaacatgatgcttgaattggttgcctgcctacagtaatattgcccacagggacacaattaagtatttgttttagtctttcatacttacatcctcttgcgtgtaccttgtgtcaaaatgacctaggaaatttattttttcctattttcctattgttaattctacttattttatgtatcatgcactctttgttgtgtctgttatgtttcctctctaacgtacctcaacttgttttttaaagactctgtatatgtttatatttcatgtgtatccaattcagtacaataagcagacaattaatattagctatgtggtagttctgaatattttagttcaatatgtgtgcaatccataaatgatacgtatcatgttgtcatgtaattatttaaattttatattttgtaatttccttctctaaactttatgacatccattgattattttgccttgtatgttttgatgcacgaatggatccatgtcatgttttcagtgcgcatatttgaatatgtatatatatatatgtacttttacagtttcctcttttaaactgcctgccaattttttgatttatttaacattataatttacctgggttccaataggacttgcaagttaagtcatcaccaccaccgccacc

SEQ ID NO: 37453 - DNA, 933 bp, Sorghum bicolor
  Intron number 1 from transcript Sb07g015450.1 (locus Sb07g 015450) derived from phytozome v7.0 (chr-ID chromosome_7; pos 38613885 to 38614817 reverse strand)
ggaagcaacaacacctcgacgacctcaacttacaggttcgttcgtgtccatctcgctcttatatatacatacaagtatgtttctaccaatttgatttccatgctttaattagtcggtatatggattgcgatgtctttaattaatttgctctgatatataggttgcttttccttttatgtattgaagcttgcactcatgtgcaggtgaatttgacacaaagcaaaatcagatgaaaaaggagacttgagcttcaggatctgctgaagcaagtaaactccaataatgcacggtgcccctttctcagggtccacccaacaaaatttgcttcaatgtaagcagttggaacatccaaccaaaacaagacattacaacctttcactatgcatcttatcttttaataaagataaagaggtgatatcgaactagcaaagaacgatgcacaacgtgccactgtcaaaatctttctcaaaagtacgatcgaacagctcaaactttaatacctttcttcccaaatattatcaattttccacgaattgaactactagctggttctcatcaaaaagaaggaaaagaaaaatcccataccatttcgttgggtttttagatcaatagtaacgtaaattgtacatgatattatatttctgaacgtaaactgaacttattattaaccaacaataatcaccaaatactccaggcaaaaaggacacagcagtccctgcgacacagacttcatgaatatcagaaaactttctatcaatcttagccctcgaaatctaaaacaaaaacattcaatttgtcgatcgtatatatatcttcctcctacgatttttttgttctgccaatcgactgcgtttatatcggaatgtaattgtcttctgttttttttctaaaaaaacaggtcgacaagctgaggacaacgaaacagcaactcat

SEQ ID NO: 37454 - DNA, 1012 bp, Sorghum bicolor
  Intron number 3 from transcript Sb03g031750.1 (locus Sb03g 031750) derived from phytozome v7.0 (chr-ID chromosome_3; pos 60128365 to 60129376)
gatttcctcatcgccatcgcggagcctgtgtgcaggttccctccaatcactcccgtattcagatactaccaaccttggttgcatctttaattcagactgctcatgtgtgtatccgggttgtacacaacacaacttgaattccagcagctgatttttgcataaagttctgatagcgtgaagagggccatgttttgatagggctggtctgatcaatctagtatgcattgttgacacactagccagaattaattaggcttgtctttggatgtcatggaccaggagatgtatttcgagtatttccaagactagattgagagatttgcaatactaaaaccttactacagtgtgaatttaggatggggtttgcttttgggtgattttttctgtcccatgttatcttatgttcatgtgatggagttagcatgatttcgtgtgaaggaatttgtgtgagattggttgggatgcatacatatgctgggagttgtgagggagaaagatgtcagtgtttgcttaatttaatcaactatgattatcgggatcttttggttttaaataagtgctgaatgtagctattgcattttttgtatttttttcttctccgagcagagttttgttgcttgttagttatgttatttgtttatgaagttaaatatgtggaccactatctaaacttgactggagtaagttgcaatacatgcgatgtttattctggagaattgagtgctaggacagtaggatttgcttattttggaggattgaatgacctcattagaggtatcaggagctcgttacttcaaattatggaacagcaatgaacataagtaaaaattgaaactgaatctgagcttgcatggtgctgttaatctacagtataagagagattgaaatggctatgttttttcttcaaaatttctaggatgcatatgtgttaaaggcttcaaatatattcaatgacgcgtttgcaattttgctttctgaaaattttaccctgttgttgtgcaggccagaatct

SEQ ID NO: 37455 - DNA, 861 bp, Sorghum bicolor
  Intron number 3 from transcript Sb04g019800.1 (locus Sb04g 019800) derived from phytozome v7.0 (chr-ID chromosome_4; pos 46383929 to 46384789 reverse strand)
gaagagagaggggagaggtaatgaaaacaaatatacttttagattttggttttaacttttggggtggggtggggtgctaataatttgaaccagtgtgctaacacttagtaaccagtatcacttcttcacaggaccttgtagtgagtaatgagaatcaccctggaacctgattcctgtcggattgatgtatacaaatccaatgccatataaccgaacctattgcacccctgttagcctttaattaaaaataagaaattatgaacggtggatgtaggaatgatcaatgcagaagtcacaatacagtcgtcattaagctctaatgggcagagctgccaaattgtattcttgtgtactaaccctaacctaccttttaaacggtaaccagcaaggccacctgaataatcattaactgggtaataactgggttgtgtacgttcaacattaactggctgattatttatgctaccagtcctatttttagaacactaatttcagaacgtgcttgcagtgccacataaactgcattcctaaaagtcatttgggaatcttcaataaggcatcctatatttactttcactttttgagctaagcctgcaagctctcctcattgatttgagtttgtcttattatatttttttttgtggaaggactccagcttattagataagccaaacaatgcactgtctgctgcatccttgcttcagcttatatgtgcacaagctgaagatgtaattggttcatactgaccaatctgattgctcatggatgtcaggattaatgattgttgttagattttgtgttccaaagcttttactccacattgtgcctgtatgacttgtacttcatctatttcatctcagg

SEQ ID NO: 37456 - DNA, 964 bp, Sorghum bicolor
  Intron number 3 from transcript Sb01g007300.1 (locus Sb01g 007300) derived from phytozome v7.0 (chr-ID chromosome_1; pos 6255416 to 6256379)
ccaagcctgaagtaagtgaaggtacctgttggatctctttcagcacatccatggtgtacaccatatgcattcttatatatgttaaaacttgtcaggctatccacctaggaccttggttgtcttgtttagatttttttagatttatcttttatcatgatactgttgcatatcaaaatttgatttgtgtgaattgaatcatatcagaaaaaaatgaagaaatgtttactggacacaaccttgctaaatgaaaagtacaagtcaaaacactgtgctgtaaaaaccaaagataagcatgtttttagaactcggttgctcatttttccctgatatcttttctcttgctacatggttaaacaaaactattcatgttcttttcatggctgcgccatttttttaattaaatggtgcttaactctctagggcttgtttggtttggtgggggttggagggggattaaagggtattaaatcccttgcaagccaaaaaccctcttatcctctccaatccccttgaggaggggattaagtgaacaaggccttggctagactacaatgacaggttcattttttaaggtgatctaatttaattaaatgaacagcaattgattggccattgcactagttttagtttggttcagttgaaaccgcaaaccatcaaacttattaccttttgaacaagtttgataaacaccaggcagtccaaaattaacatgggaaagtgtttttcactgatcagaattttaatctatgtctagctgagcagtgagctaaatacagctatttggaaatgtaattcttcactattctttaatagatgtacagcgattaccctgccaagcctgttaactggtcaactaattcctggaccatggctataatatgggtacctttttttaactacaattgcatttgctgttcctttgtcggtttattattttttaattacatatttcttttttgcagat

SEQ ID NO: 37457 - DNA, 535 bp, Sorghum bicolor
  Intron number 2 from transcript Sb0010s016080.1 (locus Sb0 010s016080) derived from phytozome v7.0 (chr-ID super_10; pos 5711330 to 5711864 reverse strand)
ctgtctcggagcaatcccaaatatttcgcttgcctgtatgcccaccactcagatcctgttcttttccctatatcaatgttttgatgaactcttttgtctccaactgtagatcacggttggtcatgcatgagtgacccatatgtagtttagaaaaattcaaagaatagattattatcactaggtgaatcatagggtgattgtttttttttctttggtgcgtgattacaagtttatccaaaaaaagtgtgacgtaaggattaagatgaaaatcttttgctgatgttgacttaacagttaataatgtcttgctcccctcatcttttgacaaaactcatccatattactgtcatatgagcccttttgtttgtatttttcaagttcaaatgttggtggtgtccattatgcatcatgttatattgaactaggatttatgttcccaatggatgaaatatatttctatattatatctatcaaaaccagttatctcagatgctatatcttaatcacactaattaaatctggtaactaggctcac

SEQ ID NO: 37458 - DNA, 707 bp, Sorghum bicolor
  Intron number 1 from transcript Sb01g010560.1 (locus Sb01g 010560) derived from phytozome v7.0 (chr-ID chromosome_1; pos 9333195 to 9333901 reverse strand)
ctcaaatttgcgcgcgatcgcttcgatctcctcaggtggaagaaaccttgcgactcttttgccctttgcatctatgcaggaatcaaatctccaaatttctttatgtcgcgtacttatgtagtaattaggatacatggatctcggaattcagtttttcggatgctgcacaaataatcatgccactgatttagtggggatgcagccgcaaattactaattgggccttttggtgtgcttatgaaacatgatcgaaagagtgataaccaataaatctccacttgcatgcgttgcattaaatcaatgcttcctgcatttgtttgttagtaggctgaagaatatctactaattgttgcatgccttccattaaatcaacgcggcctgcatttgttagttagtcggctgaagaatatctactaaatttcatccgtacatatgagcatgtttggtagagtactcactgactatgccctcaaataactgccaaccctctgattaacatgggattaaaagttacgcatataaactgtgacattatttaaaatataaacattggggtcatggttgtcatcagtgcttctgtcaggaaccgagtcttcacgcccatgacctggcagcaaacattatatatcttctggctaaactgaatttttatttgagtgctttaccgctgcagctcgcttccgaagcaggatattcaagctattgtca

SEQ ID NO: 37459 - DNA, 708 bp, Sorghum bicolor
  Intron number 2 from transcript Sb03g024890.1 (locus Sb03g 024890) derived from phytozome v7.0 (chr-ID chromosome_3; pos 50074309 to 50075016)
ctacaaactgttatctagacaagttggagagccaggtaaacatcttctttttcatcaattaccgtatgcttaatgataatatctttctttttgaacgaaatgatagtctatatctccactttaatgtaagtaaagaggtattatgttggcttttcatataagttaggctgatcccttttagtctaaaagaaaagcagtatctgtgctttgtggttttttttatatatctggaaaaacgaactagcaggatgttgaatgaaattttattttcgaccttggtgctttgcccaggcgttctattagaagcaagacctttctttgatagttcctatacgacaattactacatcactgcatatgtattttctacaaattagacaactcagctcctacgtcagtgatggatggtcagattttttccccagtcactttttatgatacctccctttgtctgaaagctcagtccctaaaagattgataactacaggtctgctggaccaatgtaatttgtaggttgttcattcctagtttgccagtcccatgataagttgtccaatggcattttttttttcattctactagtgagatggcttggaaaagaatttgatttgatattttccttggtaataatattcttcattcatccaattgggagcatacggttaaattgtttcttgtttaaatttgtttgtcagggttttgaggtact

SEQ ID NO: 37460 - DNA, 823 bp, Sorghum bicolor
  Intron number 2 from transcript Sb04g026890.1 (locus Sb04g 026890) derived from phytozome v7.0 (chr-ID chromosome_4; pos 56848216 to 56849038)
taaatcgtttgtttctctatacgaggtttgctaatatcctaagaaaaagctgctctgttttcccccttttttttcactgtgtaattttcagtagcatttccttcgtattttcagtggcatttccttgtacgaagtattagtagcacattagcacttgcaatttttttcctttatcctttcaagctttcggctgccagtttgtgtcttttatagttgttatttcattctggttgttcataagtgaaagtcatttatgtgaatatctggttagatgagttgcatcttctcagctcttttgttattaacacaaacaattagtaagcatctcgtttaggctttcaatgataaaagtttgaattccctggggcgcaataaattgatgggagcatacttgaagcctagtatattaatgacactatttgccgagacaaacacaatgtcaagttaaccaaactcttggtgcctaaacagttttcaagtatgcaatcatttgaaagcacatcagtggacttagatttcatcttgtctgggcaaatagtgtccttaatatactaggcttcaagtatgctcccatcaatttattgcgccccagggaattcaaacttttatcattgaaagcctaaacgagatgctcccatctgttactaattgtttgtgttacccctaatcaaactgcagggattattccactaaacatgtagtgttgggatctgtgttcaaggagatttcgttattacctagttctcttgcaaaaccatttgtggagttactgctttcctgagtttcttctgctgtgcacttagctattctcgtctgggggaga

SEQ ID NO: 37461 - DNA, 1031 bp, Sorghum bicolor
  Intron number 2 from transcript Sb03g031950.1 (locus Sb03g 031950) derived from phytozome v7.0 (chr-ID chromosome_3; pos 60357771 to 60358801)
gcgctgccgatctcgacaaggaggagcgccccgaggtgattgtttccgcgatgatgtttttcccgtattatccattccattgtttgttataaactgttagtataccttgtttagtgccttttgggatccatctgcttggatctgggctgggcagtatgtgtcagccacactcaacttttgctccgcagtatcacatggctatctgttaagggacacgtgtgtggaaataaagggggatgcactggcctgatgtgagaggattacgttgatagattttttttgtttctttttcttttttctttaaagagtgaaaagtgaacttgaacaagaaaatagcctgctcacttgaggttgtgacaggtcttttaatttgtgatgtgaagtataactaatttcttagctaaactctaacaaacaaggtaaatgttctttttttttgagtatctgaattttgctaggacttttactctgatgtagtaaactatacaggtacttattatgacttgcactgattattttccacgttctagactagtagactgttaaagggatatataaaaaatctgtcataaaggctaatttacaccatgattttatttattgtgttttatgattaatatcttgatttccttgtagtttgtatctttaagtgttttcgaaagaaactcatatttgtttgatgcttttctgtaagcatgtgttgatccatttcatgttctgactatggtaattcttagtttaattaacatctgcaaagaaaaaataggaattgaaaatcaaagcttgcatttattaattatttgacttaaaaattgaaccagttctattttatttccaagaactgggacataattatgctatgcccgctggttgcttgaaatgataataattttttatttagcaggcaacattttgacttataagagaaggtgttgctgaacgcaccttggcttttagggctaaacattttgatatgcttctggtccttttctgtaggtcctgtctttgcttccctcattcgaaggaaaatc

SEQ ID NO: 37462 - DNA, 589 bp, Sorghum bicolor
  Intron number 4 from transcript Sb02g005160.1 (locus Sb02g 005160) derived from phytozome v7.0 (chr-ID chromosome_2; pos 6019661 to 6020249)
gcggggctcaagctgttaagggatcccgtgttgcggtaagtaccaccacaatttgtgtatctgggatctagcatgacatagccttaatggacgaatcattggcatttgcatttgtctgcagtatgcaaatcatacatgacactgtatctccctaaaaaatatagttgacgctgaatgcaataatccaaggaatagaggaatggtgaccatgaggtcccttgactcctgagactgggaagtctgaattgtgttcatttgcttactgatttgaagacggaattaatctcttcttgttttctaatgtgctcttgtttttttaatcatgtgaataaattaatgacttgcttgaaattagttagcatgctataactagttgaccgctgaaaagtgtcccctaaaactaagagatcccttttgaactttgattttatcatataccacatgccagtgttgtcatacaaaaaatgatatttttttaactacttacaaacgacctgtatgaatgtttaccagctgcattgttattacagataacatagctgcatttatcttgtataatgatcaatgcttaagttagtgtaggtacatt

SEQ ID NO: 37463 - DNA, 922 bp, Sorghum bicolor
  Intron number 3 from transcript Sb01g001440.1 (locus Sb01g 001440) derived from phytozome v7.0 (chr-ID chromosome_1; pos 1334555 to 1335476)
cctttcaaagcaatttcctggcagcacacgggttggtaagtgcggttactgaactcaactttagtgagaccgttgcggttcctaaacatacggtccttcagattaaggaggaatttgttttagtataaataaatagagcttgatctagaatttagctgacttgacattaaactttggaacatatcatctagccttgtccatatttttgtaaatacagctatctgggttagatttacatctgcactgtattcatactgtcatgatacagcctggcaagtacaactgaaggcatcaaatgaaccttataggtctggatgttggtttatttgaatttaaacaagtatgcactacattaatgtatcaacacaaaattgtaactaagattccagtagaaaagagggcaattggataaggttggaggtaatgtggctcatccaagaacgaaatttctttttccgtttcaagttcaaaagacatgatatctgccgggttatgctgccatgctgatacttttgttattctcacctttctttatatgctatactaaactcagtgaaggtgtaagtgtgaatttttgaattcaaagtgttaaataactatacatgcaccctatattaattataaaggcaaagtgttgatgttttaattaagaatatggtaagaaaaagcaattgtatagttggatattgttggtgatgtgatctattggttgagttcttaatcatagtgcatacagaaaaggttaaaaataaatgtatacatctaagactcaaattcctgatttttttatttttgtgtatggaagacttgacatctgtgagttctatgatgctggtatgttggtcacctctctgtatatgctaaactgattgtgccctaaaatgtagcccggctagaagctcttctatttgaagcgaaaggt

SEQ ID NO: 37464 - DNA, 761 bp, Sorghum bicolor
  Intron number 3 from transcript Sb01g015660.1 (locus Sb01g 015660) derived from phytozome v7.0 (chr-ID chromosome_1; pos 15252680 to 15253440 reverse strand)
ggcagcaaactgctacaaaaagttctcaccacaaggtagtatatatacacttaccagagtatgatgaatatcctcctttgttgttgttcttcatttcatacattttctagctagccatacaattcgatatatccttcatatttttctagaatatcaattattggatctagtgaaactcattcggttgtctaagttatgctatttgatttgttccttatggctaaatatgtctaccttagagcatctccaagagcttggctaaaatgagtagctaaattataatatttagctattttataaaatagataacttcttaaaagagaagaggtttacaacagccttgctatcagatagctagtgccagtggttggctatatatggccaacgaaaatcaagggataacaaactttctattttacaaaaccaaatagcacatctgttggagcctatttttctactataaaaattctaaaaggcctccattataagaatagcaaagctgttggagttgctcttactacctctttctatagttggctacccatgggatatctagcagctagcatgaaaaagatggcatgtccttttaacaataattgatttaatgcaatcaaagaaacattaatgttatgtgtcgtgagtactttctacaagtgaacaagtcattaatccaaccaaacaaaatgaagtttgattcccttggcatgactgttcatgctacaacttgctctactaactgttacatataatgtttcatgcag

SEQ ID NO: 37465 - DNA, 671 bp, Sorghum bicolor
  Intron number 1 from transcript Sb01g015660.1 (locus Sb01g 015660) derived from phytozome v7.0 (chr-ID chromosome_1; pos 15253594 to 15254264 reverse strand)
cagggccggcaacttcttcaaactcgcgaagaactgtgagacgccctgtccccccttttgcatcgttcggcaatctcgcatccgtgtgccggtgttgaggcatcaatgcgcgatcgatcgtatgtaggtgtctgatgatgtcgtttcgctgggtatcacgggggatacgtacggaaatgcgatttctgagatctaggtttattgtttttcattatataagtgattttgattgggggagagccggagaggttacatgatactcgtgatttcgacgaaatttattgatgccattgggccgatcttattattgagctccctgatactaccatccatgtgcagtttttcatctgttccattttttggtaggccgcataatttggctgtttcaatattgaattgggacccatatcccacaatattggttttatacccgacttatccattagggatcctgaactgctgatatatatgttcagtaggtactgtgccctgttgccctctcgaatccatttactatccatgagaacctgaaattgcagatttatcttgtcatactggagtttatcaactcctcctttgcatttaaggaaaagaaaaacttcttatccttgttaatcattgtactatttgctatagggagcagagcagcttcggtatacaaaaagattgca

SEQ ID NO: 37466 - DNA, 850 bp, Sorghum bicolor
  Intron number 3 from transcript Sb02g039800.1 (locus Sb02g 039800) derived from phytozome v7.0 (chr-ID chromosome_2; pos 73891718 to 73892567 reverse strand)
cagggacaaggtactacatttcgattccgattccaggaacgaactcatctcctttcccttcttttctgctgcacttgcggcacatatataaagcattaaatatagatgaaaacaaaaactaattatacagtttatctgtaaatcgcgagacgaatcttttaatcctagttagtttataattagataatatttgtcaaataaaaacgaaattgctacagtagcgaaattcgaaataaacaaggcctatatattttgggggaaaaaaaagagttttgttgtcttgtgaggtggccttggccttggcgccttgcagttgcacgctgtagtgtactactgcttgccgctcctgcacacgaactggaaaaagatatcatttcacctcacgcgtccgtccgtcctgcctcctgaggctgtgaccgtgaacgtggacgcgcgcgccggccggggccggggcccgtgtgatcggacggagaagtcgccgccggctcgccggggcagcagctggcgcgcggagaacgaggatcgtccagcgcgtttgttttgtttctcgttccatgcaccttttccagcgcgtttgttgacgtgcttgttgtatttaaagagatttacttgtatgtctctcaaaaaagcctcttttttatatggttttttttaaacttccttctatggtccttaaacaaactcttatttcttctatggcctcccgtccgttttcagcagttaacggtattaagtggaggataaaaagaccataatgcccctggtgtaaaaaaaattcacaaagtttggtttgtttcttgtatattttgagtaatagtaaacaaataaattgacaatttagacattataa

SEQ ID NO: 37467 - DNA, 997 bp, Sorghum bicolor
  Intron number 1 from transcript Sb07g002120.1 (locus Sb07g 002120) derived from phytozome v7.0 (chr-ID chromosome_7; pos 2283587 to 2284583)
aaggcgcgatcggcggcgcggaggttccgccggaggtgcgttcttgatcgatatattttgtctatttttgcgaatagtatagttgcttggttagtagtttcaaaaaacgttgcttcgatagttgggatgaatgaatgatatatgttctctcatttgctgctataataaatgatatgattgctggttctatgacagttgagcttaattttagaccaaactgcaagtgttagcgactgattccgtgtgcatgtcctatgttcaagttgttgtatatctgacagcaatagtttgattgccaatttcattagacaattagcatgccaagttgccaaccattctactgctgacattcatgatcctgaaggttggacagctagttttacagacattagcatgttaacacagatcatttcctgaatggaaatagctgtgcatgtggaatggtccattcaagatcctgttttcgtctttagtatttatgctgttttgtgtaccagcatcatcatcatattttacaccggcggtataattcttgttcaccttttgaaaagtgaggtgttattcttcatcatgaatacatgagtgtgcattccctgccattttcaagtgcaagttaaatgcctaatcaaatacccattgtttgcaacattcagcaagcttcatgctgaattttgcaaaatctaacatcaagggcatctcccctttctgatgacacgtttgttttttgccattccaaagtttcagcaagttttatgctgaattttccaaaatctaccatcaagggcatctccccctttctgaagacatgtttgtttttggccattccaaagtttcagcatgttttatgttgaattttgcaaaatctagcttcaagggcatctccaaacctcatttagttcatttgagttgtagtaacaatataagaaactcctgattcctcctaactgagtccagtcactctggtacaggcgattcaagggcccataccctttcagtg

SEQ ID NO: 37468 - DNA, 504 bp, Sorghum bicolor
  Intron number 1 from transcript Sb02g039370.1 (locus Sb02g 039370) derived from phytozome v7.0 (chr-ID chromosome_2; pos 73487360 to 73487863)
ccaacaccgactcgagtgagtgatttctgctccttttagtagttttcttcttctctcaaagcactcttggtttccgcgcatcaagaaacgatgcatttcgtcatggtttagtttggttttcccagccataaatggatgcgaaaggctccttcttgtctttgtctgtatcccccctgccctgctctggtcagttcattgagtctgaagaacaagaagtacgggttctgaaatttcgggttggcataatgacaggtttcgtgaaacttcggttcatgtacaggcgtgctgtccacaactccataggaaattttcttgtagattcagtgaagttaaccaagggaatgatatcccttcatttttgctacttgcgaatgcgaacatcttagttattttaagaaaaatgttgtagaacagcaaaatatgactgaaataccatgttacctgaaacatcaaccctccgttgttactgatttgtcccaaaccttgttcttgcatatgcagtga

SEQ ID NO: 37469 - DNA, 959 bp, Sorghum bicolor
  Intron number 1 from transcript Sb05g022940.1 (locus Sb05g 022940) derived from phytozome v7.0 (chr-ID chromosome_5; pos 55294477 to 55295435)
cgggcagtgtctcctggtaagctcaagctgaaacctctgtcagtaagactgctatagcaagagttgttacctgcattaattaatctagctagttaccgtgaattagttcacctttcgttcaaaaactttttaagatttctcgtcacatcaaatcttatatggtatatgccaggaacgtcctagagctcgtgcaggctgtgcgaccgaactgggctcctaaaatttatgggctccaaaatttactaaagtattctaagtatatataataattttaggtttattttaattagtaaattagtcacagagactcaataaacgtggcctgctacttccttagagataaagcacattgagtccatgatcatgagttagaaaagtctaagttcagaaattcttcttgacataagtttgtaacccttcgtgagtttgtggcttcgtcccttggacttgttccttgtccttggtgttgttcttcactcaagagtcgagacctagtagcaatcctagacgactggacctaaattaggacactaaacggagatcattgcctggtataaattccatgcacaattcctattttatttagttaatcttttatacattgtctttgtaatatattgatatttgatattatctttttagattttgacaatagattttagacctccacttgttattttgaactgggcctcatttgctcgggacgccgctggcacatacatggaactttaaatataaataaaaaaccaattatacagtttgtctgtaatttacgagatgattttttaaacctaattattttatagttagacaataattatcaaaaaaacaaacgaaaaatgctatagtgtcaggatccaaaccaggctttagtgccgattgttactcatggattattgatgctttccgcacatgtacctacaggtgacgaactcggcgacgggggcgtcgctgacggt

SEQ ID NO: 37470 - DNA, 705 bp, Sorghum bicolor
  Intron number 1 from transcript Sb01g009210.1 (locus Sb01g 009210) derived from phytozome v7.0 (chr-ID chromosome_1; pos 7937903 to 7938607 reverse strand)
actccgtcttctaccgtcgccaaatccccagtcaggttagctcgtcacctccgatcccctctctggcatctggcctctggcttacgaaaacaaactccaatctagcgccaggaatgcctatttgttctgtcacctgtacgaaaccaaactccaatctagctgtattcaactactgcttcgcacgtgatctatcaagtcggtaccaaatacctatttgttctgtcacttttaaagatgaattcaaaggagtgtttccaaatccaattaagaaagtagtatataaattaaattactgatcattgtgatgctacattgctaggctagtactttgtacaaataaaaaatacgtaagtaatgcaagccagtccatagattattgctgttttggtttttgagaaaatcaaccgttcctgtggcgcaggggttaagacctggaagaacatatctagactaataactctgttaaaagttccgtctattaatgtttcgtatttattcactgactgttgttgtagtgcttttgatattacaatgtttatggggtaacctttatctaaaaaattgcattactttgatgttacatatatattgctgtgggcactgttatttgataaactggagaagtcatctctgtagcctctcttgtattgaggtacccataccctgctgatggcatatcagtttgaaatttctgctgattacagg

SEQ ID NO: 37471 - DNA, 677 bp, Sorghum bicolor
  Intron number 1 from transcript Sb01g034780.1 (locus Sb01g 034780) derived from phytozome v7.0 (chr-ID chromosome_1; pos 58223297 to 58223973)
ccttcctggcgctccacacgcggacccacgccaaggtgattttgctagtctccccgcccccttccgccgggcctctccctccctcctcttcagtagttcttgcgcgcttttctctggagatctagaggccgatcgatccatgcgaacccactcccggatagcctctggtgacgcaatcggatgtgccgatttcgtttcggtggtcgtctcaagatcatcatctttgttgggttctccccatgtgcctggtgatcatttccttccttttgttttgtttatataattaaggggttccgattggtcgtgacactactggcatattttggtgggtcgaaatgggataatgcgaaatggctcaacccttcgtcgtgatgatgcttgaataaaacagagaactactgtttttttttttgctaaattaaattggtagaggaatacgcagttgctagggtgtcatgttcttgtactgctttgtttgtctgactgtctccaccatgatgtcaggatgtgattgattatttcccttgttctttgctcctcaatgccaagtgatagttctgatgtaactcagtttactttgaattctctatcaaattattagaatactacttgtagactgattggtattcaccttcttgttaggctctggaagaggtcgagaaaaatatctcatcctt

SEQ ID NO: 37472 - DNA, 667 bp, Sorghum bicolor
  Intron number 4 from transcript Sb03g009990.1 (locus Sb03g 009990) derived from phytozome v7.0 (chr-ID chromosome_3; pos 10793997 to 10794663)
gaaacttgggcagcttggaaagttcctcgggtaacttagctgatatggactgttttgaagtttctttgacttgtttatatggtttagttgcatttcatctttctggttactcatactatgttttgggtatcgttcactacaactttggcaagattggtttccccgaaaatctatatcctaatactagagacatcaatgcaaataattgcatttccatggcaaagattgtgtcccgatctctttttgtatatttattagtgtttcataacctaaacctaaagtcctaaacagctggagttttagtttgtggttaaactattcttctaccaatttccttgtataatccttatgtcattacgtggtgaactattatttatgggttctttagaatacaaattgtaatcaagagggtatgacttacagtcttttttgtaaataagacaatgctcatcatcaaaatttaaaagtttgatcagtgaaatgaaattttcttgtcatctttatcatggacttatgtctcatagcaccccattagtaagtagcgttactgcagtcagttgtcatgtggaaaacatcattttttccaattgttgtgtcaaataattgaaattgtttcacaaagacatataagctgctgctaatgcacttattttgccaggaaaatctt

SEQ ID NO: 37473 - DNA, 730 bp, Sorghum bicolor
  Intron number 1 from transcript Sb01g015120.1 (locus Sb01g 015120) derived from phytozome v7.0 (chr-ID chromosome_1; pos 14575619 to 14576348 reverse strand)
gcgtcgactcggtatgcttctaccactatactatactatagtgcctgtcaatcgtcttcatccttctgccattgcaaaaagttgttgacttgttttccatctaccgttttgggtgttgttagcgtgttgcggcgataactactgaatgaatctgtgcatctggctttgtgttcttctgatgatggcccatggatcctgcaaaatatgagttgggatttggggatccatgcgggcactgctagagggtgttcttcgtttgtctctgtgttcttggctcttgcatgcattaggccgtttctgagatcacattgctgcaaagttggactccatgctgtctaaggttacagaactggataaagaacattgatttgtcacactaactttagaaggaaggtttattgttggtttttactaattgctatatgaaatatcataataataatttgcatgggagctcatctattttttttactgatgcctgactttggcaactacactccatattttgggatctgtttttataactttggctcaaatggcttattttagaaatttaagctcgcacaacttactgcatgttctggagtatttttttggtctcagcataatttgatttatatcattctgtcatctctgtttgctctgttcacataccttttctgcactctcttctaattgcctccttctcatcctagggctctgctgctcgtcacagaggtgatacacgtgt

SEQ ID NO: 37474 - DNA, 298 bp, Sorghum bicolor
  Intron number 1 from transcript Sb07g005680.1 (locus Sb07g 005680) derived from phytozome v7.0 (chr-ID chromosome_7; pos 7862635 to 7862932 reverse strand)
aggtacttgttcttttcagtgcagcataatctatccttttgttatgtgttgctaaaactgtaaaagaagttgtaatacaaaggtgcctatcttatattgtagtatgtttcatgtgcttttcattgaactttagtaatttctttcactattttgaatatttttgaaaagttgtgcaaatagttgaagctgaaagatcatttctatgtgcacttttccagtaagagaatgtgatctgaattagctggttgtgaatttttgttcaggtaaagtgttggcagatcagacgtcagactaaagc

SEQ ID NO: 37475 - DNA, 988 bp, Sorghum bicolor
  Intron number 2 from transcript Sb03g043995.1 (locus Sb03g 043995) derived from phytozome v7.0 (chr-ID chromosome_3; pos 71237079 to 71238066 reverse strand)
aaggcactctgcaggtttgaacttttctctcatcgaactcaaatattattcgtgctgagtgtatgtttgctattaacaaatacatttgtggattcatatagtaataaacacatgcatacctttgcatccagtgatgctgagcaagcagttcacattcctaaggttctgatgtttgcattttagcataggaattgtttgcacttcttgagcatgcatagtgcttttgcccaacttctcaatggtcctctcaattcaactgcccttgatgattacaattgaatgtatgtgaaaggcacacattaatctgtcaaaaccccaaacctttgttctatttgctcaaatgcagctaagttctgaagcataagaagtagtttcatcaattcctcatgaaaataacatgaaggggttctgttgcttcctgataaattgggaaattttgtaaaatcttatgcagctcaagttctctcaaattttctggtaaatacgtaattgcaatgcttttactagatggctactgcaattattgcaacccatgcaagtgtgcaacataactatgcagtttttaaaaatttgtgctttctttttcctgcaatatattcgttcggaacctgtgttgcaaaaacaggttctgaataacccactaagcacttgcacgttaaaatctttgtactgacaggattcagctgaaagcaggttcttatgctttatccaaattctacgctaaatgttcatcacccaatcaaatttgatctaattctgaagtcttaaaaatgctaggcattggagatcattttgcagtttgtcactttaactgtagctacctcaaactttctcgatataccattctgaaatttgtgctacaatacacactccataggttgagaataaagatggcgtggttttaactggatagtgtgtatctttcccaatgctcatcattcttttcgatgcatctctcttttgtccttgtgtgtactgtgtagggcct

SEQ ID NO: 37476 - DNA, 771 bp, Sorghum bicolor
  Intron number 3 from transcript Sb03g007303.1 (locus Sb03g 007303) derived from phytozome v7.0 (chr-ID chromosome_3; pos 7609853 to 7610623 reverse strand)
caaaactatcgaagaggtttcagtctaccgtcgaggtttgcttttgtaatcttgctcagtatttgtcccttatagctcctctgaggaagttattttctgtagctcttgagcacaaggcactaggttgctaggatcagttcaccactattcttgattcatgaaagatgtcggttatacttagtgtcttcttgacaggggatattggtaatcttgtttgtagagttgctttcagaaatttaatgtctggttaactgcttttcaatttaagctgcaacaagttacaagatgcattttgaatcaccaataatagtgagagaagctagggtttcgtagcagacttttgtctaaacttagtctaattttccaaataagagtttttaacaacagtttctcagcaacagcttcaaagaaaaagcacagtgacattaaccacaaactgatctttactaattttgcacttcggggatataatctagcaattgtaccttagatgtctttgaaacttttactccatttcagtataagctaattaatgttatcattagaggacagacaagcttctgagtaggttgtgctagagagttggtacatttgattcttggaagtgggtcccagattaaaaaagtactcaatagtatattcctttaattgatgtattataaatatgtatcagagcatatgtagatgctatcatgtatcgtccatacacagctgacatagctctatgattttgcagagacgtttaaagaatcgaaaaccaaaattaatagt

SEQ ID NO: 37477 - DNA, 585 bp, Sorghum bicolor
  Intron number 1 from transcript Sb03g037910.1 (locus Sb03g 037910) derived from phytozome v7.0 (chr-ID chromosome_3; pos 65815230 to 65815814 reverse strand)
gaaaattgttaaggttcctgggcttgctttggttggtgagattcaatagtcatcaaaattgttcggtctgatgaggagaagctctctaaaatttcattgcaaccttaccacgttaattatgtcccagtagcataccaacttcattaaaaaacctcccagcctattggtgggttattgcacttttttacctttttaattgttattatctcccatgtcaagaggcaaaattgaattttattcgctggggtgttttgccccacagttttaattcaaaaaagaatgtttttttttcttggttgctaaatagattgtcataaatgatatgcctgcagttccatatttgtgaactcagtgttaccattgtgccatctcactttgttttctttttatgtactgataataagcctcgaaggcatgatgtatttgttaactcgtttctatcttcaaaatgactgtttcgcccagtacaactgtttgttggaccttttacctattcttacgattccttgcagttgcaggaagcaggtgaagtgaacctcatgtccagttcttgctcctctttaactagtaactagatcatttgta

SEQ ID NO: 37478 - DNA, 987 bp, Sorghum bicolor
  Intron number 1 from transcript Sb03g010240.1 (locus Sb03g 010240) derived from phytozome v7.0 (chr-ID chromosome_3; pos 11089856 to 11090842)
actgcttcgtcaaggtacctactatagctagtaaataaaccctgctttccggcactgtagttttcgttacattacatgcagctaagcagctctgaatatcttatgcatgttagttaacaataggtacatgatgactgaatatgcaaagtgcaccgctgcaacttttgctgtttgagtgagcaaatccctagttctttttgctacctttttaccaacaaagatatgatgacgacctagctacacattgcgcatgcatgccagcactagtttatgtcttgccgttggcgacaacattacaatgcaatatcatatcccgtatcgtatgattgattcaggccttgttttggcaaaactttttagtttcgtttgtatttgataaatattgttgtttaattatgcttatgaactaactaaggttaaaagattcatctcgcaaattacaaacaaactgtgtaattagtttttgttttcatctatatctaatacttcatacatgaccgtaaaatttgatgggacgaaaaatctttaaaaaattatactcaatccattccaaattgtaagtcgtttgacttttttaatatcaagtttgaccactcgtcttattcaaagttttgtacaaaatattactttttttttgttgtgtattggtttattaataaaagttcttcaagaatgacttaaatttgactatatttgcataaattttttgaataagacgagtggtcaaacttggggtaaaaaaagtcaaatgacttacaatttgggatggagggagtatttttaggaactaagcaaagcctcattcctctctctctgtttttttttgttgcccttttctcaaaaagagagaaaactatcgtcaatgtaggtgcctaattaatgagtcgtctaccaccatgattgtcaaattaaccttttgcaacacttttccatccgtgtgtatctctgatagggctgcgacgcttctgtgctgctggacaacagcag

SEQ ID NO: 37479 - DNA, 735 bp, Sorghum bicolor
  Intron number 4 from transcript Sb01g008930.1 (locus Sb01g 008930) derived from phytozome v7.0 (chr-ID chromosome_1; pos 7686773 to 7687507 reverse strand)
ggtatgtttatatttccttactggtttaagcaggcttgtgttatttactgcatattctttcctatgtatacaaatagtctgtttcacatttgtcttgtttctgtaattatttatcatactttcctccatccatgtatagtaggcgcaactcaaaaaacgctaagaccaaggaacaggttaattactgtgcgtttttaggagagtctgtttggtttctgcctccgaataatgtgtttcacatttctctgtcacgcaccgtgggagagcgcacgtgcaaattcctttctggcttctaggcatgcgcatgcaaatcttctcccacctatctgccgatggcgtcatgcagccatcaactccccactaactgaagttctgttttttcttggtaaaattttctgtcctgccgaactatttttttcctattggcggtatggaaaatattttggcagtgcttatgctagtcagctcctgccgtgagagagtaacgtataatctaacggaacacgagcagttcaaggagtttggccgccagtgataaatgcttcacgcagagctgagcaccgcatgtgcagcaaatagctgagcgccctgtatacgtggaaacacacacacacacacaaaaaaaggttatgcctactatagtggacagagggattaatttctagtggtgtgagctggcattctcatggtttcaatttttggtatcttctttcccgctattggcagtttaatcag

SEQ ID NO: 37480 - DNA, 724 bp, Sorghum bicolor
  Intron number 1 from transcript Sb01g043060.1 (locus Sb01g 043060) derived from phytozome v7.0 (chr-ID chromosome_1; pos 66387028 to 66387751 reverse strand)
caggaggtatgcaccctgatttgtagttttgtcgatatctgtttattcgaagttctcatttttgtgctgtaaccagtttgggtaataatcactaatcaggcattcgttctatctatgctcattgctctctatggttaagtttgtcggccatgttaaactttttattgagacagttttttatcatattaaagtaaatggttttatttatctcagataagctgcactatgtgttgtatggtgtgtgatgaatagatctttctggtttgttgttagcatttctattaatcctaaagctatgtcatgaagaggattatgcattctgacatgggagaattgtctggaaaatttagagtggggaagggaggtgagtagtctgctaggcatttgttcctcttaaactagctgagaagttaaaagagctgagtgaaaaatatttttccaagtgggtgaggagatgatagagttgaatacatctagccatcgtctcagtatagctgagtcttaagaaacttgttttggatcctttgctcactatattcatcaatccctaacattgcttttgcttgttagtaattccaatttgattaaacagccaaggtgttctgtatagtaaaatgttcatgttcagtgttatgaaattcttttaattcttttaacacaattcttctgtctgtttcttccttacataggttgagggacagtctgaggaagttatatttgatca

SEQ ID NO: 37481 - DNA, 337 bp, Sorghum bicolor
  Intron number 2 from transcript Sb02g008800.1 (locus Sb02g 008800) derived from phytozome v7.0 (chr-ID chromosome_2; pos 12221989 to 12222325 reverse strand)
aagtcattccagaagtgtgtcgtctatttccaaaggtgagtttgagctacatcactatataagtcaaataaccctggtgaattgagtatgtacacactaagggagagcctttgttacgcagaatataacaaacttgatcaccaattgttttgattgacgtgcatgtaaaacaagtctatgacagtacatttttattggacagtagagtttggctgttttcttgaagtcatcttgcaccattattttcttatcgtactgttttgaatttagtgagttggttgtattttgtcaattaatgactccatggatttgcaggttcgctttattgttggtggtg

SEQ ID NO: 37482 - DNA, 845 bp, Sorghum bicolor
  Intron number 1 from transcript Sb04g010380.1 (locus Sb04g 010380) derived from phytozome v7.0 (chr-ID chromosome_4; pos 14211863 to 14212707 reverse strand)
gccttcaaccccctgtgaggaagctcctcagcttgggattctatttcccttttgtttgtgtgtttgcatatgcatatggttctgttcttgcttcgtgtggcctgttgggtttagctcaggtgttctaattttaccttttggtgcttcttgttgttggtactaccattctgttttaatgagttggagatttttgaatatttctaagaattatgaggatcttagagttagaagaatccattccctcgtctcacctatagtagcaattctgatttctgtaagaatgtttgaggcatagtggagcttagagtgatttttagtactgtagcctgtgggtgaacatattgtgctaatcaaaacagatggccctgcacagtcatgtgaaaggaaaatgtgactgatatgtttttgcatatcatggtttgcaattgattagcattgatgcttaaacatttcttgcttatggaaaggcaagtgtgacatgactgaaattgctattgcctatcatggtttgcactaatattggcgcttcaacatttcaatattgttgttttggacacctggtttgaaatgttgacgtctttgaggtcaaacattacatacgtttcaaggtcaagtgttgcaacttttacgggcagacaagtgttgtcaacataaatgatcaggatttgtcttgcatgtcttcctacagaaatttgtgtttctactttcttgtgatatgattcatttacatttagaaaaacaaaaaaagggcatactgctggaaacatattccttgcattgaactttgcaccctattttttttttttgcaggaagccttccactgaagtgaaaagtgttactccaa

SEQ ID NO: 37483 - DNA, 939 bp, Sorghum bicolor
  Intron number 1 from transcript Sb02g002350.1 (locus Sb02g 002350) derived from phytozome v7.0 (chr-ID chromosome_2; pos 2419275 to 2420213 reverse strand)
agttggcctgctgacgctggtgaagctgctgttgcttagagctgatttttttcctgacatctataggttggtttccatgtatacatggtcagtagatcagtacatggtttctctgtattgtgttatccaccttttgtactccttgatcgtggcctgtcaattgccacttttcttgattgatgggaagttgtggattaagctagattgctattgtatgggttgttctaataacttgttaaatatagtagtagtataagcacgaagtatgtgagcaatgtctggtgacaaactgacaaccaaggctaactgcagctgcttaacattagattttttttttgaaaggacagcttaacattagatgactactaccatatacatggaattcatggatatgcatcccaagccagtgttcattttcacccttctctgcaagtctacaagactacatctctgataagttgagcggcctgctcttgccacagttacaggacagatggacctgtaagcattagtctctgccacgaggatggaacatattcaaatcctccataacagcatcaggattcaataggagaaaatcatagatcaaagttttcaagcaaactcatggcaattaacataaagcaatatatacccatttccactgacgaaacccacacgacagtcgtgagagaagacagcaagcacaagggcgtaacagctctacagtggaatcagacaatcaggcagcccatggctagagggaatttcaacaaatgctggcacggccctgcaatgattcaatgctcctcttagataagctagagggtaatgtagaagcaatagaagctctcagaatttaggagcttgcattgtgggcttgcatattttagccactttgtttttgccagagccagactctgtatttagttgtttctctatccccagatctgcttccag

SEQ ID NO: 37484 - DNA, 964 bp, Sorghum bicolor; identical to SEQ ID NO: 36980
  Intron number 2 from transcript Sb03g043810.2 (locus Sb03g 043810) derived from phytozome v7.0 (chr-ID chromosome_3; pos 71065157 to 71066120 reverse strand)

SEQ ID NO: 37485 - DNA, 679 bp, Sorghum bicolor
  Intron number 2 from transcript Sb03g013470.1 (locus Sb03g 013470) derived from phytozome v7.0 (chr-ID chromosome_3; pos 16822741 to 16823419 reverse strand)
gaataaaggtttaatacttctctctttgctccattcgtttttcttataagccgtattttttcttccggcctgttgagccacctggtctaaaaagtcgtggctgaaaatattgttcgctgatttattgtgagagaaaaacactgctggctggaagaaaaaatacggcttataagaaaaacagtggtgttgagttgttagttgggtcgattgatgatgtatgtactagtttttgtgggaagtgtagcacacgcacacccagaaaaaatatttttgtattctccttttattaaaacttgtgttttcagaactctaaaaatatttttgttttctcctaataaaaacttttggcaaaatttctccttctgaatagaaaacgcctatagttgatgctagccaccatgttttacataacttcccacgccttgtgtttttaaaccgaaattaatttcagttcttatttttcaacattagcatgcaactgttttttcacacctgatgacctgagctccccaggggtgcaccgatcttgtttttacgcacagtttttcttcgtccacattagcacagagttcgcaatgttcagagtagtttcaaaatttttcctgttactcattttcgtttgcttggttgaaaatttcattcagaggccaatttgctgttcttggaatcccccgttggt

SEQ ID NO: 37486 - DNA, 954 bp, Sorghum bicolor
  Intron number 1 from transcript Sb05g003690.1 (locus Sb05g 003690) derived from phytozome v7.0 (chr-ID chromosome_5; pos 4283380 to 4284333 reverse strand)
ggaggcagcagcagcagcagcaggtatcgttgggaccaggccttggacacgggcaagcggggcggccgccctgggcccccaattaggcagggccccaccccaaattatacaacaccggcactaggactagtactaaattaactggcttccttgagcagaatcgaggccgtattaaaataagagagaaaatcattacagcagctagcgttcacgagaaaccaacgcctgcgtccccgacggcggcagacgcgctgcgcgccacagaggggttctatgcataagtttctcaagaagaattcaaacatttcaagagatccaaatcagttggcgatagttgtctggaaggatccagcacatattgttccagaagatgaagatccttctcacgacaatgttggcattgaaatggaagaaatcaatgtgagtaatgatgaacacatatttaattcaaatgctacggaaaatactagtgttgatgaggaactggtgtgtcacatggatatttatgatccaagaaattgggataatgttgataacaaagcaagggatatattagttgaaaaggggcccataagagaagataatattgtattccccttcgataataatttaaggcattttgcatattctcattatcaaagaaaaatgagtaatggagagctatgtgatagaaaatggctagtttattccaaacacttggataaagtattttgcttttgctgtaagctttttaattctaagaagtgcaagagttcattggggaatgatgggtatagagattggaaacatatcaatgagaggctgaaggaacatgaaattagtgttgagcatattaccagtatgaactcatggaaggtgagtactttcttggtttcctgaaggtagaagacacatctggttctgggctctttaaagttttggttgattccattaagtcctttggtcttaatattg

SEQ ID NO: 37487 - DNA, 830 bp, Sorghum bicolor
  Intron number 2 from transcript Sb01g010090.1 (locus Sb01g 010090) derived from phytozome v7.0 (chr-ID chromosome_1; pos 8936306 to 8937135 reverse strand)
ctgccgcatttgccttgaggctgagtctgagataggtgatggtcccaatgagctacctcactgcatttttgttatgcctgttagttcactttatttcaaggaatgcttttgtctggtgttaatctttctgtgttatagtagcaagatgaaaaataaagaatactcatacctttgatattttgcttaccttatctattggtctaacaaaattctctgtactgcatttattgtgtgactggtagagtatgatatggctcagtcacagtttacatccaacaaaataggaacaggaatgatatctgatctgaagttctgtatcataccagataccacaagcattaagccttaactaggagaataaacaagatgcacagctgactagattacataagttctttgtattccctatgctattagatagaaatcaaaacctgtcttcttaggctatcagcattttccttgatgtaactgatttaatgattaccctggataatatctgcaatgctgttgtgacatctgagaacaaaaaccaacagtaagtgctagtcctatctgccacttacaaggaataaatattagtttgctcatgttgaacaacaaccaatttgtaattcagccttggtgtgtgaataaaatgaaattaattgcctgcgtatcaggattcaggatgtgtattgagctaacattttggtttggataattgaacctgtagaaatgcttagtatacaatatattggttgggtgcttcagttttctttccctatccaaccaaccaatgatgtaactgtaagcttgtgattccatctattcttttaatgtttttgcaggtg

SEQ ID NO: 37488 - DNA, 861 bp, Sorghum bicolor
  Intron number 2 from transcript Sb01g016810.1 (locus Sb01g 016810) derived from phytozome v7.0 (chr-ID chromosome_1; pos 16996781 to 16997641)
cgcccgcagccaaactcccccaccgtctacgactggtaagtactagtagcaataagcagaagcatgcatgcatcatctcgctgccccgtcggtggctatgaatcacttggttaattgcagatacacctacaacgtcggtgtggctagccacgtgatctgctcattcaacagcagatccagcatctaactaataattatgagcccgtaacttaaactatttttcgatgatttattatgccgataaaaatattgctaaatagctgacggattcgacatataagtccaaacaaatagactctataagcacaaacttgggctgctgtgctgctgctctcccactcttcctctcatgagccctgtttagctaaatgaatggttgatcttaattagtttctgttacaagcacccagaaagttccataatcaagacgatacatgtgcactggtgaagtcagcacacacacaatattaaaaaaataataataagcaaaagcaatatgagatccacttagccaataaccatgattcgctcacgtggcatgccaatccagaagcacgaccgagaagagtgagacagtgacagagactgctatacttcactgtttgagtgtttactttgttggaacggataaggcctaaaggacaagcacgctggtggccagatttattttagttaataatattaatatactccgtatgtatagtttcactaatatagtacgcaaaaataattaagctgtgaaaacgatctagttaaacaatggtgtcatttggactttagcaaacaaaatatcgtgacacggaatgttgtcaatatttgatttcaggctctacagcgacgagaccaggagcaaccaccgtt

SEQ ID NO: 37489 - DNA, 916 bp, Sorghum bicolor
  Intron number 2 from transcript Sb07g005180.1 (locus Sb07g 005180) derived from phytozome v7.0 (chr-ID chromosome_7; pos 7030237 to 7031152)
cgtttgggtcctcgtcggcgctgtctttaagccaggtgactactcctccagtgacagggagaaatcttttggagtgtacaggatcagtcgtcgtctcactgagtagctactactagctactagtttaactttttgtggggcaaataattaatgttcctgcttgtgcatatctttttcttgctgattattaattccgtgagctaactataggatgtacatatatgcaagtatttatgggagcgatgttcaacgatactctggccactaatcagctatttaatgtaaactgagtagtaccggccggccggtaggaggaggaagaagagacaacaagttgatcgatgtttgttttttttatggaaaactcatcgagtgtatatatgaccattgtgtatgtatatacgcagttggtgatctcgttctcgatcctatatatacctacacacatgttttgttcctaaaagtaagaagtacgtatacgcggtctactgtactacatgatttttgtgcttagttttcatacttttttaaaaaatttactagccctcataaaagcaaaattcttgtcttctcattttgaatggaagcaccttccttttgtcatgcatacatcacaacaaaattaatgaggaagtgttgcttcagtcaactgttcgtgcattaattcagcatgattctgcattcaaagtctttttggagtagtactgctccaaaagttttttttaaaaaaaaaacacttgttgcatctttaatgttccattaactttgtgtaatccacagatctcctcgattgcattatgaatcgtccttagcttatacatgcaagtatcaaattctcatagtatctgtgactcttacaaattttgggactgaaattgcaggctgacctcctagacagccatcacctgcagcaagc

SEQ ID NO: 37490 - DNA, 554 bp, Sorghum bicolor
  Intron number 2 from transcript Sb05g003980.1 (locus Sb05g 003980) derived from phytozome v7.0 (chr-ID chromosome_5; pos 4732001 to 4732554 reverse strand)
aagtttgctttcgagctcgcccgattcgtccccaggtgcgttttctgtagagaatgagttgcagtaaaaaactaaaaatgggttacgggatgatgattttcattgtactgcttagtgaattgagtagtcgatagaacactgataattagttaattactactgccgacaatgttcaaaagatgttttggaaaaatgctacttaatttgtaaagtttactggtgccgacaatgtttaacaaaagaacttgcttttgtatggaagaatcaaaagaaaggaacatatctactgttagcttacaagctttgcatagtgatgataacagtttgtgaagttagctgtttacagtcttacaacacttgactttgctaatcactccatatggatcatattcatgtacatagtgtaatcgcccaatggttacacatcccttactttttggctaatgtatttgtcagatcttgtttaagtgagctacatggtcgaggggtataacctcatgacattgctgactgatgcagtgtgatagcatttgatcaccggcaaagtacactag

SEQ ID NO: 37491 - DNA, 1039 bp, Sorghum bicolor
  Intron number 4 from transcript Sb01g022205.1 (locus Sb01g 022205) derived from phytozome v7.0 (chr-ID chromosome_1; pos 27288454 to 27289492)
aggcaggtagcttcctattttgtttgcccacttattttgggccaccatttattttgcatgctatgtatacaaattactaaacttgctagtgtatatctctgtcttcgccgcaatcacacatttgtgcaaatcttctttcagttaacctactgaagtttttatgtttacaatcatgaatcatcatcccctcaaatatggcttctcaaaccaagaggatgatacaacatatttactgctcccttttttagttatgtttggtttccttgctcaactttgcctactagccttgcttgccaaggttgggcaatgctgcaaagcataccttgctaggtgaggatagtcaagttggctctctctcaaaaagcatttacatctttacctcccaattcaaaccaagcaaaggaatagaacaagcttgcttgttctctgaccctgctaagttgtacgcaagagaaccagacatgcctgcatctttgataacgcttcattttttttgtacaatgccaattgccaattataagtgatgtagaagcatttattggttggaatttgatgaaaattggacattgtttactatcattgaattcacgtaatttgattttgttttttcaatggttttagcttaggttctcaatcaacctatgcatgggaaaaaactgacatttggctcatataccaatataccatgttcataggcaggactctacttgttctatgcaatggacaatccagatgaaggacaaacagattgctgtaatttcggagaaattgaattcacatcttgttttatttagttcggtagaaaaggaagttgctgctgtgaaacaaatactaggtgatgtgcattgtctggttggtgagaaggaaaatttaggtatggctatgatcactcttgacactttgattctccagctatctgattactctatttcattttgattattatgtttcactgcttctctgattattatgtttccttaccgtcacttttattgttatttcagttgctgacttgaaggataaagtccaaaggatttct

SEQ ID NO: 37492 - DNA, 678 bp, Sorghum bicolor
  Intron number 1 from transcript Sb01g012976.1 (locus Sb01g 012976) derived from phytozome v7.0 (chr-ID chromosome_1; pos 12012032 to 12012709)
ctcgtgattggtaagaatctccgccagaattgaaccgtgtttcttatgcacagccctcatgcatacaacaaaggcgcttggccacagaattgaaaaaaacatgtttttagtctccctagattgtcttcagcatttacctaaagatcatgtagtctcactagcaccacagaggttacaagcttcacaagctgatcaatttgagcgcagttgggatgttgttctgccaattgggttgggtccgattggtgacagaagtccccgatcagtttgaagcagttctgcagatgattgaggaaaaccttgcaaacagtaatcttagcatcttttggtttattttgtgtaatcataatgtccaagtttccaacatcaatagaagaacttgatacctgacctgatttctacaggttccaccttactgaaatagggtttatctgaaagctgggttctttgatcaagtttaacatcttatactattttctcagttcttactgccatttcatatgtttggaggatactgatatcaattgcaaccatcagtgcatttagttaatattttttgagttctgatataatgttttttagattgaaacatgtcacattttgataagtattgtggctaaatcggtctttttttgtgtttcaggttgcctccactcgcttctttcattctgcagtccc

SEQ ID NO: 37493 - DNA, 629 bp, Sorghum bicolor
  Intron number 1 from transcript Sb01g048700.1 (locus Sb01g 048700) derived from phytozome v7.0 (chr-ID chromosome_1; pos 71649761 to 71650389)
ccgccatctccaagaaggcccgcctccggccccaggtccccccctcccctgcctctcttaaaccctaaccctaaaacccaagcattgccagtgttccttccttccttttgcccgcattcctgtttgatgtatatgtattgttcggattaactatgcgtgggttgcaccctgtgtttgggctcactggttcctgctttgtttctttcttctttcttgtaaattttgtaaactcctttttaaataaatgctgtaggggtgaaagcccctccagtttagttcaaaaaaaaaaactatgcgtgggttgaagcaaagcaattttttttatcgctgaaacagttgttgaattgtttggtttattattgtgatgggctttattattattagttaatgacaataccagtttattaaatttgtttttggcttcaccagttactgattctgaatgtagtaggcttctttataattgggaaaagtgcagagttcctgttgttattatcattaatatgtttcaattcatggcctaagaaattcatggtctactattgatgttgttggcttgggcttgctaacattgcaattaatatttccttcacccatctgattggagttctatgaatcaactgaaggga

SEQ ID NO: 37494 - DNA, 1039 bp, Sorghum bicolor
  Intron number 3 from transcript Sb02g023930.1 (locus Sb02g 023930) derived from phytozome v7.0 (chr-ID chromosome_2; pos 57871312 to 57872350 reverse strand)
aaggtttttggcacactagcggtatgttatcattcaaaagattttgttcagtcttattaatcataatttggacttttaagcatcagttgaattaccaggacagttgtgaactgcatttgttagttgttgattgttgtgctaaccagctaggcttgaatagtttgatgttgggattatagaggaataaaactatcatttaatgcaaaggcttgaatagtttgggattatagaggaacaaactatcatttaatgcaatgtcttatcattttttgattcattaaattattaggaactccattgaggaggttattttagttagaaatcttcttggaacttatgtggctatcccttcaatttggtctttgatgaatcactagcaaatagtatggctgtgtgttggaacaaaaaaaaaaaatcttcatatgcccctattccaataataaacatggtcgatggtccagtatttttcttttaccatgtacatgaaaaaaccactttaatcttagaggaaaaccatctatttatgaagaatcacatgacaagtccaacttacaaataaataattgattgcccgcacattgctatggtaaaatattaattgcaatagtttgaattcactgagtttttatttctgccattatagtttctattgctttcagcatatatctctacatatttgctagaaatcatagaatcttacttaacttaatatactagcaaacttgatcggtgttgcaacaggaatatatcaacttgtagctcaaataataaatatcctttaggcttactactaccaggatcaaaacatgcataacattaggcaggaataagaagtgactattattcatagcttatctcaaagaagccaaatacaaatgccccaacaatcatttgttaggaacttagcatagagatagagatggtatggtatagagagagagagagagagagatatctacttttaccataatctgtgctgtgatagctattttctgcccaatgtttcaggtgaaaggacctaagcgtattggagcactct

SEQ ID NO: 37495 - DNA, 1029 bp, Sorghum bicolor
  Intron number 1 from transcript Sb02g004980.1 (locus Sb02g 004980) derived from phytozome v7.0 (chr-ID chromosome_2; pos 5714441 to 5715469 reverse strand)
ggagagcccccgccgctggaatccaacgctctcaggtccgcccgcgttccttaccctaaccctcgctccatgccgctctttgtttccctttggtacagtttcgttgggtagatagatgtggagacagattgaagcagccagcaggtagggactagggggagcctatatatcctgcgtcaagcaatagtctctcgtgttggtttggtgtgcttttcggccatggattcgtgcccttatctcgctgcctaaaatgcttatgctcactgaaatcagaggtttcttgcctgttgtttgttgcgaactgctaaagcgtgtcagttgtattaaatactatgtttatgcggcctccgagctcggttaacgtgtcttgtgtaccagattactgttactgcattcgcacctctcctaagagatccttattggagttcagataaattactgccttgtagtacctttagtacaccatgtgattctcgtttcgtgatagcacagggatccaggaagagcttatcagatggaactattaaaatttgaaaaataaaaaatcttacctggaactaattgcatggttttctgagatttagcaaaggccaaaggtgtagttcagctgctcaatgtaccagtttggccctgagaagccaaaccgtccagataataatggaaacttattttcctttttaaatttaacttctgtttttttatgtctttggggtacctgattcaaagtactgtccccatcatgagattcaaaaaaaaaaacatggattccttaggctactgagaaatatatctatgctgatgtactagttgtgggtggtattgtcgtactttgctttgattgatgtttgatatgcatcctgttctggagtttaatgaaatggatatcccttatataccttggtctgtatcaaaaacattttgcatttttaacattttattctttatcatatttgtcccattaatccatcagcattgaatttgctgtgtttgacagggaagtcaccgttgcagaaagctcatccaagaaaa

SEQ ID NO: 37496 - DNA, 772 bp, Sorghum bicolor
  Intron number 1 from transcript Sb04g006530.2 (locus Sb04g 006530) derived from phytozome v7.0 (chr-ID chromosome_4; pos 6562695 to 6563466 reverse strand)
acgcctcctccgcctccgcgtccgcctcgcgcagggttagggtctgctctgctcccccatctcgtgcttgttttttcctgttggatttggtagagaaggcttgatctatggctctcggggcccgattcggcgtcgcctgatcgattcgtgcggttttctttgagcggggtgggggaaggggttgtggtggtgttgattcgtcggatacggggatttcgcgggctgggaattgtcaaggagacgggagctcgcaggttcgtgggttgatttggcctttcggttggtggtttctcttgttctcttggggtggggaaatgaaaacgcgtttttccttcttatttattttttattttttttgttaaaaagctgtataaaggttgtttgtcactttgtcatgatttgatttgtcggtccattttgcctgatttttcaaaagtttatagcgctgttaatagctagtgatttaagtgctctattatggtggaaatcgtgtgtatgtagttgtaagcggtggatttgttaaattatgcggcagatttggtgcacgctgttgtcgatttacatccttggggatttttttggtatgtttttgtagagattcgaatttgatatattactctgattcgtttcaaaagttggtttgagctgtatttgcgcagcatattttgcgatagtgacttatcttcctaaaaattaggatcttgtttcgcccaccacgattgatgtttcctaaggtggcattgattgtttaatgtgcagcttatagtcagtg

SEQ ID NO: 37497 - DNA, 948 bp, Sorghum bicolor
  Intron number 1 from transcript Sb01g027950.1 (locus Sb01g 027950) derived from phytozome v7.0 (chr-ID chromosome_1; pos 48650702 to 48651649 reverse strand)
gctttgcgggcgcgagcgagcctcgtcagcggcggttgaggccttgtttagttccgaaaagtgaaaacttttcggaactgtagcactttcgtttgtttatgacaaatattatccaatcatgcactaactaggatcaaaagattcgtctcgtgattttcagctaaactgtgtaattagtttttgttttcgtctatatttaatgtttcatgcatgtgccacaagattcgatgtcacagggaatcttgaaaactttttggttttcagggtgaactaaacaaggcctgagctagatatcatgtacagtactactatatgaaagcgaagctgaaccccgaaaaataagatccgatggatggatgcataataacgatggctgcaccgtacctactgtacacctgcaatttttatttatatatatacaccatcctaataatacgtactatagtattcctgctggccttgaggcgtcgaattgaagagaagaaaaaggcggcggcagcagcagggtcaaccacttccacccgtcctcgactcggatcgctttctttccagatagatgagcagaccccaccatcaccgggttcatggtcaactcgaacatcagctactcctactagcaataatcaaatcatcattaccggtgccctccatgaaaccaatccaatccatacattgcattgttgtgcctggcaggcggcggcgacttgccagtgccggccactgcccagtgttcatgcacgcaaagcaacctgtgcggcagccgcgggaaagagcagagagcgtagcggaaagcaacggcaacctcgcaaaaccgcgggacgatggatccaaaaaaccccgtggaaggtctcgctcggacatccggacaggagaggagtggacgcccacggcccacccaccctctggtcacgagggaggaggaggacggaggaggacgggtcctcctcg

SEQ ID NO: 37498 - DNA, 825 bp, Sorghum bicolor
  Intron number 1 from transcript Sb06g000960.1 (locus Sb06g 000960) derived from phytozome v7.0 (chr-ID chromosome_6; pos 1355026 to 1355850)
gaagaccggcaaggggctcggcaagaacgaacaaggtacagtatcttccttttgctgctatatatatgcttacttctcttatgatgattgcttgtcacttgctatagcaattgggaattcacgactaggagcttgtatgatcctttgttttttttttttaaaaaaaaaaagatggaagaattattaaattgtcatggtgctaggaatttattctttcatggacggagggaatggacggagggagtaacttattatgggctaggatggtttacagtcagtcagtttgcttatatgtctaacgttagttgtaaataaacttcttggccctcaatgatcttgtcagctcaccttactcatagtttaattgatacaaatactctatcaatagccattcactctcttttttttttcccaaagttcctttaccaggtaaagaatggatgcctgttgttgtctattttgattcagcaataaccttattacgccttacatttcccttataattcatggcacagtaatattttcatctgggcattttacacatttttttttaaaaatttggaccctctggaaagacataaatgctaatgtagcttttcctttaccaatgttctgcttcactttgcgttaacttaacaggtttaggtgcatagaaattccatttgagatatgtcattttctacacctggagcagagttgatcaccaaatattcacctcttattgttcagctaactaaatgtgatgatgcttctacaccttctgaggatacctttctttgttgtgatgcaggtatactagagccaataagagctgacatcagagat

SEQ ID NO: 37499 - DNA, 717 bp, Sorghum bicolor
  Intron number 1 from transcript Sb02g028310.1 (locus Sb02g 028310) derived from phytozome v7.0 (chr-ID chromosome_2; pos 63515136 to 63515852)
tgtcgccgtctgcatcctcctccggtcttcccaaggtgagtcccgacctaaacctaattcacaaattatgtagcagtaattagaagatctcgacttctcgagatcgattcggtaggagggttatatgttatagatgcgaattcggtaggaagggccacatgttatagatgcgaatttgctctatgcgcatgaccaggattgtctagatgcataatatctggtactattgtcacgttcttttgaactgatgacaaggttaggttgaactgatgcatatctgaaagacttgaactgtatattctagttcgtatcctgtatcagcaaatattatatcattttttttcatttgtgaacaatccaatttgggctgaaccttgtattcggatatgatctaatgacaagtgtttacatgtattataaacttcgactattttgaattttttttgggagtgcatgtgtacccccatgtcgtcttcccctgctatgctgaacttttatcttctgtttcatagtcactggttctgtaaagtcatttttaaggattgattcactatgatactcttcaaatttgtactcaattttttttacttttgtgtcagctctgcctctagtttaatgcagcctccactatttcttctgtttttatattaattattgctcattcttggtgtaatttttgcagagcttgattctcgtagaagctaaagcagcagccgg

SEQ ID NO: 37500 - DNA, 896 bp, Sorghum bicolor
  Intron number 1 from transcript Sb03g009940.1 (locus Sb03g 009940) derived from phytozome v7.0 (chr-ID chromosome_3; pos 10739878 to 10740773)
ggaacagttcagaatcaatcgccaggtggcctcaggtgatgggcgatgctcatggctcaatttttttttctcgcgttgatgtttcctgcttttgtcttcgtcatataggacagtatattatgatacttcgtctggctaggaagtactcgtttctcggtgctctattttctggtactaaacttgttcgtagtatgtttacttgctcgtggtatgtgaggcgtactccggtaccatgcttcctgtgaagctgaacatgttcttgctgacagaggggcgtttgattctgaggaagaaaataagttcaactctactgattcgtgaacttgatagctgcagcatgaccaatttctagttgtttatttacgggagtagaattgtactcatactcagccatcatgaacttttttattctgatgaatagcaggtcaaccttttcttttcacacccagcctcgcggatgaattccttaaagcacccaaggtctcgatagtcgatattacaaaactcctatgtcttttttatatgcgaagggaattttattctgaactatgcattaggcttgcacaaccctccattattccaatctttgctagtggcttcaataaaatgctatcaaacagcagagtgcgaaaactcttatatgtctaccgtttggtatctcataagataagagaagaaaatcagtagaaaggaaatcaagagtcatgaagaaagtaaatgcttgaaaacagtgttgggtgagctatgagaaattttttgatatattcttgttcggtctttttttttcagctgtattattttggttttcaatggtccattgacacttattgtatcttttggttttcaatggtccattgacagtggactactcaaaatctcctgaaagctgcccattg

SEQ ID NO: 37501 - DNA, 802 bp, Sorghum bicolor
  Intron number 1 from transcript Sb03g045220.1 (locus Sb03g 045220) derived from phytozome v7.0 (chr-ID chromosome_3; pos 72485568 to 72486369 reverse strand)
tctgctgtgcttccttgctgtttgctccgggagaggtgagaacagttactcccttcttttatgtctattggttccacaatgttctatcgcaattcgcgatgttcgtcgcttgcatttgggggtgcttgttgtctgtagattcgctatgagaatgggagtagtatctgtcaaaaaaaaaaaaatcatatgccaagaacagatgagatacttagttacttttgtgcctccgtctttcagaagtctcttaacgcactgggaaggcgtttagatttcaaaggttgattaaataaattagcggcaaattatcatgctactacttactatgcagacacatcttctgggcggagcttttacgcagctacattttactattataaaattttgccttgtccttgcatttcgattcttcaggttttcttttagcagggtataaaaatttgccttgtcccttgcatttcgattcttcaaggttgaaagacaacattggagccgtgtcttgtcggtatggttctgtagcctggtcatagtcagtttcactctaacaagcgacagttgcttacagatttcaatcattcaaagacgtcaacatatgcccatttaaataaagttttctgtgcagttatatttttcccgtcatttttccttgttatgcatacttttctttctgctactagttggtttgtctccgtgtatgcatcgtgttccatattactctatagtaatttatcaatgaaactctattgtaacgctttgcttttgtcaaatagaacttgcgatcaaacagaacccatcaactaccata

SEQ ID NO: 37502 - DNA, 973 bp, Sorghum bicolor
  Intron number 3 from transcript Sb03g043910.1 (locus Sb03g 043910) derived from phytozome v7.0 (chr-ID chromosome_3; pos 71163234 to 71164206)
attctgaaacaaacccagaaccagcaggtttgatgttatctccggcatgaattttagaaaccacattccgccattcatttttatgcagcaatctagttgttttgtgttgaaactcatggttcttattccatctcgcacatagtaatttatattatagttttgctctgttggactgccttgctcttcattctctagtagttgtgatgttttccctgcactttaaaggaggtagcatcataatgtaggtcatgtttcttacagtttagcttgctaagcataaaaatttaggtgatgtgtgttagtgcttcacaatgtagcgctatttttttttagcgtggctagttgttagctgcccatgtaacaacataatcttattgttgtggctggtatcgttcacatggtttgtttagcaagctagcagtaatatcagagatcactaatgtcttccaatgtactgaattgaaatcatggtttcaaaggtgactgggcatccaggtgagtgctatgtctgcttggacgcctaggcaacacgttgctagtgttccccaaggtgagctgggtatgcctgggcgcctaggccacacctttgaaacagggattgaaattgaaacactggttggcatactgacttgagagttgttccactggaaggttaatagcatgggcatgtgcacacatgtctatgtcgtgttagcagttttggataccaatgttatgttttttccctggtttcagttggtttaggctgccttgtatgttttaattattgtttacctgatcatttgcacacacgacaagcgtttatgttatataatcgtagccttagtgatgcatttccttttaaataagtgttaaatatcaccttgtaaatttttgttcttaattttgctaagtatgcctagcatgtaggaatggaatcttaagagactcacatacttgtctttctgggtggatgtttcattctttctagggg

SEQ ID NO: 37503 - DNA, 380 bp, Sorghum bicolor
  Intron number 2 from transcript Sb01g032360.1 (locus Sb01g 032360) derived from phytozome v7.0 (chr-ID chromosome_1; pos 55264735 to 55265114)
caagacgctgcaaggggagctcgtctacaatagaggtaaaccgtttgcgactcactccagtagatacacaatgcccatgactaatcataaccatcaagtccgagtttccagtgacatgattattgtaacaacatttaatctgtgcaaaacagaaatgtcctgtaaattgcaatgcgcttgaagttaataaaaacatgttaccacttgcaaatggcatttttacacattggtgtctgaattttgaacaatgatgttttgtttttcttcaaatttgttctgtttgtggtgtactggtgtgaaactgtgaatgctcacataactttgtaacatgtatgccacatgcagcaaagaaagcaaggtctgaagacaataccggcagt

SEQ ID NO: 37504 - DNA, 1002 bp, Sorghum bicolor
  Intron number 2 from transcript Sb01g002610.1 (locus Sb01g 002610) derived from phytozome v7.0 (chr-ID chromosome_1; pos 2129085 to 2130086)
ccaaggaattggaatactcagctgggccaacaattgtaagttatcagctccttctattttgctttagaaactctgattttggttgaaatgtcattcccattctaaagacattaagtcagtaacagagagtttactagttcttgcttaaatcattcctttccccttgttcaagtggaagattgctctagtgaaaatgcataattctttccatttgtagcatcattgaaaactagatgataaattatctggtaaggactaaggacttcaatgtgcaattgattagacccagtcaactgtatatactctgtttgggtactgaattatcgttgggatttcatattacataatgtgaggtgctcctttaaacacagcagttatttgtactagattgtgtaatcactacatatatgcatgcatcccgtttcttcacaagaatagacaagatcttatgtctctgatcattggccaaaccctggttgcaatgaaaagtaaaacaggctccagagtagataaggtgaacagacaatgcagcctttgatatattcacaatcgataaatccactctttcatcagtcatttgtgggcttgtggcacttcattatttgcttatatatacatagaacagccatggccaacttaatcaatacagttaagtctaggttcaaaactcccttcctgaaaaatcaatgaggttttaggacagcatgtttttctagtaagtagtctggttactggaacttgaacaatctcagggaaccttgcactgcagatgattctacatataaaaaaacacaaagcaattcgaagttgtgcaaacatttttacgatgactcttttgatttttatctacaatgtattgctttggtgttgaattttgcttatacatgattcaaaatgacaagatgagacatgctctcgcagataggctatgatttgtttctgacagaaaattggcatttgcttccaggaaatagcacaaaagatcggtgaggtgattgccaa

SEQ ID NO: 37505 - DNA, 750 bp, Sorghum bicolor
  Intron number 1 from transcript Sb03g033030.1 (locus Sb03g 033030) derived from phytozome v7.0 (chr-ID chromosome_3; pos 61445699 to 61446448)
agagccagcacgccgatccgcgcccggtcgacgaggtacgccgctgctcatcctcgtcttccctggcatgtgcttgcttatacgcggctgtgggcgtgggggattggattgcttctgttgtggattagcgagacttgtgtagtaagtaggtgattgatttgtcgtgctcatatggtttttggttgggatgtaatgccgctttcctctggtggagctattgagttcgatttctgcattccaagttctcattgaggcgacctgtttgttctgaatgttggggacgaattcgccgatgggatagtatcggaggatttgggaaacaccctactctttgccatggtgattctgcgggtgttgttgcacttattactgacaagagtttcacgtgagtgttcattttttcggtccctggtctagctcggtccaatgacttgttcaagtgagtcttcctttttgctgatctcattcatctcgctcttttgaatcacttgcctttacgtttctgtttttttctgtgctttttttgatgcgcgtatagacaatcattacccctttctctttttttctgcaactttgacttgatgacagaaaaagcaaaagctcaatttcagtccaccttttctttgctttccaataatacgcattgatccatccatcttattacaaatgattcaatgcaactaaaccaaccgacaaacgtggtgaccgttttcaggcgcatcctgctctcgtcctcatcagcgcttggga

SEQ ID NO: 37506 - DNA, 1018 bp, Sorghum bicolor
  Intron number 1 from transcript Sb03g004620.1 (locus Sb03g 004620) derived from phytozome v7.0 (chr-ID chromosome_3; pos 4940504 to 4941521)
ctccgggtacgtacaggtggccgtccaaaggacattcgcgtcgcgcgcgtagacgatagagcccacaaaaaatactaggcttgttgggctgggggcccacgctaatataagccttgtttagtttaaaaaaattgtaattttttttcagatttcttgttatctcgaatcttgtggcacatacatagagcattaaatatagataaaaaactaattgcatagtttgtctgtaatttttgagatgaattttttgagcgctgtgattagacaatatttgtcaaatacaaataaaattgctagtgtgtttatttttaataaaaaattagaactaaataatttagatgtagccggattcgcatcaatccatatgttttggggtggattggagtagaacttgaactaaattgtaccctaatccactccaacacatgtggattgaggtgccaacaacatccaaacaagacctaataaagttataaactagtagtacactaatgttattaattactcctagctaaaactgcccccaacttttaggtaattaattaataatagtataagcaaaagcaaagatttggcggggaatccacatccgcgagcgaccaccgagcacggacagctcaaatgctcaatcatatgcccctcccgcgttcgcgtaaagcattctagtagttcgccagcgtgacgcaagcatggcgtcatgtatgtatctccctgttctacggatcgtttctgcggcgaaaaatattgttccctagctgaaaaagtagcagccgtatattcatctgtgtcaaagtattgtaggaaccgcttattcctgcagccgaacacccaaaatttactatgcctggttttcagatagcaaggaagagactcttctgctgaaatgcgtcaaacaatccaatgacgctgtgtatagtattttttctacataatgaaaataaaaatccggattcaaactgctgctcttatatacatatatgcagaaatacttcgcggacaagagggaggagaagatagc

SEQ ID NO: 37507 - DNA, 928 bp, Sorghum bicolor
  Intron number 3 from transcript Sb01g048070.1 (locus Sb01g 048070) derived from phytozome v7.0 (chr-ID chromosome_1; pos 71142714 to 71143641 reverse strand)
aggttgattgctataatctcttccatcactcctgtcgttttgatagcatttcatagtactgctggcctgttagtctgtttattagttctatctgttatctctctggttccaagttcacaagttttcgaggtggaaacttgtaccccattcgtcttcaggtatgcttgttgtttagcacttgtgcttgcctgtctttgtttgattggattgaactatatttccagtcaaatctaatgggaaaggggtcatctggtttgaaattttgaacaactagttaggtgaaaaaaaatgtgtaattcaaacatggcgaccattgcgaacagtattttttttgtttggcttacaccactgtagtgcccagtctgctgtgtgtaggcaccaagtgcttgcttatatgagaatgctaataattcttttgtctttgtcctatgagttgactaataatctgttagtcctgcagcttggcaaaatagtatttagaattttagatagctctagagctgcacttctacacagggctaatatttcaatttgctgatccaatgtgtcaacagtagtaacaagaatgttgtgcactgttaagattctactaacataacaggatttgggatcaaagacagagaactgatgtgctttgtgaatgatgactttggttaaatgtgctaataaaacactctggatgccatgtcaactcttaccattccatgcaagctcccatagaaattgtgctcaattcaatccacataggagcaccagggggtttatctgatgccacactgaataatttaactttgctgcaaaattatattgtacttatggtggtatatggtaaatgcacattcctgttacctttattttcttcagctaatatgacatttaatattcattcttaggttgtgtctgtcattgaaaggcgtgcggaccaatt

SEQ ID NO: 37508 - DNA, 771 bp, Sorghum bicolor
  Intron number 2 from transcript Sb02g029030.1 (locus Sb02g 029030) derived from phytozome v7.0 (chr-ID chromosome_2; pos 64206647 to 64207417)
agaggccccacctcgaccgctacaagtgcctcaaggtagggaaggcatcgcccgtcgccttgaaccttgttgcccgaatcccttgttctgcgtgcttgctattcgttgatccattggtcgactgctacataacctttgctttaggttcaccggaagaatgtcacttgtgcactaatttgaatgccttggtccgattttggtttgaactggcagcacgttggcttgtgtaggatttaggtagaatcttgccccaatggcctgaaatgtaagcttagtttgtcaagtactggagtagtatacagactttcattttaggatgcctgcttagcaattgttaattaaaagagaccaagtcccttctgtttgtggaagttgatgttgtgccactgattctgtagctggggataataacttaaaaacaatactatacaagtgtagcaagtacccattacttgtaccagtttattaaatgaccattacttctggtcatgttggtaactgggtgaaattgaaatgtgccataccatacctaaacctgccagagttttcttttcctttttattttctggggagtgctatgaattgagtcttggatatgacttctagcaccaggcataagtagatatcctataaaaagatgggcacagctttctaattcattggtactgtatatttgagtcatctgcataacatttctgttggttgaagctaattttgctgataatgttttatgtagccaagctggcgcaggcccaagggtatcgactcccg

SEQ ID NO: 37509 - DNA, 848 bp, Sorghum bicolor
  Intron number 2 from transcript Sb01g042960.1 (locus Sb01g 042960) derived from phytozome v7.0 (chr-ID chromosome_1; pos 66222722 to 66223569 reverse strand)
aataacgcctgctgtcagtgcaagcaacactcaaggtatacttcccgcttactgcacttcgtgcttgtattatgcacacacaaaaaagtgtaaatggcttcatttgtgcttgtttgcattttggctcgcaaaatttcttgaagatgtcatgttgatcaatgtgatttgtatttgctcttgttagtgttgggaaatccttctcatgagtgggcattgaggagagtaaatggtcctagtataagtttgttcattcatcatgacaattagtgtatatatatatattttttgggagggtgggggtggaataaatgttacactgacattttgtataggactacttctaaaaaacaaacatatatcagtttggccaaagtaaactaggaactgtgaatgagaatgaactatatttagacgttcaaggttcaatacagctgtatatgataagatacaaaattgatatatgcttgaagatgttgctttgttatactgagaaaattgcatttctctgatgagttgccctacacttatgtttctgtttttcctttttttctaagtgttctctaaaactctggctgtagctgactccttaatttggaacatatggtgtactaacttgttctatcttttatgcttcctatttctccaaaagtggaggtgtaataactgaatcaaggaaccattgcaccatttaattatgcatatattgttgtctgtgtagactgttggcagattgttacctgaatgctgtgaagttaatgcatttctgtgccaaatctcagtttcttatgttgattctagccatatttgatttgccgttgatgacactagtttttattttagatccagac

SEQ ID NO: 37510 - DNA, 815 bp, Sorghum bicolor
  Intron number 1 from transcript Sb01g042960.1 (locus Sb01g 042960) derived from phytozome v7.0 (chr-ID chromosome_1; pos 66223589 to 66224403 reverse strand)
cgcgccgccccggcacgccacggaaggctgcgcaggtgatcggacccctccctcctctcttctctgcgtgaccgtgctgtgtttcctcaaatcgtcctgccgatcgcggttcccttcggtggggttttgttggggtgaagtgaaaattgaaatgcgatgtttttttgcttgagatgctcttgctctctgtttgccgtgcgagggttttgtgttcgcgcttgcttgtgcgggggccgggggacaatgaggaaatgttttattttataccttttaggacttaatcttgttgttgctcgtgatccctcgcctatagattgcgcaatgccgcctggctttgtaatgctgtcatgtcctgtgtgtagtagtagctgcaggtggggttttgatgccagtgcttcaccaaattcgtgctgtttttttttaatcttttattttggtagtttctgcggattatttttgttaccgtgaaatctactggtgcgaagtcatctgttccattaggtagacagcgtctgtgatgtgatcctgctctcatctctcacgtttatgttatgctttcgtacatgattgtcgtgcgggcttccagcagagcatctctgttttatccatcatttgatttttgtcatgctgataactgaagaaattaaattcacctcttgaattagatttgatcgtcttacacaaatgtttgctgttaatatttatgttgtctttttgtgtcttctatgatgctttggaatacacgtaccctatcctgtatttgaaacaactttacatctgcgttgctctgctcctcagggcacagtttgtgcaac

SEQ ID NO: 37511 - DNA, 899 bp, Sorghum bicolor
  Intron number 2 from transcript Sb01g017640.1 (locus Sb01g 017640) derived from phytozome v7.0 (chr-ID chromosome_1; pos 18192683 to 18193581 reverse strand)
tttgttgaattaaggtaaagtattgcagttcttgattagttgacatgaaactagttttgtttttgtgcatactgaatgctattctaatttgagtagatggctgattagtcatgactgtcaacatgcttttggtcgttttggtagagcaatgggtgtgtaaagatgggttcgtggcatgtgtacttcagatttgatactattagttttttttctttttcctgctgctctaaaacccctgatcatgttggatgatgtttgtgaaatgttgtgtttggttcctcctttatatgtgttactagtttgctccgtcatacactcatactgagtccatccaatttttgttgtgataaactaggaaggaagatgctatagacgttccaaaacacaatattggttcatgttatattgctgaaaggcattgctattggtaactgactgtgatcagttttttttttctaattcatagttggaaatttctatcttggattggattggaatagtttgattgtgtctctatgttcagaataattgattatcttatgcttaaaccaagatattctaaatactgttcctttgtggttgggctctttactcaacttccttatgaattatgatggtttgtttgcactgaagtttttgagaactttgcttgtacttgaaatgccagctgtacaacattctatacatatattctagttgcttgttttatgaaaaaaaattgcttactgccttactcttatagataaggctccccagtttattctttggaacaaaacattcatggaagaatgccttattcttgtgactgatctttcccttccacaggataagtcattgaaagaatgccttattcttgtgactgatctttcccttccacaggataagtcattgaaccgggc

SEQ ID NO: 37512 - DNA, 606 bp, Sorghum bicolor
  Intron number 1 from transcript Sb01g032400.1 (locus Sb01g 032400) derived from phytozome v7.0 (chr-ID chromosome_1; pos 55301856 to 55302461 reverse strand)
tggaaccaaggacgaggacgaactgcctccagcaggtacttcgactctgctactttttcattactactttgccatctgttccccccgactgaagaaagccatccatccttaccaaaaaaataaataaataatcaagaagccatcaggcgaccaactgaactgtacaaaaaaaagaaaagaaaaaagaactgtaccattataatagtgctgcaagtataagctgtagggtgacaaacaaaagtagtttaaaaatttatttcatgttcaacgtaatacaaggcaaaaacgactctttattgggaagaagatgaacaagaacaatgatcacccatggtatagtacaagctgcaggcatgcaacttcacttcacacatataagatagtgtcatgagaagttacatgggaatcaaaatgttcatgcaaaggaaattgatcttagaatcatttgtatttcagacatttcacttttcctccatcagttcaagttttccgaattacctgcaccacccctgcttgaagcataatatataactatacttttcgatattagttctaatacactgtgcttctgttgtccaggccatactctgccggttagcagcacgc

SEQ ID NO: 37513 - DNA, 1015 bp, Sorghum bicolor
  Intron number 1 from transcript Sb03g000330.1 (locus Sb03g 000330) derived from phytozome v7.0 (chr-ID chromosome_3; pos 195357 to 196371)
ggacctccctggtgagtccagtcgtccgtcctgatctagctgctcacagcatccaacaatccatgccggccggccgcatcatcatcctaattaacttccatatgtatactcaaaaaatcgatcgcaaatgtatcgatccgggtggccgtcagcagatggatcatatcattcgcctgtcttttcgttcccggttcgtcagtgaaattagctagctagccgatcgatgcatgtacactcgatatccttttattaatattggacgatctcttatggaaatttctcgccctcgctcatcaagctaagctagcaacggcaccggtggtggtcgttgagaacaaggccgacgggaagcaccggcagcagctagcgtctcttctctttgtcttgtccgctagatacaaactatgcaaggacaggctggtgatacggtgacagatgaggccgcccgccgtcgatgacttttgtttagtcgccaaatttatcagccattcagcagtgcatatatgatgatatatatgtttctttgataaacacagcatgcattatatatatatatatatatatatatatatatatatatatatatatatgtgtgtgtatatatatgtagctatcgctctctctatatctctatatatgtctaggtacatatacatacgcgcagagacagaaaaccaaatgctaagtgaaaaaagaagtcttcgccaataatttgttatttggacttggcaaaagaacgggacatcctagtattttggccaaaatcacaaaattgaggctccaacaagttggcaaaactagttggcaaattgtgatacacataatgccaagtgatggaggacttggcatatttgccaagtgaagggaaaattttgtcaagctcacaaaattgccaagtagttttgccaacttgttggaggctgttttttatagttttggcaaaaatcctagaatgccaagtacttttggcaaattgttggagttgctctaatataatataattgcagacaaggct

SEQ ID NO: 37514 - DNA, 764 bp, Sorghum bicolor
  Intron number 1 from transcript Sb03g012660.1 (locus Sb03g 012660) derived from phytozome v7.0 (chr-ID chromosome_3; pos 15158509 to 15159272 reverse strand)
cgctcgacgtgcaccggggctcgcctggctcgtcggtacacttctttagtactcgtcttccttttttcttgtagtagtaccgtaccgtattagtatgatatagcttcttgtgtggttgcataccacaagataagggcatactactatactgctctctaagatattcaagaacttatttactttttttgaaacggcagaacttattgtgggagggttttgggcacttgctgaccagctacttctccacaatattgtgggagggtatttgccttgggtaattgttgtccactgatccattcaaggtgaatcgtgaaagtttaatatgcaaatattgttaatacaactctaccaaaccatcttgtcaattacagattaacacttgtccatttgagtcttagagtattgttgtcaattatagattaacacttgtccatttgagtcttagagtattgttgtgagactgcgtgttgcctgataaaaaaaagaactgctgaatcaacactggcgatgatccatccttgttcttgtcaaaactgaaactgtaatcgcaatccaatctgaatatcactgtcatatctgctcgtccttgagctgatagttcaatctgagaatgtgatttcagtcattgaaaataacaatgtcattgagaatggaagaacaatctcttgttgtcaaaaagcttgcactgtttgctactgttgtaagatgtaaaaagaaatgatgacaggacctgatgtgtgtttccttgtctacagattgatttc

SEQ ID NO: 37515 - DNA, 666 bp, Sorghum bicolor
  Intron number 3 from transcript Sb02g043440.1 (locus Sb02g 043440) derived from phytozome v7.0 (chr-ID chromosome_2; pos 77267976 to 77268641)
aaggtattttgttaatttgttctaggaacatgtctaatcttctctgggtttggtgtattgatttaattttgtggtttctgaaacttcttttactatatttgagatattatgttggcatttagaaaattaatgtacaaccatatttatacctatatataaggtgattttgtatagttacacatcatttcattgaattgaggcaaagaatgggtgtgcagcgtaagtttttatctcatcagacataaaagaaatcttctttccgggtgaagctttgctaatggtttagggatgtcacatgattctcgtattgcatgtgatgattcatgacaccccattaataatattttgatcttggcagtcagtctctatgtttaaaggttgagagcaacacaaactgaacattctcttttcttgtaaacctgaaggtatgctgagatgttcttgtgcagctcatcttgtttagggaacatttgtaataccagtttaacatgggttattacataagttagcaaaaaaataatattctagaaagtcaaggttctactatcttgcggtaggagagctgtccttttggatgaagcctttttttttgtaataatctaatttctataattatattgtaaccaattattattcttgtaggtactcatccaagattcttggtcg

SEQ ID NO: 37516 - DNA, 606 bp, Sorghum bicolor
  Intron number 2 from transcript Sb02g041780.1 (locus Sb02g 041780) derived from phytozome v7.0 (chr-ID chromosome_2; pos 75544432 to 75545037 reverse strand)
ctcgctggactccacagattcgcaaggccgcacaggttgggttcgattctatgtactcgtccactgctctaagtgatcttcgctgtttataagaaaaattctgtttcagttttgtcatggcagtataacatagggcttagtttgattgtggtgactgtcgtaaaacaaagtgaagtggaattatgtagttgaagtatgcagtatgcatatctgtttggtgaataataaactagtaggagtactataagctaattgaagtgtagttgctccttggtggaaggtttcctcagtctatagtgtgtcgatgagcctttttggccccttttgtattcatatacagtattctcttcttatcagcctagtatcattaagctgcaaatcaccaatcgactgcctagactcttaaactgtgcgaaactggagtagttaaagttacccaatagactaccaaaactctttaaaatttgtgaaactggaatagttaaagttcatctgaagcctgctgaaagacttggtggctgggttttcatcaaagattattgtcgaattattgtgctactggccactaactaacattttgttccccatttccgttcagctcttcat

SEQ ID NO: 37517 - DNA, 528 bp, Sorghum bicolor
  Intron number 2 from transcript Sb02g003680.1 (locus Sb02g 003680) derived from phytozome v7.0 (chr-ID chromosome_2; pos 4118782 to 4119309 reverse strand)
aggtcagtatttttgccccatcttgatattatgtcttgtctgtcctagtaaaggtctgcatactggtgctcttctgccttctgagaagtgcagtagagtccttgttggattgctaggttgtctatgtttggcaatgcattatatatttaactgttgtgagcctttcctcaaaatttaagaactgatgactgtatagcattgtaactgacaacttgtagtaagccgcaaagactgatcgaacataaggttccatttgacattttcttatgctaatattttgtagttgtaatataatctgacttggttccctacaatgtcaatacctgtgccagattattggtagtacaattcacaaagtattaaccattctgccgaccactcaaagcatgctactgttcatgtcatatttgagcttcgttgcacttttagaatatataaaacaaaaacccaatcacctcttctaacatcaccatactactgtacttcatttcagagcttcctatcatctacccatcctcttgttggcca

SEQ ID NO: 37518 - DNA, 981 bp, Sorghum bicolor
  Intron number 2 from transcript Sb01g032310.1 (locus Sb01g 032310) derived from phytozome v7.0 (chr-ID chromosome_1; pos 55213400 to 55214380 reverse strand)
agactgggatattttgcatacacaaaggatcatctgtacgttaaatcttctgaatcctggatccaacatttgtaccgtacctgtgaacctacccttgctttacttttgagtcttgtgtaaattagcttttctttcctcaccatgcaatagtttcgtttgatgaattcaggggaatggtgatgctcattttctgaagcaccgttccccttttttattttcaaagggtaccatgcttactaaacgacgatttggtagaaattaatgactgatggggtcaagatgtgtgaaactgtgaagagcttgagttcttcggcagggtctgtgcttcagagtaaatctgctgatcaaccatacacccaaaagggaaaataaagtgattttttgaagatttgatttatactctataaaagaacataattttgtgttactgagaatgattccccaacaatattaataacttcaagtttttccttgatgttgatcttctacctccatgcctccattgtgccagtggatattgatttggtgctctgtccctatcatcttgttgtggtgatggggttcaggcaattagttgaaccccctcagtcacccccacccaccacggttggaagactccattgtgattaaccataacttctggttgaccttacatctctaaattattgttttccatggaatgtggatgctattcttaactgggctgcaaataataaagccacaaccgcttttccatgcactgctgaagtgccattctatgtttttcctttttgtcatcttcgtggaattaatatgagtgtattacagtgaaagtgaagtactgaacataggggtattgttactttgtttttcagtgctcatgtttagtatcttttgacaatttaatgaggcatgtctgattgcttcttctgtttctttccccagaatcttgcctcctggaggtgtagaggacattcagtttccttcagttcttggatagca

SEQ ID NO: 37519 - DNA, 790 bp, Sorghum bicolor
  Intron number 1 from transcript Sb01g007390.1 (locus Sb01g 007390) derived from phytozome v7.0 (chr-ID chromosome_1; pos 6330183 to 6330972)
aaaggctccatcctcaacgccgcctccctccaacggtacgagccgcccccaccataaaccctagcccttccctccccgtcctttcgattcgtctatgtacaagactggaaacttggactcagactcgcaataggcagagcttcacattcgcagtagtaccgctgcagcgtatttgatcaatttgtgtacttttcctatctgtttgtccatccctttgatctgattattcatgtcacatgccttacttctttgttcatcactcatggaattcatatgtattccaattttattgcaatattcgtagtagtagcactgcagcgtgtttgatcaatttgtgtgtacttctcctatctgtttgtccatccctttgatctgattaaacatgtcacatggcttagttttgtgttcatcacttatggaattcatatatgttccaattttgttacactatgcttgtcttggcatttcaacttccacatggtagggatcggaggtgatgcttgaactgcgaatcacccccctgtcacatcaatgataattgatcattaaccaactttcgtattgttacatccaatcaggaaaaatgtgcacagtaactttagagttgatttattaaatcattgctactttaaagcaagtgcactatgcctactagtagtgttggatctatccagtgtctactggtgttacatctgtggagtcttcagtgttaaataaatagatgaatattgctgttacagagagctaatgctaaattctgtaatgccaactctgttcttcagttttgaag

SEQ ID NO: 37520 - DNA, 782 bp, Sorghum bicolor
  Intron number 2 from transcript Sb01g038680.1 (locus Sb01g 038680) derived from phytozome v7.0 (chr-ID chromosome_1; pos 62183091 to 62183872 reverse strand)
gtcaggtttgtctctaccaacaatgatttggatggatacattatattttttctatctgtctcataagctgtaaacaaattcagggaacttattaccatgatttatttgctggcatgtgaaccatgtgtaaagagactgaggtcattgcacagaatatctaaattattatgagaaagccagctgtatgtagaataccattcatcagccttgtgagtctaagtaacttatgcaacacatttgtaaaccatgctgagcttctgctgtggttctaggtaatttgtttttttaacctaggtggcatgatggcaactataactccatgcataaaacagcatcttatatcagcattgcaaaaatccttcacgaaaaacacgaaggaaaacgacaaaacctttttttctctctaggcttttagctccaaatctcttttgtcttcactggaacagcgttttcaaaagttggggctatacataattaaaactttgttgttgtggaaattatgccacaaatgcttgcatgcatctttatgaccgtgtcctgaagcatttgtgttgcttgactagcattgtttcttgcagtacatattattttgaagtaagcttggcattgcctacttttctattttctttctacttagtaccatattggaaatgattttactggctaccagctccttgtactccatgctaaaacatcatggatatttttctcttcattgcaacctaataaactacttctgccacccaggtacgagtaggacaactgaaggagggcggtgaagt

SEQ ID NO: 37521 - DNA, 577 bp, Sorghum bicolor
  Intron number 2 from transcript Sb03g013770.1 (locus Sb03g 013770) derived from phytozome v7.0 (chr-ID chromosome_3; pos 18021677 to 18022253)
tcgtgcgggcgtctgggtctccgttcatcagccaggtatataccgccatttcgtctcgctcttcagttcctgtgatccattggtggcgaaagaacagctccttctttccatactcagccacgcaattggatgtggatctgagaacttttttttatatcattcctcttctgatgcattaagtcgacgatgaatttttgttacttgtacaacaattaagtttcttactttttgacaatctttcacgtgcctgtatttcatcaaaatttcaatgtttgatttatgagcggtgcacctcttgttggtatgctgaaaatgcgtacgtttatatatctaatcatcaagcatcgtgaactttgtacagtatgaaccatcttacttactgttttatattactacttaattgaaaatacacattgtatccaaatgatttgtaccatgagtataatttgtttcttcatagcatggggacgggtttgtcaaggcagattatactttttgtttcaataactgatagtattactgttgctcttactatattgcagttcagaagtactagatcttgcagatcctgatagca

SEQ ID NO: 37522 - DNA, 903 bp, Sorghum bicolor
  Intron number 3 from transcript Sb02g026250.1 (locus Sb02g 026250) derived from phytozome v7.0 (chr-ID chromosome_2; pos 61382248 to 61383150)
tgaagcacctggagtggccgggctttcagcacacggtatgccccttgaatttgacattattgagatgtttagagaattgccattgatgcattgctaaatataatgtgatttgctgcccatattaggttagtatcagcaaagacaagaaaagtgcatttttagcttgtctggatgtgttgaatttgcagcatatgttgtgcaggagcacgtgcgaaacaacctgaactaattggtaatgtattgtggcagagtggcgctgtaggttgttattgagattgaagtacactgtacacatttttataactattctgtaaaatccagggggcagccatctaaatgatacatgagatgtggataaatttgattgggaacctgaattaccttcaaccaacaagtgtcaatatgtgtttattttaataaggggctgaagttttccttgttttgattcctttctcgataaagtgttaaattatgtccatatcctgacatcattattctaattttcaccagacttatgtttaccgatgccagttttctcaatgaatcttgaatttattggcatgccatattcatatgcatcatagatgggcaatgtgcattctaactttatgagtataaatatgtctccagatgcatttttgatagcttcacattcaaatgttacttgtagaacttggtcgaatcctgtgtaattctttgactgtgtctaataggcacggctggattatagctccttcaaatgcagggccttagccaccttattgtgatcattttatgccttaattttaaatactttgaagcttctgcataaagagagagagagagagagagagagagagagagagagagagagagctttcctatgcttacctcttgatttaatcaaattgtcatcattggcag

SEQ ID NO: 37523 - DNA, 608 bp, Sorghum bicolor
  Intron number 1 from transcript Sb06g024570.1 (locus Sb06g 024570) derived from phytozome v7.0 (chr-ID chromosome_6; pos 53681401 to 53682008 reverse strand)
gacgaggtccgcgccgccgtcgccagcatcaaacggtaagattcaatctatttttgataatttttgataaagttatagctgttgatttcttatgttggtgataatctggttgtgtaattggaatatattgttttaagatttgagtttttttagcgtaagtaattacatgttgcttacttaaatctggtgtctgtgattagattgtgaagtttgtgaagttccccatgattttccgatattatttactgcatattgtcatgtgcaagttagcgtgcctcagatcactttgtttcgtgtatccttcaaatttgctcagagtgtacgccttgttagtgcatctccaatttatttattttttctgctaacagagcaaattttcttgcctttttactatgttgattgatatttgctctccgtctttgccgagatagagcttcttatcctgttagtggagttgtcacccttcagtattgtttagagcatatggccttcatatttatttgtttaactgattcagtaccgcggcgttattgatccatccatctaagcaaattgactttttcatgcatgcagggtgtttgaaaaggctcctgccgtggaccctgaag

SEQ ID NO: 37524 - DNA, 1040 bp, Sorghum bicolor
  Intron number 1 from transcript Sb06g029150.1 (locus Sb06g 029150) derived from phytozome v7.0 (chr-ID chromosome_6; pos 57829740 to 57830779 reverse strand)
ttcgctgacttcatcgtcgccgaggagaagcagctgtaagttcttaattgtgctataattccttttggttttctttttctgtttgatcgaggtgacgttaggtgtagatggggatctcaggagcataaataattgctgtttcttgaaacctgtaaatctcttggtactttgtcacatgaaaagaatcttttttttttatgaaatacatgaaaataatctgttgagttcatgatgcaaatatggtcctctgtttgatagtagtactattgtgttagcttgttagttgcgttgcaaaacgtaaacccgttaggattttcattgatgtgttcatgttaactggacgatgtacagataaacggataatgcatttcttggccatacatgctaataaccaaaaagaaaaaaaaatgcaggcaccatactctgttggcaagagataacagccattcagattagtgttgattttctgtattgctttttttttgttgatttattcctgtaagaaaggaagtgaatgtttattttcgaatgtagacacagtaggggtgcacccctcctgttttcctaaaaaaaaaatcgaatgtagaggaggcagccatgttagtgctgtttgacataaaatgcatgtgatttgtctattagctgaatttgtgtcgaattttctgccagccactttggtcaagcatttacgttcttgtggtttgtcaaaagtggatgctgctaatcttgtagtggatgtctgctattccatagttttgttgtctttcagttaaggatttccatcagctgaaccatatcacaggtaggctccttgttaatctacacattctcgtcaagaatatatcttctatcttaataatgcatatatgcataatgactgtgcttagcattaatagttcattctgaatttttgccacgacatctgtgtgatgtaaatgtatgtttggaatataataaattgatgtgttagttatgtaatgattattttgttcctttctaaatcgatgtcatgtttttctgaatcagatttttagtgcctg

SEQ ID NO: 37525 - DNA, 360 bp, Sorghum bicolor
  Intron number 1 from transcript Sb01g028980.1 (locus Sb01g 028980) derived from phytozome v7.0 (chr-ID chromosome_1; pos 50574969 to 50575328 reverse strand)
aggtcatgaaattttcttcccctttttttatcgatgttgctgtgattgctttggtgttctggtcgccttgtccgatctattgtttgatttgatttctttgtgaattttggccctgtttggttccccttgctttgtatcttgaatgtggctgtttgcgtctgcagttctactgatatgtttcgcattagtttttgcttttctgcttcgtggttttgggattttcttaattgattttggaagcacatgaatacatgattgtgcaacgtcttacaatttttgctgaccttttatgtttcaattaatttagaattttctgctgattctgcttccattgtgttcaaacgtttttggtgtatcagc

SEQ ID NO: 37526 - DNA, 874 bp, Sorghum bicolor
  Intron number 1 from transcript Sb03g028640.1 (locus Sb03g 028640) derived from phytozome v7.0 (chr-ID chromosome_3; pos 56603692 to 56604565)
ccgcatctcttcaacacagttaaggagcacggtatgtcgaaagtaattaaacacacgttcctttctttcttcttgcccacgctgtcctctccctctctcgctaaactcactcgcgttgcgcactcctctaccttacatacccacctcttaccccacccttgcattgcgcaaacccatctttccctaaacctaggttgcaagcgaccactctacagataggtctaggcattaggtattaccgaaccatggtttggtacttcagttcccacacaaattcggttcctcaaaaaataggcattggtcagtttattccaaaatttggtacacaataaaattggttttggtatttttggtttggtttcagtatttattgaaaactaccgaactgaacacagagactcgtaatagcaggtataaaagctaaatttgcaagaatttcaaagagaataatagtgcaaaatacatacacataaaagttcataagactataagagtagagtactacaaatacataatataatagtctttaataatacaatcaataatttaacaatattcaaactcagcatatttcgcgtagtttggccagtccaggcatgacttgattcggactgttttggacttgtatcaccccctctagatttgatttgtcaccatcttcacgtttaagtaaacaaattcacatagtcctttgtaatactcattccctaaatttgtccattccaataaactggaaaattacctaagttttaaagattttttttgagaatactaagttttaaagattgaattgaaagttttgtagacttaacggcacatatgcaaacgttgaactgcaggcaacatttctatcacctgggtcggaccaattcct

SEQ ID NO: 37527 - DNA, 751 bp, Sorghum bicolor
  Intron number 1 from transcript Sb01g048740.1 (locus Sb01g 048740) derived from phytozome v7.0 (chr-ID chromosome_1; pos 71707344 to 71708094)
tcgccgccatctccgccaagttcttcgccactctggtaccgtgccactagcctaccccttcctccgtctctaccgctcgccctccctatacgatccgagattcccttttggttcgggttcggcttcagagcttcaggctagtaaatgagtttggatgatgagttcggggtcatgaactagtttcctaaatccggaagtttcggtcggaggatttgaccgtaggtttgagcctctttatttatacttgaacacatatgggatcacaagtagagattacaattcaatcggtttttatgattcgctagagtactactactaacttcagtttgtatttatccaatgttcctatccctgctttatagtgcagaagatgaggtagaaccatttccttaagctaaaattggtgcaagcaacgtagatataatcatgtatccttacaaagaagaaaccgaaaaaaatggaatgactgcttcaaaagaaagggggattcctcctgtgggccaataatcagcacattatcaacttaatctcgagttcaaatctcaaacctctgttgctcaagtttatcttggacaagagatgaaaaatggcatctaccaggaaaacgggaaaacaagcatgcgctcctttaacaaggaaaactcaaaaataactcttataatgtgccgatgctttctgttcccagattcatgacactgacacaggttactctgtcacttactctgattgggtctaatgcagttgctgaaat

SEQ ID NO: 37528 - DNA, 825 bp, Sorghum bicolor
  Intron number 2 from transcript Sb02g003660.1 (locus Sb02g 003660) derived from phytozome v7.0 (chr-ID chromosome_2; pos 4098355 to 4099179 reverse strand)
gaaggtctggttggccatctcctctagcgattattagttcagtgggctcatgtcattatgcgtctgtcagctagttagttgatgttgtcagctagttagttgatgttctgtgacttgtggtgtgtagatactcagaccagctgcctagataggccgcattttgctgtctcctatttgctatgatattttatcagcctgctgttcatctgcggtgtcgctgctgattattttttaatcttttgcgcaaatggcgccattgtaagtgctgtggccagagttattgctgtataacacacatcatgattgtttatttgcttgttatatgatttggtattgctatcctgtatggagctataatttcttatgtagtctgttcattttgttatgcattcatttatagcttagactagatattgtatatttgggtgtttctagattattgttatactattcccgaggtgttaagttgggttaaagctggatagagtgtgtgggcccacacatttgatgtctttatgttgatggaagttcttttaattgtcatacagtaattgtaggattgaccatagttgtgttttcatatgcaaaaccacattgacatgagaagttctctaagtgtggtgggtgcattttttgttactatttgcagtaggttagagatgcaaaacgattttgagcctttatgcaccatagacatggactcttttgttgttttctttgctgcttttgttatgtgacctagcatttgagtttatcagctatttatgatttcttcttgtcatcgtgctagttgtgcctgctgagccagctgctactgtggaaaac

SEQ ID NO: 37529 - DNA, 738 bp, Sorghum bicolor
  Intron number 2 from transcript Sb06g026510.1 (locus Sb06g 026510) derived from phytozome v7.0 (chr-ID chromosome_6; pos 55570095 to 55570832 reverse strand)
cttcatctctaaccacctttctgcgcacatcgtccgtacgtgcccccaccttctccgtatgattccattccaacaaattttactctttttgggcttcgtgaaatgctgctcgatagcttttagagtggttgtttgattcgattatacagtattagcgttgaattcttttgggtcggttagattgatgcctttattcctgtttttttaagagctgcatgtgcaatctcattgataaactgtatgcttcttttaagaatcgtgatttttttagagaaaaaaagaagaatctggaagttggtgtgaaatagtggaatgactatttcgtccgcgggccacgttagtgacatgctttgcccatctaattgggggaatgaaatgggctttaagtttttttcccctttttgggataccattgactgccaacagagggagtttgtacatcgtggctacgctacttgcagtattgattcggtcgcagtataggaagtgttgtcgttcatcgccttgttcgtttgggaagtataggcagtattgataggctacttgcagtatgtcttcagttccatgcttgtgtcatgtctgtgaaaataattgtttatcgctgagatcaccacgtcacacataagctcacttacaattgttattacgattagggacaatcaacttgttctgtttttggcagaaaaaaatgttctgatgctaacatgtagtataaactcgcaggtcttgcacaggaac

SEQ ID NO: 37530 - DNA, 872 bp, Sorghum bicolor
  Intron number 1 from transcript Sb0014s003010.1 (locus Sb0 014s003010) derived from phytozome v7.0 (chr-ID super_14; pos 281743 to 282614 reverse strand)
aggtacggatcggccctagatctttgcttctgcttctcgtagcgccgtgcctagcggatctgtagagtctgtcccggcagctcgatcgatggggagccggatttttggttgatcggagcttaggtggtgaactttgggttgttggaagttagggttttgagcggattcggcgggagagtcggttcgataggtctatgatgatggttgctggaggtcgatttggattgttcgaagttaaattttgagtggattcggcgtgagggaaggttggatcgagctgatggtattgtagcgggctaggttcgtgatatttggtgctttgctttgggtaaattatggtggcttgaaataagtggtttgaggctctgggtgaacaagctgttttggtgttggttcttcgatgtcttgcaataagattttttattgttttttttttcaattggtctggcgaagttcagttccttttgcatgacaattagttgttttttttgcattgatctgataaagtgctagatcttctaattttgcatggttgacttgtctgcttattatacaatccagtttcgaagatctggttagaaagtggttgccttaaaaaatatcataggatttgtaatgttgggttgatagtatcatgtggctatctgatgttattgaatttcttcagtgtggtacaggaaaataaaaagtttgttaaagcaggatcttttgatgaactcattttaatcttcaaatgaactgaattgtaaaagttttgataacaaagtagcatagcagtgttcttttaggcggtccatgttacagtttttaacttctatcctcgtcttttttgtgcagctcgaaggagaagcccactcttgggtaagactctt

SEQ ID NO: 37531 - DNA, 523 bp, Sorghum bicolor
  Intron number 1 from transcript Sb01g011780.1 (locus Sb01g 011780) derived from phytozome v7.0 (chr-ID chromosome_1; pos 10661658 to 10662180)
cgtcagcgtcagcgacgtgctctggccttccgccggtgagtcccagacttcgatttttttttttttttttggccatgggccatagtttattctctttgatccgatctgctgactgggttagtcacaaactattccttgcacatttatttcagaaaaaacaagtagttcttgcgtagtattggcaaagcagcgaagagttttgggctttaagaacaagtttattattacggggcagctaagctaggtcgtctattgcattagtagtcgccatgtacttcttctcgctaggaggggatgagcctattgtaaaatcctaacccccttagtgcgcccgatttgagccacgtcgttgtaaaaactttattttctcgatcaggcacatatagacccgtgtttgatcttaatacaataatgtacaaaccttttgcgagaaaaaaaagaacaagtttaaagagaaaggactcccgtttgatctgttgccctctgcaattaatgttgataccatgcaggagcgttcttggcc

SEQ ID NO: 37532 - DNA, 837 bp, Sorghum bicolor
  Intron number 2 from transcript Sb04g008130.1 (locus Sb04g 008130) derived from phytozome v7.0 (chr-ID chromosome_4; pos 8934123 to 8934959 reverse strand)
ccaagaagttcgagcccaagtacaggctcatcagggtatgcgtctcttgctccttccccttttctcactctgtcattggcgctggattcttattaggtcttcgtgttgaataaactacctggtaccctcggttgaaagctcaaatcataccatgcattagtccatgtaggagaggcaattagctcgcgtataggatattgtggcaattgctgtatatttatgctggctggcctcttcagattaggtcgcatttgttgtgaacatagatctcgttatcaaacgatgtatctgttactattcgaccctttaccatgtcttgtattttccttagtgatggcgttgttgctacatggtttgttggcccccattgcactatgtttgttgaaagtacactgtattttgcaaaccatgacattgttcagccaataagaggagctaaaaattggattaagataactttttggtgtgcttttttctttgtggtggaatatgtattactacatgtttaggtcatatccattgccaactcgcaattatgttgtggccttttattttaaatgtgaaccatagggtactacagaaagataatatgtcattgtgtatgctatttttatgaattgtccttgaccgttttgtgtatgaaacctagcataaataacagttaatgattagcatctccgtgtgtatgctcccttagcataaaaaatatcttacagaatgttacattgcaatgcagattctgtgattgaaacaacactgtctgtctgcatttttttttgactgtctgtttgggtttctgcagaacggtcttgctaccaaggtggagaagtcgcgcaa

SEQ ID NO: 37533 - DNA, 596 bp, Sorghum bicolor
  Intron number 3 from transcript Sb01g028795.1 (locus Sb01g 028795) derived from phytozome v7.0 (chr-ID chromosome_1; pos 50255220 to 50255815)
ggcaacagaaaaaggaagtatgcagctcccttgcaatcattcaacaatttgttttatgaagctatttgtccatgcactgttttctttccttgctattttgtctgtgctatgaaattattggtgaactattatttttgaaggacacgatacaattcagtttgatttatggccactcttccaatatagattatggagatccttgtctccattacaggaaagatggttgaggctctcaacatgctttttttagggaagctatatcctcttcctcttcctcttcctcttccactgcagttactgttcttcattgaagacagctgagaaacagttttagttttacttctctgatctttggcccattgtttgagtaaatttatctcaatttttttctaaaatgatattgagtcaagcaatatattttttatttagctttgttaaagactagtcaactgaaatgtggacttcatgtaactgcgagtgactctgcatatttccttttgcttcccacaaagcttagtcgggctcggggaagtgtgatatgattgttccataaaactatcatttgactgatgatatgtgtacatcatcatcgcagg

SEQ ID NO: 37534 - DNA, 865 bp, Sorghum bicolor
  Intron number 3 from transcript Sb06g016660.1 (locus Sb06g 016660) derived from phytozome v7.0 (chr-ID chromosome_6; pos 45733236 to 45734100 reverse strand)
ccctgacctcgctgatttcatcactgccttcctaggtatgtggattgcttttattgttatggatggcatatgattttcctatgggtgtgtgcaaagtagtgaagtgaaatttgaattgttttctttcatagagatttgatagtctagtgagtagtgacatgggtgggtagaggctgttgaacatattatcaccatggattggtagtgggagaatttatctgttgaattgggctgcaatgagaatgagatatcctctgtgaatatgatgatggagaagttctcaggggaacttcatggctgttctatgatactctgatttattctgtcaaatttattgtttcaaggtgtcagctggccatagtgtcttgtctttcagtaataagatggtatttttcatgccaacaaatgaggtgcttatattgttatgctatatggatatgatatcaaaccacaacatatgctggcgcagaatgcaccttttgacatagcatgtagtgaaccaatagcccattgctatctgttgcttgagagcaagttatgactgtcatctctacatctcctgttcatagattgtaagattgtaagtgtgactcttaatctagggaccaaggcagaagttattgaaaacaaaattgagacattgaacaatttgatcatattcttcctctggtgttctctgtaaagaaagtatggtttccaggatgttattatggcgaatggttttgtttttttagcttgattgtttggaaactgatcaggcttgttattaataatgtgagcttaactatttaaggacttaaggtgaatatcttatctttgatgtaatgcagagagctacagacagaggatattcaagctgttgact

SEQ ID NO: 37535 - DNA, 523 bp, Sorghum bicolor
  Intron number 2 from transcript Sb02g037330.1 (locus Sb02g 037330) derived from phytozome v7.0 (chr-ID chromosome_2; pos 71654471 to 71654993)
ggtttggggcaaacaggtgtctgccatactctgataaacccgtgtttgagtgtttctgtttcataatctgtctccagatttgcaagcaactccagttcttaatagcaaatgttccttacttccttagctgttggtacacttttcgttggtggactgctaagatatgcagaaatgcatttttaagaaaaaaaaagctatgcagaaatgtagaataggccaggggaaagcagcccattaacttagtaggtacttgagatcttatattcatttgataattcagctttaagagaagatttgtttacgtgttacatcgaaaattttctgattattttgcttcaaagttactctgtacccgtacgagactaaagtaactctagccctttactaaccacacatatgtctctctgcaagttatcagctacctttgcgttgcagtaatccatctttaagagaagatatgttcacccatatattccttttcttttcagtgaccattggcggaaaaatattcctgttctagccg

SEQ ID NO: 37536 - DNA, 934 bp, Sorghum bicolor
  Intron number 1 from transcript Sb05g021690.1 (locus Sb05g 021690) derived from phytozome v7.0 (chr-ID chromosome_5; pos 52989193 to 52990126 reverse strand)
ccgtgcgcggccgccgcctctccatcgcatcgcacgtatgtttccttgtttctctgtcttttttttttcctctgaaatatgcagaaaaccatttcgcgtgagattttttgagagcttttttctcggcaaccatcaatcttgtgcagattggtgtagtgtagtacatatgcataagcatttcggctactactagccactagggggaaggctgttgcgacgtagggattgttttgggcaattaatttcttgaaatagaaaacttggaggaaactgaaagtcgttaacttgcctatgaagtttgagttcccaggtttcttgtgtgtgaagttcatccactaggtcgctcaaatttgtaggaaatcacagagattttcctatgttgcatccaattggctcacctgaagaaaccctgtgattcatggaattgggaacaaaaaaaggattaatgataggagtacattgcaattgggatggaaaatactactagataaacccatgaggccatgagttgtcctagttgagttacttaaattcataagaaatgggtataggattatggagagacaggtactctaagtcaaatttcattcatgtatcctcaaaaaaaagtgtcaaatttcattaggttgtgcattatgctgagtgtccttagaattcatattcatgctgactgaactgtttaagtctcggaaactaaaagcaaataaagtaccctctgcacattgacagatgaagttagatatatcaacatttaacatgtcttgcaaataatgacatttaaaaattatttcctatcaggctgtcaacttagatcttgattgcgggacccaaatcattattggccaactggagcagaagatccagaaaataagcttatgagtacagatctcatccatgggttcaatgagtcaaaaaattaaaattttcacagaag

SEQ ID NO: 37537 - DNA, 851 bp, Sorghum bicolor
  Intron number 2 from transcript Sb04g036660.1 (locus Sb04g 036660) derived from phytozome v7.0 (chr-ID chromosome_4; pos 66481708 to 66482558 reverse strand)
gggtaagccatgctttatccagattcattcatgaccttgagcttcttccagtgatatatatgtctcgtactcagaaagtttacatgcattttgtgttagtaccatactgaagtatagagctgttattcaggaggctgttaaaaccatcgagatttttttcacgcaaaatgaagattaggaatccctattggatgttcttttatgttttgacttgctcaacctgttccataagtcaacacaaggtttgatgggcaaaacctagttatagctattactgctttaaccaaacacacctacatggctacacactttgtgaaactaacttacctataccttatgacctctccaacaggcaactatatgcatttcaacctctggtacctttcctcagtctcattgctaacatgttctccttgtgctcaatttcttgttcattaatttctccttctggttttgcttaatgtagcaagttcacctacatggctgcactctccttataaaacaggcttaatttttttttttctgaatgcaatggcaggagctctgcctttcaattaagaaacagaattgacccataaaacaggcttacccatatcctatgacctttccaagaggttactccatgtgttctaatacagtcctctgtacatttcttcttgttcttctcattgatgatttttcaatatggtgtgtccctattatggccttcactgctaatatgttttctttttttatgccgagaatcgttgctatgtcatgtaattccttagattcattttgccatggtattgtctttatttttgtatgtgcaaacagggagtccacccaacaatcaaaggagaggtttggga

SEQ ID NO: 37538 - DNA, 711 bp, Sorghum bicolor
  Intron number 1 from transcript Sb01g031220.1 (locus Sb01g 031220) derived from phytozome v7.0 (chr-ID chromosome_1; pos 53798234 to 53798944)
gcatcgcctccggccgctcgtcagtctccgatccggtgagagctccatttcccgccccattccccaccgcgattggaggtccgggcacccgcattgggtgtttaatgacgctatgctaacattcgggttcattttgttgggattcgctaggtcgtctcttgcggcagcgtttgttcgttccgtttgcttgcttggttgtgggtgcctacccttacaaaggctaaagcgttgcacggcctgttgccccctcgggtggcaagcgctttattttgctttagccgatttggcattcggctccttgcgctttaaagtcgacatcttgtttgtttttgctcaagtatttatttctccagttggtctaatagatgtggttttggctgtaatgcgttagcaatgtgagcttcataggaccatgtagaaaatggatagtagcctattcactgagactttactagtaaaggataatagcaggttctagtgagtccattggttcaaaaacatttgcccatttgggaaggatttaaccagtggattaatcaggaaatggctcccgttcacaaaaaaagaaggacatgggaaatgggggttgttacattgaagaaactctgccttttcttcttctataaatgctaatgaattacaaaacaaatacccatgtcttgttgtctattgttagggtggtgactctggctccaaaaggccaaaatttga

SEQ ID NO: 37539 - DNA, 613 bp, Sorghum bicolor
  Intron number 2 from transcript Sb01g002420.1 (locus Sb01g 002420) derived from phytozome v7.0 (chr-ID chromosome_1; pos 1977264 to 1977876 reverse strand)
gacttcgtcggaggtaatttgagagttgtcacaacgagtgacctgagataattaacgatggggccatagtaagactttatattctcatttatatagagaaaaaattcgagtgtttgcaaagtgtagtaaaaaattcctatggtttcattgtccagtaagatcaattaggattcatatgttcatgctctggaaactatttaggatcattgagagttatttcggccttgctgctttattgtgaaaactgacaaggagtgatggcagctagaagcagatggattttagcaattatagcttcgtttgataagctttgtggaaagtgcaagcgagcaatttaacagttagaattgccaaggcaagccctcatgctcatttgatggtggttattccataggcaggaatacaaaagtatgtttcatggcatatagaaatacaaaactgtttgtaatatgttctcttcatcattattgaacttgagttaaaaggatacactatctaatctcctttgtgcttacctcattttttttgtgcttttttaattgatctgtttaaagcatttgttgagacaaactaaatatgaaataactgcttgtgtcattcaatttcccaggtt

SEQ ID NO: 37540 - DNA, 284 bp, Sorghum bicolor
  Intron number 1 from transcript Sb07g005510.1 (locus Sb07g 005510) derived from phytozome v7.0 (chr-ID chromosome_7; pos 7675227 to 7675510 reverse strand)
gtggctccgaagaggactccgagtctgaagaggaggtatgcggtggtgattgttcttgtttttcttgtacgtatgtggcgggtacgggattttttatttttagaatttttaatgatttgattgaggtggggagggtagacagaaatagctgcatgcagaatctcagtctgagtatggcttgtaaaggtgacaattttttatcaatcgaagtttcttcttctgtaacatagttaacttatgtctctacaggttaaggtaccaaagaaggcgcctgctgctaagat

SEQ ID NO: 37541 - DNA, 952 bp, Sorghum bicolor
  Intron number 1 from transcript Sb02g035200.2 (locus Sb02g 035200) derived from phytozome v7.0 (chr-ID chromosome_2; pos 69664804 to 69665755)
gcggctgtgctgtcaacacccacctcttctccgtaaatatctcgccatgccttcatatacttctttttccttttttggctagaagtacgttcatgctgtgctaactgctgacagagtgagtagctatcatggaagatgttcagttttgtcatctaataccgagctacccattagggggcctgcaatttttggacagtagctgtaaatatggatgacgccacaagtgtaactggataattgaacatgaaatgctaatttagagaaataaaactgaggaagagctagatcttcgaggacaaatcattgactgctagctttacggatggaatttaacgccctgctctgtactgatatgtgcacaagtttgatctattttcaggttgattatagtacaactactatcaattactgtgctatgctacaggttctcaatttgaagataatttatttgtaatacagaaattttatattttggacgctttctttgagtgaagataaattcacaatctccaagcgtatgcatatggatcatgtactggggtagatggtagaggcagaagttttgtgcaaaatttattttattggtttttgtctgggtcttgtacgcacgttaataattgtttgtgcagaggcaactatatgtatcaggcagttgggttgttgggatactagttatcaacgtatatgttagttttttttgtctgtttgtgttgatcatattgttggagaaaagcagatgtttgtcatattcagaaaatcccgacttggtgctagttatccacgtttctacctgcgttggcttgaaaaatgttagctgcacatcactttttagtaataggctgcatcttttgtaagtaacagcttttgataatgatctgtagattaacgacatggatcgaattcttgaggtaataaagcaagcagcaaaggaaggggcactggttctatatac

SEQ ID NO: 37542 - DNA, 653 bp, Sorghum bicolor
  Intron number 3 from transcript Sb02g004340.1 (locus Sb02g 004340) derived from phytozome v7.0 (chr-ID chromosome_2; pos 4902955 to 4903607)
tttgacgacaacagaccacattgtcagatcaagaggttcgtttatctcttttctctgttgtagttaccttccacgctacgtttatcatgatttcttaagtgacgatcaaacagtataattcaaagtttgaaccttctttctactgctagttgcctatggcttgtataattcctaagttcgttaggaggttatggcctatggctagttgccatgctttaaggtgctatatagttgctcctactgctagttccctttgaagatgaaccattcaaatgctatcctttttgtgaagactgttgcagttctttctattcaaacaaatgccaaccctatacgacaatacaagcacacaggggtgtgcatgcccacatgcacattgccagtacaaactgaaaacagcaaggaagcaagcgccactttattggatcagtgattgcatttccagaattttgaattttgttctgaacttactgtttcaatctaacctactgaacttatctctctttgcatccgttcctgaatcctgatagatttgaactgaatatcattaacctgatactgctatatgcatgttttttttgtttgctggtgatttacttttaagcttttattttacaggaatactgcttctgggggaaatattgtctcgaatt

SEQ ID NO: 37543 - DNA, 857 bp, Sorghum bicolor
  Intron number 1 from transcript Sb04g037570.1 (locus Sb04g 037570) derived from phytozome v7.0 (chr-ID chromosome_4; pos 67159347 to 67160203 reverse strand)
cgccgcgccgcgccctcctccaaggtatcgcctcgcttcactgactcggctttgctattcttcaaagcttggttgatgactagcagcttgtggattggttttagcaaccggtgcaacagatttctggtccctgttgctttcccgaactaatcgagtagatgccgtgctgcggttcactaattgggtgctttgattgaagcttcctttgtacttcagtttagttccaaattcttgtggccttacagtccaaactagtgctgagctagtgagctgatgaactgatgatactaggaaatttaacattgtttgattctttgcattatttatcaaattgatttcagttctcgacaggcccttcgtaggacttgctgaacatatgaccaatatatttgttatttactatttagagtgttatatcaaatatcggcattgtttcattggttgaggctgtttgatatttattgctatgtagtacgtacatgttaatttcctgaaagttctgttgcctgctgcttttttgttcccttgctgatatgtatagttgtgagattatgttattagctttagtttgtactctgctgtcaacagtgaccgttacagacaaaactgctacctcttaatgtcgatcaatgtctttttagtcctactgaaaaacaaaactgcactagaatagttatggaagaagtgaaaaacacatcaagggcctgatttacaaccacccacttttgcactgctagctgtgcgtcttcagatttcttcaacttagtgtttgagagatcaaagggttgtgattaagaaaacctgacatagtttataaaattgttcagctgcaagggatccttctaacttgcttgccc

SEQ ID NO: 37544 - DNA, 634 bp, Sorghum bicolor
  Intron number 1 from transcript Sb07g002140.1 (locus Sb07g 002140) derived from phytozome v7.0 (chr-ID chromosome_7; pos 2302353 to 2302986 reverse strand)
cgtagtcgtcctcggcggcgtgcacgtcattggaggtgagctttccttccccatttgcctctgtgccttctcctggcgtgaattattggatcttaggtggggtttaggtgggtcgccggaattgtgttgtcacgagaaccgtgtgcttggagcgtggtgggattaacaatgatttgggcgagaaagttctcatttttagatacgattttggtatgtgtttggtgttcgttgttggggaggtgaggaaaaagtcggtttctttttttttttttttttgtgggggcgttgcggtagatctgatgtggtcttaccactcccgggaaaattgcaatttatctcgctggattctgtccgtttgttaatgatttcattggaaacgcaccagtggcacctgggtttccgggttggaacgttagcaagtgaatactgcattatgctagtgatggcgtttgcttttgactgatttttactagaacaggaaaagctcacgccatcacatgaagaatgtgtgtgttggtgtttctgaattcaagcatgctaaatccgcttggtttgtttcttctccacacgaggtgctgatgttcttgtctctgatgcagcgtcgttccggccggtgctcaggacggcgtggccg

SEQ ID NO: 37545 - DNA, 962 bp, Sorghum bicolor
  Intron number 3 from transcript Sb04g035750.1 (locus Sb04g 035750) derived from phytozome v7.0 (chr-ID chromosome_4; pos 65636843 to 65637804 reverse strand)
cagttaaaattgcagacgataacgatcttatactggtacgcctctttttctctgaaaacatacatttcagcataattttttttttcgcgatcgtgccttagcatgtttttcattaagaaaaagagagtttattacaacacaaagttgccacggtaatccgaagttactgaagccacatagcccaatcaaaacaagaagttgtgattacatggatacaaactgagcgactaaggggtcggccgttcaagagaacgctatgagcacccgcaacttccgaaagccagcaaggcaccaattgtcaacctcctcctggatcttccagtccatttgtgccggcggagttgcaacaccattgaaggtccttgcgttccgcaacttccatatcaaccatccaacgaggaagaagagcgaatcaaaacccctgcagatcggcttcggtattctcttcctgcatagcagccaccacaacaatgtagccccactaaatttcagcataatgctgtacactgtacagagagtaactgaggactgttcactaccaaatttgaataatagtccacctgggcttccaagttctgaaataggagaggactgttcactaccaatttgaataatagagtagtccacctgtgcttccaagttctgaaataggagaacaaatactttggtaatgcaatgattattgtagcagtcgtgagttgtcatgcaatggctaaaaactctggccctaaccactagttacttgctactggagcaacaaattgaacacgatagtttttattccctgctcggtgcaatatctgcagacgcatgaacagctttgcaaactaccttgataaacaggacatatgcctaccttaaaccagatattcatcagatgacacttgttattagtgcagtagtaatgtacaccaattaggattgctgatattttttctaatttcaggcaatattatcattag

SEQ ID NO: 37546 - DNA, 1022 bp, Sorghum bicolor
  Intron number 2 from transcript Sb04g009170.1 (locus Sb04g 009170) derived from phytozome v7.0 (chr-ID chromosome_4; pos 11189559 to 11190580)
atcaagcgtctggtttctatttgacgtaagtatgtcttaccacttccagtattgaaacatattgaatcaactggcactctggtccaaccacaatagccaatgcggtgctattgatatattcagaaatatagtttcattatcatagatacattcattctagtaccatcatctcctgctattgatattaatgtggaattcatcagaaaaacaagaaatggataaatatgtcacctcctgttttgtgtgaacaatgatttctcaaatcaaggtttcaggaaaacaaaacttgctttactctgtgggatttccccttttttagacaacagaagaaagttctagccttcatggaagtggcattagtccacaattattgcaagatatagctagcactaccaaatccacaaccacgtgtgtagaaaaaaaacatcagatatgagttcgacatcattactcaattctagagataaaaaggcatccatgatccatgagaggcaaaaaaaaattgcataactggtgagtggtgacaccagagtacagcaagtgtgaatcaactgctcctgttcgtcacattgcttgctacaactttgcccccagtatgtgagtagaaaaaaagtttttgaactcactaccttgtgccttaaaaaggttttgaaatccagtttcttggttcccaacttttatctaggactgacattgtcctacaaatttgggtgagtttttgaaattgtgatattaataaaaaataacaatttgcgatgcccatagaactgggacaataaaactggtagaaaactgctcagttcaaaagattaaaccgcactgtgtccaacacactagcttattcgtgttggctttgttaacctcttaagatccttctagtccaacacgcatgtagtccttgtccttttgcacacttcagcagaagttataaatattttcatatcgccccattttgttagctaacttttgaattgtgtaaaaatgcagaaacttattggctgctattaatattgcagttctgt

SEQ ID NO: 37547 - DNA, 1031 bp, Sorghum bicolor
  Intron number 1 from transcript Sb02g033390.1 (locus Sb02g 033390) derived from phytozome v7.0 (chr-ID chromosome_2; pos 68046637 to 68047667 reverse strand)
cccacgtgttcctcgtcgtcatcctcgcgctcaaggtgtcttttggctcctttgttccttatctatttggtgtgattttcgtgggtggcaccatgaagctatttgtgtttcaatgaaggagatggattcttctggtgtaggcacgattggtcagctcattgaactgtctacttctgtagtggctcgtgtaatctatcgcttggatgggtcaattttgattggagatttgtttgacttccctataatttggaatttagaagctggttccccaaatgaaggtgttttgaatgagcaataagcaacatgttgattgaattagcaaactccggattttctctttcaagggaatgctagaatgagctaactgatgtacagtagctggtaccgcaaatattgtacatctagctatgattccttggcttatgcagttctatttgactgtaaaacgtaaaagttctggagtgtatggatgaggaatgcttgtccttgtaatttgatgcatatctccttggttttcttctcctctctctatttttttttatttttttttatttttgcgacgaggatggtattccctcttggcagttgatagcttcatgttttgttttcttgatttgaattgctgcagtggtagccattgactatgactattgtggtatttgggagggtgctagtcatgatgttatgtttattaccaatgctgattagtaaagaaatgtcaggggcaagaagcatttcagtatcaaactgttgtctgttgtaagacctttaggctttttatggatggagttcaatatgggagatgagcatttatttattaaaaaaacatgggagatgagcatttgaacatcttattgttatttcactagtcactagtgtaaaaacctctctacggatacatttgaattctgcaacttacctatatatcaagcatatttctgtctttccattgtttatggtgcagcagtgttaatgctgtttccttttgccatgcagactctattttttgttcagctaacttctatagagac

SEQ ID NO: 37548 - DNA, 741 bp, Sorghum bicolor
  Intron number 2 from transcript Sb01g011570.1 (locus Sb01g 011570) derived from phytozome v7.0 (chr-ID chromosome_1; pos 10399049 to 10399789)
gacttcgtcggaggtaatttcagaaattgcgtcacagcgatggagccttcgtgagatatgttcgtgctctgtgttctcattgaaatgttacgagctgagataattaacgatgaacccttcatgagatagtaaggctttgtattctcgtttatagagaaaagttcgtgtgttttcaaagtgccaaagtgtaccaaaaaaaaaaaaaaaaacctatggtttcatttttcagaaaggtccattaggattctaggatatgttcagagttattttggccttactgctttattgtgacgaggagtgatggtgtgatggaagctagaaacatatggaatttagcaattctagcttcttgacaagcttgatggaatgtgcaagggagcaatttaaaagttcgaattgccaaggcaagctcgtgctcatttggtgatggttattgtataggctggaatacaaaagtatgtttcatggaatatagaaatacagaactcatcaattcaactatgttttcttgtacaattgtagttttgtggttttatggcctgaccgataactatttgtattctgttctcttcatcattagtgaacttgagttaaaagcttacaatatgtagtctcctttagtcctttgtgctacctcattctttttatgctttttgaattgagcagtttaaagcatttgttggcgacactgcgacaaactaaatatttgataactgcttgtgtcattgaattttccaggtt

SEQ ID NO: 37549 - DNA, 764 bp, Sorghum bicolor
  Intron number 1 from transcript Sb07g004020.1 (locus Sb07g 004020) derived from phytozome v7.0 (chr-ID chromosome_7; pos 5054249 to 5055012 reverse strand)
cgcgaggcgcgccgaccaccatcgcctccccctaggtatgtcttacacgctgcgccgcttctcccgcgcccctagcacaaagggtgttcgacggaatgcccgccggcgacgtcttaggtacagcgtagaggtagtcgcgggcacgctgtttctgttcgtggggtgcttctttgcgcgatggattttacttcgcttcgcttctattgaggcctgcgtgctgttcgcgcggggactgtctgcgtaggattattcattacctacttgttttcacatcctatctgacttaccaaagcaaagaaaatggttgcctgcctattaaaaatattatgctcaattggctttacgcagtgcacaacgtgtgcatgagaggtcaattcagagtttttagttgctgcatattaaaaatattatgctcaatagctttaggcagtgcacagcgtgtgcatgagcggtcagttcagagtttttagttgttttttgaagcaatagtcggatgccacactagagcttgggaactttactttaccagacgaactgtgtcagaacaatgtcagtttggtttggcgccacactgctgatgccctgattgaaacacttatttccattcacgcttctatttccattcacgcttctcagtttgattaccaaaactctgctgctcctacaagcattattattgtagttttcattgtcgtttcaatttgtatacattgtttttaatattttccaccggtgctgccttcaactcaggttttttatcaact

SEQ ID NO: 37550 - DNA, 939 bp, Sorghum bicolor
  Intron number 1 from transcript Sb03g025580.1 (locus Sb03g 025580) derived from phytozome v7.0 (chr-ID chromosome_3; pos 51399426 to 51400364 reverse strand)
cctcgactccgccgccgccgcagacgccccctcaggtgcggcacttgcctctgcctcccctctctctctcttcatcctcctggtggctcggctctcccagtgttgctctgctcgcggtgtaaatcgtcgcgggtcaggtcgctgtgatcctgctgcccggtgctccgtttcgcttggaagtgctccacgattcgcgctcatagtgctgcgcccgctcggcgcgagcccctgcgtctgtgctcgcgggcccgcatcggcgtccgctgcttttagggttctgggagtttgtttagtccttgtgtacttgtgctttagcttctaccttgctgtattttgttggagcgttttgtgtcatggtttaatcttagggttttagggctcgtaatgttggtatgcagatgctttttgattgctcagctagccacttcgtgcgggttgctctaggactaggatttttttgggcgggattgcaggacgatagttctaagtgaaatacttgttctcttgaacagccaatagttctgtactttgtatgcaaataatttgtagatatcctagtgcttgtgataattacctgctgataggtgcttgctacttcatcagtatactctttttagcattgatagcgaattagttgtttagctgcattgtaccagaaattctggaacaagaggttcttatgattccattcccatgcaccttatccatttacttaatagtttggcagtgaaattggctgcatctagctacctgtgtgttttcttggtagattttttgcttgttaggaacggttatcttgctcagaacttggagctgcttttgtccatataatttccccttgatttggggttgcttgtacagatgttcaccaatgaaccaattttagttgctttgttttcatcacttgagttctcttgcagataataacccagaattacc

SEQ ID NO: 37551 - DNA, 603 bp, Sorghum bicolor
  Intron number 1 from transcript Sb02g038330.1 (locus Sb02g 038330) derived from phytozome v7.0 (chr-ID chromosome_2; pos 72608082 to 72608684)
gccggcttcggcccagccccgcggcgacgctccaggtaagcctcggttcgccgtcgctctgtatctcccgcgggaatggatgcgcaacgcgtgttcaatggcgtcaccgtcaccctatgctacttggccgcgagccccgtctcctcctcttgtcgagtggagaatgccgagatgactggagctggcgctcgagtagcgcttatgcggtgccgcgcgcgaagaattgcacctgggtataacctgtcgaggagctcccgatccacgcatgccgggagaaccccgcacgctgagcaagcgagcgcctgcactgcctgctatgtctgattgaccgtagtcgcttgctgcccgcagctagtacatgcaggctgcgcctctaggtttcctaggcgacattgggttcacctaggaagcatttcgtgctgttggttcgagctttacaagtgatagtgaaatgttgttttttcagatttatgagtgacagacttttcctgcgcttatgccattcctatgaattttctttgattgccagcactggtaatcagtcaatgataactgtctgataatttaacatcaccatttctgtaaaacaggattgaagggggc

SEQ ID NO: 37552 - DNA, 959 bp, Sorghum bicolor
  Intron number 2 from transcript Sb03g010100.1 (locus Sb03g 010100) derived from phytozome v7.0 (chr-ID chromosome_3; pos 10891327 to 10892285)
acgcatcagaatcagtacatatttaactatgcatatatatgtgtaatatgtatgtatgtatattttacattttgacaagagagagagagagagagagagagagagagagaggaacaataactgctagagatcgatgcatatattttcttgttgctcttgtatattgaactatgtatatataattatcatggcattgcacaaaagctaatgcaaatttaaaacttggaatccgagtatgggagatggattattggttttcttctcgtatttgccccggcccggacctggcccgtcctctccctcttcttctcaggagcacggcaatagaacatgcaacacgttgactaggcataatcagacgcgatgtttcaactccaagattgtttatttctatactacattccgtgcattcctataggacaatcagttctatttgacaggttagcacaatggccgattcgtattagtttgactgtcaaatggtagctagaactcagctagatccatgtcaatcttggatatagcgatatgcttgatcaccagaattgaactttgtaaacaatgcaaatcagtagcagctacgtacagcatggatacatcaaagcaccttttctgttaagtactccaatccctctgttttaaattatagtctgcttagattttgtcctaccaaatcccaattctataattttgaccaagttatttagaggaaatgcatcaacatctataacgtcaagttagttttcattattttttcacatgacctatgcagctatatgctttgatatgtagtgaatttatttgaacttgtagatgcaaatatatttttctaaaataactagtttaaactagtaagtttgacatgggaaaaaaataaattaactacaatttgaaatgaaactaccacgtagtgtagcgtgtaattgttcatgcatacatggcaggagacatcggaatcc

SEQ ID NO: 37553 - DNA, 729 bp, Sorghum bicolor
  Intron number 1 from transcript Sb04g035470.1 (locus Sb04g 035470) derived from phytozome v7.0 (chr-ID chromosome_4; pos 65387318 to 65388046 reverse strand)
tcaggtgtctgcttccgtgttggagcgaagcgcttgtgaggcccctcctctgaactccgtgttgcgttatttggcaggatgttctttacttgagcgctcgagcggtaattcaccgaaattaggttctgcttgctttccgcgtatctgcattagacgtttgggggcaaatttgggacctcggctttgattaatttgatgtgtgcctcttgtattgactagacatgcttaagcctatcattaagggtttgagttctccctccagtcacatcatcacaaattcacaataaggaaatgcagcatcagagacatactagtagtagtttatgcaaaccaatagaagatgtcttcttctttttacaaattttccaatgaataatgtaacctctgttctggcttggcttggtcttcctagcgatttttacttgtttaggcgtttaccttttactcttcttattgggtggcttgagaagatgatctgaatcaaaacaaatttgcctatttctcgtcttcgtctcttcttagtcttcatcagtgcaggtgcagaagttcaatctagcgtatgtgcactcacgtcatcggtttcatataaaatcttgttgttttgcatcgattttcattccctttggaaatgtgaaaatacagccattgttaacgtgctgacaacctgctgctgtaacatttcctcgtcgtccagcaacgcacgactccagacggcaagcagctgtgggc

SEQ ID NO: 37554 - DNA, 908 bp, Sorghum bicolor
  Intron number 2 from transcript Sb04g027760.1 (locus Sb04g 027760) derived from phytozome v7.0 (chr-ID chromosome_4; pos 57641011 to 57641918 reverse strand)
agtgtgcccctttggctggctaccgtggaaatctggtatgcatcccctttgttcagtagcttgatgttaatatctgaagatgtctgtattgtgacacagctgtcagcttgagttgggacctactagaatctgtttttttttttccaaagacatatttgaattgttcatgtaaaattgctgtggcagatgatgacctgactcttcacatttctatctattacataatgcacaaacctcagttgaagaaactaatacatgacatgcagtttgctttaacttcattgactatggaacttattgggaaaaaatgcaaagcagttctaaacttggaaactaacatgactgatctctgatctataaacttctcattgtgtctctgcagtcatcttcagtttaaatttcactatagtcactgttcttggccgcatgcaagttgtggcgcaaagtatgcacaccattatgtgaccctaaaacaccacaagaaaaatccatctacattttgatggaaagtaatttcctaactgttcatgtttagctgcaattttggtagttcaattaattttgtgctaccaccaaaatggcacatttgtcatgctatgaatctcgtgtaatggtccagtgtaagttgcacaagcacagctgcaattcattgccaattttagctcttacctgagtgactggcttaggagtccaagtggtggtgtcatgtgtgaactctggttcttatcaattttgttcattttaagtttcttctgtgtcttcctaacaagtgcaaaaacatgaggagactaccatatttttaagcagtttagtgcttatttctagtgattgattggcaggtgctccgtcataaatggagcatctattatgcaggatagagatctaggaatatacaagcctgctgaatc

SEQ ID NO: 37555 - DNA, 633 bp, Sorghum bicolor
  Intron number 1 from transcript Sb0013s009080.1 (locus Sb0 013s009080) derived from phytozome v7.0 (chr-ID super_13; pos 2534212 to 2534844)
aaattgagaaaggtgcacttctcagttttccttgagaacactgtatctttaaatttaagttaaaaccatatttttctagacataggtgtatagaatcctggtgtcttgattaaatgtttcttggtttgtcgcatgcttatggtcatggtcatattcttctttctactcactcctccccccctgcccccgcacacacacactatccctaaccctatcctacccttttgttgattatgactatgtgatgcctgatatcacaggataagaaacatgggagttcaaattttttatcccaaatttaagaagcagatgattgtgattgttacacattcatgcatgactagccttttgattttatacttattacgatcataagtgatcctaaattatcaattatgttgctttattttgttaggtcaattgagttttataattatgcttaatgtcgtaccaccacattgaagtaatcttgacctgttatagtagagcaattgtctgactttgttgttgttgcagtagggctattccaaaatgtttaccttcctaagaaaatattaatattgcccttaatataattagtgcatttgttgcatctagtttatcatcatagtagggaatttcctttttcaggtg

SEQ ID NO: 37556 - DNA, 494 bp, Sorghum bicolor
  Intron number 1 from transcript Sb01g000970.1 (locus Sb01g 000970) derived from phytozome v7.0 (chr-ID chromosome_1; pos 915352 to 915845 reverse strand)
aagattatcaacagtggcgcgtcatctgtcgggtaacaactttgacatcgacacacagatataatttccttccgtttaggatctgcagaaaaagacagccatggcaaatgcattgaaactaaatagaccttaggccatcgactgatgacttttttgcttcagaccagacccctccggtttattgctgctttcaccaagcttaaaacctggcaccagccccccctaaaagaaaacaaaaaattggcactggaggtgactctttagaagccaactttgcttcttttctgtttcatgttcacttcaactctagccccatgtaatgtgtcttagctatttatctcagatcaagtttattaatttgatacctgttactgatacagctttctttttttgatctccccattcccattgataacaacggaaatacatgttactgatacaagctcttgctgttttcaggttcgtgatctcgattttgccatacagatagttgg

SEQ ID NO: 37557 - DNA, 711 bp, Sorghum bicolor
  Intron number 3 from transcript Sb0012s009110.1 (locus Sb0 012s009110) derived from phytozome v7.0 (chr-ID super_12; pos 1982013 to 1982723 reverse strand)
atcctgctccaaatagaggaggttcaaggaattttacagagacacaacaatttctagtctgaaaaatccttgactcttgcaaacttatgtaattgaccctctactaagttttcacatgcattttttttggttttataggaatatacttttggccccgagaagagcggcaccataaatacatatgctgtaatgaaatctggaatgaaaatagtggatagcactggaaggagtcgtccaataccaagtgcaaaagcacagaaacgcttggtattacatctttcttttctagaaatttcctttgtctattttagcttagctggtccatatcttgtgtgtgcaatgagccaatgaacagtatgtactgaaatttatacagaacataacttacagcttcgacagtatgtagtatgatcaaaggatgttattcggttgtgtctagtgtccacaaccaattttaatattatatgtttatgctgactttcattacagagagccagtagtggacatattcatgatattgaaagcaaaatatatgtagtgtctatagccaatctctagagctacttagaaaaaattggaatgtcaatgacatggtgggaactaataattgccacatctatttgcttctttttaggatgactacagggcctagttccagatgagacctcaaaacaacttgatggaaaggctttgtacacaataggacgtggc

SEQ ID NO: 37558 - DNA, 857 bp, Sorghum bicolor
  Intron number 1 from transcript Sb04g029040.1 (locus Sb04g 029040) derived from phytozome v7.0 (chr-ID chromosome_4; pos 59077824 to 59078680)
ttctcccgccggcaaatccgccctcctaggagcaggtgatctctacatgaaccctgtttctttcttgattcatttctgctaatgatcgcaatcgagctctgatactgtaattccgagggccgtcgtcttgccttcgctaatcattttcctgttgccgtttcaatcgccttatcacgtcgtcaggtgtagtagtgcctttgtcttttctctgtgaagtctattctcactgttgattgtcggtatctgaagaacagtagatagcgataggcatcactggttgttgggcacgccgatcagcatgcccaacaaaataacgtcatcagtgagtcatggcgctaaggtagcctgaaatttcctctgctctgcaggtaaggtccgtccttatcagaaagggggttgcaaaagctgtaacgcaggggcatgtttccaatgctgaattcgcattgagaagtgtacatacacatatctcaatacagattcgtattgatatgtatgtttacagacttctcaatgtgaatctagagggagcgagagcatgtgccctcatggtcaaaaataagtttaccaactgtaattgcatactcggtggtttctgttgcaacactactgtgtttttccaagttccaacgctactgtgtttttctggtagatcacacgcctaccatgcgtcaacgaactagtttgaagcatgtatactaatcaaaagataagaaattgtttcctcagtccatggattctgcgttaactttgagttgagcaatttgtgattcattcatgctctagctgaaactcttggctcgattgaacgtgttctgttgccagggggccctcttcacaggttcagcactgcaccggca

SEQ ID NO: 37559 - DNA, 711 bp, Sorghum bicolor
  Intron number 5 from transcript Sb01g048630.1 (locus Sb01g 048630) derived from phytozome v7.0 (chr-ID chromosome_1; pos 71575576 to 71576286)
ctttatcacttctgctatactaaatcttggacaaggtttgtaaacttggcattggtctggtaaagtgtctgatgttccccagttatattgtttttgaattcacaatttattttttaagagtttgacatattatatgtgtgctttgccatgcccatatgtgtagtgtaaggtatcaaatgaaagcccacatgggatgataggcatttatactatgccatattacatacacaaatccattattgttggttctcatatccttgtaccacatgcatttgcagattaggctgaagaaccatagaaggttcaacattcttgtcattttttgaactttgttattcagtgttgtagcatcttgggaatatatttaaaacccacaaaccggcaagaacattacaatagtaattacaacatttttggtcctggttgagaaaattcactttttgttttttttgcttatctcggccttttgtcagcttgtcacccataatcatggtggtaataagataagaagataaagattttctgtaattattagaatatatagaatgcaaatttttatttgcccaagtaataagatctttcactgaacataaacctgttgtatcattctgccataattatatacacaatgtttgaaatcagctctgttttgaataacttcctctgttatttacagctacactagatattatatttaattggaaggccagg

SEQ ID NO: 37560 - DNA, 996 bp, Sorghum bicolor
  Intron number 1 from transcript Sb07g001240.1 (locus Sb07g 001240) derived from phytozome v7.0 (chr-ID chromosome_7; pos 1220602 to 1221597)
ccgagctgcgctactccttccagcgcaacagcagggtaccctatacgcccccccgaccatcgctttcttggttctcagtgatttcccctgctccttctcggtgtcttgctcatgcgcgcgcgcgcgggggtggtggtgctctacggattgttatcttccttaggccccctcgcagttgttgtggggttgttacccggtccctggaacaattgccaagttcagaatccttataaattgtgtaggaaatgcactagtgttttgtgttcttggatatcggatgacattggctcaaaaaacgaatcaaaaaatgcaccgcgtcactgagaacagcattgccagtttgtaaattgcagttgctgaaggacaggattatgctgattttactgccatgatggtgccaactgaccgtaacaaacgaatggggaaagtgcactagattcttgagaatagcatttacagctgctgatgaaaaagctgtgtcctcagcaccttgatacttgcaccaacccgccattagagtctcaagtcatgaatgttgtttttgcaaaccccacaatttcaatttcttctcagtcatgtgtgctcttacacgtggattgagcaaagctatgaacagaagcaggacctgaaagttactcaacacagttcatgcatcagacactgtgtgatactgtgatgtgtaagtttcatagcctgaaaccaaactaggttgatagcacaaggacgtcacttgtccagtacatcgtgttgctgctttctatgacacggtcctttgtttttgtatttggctctggacaccgaacctgaacaaaaaaaggggatgatacccctgattcgtagccttgcacttctcttgaatggattactattctatagcaaatttagttcttcattggcacaaataataaacatcttttcactttttgttcaattatttgacattaaactggatgctttgcagtttctgaagagagtttttagtgtggacacacttgt

SEQ ID NO: 37561 - DNA, 484 bp, Sorghum bicolor
  Intron number 1 from transcript Sb01g043010.1 (locus Sb01g 043010) derived from phytozome v7.0 (chr-ID chromosome_1; pos 66336448 to 66336931 reverse strand)
gcggtaagcttcctgcctttctcaatgtatttaaatgctcattcagtttctcttttctctttcctacgagaatggcgtagcaagattgtatcttttgtcttcaatggggcttcagatttattctctccatcccaaattataagtcattctaagaatattggagagtcaaagaatctcaagtttgaccaatattatataataaaataataatatttatgatattaactaagtatcattagattcttcatcaattatattttcataatatatctatttgattttataaatctttataattttttctataattttagtcaaacttaagatactttgattatataaaattcttggaatgacttataaccaactggggtactcacattgctattggttttggttcaattgttacttgagatatacctgaagcgtgatgaactcttgtctcacaggacagggtcggtggcagcgacgacggagacaagtc

SEQ ID NO: 37562 - DNA, 830 bp, Sorghum bicolor
  Intron number 1 from transcript Sb03g041400.1 (locus Sb03g 041400) derived from phytozome v7.0 (chr-ID chromosome_3; pos 68914049 to 68914878)
gtggatttggaatcgtgccttctcggcacgcacaagtaagttttgatgctttgcccttcgtctcaaatcgcgttgtttcccgggttggttatttgacgatgcgagacaatcggggaaacctgtcaaaattctcgagaggcggcggcggcggcgatcgcgaggcatttggccatctgcgtgttttttttgggcgctgttttggttgtcaccgcttcctccgccgtagccgcgcggcgttgcctgcttgccgccgcatcgtcctccatcctcagccgtagcctgtaggctccctcgtagcgcgcgccgctagacttatcgtcgcctgccgccgccggagcgtcgctgtaggcggaggctgctgcccgccctcctcccatcaataggtgaaatacaagtgaatctagtgtttgttactgcataaattgggaggcatttggcgttagctgcataatcttagttgttcagcaaacatttattatttccatcttgtatattatctccgtaattctcatgatgtctccgagtgaacttgtgatgtcaaatccctggttcaccgtaatttttaagtgtttttcctgtcatcattacagtttcagtttgatcctcttcagtgcggctttttagaattttactagaatgtgtgcaataagctcagaacttaacatcatgacatatgagtataatataacaaataattctcgtccccatgtggtggaacctttgtaatagcttaggcagtcatgatgtttacttggcatttagcgattattctctcaggttatggtttaccagagtggatggctccaatgttatttttatgtgcaggtggc

SEQ ID NO: 37563 - DNA, 976 bp, Sorghum bicolor
  Intron number 2 from transcript Sb03g002650.1 (locus Sb03g 002650) derived from phytozome v7.0 (chr-ID chromosome_3; pos 2544915 to 2545890)
cagtgctcgtgttcctcgtgctcttcgtagtgaaggtgcgatgatcaattccaaccagaattccattttgcaagcttattttctgaatagtatgcttggatttggtgttaaaattggtgggagtagccagtaggtacagctgttgctctgaaacgtggattgtaatgctgttatgtgtgctttcatatttgttatgttacatgggcaaggactttgtgtgtttctaatttttccatttataaattagtcagcctgacagcctgcaacttgaggtgttgaatttgatgtcccagtaaattgaaaaagaaaagggtcacattgttaggccattacatgaattgcttttgtggtagaattagatttgctatgaggttagattgcatcatattgaagatgcaagatcagttgaagtaatagcaatgcaggttgagatgtgagagccaatgctatgctattccttgtgggatactttctcctattgcaaatatgcatatagattcgcttgtgccttatctttttgctgttggaagtcgattatccacatgctataggaatttcttgctattccttgtgtgatacttccccatatttatggcaaatatggatagagtctcaagcatgccttccttccttcttttttttttcctttgctggaagtggattatttgcatgcctgatgaatgctcatagctgaggttacacattggttcataagaaaataatttttctaggtggatttttcttgtttttgtgcttcgctgtccacatgcacaaatgcacaatcttcttgtttgatatgggagtcttccacaaaagggggacagcgaggaattatacttttcaccatcaaatgcacatcttcttgtttgatatgggatgatgattgtgtaaaagctcattatgatgtttgtttcgctaattaaattgttaatgctcagcagattgtgaaagaggaaacctgggaaacattcattgc

SEQ ID NO: 37564 - DNA, 848 bp, Sorghum bicolor
  Intron number 1 from transcript Sb03g040010.1 (locus Sb03g 040010) derived from phytozome v7.0 (chr-ID chromosome_3; pos 67627409 to 67628256)
tgttaaaagaggtgagttggtaatccttggggtaaacattggattctgaatttccgattcaagatttatgctcgcgtagtcatttcagggcaagctatgtctttatgggcataacaaccacagtgcacttttgcagaacaattgcatcaaattactttctagctgaaaaacaaaattgatgtgatctaacagcatagcatgattgccaattgtatttctcttttggtatcatggaaggtcgattcttataaaaaagattcatccttattgctaaattctctactcaacttgtttgagttttgtatatgcatacagatgctacttgatctcatagtgcagagttgacatctgaatcagtcttatttatggaatctaagatagcagcggattatggactgataacagtttcagtatttgtatttagaaaataaataaaataaaattgttatagaagtccatgaaatcagaggttacactgcattagctaaagcttctagctctgaaaaaaaattgaacattcttcatgatagatttgtctcaggtttatttctccactactttattattatgtttaaatcatgatagctttcacgatcacggtgtgatcatcttccagactgtttcaggtatgcacttaaacaatagaatggtgtcctttgggatgccgtcagaattaacaactttgcagataaaagtaagtttagcagaattgcactgttcagggtcacatgctggcaacaaaattttaagaggacacgttttgatgagttagatgtagccattgctattgaattgcaaaccattttctctttattcagatctaatctgtggtaattacacaggctaga

SEQ ID NO: 37565 - DNA, 811 bp, Sorghum bicolor
  Intron number 4 from transcript Sb07g019770.1 (locus Sb07g 019770) derived from phytozome v7.0 (chr-ID chromosome_7; pos 50920662 to 50921472)
ttgcaaaaaggattgcacaggaaactgcggtgggtcaactgtcattgcaaaacattgctattcaagttccgaaactagattgaccatcaatataaaggttccatatgttgtgctcatacatcacagctctcttcagatttttgttactccatcacatctcagggtgtcaactcacatgggcctagtttaggtttgctatgtggcacatgggaatataattattatgggaattttgttaattctagtaaggcttttctaccatggttcgaccaaagatgctttcaacaaactgcaataataaataataaaaactagggaaacacaacttgtttctaaaagcaaaatacccccctttgatgtgcttgtggattgtcacctgttctatttacgaattggttataacacctgggtcattatctcaaaagaagtgtgttgaacttgggaaatagctatgactctaaaacggtggaatggtataaacataagaggtggcatctgtaggtacatttttattgtttgggtgctttttgagtgtgatcatgagtttctgcgtgtgttatatccataaatgtgagtaccacataagtgttcatttctttattcagtccacaagcacaattcattatccacttaagttgttaacctacaagttggaagaaattcaatctgtagaagtaccaaaatatcttctgtaatccacttattttgtgcgacagaaaaccaataacaattgcaattgtaatatttatttgaaatgaaaactaatggaacttgttcttaagcacttataatttgggctatgcagagattg

SEQ ID NO: 37566 - DNA, 664 bp, Sorghum bicolor
  Intron number 1 from transcript Sb06g003160.1 (locus Sb06g 003160) derived from phytozome v7.0 (chr-ID chromosome_6; pos 6498809 to 6499472)
gtgttggcgcatccacgccgtcgccccgcagggaggtgcgtctcctctttcgttctgctcctcgaattgaatggatgtcgtattatagctcagaccaaataagttgtgcacgaactgcttgcatgtagagagtaaccagctgatgaaggacaattgacacggatgatatgccagtgttctgttttcgtgtagggaacttgtctcgtgtttaaattttgtcgtttcacacatttcagattcacaagtgtttggtatggtaatgtcctttttatgattaattaaattggtgctagtttcttttcaatcgatgcactgaaaaagctccgctacatcactctgatagcatgcatcattcatttctctgtttacagttaccacaaactagagtagaaatttagtttgttttaacagcaacaacgaggccatatgtttggggttaggctacagatgaatcccaacaagagccacaaacagagatgataaaaagtccagaggtcgtagttatagtaaaaaaaaagtaccctgtttggttcaggcactttgattgctaaaatcatacaccatctaaaatatctggtgcatagtgaatgtttcatatggtcatgcattatcatacacacttttttcatctgaccattgtctctaatcatcagcgaaagctccc

SEQ ID NO: 37567 - DNA, 578 bp, Sorghum bicolor
  Intron number 1 from transcript Sb02g042060.1 (locus Sb02g 042060) derived from phytozome v7.0 (chr-ID chromosome_2; pos 75793126 to 75793703)
cggcgaggtgctcaggatttacctcgttcctgaaggtaaccagctacctgaaatcgatgctcgtgttctcttcagttttggtgggcgtaggcgtagctagctgcagagcgtagtgcatatttctggctgttgcgtggaagccttcatcggctgatgtaattgtatttccttactctatgcagggatattttttagtccactgtggtaaagcatgcgtgcttgaccgaagcaacactcacttcctgattgttgcttctgctgcttccatttgtgtaaatgtagttctcgatagaggaacaaatatcaacttcagtgcctttttttctttctttctttgatgtgttagaacttagaagtcttagttgtctgattgaagggaaaaaacacttcagcttctctttattggtcatgtaacatagcttattattgttctcaaatctcaatatatgacattaacaactaaaaagtataaccgtattagtttttcaatgtttgtcggttaacagtatcttatatattcatatatgtcatgcccaccttcaggtcaaggtcatcggaagcatactactgttaaagca

SEQ ID NO: 37568 - DNA, 926 bp, Sorghum bicolor
  Intron number 3 from transcript Sb02g044060.1 (locus Sb02g 044060) derived from phytozome v7.0 (chr-ID chromosome_2; pos 77864175 to 77865100 reverse strand)
tccccttccaccctgggaggcaggtgaggcggattcctttttctaataaccctttttagttttattatattattattagatagaaaaaaatcatcaagccccagcctaacccaacccaaaccagagattttgttagggtttaagcaaaataaaccctagtcgctaccaattgtacctgcgacaccctggctcgctgacacgtgctcatgcgtagcacatggtggcttaactccagcctctgttggctttagctattaccatacattctggattcatgtgatgctagttcttgcaatccctcatcgtgtggacaatgatttcagatgtttctcaggttggatggaccgttgataggttggcaattgacatttaccccttttatgtgccacgtttaaaattcttgtgaatttgtgatagtgtattggtttgccaaataaaattccctagctacattatcagcccgtcacatgagagagtggtaatattaggaggacagttgtgccatggagctagttgatctgctgcatagggtccatatgcattagatgctattttgcgtgtttgttcatatagtagtatattactcattctgcagatgttttgactgttcgctggccagcttctggttaaatagatggtgatcgtgtaattagtaactagctatgtcctgtgacctgtgtgtagcattttatccagtccttaaaatacttgttctagtttatcgcctaagactcttgccttgggttagtagtatttctatttgttcgctgtagaagctacatcatctgctagtgggaatatgttattatgctttgtttcagactgcagtttctttactgtattgatcttctagctgtggctgttgatgaaatcattgtttttattctgtaggacaagcctgagcctccgccagaaggccgccttcc

SEQ ID NO: 37569 - DNA, 643 bp, Sorghum bicolor
  Intron number 5 from transcript Sb02g018600.1 (locus Sb02g 018600) derived from phytozome v7.0 (chr-ID chromosome_2; pos 45390053 to 45390695)
cagggtaatcctacttatagtaacaaaagaacagatacaagtcacagaaaaaatgttcatcaagatgcttatggaagaactagaaacactcatacactttggttcactggatttcatgctctggattgttttcttctataaaatcacaccaaccatttcccctcaggacacgaacttgtggcaagttgatgcctggatcgcttggatacgaagaccaagacgcgaaaacttttgcatcttgggtaccatcatatctcaattagaaccaaactttaggcatgtcaagatcatgccttcctttgcttcttgcatactgaaatcatgcttttgatgattcaattcaaagggagtcgattacttgaagtatgacaactgcaacaaccagggaataagccctcagccaaggtgatcagcaatcacaagagctcttaacatttccctcattcatgctacctttgggagactgatttgctcatgaccatatgcagatatgatgcaatgagcaaagcgctcctgaattctgggagaaatattttcttctctctctgcgaatggtacttgttcattcttttgagcaactcaaatggatgatttagattcaatccttctatactaaaaataatattgttcactaggggtgtga

SEQ ID NO: 37570 - DNA, 818 bp, Sorghum bicolor
  Intron number 1 from transcript Sb01g040530.1 (locus Sb01g 040530) derived from phytozome v7.0 (chr-ID chromosome_1; pos 63893354 to 63894171 reverse strand)
gccctcgcgtactcctatttccgccaggaggtgaggtggccaagaccgtttgcttttattcactcgtacaatctgcgtacacaaacattacacatttacaccttatttttaccacatcattgggggttcttaattttaccacatcattgtagggttcttatttttaccacaaacgttacaccttagagaatcaaattccctcttcatcattgtagggttatatgtaatggtaggtctacaaattcttctctagaactaatgctttccgtgacacaaaatcatcttacaagttggagataatttaaggagcaataatcgagttgatgaaatttatcagtactaaccatgatgttttttttttcttaagtaccagtgagcagccttaaccatttttactctttctatcttgcatccagacattgaatgtctgatgcagtgttctcttgtaaattgttgtgtttcttttgatgaaacagaatgagggatagtattttaccttaaaaatattcagtttagcttcttgccctagcttttaattctttttgattgctttcatgtattgcacaatctgtagttatcgcaataaggtttacttcatataaaaaaatagtgcttgctcaatctaattcaatataatttcttagcaatcctctggatttatcattttgtgatggtttctacacttgttaattgtcatatatatgctatactagttatttctaacctaattattgtcatgtagcatgttctactccagtccactctattggtgtttaaattgggctcaacttgtcaaatcctatcattttaattttcag

SEQ ID NO: 37571 - DNA, 1001 bp, Sorghum bicolor
  Intron number 1 from transcript Sb01g022060.1 (locus Sb01g 022060) derived from phytozome v7.0 (chr-ID chromosome_1; pos 27039355 to 27040355)
ccagcaacaagccggagccacgcgtctcggaaccggtgaaccccttctcccagccccagcaataccttccgatgttttgtggacagttccagtagtggaggcgtggactgttcctgtagtgtggacttgtggttgcatcaaagtggctactccgctttgctcgtttatcaaactaaaattgtttctagctcagtgcgattggtttaggtttgaccaagttagaatttaggactacaaaaactcttcttatgtgattctgaagacgttatacgattattatgtgaagccaatcatgctctctggcaattattatagatgcaggggccgagccagagtattgagccaccgaggccaatcaaacttgaggcactaatagagggggctagattaccaattcatcagcacttattggtggattttttcttttgaaaatgcaggagagctgcatttcattgtattagagagatgaaaaaaagggggtcatggcccactttaggctacacaaagctctgccccttgttagattttcttcatagtgtttatgggattgttttcttcaagtgattcctaatagaaaaaacaaatactggaaaggaattgcctttcttttgttgcttctgcaccaaaacatttattctttggttagagctcgaacattttaggagatgtttctctgtttctagccttatgggtcgatgagtgtgggtagatttatgacaagaaaagttgggcctgtatgagggctctggcatgctcctgtaaatctattcttagaattggatttactgatttatgaaatattcaggatgaaagtagaggacaagggctacccattgccacctgattcctggcctttaagtttaggcatttgctcgctttaggggcaaaagcatgattacatggtttgttttttattgtccagcgcctgtgccatgacactttcagatatttcattttaatatgcaggatctggaatcaggtctgtatcttgtggcaacgcc

SEQ ID NO: 37572 - DNA, 366 bp, Sorghum bicolor
  Intron number 6 from transcript Sb01g019390.1 (locus Sb01g 019390) derived from phytozome v7.0 (chr-ID chromosome_1; pos 20826142 to 20826507 reverse strand)
cttgctgatcaactggtgagtttattcattccatattcaacacttacactgccccgcaacagttaggaagcaagacaactttctggaatttgatatcagctatttgttaggagttacatgttcagacgtttcatgagcattctaccataagtgttgccttatcttgtgggttttaattcttctgagtgtatgtcagccaagctttgcaagattgtaactattttaagtttgttcttttttttctcagtgggcaagggagggagagcgagagtttattatcatcctattagttttctttgaagactttttttttgcttggacttacattattgactctttcatttttagataaaccgagtggaatac

SEQ ID NO: 37573 - DNA, 938 bp, Sorghum bicolor
  Intron number 2 from transcript Sb01g044460.1 (locus Sb01g 044460) derived from phytozome v7.0 (chr-ID chromosome_1; pos 67560617 to 67561554)
agctcgagagcttcgacggccacctcgaggccgtaatgcggccggtccctccctgctcgttgtactctttactccgttgcttctactgcctgccccctttgtgccaaaagttattgctccatgtggattaagtaggccttgcgcagtaaaactgatcggatgaatgctggtggatggattgaattaagctgctttatccttgtagaaactagatcacatgatcttgctattgttgctccccagagatgtgattgcctcttaagtggaaatgcaattctgctagcaatgtggtcatttttaagttgaattttgaaatgaattgctattgatcacgaaatcatgaccataaatatgcaaatcaaaaaacgaatctagtggaacctcttttgtgtaactaagccatcatatagttggcttaattaattcgtgaaaacatacaatgtctgtatcttcaaatatgcatatcaggacagaaataaccttaaagcagtattatgtgaactagatgatcttgagcacttggtatgaccaacaatatgtttattacacacacatcatgaaaggatcgatacagatttataggttttatccatcacagatacttgtatggcagtctcggtattgtattaatctgtcaaaagctccgtattattattatatgctgaacaatgtttctgttccttgataaaaatatatcattggaaattgtggtatggagtgcctgattttcagtctagcaatactagagggtagagggtgaaatcgattacatgttcattattatattctgcctttttctttctttctatctggtatatgctaacattatatacttctatgattcatgcaaccttggaagaatgatttgaaatgtttgaccatgttgttcatgcaccattgtagatagaggagataccaaacttgacatctggctgcac

SEQ ID NO: 37574 - DNA, 647 bp, Sorghum bicolor
  Intron number 2 from transcript Sb01g007510.1 (locus Sb01g 007510) derived from phytozome v7.0 (chr-ID chromosome_1; pos 6463847 to 6464493 reverse strand)
gatctgtgagaaggtaaaattaaaaacggtcgcaattcgtttctggattgtatcttgaagtcacgtacccttgtagcatttccatttactatctcgggctgcattatagcatgagtgaaagtgtgcttcttgtactggtagccaagtgccacattgtaattctgtgcattattgatgcaagtagtttttgtcttttgaagtggtaacaattaaggaaacatctaccagttgcaatctgttaacaactaatcacaagtctacggtttgacctttgcttgatttcatgagatgatatttgatgctaatgcatgtcagtgcaaataaggtatgatagttccatttatccttgtttattttgcatatttgcgttcatggcattcattatgcgtgacattgataggacaaagaataatagtacttagatgttgcaactgctgatttactccatcagcacaactatatgtgcaactgcaactaaactgaattagagaagattgttgtgtgcctgctgctgctgatttattctatcaagtacactcgcattctccatgttaacttagtttaacttggaaactgctgtatacacatttaagttatgggcaatattctcaggtacgacttccactcaggttctcaggatacagtgg

SEQ ID NO: 37575 - DNA, 885 bp, Sorghum bicolor
  Intron number 1 from transcript Sb03g026490.1 (locus Sb03g 026490) derived from phytozome v7.0 (chr-ID chromosome_3; pos 53303054 to 53303938 reverse strand)
agctctccttccaggccggcgagcgccacgccttagtgcgtacaccctcctcccctgtctcctgtgtaccgcccccgttcctgctgcttctcttccgcccgccggttggtcgtcggtagggggtccgggcatagggaattcgattggtccccctcctccgcgcgaatttgattgatttgccttcttcgatcttttagatagacaagtatagaggttggatttagccatacatcagtggacaggtatagaagaagaaatgccggttggaacagtctcaaatattagttgtgtgtttattgtcactgtcggtgtacctgtccttcatagtttaaccgtctctcatgagagacattaggtaatccgcgacaagtaaattatgcagtgtaggactccgaaggtgcttgggtatctatttatagtttacccgcaagtgatgcaattttgtgttgcaacactatagtattcattgagacttgaagtagtttagtatgaaggtttattctattagtcttcagacttcagagaaaaataataataattggtatatctacagggaaaaagttatggagaaacatacaggattagctatcacaattaattcctgtgcttcaaaacagcatacatgagcatttatctttcgtagagattcttaaagaatttcaattacttgtccaagaagaatcttcactttaattgtgatcttaccatttagaatttagaacttgatcatgtggtgtctcgcctaccaagtctgagactttcccattcttatgctatcttttgcttcagagttatattgctaagtatgagttaagaaatgtctttgctaaattcaagcttaatgttacaggaaaagctctaccagtggatcttgaggaagcacga

SEQ ID NO: 37576 - DNA, 857 bp, Sorghum bicolor
  Intron number 1 from transcript Sb02g025570.1 (locus Sb02g 025570) derived from phytozome v7.0 (chr-ID chromosome_2; pos 60534953 to 60535809)
aacttccctcttccaaaaattcaggttattgactccacgcacactcttctcttttgaggtccagtttggtttcacaagttaaagtttagttatatcgaatgtttggtcacataaatagagtattaaatatagactatttacgaaactaaaaacactgctaaagaataatttgcgagacgaatcttttgagcctaattagtccatgattggacactagttattaaataaaacgaaaatgttacggtatctgttaaactttggtcttgtttagttcaccccaaaaaccaaaaacttttcaagattcctcatcacattgaatcttgcggcacatgcatggagcactaaatatagacaaaaaaaactaattacacagtttatctgtaaaatcacaagatgaaacttttaagcctagttactccatgattagacaatgtttatcaaataaaaatgaaagtgctacagttccgaaaaccaaaaagttttcgaaactaaacaaggcctttaacaacccaatcaaacacccccattgtttggttgttggcaattagtgttcaattatagactaagtagaattaaaaaattcgtctcacaaattactctctagttgtgtttttagtttcataaatagtctatatttagtactccatacatatgtctaaacattcgatgtgacgaaagttaaactttaccgggagcaaccaaacgtagtgatttccaaaaaaaaagaacaaaaataatgtcttgtactcttgtgcttacatgttagtacatctgaagttctttgcttgttttctgaaatttggccttatttttttatttcagttttcgctggattgtagatttggaactaactacac

SEQ ID NO: 37577 - DNA, 742 bp, Sorghum bicolor
  Intron number 1 from transcript Sb04g028630.1 (locus Sb04g 028630) derived from phytozome v7.0 (chr-ID chromosome_4; pos 58773580 to 58774321 reverse strand)
cttataggtcacggacaaagttccttttgattcaggttggtttctcatacaatttcccctcattgggcattttagcagatttttaggctctactttttagtcctctgaaagatacagaaatatatgatttaagcatcactgaatacaagaatgagttattcttatgttagtcttgtctttgcatcttcctattttctttgtacaagtctgtgaactgtacgctttttcattccggttacattttccttttcatggctatatcctttcaggtatactgccaatccagtcacataagatttcttaatcatctgaacgataaattaattgatgtaattgtaaacattatcgactacaggaatgagttatttcttatgtttttcttgtcttcacatgttcctattttctttgtattcttgacttggattgtatgccttttcatttaggcaacctttatttatatcctttctagcacagaggaaggttaagtcagacaattctgttaaatgaatttagcgtatttttgagttttggtggaatggaaatgacacctgttgggtaaaaataatttcttatatttcttgaaaattcagtatacccatccaatcagtgatccacaaatagccattaccaaattttcgattacttagaaatgttgctatttggtaaagagttttttgagctttagagttcatatagactaaaaaaaaagtcatgtttcaggttcaggcagctcctaaaattt

SEQ ID NO: 37578 - DNA, 815 bp, Sorghum bicolor
  Intron number 2 from transcript Sb05g005270.1 (locus Sb05g 005270) derived from phytozome v7.0 (chr-ID chromosome_5; pos 6915087 to 6915901)
ctccgcgcccctgggtcgtcgacggcggcggcaaggtcagttctttgttggctcgtagctcggtatccccggttctttttatctccatctttgttggggattttatggattggtagaaaactctcttaagcttaccttactgtatggattggattggtagtatatggagctgtctcaaggattggtggggtattttgtagaggaagaattatcttgcagtttgttgtggaactttgatggtttaatcctggaatcatactgcggcatcatctgctaaaaaggaagaatcacaaactgtgttgttttaaatcccgcgttcaggtgttaggagtgaagactggcttctattgccacatagtgattgtttgcttaggttcttggctaagcatagcgttccaagatgatcaatcttttgatatagtgacactaaaatgtagatggtgtgtgatatgctttgtaatatgcagtaactagctggcaacattagcaaaacgatgaagtacaccttgcacctatccagtatgttctgtaggactatacgataccttctgtcttgggagcgtagtttcctattgtccgcgctgtattgtgattatcatcttagcatataggtgtagaaagttaactgttttggtacaagctggagcatctcctacagtgattgaggttaggtatcagggcatttcacaattcagactatttgcttgtattttctgtctcaatttattaagttgtaactgttcaagtaactgcaactctaactgtgtcctgctctagcagtggttcaagctgttgccaatccagaccctgcaatc

SEQ ID NO: 37579 - DNA, 930 bp, Sorghum bicolor
  Intron number 1 from transcript Sb04g005907.1 (locus Sb04g 005907) derived from phytozome v7.0 (chr-ID chromosome_4; pos 5752304 to 5753233 reverse strand)
gggaagaaagtcataattccagaatacacaccagggtatgtcaatttggctatgtgtattatctttgtggcttgtgagatacagactatttgtttctctgctgctgactgtaatcagttaccctggttcacatttgcttatccatgcatatcttccccataggccatagtaatgtcaggtcaatgctataaacaaacgtcatactacccatttcccctctggcaagtgtagggacctacaaattatctgactatggaatgatttccacaacgttttctttgatcctgttttttaatattgagtttggtgattgccagccaattgcaaattggctagttagttaaggcaaacaagtgtgttccttctctatcaatgaaatgagcaccgactcatgcatgttcgctaaaaaaaaaaggcaaacaagtgtatcctactatccatggattaatgacgtttttcattccctgttcttgttgactagattgcagttagcatttaagaggtgtggtctgtggtgtactctagtgtattttaattagaatatgtctcggcagagctgttttttcctgtagaatttctagtacattgctcttttctggaggtatctcaaccacacaccatcaagttatatttgacaaaactaggccaatagcttctaccaccaaatattaaggatagcattgctaaatgaatgcagagccactagggacaaatttgtcaagaaacaaaatctcatgtctatatacggtatttttctaactgaggattgcagaaaattcatgaactacacagttcaattctaaatacaaataaaaagttatgtttaactcggtagccatgaatctagtcctctttcatttttgcaccacttctctaatatatcagatcatgtataaaaatttcttcaggtgggtctacttttggttgctc

SEQ ID NO: 37580 - DNA, 561 bp, Sorghum bicolor; identical to SEQ ID NO: 36181
  Intron number 2 from transcript Sb02g039620.1 (locus Sb02g 039620) derived from phytozome v7.0 (chr-ID chromosome_2; pos 73675758 to 73676318 reverse strand)

SEQ ID NO: 37581 - DNA, 925 bp, Sorghum bicolor
  Intron number 1 from transcript Sb01g001840.1 (locus Sb01g 001840) derived from phytozome v7.0 (chr-ID chromosome_1; pos 1574657 to 1575581)
gaggagcggcttcccaccccgagcttgtaaccgtgagcgccgccacttctccgttcatccccgctcctttgcgcgcgcacgctttcgtgtagatctgggtcgccgcgggccgtttttgttttgcactggcgtagagccgccgctgcaggtgcctctagctcctcggttcttcccccgctttaggtgcctctatctcttctagcaccgttagggtttcctttttgcgcgtagaggcgcggctgattcacggttggctggcgcattcggctagctctagattttggctgtttgttttgccttgtgggtacttgctgtgcttagtacatcccgccagccaatcaccactggccgatccattcctagaaaatccggacagccatgcaggatcgaggacgcacgtgttggcaactagagccttatagggttcaatctcagtagaaagtcgatagattatacatcagtttccagtttgaagcctgtatttgaacttgtgtggtgcagtatcaatttaggccttgtttagttcccaaaaaatgtattttcagattatgcatgaagtattaaatatagacgaaaataaaaactaattgcaccgtttgatcggaattgatgagacgaatcttttgagtcttgttagtacatgattgaataatatttgtcaaatacgaacgaaagtggtactattcctattttgcaaaaaaatttggaactaaacaaggcctgatatatcgaacttgtttataagccatttggacaactaccctaagttttaattggtttattagttactacatcgattgcttatcttttttgaaagaagattgcttatcttttgcctcctatccatcaaatgttgttccaacctgtgcaattcgttcgatgttatataggtgaacgttcctaagaccaagaagacctactgcaa

SEQ ID NO: 37582 - DNA, 534 bp, Sorghum bicolor
  Intron number 1 from transcript Sb01g023120.1 (locus Sb01g 023120) derived from phytozome v7.0 (chr-ID chromosome_1; pos 30542688 to 30543221)
agcctcttcgggcttgggagcaagtatggcctctgtctatttcttgttctattccattttgatccgatcctctggttaattctaggccaactgcgttaatatttctttctgccttcagatcatcatctcttctttttatttttcatctcgttcttttgttagttttcttcagattttgttttgcatgcggtaggtgtggagggctcatttatgatcatctgaaaacaatctgcagaaaacagaggaaaagtgggagattaaatggttttgaccttgagaacaatattgcctgcaagttctcatgcatggctgcactcttgagtttttcttttaaaaaacatatctttatgtttttaaatgtttgtttaccgatttgaattgacgtacattgttatttccgatatttcatcgattattctgtttgtgtattcgcttttccttattcatcagtagttgtatgtatatctgattagacgttgtttcaatgtgctttacttatgaacaggaatcagaagacgttcaggcctaagaaga

SEQ ID NO: 37583 - DNA, 1033 bp, Sorghum bicolor
  Intron number 3 from transcript Sb02g002440.1 (locus Sb02g 002440) derived from phytozome v7.0 (chr-ID chromosome_2; pos 2567493 to 2568525 reverse strand)
gggtacttactgcatgcattcccctgtctcatgctctgcttctgcatgctcccatgtttttcattcttgtggttctagttggtaggaaaactgaatgatggccatatctcatcataaataaaaaacttcagtcgtcaaaccggcagcgtttaattagctcgtcttgtttctacgtagtgctgctgtgatgatgtccaagttcgttccgtatacattttccaattaattattcctccttttgtgaggaaattaaaagttctgttttgttgttttcatccttttataaaagggttattaattattggagtagcaagaggttttttaatcagaagtaggtaggaaaagagatcgaggagctgagagagagggagtagtaatcctgatgattcacacgcatcagctgtagttgtcatcaaattaagggtggtcgtcttttaaggttccagagggcagggaaaagccaatttaaagtgatgcccaagataacattatttggcacttgaaaaagtgctttgcttgcaaaggaaaaaaaatcagatgttgaagggcgcctccgatcagcctcccccttttccatccatccatccatccgttggaaaagagggtgtgaaaaagcagtggcctgtattggcatgcctgcaagaagaatcgtatttgcttttttctttatttcttgtgtttattttgatttatgtttacaaaaaggagcaatcttttttcaccagacagtagaaacaacaccaacaaaatgacagactagcaatgagtagtatatactcctagtacagcagtaatagattcatgacagcagccatgctgcatgctactgaaattaatcatcttattcagaactactgttctcagcatggcctaggagagtagtgtagtagtaaatgttctcgaccaaccctagacaccatttcagtgattgttgcatcgatcgatctttggatgtgtgtaccttaacctgcttgctgcctggcatggtggtgttgcagggcgatcaatcgttccaactgcttccacagcaagg

SEQ ID NO: 37584 - DNA, 968 bp, Sorghum bicolor
  Intron number 1 from transcript Sb02g022390.1 (locus Sb02g 022390) derived from phytozome v7.0 (chr-ID chromosome_2; pos 55419759 to 55420726)
gcccttccggcctcctttccgccgccgccaaagtaagccgtcttcttccctgcctctctgttccttcctcgcgcgcgggcctcgccgagacctctataccttgctgcccttgtggatttatgcgtgcctcatgatggacgtctagtacctttgtagcgttgcccttatatgttgttagatctgtggagcatcacaaggaaatctgcgaatcctagtagtagccatcgggtgctggtatttcttcgtttttagactcaggctagtggatttatttaaagtcctgttcgtttacgtcggaataggccaggaacggcgtggaataattcctgttttgtataaatttgtgaatggattatgcgactaggaatcgttcctgtaaaaacgaacggggcctaaatgtgtatttgtgctgagagtgggatgatcctcttgttagagtttttgtttttatatatatatagattggagaaatctagtgatagggtattttgacattcagtggccactgaatgtgtgcgacaaaactgtgcgttatgtttggattttgacatctgaggagtgcagcgcacaactttgtttgtccaactgatgtgatactgcagtgtctgctcatactttctgtagggcctctgtattcatgccacaattgtacctggatattagcatgttttgttatcttctgttcaaatgcgtgatgcttttgtggggtcctatgatggcatgaatctttgagacctgattattctaatgatgacaactacaagcatatctcctgaggacctatatgctccgatttgagttttcaatttcccttccaactaatattgaacttgtttgtacatcaatgttgagaacttgtttatgatctgatctttagttgccaaggatatgaaattttgtttacctgtgcaatttgtttgacatgttatacaggtgaacgttcctaagaccaagaagacctactgcaa

SEQ ID NO: 37585 - DNA, 664 bp, Sorghum bicolor
  Intron number 1 from transcript Sb01g045886.1 (locus Sb01g 045886) derived from phytozome v7.0 (chr-ID chromosome_1; pos 68974392 to 68975055 reverse strand)
gggacaacacgactactcacatcaagcatactcaggtagtgtcacttccggctggcctcctccttgaatagatagtctgtcatgtgtatgtgctatccccagtgaaattacaagtgcctggtaaagattcacttaacagggattgctattacttagatatgtaacaatgatgtcatttcgatttgtaaatatcaaaatattgtttgtcaaggtaaccagtgcattttgcattgatcacgtacaatataagttgaggttattctaccccttgtgaaagtttcattgtttgttatgggaatcaatacatttgtggcttttgagtatcataactttttcccaccccggtaattagtgaattatttttcctagatgtccttaaatttgaagtcttgttcattgagaggaagccactagcaatgacatttatcttcctaaaaagagcaacaatgtgtatttcagttctattaatctgaaccaatgtgtatccgaaatgataagcctgaatggaattactctggctgttcctccaccataatcggatgcaatcatgtaaagttcttgtattattattttctctttttgcattttctgaatactcctcacatattccatatctgttctcttaccagtcatcacaagaggaagagattggcataggaacact

SEQ ID NO: 37586 - DNA, 541 bp, Sorghum bicolor
  Intron number 1 from transcript Sb04g022360.1 (locus Sb04g 022360) derived from phytozome v7.0 (chr-ID chromosome_4; pos 51854780 to 51855320 reverse strand)
acaagcttatccatcttctgtgtctacctgaagtttgttccacttccctctacacatagtcaaatacaattctcgctgcataagtgatacaaatggtagtgctggtcatgtcatagaacaaaaaatcagttataatgatatctacttttcagaaagggaactgctcttctttgctatcttctgttatgtatttctgtgttataatatattttgaaaaagagagtcctatgccttaaaacaccaatctattgtaacgatatctacttgtcagagacagaactggtctggtgttctatcttttgtatgtatttatgtgttagatcatatccttatatttaatttaaggagagtcaaatatttctttcaagtatatcaactaatccctaatctatatttagtttggttggaggaaacaaagtaataattatgaagttagtcagtattacttgcttgcatatgggtggcgacaaggcatttaagttttgttccttgatgtgtttttacagaagatcttcttggagactactagactgcttgcaac

SEQ ID NO: 37587 - DNA, 384 bp, Sorghum bicolor
  Intron number 3 from transcript Sb03g026670.1 (locus Sb03g 026670) derived from phytozome v7.0 (chr-ID chromosome_3; pos 53518961 to 53519344 reverse strand)
tttctggtaattgcaacaaaattctttttttgtttgatataagccttaaaattggctctgcagacaaaaataaacagcaacctaaaaggaaaatgcatacacaaattcttgcctttacctgagatgctttggttgatacaaggctttgtctctctgaatgccatgatttattattttattcttgcaaatgtctcttcaagtggagggccttccttaatgccttaaaaaaatattggttcaatactctggttgaatacttctgttttattcaacctacttccctggtccaccttttgcagctaagttttttctttatattccaaataaatttctatcatcaataacacatatattgagcatgaatggcattttcctgcagagttc

SEQ ID NO: 37588 - DNA, 911 bp, Sorghum bicolor
  Intron number 1 from transcript Sb05g024370.1 (locus Sb05g 024370) derived from phytozome v7.0 (chr-ID chromosome_5; pos 57560584 to 57561494)
tcactgtctacaaggacagccgccgtgagaatctcatcaccgccacgccgccgccgccgtcgcgttcgtgtgctcgcgtggctgttagattgatcttgtggcttattctactagttgcatgtcgggtcgtgttcggctacatctgttaggccttgtttggatgtagtcatatttacctcaatccacatgggttgaggtggattggagtgaaacttgaactaaattccaccccaatccacaacaacacacatggattaaagtgaaaacgacaacatccaaacaaggccttagtgtaggaaggagtcccccaagtttgtttaaagttaattactcttagttgagtggtcgtcgcatgttcaatttctatctgggaaaccatatgtccaaagttaccaactccgaaagtttgtttgaattattagtacttgtataaaagcatctccaagagttttcaaaactttttttcgaaaggcggcaaaaagcttttgccggatttttattagacgggtaagaaaaacaaaacaaaagagtatacaaattacatacaaacagcccgtaggctccattccacgaaccccaccataaaactaccataagaaatctttttttttgttttggcgacagtatgcatatttagatgttttttcacatgttcagtaaaaaaaggcactctattcgtttgtttgtctactctatacaagtgttttcgggtggtgggtgggggggggggggataacactctgtgtttgtctacatgggggggcagaacatactctgtttattcattgttcatctgtttgtctatactagtgttttcgggtggggggcagatagatcactctctatttattcatcgttcaatgttcatcttcctcattgcccttgcagccgtccaccgccctgctgcgacc

SEQ ID NO: 37589 - DNA, 693 bp, Sorghum bicolor
  Intron number 2 from transcript Sb06g001290.1 (locus Sb06g 001290) derived from phytozome v7.0 (chr-ID chromosome_6; pos 1854564 to 1855256)
gggccccatttcgtctactactgctccccaaacaggtatcggtatccgctagctacgagcactgattcttacagcacttcaactaccagttattgggaaataatgtcgaggatttgcgttgagaatgctttcagtacatgaatcggttttctttttttttttaaatcagttactgtcagttgtgctacatattcattgttttttttttggacggcagctatatattcattcttctagtttgtcagatgaagtgttgtacagaattaacccaacagcttacttcgagtttgagttcctttttaactgcaatgaagaagtgactgtgatgcttgttttaccatgacatgctcacaatcttagtactttggaagggactttgctatatgtgacacaaaattctagaatgctaatcacacgaatttcctgcgattatggaccccataaacatggtatagactctagagtagtggtagataagcactcctcttctcttgattgctttcatccagccttgtaacattcttaaaactgtttggcagtgtgtgaaatggttgagtatttgtgtgcatgctccatttggtttacttccatttgcaatgtgttctgatggtccttatctgtactgccatggcttcatttaatagagaatgatatagtgcactgaccgcttccaaaatctgaacacttttaggc

SEQ ID NO: 37590 - DNA, 963 bp, Sorghum bicolor
  Intron number 2 from transcript Sb03g043710.1 (locus Sb03g 043710) derived from phytozome v7.0 (chr-ID chromosome_3; pos 70984274 to 70985236 reverse strand)
tcaccgagcttcagatcggcgtcaaggtgtgtgctctgtaacctcctaaccgggtcaactctctctgcccgtttaattgtttgttacccttgcggactctggcggatctggtattagctggttagttcatttactgcctgcaaaaaaggtctgcagcctccgattcgtgggcgtcagttgaaatatgttaaggttgcagacttcagaaaggggtcggcttaggatagcgagctacgcggatctgcaactgcaaaatcggttccttttctcacccctttaacgcaacattgtggagtcatccaatgcacttagtttcacttgatttttattttgtgtcattcaaagatgaatactggaaacgattgcggtactgttccttgttcacttctcgttaaattcttgtagtcgatgctcaaacagtcaaactagaagaggtctaaaatctccagctagcctgtgttgaagatggtttccctccctattgctacctttggagaagggactttattggactagtaccttgtatcaagattctggaccaggctgcgcgatgacttgtggcctccagtaacggcctcacagtcagacctctttagggataaccattgtaatgttgctgaagttctctgtttggggtcttattcaaagggtatatcctttgttttggtccttttggattatggctaccacttcaaagttcaaacagaaaactaagaatcattgggtcatggtaataataagtagaatatatggttacaatccgacgtgtcagttagggagtgtgatattggagaattgcgtgtctccaacttctgcttattcttataaaattacggtgttatcaaatatttgatttatctgagtgtagttttcttgttacattttgaaaggagaggtgcccttttgattctgtgtggcattgattttcccttgctcatgttcctttcagtacaagcctgagtc

SEQ ID NO: 37591 - DNA, 518 bp, Sorghum bicolor
  Intron number 2 from transcript Sb02g041870.1 (locus Sb02g 041870) derived from phytozome v7.0 (chr-ID chromosome_2; pos 75618817 to 75619334)
ctcacggtaatgctcatcgacttctgtacaagtttttggttgacctggatctaaattctcagtataagtttatggctctaggatttggattctttcctttgtaaacatgatattctgattgacttgaatccctaggacaatttttgtatatgtatatttgattgatctggatcttagcattgagttcatgtttttttctctgatttcttaacaagtgcacatttatcagcattagtagcactggtatactgctaaaaagatgcactcttgccatcatcagctctgtcagtcatggtactgaccacagacagaaagtgattacttgccatcattagctctactgtttttcttctctgggcagaaaagtagaatgtgttatagtaccaccttcttttttaaaagggacgttatcccaacttttgaagcctgtgttttggttttggttttcgtttccatgggaactaatccatcctcctcctccaggttttcagctgcttcggccagtacttctgcctgca

SEQ ID NO: 37592 - DNA, 648 bp, Sorghum bicolor
  Intron number 1 from transcript Sb01g020560.1 (locus Sb01g 020560) derived from phytozome v7.0 (chr-ID chromosome_1; pos 23281971 to 23282618)
aacggcaaggacaccggtggcggtggcaccaagccgtggcgaagccagaagattatagaagcccagacaatttttattaaaaaaaatatttaattataaaattacataattttatataaatataaagaaaatttcttttgcatcttggcgagaagtgcggccggccgcccggggtggtcgggcggtggctccgccagtggcaccaagtaccgtggcgagcaactccaacagttttgtaaattttgtttggcaaatgttgttatttgccaactcctaaaacgatatgggtagggaacaaaaaggacatctccaagtgtttgacatttttgacttggcaaaaacaaaattctattggttctgaagatcaacgaagaagcatcaagttgtcagcttgctataaaagcacacgcatgcataatgccaagcctattctaggtgtgcataaatgccaaaaaaggagaagaatttaccaacttgctataaatgtcaaactcaattgccaaactgttggataggagattttgagagttttggcaaaaaataaaaatgtcaaatttatttgcaaaactgttggagttgctctaagcgtccgtggggcaagtttgctgccgagatccgtgacccggagcgtggcggcgcccgggtttg

SEQ ID NO: 37593 - DNA, 709 bp, Sorghum bicolor
  Intron number 2 from transcript Sb0011s003320.1 (locus Sb0 011s003320) derived from phytozome v7.0 (chr-ID super_11; pos 328759 to 329467)
aggtatgtatgcataatgcccttgtgttatgtttccttcgagatgtagtgacgatcaaatgttgaaaataaggggatgtgctttcggatgtttgattacttgataaactacatgctgcttcaaatgagcgtggatttggaacttcattccaatcaggcttttggatatgtcgaactcgctatcataaattcttggatagttgaggccctctctggtgggcttgggcttctaagaaaacagagaagccagacaaatccacccaaaacggcttcggcttcactattttttggcttggttttggttttagaagccattcttgtgtgtactcgtttggtaaactgttggagaagtcccaacaaaagccccgatgctggtgcatgtcgttggcattggacagtagctctagttggcactcacaacgcagactctattatagtttctatccctatttattatgctgccacatcagcattttgatgacgtggaagacaattaaatgaagaaagagaaggaaaccgagtcttatttatgacttgtagagtattatgtaaatgtcccagtccatgctcatgtgttatcatctgtcaaccacttaccacatgtatacacaagtccatatctgatgtgtgaaagacaaggtcattaagtcctaacatgttgtactgaaaatgcaggttattgaagcattagcacaagctggtcttgagtc

SEQ ID NO: 37594 - DNA, 524 bp, Sorghum bicolor
  Intron number 1 from transcript Sb09g030170.1 (locus Sb09g 030170) derived from phytozome v7.0 (chr-ID chromosome_9; pos 58791762 to 58792285 reverse strand)
cctccggtgagctttttccttcgcttccttctgtgcattcatgctcttctggcttctgcaccgaaatggaatggaattgcatccacagatctcgtatccttgtctccgctttgcttgcgtgcaaatccaatatgctgctccttttctggcagttctttgcggcatgtttatctgattttggatcattacagttatggtactgatcattaccgtttcttctcttacttgttttggaagtaaaagctctgatcctgtgattacatgagaaacatgagaaagattgcatctttatagttggtagtatgttgcagtgaattaatgtggacttaacacgatgtgcatcacacaatgcagctgatagggactgcttacctgcattatcgattgtgctctgaccacgacggggataaccgcatattctttgaatagtggtcctgattgttttgatgtttacaagtgtataatcgaaaatggaactttttctcgattgcacaatgactgactgaccatattgcaggcttggg

SEQ ID NO: 37595 - DNA, 903 bp, Sorghum bicolor
  Intron number 1 from transcript Sb09g022090.1 (locus Sb09g 022090) derived from phytozome v7.0 (chr-ID chromosome_9; pos 51747293 to 51748195)
acgggtggtccagctccttcgtcggcatcgtccaggtagatcacctatcacagccttctctcctctcactctttcgtctcttaaaagtagaagtgaagcaaaggtcctttttttctcaagaaattaagcaacacatttgctgccctgtcgctgaacaacaaaatgtgttgtctcggacgatctgttcatggctatggctcaacaaagtcaaccctgcatcggcacgttaacgccagacgccatgagaaaacgactggaactggaaacaatatgtcttggaagcacgcggaactgcaatgatgggagacggtcggtctgccagcttcacactacagtcctgcgcttgtcgtgtgccacgcagagcagctccaagttaccaaaatgtcagcagaacacgataaatttgagagtggaaactgatgtttgcctttgctgcttttcacgggcgatagcaatatatactttgcttgtagtattacacttcagaatacaaatgcataggtaaatcaaggccttttttttttggcacaatccagaattatgaagtgaagggtcagcaacttgattggcaccaaagtttcctaatacagataggattcagattcgatgattgggcttatggaaatgtccatgctattggggtcgagttttacccggtgccggtgtgaccaggaacaggaagattgtactaccaaaaaaaaaatcaataatagaaacagtcaactaaaagctgcaatgtatgccctgtagctcaatatacgttttaatttgctgaagactcaaatcattaagcccaaatgcccaatgcattgactatagccctgaacaagcacagctatcttgctattaagcagaaattgactgaggttaaattttcttaccatttctgcagtcgtcgttttt

SEQ ID NO: 37596 - DNA, 855 bp, Sorghum bicolor
  Intron number 1 from transcript Sb09g022270.1 (locus Sb09g 022270) derived from phytozome v7.0 (chr-ID chromosome_9; pos 51967737 to 51968591)
gaggacgtgagttgatccgccttccccagcttctagcttgatccttctaagaaaaacacgggttttctgcttttgtttcgtatcgcaattatttcttcttcttcggcgagaagaatctaacgaacacctcatggtcacgtcacggagcctacatcctggttgaatctctatttactgttctggcacagcttatttcttgtgcttgtgatttgatgatagtagatatggattgtgattcgagctctttcggatatgtttctttggttattatatgcatcaaatcattgttttgcactgttgatgttgagcggttttccattcctttttcatttctcccttgtgaaaactagcaacatgctgtgatgttcttgatgaacagaattgctcagcacttcaaagcatgaaattggaacatcaaaatatatcaggaatctctagttttacccgatcccgtataaattttcaaagttgctactcgataagattccgagaggttttgtcttctttcgaaaggatgccatatgcatcagtgtaacctgcagaaagattctgtttatctggtcaccactcttttgctaaaataattctattgttcacggttggaattttgccaggtaaagcacagtacgtgctagcatcttggttcctgaacatacatgctttggtgcagtcttgtcgagcgggaggaaaataaattcttgctatgtgtcctatatatgtttaacttcctgagtttattggctgcacttagtagtttttagttatgtactaaattttgggtgtgctctacctttaaactcagagtacatgaaccttgcaggtttgcaggcgatacaagcagtactaccagcagct

SEQ ID NO: 37597 - DNA, 609 bp, Sorghum bicolor
  Intron number 1 from transcript Sb08g014305.1 (locus Sb08g 014305) derived from phytozome v7.0 (chr-ID chromosome_8; pos 37858175 to 37858783)
gagaaggtattataactcagtttaatccagatcacattatcactgatccagggcttcgtataccaattgatcggttttctatcgatattagatctgaggttagaagggctttcatagataagggtccaactcaaccaatgggttacaatttccctaaaacaaataagaaaaggtgctttcagaaaagttggttcaagcaacattcttgtcttgaatacagtgtggagaaggatagggcctattgtttttattgttatcttttcaagcatgatcgaatggatgacaaatttggatatgatgtctttacaacattggggtttaataattggaagaatgcatatttgtcgcttccaaaacatgatggaataatccacaatcagtgtaggacagcatatgaagatttcaaaaatcaaagaacaagtgtgaaacataaggttgacagacatacaaaagatgcactagtcaaatatgaaactcggttggatacatcattgggtattgtgagtttgctcacattgcaaggtgaaccattccgtggacatgatgagtcccttgtttctttgaataagggaaattttctagagtttcttgattggtacaaagaaagga

SEQ ID NO: 37598 - DNA, 1038 bp, Sorghum bicolor
  Intron number 3 from transcript Sb10g007030.1 (locus Sb10g 007030) derived from phytozome v7.0 (chr-ID chromosome_10; pos 6841042 to 6842079)
gtctgagttccgtgaaggtgatatcccttctggtgcccttgctattgattttaatttctcagctcacaatttgaagtaggtttcatgtcggtcaaaaagagtgcttaactagttaaaataacttttaccatttcttgtggagctaatctaggaatattgtgtcttctcatagttcaagcacaacacatgctgaacatctggaatggaacacaaatgtgcacttataaattagaatatggccatttaatgctcttttgctaatcaagcttgcacatcttccttctaaagttcaatctttactcattgcctttgctctcgcatttggaaggtctggccaaacttggttagtgtagtatacaatacgttgatgacaaaggggtgttcccctccgtaggttttggattgctactgcttgttcagaggggagatttgaaggttgacatccttttaacactactgaactagtgattagtgaaagtaaacgaataccaatatatggtgaggagatatgtaattcaaacacacagttaggtggaaaagtgcaaaacgatttggctagtagttagtacaccaattgtttctgggtatattcgagatgtaattctcaaactctacctatgtggcctttgaagttcaccctgtactgggaataagaaactgaaaaaatttcttatacatgttaaatcaaatgaagtttcgttgctatccacaccaagcacagcttgttttttccgtatcttgtttggaggttgaatttcaaatggtcttacaacatatagtgcatcttgcatattttttaaggattttctcatgttgatttgatatccaaactggaagtctcttcacctaattctgtttttaaattgcaatatgcatctctgcttggatttctactgcttgtttaaatcatgttcagcttgctcatgttgaaaaattgtctgtttccccatattttgatatttctgaccccacaaaatgcttacatgttactgaatttagacaggtgtaacattggaaagtgatccctcaaaggggact

SEQ ID NO: 37599 - DNA, 397 bp, Sorghum bicolor
  Intron number 3 from transcript Sb10g026230.1 (locus Sb10g 026230) derived from phytozome v7.0 (chr-ID chromosome_10; pos 55634751 to 55635147 reverse strand)
aatttttcacaggagactcctatatagtactgaaggtactcaactttgctcatttagtaaatgtgtcaattcctatatttagttctatggaaaaaaaatgttgtgagctgcctgatgtcaggagtgcaatccattgcttacatcttttctccaaagatcactacatctttacttccccagttcacattcttatcaaatcatgcatccttcatacttgaagggattagttgtttctgatgctcctgatcatttcattatgctacaataaaatgtttatattgtgcagatactcagattacagttatatgctcatattcatatcgatcaggagtgaaatcctgattgttattaatagttattttgttctttgagtttgaacagacaactgcccttaaga

SEQ ID NO: 37600 - DNA, 997 bp, Sorghum bicolor
  Intron number 1 from transcript Sb08g019196.1 (locus Sb08g 019196) derived from phytozome v7.0 (chr-ID chromosome_8; pos 49847281 to 49848277 reverse strand)
ggatcgtctcctcgagatcgccgaccgcgtctacggtacggtctcctcgccccgcgcctgctcttcgattgggggaatttaggggtgtatgtgtgtgtgtgtgtgtgtgcaatcggtggttctattgattttagcaccggaaatgcagctgcattctgtaatttcacccagtgcgggaacaaatttctctgcatattgttttcaggctttcagctaatgaacatgtcttccttgtgcatgctgcgttagcttacggtgccagcatgattttgcgggcccattctagtttcgtcagagctatgcttctcaaaaagcaagggtttgttctcagtgttcgactgttgctgtaattttcctttgtttattatactgcacttttgatagtaacgttgctagcaaccttgttggcttgtgcaggtaggatagattctgaagctcctatgttatgcagatcacttttgtgctaagtaatgttatgtatttatggtcgattagtgtaacctccttgtttgaatatagatgagaagctgtggcatttagtctatgcctaatatgataatgcttgctcatcaacaacaacaatgcgatcatgttgaatgggaagtgcattttggtctaaaatgctgctaaaatgtttgtaagacatgaggcttcacatgactagagaaccagagatactgattggcatctttgtgttgtattcaattgtttgctgacgagttttcagtagtgcagttaggtgacttcttagtagtagtagtaggactaacaggataactgtcatgcgtttatgctctgagtatgtaggaccaaggctatcatgttttgatctgatacttccatagtcccgtatcagaaaattttcaactggtggcttctagccttgcacatactgctatgatgtttacagacattgtcaaattaagtctgacattaatgtgcaatgattggcctgtttgtgcttgcagtatttgattgttgcttctcgacagaaacc

SEQ ID NO: 37601 - DNA, 691 bp, Sorghum bicolor
  Intron number 4 from transcript Sb07g020990.2 (locus Sb07g 020990) derived from phytozome v7.0 (chr-ID chromosome_7; pos 54561157 to 54561847 reverse strand)
actccccagacaaagcttgcaaccttgcaaagcaggttcgaattgcatctacttttctactacatacattcattttactgtgtttagggtgagggttgtttgtgcatttgagcctggaaattataggatccttgtcctaaattgtttagtatatcaggagcgttttattgcttctcatatggcaaacttttgccctgataggaccgataggttcatgttacaatttgactactagatgtcttaaccctgtgtatgagatcagatagtttctgattagtaatgctacctttgatatgatgatagtttcttattggtaatgctactactgatatgatgagcttctgatccaacatgtttgcacatatctaaacatgcttgcctctagtagttttgtgccattctgccatgttattgctagactcttgcttgttattatccacctcgttaaaaggattcttcatgttctattgaattgtggtgatacttgtaatgtctagcacctacattatcaagacaataatgatgccatgtgttttactggagtatctaaattaactaatctgtggtaactgggaagcatttgagttggttgcctgatcgttttactttttatttttttatttttccttagttcttatgccattgaagctttgataattgataatgattggctaatctttgcaggcgtttg

SEQ ID NO: 37602 - DNA, 960 bp, Sorghum bicolor
  Intron number 1 from transcript Sb08g016960.1 (locus Sb08g 016960) derived from phytozome v7.0 (chr-ID chromosome_8; pos 45232341 to 45233300 reverse strand)
cgtcgccgctgccaccgccttcacccatccactcggtcagctacctgctcttcctctcatctgttgcttgttattttgggtaatttgctattcctgagctgcctcaggtttccattggggaaggacagcaaggaaattggcatgtatgattcgggtgctaattctggatttcgttgtagttccgccagtcagaaattctcgcctcaactctctgcttagggaattccttgctagttaagatgaggccggctagatagtgtagcagcgtatatactaataattgggaaaaatgtgcctaataaatgcaactaggtattttccgacaggaatgaaatgccaagaaaccatgattttgggtttcagttgtagttcaggtataacttcagcggcataaccggctgtgctgaaagagtgctgggtatggaatggttttgctttatggtgaagcatatatgattatgatcattattggcaggctgatgccttttttcttccagtagaaaaaagatttatatgctgctggattcagccattcaaaacatttaatatgggttgatccccccttttcaagaaggcgacaaatagtcgcgttatctggactggagtatgtaacagtcgtatgcaaaacagcaaccacatatggatgaggagaatgttatactaaatgtacaatgtctgagtaatgtcaaggatggcgcacaggaaaaattgcacaatcttcatcctaaatcagttggttattaaattcgaatcgcacattctatgattttacagggtatttggtaactggtacccggaccaagaattgagtacataggtctaaattgacttgtataacaattattaactgtacatttctgtgcttctaattttattacaaaattgaaaatacactatatattgtttgtccagaaaataagttactctttatataggtctaccaccattttcgtcctgcag

SEQ ID NO: 37603 - DNA, 932 bp, Sorghum bicolor
  Intron number 2 from transcript Sb10g004420.3 (locus Sb10g 004420) derived from phytozome v7.0 (chr-ID chromosome_10; pos 3909990 to 3910921)
ccgcccggccgtacgagcccgaggtcgtcgtcaaggtatacacaattagtcaattacacatccaccccgtccgtccttgcagcatcggagcctgagcaagctcaattcacttcttcttcttcagtttatgggatactagccgttcctctttgtttggttgtttcctctccaatccctgaatcaagtaattgactgttagttactaaaattgactcatgtcgcatggttccagcggtaggcgagatgggttacatcatacaattgattggtggttcagttagacagtgatatgttggaaattaatgaggaataagacaggaatgcagatagggtggtttttggttttgctgctcagacactggttatatgtggttgcaactaaatgggaaattgggggcctaattttgcggtagccagtaagctctggttacagtatagattggttcaagacttcgaattatagaagttcaattgttgcttttttggtactgaataacaaactggttaatttgtgctaacaatttccagttactctgaaaaagaaaccaatatttgttttatttctgtagaatcaggaatgagaatctgatacctcaggtcttaaacaatggactgcactgaagactgaagaaaagtcaaaaataccaagtagtactagattagtctcattgcatattaataatgaaatctgatggggatgttgctggctggcactgcatttagcatgctgacttttggggctacatttcctaaccatattgttctactttacaagataacaaaatcgcttcaataatcaatagtatgcatttatgatttgcactatctgtcatggcaaaacttcttttccgtagatctgagcatgatgtttaccacaaaatatgtcctaaaccacgaacttcttcaacttctgttttgtgcagagcttggtg

SEQ ID NO: 37604 - DNA, 646 bp, Sorghum bicolor
  Intron number 1 from transcript Sb09g021280.1 (locus Sb09g 021280) derived from phytozome v7.0 (chr-ID chromosome_9; pos 50779525 to 50780170)
ctggtgtgggcaaggcaaaagccggcgctggcaaggtttgaggaattcttgtgcctcttgtttgatctatgtttaattagaccgcaatatagcatgttttgttaaggaacagttgttccaagtgattcttagtcatttattagatcgcatcaatatacactgtatctaagatacataaaaactgaataattctaatcatgatactgttatatattggggacagcactcactgtttgttcagtatctatagtcttctttaccatttgactgggaatagttcaagaaattttcttgtagcaggaaaccatgccattctgtatgtcttatcaataaaattcttatatttgtatttatacttattagcatcctggcaaaagaaattgagttgttaatgttctctaagacatcttatagttaaaaattaaatggtctgtcacgcacaagcgcaattgtctatgctattgcattttggcagctacatcatgtccttcaacttcaattatcaaattttatagtatacctcaaagtctaggttagttctgtgtttatgtcggaggttgttagttaggcatctctatcattaatattggttcctttccatattgaaacaggtttcagaagtgagctcaattttaggtagggctag

SEQ ID NO: 37605 - DNA, 769 bp, Sorghum bicolor
  Intron number 3 from transcript Sb0877s002010.1 (locus Sb0 877s002010) derived from phytozome v7.0 (chr-ID super_877; pos 2938 to 3706 reverse strand)
gtcaggtaaaattcatgcaaattcttacttttgttccttctatgcatacatgtacaacttagatggctgagataaagatgtataggcactgaacgtttcttgtggcgtacctttgcacctcatggttaccacccatcttctgagctgacgcttcattgaatctgcactggtgcaaaaaaaaaaaaaattaaaaacttctatacttcattaccacccatctttggcattggtgattatttgactggtgcgcagaaggctgtagtaccactgaaaaatacccaacatggagatataacatcagtaattgactactcatttgaaacaggtggaccatataatttagcctggcttttctttctacattgattcctagtagactgcaaaagaacaacttttataatggttgtttgttttgttctttggttctaagacttagacttcactgagtgaagaacagtttttataacaatgatcttacgttccagatcttccatagctttcctgccatcttccatagctttcctgccctaactgtattaatttgtcttgctgctgcgttcataccttttataatggttattttgctttgatatgtgttagtatcaacgagaaaatatgctagaattacatgtacctttgatatttaccatagtgggagtgggggcagaggccgattattctattttagcagtaatactttctgctacttcaatgacatcttcgttatcctgaaggctgaagtttctgcgcctgcgaatacagaagaagc

SEQ ID NO: 37606 - DNA, 518 bp, Sorghum bicolor
  Intron number 2 from transcript Sb10g003170.1 (locus Sb10g 003170) derived from phytozome v7.0 (chr-ID chromosome_10; pos 2814045 to 2814562)
tggccactcgacagtacgactggacgcgcaagcaggtatgctccaattgcctcagcttttggtttcaacttatcttcctttttgattttggataagcaacccaccaatttgagtcaacccgtcgggcatggggagagaagagccgatatttgcagttgcagcgtagctagaaattcatcttggtgaaaataaaatgttgtagcaatttggacacgcagttttcaactggctgcattgttgcttctttgtaataagctgaaccaggaaggatagttactgcttcctcactctggccatgcaagagatgccatgtattatggcccatgggttctatccattcggatcctctgtgatctttcctgcttcatatatcttgcctgctgtatgtttttgtaaattttgcgacaagcctgctgattctttgtatccatctaatgtgcttacactaacttgtttgatgtaatttaatgctatgctatgcaggtgttctcattatctgtgtgggagataggaaccct

SEQ ID NO: 37607 - DNA, 858 bp, Sorghum bicolor
  Intron number 1 from transcript Sb07g023850.1 (locus Sb07g 023850) derived from phytozome v7.0 (chr-ID chromosome_7; pos 58820823 to 58821680)
tggccagtggcctggcccgatcccttcgctgctcggtaagcagcccccccttggccctcgctgctcggacgaacggatcggttccccccctctcgcgctgctgaatcgcagccaccacctctgttgttccgaatccaatccgctcgctcgctcgctcgccgccggctggctctcgtcgatttattcttccgttttgtttgttttgattgcttgctgctgcgtcgtgcaaggaacatgatgtactaactcgtgcgtgtaccagtttaggattcattcttcgacacgtttgggattggttcggttggggatggcgcgtcgcctgattagccccgcagcggcgtgccgaggctgcggtttcgttaggcccggctttctggctgccttctcctccttccatgtgattccactgccccctatctaaactcttgtcagcagtcactgccttcccctctctgtgtctccattcttcttcttccagtcgtccagaattttcgattctagttaccaggtcaatctacttattagaccaagttagcatgtatactaatatgaacttcgataggcactgcaattatcatagaccagctgttttttgcattgtacattacattcatgttagattatatattgccggctttgctgaccgtggattcttcctccatgtattacgctctttctagtgctattactggtacatgcttcttctgacataaacagataaactgcttattgtcttgtagttgtcgcgactaagtgttatatactgcaaaagccacttcctgtagtcagtgattgcctagtgacctccttcactttttggcagtatcgaaccttgccatcgtgctcaccgaagaggac

SEQ ID NO: 37608 - DNA, 792 bp, Sorghum bicolor
  Intron number 2 from transcript Sb10g009520.2 (locus Sb10g 009520) derived from phytozome v7.0 (chr-ID chromosome_10; pos 10744568 to 10745359)
ttgtccaaggtatttggggctctctctctggtttatcccatcgacaatgtattcaatatattccggttcttaactgtaaagtgtaatcgattgtttgtaaattgtgccatatttgagtgttctatgttggttgcattgatttcagtttcgtaattaatttacttccacggttacgttacatggatggattgctagcaaaatattagtagttatgttttatccactcccttatggtgctcataagtcatttgcctgaggtggcattgtgactggttttctttgatgatttccatgtaaattgtaaattatgtctttgaatgtctcacaaaatgttatttgattgcctcaattctgtatacacatttgatttgtcttccagaatgaaagtctcagattcaacatctgcagatttggatttggaatatttcacctcttcccttttccagtttcttcgtatttactctcccattttggctgctgttttctgaaatccgatggctgcattgtcaactgttgactgcatttcaaataaaattcgacctatacttgcctgggtgataaattgattgctttcaaggtgataaagacaacgtaagatatcgagtgttcatattgagttttgtggattttgtgtgaagatgacttttaacagcttccatgacccattgttatatattttccatttcaaaacttcagttataattgacactgatttattggttaattaatctgacatgcataacatgaatttttgtaggctaaggcatcgtcgagtggagcttctaccgctac

SEQ ID NO: 37609 - DNA, 782 bp, Sorghum bicolor
  Intron number 1 from transcript Sb10g021970.1 (locus Sb10g 021970) derived from phytozome v7.0 (chr-ID chromosome_10; pos 48900515 to 48901296 reverse strand)
tgcccgcctcaacctccacctcgccctcctcgctggtgcgtgctgcttctctcttcttattattcttggcgtaccacttgtgtagttgtgtttgtggtcagtttggtggctcttgctactccatactggaaaaattattggtgccgttcgcttactcaaagcgagagacggctgatccgggtagtttttacttggattgaattgttcgtactacatcttttgtggtcagtttggtagacggctgatcctggtagtttttacttggattgaattgtaaattggggtgctttcaacttgtgaattgggggagctttcaactttaatataatatacaatgttttttccatgaaacgaaataattgttcaaaaaataataataaattgcaaagttatattactgttaaagcatttcaggaaccttgaaatctgggtttagcatatgttctggcatttcaggaatcttgaaccagaatttaggatttatgagtgtagtttcgttccctggccaagaaggttgaggaactttgcttcattggtttctcaatactcataacacaagcttggggtgaactgaagcacaaatatcctaggtaaactatcctgatatttgagtttgagtctatgtgtttggagatcacccttgttttgagggaatagcataaatatacctggacaatgcagaagacctaaacttctgagtaatagcttgatttagcctcagtttatttgtttgtttcctttgagcaggggagagaggagggtgcataatagttgattcaaca

SEQ ID NO: 37610 - DNA, 670 bp, Sorghum bicolor
  Intron number 1 from transcript Sb09g024140.1 (locus Sb09g 024140) derived from phytozome v7.0 (chr-ID chromosome_9; pos 53706063 to 53706732)
cggaagcgaccactccggcacaggaagcaacgacggtgagtcccgtcactttcctgacgcgtttgatagttgacacttaggaagttaggatcttctgtcgtcccgtcactttccatatgttgtcgccgtcgtagttgacacttagctcacatcttgactcggcaaaggccttgtttagttcaaacaaaaaccaaaatcaaaaccttttcaagattcctcgtcatatcgaatcttgtggcatatgtatagagtattaaatatagataaaaataaaaactaattacacagtttgcttgtaaatcacacgataaatcttataagcctagctagttactctataattagacaatgtttgtcaaataaaaacaaaaatgctataatactaaaaatcaaaaagttttcggaactaaacaaggccaaatttgacgatgggatttctccatcttctccaaacatgaccacatgagatgctataccattttgagagagtcgtgacgtctttataaaggctttgaaaaacgttttgctttttagtagcagagttgaattccagagtttggacggtgactaatcttggcaaagtctgaaatgtcttctattctgaattaccgtgcacccgtgtgaactctgtgcagggagtaatcacacggtcaggacagctcttctcgtg

SEQ ID NO: 37611 - DNA, 788 bp, Sorghum bicolor
  Intron number 1 from transcript Sb07g025030.1 (locus Sb07g 025030) derived from phytozome v7.0 (chr-ID chromosome_7; pos 60020392 to 60021179)
cgtcatcctcggcgccgattccaggaccagcactggtaacgccctttggctcctatcgatctgtgtatgccgcaggagatcctgccgctggtaggggtagatttggcgccgggatggcgttgcgggcctaggttttcgcttggatcgttggaaattgaggggcctggctggcgatgtcggcggctgtgatgtgtgctgcctttctactttgactattaggttcatgattagtttgcactggcgagtttgggtgaattggtctatttgtttcactgctagtcacttagttgcgactcgcgagattagctgaatttgggtactagcagcaccctatgttaaggggaagttggctctcatctgcagtctgtttaattattcaggtcattgatggatgtgtttcggcctttatttctgaagaaaaagttataggatagtcatcctctgagctgtgcactgtattgcatatgattaaacaaaaactaacatccattgttacagttattattattattttgccatgttaactgtgatcacagttcttatggaaatgttaaatgtataatggctcggatgggattatgtgctccctttggttcaaggatttaatccttttgattaaaacatgcctccttaagttcgtgaagactgaagagtcctactcgtactggtctagaaaaatgattgtgctcctatttccaccaaagagatttcattattaagctgatatattctttactttttatttggccaagtgctaatatttctttgttgtttgctccaactcagga

SEQ ID NO: 37612 - DNA, 862 bp, Sorghum bicolor
  Intron number 1 from transcript Sb09g025490.1 (locus Sb09g 025490) derived from phytozome v7.0 (chr-ID chromosome_9; pos 54926144 to 54927005)
tcaagggactcatcgctgtaagccattaagggttcttctttcactgatacacattttattgatcttgatgactattctctatagttttcttaggataatggaatttatacctgtctatctaaccgtaaaaggtaagctctcaaaaagcaaaagtaaaaaacacgacgttagtctaatcagtatagtagtctatcgaaaatgctaaaataagaatacgtacgctacaaccttaaagccttgttgttcagtcaaaaaaccttaagaccttgtttagttcttaaaaaattttgctaaatttttcaaattccttgcgacacatatatatatatggagtattaaatataagtaaaagaaataactaattgcacagtttacttgtaatttgcgagacgaattttttaaatctaattagtttatgattggacaatatttgttaaaatacaaatgaaagtgttacagtacttattatgcaaatttttttgaaactaaacaaggcctaagcccggcccgccacataccgcccgtacttatccccttcatgctctctctctctgtctgcggtggtgaccgacggcctccttgcatccaccacactgatatggctacctcggtttgtcacagtttttcttttggataataatggtacagcacaatatggctacctcagattgtcgttttcttttggataatgatacaattttacagaagacttccaataaacttcgttcactgaccccggaaaaaaaatcacagaattaacgacagattgagtagtaagcacggtactattcgtcgctaacacacattgatgcaaatttattatgcaggacctcttcctagcaggcactgatacaattgccaa

SEQ ID NO: 37613 - DNA, 596 bp, Sorghum bicolor
  Intron number 1 from transcript Sb10g025440.1 (locus Sb10g 025440) derived from phytozome v7.0 (chr-ID chromosome_10; pos 54734858 to 54735453 reverse strand)
cgcactcgggaggcgaggagctcgacctcttcgtcggaacccaaactctctctctctctcgtctcccttcctctcacggtcttgctgtgatgaagctactaataaggttgcccggtggttctctgtgtggattttctgattgagtttgggggtggaatcgtatgcctggatggtttatccggcatgctagtacgcatgtggaaaatttggggatgatgttggctagttcattcaaaatggattttcaaacaaaccgagttaattatgtaggtgtagcaacggagctgcaaatttaagtggctccttgtcaaaaaaaaaaagtgtagaattggctcatgaactgaaggtgctatcccttgacttgcttttcgttcttaattgtgtcgcctctctggtgaccaaggttattgatagggaagctgtttttgcaattttctgcttagatttagctgtagctcctttttctttttgagtttataataattaatcttcctatcgcaacgtcaggttgttatcatgccctattttgttttccttgtctggttctaaattctaatctaatgactatatatcttgtttttttgcccagacgcatt

SEQ ID NO: 37614 - DNA, 1034 bp, Sorghum bicolor
  Intron number 1 from transcript Sb10g024210.1 (locus Sb10g 024210) derived from phytozome v7.0 (chr-ID chromosome_10; pos 53183624 to 53184657)
gatacctctccgcgctatcgccgatccaggtcaggccccgcgtgtattatggacttatgtttagtatatgtgctagattggagtgcgacagagtgattccttaagattggttttggtggtttctaaaaaaaaataattttggatcgaaattgaggcatgcttcttccaacatatacatattatggatctcggatataacacacatatataagaataagagataataatattgtgatatattcctgaaatggccaaaaatctagagtgtcaggaaatgatgcttaatgtctggtttcagtttcaagtgcatttcaactttcaggcaatcaataaaggtgtcaggtgattgcttcattatgagaacatgagaaggctttatatttattaccagttctgtagcattattttttatgaaattcttgccaatcattttggttaaggaatgtataagaagatgtatttttgtgaatatttttacagtaactttggtacattttaccgactatgagagtctatgaccgctagggtttgtaggaaatggcgcatttgatgatttgattaacagttaaaattttgattgttcaagtgcttattattgacacatggggtagaacttgtaaaatatcaaaagtttttctcaatatgtgattcccaatgtttttttgtttctcgaaaaaatgtgcttcccaatgttgcatgctaactgtaaggctagtctcaatgcatgtttcatgagagtgtcatgcacattaaatagggtgccacataagcaaaattgttgacttggcagggtcattaaatgaagaagtttcatcagatgagagaggagtttcatccccatgaaattcatgtggcttggttaactagtttatagtcttggtaactatgtcatgaaactatgcattgagactggcctaactgttccatatcaaaacgtgctctttcttcattgcaacttttacttcttatttagcaactcttagacatatgtttatgtcattttgcagtttgtacgcagcaatagtcgccgtttt

SEQ ID NO: 37615 - DNA, 1000 bp, Sorghum bicolor
  Intron number 3 from transcript Sb09g022330.1 (locus Sb09g 022330) derived from phytozome v7.0 (chr-ID chromosome_9; pos 52013179 to 52014178)
tggaggagggtatcgtccaccaagtggccctgcaggtaattaatgttgatgccaattgtcgccacgatctgcagtattttgtttgagtttcgaattgatctatctaactatggatgcacaattgcacacggtacctgattgatgagtgcagataacttggtatattattgtgcaagtaggttgttatatgaggttacatttcaacctgaaccatggggacgcaggctccacatgtttttggtcattgggtcaacccaaaacttgctaaaatgaactagaattgaatgccatctcattatatttaggaggagaaatgaattgagttggctgacccacaaaacactgttgggtacccacttgcatctttattgaaccatatcgaaatgtgaactgtggatttaggagaattaggagaattaagaagaatatcctgatgttcttatgtcagaaattttgaatgaatacgttgtgtgtagtgtagataaatggcctcttaaatgtggcaacatcagccctgcactgctttatttttggggcatgctaaaggatactgttgtagaagtcacataatgagaaacgaaacttgtggtctgatttttatcttgtagatagtggttgataattgagaacaacctttacttaaacctttgaataagtcactaagtatcatgacttgcatgaagtgacaattatgttgcacttttgatgaaccatgcctcctattaatcaagcgtgttaaatttctatacattttattttttcagaagtctttaacacgtaaccatgatggtctaatattctaaccatctcaactagaagcaaggcaccagagagtcgttttattgtttctttcgctactttgaattttgatccttgtcactgttctattttgatgagtataaatgaatagatttttcttaatgtcagctattgaatagaattctggttttgtttttgtatatgcattgctccatattgaagtctctctttactttttcag

SEQ ID NO: 37616 - DNA, 1006 bp, Sorghum bicolor
  Intron number 1 from transcript Sb08g004710.1 (locus Sb08g 004710) derived from phytozome v7.0 (chr-ID chromosome_8; pos 5686035 to 5687040 reverse strand)
gcttgtccgacgagtacagaaaactctcggtatggatgattgttgttcgattctgcttgttttgcttcgaagcaaagcacggcttttgctattgggttgatttaatgtgaagcattggggatctgatcggattttgttggtacgggatgccgtatatggatactacaataagttaaatgtcttcgctaaacccaactgcaatattaaattttaatcatgagtagttttttttttttaaaaaaaaatagtagaatgtgactgctatcaggctcgagattgatttctgtctctatctatctagaagaaaacgcagccaacgtttctttactctagggtattcatcataaatgtaaggtgtattttttcagggaaaagtcctcataagtacattttgatttttattagtttctcttgctagacctttgagtacaaatctattgacacagtgtttttacactaaacacacaaaaattgtcaaattgttggtcaaaagatgcaagctttgactatttttgaatcaaaatatgccttacctgatggacagaacgagtacgatttcttatttatcaggaacctaaatattatcctcccaaccatccatgacagacatatttattcatatcatcgtttcattaaccttcctggagatcattctgtaatacaattcaccatatcaaccgatgccttcatgatctgttgattggctgttcttcattctcttcacttaagagccagttttggcatcttatacaaatgcatgaatatctatataagttgtattgaaaaacaatataactcccatcctagaaaactttcagaaactgtcttacagaacacaacagttcatgatatttttatattcttttggagcagacatcatgttgtatttattatagaatatgctttgaatttttttagcaggctgctgaatgcttctagtcatgatgaaatctatgcattctaagtatttaatgtttcatggccgcttttgcagggtattagacat

SEQ ID NO: 37617 - DNA, 847 bp, Sorghum bicolor
  Intron number 1 from transcript Sb09g027230.1 (locus Sb09g 027230) derived from phytozome v7.0 (chr-ID chromosome_9; pos 56341239 to 56342085)
aacctcatattttactagctcaggtaacaagtgaacttgaactttaattttctttctaggactagttactttaaaactcaaatatttccttcatcgggttgactacatttaacttgatagcgtccatttcactattgaaagctaaataaaatacttgcacaccatgttttgttctcacctgtaaaagaaccctaacctattgtatagtacgttcgcaagggtcagcatactgcacttgtattcaaacaagatcttattcagtagtacagcttctgggacacttgattagctggagtatgagctttgctgattttttcttgtccgacaccgcgttggccatctatataatgccccttgttcacatgatatgttcctctttcctatccttaatttgtgtcgctctgtcatgctcatgtcactgtcagactatattaagtttgtgctacttaatttcagtagcactatagtatcacctttaagaagctggtactttgttaagtattagtcatacactattgctaatactagtaacctctgttagttaatctgtacagaattatgtggagcgtgttttacagtttatttctaggtatttattattgtgcgtgactactggctgtaactaccaccgtgtaaccttttagcacttatcattcttgtagatggccattttgtttggtactttttaaaatatggattgggccaattttcagaacagtctgctttacgtactattgtataattattaatgctccagttggaaaattcttaatggattcttctttttttacaaaaaaaaaatctttgttcagattgccaagaagatagctaggactatttttgtgaa

SEQ ID NO: 37618 - DNA, 877 bp, Sorghum bicolor
  Intron number 2 from transcript Sb10g007620.1 (locus Sb10g 007620) derived from phytozome v7.0 (chr-ID chromosome_10; pos 7438258 to 7439134)
caaggttcggaatcccctctctccccgtgtgcgcagcttttccgtgttagtgattagagatctgcatctcaagtagggtcgttgcgcaaatcatttgcgttggcttgcagctactaagcagtagttgggaattagctgatcgagttggaacttgaagctacatgatgtgctgtggtgactgtttctgttgatgtgtcgacactgcaattgttcgtctatagtagggtggttgggaaatttgttttaattaacttgcgtctttttagcaatagttgattgtttgctgattgcaatagaagctatttggttgttgtttagattagcctagttgccttcgatgattagttgctgtgttgaactgtggatgtaagtgcagcacctgattttgattcacaatcgtacaggtaatgctattacaggttagggtagtagtttgttttggtagatttggttgggatgggtgataatggctaaatctctgttgcctatactttgttcccgtcatgttcaactacacccagtttgaaatccactctgttatcattgtaaccctgtatcctaggagctggaaagcttagtttgtgatctgtatcccctctttgctaattgggccttttattctgttgaataacttaacttttctgttttagctgaactttttagtttgtctatagggcatgtttggaagagtaaaatgggcacttggtcattttttatgattataagcaatcctatagatttagatcccattcctccctattcaaacgggcagcaagtaagccttggtttgattgcatgttgtaatataacactataatcattcatttgttagttctcttacacaatcatcgatctttttctctaggtgtagatccca

SEQ ID NO: 37619 - DNA, 718 bp, Sorghum bicolor
  Intron number 4 from transcript Sb09g022770.1 (locus Sb09g 022770) derived from phytozome v7.0 (chr-ID chromosome_9; pos 52399752 to 52400469 reverse strand)
cagatcgcaatctgattgcaaagtggaaaaaggttggtgagcatcctgtatagaactaaactaccaatgctttgttttgatgcttttgcagaattttctggaatgctactctcccgcatatatattgccattgaactttgatggtgtaactattctagttttcttagaacttatctaggccatatcttcatcacgtgaacaagtaaaaacatagcaagtataatctttttgtctggatgcatcctttttgccgactatcattacttaaagaagagccatgtagaacacaattcaatgcttcttcatacaattttcatgtttttgtaagtactgtcgcttcatcatgaaagagtaaacttgtgagtggtttgctttgccaaacccttccttgtagaaattgaaaggtactttatggcttgacccatgcaattgtgggtgtacttttgtgtgtgtctgagtttttcatgtggaaatttcgaatggtactatctttttattgattcactgattagggcatgctcagatacctttccttcctctcagtattactatacttttgctccataccctgaaccacactatctttatatgtatagctgctgtcaatctactgtgtctcggctcgggttctttcactgtgactatatttggattctattactcaattctccggatcgctactaacgatttttctctcgagtccttttgcagccaggtt

SEQ ID NO: 37620 - DNA, 751 bp, Sorghum bicolor
  Intron number 2 from transcript Sb10g022560.1 (locus Sb10g 022560) derived from phytozome v7.0 (chr-ID chromosome_10; pos 50559650 to 50560400)
cggacagggccgccccgaccgcctacagtgccaaggttaaccctctcgcttcggcaagctccattcatgctgaatttagtggtctttatggaggctgcttagatcttagttcgagacatctagggctgtctatacacggaggattgctttgataattgaacagctggtaccaatgtcattgtggcaatggaatgttttgtgttgagggtacaaatttcacattcgcccaactaataaagtgtcaaaagttagctcgtttattcatcatgcactggaatcgttttactatgccatcacacggtaatatttatctttttgagaaaaaaaaatgatggggatacgattgtatgctcattctgcattgttgctctgccactggaagcctttgttttttctgtgacaagcacggggcaaaatcaggataagaatgttgctttttgcaaatcagttcatcaggagcagtaaaataatttctctaatgcattactttggacagcatgtttcagataaatctagaatcctgatgtaatgatgttccacttagatcttaaacagttgttaatttgcttatagttgtcaatgatgttctgtaatcttaacttaataatggtagattgcatcctatctttctcaaatcagtacctccttgctgtcggcacaacataacctggtgattgagttcatatgactgatgatgtttctgtcactttgctcaggacttagagctctgaacaagattggcctatcaagt

SEQ ID NO: 37621 - DNA, 713 bp, Sorghum bicolor
  Intron number 2 from transcript Sb09g026890.1 (locus Sb09g 026890) derived from phytozome v7.0 (chr-ID chromosome_9; pos 56066878 to 56067590)
gattccgagccacaaaggcaagtccgtaccatctgtcatataatatgctctaggaataaaatagtttaattgagtatctgattcgctttggtattaattccctgtgcatgtactttatgaggatgttgagtgcagtgataagtaggagtataaatccagctatttaaacatcaaagatctgaagattcttgtatgtttccatttgttctgctaaaattattcttttaggtagggatggaacatatggtattgctttatttctactctttcctttgagatgtaacagagatgtaacactttcaagatgcttcaacttccttccttctttctttccatccttctctttctttctttctttcttttttgtaaacttttgcttgtacaaagttattccacttctgatacagattcaattgaggtcgtgctagtcctattataaagaaatgagcaataggaacacaattctacctgtcactacaaagtatatgtatattctcaatgtagatatgtacattctcaatgtatcacaacaataacaaggacaaagcctttttaaccccaagcaagttgggtaagctggagaaaaaaatcacacagaattcacaaagtagagcagaaaggattatggataaaaagttaatatgtttctacttcagttctatactattactgtcactattagtaatctggcacttttgaacaaaacctacagg

SEQ ID NO: 37622 - DNA, 931 bp, Sorghum bicolor
  Intron number 2 from transcript Sb10g008490.1 (locus Sb10g 008490) derived from phytozome v7.0 (chr-ID chromosome_10; pos 8735247 to 8736177)
cgagggccctgaggcctactacgagggctctacaggtcagttactacacttatgatgggatcaaaaaagtttttgtgtgctatgaacagactaacgttgtgatgctggggtggtgtgcaatgcatgatagcaagaatgctagtagcaagttagcaactatgagctatttggactatatttcttctatttgacttgagttgcatgacaccatcttggaggatatttcagttcttgagttatgtgtccatagtatgctgtgccaatgtgacatctgtcatgatttatgaatagtgggtggataacctttcgcttcttgttgatgcttatgatttggtcagctgcaggattcatcgttaacaagcattgtgaaggatagtgatgttgcaacttgcaagccttatgatgttcagtggactaatttaaatttcagtttgttctacctcatgttgcccattctactatttctctcatcatgcattctttaccaatgaaaaaaaaaaagatgttgtagttgtagctgttattgcagaattgccctcctacattgaaagcttgcaaaattttagaaggtgagctccatgtgaatgataaaccaaactttgtattgtgacgctgtgataatagtgactttaaactattagagggtatgctaaaagaagctattgtttgtagaatacccatttagccaaagaaaagggagaagaaagcatttttttttcttttcctgttaagcgagcgtacttttaaactatgtcatgtttcaccgctacttttgtctcttagtgatgtttaattttgagctgtgtcatgtttcaccataactgtttccctcttagtgatgagtgatgtttaattttgaactaattagtgctaacatcttcatgttttggtttcagctgcactgaaagttgcatcatacctgcctcttccc

SEQ ID NO: 37623 - DNA, 874 bp, Sorghum bicolor
  Intron number 1 from transcript Sb08g003320.1 (locus Sb08g 003320) derived from phytozome v7.0 (chr-ID chromosome_8; pos 3669924 to 3670797 reverse strand)
ctccaggctgctggtccgcgccgacctcaacccaggtgaagcgaaagcggaagagcccgctttcctgcgcttttcgtctccgcagatctttctcccccttctttaatgctactttgctaatgtcttcttgctctgtttccttcaccgtttggtcccgaggaactattttaccttttattgaaatggtacttgccaagtagtagtattttatctttattacacggtcccagaaaaaaaaaaccccttttctcatggtatatgcctaaatgttgtattgataccgatgagtgtctggagactggagttgcgtgattcctttcacaagatgggtgaaatcagtgtgctacctggatttcttcatctcgtgagtttaggctgcttacacaaggggcaaaaaattggattccttttctgtaagtttatttcacatgtagtcttttcttttgttggcgttggaaattagattttggcattttgctatgggtgaagtaatatgcatatctaatgttgacataaacgagtcaagtggtgaatgccttgctcatgttgcccccactagcttaatgtttgattgtctgctgtatgcaaggtcaagatacatggatttagtttgatgagaacaaatattccttctttgccttttcttttgtttatgcggattgaacaaggcagtaagacttgttctaacttcaattgttaacctaatcttcctactctattaagaaaaatccatctctggatatctgtagatcagtacatatgcctgacttttttttccccaacaattttggtatactttttcttctgccaataaagtacaagtttcatgcctttttcagttgtacgagaagtcaaacgcgaatccagtgtttct

SEQ ID NO: 37624 - DNA, 620 bp, Sorghum bicolor
  Intron number 1 from transcript Sb09g017090.1 (locus Sb09g 017090) derived from phytozome v7.0 (chr-ID chromosome_9; pos 42871086 to 42871705)
gcaccgcaggtacgtgcctgcgtcagatcatcaaaccccgagaatcaatttatccgtcctggatgatcctgcatgctagaggggaaaaaaaaagctaaccccagtataacaattcatcgaatttgggctttcattccatgacttggtgtccattttaggcctatttacatggaattcttttcttggtaattttaggtttatatgtttttagctaaggccatgagggtggcaagggttgtgtttgtctaatgccaacagaaaatacttcattactgctagttgccgtttacatctgttattaatacgatgaaaattagaagtatcaaatgcgtgcttagaaatgtaatggttttacataaataaaaagagcaaaaatacaacagacatggtgaaaatatataaataaacataattaatatctagaccatacaatctcatgaataccaaatttgttggaaaacatagttcaaatacaaaactcaaaagccatcatccctattgtataatgagcaaccttttgattttacagcgtctcatttggttgtcacatgttttatatcctggtttataaaaacattgccacaggattgtggattattgtatacgtaaaaggttgccgt

SEQ ID NO: 37625 - DNA, 870 bp, Sorghum bicolor
  Intron number 1 from transcript Sb08g018240.1 (locus Sb08g 018240) derived from phytozome v7.0 (chr-ID chromosome_8; pos 48226892 to 48227761)
cacattcttgacctcgacgggaggatcatatactggttagatttctgctgctttaccgtcttttgatttgcttgccttcaacttgcgagcttgacaaacattcgaggaaatgcagtagtgggcatgttgattaaatatgttgattctagtgcctgtaatggagtaagtgaccgcatataagttgtgaccaaaacgaaatgtatttgaagctcttgcaataacaatcctagactcttgagcaattcttgtgtgtcattttgatctatcaataacaaacatgtgatagaggttgcagtgggatagtgcgaatgacaatctgttacactgttagcattctgtagaaccctagctctgtaaggatgtgcccttaattttctgtgcgaagtcacagtaatgtaatgctggataggatgcctagactttgaactggttctggtgatgagctttgtaccctgaagttctacttctacatgattaaacatattggtataactacaatataacatgataagacacttcatctctagttgttggttgcttgagggccaacattaagtcacaaaatgcaccaggagctccctacaagatcaaaattagttgagttgcatttcttatgtaagtattgacagaatgtgccctttgcgtcataacatttttttaaaatcttgaaaatgctacttctttgccctttaatcgaataaacattttggtttgataagtgtgtgtgctttttgctacataagcacaataggttcttcacaagtgttcttgatcccattttgtttttgtttgtgcttcctttttcaccatattttgtcatgtactttttatgtaggaatcagtctgcggagaatctgtttggctatcctg

SEQ ID NO: 37626 - DNA, 882 bp, Sorghum bicolor
  Intron number 2 from transcript Sb10g023610.1 (locus Sb10g 023610) derived from phytozome v7.0 (chr-ID chromosome_10; pos 52271306 to 52272187)
atattgtggactggtttgcccctgtcgtaaaggtatgagggctacttttattgtgataggtttcgatcttttcttattcaccctgacagataaaagaagtatttacaccaatttaggctaaagctgtagttatacatgcatctatcttattagaaatatgcataagcttgttttccttgtactgctgtcaaactttctgtaattctataatcactactggtgcttcacaacactatgcagaagcttattgaatatcttcatgaatttataactctacattctcatttaacaaattactggagtcgtcatcaaatttacaatatgcattggaagtggtctactgccataggatcatcttgactattgtgtttttactttgaacaagttccacaggattatcgactattgtgtttttattttaaaaatctgtttgtttgccgttttacttgcttttaatataatttgcctatgcccatcataaaatcatgacgctacctttttaccttgtcaaatgtcatcaacaatctttatttgttgtatagtattgggaatatggtttacaataatcatgtagcttattccattagtaaatgaaaaattaatatttgatttctagtgaactagctttctacatgtttaataaactattctttgttcttaagttctgtttcttaagttctgtattatgtatttagtgaaattagttatgattgtctactccacacaaaaacagggcactttattcaaaattatatagcaaacacaaagcacttgtgtatgtgggaagtacaattacgttatagactgttctatatctcttagcaattaactgacttgatcaattcagaggttggcggcaggcgagtggttcacagctcgagt

SEQ ID NO: 37627 - DNA, 672 bp, Sorghum bicolor
  Intron number 2 from transcript Sb10g009250.1 (locus Sb10g 009250) derived from phytozome v7.0 (chr-ID chromosome_10; pos 10040833 to 10041504)
agtacgctgacgtcatcaactccgtcgtgctccaggtacggccttacgggggacgcgtttgaccttcttctatattaaggtggtcgcaccgtgctgtattaggatgttgccatggagttctccggatgttgatttgctacctttcatgaacaattttccctgttgggatggtttgtggggaggagagggggaaaggggatgatcgatttgatcaaatgtgctttgcttgttgcctcattcggaatgtctttaaaaggtggattagtttgattagacagaacggcaggaatcatttagttttcacgtgctaaagaaaggttgtttacaggaggtttaagtcatatctgtcgatcatgaaacacaatgttcaatttgagagcagagcctgtaccagtaaatataccctgctttcgcattgccccaaaacacaatgaatttgtttcatgcaggcatgcagcaagttgagttgataaggagtatttgtgtgttctgcaactcttaaaatgccaatgttggttgttgctctgttgctgtcttgtttattctgaataataaatgaacctttatgaatccagccaatcctatgttgtcagtttaattttcatctctggcactaatgaaatcttagtctcatctgaagtctttggcttacattttggtgtctcttccagg

SEQ ID NO: 37628 - DNA, 873 bp, Sorghum bicolor
  Intron number 2 from transcript Sb10g026490.1 (locus Sb10g 026490) derived from phytozome v7.0 (chr-ID chromosome_10; pos 55902175 to 55903047 reverse strand)
aggtaagaaaaaaaacattttgtcattgccaccagccaccctatgatagacaggttgtgatttttcttactttctcgatagggatgaaggaagaggaatgtcgtttttttcctgacaattatctatattgtgccaaattgtaatgtcgtccagtaaatagatcttttttaggcagactgatgattgaatcgagccatactagtattgcacgattaaaatttgaatgcgtggcctactactctagatgtgcctatactggaatacctaaagaagctctaggatcaactgagatttaggggctgtttgtttccccttgctaaattttagccagctaaactttagtcactttagtagctaaagttctaaacacaatgactaaaaaggagctaaaatagtttagtcccactagtcactcaagagtagctaaaataattttagctgactaaaatttagcaaggagaaccaataggccagttttttctagaaaaaaaatgttagagttggcctattattcacatatttgattttgggaaactcatttagattttacttccacagaaagactacaccctttttactgctggagaaaattatctaacaccgtcagaaaaaacaacggtaactacttcctccaaagaccgtggaggaagatgggaaagagtaacatttaaagttgttatttcgtaccatgggggttcatttgatggttggcagaaacagcctggcctcaatactgttcaagggtaatttgtttgacctattactcttcacttcattcacatgtaatggaaaacaatcactggtacttttttttaaaaaaaaaagaattattgatttgcaggttagtggagaaacatcttggacagtttgttg

SEQ ID NO: 37629 - DNA, 923 bp, Sorghum bicolor
  Intron number 1 from transcript Sb09g024760.1 (locus Sb09g 024760) derived from phytozome v7.0 (chr-ID chromosome_9; pos 54271681 to 54272603 reverse strand)
atcccggcaacagcgacgcctccaaaaccgtcgtggtgagtgtgtgtgactgcgctgggcttttgggggtccgtactagtacttgttatgctgcctccgtgattggatttgtgctcaattggttgatgctcttggcgctgtaaagatcccaatttggtcgtggggcgtaatgcactgacgctagaggatggggggctttaaattcaattgcttggcatactagtattgttgacagtagcttttgattagtgattatttattatttgttgtgcttctcctcgtcgaggttgcttggtttgtttgtgagcattgttcatttaaagaagtttcatcagttattttttgaagacaggtttagtacttgctagtacattttacttgcttcgaattgagatgcatagaagacgtgtgtttttggtaattggtacctacttgatactctaggcaccaaagttttggaggatgtttgaaccactggtggtgttggttcagtatgagatacggtgttattaaccctaaaattaattactactgatacaaatagattttcgatggattagaactatgtgctagtaaaaccttgcattgtgctgccttcagtatatttaccccaccagagggtgcaatttctacatttgtgtttgaacttagagatatcaatagcacaaaatttggcggctttaggtttgttttccatggactgtcaacatgatgtttgtgtctttaaattcaggaatttggttatgttcacattcgttactgatttagtgggttacatgtataatgttggggcctgatgagttctacgctttcttgaattttgtattcttttatttgtcccttgtcattattttgtttgaaaattgtacggcccctcatgcccttaagttgggcaattgtataattataggtaccacaaggtc

SEQ ID NO: 37630 - DNA, 616 bp, Sorghum bicolor
  Intron number 3 from transcript Sb09g003590.2 (locus Sb09g 003590) derived from phytozome v7.0 (chr-ID chromosome_9; pos 4114937 to 4115552)
ccgggtgagtgtgagtctgcttagtaccatcgtggtcttttttttttgtcttagatttgcttttggagccgagcttttcttcctaggtggcaaatgctgtcttagtttgatcttattgttcaagcaatgtaaatatgtaatgtaagaggttaatccataaatgagcaatgcacaaccaatgtagtaagcttgggacctaatctctttcctctgtatgttgtaattacactatggtgaaaccctgaaactcactatcttcactataaacccattttctccaaaagtcctaaaaaactgcttccctgaagtacaaagttgcctttagattctctagggttgtatcagggacttatagggacccttattataactaaatgattcaaattttgagtaagcaccattttgtttaatctttttttttctgaatttggcaagctatttcagtagtttaggctaacagaactgtgctagactatctccagaacccggtaaaacattttgcactgtttgtctaaactccaaagttacatttcattcaagtaatgaagtatacctttgtaaatgtttctccacattatcaggtttcaagtaaagaaaaagcaattcttccgcaact

SEQ ID NO: 37631 - DNA, 868 bp, Sorghum bicolor
  Intron number 1 from transcript Sb10g001380.1 (locus Sb10g 001380) derived from phytozome v7.0 (chr-ID chromosome_10; pos 1135409 to 1136276)
tcgcctactacaagaagcagcccagggacagcgtatgtgatgcatcgctcgttgtatgctctcaagcctgaatcacttgttctgtagggatcgtccatctgtttggggcaattgcgtgcctctgcttctgtttcaaaatttggatccagttctagttacttctgtagtttggttagctgtgatgttaagattgatgtgggagtttgtttggacgatcccttgctgctgttaattcgtagactcgggatttccctctcgcggtttttgaattttgaggaggagggtttgaccagtttgagatgcatggaaccgggtctcgattctggtccactgggcataattgtttttgggtgtaggaatcattccagcttgccaattgtgaactgtgaagttgagggacccatcgatgtcggaacctggaccggttgaccatttcgataattagatgctttattattcattagagtctggcaagtgccgaataatggcacacttgttagctgagttttggtcctcagtttaaccatgtcagcaacttgtttcgtctgcttagacttctttagtcttccaatcattcaatctaatgattacctgtaaagctgttgcttccatcaacaaaagcaaatagcatatctctgggattaaagaatatgctttttgttaatcagtttagaagttctcttttaacttgtttgttagctgtactcatattgatttttgttaccttattgggagtactttcaaggaatcaaatccattccagttatggttagaattgagtacacccagtgacacagcatgatgtagttttcaactttgtactgaaaatgtgtggctttgcagattccactcaagtcaattgttattg

SEQ ID NO: 37632 - DNA, 881 bp, Sorghum bicolor
  Intron number 1 from transcript Sb08g002240.1 (locus Sb08g 002240) derived from phytozome v7.0 (chr-ID chromosome_8; pos 2352270 to 2353150)
ccgccgccaggccgctccccgctacactcatcaaggtgtgccctgttcacctctgtcatttgtagggaaaaaaaaatgatactttttataatcgatcttctgagcaattcagcgtttcgtgatcggaaataagtatcctgtgcgttgcaattcacatccttaaacttaattctgatgagaacggtacaattctgatcagaaggagaaaaaaagccacataaatgtctactgctcatgttccaatcgatctgtgcaattgatcactttgtgaccagagcaaactagcctgcgtgttacaaatggtgttttcgggtgtgataaaaggtgcggatcttattggatcatcataggttcactgactgagaacaactgtcaaatcaaagcacttagctctgaaattaaatttgtatgttttgtctgtataagttctggttctgcacacaaaggcacatcaaattgtttctcagattcagtaggtaatggttgtaaatcaacatatactgattataatttgcagtaagctggcagatgatgcgataacctgtgtttaccatttctcaaattaataacaagagagttaagttttggaagtaactatcctggagtgtttattgatattggtccccaggtcccataattgaggttccttccttttgattcgaaaaaagttccagtacaacacactgtattttgactagtgaagcatttagtgcatcatggacgatgagtcattctcctctacctttactctcttgaaaacttgtttagccaatgcagcaattcttgatcattatatgccaagttctgaagttcaccctcctttggttgcttttgaactaatgtactttctttacttctttctagaatttcctgtatcagtt

SEQ ID NO: 37633 - DNA, 1024 bp, Sorghum bicolor
  Intron number 3 from transcript Sb09g019700.1 (locus Sb09g 019700) derived from phytozome v7.0 (chr-ID chromosome_9; pos 48544070 to 48545093)
ggctgctgcactggaggcactacgtgcatatcctggtgagaatttgttatctagttgctgcatgaactgagattgctcattgggttagcctcttgtgttgtttggctgtttgctcttattagtcttatttgtagtagcacttaatgtttgcccattgtctcttattgtgtgttctggatgttgcaaatgctaaaatgcataaaaatcaaagtttctattttaaaaaatagcagatcgaaatagcaggtagaattttgagaattacaaaaattatcctgttgatgagagctggaagtaaatttggttttaacaaagcactataagctgactgatgatagatgaaaaattatatttatttcatttcatcatctgtattcaacgcaatagtttaagcacatagacacagtctttcaattgttatggtgactctggtttttgttttgttagagttagatacaagatgattctgcatatgcataccggttttttggtgtccaagaaactgtattatgtaccagttgaacttattttgtcaatatacgacctttgtagaggatcatgaaatttacagaacagaaaggtggtacttgttgtacaacaattaagttcattctgttaagtgccattctgataggcctttactataaaaagtagatataaagctaggctggtgatgattaacacatcaacaaattagcctcccaccttgtagaaggctttttcaaaggctgttagtagtattagatgatactcaatgtactttagcagttcagctacacttatcttcattgaaaccctaatttctgtgagattacaaggtaaagtcgcagccctgtgcttgtttaattctctaccatcacagccatcagccttcttgtgatggagactgttacatcttctagtgattcttctttagtatggtttgtttctgctgtaagccatgagatgccatcatgataaactgcaacaaacgtgggctatcatactaggtggtttgcaacttggaggtggaataaatttggag

SEQ ID NO: 37634 - DNA, 721 bp, Sorghum bicolor
  Intron number 2 from transcript Sb09g003520.1 (locus Sb09g 003520) derived from phytozome v7.0 (chr-ID chromosome_9; pos 4060112 to 4060832 reverse strand)
aggagggtggcataggttcaggttagttaccagctactgaatctgctattattgctatctttgtcatgtagcaattcattaggatcagtctaataaaatgcttacagaagtgccctgtagttttatcagttttaagttgagagaggcctacaggtatcaaactagtccaaagacctcttgttatgtttcttattttaaaatcagaacttgtcttttagagttttgtccgataacaggaatatattttctcagacaatcacaatgtgtactctcatctttttaaggtaccggtgtttttgttgagattttatttcatttttgttttccctgggaactggaggtgaattagctttacatattcatcttgcggtcaattttagttatgaatgctttgattcttactcgaagacaagtaaaagagaatgacattgtcaaatagtaaaagtgttctgtacggctgtacctctggtttgaacataatgaagaattgcacttgatttttcttttatatataaaaaaactcgaccagcgcggttaagactgccgctgcagctttcaaattaagaagaaagtgccatgatttttcttttatatatacaacccttatttctaaaaaatgtttagtttattagatttaatttaatctggcttttgctttctagtgaaacttaaattttgttttctaatactaacatatgtgcaacatctaggtcaccttcag

SEQ ID NO: 37635 - DNA, 514 bp, Sorghum bicolor
  Intron number 1 from transcript Sb10g004970.1 (locus Sb10g 004970) derived from phytozome v7.0 (chr-ID chromosome_10; pos 4462171 to 4462684)
gctctaccaccccgtcctcatctccaccatttcaggtagtactactactagtggttctcggtgctcgcatttcttcagttaaatatcgagtgttggttgaacttgaacgagatctagattagtgaatcaatttggtttcgcattgctaatgagaaagaattggcctggtgggatttagcctcttccgttaataatattactccaaccgtatgctgtaagatcaaagcttaaacattttgcacacgcttgaatccgaactccacaagcatgtttgacacttttttttaactttctactgctgtctggcaattaatctgagatcattccattttggaatatgatttgtactttttatcgactattatcacttttactacaaatctctttaatcccttgggttcatccttctgaaaatctaacttgacatggtcctactcagttttttatgcatgacatgctgtcgatattgttttaaataacacagctataaatatttttcttatttgcagcacag

SEQ ID NO: 37636 - DNA, 735 bp, Sorghum bicolor
  Intron number 1 from transcript Sb08g023130.1 (locus Sb08g 023130) derived from phytozome v7.0 (chr-ID chromosome_8; pos 55276885 to 55277619)
aaggcaagttaactctctctctctctctttctttctttctttctttctttctttctctgctctgtcctcccattatttcggaatgcgatccacaatatttgatctgagacattcagacaacagtagacttgttattgggttggagcccttaactgacaattgaaatcagcacaccacgttacctgtcacgtttttctgggttacctgtcattcactactttgcttatgccatctggatggagccttattggctaacatgaattttgactatgtcctgctcctggatgctgctgtcccaccaaactctttggatcacattctatcaattgtcttcattttgcatcaaactttcagtctagtaccaaagctagtattgattacttaaaaaaaaggtagtattcgtttgtcagtttcggtttgaaccccaaccatgttaatttactaccagccaaattgactggatttttttttttcaaaccgacggtttccccatttccgttaacaaactgaaatacagatgtttgagcaagcagtttgaaagaaatcagatacagtgacctatatctgtatgctaagactgccacctgacagccaattgacaggaaattaattcctattgatcccacctgcagttccatactaatgctggcagttttgacccgaacttaactcatttcatttttgtttacttttgcaacagggttttctaggcctaagtggggcaatacttgtcca

SEQ ID NO: 37637 - DNA, 510 bp, Sorghum bicolor
  Intron number 2 from transcript Sb09g003710.1 (locus Sb09g 003710) derived from phytozome v7.0 (chr-ID chromosome_9; pos 4192567 to 4193076 reverse strand)
gacttcgagtccaaagaccctgaggtaaactaaggccttgtttagttcaccctgaaaaccaaaaagttttcaagattcttcgtcacatcgaatcttgtggcacatgcatgaaacattaaatatagacgaaaacgaaaactaattacataaaatcacgagacgaatcttttgatcctagttagtccatgattggataatatttgtcacaaacaaacgaaagtgctacagtaccgaaaacttttcacttttcggaactaaacaaggcctaagaccttgtttggttactatatatcgatctttttttttaaacatctatcatatcgaatgtttggacacatgcatgaaatattaaatatagattgtttacgaaactaaaaacatagatagagaataatttgcgagacgaatcttttaaactgaattactttgtgattggacactaattgtcaaataaaataaaaatattacgatacatgttaaactttaacaccccataataatgtttgcaga

SEQ ID NO: 37638 - DNA, 727 bp, Sorghum bicolor
  Intron number 3 from transcript Sb10g029680.1 (locus Sb10g 029680) derived from phytozome v7.0 (chr-ID chromosome_10; pos 59429025 to 59429751 reverse strand)
agtggtaagtggctcagactctggctgacgatacaaaacaattttgttgcatacttgcattgcctttttacttggttgatttccaacagagtggcacttgatttggtgcactctgaaccttccaaaaataacttatttatgtagttgattttgtcttctaacttagtaatttgataattcaatatgcccatctcgcatcattttcaaggttaacaagtgtgaaactgtgaataatcctcttgtgggctgttttgctgtttcatttgagtaatagactaactttcggtgcaacattattgccatctctgatgaaggtacataggatccaagctatagaaagctatagcatttagatttatcaaatttaatctattttcctcatatattgttgacctttttggaactacatttctccttcagaactcaaaatatagtgtactcttcagttattttcctgcttaaattattgctgtgtcaattaggatggtcagctttatagtaaagctatgcatctagatatatgctgtgtgggaacatcttataatttggaacagagggagtagcacttttgccatgttgcaatactaatatgtactggtagtccttaagaaaagggctgctcctttttttatggccgaactgagaccacagttgttctcatcaatcatcatcacattcacttttttttctaggaagcatcagggcttgcaagaaagctgcgctggag

SEQ ID NO: 37639 - DNA, 743 bp, Sorghum bicolor
  Intron number 1 from transcript Sb10g027830.1 (locus Sb10g 027830) derived from phytozome v7.0 (chr-ID chromosome_10; pos 57690021 to 57690763)
tcctccgctccggcaaccgcctcaccgagccgcaggtatcgtcgtcgtccttcccattcctttttttttctctcattcgcagaccacgcacgacgacgacgacgacgacgatgacggacacctggccataggccatggcggccgtcctcttcagaactcactcgtcactcgtcttggatacgtcgcctgtttctggctggcggtttgtctttccctctttggacccatccaatccatctgaccggccggccaatggccatgttggggcatcttgtgtcagtgaagatcgaacactcggacattccaccgtatggaaatagactttccgaagctacacggccacaatcaaccttgctgtttgtcattgtctgacagtgattgtgtctggcatattgttagcacacatcttggtcacatctatggtctgtggcacacgtgaaccgatcaatttagaggtgtactctagagtctagacctgctctgctggcaatttgttgtcaattctgccaatggaggcagagaaccctggttccggaacagtgtaacgcccaaggcctgaatttcatgaaatttactaccactctgtactttgtataatcaaatgtgcacacagaccagaaataatctaagctaagcatcttgaagttctttttttttaaaaaaaaaatctagcagactagtaaatttgaaacatcttctcttgatggttgccaatgcatggtcggttgcagatcaagtgctac

SEQ ID NO: 37640 - DNA, 985 bp, Sorghum bicolor
  Intron number 1 from transcript Sb07g026120.1 (locus Sb07g 026120) derived from phytozome v7.0 (chr-ID chromosome_7; pos 61310064 to 61311048)
caacctccccaactccaacgtctccctctgcatcagtgagcaccagcgcctctccttcttacttactgaatagtagaactgagtactgaccatggcatgtcctcaatttcaaagtcctcttccttttatcattataatatacgtatttacttagctgctgctccaaattcgtgatttgctagctctgatttctgcatcagtgatttctttcatcattattacaatatatgtatttgctagctccaaaggggctgatgagttgcaaacagtaacatgctaatgcaaacgggatagtacttccacagtactaatttgggagatcatctagccctgttcatccacggttttagccttgacatgatagtgtccaagtgggctgcgtgctttggttgggccggctttgggtggatctgatctccatgtgccagctaaacagcccatgctccatacttcctactgtctaagtaagactagacctttgttcagtgtcttttttttttgttaaaaagaaaaaaaatgatatttttgctagtatagttaagtatttaaaagtttcagatgttttgtactcttactttggtcccaatataaggccctatttggttctccccctaaattttagctatttagcttctttttagtcagggtgtttgaaagtttagctactaaatagttggctaaaatttagcaaggagaatcaaacagagtaaattaatttccagaatcactttaagttaaactatctaagtttaactaactttataaaaaaggtaataacatctatgacatggtgtatctatctatactattttcgtgttataaatatttatgtttttttcctataaatttagttaaatttaaaatagtctaacttaaaatatctctagaagtttgatatttttcgttcgtaattcctgatggctgatgatgccctcccctgtctgctatagacctgctgaacctgaaaccgggctccccggactac

SEQ ID NO: 37641 - DNA, 891 bp, Sorghum bicolor
  Intron number 2 from transcript Sb10g024980.1 (locus Sb10g 024980) derived from phytozome v7.0 (chr-ID chromosome_10; pos 54162870 to 54163760)
gcgcatctgttctgtatgtatttattcacaatggatgcgtttcctgcaattttttttggtgcatagttggttttgcgtatcgatttttctttcagtgatgtaagttacgtgattatttagtgtcgatggtataatactagtgaccataagatgtactggagttggtctgcgttcccagtgcttttcatgtcaaagctagtatggaaaattggaaataagtacattgagaagatttgaagttgtgatcactgactaatgatgcatcatttgtgagcgctgagcggatatgcttgggagagaattcaagtggaaatctttagaacaaccataatttggaattccaagaggtgcttactttttttatttagtctcatggagatgctagttctgagtggattctagcagttggctcttacatctttgtactatcggtgttggcaaattctgtaggtcttgtttttgttgtaagcgatgtcaatatttcttattctcatgcccaccatttgagattttgagcacttgtgcgatacatagatttttcccttttggcatttatgcaaaaaaggaagaaagaaaaagaatttgctgttacttgactttgttgctcgatcaggtgtataggaagaaaaagaaacaatattcatgtagactagcacttgctgctaagaaatattgggtataatgaaaatatattaaattcatgtattttcatgttgattctaattagaagagagaaaaacagaaacttcagacagaagatgtacccatgaaacctcatgttatattagattgaattttttatgtagactttctgtatgcagtctctgtttttaacactagtaaaatggtcatgctctacagtgcagcacacaagcgcttcattgactatta

SEQ ID NO: 37642 - DNA, 1017 bp, Sorghum bicolor
  Intron number 2 from transcript Sb10g007280.1 (locus Sb10g 007280) derived from phytozome v7.0 (chr-ID chromosome_10; pos 7078504 to 7079520 reverse strand)
cactgaccagcgtctgtacaagcaaacaatcggaggtaaggggctgacctgaacctacgcttaacagctggtaccgcacgctgcataaagcattacttcctcgttcctggttattcctactgttttgtcacccgtggccactttaatttggcaaatactttcgctccaagccttaaaaatcaaacccaacatgctaccggtatctgtctgactttatgtggcagcggacgcttgacgcttgtgcccatgattcacatgttgcggaaatgttgaaatggggactgataggcaaaggatggggcatggtgggtgtacaacctggcattgctcctatctagcatctgaactttttgacgcactaactaaactcattcagtccaggtgattacacaaaaagtgctcctttatgccacatttaaactctcttctgttgttaactcgttatcttgatatgtatcatgtttaggtttagatccttatacaaaaaagggttaaatctccatgatttagggattcaagcgaacatttggaaaacgggaactatcttagttatgtttttcttttcttgaactgtaacctaactttgattttgaaaagtttgattctacttcggccttgtttagttccgaaaagatttcggattttggtagtgtagcattttcgtttgtttgtggtaaatattgtccaatcataaactaactaggctcaaaagattcgtctcgtaaattacagataaactgttcaattagttttgttttcttctatatttagtgcttcatgcatgtgccacaagattttatgtgacggggaatcttgaaaagtttttgaatttcggggtgaactaaacaaggccttctttgaatcttcttggccttaagccatgattactaataaaggccaaagggatgtcatttattatcaaattcatgtgtaagtacatgatattctgtaactggccttttaaaatccttgctttgttggtttcagataattcaccactaccgctgacaccagatt

SEQ ID NO: 37643 - DNA, 1037 bp, Sorghum bicolor
  Intron number 1 from transcript Sb08g021340.1 (locus Sb08g 021340) derived from phytozome v7.0 (chr-ID chromosome_8; pos 52942884 to 52943920 reverse strand)
tcgccaggctcaacgtccagaggtacggggtgcaggtgagcttgcgtttcttttgagttctcctcttttttttctctttttttttcattgatcggataagtgagtaactgggagtacacagagctaatttaactctatgttacacggatactccaatggggatgacgtatccgtatccgatactcgtcggatacgcggatacagatagtcggatacaccattttagtgggtttttttttttaaaaaaagtgtgtatccgcgtatccgatacgtattgtatcccatactcgtacccgtactcgtgtaacgtagatttaactttcttatggttatcacttgccatctcatcgtcgtcagtgacagcaagtgtaccgagctatgacagcatgtgtccctctagactctgagtgatcagtgctgtttcgctggaatgtggatagttagcataggtgtatgttttgctggaaaatgtagaacgaactgattgaaaaatatggttttgagttgtcaatttatatataaagttagggaaatttgaagcttagacacaatgtattactatgatacaactatagtagcctcattcaacttttggtgtggctttcattgaagaaagcatgcccaaaggtgttccttttaggctttaagtttgatgctcaaagatgctcagttgctcacacgatgctgaaagaattcccaaagatgctcacatccacctcaaaggtggacgtgagcataggtgtgaattttctgacagtatgttttgttcatttgttgtgttaaattggtacatatagaattaaaactacacacttgtgttacacaccatgctgtaactatcacattctgatagcctgtcttatatacatcctagttagtgtcaataatagtctaggaagtaaaaagatgggtatcaacgagcttggatttgtaatttttctgcacagttaaatttattacaccgtgctgaagtacatagaaagtcatgattaatacagtttttcggtgttgtaatcaggataaagttgaaataaggc

SEQ ID NO: 37644 - DNA, 920 bp, Sorghum bicolor
  Intron number 3 from transcript Sb09g000780.1 (locus Sb09g 000780) derived from phytozome v7.0 (chr-ID chromosome_9; pos 565650 to 566569 reverse strand)
ggccctctggatcgtcctgcaggtacaacaaacgtatctctgattcctcctctctctactatttttttattttattttgtagagtagtatatacgtactagtgacatatatattgctagagtgagatttggggtatgattatatttgaacatcattttcagctaatgaagaatgcaatctttgctttcatattagcatgtgcattgacacctctacttaggcaaaaaccacaacttccaccttgttggcagttggcactaatttgttcagcgagcaactccagcagggctcctattcaagccccaatagctaaatatgggtgccaggcaaaatactactccagcagagcccctactccagaccccatatttggttgggcacccatatttctccctaagaccccattctcattggcccaacaggacaacccccatcctccatcgcgtgtgctagtcccagcgcgcgctccctctctctcttcccttgcatgtgcatgacacctacggtaaccggctccgtgctccaattgtgtccatgtccaaacgaagaagaaagaggaagaagaaaaagacaatgacgagtgggtcccttctgtcattatctctggaataggtttggaggcccaaatttggatgctactgttggagttgaagcaaaaaaattgagcccaaaaaataggggagtactcaaatcaaaagtaggggcctgtgattttggggctactgctggagttgctcttatcctaatccatttcacaaggcagtggtctccatctgcttctttcatccctttccacatgatggccgggacaatggagagagcaaattattatttgttaccttcagagagagatatataaatcacatatggttatatttgtatatgtgcagtcagcgttgctgaaagagtaccccaataag

SEQ ID NO: 37645 - DNA, 1000 bp, Sorghum bicolor
  Intron number 1 from transcript Sb10g010830.1 (locus Sb10g 010830) derived from phytozome v7.0 (chr-ID chromosome_10; pos 14351695 to 14352694 reverse strand)
tattggtacgaaggaggttgttcttggagatgctgcgccgatgtggtttcctgtaatcctgtttcacttgctcctctcacgaactacttcattttggccgttgctttatgttttgagcgacattgcgattcgggacattgtgactcaattgtccatgcctttctgcgggatccattcccctgctcacaggcaattatgttttggagattgcctccaatcgttttctctttaggataacgttaacatatgattggctggttgatttttggtggttgatgtgtaaaccatcccaagagaacaagcagatggaatgctgaagtttacttgctatctttgtcctcagcatttctcaggtgttggtaaatcccagtgtttgttgcttctcctggtccccagatcagttcatcacttcatcccttgtggccactttctccgagcgtgatgatattgtttccgcctttccagtggctgcaaggtttatgaaattgatggtgatagcttttgggttccattgcgagttcacttgtttgattgtatataatgatctcttccttttcgaatgaagatttttgaaagtttgattgcacatgatagctattccagcacttattagctacctcaggaaaagagttgagcttgctaatagtttcatggcacaataaatgtattaattgaaaatcatgcttttaaatcatgagaatgtttaaatttcattagttacagagtttttttccccggtgtaacagacatattttgatgccattgaatatgttccatatcattaagtgcttgttaggcccgactttatgactagttttccactgccctggttttaattaaattctgggtgaagatattgcattttaagaatgtttttaatggtgatatatactcctataaccatctcattggaaaaggctgctgcattaagtcttgtctcacactctctcactcatacttaacaggtcgggcactagaggaactgaggggctcactgtac

SEQ ID NO: 37646 - DNA, 351 bp, Sorghum bicolor
  Intron number 1 from transcript Sb09g025560.1 (locus Sb09g 025560) derived from phytozome v7.0 (chr-ID chromosome_9; pos 55037223 to 55037573)
ctgtttacgggctcacgccggcgtctcgtcttctggtcagctcggggcgcctgtacaaccgtataccggtatctcctaaaaaatgtctcactagtacacaaaatttaatgaagacaatcacttttgattattggagacgggcatatgtaaccgtctccaatgaaagatcatggttaatgcacaaaccatgaaggtcacggttaatcgatatgaaaaaaaacaaaaaaagaaagaaaatcacgtggataggccaaccgttcccatccacaggcccgccaaacccatccacatgtggctgccgccgctctgctcacaggattcgggccgccatcggagaagatcgggccctgc

SEQ ID NO: 37647 - DNA, 915 bp, Sorghum bicolor
  Intron number 3 from transcript Sb09g026030.1 (locus Sb09g 026030) derived from phytozome v7.0 (chr-ID chromosome_9; pos 55372301 to 55373215 reverse strand)
cagcaattaaaaggaagctgttgtaggttggtccatccatatagttgcttgtctttgtttgactgcatatatcatgcatggctatgtgatagaactattgacaatggactttagaggttgagttggacttgtttggcctttaggcaaatgtattataaatgttggtcacctctttggtgggggagagaaatcccactttctctaacaactgatccaacttagatttgaaaaccactgccaggtggaggagagccaaatatacccaggtcgttttcatgggttggaaatgaaaatgataatgtttaggttttaactgttgttcttgttcatgtgttacctatactgttaactctcaaatattaacaagtgttcaactaatctatcatcagacctaatttattttgccaagaaaccacacggaagacaaaactaaaatggaataaaaaatagcttatttttttctaccctttatatagcctggataggcgaagaacctgaacaagtcttcatccccatctgttacttcttacatttgcctggatgcttaaatatttttggttgatttgaaatgcatagcctggcaaaatggtaggtaacaatgctcagaaatgtgtagcatattttgttttgatgagatctgctaatgcaaaggcaaattttagtttgatcagtctcatcgtaaaaatgtacgttacaaactaaaagttgtgttcatgcatatatcaaggtaacaatgttgtatagaagatattgtgatattactgtcacagttttatatatgtgaatatgtgatacaattatacagtgatacatagacattttgataatgtgtttacatcgtaacgactttatgtctttgtatgatctattcatgcctaacataacactaccggtgacagtattggtgcttctagg

SEQ ID NO: 37648 - DNA, 627 bp, Sorghum bicolor
  Intron number 1 from transcript Sb09g018720.1 (locus Sb09g 018720) derived from phytozome v7.0 (chr-ID chromosome_9; pos 46914666 to 46915292 reverse strand)
ctgctcacctgcgtcgacgcgctgcctgacgggtaagtgggtaacggtcgtgcccacgtacgccctgcgcttcgtctgtttgttgttggttctctttctcctcggtctgcttcagtgttgcttgtgttgtttatgcatgggagggtttatggcttcgtgctagggttctagccaaatgaaatgtatttgcaatttctaatttgcggagtttctgcgatagtgcaatcttaacctggttcattctttattggcaccaatttatccttatttcttattattttctctatatcttgcatttggttcagcttgcagctagtacgacacaattgttcttggactaattttctatgaaaattatgaaactttctatatagtgaccatgttttgcctcttcaaacatttcaggaaatttgatgcagtacgatattacattatattcgcttcacagaattccatgttaatgactacttttctttgagttgagctatccaattggcaacttaattatgtcttatatgtagcatatggatcctttatttgttgcttatttgctaaccagatatatatattcatatatacatatgatgggcaggagtgaggaaggcatctattactctgttgatcttg

SEQ ID NO: 37649 - DNA, 914 bp, Sorghum bicolor
  Intron number 1 from transcript Sb08g000850.1 (locus Sb08g 000850) derived from phytozome v7.0 (chr-ID chromosome_8; pos 737324 to 738237)
gaatccacgtccgtaaacatgcaacccaccacgcctgtatacttgctttcagtacattatattactagtgaattttccatgtgatattatgaatgaaatggatgtcaacttgcaaacatgcaccgtatgcactgtgtaattctcaaaagagagagagagagagagagagagagagagagagccaacctatgcaaaattgtgttttctaatctagggttattttggtctgctagctaggaggagaagttttttttaacaactagaagaagaaggttagtttcctgcgtgatgtccgcttgtgttatttttttttatgcaaacatgactagtttacctcgctcttgcaacttctgtgaacatttgccttttctactcttcttcttcagaataaagtgatgaacataaatacataatactctacactctaaactttgccttgacacagtttaattgttttgttttacacatgatgtacatcagctgcaaatctcaagttgctaagatgagcacttttcatgctacattttatccactgagtaagttctgcagagcagacgttgtaaatcaaacattggatcttaatttgctttcacatctttttaggccaagtttcatatttctgatctctattttcgttgacgtgctgatggatatggcagccaatgaatcaataatatctaatatgctgcagcactagggatattgtgactgctagaatattactgtatggaaacagttgcaaatctttagattttgatagcatgtcatgaaattagaataatttcctttacccccaatttcccccctgcttttcctgtaatgagatttgcataacaaagggaaagactaacataacaaagggaattttgttttgtctctgtcatcttttcagattcctgaagggttcaaacggc

SEQ ID NO: 37650 - DNA, 544 bp, Sorghum bicolor
  Intron number 2 from transcript Sb10g023320.1 (locus Sb10g 023320) derived from phytozome v7.0 (chr-ID chromosome_10; pos 51842882 to 51843425)
agcaagtcaaaggttctagtgaaggtacatctcttctcttcctttggtttttaaatgtggcgtatgaacatcccagtcttgctttggcatagtagaagaggcacaatatttcattcatggcaatatgtgaaaaagaacaaatacatcctttctaatccaaagtatgctgtaaaaaaaatacacgcgaacaaggatagatattatgcaaatacctagtacttggtctatgcaaaatattagagaatataatagaaactggaatggtgctttatcttagatttcagaatcggacactcattctttgacatgacattctacttataatttctgtgaaaaatagcaataattcaagctgatgccaatttactgttcctcttctctctggtttctttgttttacatagtccacagtatgatcattatcatagcagatgtatttgtgttagcatgtatgttttgaatgggactgagtttccacatatcctactgtacctaactggttatggcaatctctcaggtgcatccagaaggcaaatatattgttg

SEQ ID NO: 37651 - DNA, 485 bp, Sorghum bicolor
  Intron number 1 from transcript Sb08g005200.1 (locus Sb08g 005200) derived from phytozome v7.0 (chr-ID chromosome_8; pos 6665044 to 6665528 reverse strand)
agaaggccgtcaccctcgccgcccgcctctgcaaggttcgtggctaccatggtccagctgcgggcatagtccggtgctttagatttcaaaattcaaaaatagtacttaatgataacactgactgaactacctgaagttgggtttcacgcgccagaaatgggggaagaaccactgtaggctgtaccgtagtttttatacctaatgtttaatgtatttcgttttcatagctatagtatattgtatttcatggcataccaatttcttctgtttatatttacagaagtgggatgcttgtgtagttgtacaggcttgtattggtggtcttggctctgataaaaaaaaaaacattcgcatatgtggtgattgagtggtgtactgtatttgattgtatagacccttatataccattcagtttggatttattgctattgctttgtgtttcctccccagacagtgcaacaggacattgtgcattctggtgttca

SEQ ID NO: 37652 - DNA, 1019 bp, Sorghum bicolor
  Intron number 3 from transcript Sb08g008650.1 (locus Sb08g 008650) derived from phytozome v7.0 (chr-ID chromosome_8; pos 17133113 to 17134131 reverse strand)
ccaagcatcgcaagacgctaggggaggttagttataatgcttgcagggttttatatttgtcactgattaccacagagatactgttctaggaaaataattaatggtaaataaacgaataagtgctggcaagaccagaaagaaccatacaatacctattgctgaggaagaaaaccttaacgccctttcagatgcagctatagatgacgtagttgcaaacccaacggaatgcctattgctcggaaagaaaaaactcatattcatttccgttacatgcttacagctatagatgacatagttgcaaacccatcaaaattatttcatgtatatacgtcttgcttatttctttcgtctttcctcatttgggatcctcagataagagaatttgattggctcgtgcccttaatttaattgcttcactcactcttcatgccttcctgcaaaggaaggacaatgttaattgataactggccattttcctcatcatattcagtaagtctaaactgtctgcccttctggtttcaggcgtagggttaagacaaggagaccgtttgttctttcttttcttttaaatgacaaagagctttggcattctgtagagaaagatgtcaacacgtgagtcagttgggtaataaaagaagtaattgcagcctttagttgacagctgcaaaaatagctgcagccttcagttcacagctgcaacttcattggatgtatgcagcatggaaaagccatggaaggggaaaacactccccactgtcttgaactgcataattctgagtaatatagtggggcagattgccttctaggtgtcaggcttttcctgtcgagaagaggctcccatcaaagcccaatttagtgggcagaggcctttactgtattaatatttggctgggactttgagaagggtgtcttgatcagaatagtcacaatttaaaaaatgatgttggactagtagtccttttttttttcttttcgttattcattgttatattgtttgctccagcttgagaagggtgtgg

SEQ ID NO: 37653 - DNA, 1010 bp, Sorghum bicolor
  Intron number 3 from transcript Sb10g026910.1 (locus Sb10g 026910) derived from phytozome v7.0 (chr-ID chromosome_10; pos 56314731 to 56315740)
ctacaagcgacattgttacttctgtgcggcatcaggtactgcatgttataaaagattggacttaccatttcttatgttaatgttttgaattatggaaccccttaaaaaaaagctagcgctgcagcagtttctttgaaataaagccattactggtgacaggcccatttttgattttatgctcacaagtcacaactatttaaacatatgttctaaagttgaaatacttaattacatgtaatgtaactgaagttgaaaaggagtatggatatagttttcatgttggttctgataaaagaaactgcgcattggtgctaacatcttacacaattgtatgcacttgagagaagttgaaaccagccttttcttgcttacgatacaaaactttatactcacaggtcctaaaatacttcaatgcatctccaagggattacaaatgtatatttacatcaggggcaacagcagctctgaaacttgttggtgaatgttttccatggagtagagacagttgctatatgtacacaatggaaaatcataatagtgtgcttgggataagagagtatcctaccatggttactactgtacttactgactagttaatgtatatatcattatggaagtacatgctccaatggtgcaatgtgtcatagctacatatctttatactccaatgccctcagatatatggcaaaacagctatttttcctttctattctcttcacagtaggttctataaagctctcaatttgttttttttttccttttcaaaatgggttctttcattaggagtatatttcgcaagctgagaaattcaagttgacactatgccataatgcacattgttgtagggcatactgtagattatgtatccccttaatgtatttatagatatgcactgagcaaaggagctactgtatcagcagttgatgttgaagaggttgttgatccatcaaataatcatgagagtgataggttttttaaggtttcaaaacactcaaaccaaagaagaggtg

SEQ ID NO: 37654 - DNA, 895 bp, Sorghum bicolor
  Intron number 1 from transcript Sb09g007930.1 (locus Sb09g 007930) derived from phytozome v7.0 (chr-ID chromosome_9; pos 14530196 to 14531090 reverse strand)
acatcgtggtaatcttctcttttgcagtgaaaccgtgtagagaaccctgattgtgggtagaaactagaaactattaactgtgtgaaacccctactcttctattatgttcttgataacctcataggcattaagccataacacgttttccatctggcatttcttgcaaaaaaaaagaagatctttttcttttgaattcgtgatgaagacactctggatgtaatcatactagtatgagtatcttttgaatggtggatgctactatgctagagaaagtgtttagttgattgaatactatggaacattaaccatacaaggccgagattgtttaagttgcagattgtggattgcagcctttaagtttgtacaatcttgcagttgaaacaaagcaactataaggttctatcgatcaacaggccagattattacgatccaacaatctgcttcctacaagatgcaacaatttgcaagacaaacaaataggctaagaatacatagccttgtagaaataaacagtgctttggtcgcaaacttgcaatgtaatgtgtattgattggaaagcgaagtatggaagaataaactttctgcactgatctacttatttttgtgcttatgcatcaatattgtgttatcttgtacaaattaactagctataagtgaacttcttgtgcatttatattgaaagtttctatgtagcattaagtgcaacttgccaagtctattttgacttaattgtaatggaattttgggcattaagggtttcatcagtcttcctttgataccttatacttctattccaaaacagtaaaaaaaaactcatagccatgtcccgtgttcatataactattttcagtgacttgcaggtacatccatcactacagaggagaggaattggccg

SEQ ID NO: 37655 - DNA, 767 bp, Sorghum bicolor
  Intron number 1 from transcript Sb09g001920.1 (locus Sb09g 001920) derived from phytozome v7.0 (chr-ID chromosome_9; pos 1969249 to 1970015)
ccgccgacgggagcacgtccccgatccagatccaggtagtacacggtgcacctccgccgccctctttctgctcaagttatactggttgctctcgcgttcttccccgttggttgttggtaaggacccggtggcgccgcttgcactccgtgttccgctggatctgcgctctgctgcgagctttcgaatcaaatttttttctttttttgttgtctcgtcttgtttgcggcggatttgttttgttttttgctttacgttcgatttgctgcgtgctggagtaatagaatcgttctggtttcctgggctttagctccccgcgttgttcgaggaatttgtaaaatacttattgttagtccgtcctggatgtctgtagtaatttccaggccgcagattccgacttcttggttgcggagctcgtggtttgtctgtccggcttgttgcttagggttttgcttttgctaggggacgatttcgcgcggatctcggacttgtttactatgagagattaggggtatttgcagcttcgcataacaatcatagcgttgactggcggttcacagactgattcctgtctggtgactctgctggattctacttagtgtcttagctaactttgtatctgatatatatatggtgcgagggggcttttgtttcttattacagctttcgatgttagatgctgcaattgctgtggtgttcccagatttttttttctttttacctttttcattgtaaaatactgatggaagcctctcatttgttcaggagat

SEQ ID NO: 37656 - DNA, 1019 bp, Sorghum bicolor
  Intron number 1 from transcript Sb09g026144.1 (locus Sb09g 026144) derived from phytozome v7.0 (chr-ID chromosome_9; pos 55476365 to 55477383)
aggccccaggcggccagccactgcgactccagctcgtcagttcccagccgcccttccctcgattcctctccctccccggctccctcagttctgatatgaggatcaacagtctccagattttatttttctttagcaaaaatttaaataagtttagctgagaacagttagttccctagtcgaagatattggtgtctgctacctgattgttgcagcccttgctttggactgtctgaggcttatgatattttttcgtacatggatccaagtatttgtataacactcctcgatatggcttgttatttgacttgctcacttgcacaaagttttctatatcgcatttgattgttgagtagtagttttcaaaaaaaaaaaaaagattgttgagtaaacatgtatgtttttgtagggtgtgaactgattctctagcaatgctcttttacttcttcaaatatgtgaaacataggcaggcctaacttataaaagttgggtattacttaaaaactgaatagaactttgcaccaggactcatatctactagaaattttagttcaaccattgcatctattagatagaaattttatcttcaatttagttatttctatatgtaacattaatgggttgccattgggtaggggtataatggttagttttcactgctagtcagaggccctaggcttgagcaaattctgggtctgccactgcctgcagtgcggcacttagttatccaccattagccacggttgcttcctggacattgtccagggggtgagctaggcacgctgcaagatttgggccatctcaatgcagaggcggcagctggcagcagcaaggtgtggtttgtgccattttttgtgatataagatggattagagagagtttcagtgaattcctgccattttttttaatttgaattatttaaatttagtccgaaatttgatgctccactctgatattcattgtttgattttgttctttggtatgtagtaagtacgggtcgccagctgttcccctcaccgtgt

SEQ ID NO: 37657 - DNA, 844 bp, Sorghum bicolor
  Intron number 3 from transcript Sb09g020070.1 (locus Sb09g 020070) derived from phytozome v7.0 (chr-ID chromosome_9; pos 49147253 to 49148096 reverse strand)
tatccttatcacctgatcagcggtatcttgtaagtttctcctggcttttcacaactttagcttgtcacccttattcacttttcatcggtcatcattgtaaataaatctctttcatcattcttcttattgagaagaaatattcaatatgcaactctgttcaacagatgtgaataaaccgaagagtatcagatgtggttacattacatgttttacaacaaggttttcctttttcattattgtgtttttgacagtagtttccagttcttctagtggaaacatgttgaagttgggaaatggatgtttcatctggacagttatcaaagaaactagtatccaaaaacgtttttttgcaatatggaccttactgtgtctggctaccaagattaaatgtatcaaagttgttctgaccattaaatacattacaatgactggaaatacctgtaggacaatgaagtttacagggacattttagaagattaaatgtatcaacgttgttctaaccattaaatacactataatgactggaagtacctgtaggacaatgaagtttacagggacattttagacttcgtctagtccatttggttctttcatttctagtccgccctttcatgacatgttgttacatattttgttttttggtatgaccatgtcttggatgtttcaaaatgcattctagctttttatgtttgcatatcatattatcatttatgtatatatgtacttcatcagtctgtggaatgctgtcttgctccccatttttgcttgcatatcaggctgaatcattgtttttgattatcaatctgcaggcctactctagtctggcacctattgtccatattgt

SEQ ID NO: 37658 - DNA, 1041 bp, Sorghum bicolor
  Intron number 1 from transcript Sb09g025520.1 (locus Sb09g 025520) derived from phytozome v7.0 (chr-ID chromosome_9; pos 54974693 to 54975733 reverse strand)
tgagtttccgtgtgtcgctactcactttcctcctggtgagttcatgcatctgtcaaagctttacgtacatacatatattgctgatttaatttgctgacagcttgctaccatacatgcatatatatcgctccatatcaaaaaaatgattaaaaacaaaaacaaatgctcttggacaccaatctccatttgaaggtatggactttggttgtagagtttagcatgacgatggagaccagcatatccgtttagcccatcgtggatgcaaccatggatgccatgcgtggaggccaccatgatgccccgcaatggagcacacaccactgtggagcattgttgtgggtgcttgctggcctacgttgtctctaggccttattggtcagttaatcccgtccccatatgtccatgttttttggagaagcttccccacatgtccatgttgattggaggggattgaaacgggatcagccccttcacattatttcagacataaattaaaggatttcaggagagacaccttcatctatttttagagataggtaaaaattatagactgtctaaaaataaacgtacgtctctataaatttactagtagagatgagaaaatccttaataggcttacctcagaaaaaagccaaggccccttaacgtaggatgcgatggtgcttttggaatagccaaaagaagtttattttgactacttataaaatgcatatatgagatctctagattaggtttttttttattcagaagtatcttctgaaacagtaggagttaatgacctataccgatgactttggccttgtttagctggcaatttatttttttttgtttcggctactgtatcactttcgtactttcgtttgtatttgtcaaatattatctaatcatagactaactaggatcaaaagattcatctcgcaaattacaggtaatttatgtaattagtttttttcgtctatatttaatactccatgcatgtgtcgtaagatttcatatgatgagaaattttgaaaaaatttgtagttcgctgtgtttggaggt

SEQ ID NO: 37659 - DNA, 745 bp, Sorghum bicolor
  Intron number 3 from transcript Sb09g023790.1 (locus Sb09g 023790) derived from phytozome v7.0 (chr-ID chromosome_9; pos 53415704 to 53416448 reverse strand)
gacagcatcggacagctcacccagctcgtctacctgtaagtcacttcttcccgaatcacaatcgctagctgctgcaaggcgccatggctatacccacccggcgtgaagcgtttgcgtttcagtgtttcagacgattcagggttagaaagattttgaattggtcagagcgctgaatacttctgcatctaggcttgtagctaccttgcaaactctgctttcttcgggcttcacctgtccagctcatgctgaccaattcaagtttggcagattgttggttgtgactaataatctaccagtaaagtatcattaccatggattagctagttggtctctaggttcttttgttaataaggccaggttaccaaaaaaataattaaacaaagatatatactccttcggtccataaaacaatgcaattatcacatcccaaggagtcaaacaatttaaactttgactagaattatataaaaattactaacacttatgaaacaaaataagtatcattagattagttatataatatatttttataatgaatttatttgaaaatataaatgctaatattattttctataaatttggttaaatttgagctagtttgaccggcacgctttccataattgcgttcttgagtatatacacgaacctatacctatattataataatgtgacagaaatgataatgtacagtaaatttctaagagaggaaagggtgttctatctcacaacataagcacttgcaggg

SEQ ID NO: 37660 - DNA, 988 bp, Sorghum bicolor
  Intron number 1 from transcript Sb07g028630.1 (locus Sb07g 028630) derived from phytozome v7.0 (chr-ID chromosome_7; pos 63635826 to 63636813 reverse strand)
aagtcactccccttccgcatcggcctctggaactggtccgtcccctcccttgctccagcccctggtgctaccctccccttacatgtctctctgcctctccgccgctctgcagattagtagtaaccgtgctttgttacttggttctcatgtcgggtagggtgcaaaagtttccaactttggttgtgatttgttactgctgttcaagtctcctaatttgtgtgtgaatcatgtgtttctgaatcctggatgttttcttcagtttgaggtttctggaggaagtttgctgattcatgtattgcttctcttcctgttaatttgggttattcgctctttttagttcatttcagatagtagttctgattgatagtgagctattggatagcatggtgactttaatttttttcttcttgtgtggtactgaacttccatcagaatatggttatttattaaaactggggaaaaaagacagaattttggcagtacagcttcatgtctgaaattttggtctctttggcacccagtgtaatacattctatgctaccaaaatcactaattttggttgtatccgcttaataaataattaaatttatacttccaaccgaaactatatcttagcttccttttagttataggtggatacctttccacaccaacctatgtgtagtcaggatttttcttaaccacatttggtgtgtgagggaaaagtgaagatatttcagacaaaggttcactttcttgaaccttcacttctaatattttttatgctattactaagaaaatctttgatcaagctgtatgctttcttgatttttcttcatatgataactggataagtcatcatgcacattggcacaattaaaaccatcagcagttttttttaccatcagtacaagagagaattgatgtcatgttgccatgagctaatttaagttttttgttgctgcaatgtgaaggtacctgtctgtggagagaaataacaagcaaactt

SEQ ID NO: 37661 - DNA, 953 bp, Sorghum bicolor
  Intron number 5 from transcript Sb10g020410.2 (locus Sb10g 020410) derived from phytozome v7.0 (chr-ID chromosome_10; pos 43957958 to 43958910)
aaagtaaccccgtatgactccacaatagtccttctgtctgctattttggacctcttatctgcccttttattctttacgtctttttggggtaaataaaatccatgtgttatactgaaactcaacaagataaaaggcagttagtctttgagtgttctgctgctataactctttagtcagtgcctcagtggcagagccaccgcctggccatccgccgggctcgtcggtgaagttcgaaagaaaattttctttatatcaaagaagaatactatattttgctagctaaataattttgcataatgaggatcgcctgggctcctaaaagcttttggctccgctactgtctccagttgaaccttttttttcccttcaatgcgcaggcaggacatcttttggatcattgcattaatgagaagaaagtatttagaatacaaacccacacaagcacacacccaaacacccaaacatatactgaattggttctgtttagaatgctatagtgatagattgatcatataacatgttggattttaacacaatatgtctactgtaccaaatagttaagagttacactgatttccagactttatacagtacagtaaaatgcgctttcttatatacttcgagaccactcaaagaccctagtagttccttgaactgaaatttattgaccgtagggactaaactaaaagtaccaagccatttgttaggatataagcataatgttttatgaaatattaaggagtttgaagatttgaacaaacaagaaaagcattgattatcctgagtgcaaaacaagcgcactcagagcaggggaccaactcgatcttttggaaaacttggatgtaaactctgtcattgtgctcgttcctgtaatctgtaccctatatgagctaattacatgtgctgtcttccccacaggaaaaagaaattgtctgaaaaccttctttcagcag

SEQ ID NO: 37662 - DNA, 782 bp, Sorghum bicolor
  Intron number 2 from transcript Sb07g029040.1 (locus Sb07g 029040) derived from phytozome v7.0 (chr-ID chromosome_7; pos 64103458 to 64104239 reverse strand)
aggcgcatcgcgccggagttaaggtcttgcatcaggtgcgcgccattgctagttagctgtgccagttagttaataatccaagtagtattagtaacaattccatcattgattgggaaaaatatatccacagtagcacttcatagttcatactctatggctttctacttcaactgtttattacgaattccaatgggactatgggcatggagtgacaaagactagaaaaaaaaaaatactagtacatatgatcgtgtttgcctgtggttaggctgccagcacggcatgagtctttgattcgtgggagtggggtgcattggattgtccaataataatgctcaaagcacacaatgccaattgttaaatatgccaaagttcaaatgatgatacaagtggggccagtatcaacttgatgcatcaccctcagtgggaaatgatctggtgcatagcaggcactaccacatgatgtgatgatctgtggcgttactgctctgcaatgcttacttgtcgaaatttggcaagcttctcttcctgtttacttcatatacttcattttcttgccacaaatgtgccaacattgggcaaccaatttgacgattagaataaaagtctgtgccaaattttggcagggaatattttgtcgatgggcagtaacactctgcctgttcatgctgatatgagaactccagtttgtttaatttattcacattgttgtgattgatggtttactttcggttgatacctgaacaggtcggcagccttgaggaggcagctaaagctaaaga

SEQ ID NO: 37663 - DNA, 628 bp, Sorghum bicolor
  Intron number 1 from transcript Sb10g000980.1 (locus Sb10g 000980) derived from phytozome v7.0 (chr-ID chromosome_10; pos 721588 to 722215)
ctttccatccctgctgccatactcagcccatacaggtaaaaatgcatgcctttacctagctacctgaagtttgcttgtttttcttcccctaatcgtgattggattcatcattcattcatgtgcacacacacacacacacacactaggctgttttgaatttgaaatgcattgttctatctgtgatccacttgatggtttttatttgcgttcatatataaaaaaatattccaccctgattctgagtcaaactttggttagacctggttgtgtagattagtaccagttgttgtgatctcttgaacaaactagtaggttaggtgagttgttagattcttagatctgtcctgtacttcttatgacctctaccatgttccaaacatgtgaacttaataatggttactactacattcataccccctttttgttgtatgtatttgctgttcaaattgcagaatggttcccaacctgtgcattttttattatatcctacaatttcatcacatagtctagacatcgtttggttctatctagcaaaatagacgtgcaaattttcatatatagtagcaatgtcctgtggattaaccttggcggttctggtgcttcctgcaggcttctcattcttatccgc

SEQ ID NO: 37664 - DNA, 665 bp, Sorghum bicolor
  Intron number 2 from transcript Sb07g022410.1 (locus Sb07g 022410) derived from phytozome v7.0 (chr-ID chromosome_7; pos 56915480 to 56916144)
gggacttcaaggcctccaacatcctgcttgacgaggtgagcgatccacgtccagcgtggaaattctgcgtctctattcttttcgttgcgcttacatgacatgcactggagtctagtggttggtagtttcgacgctaggaaaagcagggtcatttctgacgcatacggctcgctgctttccacggcagcttctttgcgtagctgtagacaaggatatagtgacgacacctacctacctttgtggctgccttagcagaatcaaaaaattcattccctgaatcgtccataggaagatggatgtcaaagtcgcctggtttcgatagatgaccagccccgggatgactgcgactttggagtttcttggatgcccaattcagctcatgcagtttattatacccaaataatggctacatgtatagttaaaaacaatctgcagctgcctcttgttcactgtattgttttttttggcatcaaagcactcgtagtagcttaaacatcttgatgctgacagtgatagtctgagagggccggagcgttgccttagcatccaagcatgcactactacctctcactgtaattgtcacctatgacgaccttttgcctaactcaatctggttctctggattttcaggactacaacaccaagttgtcggactttgggcttgc

SEQ ID NO: 37665 - DNA, 604 bp, Sorghum bicolor
  Intron number 2 from transcript Sb09g023590.1 (locus Sb09g 023590) derived from phytozome v7.0 (chr-ID chromosome_9; pos 53237771 to 53238374 reverse strand)
agaaggacgacaacttcggggagtggtactctgaggttggttaagtgttagtaatatgtttcactgtggtagggcaactagttccgatttgtattcatgttggtagatcccatttgattcgtgttggtagttccaatttgattgatatattggtgctcggcacctcggcgggatgaaattccaaggttttgatagaattggtgtaagagggtttaggagaaatcactgtttcagtagcttagaattgttcggtctttgtgaatacacttctagactatagttgcctattttagacctactaaaattattgtccaaactacttggagtccacagcaaaagctgcaaagttcgtcacagcaatcacaaactcaccttagatgtgagaaactggattagttggcttgctatattgtttcaggttcagtgattccattaagtaccattttcatactgctcttctttgattgctctgtttcacacatgggaaaatatctttcctcgaaatatagcccttgtttttttgtatgaaattataccttgttctttcaatggggctaattcagagcattgttatttgttcctccaggttgttgttaacagcgaa

SEQ ID NO: 37666 - DNA, 667 bp, Sorghum bicolor
  Intron number 3 from transcript Sb10g026880.1 (locus Sb10g 026880) derived from phytozome v7.0 (chr-ID chromosome_10; pos 56289279 to 56289945 reverse strand)
ccacaaaccttaggagtcctgactttgagcaacatgtaagttatttggtttcttcattcctctgatctgctcagatctctctggaaacttttggagcttttagtcatgtaaatggatgatattcctgttttgtgttattactaccattaggctcgccatgattttgtccagtacagttatatgctgactaattcaatgtttcaaaaatgggtcacaaagcccactcaggcagacttgctgggtgccactgtatgtctgccgagtgcctagtgcttcttaaaacttcactgacgataatgatctctttcagattgtgttccagttattgcgatgggtattttaacaccctgtaactccttgagattccatcatgtgcttcataacaattatggacattacctggccttattaattagtgcagttaaggacccgtaattttaacaattttgttaaaaatatgttaacctgtaaaatttccaatcacaaatacttctatgtgtaagaaataacctcaaaatgcatgattatgttgataatggcatttttacattttatacatgacacttggcaatagtgcttgaattgttcttcacttgcactgctatttttcaaaatgctgactaatttactatctgattacagcggaggttgctatcatcatatagct

SEQ ID NO: 37667 - DNA, 820 bp, Sorghum bicolor
  Intron number 2 from transcript Sb10g026880.1 (locus Sb10g 026880) derived from phytozome v7.0 (chr-ID chromosome_10; pos 56289959 to 56290778 reverse strand)
ttgaaacggtacatcttctattcatatgctctactttttggttcttttcatgcatttcacaagcatcttgcctttctttgtttgttatgtgtcccatttcaaagcttttacaatttctgtgcataactatcgtttctattttctagcttctgctgctatcttggctagtcctggctcttatttaatgtagctgggggctcatatagctgagagcactccataaataatgtcagaaaggtcaaaggtgttagttaagtttcaccaaaattttgctttggtcctactgtccttgaaattaaaactgctgggttcttttagctccaaagatcagaaagctagttctcattgtcttcatttctgcttgtttttattcacaagaacattcaagtatttctccctgtggtaaaaaaatacttggcttttgggcacaacatggtttccaataggtatggtatggatgcacctatgatcatgtttttattactataataagattatataatcaaatacaaatatgatattatggaagtgcttttcaaggaaaaatcacagattatttgtcatgtttccaaactaatatagtcagtgtcaaaaggtctcaccacattatgaaaaaaaaaccccggtatttgtgatcaaaggaagtatgttattaaactttgaattcctgtaagcgtcttctattctttttcattcaagattgagaatttttggagtcttgattgtccttaggattgttaatatttggctaatttaatatgagttgtgatttgacattgaccattggtctgttgattggcatacacaggtactactacta

SEQ ID NO: 37668 - DNA, 417 bp, Sorghum bicolor
  Intron number 2 from transcript Sb07g024470.1 (locus Sb07g 024470) derived from phytozome v7.0 (chr-ID chromosome_7; pos 59528181 to 59528597 reverse strand)
gtgctgatttggctgaagaaacaatcttgaagcaggtcttctttcctttctttttttcttcaatatgtctgttactctgttaggcctggttcagctcgtgaaagattttggttttggctactgtagcactttcgtttgtatgtgacaattattatctaattacggagtaactaggctcaaaagattcgtctcgcaaattacaggcaaactgtgtaattaatttttattttcgtctatatttaatgcttcatgcatgcgtacaaagattcgatgttttgggtatctagaaattttttgggaactaaacaaggccttattcttgcgtagtgtagtaattccatcctgctatttttttttaaaaaaaaattgttacataaatttaattattttatttttgaaatcaggtcggcatcgttt

SEQ ID NO: 37669 - DNA, 748 bp, Sorghum bicolor
  Intron number 1 from transcript Sb10g026830.1 (locus Sb10g 026830) derived from phytozome v7.0 (chr-ID chromosome_10; pos 56263693 to 56264440 reverse strand)
ctctggctccggctccggctccggttcgcacacaggtgcgtgcgcgtcttcgatttgtgcgttttggtaactgattctgctaccggtcgcttgaatccagtctggttttgtcggattgggggctgccaagttgctttttttttttttatcttgcttgcttgtgatttgtgctctggaccgtgtgtggttggacttcgtttagactcctttagcttgaagatagagggtgaagtaggagtgtcgatgcgtggttgctaatctggatttcccagtaggataggatagtggaatcttttataagactgttctgttaattagtttgtcgatttccacggagaaggtattacggttactgtatactaaggatcatactttagcaggctgatggttcatgattgcagttgcttgctgacttgcagaatataatggtctgggcgcttgtagccagtggaagtaaagtacctgtagttcttcaatggaaactgtcttctcgtgaatcatgttttttttgtttacttgttccaaagcgctttacatcctgtgtttctctttctccaaggagattttccatatactctttagtaaagacttggactgcacctgtgcttgtttcaattgaatttaagtgttgatctagaacgataggttaagctcctggatgaactcatttttttttgtgctttgcgacaattgttcttgttcttttctctcgttgacaaggtttcctttgatttttcagtgagcaaag

SEQ ID NO: 37670 - DNA, 742 bp, Sorghum bicolor
  Intron number 2 from transcript Sb08g020443.1 (locus Sb08g 020443) derived from phytozome v7.0 (chr-ID chromosome_8; pos 51456359 to 51457100)
tggaattactccactccacattgcggcaagacaaggttttttctgcccttgcatatgtctgttatgtaaattttaggtgtttttttttttgaatttcttagttttaacacggcttatctatgttatcttcacacagtgggttcagtcttcatgtatcttttcagatagtattacagatgcccatgtgcttaaaccaaacattttgtttttcgtttgaatcagatacataagcagaattgaacaatactcacactttgtcatggctaaaaaaggcgtaatcccaattttgattggatcaactatcattacctgaacttagacactaagctagctttggtagagaaacaaagtctgcatcctgcattgaagcccagtgcttgggaggttggttggaatatggccagtgaaatatataacccaaggtgcttgttacttagtaaaaattgattattcggccaccttctgattagtcacctacctgtattatttaggctgaaagttgcaaaatggagcctgtgtagaaggtcaaaagaacacctgatgtgtattgaccatcctagggctctgtgcttcatatcattttcaatttagcttatagccctatggaaatgctaaaacgatccattcttaaaatattgaactcctggtgttgactatcctttcgttatgaaacacatgttattaataggtcctaaaaagtcaatttgatgtgcttttttctatatattttttccaggctgct

SEQ ID NO: 37671 - DNA, 799 bp, Sorghum bicolor
  Intron number 1 from transcript Sb09g006230.1 (locus Sb09g 006230) derived from phytozome v7.0 (chr-ID chromosome_9; pos 9233169 to 9233967 reverse strand)
cgcaaccccggcctcgccggctcactcgatacaaggtgcgcgtcctgggctgaaatatctgcatccggctttgttgtttgtcagccgccgcggtgtgccgctctaccgcgttgttgggactttccggtgtgaacgatgtggaggagggaggtttgtggcgttgctgcagtgctctgtattgccactgtagattagagggtatacggtttttgtaccgcgtaggagaccttgcaattccacgccatttatgagcgagtaaaatcgtaggtgaatttcgtggtttcttctgtgccttcaatattttgttgctcattgagcagttggtcataaggtaagtcgactaatttgttgaattacacctcttcgtttccagtgtcctcgttatagattcgggagtgtctggtgtttagttctgaatctactattatttctattgctctgccatgtgaaaagaaaatgcataccagtgacttactgtaagcactgtactatgcgaattacatagtgcattggtgcttgtttcatttgggttcattacttcattttggtgttaagcagtgtgttgagtgctacctttttccctctccgtgtctaagtagttcaccaggatgtgtggtaacgtggaatattcaattgcactttattttagttgaattgtgcgattcttgcttggttgaacttgtgcatgttttaaagaaaggcttgtgtgctgtgttcagtcatgcgggactatgctacttagtttacactgcagggtgtttgattgttatggttttgtcgtgttgattattccagactt

SEQ ID NO: 37672 - DNA, 795 bp, Sorghum bicolor
  Intron number 2 from transcript Sb10g004050.1 (locus Sb10g 004050) derived from phytozome v7.0 (chr-ID chromosome_10; pos 3589174 to 3589968 reverse strand)
gcactagagataactgccaaatcctaactcaagaggtatgtaccatttagccatctaaatgtagcatttattttattattattgttgttctctctcatctatttatgatgtactgtatcttgtttaggcctaggtcttgtttagtttcgaaaagtgaaaagttttcggtactgtagcactttcgtttgtttgtgacaaatattatccaatcatggactaactaggatcaaaagattcgtctcgtgatttctagcaaaactgtgtaataagtttttgttttcgtctatatttaatgtttcatgcatgtgccacaagattcgatgtgacggggaatcttgaaaactttttgattttcagagtcaactaaacaaggccctagtttagatgcgaaaagattttggatttcactactgtagcactttcgtttgtttgtgacaaatattgtccaattataaattaactagaatcaaaaaattcatctcgcgatttacaggtaaactgtacaattagtttttattttcgtctatatttaatgttttatacatgtgccaaaagattcgatgtgacgaagaattttgaaaactttttggttttcgggttgaactgaacaaggcctagtctctcatctttgtatcttgtttagtctctcctgtgtatgtgttgtccttccttgttgctaatcctgcccttttcttttggaagaaaacaaaccggctggacaactagctagtaatgaattgttaaactgtgatgtttgcaggatcccttcttgcttttaacaggcccctctcgttc

SEQ ID NO: 37673 - DNA, 653 bp, Sorghum bicolor
  Intron number 1 from transcript Sb08g023050.2 (locus Sb08g 023050) derived from phytozome v7.0 (chr-ID chromosome_8; pos 55183574 to 55184226)
gcatccaacggcatcgcccccagaggtattatcgcgtcgcgtcttctctgataaacaccctcattcacacttcggcgcgtccattctcattctagatccagttccagcgaccgatctgacatgttgggaggtggacttccactatattgggtggaattttggtttatgttgctcgcgagctaggaattggttgttctccatgtaaatctagcgcctttaatttcgttctgcggccattgggggcgttctggatgctccatgatcctgctctcatgcctcaatccttgtgtatgtgtaccgatatctctttgttggacagtactctagatttcataggatcctttgctagctttccacggcttgttggtatggtatttcctagtttgctgcaaaatacgtccacaagttctgtttctctttctcccctttggtggactgcacaggtgggagtgccacacacactactttacttggctgcatgtaacaagctactgcaattactttattctgttatagttttcaagttttgtttgtaccatcggaaggatgtataagcaaccatggtttatacacatgtttttttttaaaaaaagaaaaatctagatgacttttctatgttcagcagttaataatcttttctttcttcctcacag

SEQ ID NO: 37674 - DNA, 845 bp, Sorghum bicolor
  Intron number 1 from transcript Sb07g024550.1 (locus Sb07g 024550) derived from phytozome v7.0 (chr-ID chromosome_7; pos 59614574 to 59615418)
tcaatcacctttcagaattaattgattatcacccggttcgtgtttgatgtaacttcgatgatttgtccatgcatctcctgtttcccctccagaaaagatctctttttttccctgtgcttgttagttcttttgattgtttcctctctgtctctctctctctctctaattagatagagacgatgtttctttgctatttgttgatgatgctttatttgttatcttgctttgcatgcatatgcatctccatgttctcttctcctagctctcccatgtcctctaaagctacatgcatacaccagctattagttggtagctccccttgtgctatagtagctagcttcttcgctcatcttttccgccttgtttgcgagtgcaacaaccgcggctaagtttgtttggactttcttcctcctcgctccgccctcatcatcatcagctcccttttcaccaccactcgcttttaatttgtttgtttctttgcaagcagcagagaagagctactttgtcctctgtggcacacagatccatccgcgtccatgtccatgcttgtatgcacatatagctccagttctttggagtgtgtgcttgttgtagtacatgtactgctacttgtttgcatcatatatctatatttatctgttccttcctggatggatggatggatagatagatagatatacacacacacatcatgtatatacagacacatgcatatagctgttagctgatatatgcatggatttatttgcttgtgtaagtttgcttgactcacaccattattttccctcttctctctcgtttgtcttttagatcgatcggtcgtgcagaaggagccggcggaggca

SEQ ID NO: 37675 - DNA, 974 bp, Sorghum bicolor
  Intron number 2 from transcript Sb09g026716.1 (locus Sb09g 026716) derived from phytozome v7.0 (chr-ID chromosome_9; pos 55923649 to 55924622 reverse strand)
gcacgacacctcggagggcgagaccgaccgcgaaggttgcttaactcttttcttctctacttccgcccctctgtttcttaagcggaatgttctgaatttctgaatcgatctggttgctcaagcttgctcttgtttggagcgaaattacgaagaatttggtttgcaagtttgagaggtaggcgttgacggttatgcagagcagacaacacaatgtgcaattaaagttctttcttgtacgctactgtttgggctctggtgacttctttttctcaacttctttacaactggattagaaaaatgtcatcttgaataattggtcagctcacgctggactgtattgcctgtttgatgattgctttactagattactgtaattgttcattgtttgccaccttttttatatggtgcgtctgtttggttatcttgctgagaatgcctaaccgttgtgatgtgcgcggctagcggctagtactttcttcggaccagatatttctttaggtatattcgatcttttttaaggaaatcaagaagggtattaagttcactgctgcctttaaagttaacttttggctgttcttttcatcttttggaaagaaataaaatatttggaatgttgatgtgaccatcttctagttgacctcactatctaatagttgttgtgccccacattctatgagctatatactccctccgttccaaattataagtcgctttgactatccattttgctatgcatctagatatattgatatcataatatgtctagatatatagcaaaatggatgaaccaaaaaagtcaaagcaacatataattttgaatagagagagtatttttttctctttattgaaagaaaatccgcactacatttgtattattgcttttccttagcttaaccttttcttttgtgtagatctttttggattgttttaataataaattgtaattgctgtgtttttatgtcatttgtgcagac

SEQ ID NO: 37676 - DNA, 609 bp, Sorghum bicolor
  Intron number 2 from transcript Sb07g026240.1 (locus Sb07g 026240) derived from phytozome v7.0 (chr-ID chromosome_7; pos 61461254 to 61461862)
acactgagaaggctgatcgtgctacagtggaacaggtttgtaaaatgttctcagctaggtgatggtgtttttccccctgtgccgctgtgggaactgagaagggcatccgagccaaaaatttattgtatatctgttttgattggatttatgctgtacatgataagaatttgttttagttaattagttcatttaacctcatgttctacctttgatgtagcatttccaaaaacccaaaccactctggtatttgatccaaatggtccaagggtcggatgcattataaaaatgagcagaacttctctagttggaatattctaattattattctaattattggcctgtaaattgccaattttcatcagaccttaccttactgcctttgtttttactatccatggcttgatgtatacctacaattgggaggcagaagtttcttcctttatacgagtgttaactatgctattcttgatgcttagtgtatttaaatgccttaaaaaagggtgtatgagttggcttacctaaatctaatgaaggttattccaattgaatcatttctgaactctgaatgttttttgtttatatatgcaggctattgacccaagaacgcgc

SEQ ID NO: 37677 - DNA, 922 bp, Sorghum bicolor
  Intron number 1 from transcript Sb07g029170.1 (locus Sb07g 029170) derived from phytozome v7.0 (chr-ID chromosome_7; pos 64225782 to 64226703 reverse strand)
aacttggctcttatcttgtgcagtcgcagctacaggtaataattaaacgacgatgcgcttgaatgcttgatgatgcagatgcatgcaggttttatattaagaagatgttaatagtctgatgaatgccgctgttgtatcagatattcatgaatgtgaattgtttttattttcccttttttactataatctgtcacttctttgtctaccgcactctgcattcaagactactcccaatgtgtttatacaagggagcaatggtaattttcttgatccgtaaggtccttagtactaagtaagcattatgatttgacgcgaagggtgcacttgtaaggataattttgatgtgctaagatacaaccataagtaatcaatgcagcagtgagatatccatttttttcacacaaactaattgtgggtaaagatatttttgtttgaacaaattgaaatctgacatttgaattggaaaagcctcaacctgcaagtgttcttatactccctccatactcaaaaataaagtcgttttggacaacgacacggtctccaaagcataaatttgacttcttgttttataaaatatttatcgaaaaatgatatatgtatagttttatttaaataatttttaaggcaaatctattcatatagttttcacatttccaaactcaacgatttaaaagttattcatggtttatattctcaatgtttgacccaaaccttgtccaaaacgactttatttttgagtatggagggagcatgttgtttcttgcatgtgttatgtgtacctgtgtcctctgtagttgtactagttatgttttcgcttcttaatcattagtgcattttaaaaattgatcaatggatttacttgctgctttctgatgcttgattggcaggcagctgccaactccagtgctctcttcttgacagc

SEQ ID NO: 37678 - DNA, 686 bp, Sorghum bicolor; identical to SEQ ID NO: 36331
  Intron number 1 from transcript Sb10g023360.2 (locus Sb10g 023360) derived from phytozome v7.0 (chr-ID chromosome_10; pos 51945141 to 51945826)

SEQ ID NO: 37679 - DNA, 892 bp, Sorghum bicolor
  Intron number 2 from transcript Sb09g030940.1 (locus Sb09g 030940) derived from phytozome v7.0 (chr-ID chromosome_9; pos 59556772 to 59557663)
tgctggccactccccctacaggctcttacaaggtaaaccatttcttaggtcctaacgttgcccccctacagtctcttacaaggtaagccatttcttaggtcctaatgttggttcatacgacttggctaggtatggtacaaatccataaatattgtcttcaagaattgcttttttatggataactatttgtagcctaccctacttacttgggactaagggctttgtttttgttgtatggatgatttatgccatgtctcagttgaaatatgttttaccatattcctaatataaaattttcacttttatatgctcccatgttggtggctcttgttgtgttaatctctagcggtctagcctacaatgtagttcattgtgttgtgctgctgtttctattgtttcatctcaaaggttttcgcccctaaaaagataaacttaaattgtatgcattccagaatttggtaactgcttagaagttgcaacctgtatagctacctagttgaagtccattcagaatccatctgtttaatctggaagcagaggtttttttttgggccagtttgatatgcacctatggattgctttttgtgttttttcttcccttgagttttggctaatacctctcattaagtttaggcatttgtgttttgcctgcattaggtttaggccattgctgtcatattgaacttaatagggatacaaatacgcctccttataaagtgcgatttcttgttcatttactgatcttgctttggattattagcttttcctgacttttttcattattggaaaagatgttcattttcatttcagtctgttagggcaaacgtcaaagtaactggtattcaactggctggtaacttgttaacttatttcacaggaagagcaacagtgt

SEQ ID NO: 37680 - DNA, 458 bp, Sorghum bicolor
  Intron number 1 from transcript Sb07g022380.1 (locus Sb07g 022380) derived from phytozome v7.0 (chr-ID chromosome_7; pos 56862922 to 56863379 reverse strand)
cttcttacaatcttttgctacctctgactaccaaggtaaggtctttcctgatttatatctctttgccgcatcaaatatagtactaatcaacaaacatacttaaattgtgaattcgactctgaacactgaagtgtctatcagtaaatgatgggtccatttcttttttacaagtgaccagtcaaatgtttcagattaaaattctagaagaaattcataggatagattctgaagcaagaatggtgcatatcgactgtgcaatcccttcgcttgattactatttttttctttcaaggtagataaaaccacatccatcgagcattggtaattttctgttaatcagaagcatttcaccaattttagctcccttttttttaaaaaaaaaaagattttttttctcccttgcatctacctcacaaacctgcaaataaactttgttttatccatagttgcagcattgt

SEQ ID NO: 37681 - DNA, 493 bp, Sorghum bicolor
  Intron number 1 from transcript Sb10g001710.1 (locus Sb10g 001710) derived from phytozome v7.0 (chr-ID chromosome_10; pos 1417634 to 1418126 reverse strand)
ataccgcaagttctgcaacagtcagtaagtgaaagtgctgcgtactcctactaatttaagctggtcacacgcattattcttcatctatatatatgtatcacgtgtgtctgctgtcttcatttatttaatttgtttgttaattatttgttccttcttcggttccgttcccatcaaatcaaatataataatccacagctttatttattattattactccgtggttttgattatatatttagagtactataagctagctagctactactacatagcagtattttacttttttttttcttgtgtattcaggggtctcattttattcagtagctttgcttttccgtggttatttatgtgtctcttcatcagtatatcatattatttctctcagtaatataattttccatgatttgtcgtttgttagctgtgagtcatatatatatatatgatatgggggcttattaacttggatgcaggcgtgctcggccaaggcttc

SEQ ID NO: 37682 - DNA, 920 bp, Sorghum bicolor
  Intron number 2 from transcript Sb08g016480.1 (locus Sb08g 016480) derived from phytozome v7.0 (chr-ID chromosome_8; pos 44008371 to 44009290)
caggtaaatatggtgttttcaaatggtgaaaaacagaaagatgttggaatatcttccatggtatcgtatcttttcttggctaaatcttgaaattgctagcttgaatttgatgtgtggttgaattttccagtaattttattttagaccataaaatgtggaacaacatactttcttttagcttgttcttttttctatttaagaatgatgagctagtaaaatcttccaatatacgtaccaatttatcatatgctttcgatctgagctattttcaccctgccccacttccttattcatctgatgaagtgattgagatttgagaaccttccatccttaattgatggaagaaaaccagtaaatgattaaggactacaacctctagtgttaagaatcatgcctctatgatcatgaaagattgctgggttatgctagaatccaggacagtaccaaggctttttaaaagtacgtttgttaactgcaaccacaatatattttaacctttttactgtttgggatgcgctccatcttttgttactattagaagttttctgtttgcatatcattgaataatttgcgtaaggactattctgcagcaatgtatcacaagttccaggcagtatcagttttgtttttagttcgtgatggtgtgtgctgtatctggggtctctcccccttttcttcttaatataatgaagcgcagttctcctgtgttttcgagaaaaaaatgatcagcatggttgctctgttgcaactcgagcaggtctgcatatctgaatcaatgaaactgcactcaaaagccagaccttccgattgactaagtttttgtttgaaatatcttctctgtttgtgttatttattgtttagtttctcaagatttagctctggcaggttcaggaagcatatttgagacgttacggcttggc

SEQ ID NO: 37683 - DNA, 695 bp, Sorghum bicolor
  Intron number 1 from transcript Sb10g009750.1 (locus Sb10g 009750) derived from phytozome v7.0 (chr-ID chromosome_10; pos 11559399 to 11560093)
tctcgtactactcaacctggtcacccttatatttggtacgatcgtacctcacctcgccttcttgagacggacgggtcgtttgtttgcacctcacctgttcgatgttatggtcgacaagaaaatggtggggtgtgtttaggtttagggttggagttgtttcttctgtgctcaatttccccgagttttgccgcagatataagcttcgttagcgattgttttttttctctggggattaatgtagtcatcaaatcaaatttacctatataaatggtgatcctactacaggcttcaatcgacattccttttggtcaaattgttcattgatccttttgctgaatgatgtggccacttcgtttccatttcatcttttgtggtgtcagcataaaacgtttggttcagtttattctacatttcttatatgtacaataataagaggatgcattttaatagtgttgagcgaaaaacatacacatatataaaaaatttgaatacatactaaccagcatgcaaaagttgcactaccttatcatctgctttgtgtgtgtgtgtgtttcttacaagggtctgctttgtgctttgtgcttgaactggttctggtagttactctgcatgctgatttcctcttaaattttcagctaagactcagtttatttctttcagctagcaacatttcagttgtgaaacaggcggaggct

SEQ ID NO: 37684 - DNA, 815 bp, Sorghum bicolor
  Intron number 1 from transcript Sb10g006560.1 (locus Sb10g 006560) derived from phytozome v7.0 (chr-ID chromosome_10; pos 6003623 to 6004437)
tctccttcaagctcgtcttctacctagccgtctcggtgagtggcctgctcgaatctcggtgctcttcagggtcttcgggtttgagccgctagttgtgcgatgtacccgcggttattgtttcaaattggaagctcgtggtgcgatctgtgcggtgtgtttcattaatttgcgtaccagttgtgcgcatttggtggttcatattcttagttttagaagagggctgtgttgattttttgcatattagttgaattagttctcgagaatttggtattctggtgccatcagtaagtagggatctggatcttcagaaatgtgcatacaatcgtcaattttcacctacgaggtaaatttgaacagttgtgtggtagtcttagcctagtgttcgtcatagtacattttgcacttggattttgtttgaaatacattcaaattcctgttttttaaagtatgatatttaaggtcatatgagtctacggtttgttgcagccacacatgtgctccgcctccaattggatagaactagatcactagatgggagcataatttttttttcatatatttagttcatagttcattcttaaatatggaaacagctgctctcataattttttgttttgttgaacattgataccaataggcatgaacttatctagttcatcacttgacaactagtagtttgcttttgttaaaatgatattacatgtctagttgcttagctgacacatggaaacattagccgaagcttggtttgttcattattagtgttgctctagctgttgcatgttttctgataactttgtcctgaattgcaggat

SEQ ID NO: 37685 - DNA, 808 bp, Sorghum bicolor
  Intron number 2 from transcript Sb10g020110.1 (locus Sb10g 020110) derived from phytozome v7.0 (chr-ID chromosome_10; pos 43144130 to 43144937)
gtattgaaaagctattgctgtttcttcactcactggtaataatcacaaacctttatctgtttcttcactcagctttctacatatatctgtcttgccgatagataacatgagtatgcattcattcaatatgctgctaaattatgaacctggactcctgtttctcataaattggttatgcctgatgatgaccattagatcatataacattttatttttcaactttaggtgttatttgaaatctacgtggacatttatttcaaggcaaaattggccaccggacactgaaagtggcctctctttgctagcggacatgcaaatttgacaacaacgttggtgcccactagcaaactgctccattttgcatgtccgctagcaaagagaggctacttccagtgtctggtggccaattttgccttgtttaaatagtcaactgcaccacttcccaggaatgaaaaagcatctggttctgttcttttaagatttgatttatcattttcaaatctatgttttctgaggcagtgagtagcttagatgaactcatctgtactctgcaaaaggacactgcaaatatacattgtgttgtagctaatattttgcttgttatttcaattaatatgatgttctgtgatcagttcaacaccacctgtattcacgcataaagttcattagcagattttgaatgcagtttgtttcaaccacctgtacatttgttgtatgtacagtagtccttttggattcatgaatattgacattatcattattttgttcaactgtgcagacctgcaagctctggtaatttagaagaaat

SEQ ID NO: 37686 - DNA, 730 bp, Sorghum bicolor
  Intron number 1 from transcript Sb10g002140.1 (locus Sb10g 002140) derived from phytozome v7.0 (chr-ID chromosome_10; pos 1827292 to 1828021)
cgcgccccgccggctgctctcatctcatccatcaggttccgttccagtcctgccgcgcgtgttgttcttctgcaccacagtttcgtcccgacatgatcctgccatgtgtgtccgatcgatgccgtactgtacccaccagatccttgattagttgacaggatgtgcatgcatgcgtttctttggttcagatccactgtttcttcgatccagtaggaggagtcgtctgcgtgtggtttcgtattctgtttgattaatttgtttctatagtatagtatgtttctgtcgggccatgttagatttcgtgtcatggaaaagggttagaattcatatccctcgtgatgttgccacacacctgatgaactggccgacctggaaatattggataggatcttccgctattattgtatatttgtacatatatatacttgtgtctgaacttcaagattctgaatctgaactccagtgataactgtaaatccgtccctgggattaatcattaatctataatttttgttcggtatatgtacatatgcatattttctttctaatgcagtgaaactgaaatacacaatatttttccttggcttgtcgtatgtacagtattttattttttgtccttttatatgcagtgagattcattttgaaatcccccggttcaattccacccaaacccagtacaaggataagtacaacccagtgcattaacctctttccaactgcaggcatcagc

SEQ ID NO: 37687 - DNA, 934 bp, Sorghum bicolor
  Intron number 2 from transcript Sb09g016150.2 (locus Sb09g 016150) derived from phytozome v7.0 (chr-ID chromosome_9; pos 40550760 to 40551693 reverse strand)
gttccatcagaacaataggtatgactgctttgatcacctcttgtgaaaaggacatattgactggtatgagtccacacgatacctggccctataaaacacaatcacgcaagtaacaatttatgtttcagcaggaggccgtgctcttgcctcgaatgagtaccagattttggtacagcagaaaccccagggagatgcgccactgctggccttggggtgtgttttaactgttctatatctggctgctctctgtgctagagcatctaagctatcactagcagtctttgactgatagtgttgtgcacttgaccagtgagttacacttgcgccagatactgaagtggtatctgtttctcttaacatggttgtctactttgtagaaaaattgtgcaatgtgttcaaaattaaatattaccaaggttcataatgacagatacggtatctgtttatgcgaagatgttccatgtgtaggagcttttgattaacaggcaactgacagcgtgtagggagcaaaatagtatctgtttatgtggagatgatgattgtcatgtttgaacctttggtcttctggccactaagaagagtggtaacctgttctgtttgaacattttgttttttgcttgttctctgcttgtttgtgacatggtggttattagttttttcctgtggagatagtattcctgttggagcatttttgttattttttgcttatgtactttatttgcatgcttgttacagtgttacatataatggagagtactaaagtttaccttctcaattcagcaggaagaagcgacctcgcaggtcacgcgatgggcctacgtcagtggcagctgtcatccagcagtgggctgagcacaacaagcagttggagtatgctcctgaggggtcaaaacgaccaagaaaagcacctgcaaagggttcgaagaagggctgt

SEQ ID NO: 37688 - DNA, 933 bp, Sorghum bicolor
  Intron number 1 from transcript Sb07g027890.1 (locus Sb07g 027890) derived from phytozome v7.0 (chr-ID chromosome_7; pos 62867044 to 62867976 reverse strand)
tacaccatcaacctccacaagcgcctccacggctggtacctctcctccctctcgccttcttgctgatgcgcgctgtacacagtacactgttctcgctgcgagatccggctagctcgcgagttttccgtttcgctgctgatagtatttaggcgcggtagcagatggtgctttactatttgataccagtagacaagatctccctgttccgcaacccctgatgcggctcaactagtgtatgttctatgtggccagttatattctcttcgtactttgcatatgagcacgaggagatgaaacaattcgatgaccttgccttcttgtgctttgtgatttttgtagtggcactcgtttggttttttcttcattttatttgttaattacttgaaaggtaaatgtaataggcatctagcgccgccctttatttccatttggaagtgcaaaatgtgctaccagttagcaattgctgaacctatcttaagaagatatagcctttatatgctcagtttaacattcttatcaggtaaaattctagtgctgttgtttgcatttacaaaaccaaaacctataaaccatcaaggtttagaagcctcataactcatgagatggtgcacattcattgattttggttggctttgtctgtgtttacacgagtagactcaaataattaagcatgaatagaaagttggccgctttgattgcacgttccgtgcttgtttgtctagaatcaaaataatctagatccaatgtgttcgtaaattgttccaattcatttcagttgctgaatggctatacaagtgtcttctgttatctgaatggcctcttatctctgcttaatgttgtactgttattggaactgaagcttactgaatgccatgatcccaccttaccaacattttcttatgtttgacagcacattcaagaagaaggcaccca

SEQ ID NO: 37689 - DNA, 592 bp, Sorghum bicolor
  Intron number 2 from transcript Sb10g007480.1 (locus Sb10g 007480) derived from phytozome v7.0 (chr-ID chromosome_10; pos 7340112 to 7340703 reverse strand)
cagccgaacacacgtaatctccgttccattttgtgtgttttgtttgatcccttgctggtttgggtttgagagaagttttgctctttcggatgaaaatctgctaatgaaaattgagataatttggtggtcttgggggaaaatggcacagctgattactgcttacaaaccgttcattttacaggctgttgacttgctaattgctgtgcaatgcattttctcgttcatttgttttattgttacaggttcttattatttgaataattgtagatttatattcaaactacactagaagaaagaactcttaaaatcacatcccgatatgaatatagtacggagggttattgggaaaaactgccgtgccctgtctatactggatgtgtttctgtgtttattgttggagaagaatattaatattatatgccactgatacaatataactcttgacatctgcagttggtagatgtaaattcaggtcaagcgtatacatttactggctactgtcatatttctctgttccttacccatgcttgtttgtgttttcttctggagaattgcagcttgcagcactactggcatctatattggcgataag

SEQ ID NO: 37690 - DNA, 993 bp, Sorghum bicolor
  Intron number 1 from transcript Sb07g028070.1 (locus Sb07g 028070) derived from phytozome v7.0 (chr-ID chromosome_7; pos 63032049 to 63033041 reverse strand)
ccggcaacggcgccggctggctccaagaaggacaggtgacacttcctgcactcttttagttcctcttcatttccccccttcgagttagggtttgcagtatccacacagatgctacagtagatgcgcgtgtctcgtgcggccacatttagttaggtagagtagcttctacgcgaagctaaacctctacgatcgaaaattttcccctttccagatttgtttggtgatttgaggtgggatttaccggaaaagcttacaagtttttttctttttgttggtctcacggtttgtagtgcacggatttgggcttgattgtttctggtggacagaaatattttatatcaggatatgattagtggggttgggtgaagtggaaggaacttgttttcaagcgctccagttggttcatttgagaattttgtggtgccatttctacttgtactagaaatttaatgccccctggttccaagcttaggggaggcaatcgtcttgcttgcgtgtgtacctgtgaaaagcttttaatgctcccgtagtcatgtcaaccattcatgcagaattaaatcccctaaggtcattaacgtagaaatggattccctcaacggctcaatcccatcaaaatgtttgtttttcaagcaaccggcttcaaacaaacgagcttatccataactgccaatttgacttgcagagtgggctctacgtttaggtacaacttgctcgaactagaaaggagcctttctgtttgctatgtggattcacttgaaaggaatttatcgcactttatatgtactaaatccgtactactattctgcaaacatcaaactcttctgcatgtgacaatgttcctgacactctcttcagcgtgatatggatatgtcccctgttctcaattgtcaccgtcggctgtcatttgctgatgttcagcctgttcactgaactcactgttcttgttgtggcaatgtagcagtgctagtgctggagcaaaacgaagaggtggtc

SEQ ID NO: 37691 - DNA, 445 bp, Sorghum bicolor
  Intron number 2 from transcript Sb09g021335.1 (locus Sb09g 021335) derived from phytozome v7.0 (chr-ID chromosome_9; pos 50815237 to 50815681 reverse strand)
gcaccatcgtgctcgcgtcgctcgtctacatcctcgtaagcaaagaaaaaaagaacctctgcttcctttccttacttagctgttgattcattgctttgcattaaaataaaattccagattcgttgctggccagctctcctgcacgaaccaccagtctgttcgtacgtgatgaagtttttttatttattttataacgtataataaaagtaagcgatcgatcgatattggggcgcgacaagattctcagtataagaatgaaacatccaatgatttcattttagaacaaccccttcagattttggtacactctgtgctcaaaagattgttgtcattctaaaactcaaaatttgtctcacaaaatctatcgttatagtctttgcacacagccagtcaggtcccacgcatatcagctgatcaaccgcgtatccttttcctctatatttcg

SEQ ID NO: 37692 - DNA, 716 bp, Sorghum bicolor
  Intron number 2 from transcript Sb10g020450.1 (locus Sb10g 020450) derived from phytozome v7.0 (chr-ID chromosome_10; pos 44053295 to 44054010 reverse strand)
ctatatcgtaagataaatggctaagtgttgacaattttttttttgatttttagttgacaatagagctagctgcatgtgtccagacgacgtagaatattcggaaacgttgtctaattttgagaactatgctatttttttttgtttgggctaaaatcacctatattttaaattactgttatgttgttcctaagacaattgtgtgtgtgaggagctgctggactctgttgtgtgattgtgtaattttgcaaagtcataaatgtcccttacatatttatgtctattgtgtgattgtgtaattttgcgctccctggctctaagggtttaacaaggtcaatttagttaggcctaagattgtgttctccctgtgctgctagtgtttactgtttagataaagctaaaagcattggagtcgaccattgtgtctaagcttgtgtgctccatggcaaaaactgtgtaagcaacatgttacataggtttttgagtccacaatttttttctatcatactaagattggcctgcctatgccatattctggatttattgtttcacttctggctggatataatcatataagagattctataattcttgttgtgttaatatctagcacgagaggattgaagggatttttagctactactattcattcaactcttcacatgttttttataatttactttcttgtctataattttagaagcaaaccaaatttaagg

SEQ ID NO: 37693 - DNA, 805 bp, Sorghum bicolor
  Intron number 1 from transcript Sb10g019660.1 (locus Sb10g 019660) derived from phytozome v7.0 (chr-ID chromosome_10; pos 41812962 to 41813766 reverse strand)
gaaatcacgctttctatgtgagcaaactgtttcgtttgaaaatttgaattctactctacggtcttttgatttttgggtatccaggattcaggccgatgcatgttttgtttgtatttgtccttttgaaaagttttagttgattgtagacagcagttagtcagtcctggttagggattattattattatttgggtggaggggttttgtgtgtgtgtgtgtgtgggtggggggggggggggatgagggtgttgaacatgatgtatgagggatgcactgtaagttctgttaagatgtgttcttacagcaggcactccactgctttgcaatgctgaggtaatggattagtaaagtttgactattcttctcctggtgacattattaaccattttgaatttgaattggtataaatgttactaggaatactgtggtcttcttagacatgtaggcttataacttttcattatgattccattcctgtctggttaactctcaggtgtcattttttggagaacagatgttttggtgaatagagttgtctttatattttttttctttttcatctatgccttggagcacagattgaaacaatgtgtgccaaaataatcacactatatggccatcccaattctgttttgtttttatgggagtgtcccttatgcgatatgttagtagttattttagtgtccgtgtgtgagtgtacttccatttgtcctcggagaaataatgcaagtactgcactcgtatgcaaagtgcaaaaaaaatcatttgcgtatctttttttgtttttcaggaagcctgtggttgaa

SEQ ID NO: 37694 - DNA, 991 bp, Sorghum bicolor
  Intron number 1 from transcript Sb10g019690.1 (locus Sb10g 019690) derived from phytozome v7.0 (chr-ID chromosome_10; pos 42106359 to 42107349)
acggtgacggacccgcacgccgccaactccgtcgggtacctctaagaacgcggcttgagccaatggacttttcctataattaaaatctttttttttctgttttcaaaagtcgattttgtattttctgtaaaaacatttctacaggcggttcacataactgaaccgcctctagaaatccatttgtacaggcggttcttagttaccgcctatagaattggcccatttctactggcctccagcgcaggcggtgcagaaaaacgccagtagaaataagtttccggccgcctgtacattatgcctctgtactagtgtcactagaaagatcattgagtctagtttttttaacaaatttatttggcaacacaaatattacatgtattttctataaatctagtcacacttgtagcacagaaaccaaaagtgacaattaatttgagacggaggtggtatatctatagaagaaaaagggatatcagtcgatagtatagacagagcacagagaaggtaatacgtggacgtcgccagttgattctgcgatatactgttacaaagcgtcacgaacagactgcccaagtccgatccggaattcggatagcaaactgatgcgctgatgccacgatcgacatggactctagctccagacgtaagtctatatattgcgccctagtatgattcttaattttggttcgctgcagttcttggcattagagtcgccgtcgcaagctgtgcatccggccggcacgcccacgtctcctctcacatcatcgtcgccacctttcgacatggcacactacgcgtcgctatatcacggcggcgcttccatgccaccgctgcctccggggatccccgtccgcagcgtatgggaagacaatcttgagctcgaactgcgcttcctccacagctttgttcataacgcccgcttcgccgcggtgaacatccattaccccggcgtcatacacaacggcagttagaagcacctcgcagacggctg

SEQ ID NO: 37695 - DNA, 972 bp, Sorghum bicolor
  Intron number 1 from transcript Sb09g020410.1 (locus Sb09g 020410) derived from phytozome v7.0 (chr-ID chromosome_9; pos 49721470 to 49722441 reverse strand)
acaggttccctcctgagcgcgggaagaagttcccggtgagcacccatggaacctgtccctccctcactctcgtcctctcatcgttttcttttcttcttgtggtttaattatcatcgttcttgcaaaatttgccatggtcctgtacgatcttgcatgctgtggtctgggcgagggttcttaaattcgagaggacctgtcagccgtggcgacgaaagcgatcgattttgtgtttttcgcagagaactgtgctggaatttgggagagaattagaaaccctgtgcatggtgttcgttctagcggtttgtgtcctcaggaggaagggtttgccgcaatcaaaagtgcttttttttaaagaacgacccagcgtgtgaaattagagagaaagacggaggagcatgggctcttatggtgcccgctttcgggagatctttttctttagatttttttttcttcttctgaaaagttgtgcgcctttagttgcggttggagccgtttatgttgggcatgagagatcaatcaagagactaaattagaaagccttttgacagtttttataatataggtaggatcgaggatttgttcatgatctgcctctcgtttgtttttgttgctttccatgcatatggctgcacttcttctttgttgcaaaaaccttaacaaaagttgccaactcgtgttatttgcttgcctctagtggggatcggttctttaactgatgtttcctgtgtgtggttcacattatttggcgttgccgatatcacgtttgaatcgaattttgcattttaggtagtggaagagagaagttgcatagcgacttttaggtccccatatggttgctgtcaccatttaccaattagtatatgtctctcttgtttattttattttattcaaagtctagcgtctctaagtctgtgcgttcgaatttgattttgtgtaggtgaagcttgaatcgagaagtggtgttaacatcat

SEQ ID NO: 37696 - DNA, 1014 bp, Sorghum bicolor
  Intron number 2 from transcript Sb08g000800.1 (locus Sb08g 000800) derived from phytozome v7.0 (chr-ID chromosome_8; pos 714309 to 715322)
ggaagctcaccagcctggatctctcctacaccgtgagcgttgtgcgggtttctttgccctctctgttcgtttcttggatgattctgtctttttacgtttcttgatttgatttctaggcatcaggttcccctctgattcaccagagcaaaatgggctccctttgctaaatctactacctttcatcagttacaagtagtacatcaattgctcaatctaatttattcagttagtgcttagggcattggaccacttcagtgtattcttgatctgcagacgttcttatctataaacatggcaaaacatctttgcagcaatggatcagcagagcagtactagtagccaactctagtttctcttgctgctttgtgcctaccgaccattttatcttatcgtgctagagtaataataaaatggaaacgtatcttgtgttgcagatcacaaaggatagctttcctcctatcatgaagctacccaatcttcaagagttgacactggtggggtgtattggaattgatgatgatgcctttggtagtcttggggaagaatgcagtaaatcactacaggtgaggtgctcatggtaatttgccatttttattgatttgcttgttactggtaatcacacatcaccttcatctcaaaacactgtggtagtattttctgcttggtcttacaccgttaggtcctgaactccttgtctgaactagtcacttgtactaaaatatgtatttttgataattcacacacaaaagtgtttcatagtagtgcaaagctcttcttattactgaacttgcatgcttgcacggttgcaggtgcttgatctgtctcagtgtcagaatatcactgatgtgggagtttcatccatactgaagtcggtacccaatttattggaactggatctttcatactgctgtcctgtaagtagctagtcatctagttgtattattgtatcacctgggcataacacgagcccttgcagctcaacttacatccttcatgtatcaggttactccttgt

SEQ ID NO: 37697 - DNA, 693 bp, Sorghum bicolor
  Intron number 2 from transcript Sb09g011490.1 (locus Sb09g 011490) derived from phytozome v7.0 (chr-ID chromosome_9; pos 23767257 to 23767949)
gaactagatcaattgctcaaatcgcttacgatctggtgaggaaaaaattttctaggcagatttttttttatctgctatacattgttctaccttagtgaatatatgtttttttattccaatgcagcgagacccagaaactggtgaatggcctactgcaatgcaagtttgaagggctacatatcaaaaggtggatgggacatggtccattccaacgggtgaagaaataatggtatggacatattattttcctttctgatggcatctttgggtttcacatttgccaatctgtatcctaaattttgatgtaatgttcatttaatgagttgaaaagtctgggcactatgacatgttcgcaacgtttctaatcatgaacaatatcgtttcattaagctatttgtaaacttcctatattatttaatttgtctgcaatttttatttattatataacatgtctgcagattatttttgaacagcagcaactctgagaatatttatctgcaattttcatttattatataacatgtcagcgaattttctttgaacagtagcaactctgagaacatttgcatgttacactatcctatagctattttgtgctcatacttatggttcattagatgaacgcttttgcccggtgtgtagtatatgggttcataattagtttgttgtttcatgctttgcagaccaaactac

SEQ ID NO: 37698 - DNA, 656 bp, Sorghum bicolor
  Intron number 1 from transcript Sb10g001370.1 (locus Sb10g 001370) derived from phytozome v7.0 (chr-ID chromosome_10; pos 1129919 to 1130574 reverse strand)
gcgcgtccaccaccagccgcagcttcttccagaaggtcagtgctagcgctttgtttcgtcgcgtggatggacgctttgttctggtgccctgtaattgttgttcttgcatgcacgctctgctgcatccattgcgcgctgtcaattccaatcgtaaaaaataatccctcgtgttcgtcttatccgtgcgaatcaataaagcaggaacattgagtgagagaagagcagctgtattgccatctgaagcgattctgatacagaaagaatgccaagaaagaattagcgaagaacaaacacctcaaaataagattattaaagagtagcagaatctctgccgtccatgcgttaaagtaaaatacagtagataataaaagtgctgaatacaaagtaaaaaatcctgatgctgaaacgtcgatgtcgacgttctagcatctggaacgtcgacgaacggagtagcaaaaaaaatcctgatgccgaaacgtcgatgaccgatcgacggcaaataatccaagtttgttttttccttcgaaattttatgccatataagtcatttttttcctatgcacaatgtatacatatgtacatgtgatgctcacacattttccttgttgtgcattctaacaggtgacttgtgctgcagctgccactctgctctcggc

SEQ ID NO: 37699 - DNA, 798 bp, Sorghum bicolor
  Intron number 1 from transcript Sb10g022110.1 (locus Sb10g 022110) derived from phytozome v7.0 (chr-ID chromosome_10; pos 49383374 to 49384171 reverse strand)
ggggtaagatgactccctgccttttcgaatcagttgtggcaaaaactgaactcgatgcgaatttgttcgattcagcaacttgaagacttttaagcactgctctgggttgtgataattctccaccactgtggttttgcattggtttgccaaccaatgcgccaatgctgaggtgttttctgtcaactgccatgtgtacaatgtgggattgtttgtctgtaaacacattgctgttttagaaaacatatttccactgttccaggtgtttgtgctctgaaattagttctgtttcgagggtattacttcagtttatcagttctctttattttgtgataactatttgagagaaaaaaaattaactgcaatgtgggtttcagaactttcaagtagaatatgctttggtaggattctgggacgatagattaactaagaaaggaagtggaaacagctaactgtatcatgtataaagctgttctggagtccaaattagttggcatcctctgtataccttacgggcttatggtaagtttgtgtcttgtgttgaatttttgcttgtactacaatgtttattcagcaaaagaaaagaaaggtgctagatcttttgtctccaggacatctctggtatcgttgaactttttttaagttgaggtaaaccataaatttttctgggttgctcttaaaaataaaaaagaatgcataaactggctctatttgactgcataatcatgtgaccagttttgttgtaaagtattttgctattgttttgacatttcccctgattttctagattacaggaattca

SEQ ID NO: 37700 - DNA, 562 bp, Sorghum bicolor
  Intron number 2 from transcript Sb10g004890.1 (locus Sb10g 004890) derived from phytozome v7.0 (chr-ID chromosome_10; pos 4324609 to 4325170 reverse strand)
ccgagggtccgactactgcgtcaacactcacctcggtccgtccacgagccccacgcttgtcccgaataagctgcgatgttgaatgctcccatgcatttactggggtggaggctgtagagtgcatactactggccgtgtttgtcccgaaatgcttgtagcatccgctccgctctgactgaaaaatgttgttatgtacttatgtctcaaataacaaaggcctgtacgccgtagacaaacccgtttcatctcattagctagcgtcaaataagaagattcatcacggccgctttaaaaaataattggctgtttgtgcaactgtaactaatcagtgagaaccaggcaaccagctagccaaaggtgtatacccagctaaggcactttcctttgttctattggctggttcactaggcaaaaagtgtgagtaaaattcataaatgtaccacgtacatgtttaagtggttgtggtactattgctagtattctgggtgtgtagggagtgtggcatacatatggatactatattccaaattttgacttttgtgttggtactcactctgcagat

SEQ ID NO: 37701 - DNA, 1025 bp, Sorghum bicolor
  Intron number 3 from transcript Sb10g020017.1 (locus Sb10g 020017) derived from phytozome v7.0 (chr-ID chromosome_10; pos 42821853 to 42822877 reverse strand)
tgtacagaagcatttgattgtgccatttgtcaaaggtgaaacaaaattctgtcctccttgtgtatagtccaatacatctaattacatgagtggctgctcctgttactgaactcaaatgctgcaattttctatagtttaacctttattcagaaaggaaactaatgtcagagtgtttgaaaagagagatagggagatgcctgaagttatatgtttactgatcttttgagtatgtctgaaatcagatattaaattgatgtgtatcatcaaatgtcatatagctctaaaaatgggtattgatccttccgtttgctgcttaccatattgcaatcttgttatgaatgttagtatgaaccacattaggtgcatgcattattttcttgataacaaatataattttgggtaatgcttttggctggctatccagagttccagactgttattgtcaatgtagtcccatgaaaaaaggtcggtttacatatatgaatatggattaccattctgaatgaaaattttgaattaatttcatttgttattgggaaactgagaaatgatgaatcttttgcttttaatttgttctttttaacttttccattacatgcaccttcctatctgcactttccttgctgcttgtggtcaaaatagcaaccaaaccatttgtgctactagctcttgtcctctaaaatcccttgtatttgagtacaatttttgaatacttgaatgcactatattacagagcggagggagtaaatgtaaatccaacaaataatatttgaagcattggttctcaagaaagaaagtagaaggttaacatcagccttagagaagatttgaacctggaccttgttttctcttacttctttgtgttctctaatgtttagagtctatgtgttatgttacccttcaatgatgttacaaacttctgtatagggacttttccttcgttgctcaagttagcttcgatgtctatgaaatatccattcttatatgcattgagcctattgtttcttgatttcaaattgcagcaa

SEQ ID NO: 37702 - DNA, 888 bp, Sorghum bicolor
  Intron number 1 from transcript Sb10g020950.1 (locus Sb10g 020950) derived from phytozome v7.0 (chr-ID chromosome_10; pos 45864159 to 45865046 reverse strand)
ctgctccaacggccgcctcgtcgtcgacttcctcggtactctaccctacagtgctagtttctttccagcaccagcatctgtttttattttgttttgcttctgtgtgttttttttttttttgccaactactctacttaagtatgcttgtggactctggaatatctaattcaaatgtctctcttgccaaaagtgttgttgatttgagtgtcaagagagactgtgctctgactggacttcggtggtcaagatgaaattgacctgttcagtatttaatttcccttgctccatactccgttcccctattctttttaattttttaaagaagttttatggaacaaagctaaaaatctagtcaaataaataacttctctcttttttgaaaaaggaaagaaaagatgaggtggctactaaaattagttgataaaagtgctatttctttgctctaagttcttcatttctctctgatgctaacctttcaatcaggtgaggtcgaaaggggtgatttttttcgactttttctttataaaagatgaaaacgagtggtagaaaactgctggtaaaagggcctctcctttgccgcgctgtgaattattgatgtctccgctctgctagagttagcacaatattgatgccaatcaaagtccctttttctttttcttttaggaaagaagatagatcggaccggaaatatgtccctactgcaacctttcaattggcaatgtgttcctcatcactgagcagcattgctcccttgtgaatcatgaccttctgtgcattgtacagtagcattggatgatgtcatgtgaattcttgccccctcttttctgatgggaatctttggccaattctgcagccgagcatttcgggctaccgctgccacagccgtca

SEQ ID NO: 37703 - DNA, 670 bp, Sorghum bicolor
  Intron number 1 from transcript Sb08g019930.1 (locus Sb08g 019930) derived from phytozome v7.0 (chr-ID chromosome_8; pos 50919589 to 50920258)
acaggagattttgcgcagggcattgtaagtatccactatcctgccaaattcttcaaggtttcatcatttcgttatggaagcttatggttgtgttgagagcttgtgtgctggtttgttactggataagtggaaaataggcaatagaaaggacatactacctcttcctcttaatgaaatacgggctcaaagtcaaagtcagatcgagaaaaaaatctgtctccaaaaacgacttgatgttctgggattgcctgactcctatcttgtttgactattttgagaaattttatcacttatgagatgaaataggtacattatgaaagtatattctatgacaaatctaatggtatgaatttggtactataaatactgatacttttacagtaaatttggttaaacatacgagttactactcccaaggatacacgagccttcttgtatataataagaaaaaaaaagggggggggggacatctgcttatatgacagttgtcaatagtttgcatttgtcactgttttttaaactgagattatttaaggtactgattgcacatgctgttctttatatcagacacataatcaaatcatctccaccattatcctttaaataaaaataactagtctcctgtttttatcttattagagcataccggagaagtttgttagcaatctaa

SEQ ID NO: 37704 - DNA, 562 bp, Sorghum bicolor
  Intron number 1 from transcript Sb10g002250.1 (locus Sb10g 002250) derived from phytozome v7.0 (chr-ID chromosome_10; pos 1954645 to 1955206 reverse strand)
ctcgtagaacgacggcgaacaagtacggaggagaggtaggtcttgtagcttccttgtgcaaatgcaatgcattgagtgtccttgccttctagggtttggtgcgcttgtgatttcctttgtgccccgatcctctgatataatgtacgtatctccatcatccgtttgtttactgtgccttgtcggttagcttattataaatggtttgttttgtttaaacaactgacgaatgaggatgtctcttggttgagttggttagcactatagatctgggtccgagttaggttaatcaattggaatcggttcatccctttgcaaagaaaaagtaggaaagccgtctcttcctttcacattttttaattacttccttcggtccagtagtatataaggcagcttttagtgttgcagtctcctaaattacactttgactatccatttgttttatattgtattgtttatgattaaacttatgattattggattgtacatttgattacaaatctaatagtatcaagtttgtattacaacagttaaaagttcttttcagaattattggttaaagact

SEQ ID NO: 37705 - DNA, 955 bp, Sorghum bicolor
  Intron number 1 from transcript Sb07g027310.1 (locus Sb07g 027310) derived from phytozome v7.0 (chr-ID chromosome_7; pos 62402251 to 62403205 reverse strand)
cgccttccttggccacgtcggcgccaagacatcctgtacgctacgctctcttcttctctttgctaactactctataattttgcaatccgatgccctgggatcgactgatagattcagatgattggtatttgaactgatcgcttgatgcaagcatgcacagtagtagaattcacgctctaggcatttattcatgttcttgtatgctgagatctgtagctagatttatgtagagtgtaggattccaggaaatgatgatttgcctgatattgaattgaggatctcaattatctggacttcttcaaagactttcacagaatgccttcagcactaggatcacaagcacagacaatggaaacacatgttgtttgttccacttcagttatatctaactgtctcgaactgggggttagcccatttccattaactagaacggaaatacaaaagattcatacagagtgattagacactaccagaaggaagaaccagacatctaagagatagcatactaaggctaccaccagcatttccacttcccacactgcctgtgcactaacagagatcaacgccacccacggtccaacagtatcaactaccagtgcaaacttattacatcataagtggcaagataaaaacagaaactaagtttgcagcatttcagttatatctaactgtcgcatgctatgacatacccttgaagccttgatagttcttttggtatctggattttagatttgccatctggtttttaatccaggaaaatgacactacaatggactttggtttgctctttgtaggtgtgacttatgaggttagcaaggttgggtttacactgtagttcgtttgattgattggaaatctttgtgtagattaatctgaatttcgtctgatattgttattataatacactaaatactggaatggtgtgttgcatcaggtggatacaacgaagcgcctg

SEQ ID NO: 37706 - DNA, 972 bp, Sorghum bicolor
  Intron number 1 from transcript Sb07g023600.1 (locus Sb07g 023600) derived from phytozome v7.0 (chr-ID chromosome_7; pos 58479628 to 58480599)
atgtacgtcctctccatcttccttccgttccaccctatgacgggaattgtcgagcaattcaatctttttcttgagacgaggcggctccgtattgctgctttttacgatttgatctgtggacacttgctttcctctctacttatttgtatataccgacaatgtcatgattccggggtagggtttgttgatccatccgtgcactcgtttgtttctcccacagatcgcccactcgtttgtccgtgacatacagatccatgcatgtagtcgcattggtggcatccaatccatcatcctttataagactatatacatctttaaacctaatttaattatcaaaatcaccagtagaaatagaaactacttgtctacttgtttaaagatatctttataaggtcaccttcaccataaacacacataggaacatattgtacatagctgcatatggtgtgagatctaactcttgcatatgcgcatgtgactactctttttttcctcagacacgagaggagacattaatgtgcatttgagtttttttgtaaggtgtgggagtagaatgcttggttttttcaaatgttctttatctccaatgaagggtgggtgtggcacagcagcaaactactgacgtctccacttgtgtcaacctccttgcaaaataagcaagggtaaaaccatataaaagtccccttccctagaccatcaccttgtgtgggagcttttagcattcagtatgtggtatgccctcggtacatggtgaaaactcataaagtgatactgccctttttctgccaagtgccaactacttattagttcagctatacattgccattcaaatgtgtccattttaccctagaaggcttagttcaaccatatgtacctagaaggcttagttcaaccaaatgtacctagaagcttagttcaaccatatgtccagtatatctctcaatatataacatcttgtattgtatatgtaga

SEQ ID NO: 37707 - DNA, 857 bp, Sorghum bicolor
  Intron number 2 from transcript Sb09g028630.1 (locus Sb09g 028630) derived from phytozome v7.0 (chr-ID chromosome_9; pos 57491669 to 57492525 reverse strand)
gcagtgttgcatctgttgtcacagctgcagataaggtttggataatgcatctacctgtcaatgattactacgtactagttactatttcgttcttgcagacttctttgagactatatgatgtgaaaaatgaggcctgtgtcacactatttttcagacatactattgtgccctggaactccaaaatgttatttatgttcccgatgattttgtttattggtttcgtctagagctacaaataacctaagattgtgtcactgatgattttgtcaagaaagaagtctaaaatcagacggcaggtcattgcccaggattcaatgttccggaacgggcactcattatttttcatccatgatgttaattgaagtaattatcaatgcaagttagccgtataatcaacctactctcttcgcataccatcaacatctatgaaaaccaggaagcaacctatactagctatatttttctaacacgtgtgtactcttttaagaaaaacaagaatgcaacctatagattagctaaatttggaaagtgtctgttagaagggcttttttccgcacaagtgttaaaccaaaatttgtctgactgggtggaaataaagctgttgtctactcaatttattcatgatcatgttatgagtacttatctgtcatcctaacaaacttgctgtacttttttgtttagaattcgagggctattgccccgggttttcaattaacattgaaaaaccaaaagtcttttacagcacagttttaaggagccaaatgtccaccaggactgaaaggtttcagacctcaaacaccagtaactctaaagtaacttgctgtacttttgttaattgctgcagggaggcgcaaccc

SEQ ID NO: 37708 - DNA, 163 bp, Sorghum bicolor
  Intron number 4 from transcript Sb10g021710.1 (locus Sb10g 021710) derived from phytozome v7.0 (chr-ID chromosome_10; pos 47993918 to 47994080 reverse strand)
gtcctggaggggccaatcaccagtgttctctaagggtatattttcttttcttattaatgttttcttctctgctcttagcaccaagaagtttcttcttttgtttaacattttgtggtttgattcttcagctaggtacactgtccgttccttcggtatcaggcgt

SEQ ID NO: 37709 - DNA, 709 bp, Sorghum bicolor
  Intron number 3 from transcript Sb10g027600.1 (locus Sb10g 027600) derived from phytozome v7.0 (chr-ID chromosome_10; pos 57394768 to 57395476)
ctgatattgccgttgatcactaccatcgttataaggtaagctgtcaatgattcatatatgcctctgctatcttctgtttgatttaattcattcgatcattctactaaatctggaaatttcttttttgaaagcatgcatcaaatctctccataaatgaatttcttggcatttgtttgaaaagttgcctacctttcatgtgtccatcctctggcaatttttaatttgcaagaattgaaatcacatgtgcgttttattgttcctttcatgtctgtaagaatcattctatttattattctacataattatcctaccttcatcttcttctagtaatttcttcctttttctagtgctttgacattttagttaccaaaaaaaaaatgatagtccatttctccggcatgctgctgccaaaagtaggatagtgagcagaggttttccttaatatgaagctttcttcctttttctagtgctttgacattttagttaccaaaaaaaaaaccctgatagtccacttctctggcatgctgagcagaggttctccttaatatgaagctccatttgcatcaacgatgaagttttcagacataaaaattttactattttggcaaattaacttaacctctatgactaagtagttaactgaataagaatattggttacactgaaagctatccagaaacaacaagcctaacatttgactggcaggaag

SEQ ID NO: 37710 - DNA, 602 bp, Sorghum bicolor
  Intron number 1 from transcript Sb09g018820.2 (locus Sb09g 018820) derived from phytozome v7.0 (chr-ID chromosome_9; pos 47190945 to 47191546 reverse strand)
gaggtcccgatcgcccgattccttcagtgccgaaggtgcctatcgtcatctctccccgagcgtttgccgccttcgcgatccgccgtcatggcatttcccagtccacttctccggggcttcttagaagaagcgggttatggttcccttccttgctatggttgaaatttgtgtgccggattccggtttatggctgcaggtttcgtgttgacgctcctgcattgttagtaaaaggggcgcttgttaggcgattggttctattggattgctctctatgccttgtttgagtagacggtagtttgcgggaatagttttgactgagattcgggacttgctttcatccagcaacaaagaattaggttaataaagtgcgggccagtaggttaaattagttcttaatttgccaaatactaggccttgacccatttaagtaggtcctatgtctgaaattttgttttgtactgtttctctttgcagttgcagcaacttttgttgatactagagtgctcatctgtcgacttgtcccttaccatatccagatgaatggtatttttcattatgtttccatgcccgtatggtgaaatctgtttgcttttcagttgcag

SEQ ID NO: 37711 - DNA, 727 bp, Sorghum bicolor
  Intron number 1 from transcript Sb09g001450.1 (locus Sb09g 001450) derived from phytozome v7.0 (chr-ID chromosome_9; pos 1318204 to 1318930)
catcctcgagttcggcctccgcatcacccgcggcggtacgtcccgtcccgtccttccccctcgcttctctccttctctccgcgatgaaattcaattcaaccaatcgagccaccctgccagctctgcacgaaaatcgattccttgtttcgcctgcgattcagagtcttggtagctggaccacagtttcgatttcgttttcaccttccgtttgattcctcagactactcgttgtgaagttgcgtcaataaagatttttttttcttcattttttctcccttctttcctttccagatttctgtttcattgatttgatttgggtgtacagctcaccggcgacatcttttttatgtttcatcgttatctgcctgctcttcttttagtttctagaacagaaactctccatttctctttttctttatactgccaagttgacaccaatcttgctacagttcatgtcgtctccttaatcattacaactcattactgctatctatgttgaccgtgccgtacatgccgacaatttgcagctcatcacttgtgataatagtacatgcttgtccttcggtccttgattccttttgcgctcctaactaattttgcattttttcagaattcttcgaacctgcaaccctttgttgctgtcgtctaaaattcgattctctttttttgtctgtgtgatgtgattctagcagacgtgtctacggacggacactggtgcttcgtggtg

SEQ ID NO: 37712 - DNA, 955 bp, Sorghum bicolor
  Intron number 1 from transcript Sb09g002650.1 (locus Sb09g 002650) derived from phytozome v7.0 (chr-ID chromosome_9; pos 2831708 to 2832662 reverse strand)
gggtcgccggccagtggcgctccccagatagcgtacactaacaaggggttttccaacttttttctgtttgatttgattctgggtttccttaatcggttaagcttataataatccatataaaaaaggtccttccttttctttcattctaggtgattccgtggggttagggttagaaatggctaccatattttgttcaatagtggcagggcgaatgtgggattatgatttcccacgcttgcttcttatacattatattccaagggttcttcttggtttatggataatgggaagcatcttatctgcaatctatttgttgctgattgctgtcacgaattatgattccaaatgtgcctttcgttagcagcctacaaactctcacgtataatactgtggcacgcctttaccctactgtgggaaagactgtcagaatgcatgtttttctcttacctcagtaagaatagcaaattctaatagccttttaaccttccacgatgtctagattccttgcacttaaatctgctagtctgatgccatctaagtggcacccgaagacatcaaattttatgataccaatgattagccctcattttgtaataatactacaaaagttttctgttacaaatataaatctttgaaggggttgctatttcagttagttggtagatatgttaagagacagatgctgttggacttcctagttgtgttatactgccttgtgttgttgtttagaagtttgagtatttttggtaattcagtatccttctttcatcgctaaccaaaacctatgggcttgaatatttctggattttccttcagttgtgttgatcatggtagagtagctcttgttgtaggtttttatgtaacttgttacctgtatgatgtttcttccaccttgtttgggctgcccattcagtgctaattattggttgttaccttctaggagatacccaagaca

SEQ ID NO: 37713 - DNA, 919 bp, Sorghum bicolor
  Intron number 2 from transcript Sb08g002200.1 (locus Sb08g 002200) derived from phytozome v7.0 (chr-ID chromosome_8; pos 2288937 to 2289855)
tcaacgacactgccgtcctgtcaggtgctatgctctactccatcttgcattatgtcctactctttactctctagctacgatgcaaggtacgtggcaagcagtatgctgaggtggatttatatttatttcatccggggacagggacgggccgggacgccacaatgcaaagaattcttggaattatacacatgaaactagcaggctatatataagtaggcgccattttggccggaactttgttccattatgttatcttttttaaaaaaagtagaccctgctttggaattatatataagacatagaaatggaatgaacatactatattctttatggaattcatacacatagcgtcacatgtttttaaccactatatatacaacgcgaatggcttctgaatccgatgagtctacttcagtttaataagttatatctaattccaaattcctcttgtgttgcacgtactttgaaatcagcctctcattgttcattatttcttataacacaaattttttgaacatggttgtgggctttacataaaataggcacacatttccaagtatttaagatattgttttcatatagtattattaatttgtacgcttatgcacatgaaaactacaaatacatactcaccaaatgcaaaaaaaaaagtctatgcaaatgcatcatgctgtttttcatggactagtatgtttattaccatgaatataatgcaacttttaaggccctacaagtggtgtcatttaatctctcaacatgctcttgttatttaaaagctttagatttctatttagtttgtgtacaaagcatgtcgtcattgaaaaacttgctgtggatgtttatttgttacaatgcaaggagatttgatttatgaaactttattgtgatgatgattttgtaggtgatacacctctcacct

SEQ ID NO: 37714 - DNA, 693 bp, Sorghum bicolor
  Intron number 2 from transcript Sb10g030550.1 (locus Sb10g 030550) derived from phytozome v7.0 (chr-ID chromosome_10; pos 60214059 to 60214751 reverse strand)
acgcatcggcaggagctgggatccttgactccactgtaagtcaccaacgactcactactaaggcgcttttgttttctatatatattatgatatcgttttcaaattttgtcaaatataaaatttatcagttttagttggtatcacaattatttttaattattttttgtattttttaattgctactaaaatgttcggtaccgatcacattcattttctatattataattttgttttcgaccgcttctgggcgtgtcgtcggtgatcgagtacttcagtgccaatccaattatttatacgactccaaacctagaaagtagaaaccggtgcaaatcccagtacttacgagttacgagagatctggacgtaactcgtaagggatccacatcacacacacacaatttacaaagctcaaatatgaacgtcgcaaaacaaatgagtgggggaagctcacatgcatctacaaaagtgtgttgtgcttagtttcattggactctgtaattaaaaaaaaaagagaagaaactattatgttacttgacaaagagctgaacatgattggacaaagatatcattagccgaaggagctactgctaaccactccactcgactagagtaacatatggtgactaacgtgtatgcatgtgtgccatatgatatgcagaacgcgggaggcaacattccactgtcgcagcaggt

SEQ ID NO: 37715 - DNA, 618 bp, Sorghum bicolor
  Intron number 2 from transcript Sb07g024150.1 (locus Sb07g 024150) derived from phytozome v7.0 (chr-ID chromosome_7; pos 59164695 to 59165312)
ggaagcagttcgacaaggtcttcacattcgacaaggtctgctgcttcctacctcattccggacccggagatctgagagtttgagtggctggatgcgcttcccccactcctttgttgggtcgcatttggttttactgcgatgaggctgtggatagctctgtttcggtgtgaccaatttaaaatttctgaacgcttagcgaatccccgccagtattcttttgtgtttgttcccctgattgacttttagggacatttgatatctagggttgcttaataattagagctgttgcttgcatccgaacaagttcaatttgcagtggaagcgcctggcttgtgaattcaaacagtcacgtttgactatatcaaaaaatctggatcactcatgataaacacctgttcttcacgttttaattatgctagtataagtcctctgtgctaaaagctagtgcaagaccgtgaggcaatcacgggcaagctactatcaaaagctagtgcacgccgcaccacaaagctttactactttgattcaggtttggctgccaggtgcagagctgtaacatgaagtaccctcattccattcgcaggtttttggaccaacagcaaagcagaaggacttgta

SEQ ID NO: 37716 - DNA, 1045 bp, Sorghum bicolor
  Intron number 1 from transcript Sb09g002860.1 (locus Sb09g 002860) derived from phytozome v7.0 (chr-ID chromosome_9; pos 3094187 to 3095231 reverse strand)
tccgcctgcctgctccgcctccgctcgcgctggaggtgcgtggttcttttccgccgccgccgcgtcctctgttcttgctgagttgttcgcctgcgaccgtgattgccagctttcctttgtctgcgtttgcacccttctggtcccctttcatttctatcttgggggtaaaatggtgggaactcggaagattttgagcagcggtagctggtgctctctgatccgtttttctcccactttgcccgaacgagtgaactccgcagcaacgttcccaagtcggacctgttcgtgtgcggagggccctcgtcgaaatcatagcagtgaagagatttttctagcccctgttgtggtgtgggaaaaattgcagttttttcgagctgtatgtacctgtactaggagtaacgtcagtagattcagtagtcagtactagtctactagagggttctgtcaaattctactgcatttcttctttgggtgaagaaaagaatcttcggaaaatttgaattggtttgaaattacaagttgcttttgtcctcacctcgttgcaagcactgccgaagatgcctttactaaacaaggcctttactaaacaaggccttacttggttggtcctatataagttattttttttacagaacagtacagaaagggccattgtttagtcctctggttctgtcagcatgcgattaacctatatactgtgatgaatcacgttgactctgtgcaccaaaaacatgttactcctaaacttgctgcgcagtgtgcgtaggttgactaagcatgtcggcacgtaatttgatccccgttttttcaagtctaattaatgacacgaacaagtcacttgcagcgtggatgatatctgtttcctttcctttgtttgccgctccgctgtcaatacaatatttctggagtactgaaagctacgcttctgtcatttcactgccaaaacaaatcggcttgtcctgaagaaaaatcgtttatctttcactcatttgttttttaattttttgcagccaaagctactgattggcttctaccgaccagcgaa

SEQ ID NO: 37717 - DNA, 788 bp, Sorghum bicolor
  Intron number 1 from transcript Sb09g022240.1 (locus Sb09g 022240) derived from phytozome v7.0 (chr-ID chromosome_9; pos 51916864 to 51917651)
actcctctgaggctggccagcttgcgccattcaacgtaattcctacttctctgtactcacctgcagctactagagtgattgctgcttttatctcgtttgtgtctatggcaggctgcaattttgtatgatctagtgtgttctgtgtttgatgggttaatttgcttgtggaaaaccttttgtatcctcagtcgaaagtattgctttggtagcaccttaaaaatcatgaattgtcagatcaaatattggtttggctgacagatgtgcctgcaaagttatatcatttttttgagctactgaaccagtgtcttttagactcttctcccttctaaacatgttagttactagttagtatgtgctatccaaatttgaagaaactcgtattgtacctggacacctggtttaattctccatcaagttagaccctgtccatacctatgtacataaaaaacagatcactacaatgtttcattaattcataatttttttttaccatgtgtatggatgtaaacaattactccctctgtcttaatatataagacataactaatataggcatgagcttatcagccgaatctgccagccattcagtagtgtttttctttcacaataaatcagccaacagtactttctgccatgacttatcagccaaacgaacaaggcgggcaaaaaaggttgaaaatattttgtactgctcttccgttattataagcaatgcgactttgacagcagcagtcccttttagtttctttggtacctaacttgcaatctctgaaaatgtgcagactgac

SEQ ID NO: 37718 - DNA, 899 bp, Sorghum bicolor
  Intron number 2 from transcript Sb08g020820.2 (locus Sb08g 020820) derived from phytozome v7.0 (chr-ID chromosome_8; pos 52164661 to 52165559)
acggccaggacgtcgcaggtactacccctgttctgtttccttatcctcacttcgtgtgcggtttatctgtgtctctgagattacgcggttcggctgttgcagaggatttcttggttttcatcagtattcagtagataggtgaatcgttttcaattttcatagtatccggacaagctagcatggcaaatgacacatttattatcagctggtaaaataaaaaaaatgaggcatacatacataagtaacaagctcttactatatgttttgaatatatgttgttcttggtcctcttctgttattggcttctagcaaagagttgcctctgccttgtttcaccatccatgtgagttcagaaacaatgtttgttcatggataataatagagctctcatgtcgcataaatggattgtagcacaactgcacaagtgatcagtatataattatgcattatgtggcaaagagcttctttgcagtggtttgtgtgtgaactgtgaagtatttgcacctttgtggattcaggttttttcttttattctgaggttttgattggcaattctgaaacctgttacagcttcagtttcttaggtattacagcttcacttttaacaggtgcctgattttggggcatttgtggtgagcttattcagtgtcctggtcctttacgcagaaattgtgatggttaattcctgtagatcatctaagacagcagctctcactagcatgttatcctactgatgaagttacctgaaccatgggcataataaaattgaaatttgtaccttttctagtatgttgcaaagctttaccaaataatcaacagaatcaccttgatcttcgtatgtttagttaattacttttcttttatgacatatatagtaaaactattggattggggcgaag

SEQ ID NO: 37719 - DNA, 910 bp, Sorghum bicolor
  Intron number 1 from transcript Sb09g018145.1 (locus Sb09g 018145) derived from phytozome v7.0 (chr-ID chromosome_9; pos 45536573 to 45537482)
ccatctgggagactgggacacatacgcccattcaggtctgtcccaccgtcgtctgtctccgttgactttccccctgaaatgaactgcccgttgactttctgcactccctaatttctgaccatcaagttctgccgaatgttatgctagacttgagcggttattgctagtgaagtatcaggtgctatgttggtttcagttacttgagaaaaacatggcgtagccttcttttgtgccaatctcaacatccatggacgatagatcgtttactcgtctgactgtcttcccgtactagtactgtgtttagtacttgaacatttatctcaactcaaatgtagtatgattgtctgatgtgtcagagagaaatacatttaggccttgtttagttcgcaaaaaatttcaagattctccgtcacatcgaatctttggtcgcatgcatggagcattaaatatagatgaaaataaaaactaattgcacagtttacctgtaatttgtgagatgaatcttttgagcctagttactccgtgattggacaatgtttgtcaaataaaaacgaaagtgctacagtagccaaaaatcaaagtttttgcgaactaaacaagaccttaaggataccggtgatatcgcttatgatggataccataaggccttgtttagttgtgaattttttttggatttcgctactgtagcattttttatttttattttacaaacattgtccaagcatagggtggattcttaaaaagttttttatttttgatgggaactaaacaaggcataagtataaggtacggattttctcccaaggatgaaaggatcaaatgccagttttaatttgctacagtccttgggtagttggggacttgcggaacaatcacttttcacatctgctcttttctgtttatatgtagg

SEQ ID NO: 37720 - DNA, 244 bp, Sorghum bicolor
  Intron number 2 from transcript Sb09g024270.1 (locus Sb09g 024270) derived from phytozome v7.0 (chr-ID chromosome_9; pos 53797156 to 53797399)
acggtctgttttttctctatatttcttcatggtgttgactctggctcgccctgattgtgggctgtctagttttctccctatcatggagcaattttgcttccttattatttgaattattcagttttttttatgctttgctgttgcgttttattgtttcattttcaccttttttgtcagtgtcaaattatgatatctcctggggcttgtgaagtaacaactgcagaaatatgtttatgtgcagagg

SEQ ID NO: 37721 - DNA, 611 bp, Sorghum bicolor
  Intron number 5 from transcript Sb09g024270.1 (locus Sb09g 024270) derived from phytozome v7.0 (chr-ID chromosome_9; pos 53797879 to 53798489)
gagagtcgagtacagtttatttggtgatcatcaaggtaccagaaccagaatttggactcccttgtgtctttttgaattatcccaggaagtagctgaaactatttatctatctatctatctataactcttataaagctaaaccccactagatgaattctctcttcatgcaaggtatccacatcattccccactaagtgacccactaaatattttatctcttcatgcaagatgtccacatcattccccactaagtccatgtcattccatattaattataaaaaataaccatgccatctatatcatgtgaaatactttaaatctttaatatattcacatacaagtcatgtacatacactatttgtttcatcaccaattaattcctctataatgtaaccaaatattattttttgttttattagcttagcaatttttactagatctaatacaataaaatacatgcaagtcaaattcgtatgtgtacatacataatagactaaataccatatagtaatactatgtatataataatttatttttaagaaaatcccgcagttctataaacttcaatttcctcagatactgcgccgtttgaggaggactttgaggacgat

SEQ ID NO: 37722 - DNA, 921 bp, Sorghum bicolor
  Intron number 2 from transcript Sb10g010440.1 (locus Sb10g 010440) derived from phytozome v7.0 (chr-ID chromosome_10; pos 12918693 to 12919613)
attcaaggcaaggggaacgagagttccagactgaggtattgcaatcttttttgggtgcaccattcttcgggttttgttctaagcaacttatctgtattggttgatgtgatgatttgctgggacacctgcactttattcagcgatcctatatattatttgcaccttagggaacaactattcctggaaattactccgtctgtcctaaaaaatgcaattctagaacaatagtatgttaaactatgttaagtttgactaaatttatataaaaaattactaacatttgtgggaactaaataggcaccattagatttttcacgaaatatactttcataataatatacttatttggcgtcttaaacattaatattttaagccatatatttggttaaactctaggcactataactgagaatgcatctagaattgcactcttttcgggatggaggtagtagcccctgtgatcatgtctgcatattgctgctactgcactctagtcacatagtatggtgcaaaatggcagatgagaaatgagcacattcatgttagttacaaaaaattaagttttgtgagtctagagagaagcagaaatacaagaagacgggtatcctggtgtttgttttgactgttacttttttcttagacacaaagtaattatgttcttgaatgatggcctaacaaaaaaaagagttattcaatgatggggcacactttgcctggaaaaagtatgaaacatcaaaaggaaaaagaaagaaaggaagaaaaaaaattgctgtgggtaaagtaagctcaacctgcaatacctttagcctatgtgaagtagtttgctatggacatttgactctaataaactgatcaaagttcaatcatggctacatcttgtttgcaggtagcattgcttagcaggctgcatcataggaatct

SEQ ID NO: 37723 - DNA, 1001 bp, Sorghum bicolor
  Intron number 1 from transcript Sb09g006480.1 (locus Sb09g 006480) derived from phytozome v7.0 (chr-ID chromosome_9; pos 10380485 to 10381485)
gtcaaggtaccgtaccaccgcgccgctctgccagtcctctccgttcggcttcctttgtagtgctcgtgtcgtgtgtgagctggggtggggtggcgggatcgggggttggcgggcttagatctacgggaatggtggttgcttgccacgcgaagcagtcggtcggatgcgtacccgcggagcttgcgctcttttggttggatctgatgatgaatcgagcgtggccttggggtcagcgtggtggaactgagctaggtatttgggtggggttagctttagatccgtcggaattgccgtgactggatcatgtatgcgtcgtgggtgggtgggaaggctggtgggaattgtagttgtgcgttttctgggccgcgcgatctgattgttatggatgggacaattcgctcgctgtagttacttggatccatggagatcggtttctgtgctgtgattttaattcatgtgaggtcggcatctgtgcgttgctgctcggttctcttttggtaagatctgagtatctatggaggtcgttagctgaccatttaatggattttcatttgtagtaggtggttgttttttaatgccctctgatttcctcttagaagaggatagacgcaatttgtgaactagtctttgtcatttgattgcctctatgtttgagtggactcgagcaaatgaaatatgttatcataatacaattgtaatttgttggtgaggatctactagttggaattgtttcagtcccccaccccctgccatggtttattgatgctttcacctaaaagaaccttaggtcataggtaaagggaaccacatgttttaacttctattccaacttgataactggcttagtagatgtcagatgtcactgtcaaaagtcttgatggcatgcctttttggagctttatactctagggcgctttgcaagtggagcccatcttatactaattcttattattgttttggtttcaggtgaggatccagttgggtgagggctctgctggtca

SEQ ID NO: 37724 - DNA, 572 bp, Sorghum bicolor
  Intron number 2 from transcript Sb07g025645.1 (locus Sb07g 025645) derived from phytozome v7.0 (chr-ID chromosome_7; pos 60729004 to 60729575)
agaaggtaacattcaaagccctgaaatcagatacttagtctactttactgttttctagttcaacttcccagtttaactaaatcgcaatgatgttttgttggaacctacaatgaaacttattttctatattatctatcggcctaccttcttagttatcttaattgttgcatatctatcacagcctccctccgtccatcaatgcaaggcatatttttagtagtggaaaacaaattttataaaagaagaccaacaactagccaaattatgtgttttagtgtataaaagttgtatctatagatttctattcaaggtgggtttaagataatattaattttgtagcaatcgataaaacaatgtaaaactaataaggatcaaagtctactttgtaagacttttcccatatcaaaatacaccttaaattgatggacggggagagtaccgttgaagaagcacaattttgttctctacataaaaagtgtaaccttttttatgcttcgacaaaccattaagcgttaccctgtgaaaagcagagcaacacctaacctggatagcttgtgtttagggttcacagg

SEQ ID NO: 37725 - DNA, 1019 bp, Sorghum bicolor
  Intron number 1 from transcript Sb09g027280.1 (locus Sb09g 027280) derived from phytozome v7.0 (chr-ID chromosome_9; pos 56386895 to 56387913 reverse strand)
gagccttgcgatctccgctgcgcgcgcgcaaggtaagattggagctcggattcctatgtttctttggttatgatgatctgtggacttctgtcagtgtttgaatcttagggttttagttctgtttgagcgggaagattaagcatctgatgggctgcgatctgcgattcccttttctgctgcgttctttgattacttactcatgctgatccctattcttatgcttaatgcctcactcggattcggcgcctactggttttagttgtctgatttcttaaaaagggcgaggggaactgcgcccaatattttggcacttaagactaaacaggctgttttgagtgattgttctggtttatcaaatgcaagtaattgaataacggtgaaaaaaaatagcggtaagttacctttacagatgagctggagtgatgttgtttggagctgctcatgtaagcgtgctgagactgagagtaattttgacgcttatactgatatgtttcatggcgtgtatttgcacatgtacatcctaaagaacaagaaaatatgttcatatctgatatcattttgttagagttcttttccatctcttctgtcatgtttggtgtgccttcatatctgatatcagcaattcagcatgtcttcctttacctttgagagataagagattacttctctgatattttgtgatagcttccctgtcattttgacgcaatcaatcacccaactgaataagaactctaggagttgttgaaataaatcagtattggttaacttgtttttttttctggtttaagtcttttcatgtttctgtttaacttggtcttctaggaaaaagaaaatatcttaaatttaatggaatttaggatgcccagatgtattgatttgctttagatatggcacaagcaggaacagtttgctttatctagtatccacagacatatacttttgttgcatttcttctggtggaatttatacaattttgtttgccaggctgacccagagttggaagctatcaggcagaggag

SEQ ID NO: 37726 - DNA, 833 bp, Sorghum bicolor
  Intron number 1 from transcript Sb10g000300.1 (locus Sb10g 000300) derived from phytozome v7.0 (chr-ID chromosome_10; pos 104695 to 105527)
ggattcaaggtcttagagttcttattctttcacaggtgagatgtccatggtatcatgcttccaatattcttttacctacaatctgtgcatgttggttactgtaaggtcagtctgctactccctccgttccaaaatttgtgtcgttttaattttgccataagtcaaacttctttaactctgatcaagtttatatacaaaaaaaaatgcactaacatctacaacatcaaattagtttcatcaaattcaccctgaaatgtcttcatagtgcatttatttggtattgtagatgctaatatgttttttatataaactttgtcaaaattagataagctaaacttatgacaaaatgaaaacgacctacactttggaatggagggagtactacctaagcctaaaatgtttgcaagccctgatttttaattattttcctaccttatgcctacctgtgtagtttctttcatttttccaagttagtcttccgagaaggtatctagcatatgcacacttagcatccaagtttattgtcaaataactgagtgatactgcttagttatctaacagttacaaaactaagaataacagaaaagatgtagttgattttcaattcaaatttctaacacacatctatttttgtttttgtttttttgaagtagatgcccacaatgattattttggccatctgttttaaatagctctgatttgttattgtgacgctagattacttatgcttatgatgctgctgtattctccagttattgtattaacaatgcttttggtccaatcttattcaactttattttttgttgtagtctggtggtggatctggcaaccct

SEQ ID NO: 37727 - DNA, 895 bp, Sorghum bicolor
  Intron number 1 from transcript Sb10g004013.1 (locus Sb10g 004013) derived from phytozome v7.0 (chr-ID chromosome_10; pos 3551040 to 3551934)
gtgctacctttcaagtatggtgatgtgtcatttttgtatatatcaacttttctatggttttatttatttactctctctgttctaactgtgtattgggaactgtaaactgtccttcatccattttctatggcctccctcaacattgatattttctattataaaaattatgcaataatatttgttgcagcattgatttgtgatttccatccactttgccaattttccatattttgattatttctagagatggtctacattttagatctgtgatgaagtacatatcctgctactatttttcatgaaatatgtgatcattccctacttgaataacctagataacagatgcatgcatgcttatcataactactttactgtatatgatatacttaccacagttaaacctctacttcatcaccatgtgctctcaaacaaggggtgtgttcggtacagccatataagagaaattttagataatgtttcgtaccccgaaattttcttgcctttctcgaatgctaaggagaagaaaaggaaaagctattttggagttttatcaacaatttgcttgtgtaggtgtagaagctgttgtggctgcagctgtggctgccatgtcctatctgcacaacactgtagcaacaataacatcacttaccgttcaacagttcttgtgtatgtatattcattttcctacataacttcaggaactttacaagaataattgtgaagaggttgagcagaattatgttatactgttatatctttttgcacaaacagaactgtagtaaacatctacatgcagatgatttcccagccagctttagcaatttagttttctaatttttttgtgtactcatgttatcttggcagattactgggttaacgaacaattcatacttca

SEQ ID NO: 37728 - DNA, 408 bp, Sorghum bicolor
  Intron number 1 from transcript Sb08g000550.1 (locus Sb08g 000550) derived from phytozome v7.0 (chr-ID chromosome_8; pos 484096 to 484503 reverse strand)
gacgactgcgaggccgccctcaacgaacagatcaagtaagtgctcttctctgtcattcggattccggtctctctggacggggacggcgtcatgatatggtgcctgatatgtgtatgtgttgctccatcagtttctgcgtctgtgctgtgtgctaaaattaaacttgtgcgatttatttttccctttttttttaaaaaaaaaataatttttgcttattcttaatcgagtgactcaattgatatctaaggccttacatattaggctatttttggacttagttgtcagccatctgtgcaatttgatttggattcagttccaccgaccaaaaaaaaaaagaaaaaatgtccacacgaatatcaatttggcgctggtatgtctgttcgtgcagtgtggagtacaacgcctcgt

SEQ ID NO: 37729 - DNA, 602 bp, Sorghum bicolor; identical to SEQ ID NO: 37710
  Intron number 1 from transcript Sb09g018820.1 (locus Sb09g 018820) derived from phytozome v7.0 (chr-ID chromosome_9; pos 47190945 to 47191546 reverse strand)

SEQ ID NO: 37730 - DNA, 873 bp, Sorghum bicolor
  Intron number 2 from transcript Sb08g002110.1 (locus Sb08g 002110) derived from phytozome v7.0 (chr-ID chromosome_8; pos 2235177 to 2236049 reverse strand)
gcgtacaccgtcaccttctgccccggcaccaacaggtacgacgtcgatcccgtgacctagaccttgtttagttcgcactaaaaattaaaaactttttaagatttctcatcacatcgaatcttatggcacatgcatagagcgttaaatattgatgaaaacaaaaactaattgtataatttaaaaacgaaaatgatagtgtcaaaatctaaaaacattaaacaaggccctagttaaagactgtacatcgttggtctcatcatgagagcccagtcttttgcttgcattgttgtcaaattaaaccacaagataagaaagctactgatccactgaatatagcaagaagacaagagctgatgaagggaaagaacctttttggcttttggtctctactgaatctaccaatccaaggtagtaggccatttgattgattcatataagtcattgtctttattttaagtctatccacagaaattgaaatatcaacatcaaaatcaaaatcaaattggttttacttaatcgtctatcatatatgcaacaatatgtttcgagagcgcaattatttaaattcgtggtggtcaaatgttttgagagaacgatgaaggaagaaagcctggttggccgcccactccactgtcctttcgtgtctgcatcgttcatcaaacacgtgacgggacgtgacgtgaagttattcaaattttttccgtcccctctgccggatcaaagtggatgcatccatgcattttattttgtgtcgcaaatctttaatttaattaattatttataagctgaaaatttaacttctgcatattttgtgatgatttgtgacgactgcatgcagcgtgaagtcctccagcccgagctcaggcgcaccgg

SEQ ID NO: 37731 - DNA, 758 bp, Sorghum bicolor
  Intron number 3 from transcript Sb08g022210.2 (locus Sb08g 022210) derived from phytozome v7.0 (chr-ID chromosome_8; pos 54025336 to 54026093)
acaaggctgttaacgaatacaaggaggctaaggcggtaagatacattcgttatatttctgttttacctattctcctaatgttagtttcctacttgtgtacttgattgtctgatggttgctaatacattcctatttatgttgtcatcataattacccgatgaagtcatttgatagtttagcatgctgcctcaaactagtagtgatcattcatttttaatcctgcacttaattagtaatttggattaacacagaaactgggatgtacatccagatatctattggtgtaacattttggaagcttattattgtgatattgtcagatcaaattggttgcaaacaaacttggtacttttgagcttcagttcgaacttgagcatcgatacattaaaaaatggctttcttcatgaaaatgactattttaggctacagtaagaatgttaactgagctgtattgtgcctctgacaagttggtctcatcttgcttttgttgttttgtttttgttattttgctatgttggagattgtctgaaaaggattctgagtttagtgtattttcatttttcctatgccataagcagtaggtcacacagagtgacattactataattcagagttgcattatttcttttgcgttgtttactctgaaatataaaaacatgtgcattttcttgcaaagatttcatctacttgtttgtatggcttatatgttgttgcctcatgcagcttggggttgataccgtgccagtacttattggacc

SEQ ID NO: 37732 - DNA, 796 bp, Sorghum bicolor
  Intron number 1 from transcript Sb08g014950.1 (locus Sb08g 014950) derived from phytozome v7.0 (chr-ID chromosome_8; pos 39331224 to 39332019)
catctgttttgcggccgtgtatcacacgtgacaaggtacgggatatgcacttgaagtaactctgtgcttctctgtagcagttctaggtttgtgatttttgaatgatagaaaattaagctttaagatgttataagatttttattagcgagattttttataattaggtttgtaatgctaacatttggtcaactgtccagtcctcaatctttatgtaaagttctgccaatacaatgctcaagatgctttttccatgaatccaaattcaccttcatgccttagcatgccacacctaagcttagccaaacaggccctatatggttgacttgtctgataacaattgagcctgatgttaattcttttgaactagactcctactttcctgtatctggtgcttagagaagcatgctgaggtagactttgaagactctgtggttacactgataagtcatatacttggttagaaagggattaggtagatgccatgtgcctgcattatcactggttagtttgtgtgtattctcattcatagcctatccacatcaaagtgatgatgttcatttcatggtgctgatgttgaaagaattcaatacttacactattcttactatactgttgagttgtcgaaatgggtcgagcaaaatgatcagcagtctgatttatactatgtgctgcattatatttatgtgctcaatgttgactacgctttagctcgttgcttacatactgctgaatttgataagttacggtctcatttttgggaactgatgtttaaccatcaatccttcaggtgctcatc

SEQ ID NO: 37733 - DNA, 708 bp, Sorghum bicolor
  Intron number 1 from transcript Sb10g022900.1 (locus Sb10g 022900) derived from phytozome v7.0 (chr-ID chromosome_10; pos 51227577 to 51228284 reverse strand)
gtacggctacgtcaatttctactcacgccaggaaggtaagtttctccatatgctcgcttgtagcgctaggtcctataattgattatagatgctaataatcttcctagggtttgttttgatcgcgtgctatggtatatatcataacgtgctatggtatatatcataatatacagtgtgtgttttctcaggaatacgtttcctttttgttctttctgaatttatgttgtcaggttaaattttaatttggagaggttgaggtgatcagggtttatgtcactatgaaatatgaatcttgattatctagttattaaaaagttctgatgatggaaccagaggttgcgtgatggatcttgtagtttctaggtttgatgcggtatatatacatgcaatgattttacttccttttgctttaaagactatggcttgtataattagaaaagtctaaaatctcgatttgatgatttgcatattgcttacactctacaaattgcttatagagctttgtgttgttgttagtgatttatgctattatagactctcttcttggtggagaaaatgttaatctttgattatcaatcatatgatagattattcagttttgatgtaaaagtatagaatgatattgaccaatatatctataaattaagtttattataacttggattacttgcagctacttgtgcactggaagctttgaattttgcccca

SEQ ID NO: 37734 - DNA, 762 bp, Sorghum bicolor
  Intron number 1 from transcript Sb10g005980.2 (locus Sb10g 005980) derived from phytozome v7.0 (chr-ID chromosome_10; pos 5417300 to 5418061 reverse strand)
ttcttacaactgtcaagtgcaactcaacggagcaggtacgctgttccattaattagatcgattcaactcgatcaggtagtgagccgcgcgtttgtttgaagcgttgtttgaacgagtgaattcacgtttgagaagatctaagaaaacgtgaaagatggtaaactgatgacgaatgtttaggaaatttttgtgtggaaagaagtatgaaccctagatacagataagtcataagtggatggatctttcataactgcaaatctgtaacattcgccagtgacaaataccatgtgctatttgctgggaatgcaaagcaattactttactctaggcagtatgcaaaattggaaattgaattcctcctctctttttaaagaaaaggtattagtgtttttttttttgaaataaaaggcaggagctctgccgcttaattaagtaaggaaagaaaaaatattagtgtgcagtgctacatttagttggaagattatagattaataaaccaccctacacaagggaaatagagaactgtgaatggagggaaagcaaggaatgattttttttagataaaggaagaacaactggcttcatcctctaggcacaagatgcagctgctattttgatacatagtcagcatgtaattttgattaactattctgtcagcaagaatggatgcatatctgatttcttcaacattgactggactagtgtgaattatgcgaatgtgttgcagctgaagatttgatcagaaacaatagagtacaagca

SEQ ID NO: 37735 - DNA, 947 bp, Sorghum bicolor
  Intron number 5 from transcript Sb09g027090.1 (locus Sb09g 027090) derived from phytozome v7.0 (chr-ID chromosome_9; pos 56199004 to 56199950)
ttgcagctgcttgcctttacattgcctgcaggtatactaaaacctaattgtaggttcactactttctttgttggaacgtcagaagcatttaacctattctactaacttcagttcgaatgtgaacattcactgtgcgacttgccccctccctagccacttttgttggactactagtagttaatgttatatattaccttcttttttttttcttttttgagaaactcctacaagttacttttctatcatatccttctttaaacttgcaaaaaggtttctcttgtcagatacttagattgaaaattgaactaattgactgcaggtatactaagtgccttttgactttatgcctcgtgtttatagcctctaattagaaaagtaaatacttgaccttgagaaggtccctctcagtggcccataaggattaggatgttttaaatgcctaaactgtaacacaactacgcaagtaagcttttccataccatataaacacatgtcaaacccattcaagaggctttgttatattaaataaaacctattccctgcacatttactatactttctagtgaatgccctaccactgtaatctgttgttactaaattaataaattttctttcgcagactttattagcagccaggatgtattagacttgtgggtcctttttatttcttttacctaatacaccatgaagcatgagtaacatttataccatcatctatttcttcgaaaagctcttatgtttcattaattattcctgaactcacaatttaatttattttatctttctcaattctcaaaacactgcttttcgccttcatgcttttgttagtgtatgttgcaaagtttattttgtttgtttttttgagcaagcattgtagtactaatgttcggtttctccaacttttcttgccaggcaaactaagaaagcttatcttcttattgatttct

SEQ ID NO: 37736 - DNA, 1020 bp, Sorghum bicolor
  Intron number 1 from transcript Sb07g021590.1 (locus Sb07g 021590) derived from phytozome v7.0 (chr-ID chromosome_7; pos 55726037 to 55727056 reverse strand)
gggaccacatcatcgttggacccatcaagaaccaggtccgtcctcccaaatccagcacccatagagctattctcatggttgtctcttgatcgatttgatctcgcctttcatgtctaggcgtctagccattctctggttgatgtttaggttctcttctcgtctaccagctgttcacctcccgtcacataattctgactactaagttaattctaactactaagttagattttttctctcgactagtgagtagagatgcttattatattacattaagaacggctttgatattacccagactgctgtgattttactttttgcatcgtgatgtaagaactaaggactaagatgctaaataaaccgggaaaattctatatccgcaactttatatgtcatggatattcaggattgatatactttgattctaataatataaacgaatgtaagtgcagttgctgttgtctttgaaaaaaatctatcatgatttttccaagattttcacctcaacattcatttttttaattttcttgatttacgcctcagcattcataatatttttgttgttttttaaatgtatactttaattctttgagactagtttttttttgtgattttttaatagtttgttcttatttgtagttaatttcatgtagtattgaattatttgtgctattgcacagtaggtgaaggcaatgaagtgttgaattgctgacctagttgcctgggttggcataactaggttgtgggatttgttcagaaccagagtctagggattcattgaatctatttacaggatagtcgtttggattgtttggtttgaaactgctggtggttgcgattgtttggttttcgaagctagactggtgtgaaggattgatttggtctttgtgcatgaatagaacagtgtgctgcggatttggtctagtttttaagcttttagcaggctccaaagtggagatgtgccactaaggcctaagggtttactttgttttttgtacagcaataagggggcaagtgagaagg

SEQ ID NO: 37737 - DNA, 792 bp, Sorghum bicolor
  Intron number 3 from transcript Sb08g017180.1 (locus Sb08g 017180) derived from phytozome v7.0 (chr-ID chromosome_8; pos 45699857 to 45700648)
ccacagaggggaataaacctactcctcgtttctatgtaagccattgaatgtaataactagaactaagttcatatatcttgaaaaagataggtacttacttaacacatattcaactttgattgaacagcatgcagcagccattgtaagtagcaagatggtagtgtttggtggtgattctggtcaacgcttattagatgacacaaaggtatcaggatcttctttttccttaagtgtgttgtttgcatgtatgaactctgcactgtgtgataccatattattatcaaataatcttatgacttcacttattatattaattagatactgaatttagagaagcttacttgggattctgcgcctcctaaagtttgcccatcaccaagcggacgttcaatgaagttgccagcctgcaaaggtcattgtctggtatagctcttgtgaatcagtgctgtcttatggttctcaaaacctgagttactgatatgatgattttttcaataagaaaaattactgttacacctttgtcagttagattgctacttgtccttggatgttttggtatgtgtttcgatgtgttttcttacttgaagctgattatgttatgtttttgtggaaaattgtatgctggacactatgtttaacttttttgcacctttgacatcatccgaaactcaaagtattataagtcgatgatctattattcgaagaagacaaggattgttctcaattatgactcttgtatgcactcctttattactggaaaaatatttatacatgtgtgatggtacaggttcc

SEQ ID NO: 37738 - DNA, 677 bp, Sorghum bicolor
  Intron number 2 from transcript Sb09g004870.1 (locus Sb09g 004870) derived from phytozome v7.0 (chr-ID chromosome_9; pos 5934393 to 5935069)
aagattccaggagttttgtaagttagatctaattgacactgcctcctcaattcctcatgcacctgacatgcacctccttcagtcaattgacacaattaaatggaaccagtgttgcttatagcacttttttccctttttctttttacaaattacactgttgttgtattagctaatcaacacttacatttatcttgtatcaaccattccaatatccttgagaaagtgagaatagaagagtgtgcttgaatatcattgattcctagccaagccatcatgtccttagtataggccctaccctttttttctcaaatgattaattatgttgtgtgattcttcaagtacaagcacttcattgaaaaaaaaaaaaaaatcttgtgaagctcttaataaggtagctattatattactgtaagctataaaaaaaacaaatttgataactggagccgtccaagcataaaccttattgttcatcaggtaacaaatggatatctttcatgtatggatattttgttgatttaccatgttctttggttgacaatgaaaaataagaaatggtgtatgcaaatgtcatgataaacccaaaaggtatctaaattggtgaatttcttacccaaacctaactttattcttgtactacaacagcgcatacctcaggagtttggaagctatttaagaaa

SEQ ID NO: 37739 - DNA, 555 bp, Sorghum bicolor
  Intron number 1 from transcript Sb08g019882.1 (locus Sb08g 019882) derived from phytozome v7.0 (chr-ID chromosome_8; pos 50860080 to 50860634)
cagtgcagctggaaggaagagcctcaaaggtaagaagctagctcatgcagtgaggtgtgcaaggaatatgctctattcattcatgcatcgattggtcagtcatactggtattccgattgtcttggtacatgattcttgggtacaaaatgttctctgaggaaacatcaggcgtgcatgttctttgatggcatcagacttctttgagacgccttgatttatttggtttttttttttgaactggcaggagagcttaagagtttttttttttaaaaataaattctaaaatacacgggttcttatctttcaaaaaaacacaacttctgaaagttgtagggtcacttgtactgtagtgctggaaaatttcccttacaggtatctgaaattatttttgaagaaaaacaggcatctgaaattggcgttttcagttcgtacataacctgcaatccattggtgatctgctctgctgagagggtgtgaatgagtagttgcatgattagatttaatgttcctgtataatggcttcatctcaaattacattgcaggagaggtggtagg

SEQ ID NO: 37740 - DNA, 663 bp, Sorghum bicolor
  Intron number 1 from transcript Sb10g001350.1 (locus Sb10g 001350) derived from phytozome v7.0 (chr-ID chromosome_10; pos 1118682 to 1119344 reverse strand)
ctcgcccttctaccaccaccaccaccacccgtcccgtgagctcccctaccatcccctctcgttgttgtctccttcattcgcgtgtatatatacatctcatcaatctctgttcaaatggattcgtgcttgcttgcttgctggtattatcataccataggggaaggaaactaatggatgcctttttcaggagagaagaacgcatagcatagatcttttgcctgccctgctgcttatattactgggattggattggattggttggttgggtattgccgcgatttatctcatcgaatgattcattaagcatgcgtcgcctagcatctggcatctgtgcctatgtgatggggtggatctttgtcacctcctttcctgcttgctcacgcaatgggatagggattctttattattcaaacttttaaacaaagtaggagaaagcatctttgcattgggttggtcaaatgtttatgtgcttttgatctaccccagtagcaagtaggagtacatcgtttcattagaatatgaatatatacactaactagggctgtccggctgtgtgagcaggcgatggctgattcgatttttcgatgtgctctcagtctcaccctgtattttggtttccctcctgcagtgagttactacgcctactacgggaagaagctggac

SEQ ID NO: 37741 - DNA, 691 bp, Sorghum bicolor
  Intron number 1 from transcript Sb09g024340.1 (locus Sb09g 024340) derived from phytozome v7.0 (chr-ID chromosome_9; pos 53902490 to 53903180 reverse strand)
gcaagggcgccaaggtcatcctctcaagccacttggtgagttcccggccctccagccttcccgtatatcgtctgatttggggaagtaatgctcttcgcatgcatagacaatgtaggagttcagtactccttggatccaggtgtttgtgatagtctgatttgctttggttaagtaatacgtactatatggacactggctattagttgtgattttgcttcctgtgttatatgattttagcttatcttcaacatagctaattatcacttctattttcgcttttgggcataaactgggaattactgcaaaggtgaaagagaacccttgtagaaaaaaaaaccttacaaaagtagaaaaaaactgatatttttaattcagcgtctatttgtgacttctgttttagaaaactggaacccaactgttgctctccgcatacactcacaatgtatgagccaaggacctgcacagtgatagtgtttaatttaatcaaatttgtgattttatatatgcacactggctattaattgcagatttgcttcttgtgttcaatgataattttatgaaagatagctgaaccaatttatttttctcagatggctgcttaattttcttttcatccaattagggttaatatcctcccttttgctctggatgtgcagggtcgccctaagggttttacacccaagtttagctt

SEQ ID NO: 37742 - DNA, 722 bp, Sorghum bicolor
  Intron number 2 from transcript Sb09g021380.1 (locus Sb09g 021380) derived from phytozome v7.0 (chr-ID chromosome_9; pos 50840003 to 50840724)
tgccaacttccagctattcttgttatttcttgcttgtgagtcttttgttccttctgttattactaagcacgcattgcatatgagcaagtacattgttgctggggggaaggagtatgcaattccatccatattccacagcaagaattgcctggtgccgataaatttgtagtttcaaatttcgtcagcacaatttctaatccaggtttattttgtttctctcttttcctttggtgccatttgattcagacccttccgtgtgaaatgaaatcatcgaggggaaattgatattgacattaattttgatcatattattcggtaacaggccaagagcaatttagatgtttatacaccaatttattaataccattggctagtgcatacctcactaactaaaacaagtaaattagtttcttcaacactgacacacttatcaaaaaaattccctaccatctcgcagttggatgatttctccttgaatccacatcattttcttactgtctcatttagatttctaatgctataagcctataatagcataaatatacttctgtatttggatgaacaaaccaatgatggtatgagtttcatctcacattatcttgcaacactaaattacagtgagatttggaagattgggaatttggaacctcatattttgatttgctttggttctcagttcatggtttacctatgcagattcaggagtgtatctagctgaaaag

SEQ ID NO: 37743 - DNA, 680 bp, Sorghum bicolor
  Intron number 1 from transcript Sb10g031050.1 (locus Sb10g 031050) derived from phytozome v7.0 (chr-ID chromosome_10; pos 60716634 to 60717313 reverse strand)
gccccaacaaccttcgttccccacctaaagtacaggtacgccaatccgtccatccccttttcccaattttgttttctgtcagattttctcttctgtttctacatcttttcctatttcggctccgtgttgattgttgttcaagcaagccccttctcccgcttccccctcgatctgattagattgggatagatgattctcgcctttttctttcctggacctgatcaatatcattttgctatacttccatgaatgatccaaggattttatacttttatgaagcattctagcattaatttcttttatgtacctaatggtgtcaactcccaaagaaggaaaaaaacgatttctttctgcaaaatcagcgccccgatcaataattgattacttactacttagtagtaaataaattccatgaatgaaaccaaccagcgaccttttcatcttggctgatccgtgcagagcctccgagctcttagcttatttggaaaccgatacggcaaaggaattagtgatttatttatttttgacgaaatggaatcagtgatttgatcgtcagattctgctactgtttgcttgaaatgatggattccgttcaaatcagcaagctttctgcccgcgtgctaacgaatttttcaactttttcaggggcctgatacctctgggcaagcagggggggcctc

SEQ ID NO: 37744 - DNA, 501 bp, Sorghum bicolor
  Intron number 2 from transcript Sb09g025810.1 (locus Sb09g 025810) derived from phytozome v7.0 (chr-ID chromosome_9; pos 55223137 to 55223637)
atgtatgccctcaacctacatctgtgcatatttaaaaccttttttttggtgttttagtcttgaataactcctattgtgtgtttgtttttcatccggtcgattgcttcagtttcatagaggatctaggcaaattcaaaagtacaattatgagcttaatcatggaatgtgatcttagacatgtgcataatctagtagtcaataaactagcataatcgaggcaaattcaaaagttgttgaaaagacacatgcgcgatgacctgtgccttgaatttaggtattttcagaggtttcttagcttatacctatgtgctgctgcattcaatcttgatactgatttgcacaactaaacacactagccttttttatcaactcaactgtatgtactatgtcaatattgcatgaggttatgaactgtatatgctcttcagtgcatgcttgcatgcgagaagtttggtttctgatcatgacatattcctattcttgctggactctaggaagcat

SEQ ID NO: 37745 - DNA, 824 bp, Sorghum bicolor
  Intron number 2 from transcript Sb09g022360.1 (locus Sb09g 022360) derived from phytozome v7.0 (chr-ID chromosome_9; pos 52033325 to 52034148 reverse strand)
agaaggaggtagtaatagcaattacttgcacaccagttttccacaacatgatttgtaactgattacgtagtactgtttaatgctctcaggatatatatgtatttatttatttatttatttatttatttatttatttattgacttagtttacttttacagcatcatcatattaggccttgtttagttcacccccaaaaccaaaaaatttttaagattcctcggcacatcgaatcttgcggcacatgcatgaagtattaaatatagacgaaaacaaaaactaattactaaatcgcgagacgaatcttgtgaccctagttagtctatgattggacaatatttgccacaaacaaacgaaagtactacagtagcgaaatccaaaaaattttcgcatctaaacaaggcccttgtttcagctcacatgaagatgactcaatgctaattatttgggtactaataaataacaagcatggtattttaccttaacttttgatttgactccccccccccattttttatgtttcttggtacaaaattaagttattgccttttgaaaacaatatcaagagaagaatcatactcggatatactgataaaaaacaaaattcaattctcttatggtattcacaatcaagtacaagtgataagatgaaaaaaaggtgtaaatgtagcacaaccattcaacagtaaaaaagagaccattggaggaaaaaccttctacatttttacttttgtttgattcgatttgaaaaaatattacataagtggtaagtaaatttaaatattcatttcataggtgggtttggctttgaagaaattatttgaag

SEQ ID NO: 37746 - DNA, 936 bp, Sorghum bicolor
  Intron number 1 from transcript Sb09g025340.1 (locus Sb09g 025340) derived from phytozome v7.0 (chr-ID chromosome_9; pos 54796746 to 54797681)
cttgtaagtggttcttaatggatctatacatacatgctccccggattttgagtgcttctctctctcatcccccagctgttgcttgtttttacatttcacaattttctctgagaaaaaactttacatttcacactagtgcatatacgccacacgctcccttgtttttatatgtggagtgcttgtcttaagaattggggaacgtaattgttttttctttttagtatatacatgctaagctttgcttccccaccttcagaagaaggaattgaaagacacactggaacacaaagatacagttcaatctgatttttcgtgggcgccttctaattttgttccccatccccattctccaaccggtttcaaatttcctccagcatttcttgttaatcttggataggatttatactgtatgacagtttgattctgacacactgctctatccaaatccaatgcaaggagctcataaattaactgaatccttttatcacagttctaaagttaatcttttcttaaccaatagcatcatattaattcatttttttcctattatacatcaccttgaaattaatttacattgactgctggcgttttttggaagaagattcaagttaactgctgcctgtagagtatgcaaaattaaagcataaagagagctacagtccactatccaccgaagttcatgcatgtttcagtgccatatctttccgtgattcctgtctgtgtaccgaataaggctgctcgtttaccagtggacaacagtggccagatcgatccatccacatgctgctcaccaccacgcactgtgatcgatgcgccatcgatcgatctcatttcatgcatgccaaattaatttcacctgcagtagtctgcactgtctggttcagttctgaattattatctgatatgatgatctgtgttattttactaggtgtgatc

SEQ ID NO: 37747 - DNA, 841 bp, Sorghum bicolor
  Intron number 2 from transcript Sb08g006190.1 (locus Sb08g 006190) derived from phytozome v7.0 (chr-ID chromosome_8; pos 9177239 to 9178079)
ctcgtgcgctcccttctttcccccctggtgattgttgtttttgttttcaacaacggtgttgcccatggttataaacttagaatcttcgttttcaatggaatagcatcttgtagccttagtctgctgcagctgaaaaatagtcttgatgtttgtttttttaaaaaaaagaaggaaaattagtcttgatgttgttgggcttaaaacctagggtcccctcagttttatgatacggaatgtgattaattaatcagatggcctgttgcaagtcattcccctcgtgggccggccaattatgagtgcaggagaggctagtgtgcttgcaatcagactatgagagtttttcgtgtttcgggcatatgtgcttggattaacctttggttgctggtattaggcttttagcatgttataggatttttttttccttttgagatagggcttttattattagaattttagcatgttataggaataataatgagatagggcttttattattaggattttagcatgttataggaataataattagggctaacagacaaagcctcattttcaccattggaatgcattgatgtttcagctttggttgttgtatacgctactgcaaccccatgatgtgttcttaaccccccccccccccaaaaaatgctgcttcttattttctgccagctacatcctgacttcctttgctgtcctcaaagacccacttgctatttatcattttcaatttcatcacatgtggggcatatttcaaattctatgatacattttttatcctcctgttcatagtgttttatatgtggcttgctcactgaatgttattgttcaggtacaacacaca

SEQ ID NO: 37748 - DNA, 865 bp, Sorghum bicolor
  Intron number 1 from transcript Sb08g001652.1 (locus Sb08g 001652) derived from phytozome v7.0 (chr-ID chromosome_8; pos 1658596 to 1659460 reverse strand)
aaactggtggtgagactaataagtattatcttgtttcactatgacgagataaattcttcacagtgcagcagctcctagagttgttctagagccttgtccaagaatgcaggaggatctaaatgttttagtacaattaaagtactatagtaccattgaatcaatgaccaattcagtttagttgtagcaaactattcagttttgtgcatggtgtatcgatttcgggaaggtgagcatagcttcaaaagacatcaaaatgatcatggtcatgtgtgtggtgcattttgatgtgtctgttggtgcattttgatgtttgctgaagctatgatcatggtcatgtgcatggtctgttgaagcaatgatcatggtcatgtgcatggtgcattcgattttggtatttataattgtatgaacagaaaatgtgcttaaactaactagagcagaatcaattagtaaatcaattagcatttttagtttgttgcctaatttcctccatttcgtccaatagcattgggtttaattaatatattgttttcttaaaactgtcttgcttggtaagttgctactcatctgccagaagcagtgattcaggttttttcccactggtgtttctgatgttataaatgtttggaagggtcattaaattttaaacatagtttgcatggaccttcattaatactatgcaaagaaattttctgcaaaatctactaggataatgtgcactaatcagacatgatactttattgaaactagattacatactggataactgatggctaatttgatttggttcatttttttttttggaaatccagaataaaaagattgtttataacttatctgtaggaattacatataggaatttggg

SEQ ID NO: 37749 - DNA, 904 bp, Sorghum bicolor
  Intron number 1 from transcript Sb07g025760.1 (locus Sb07g 025760) derived from phytozome v7.0 (chr-ID chromosome_7; pos 60865964 to 60866867)
cctccaccgaggagaggttcgccgatctgtgcaaggtgcgtgtacgcttgcgcggcttcgtcgggaaggggttttttgacctttcgttgggtgctggaattgtttttttttccactgcgcaaggcgtgatttttttttccagtggtgatgccttcgagccgcttcgtgtctgtttgcttcgtgaaacaaatcatagaagattgaagatttgggcggattttcttgtttggagtttaatttgggctggatctggcgctctcctttggttttgcttcgtctattttgaagggggaaatgtgtcatcttttctagctgtggtacggtctttggggttcagtgctctcgtcccactgacttttagattatcccaaccaatttctcgcccttttaatctttcgaatttcattttgaagataaaggaaaccattccaagccaatattttcggtttccttgtgatgtgtggaaatttatgttttcaacctttcgctgccaacattttgcgttctactggggtattttttttttaaaaaaaatatctgtggctgatccttcaaaatcgaataaatgaagtgtcttttgaaggttcatttttgttttatacacttttttattgaggagtctggagtggcgtgggtcatagtagatagtactgtctttcgtatgtctttgtcatatcattagtgattctgtacctgtgagtttatttactacaacctgcagtcctgactcctgagtcctgcttgttctatttttaggagaaatatatatccctaatcttgtgatgttccactttatcgctactgttctcctgtaacagattctcgtatactctaatattttattttctctgttgtttgctggcgagcagagcaagctgggactggacgagagcacgacgaggca

SEQ ID NO: 37750 - DNA, 732 bp, Sorghum bicolor
  Intron number 3 from transcript Sb10g029690.1 (locus Sb10g 029690) derived from phytozome v7.0 (chr-ID chromosome_10; pos 59433443 to 59434174)
ggtggggtgagtgagctcactcctctaacgtccacagatgtctgattggtagaaaacattgttttgttgagatagcagaaaatggcatacattggcgatgtttacttgatggcttctatgttgtgtgttgctttgtctttgatgactttctgctccattcgtgttaggattcagggtgcaatgttattcatggtcgattacttggtttgtgacaacatcaggctaagtgttatcgtactttctgttattcatgttataagaacgcacccaaagcgaaagaagtaaatcttgtggaacataattagtagtatagtactttcttggcaaagcttattgaataactatctcagtccatcatgcatatgtgtagtataaaccagaaaagtaagctaggctgggaatgtacgtgggagatatctccgtgttatatacaataggtaaatgtttcctattatgttgctggtatatatggattgcaaacagtcttgccacataacaatgtacataatagataatactagcagcaatggtgttgaattatacaactgttgccataggaatctcttctattcctcagtcagttgttatgatgaagcactgttccatgtttttttccatgtgcacagcatgccatacatcttgaagcccaaatgcacctttatttatttggatatttgagttgcatctgagaaatcatgtttatattttcagttttcaatcaaaagaccttgt

SEQ ID NO: 37751 - DNA, 665 bp, Sorghum bicolor
  Intron number 2 from transcript Sb09g003490.1 (locus Sb09g 003490) derived from phytozome v7.0 (chr-ID chromosome_9; pos 4027284 to 4027948)
cggaggacgagaagctcatctacaacctgcgcagggtaaggagacccacctcttccaagtggaatgcgattcatttgttgaattgttgtggttttatgttgaaagttttgctcgctgtatgatttatggagtggaatcgagaatgtagggtgtaatgtaaaagaaaaaaaggtactggtatattgaggtactggcacaagtaattgttcatcccagaaaatagtgaatagggctaagattgtttgggattttgctccgtttattgtctgaaggaatcaaatagctggcatagaagattggaaagtcaaccacacctgttgtcgtgcatatcatgacatatttgaagccttgtggagcatttcttatgtatactgaatgaataaatgtgactggtaatgaacacagtgcttgcattcctttaggcttcaagacaaatcaattttaataaataacagaaaagtatagtgattggatgcttaatagtagctgatctggcacacctgtttagaaaaaagtaatttccagatatatcatgaagatataagtaaactacattgtctgttgtgtttggtctattcttttagtagcgaagtccttgacttgtcatattctccatctccttttatccaggccaagaaaaaggttgctttgctcctacagaagct

SEQ ID NO: 37752 - DNA, 535 bp, Sorghum bicolor
  Intron number 3 from transcript Sb07g025350.1 (locus Sb07g 025350) derived from phytozome v7.0 (chr-ID chromosome_7; pos 60443984 to 60444518)
ccgcagctgtggcaaagatcaaggttgttccttttgctttgacctcagtgtttctcttctagtacctagctcaaataagagtgttcttcacttgccagttggagatgagctggctagtagtaccgcttgttttttccatgactttgacttttctgatggggccagatggccaagcccttttcctggttgaattatggtgttgacattgaaagggctgagcaatatcatgtcatactggtggagggtgtagctctgttggcatccttgtgctttgtaacatatacatatgctgatggacaaaatttgattagcagttgatgctcaacatacttatatgatgcattgtttgcagttcttttttgtctgtataatgataagacacagggtagcttctataaagcctcactactattattgttttgatttcatgttcttgctgcttacattgcttagttcagttcatccaattaccctgggattgtctggtccttgtttgaaaataattttgatgttcggattgaacaggagcaactgc

SEQ ID NO: 37753 - DNA, 795 bp, Sorghum bicolor
  Intron number 2 from transcript Sb09g004600.1 (locus Sb09g 004600) derived from phytozome v7.0 (chr-ID chromosome_9; pos 5578488 to 5579282 reverse strand)
gtcccccggatcaaggtaacaacaagcgcgataaggacctttcctctcgttcgatctcgtggcaacttctgttaatttgatcaacttttgatcatgatcgtgcggggaaaagtctgcttctgattcataaataatgacttcgtagtagtagtagttggttttttctgaaatggggttaatttggtttgatatttgttttttcatcgaaagagttactaacgttgcatttctgccttctagattaaggcttataatgagaaatcgtgaaattcttaaatcttctgtgatctgacttttgtttagcatcagatttgatagaagaaataaataaatcaggctcgattttcttgttccgcctgaagtacaaacgtactgtttaacggaaagtttagcatccctgttgtctgttgattcttacattctgacttttccacgattccctttgatctgcaaagttcgggcctctgcatctgtgctttctggtattgtctgctaattctcctgtttgtggttacaatccgaagctaattattgtaatatatcaatttgaaatttggactttgttgtaatatagtactcctactcaggacaacatgtttaatttggtattacacgctgtctaatttgcatcatatagataaatattcctgtgtcctggttctcatattttatttgttacttcttcaccatctcagccaaggtatctccagaagtacaacatgacattagtgacatcgtcagttgaagagagggcaaaacttccaaacccttgtaaccaggaagaccaaaatccca

SEQ ID NO: 37754 - DNA, 958 bp, Sorghum bicolor
  Intron number 1 from transcript Sb07g027080.1 (locus Sb07g 027080) derived from phytozome v7.0 (chr-ID chromosome_7; pos 62224074 to 62225031 reverse strand)
tcgtcgtctacttcccccagggacacagcgagcaggtccctcccctccctccctccctccctcgcggcgattcttgatcaaagctgtcgtttttttccaactccccaagctcccggtgagcgagattgctccatctatttatgaaatttgttctcttgtttcgattttctgtggcgtacttcggcttgtctctttcttgtcgcctccctcgtgttctccggggatgtgcgccgcgcgcgtgtcattccatggttggttcgccattcggcggcaactggtttttggagcttcgccgccaaatgcttgctttgcatttgtctcctgacaaaaacattttatttcccggttgctttttgtacagcagcgcgagaaaatcatctgctcacaattaaggcttagttttgtgattgttagtaatgttgttgtatttcaactaattttagcttttttttgggcgacgtaacatattttctccctgcagctgaacatatagtgtggccttaatttttgggcgacttaaatcatttgctttgcgaaggccgatgctcaactcacatgatagttgtatatttgttgtctgtgatgttgagctctcgtttgccatgtatagctagtatacatgtttgagtggttagtaagcattcttgtcattaaaatctcccttgtcctgtgatcctgtctatttgatcatcatgttctagtgcgaacaaaataattagggaattagggcctggtcttagttatctacgtctatctttggcttgtttgcccaactaaaatggagtttcatatgaaatgcctgtgtattgtgtgccacttttatattaaagttacataaaagctaaaagataaaccagttaaaaaaaacttgtttatttgctaataattgtgaaagttgtctggagttccatggtgaacaattcttattccttgatgccaatttcaggtagcagcatct

SEQ ID NO: 37755 - DNA, 934 bp, Sorghum bicolor
  Intron number 3 from transcript Sb09g026820.1 (locus Sb09g 026820) derived from phytozome v7.0 (chr-ID chromosome_9; pos 56001695 to 56002628)
agttcctcaatcaagtaagtcactccttttctttttgtcgagcatgtaggagagctgcatatcttcgtgctgcattctgccttcttcgtttcagatactcagattcagatatagtagcaaatataaaaaaattagcattagcgaatagtttggtgcgttgtgaattgtgatcacatctcccatggtgtctgtttacaatagcagctacttatgaggttgaccataaaacacaaacagataatgttcagatgatcggtatagtcatctacagcaagttcattatagtttgcataggcttcattttttacctccagaatcaaaataaaataaactgaacctgttaaaacgtttatccctacaatcttcttgtctggcgttgtctggtgcagtatatcaactggcagaaccttctctatgttttggtttggttgttaagtgctctctccattccatattataagtcatccaactttcttggagactcaaaacatcataagtttgaccaaaattataaaaagaattacaaaaaattataaaatcaaatagatatactataaaatataattaatgaagaatctaatgatacttagtggatatcataaatgttattattttattatataaggtcaaatttgagatcctttgactccaagaaagttgaaatgatttatagtttgagatagagggagtagtgtatgccgtatgtgtattgcatgatctgaatgctctaactgatggattcaccattttgttcccttttaggctagcccatcagatcctcaacattttccattcattttggtcgggaacaagattgatttagatggcggaagcaaaagaatggtgagtttcctgagtgtgcaaactttcttatatagattcggaatactctgcagtctctttgcgcacaggtttctgagaagaaagcgaggga

SEQ ID NO: 37756 - DNA, 634 bp, Sorghum bicolor
  Intron number 2 from transcript Sb09g002280.1 (locus Sb09g 002280) derived from phytozome v7.0 (chr-ID chromosome_9; pos 2450568 to 2451201 reverse strand)
agaagcggatcaagcagcgcaaggactttatcgtgaatacactttgcattctctatagccattactattattattataataatatattacttggatttgccgtttagcttcctgctatgatactctgttttatgctatccaagcctaacttgaggtcccttgtgctggaagcctggaaggggaagaaaattttgaccagtaaaatcttgagagttgatggtagatgccacctagcacatccaagtgccaccatgaaacggaactacatataactctttgtcactcagttagttccagctctgttctacatataactctttgtgacttagttacttccagctctgctcagcatagtttaaaatcaaccttcttttgattcactgttctataatttgttcattttcctggaccccaagcaagtgaatgacataccaaagtctggcatagaaatacattagtgaactgaagtatggatctgagccagtcagtcgatatgcctgagttgtgttacctggctctgagctctatatgtctagttagagttgatttatcgcccttagtttctaatcaaatgcttaaatgcattcttactcgtacaggctgagaagaagaagcgcagagcacagtattccgc

SEQ ID NO: 37757 - DNA, 882 bp, Sorghum bicolor
  Intron number 1 from transcript Sb10g008710.1 (locus Sb10g 008710) derived from phytozome v7.0 (chr-ID chromosome_10; pos 8977669 to 8978550 reverse strand)
cagtctcttgtggcagaggtacatgaacatatatattatgtatgatatacggaacatctaattttgtgtgtctaataattactattttatagagattgtttcaacaattagataaatatcatgcaacacacatgttttgatcttatgtgcattatcaaattgtgctgaatatttactgaagttgtatgcacatacatatgtaggaaagtaggtcttgttttaactttaaagtagccatgagattaaataaaactagcaaactttattatatttcagccactttttgtccattagatcatcaatatatatatcaaacaactcacatgtcttgttttcatatgaggtgtcaaatggtagtaaaccttactaaagctgcatatgtgcagtactaccattttgtagcatagtagtaggaaattttaagtgactgagaaataaaaatatttgtttgagaactagagatagtgattatatataaacacatatatctagctagctcgtggcatctaataactattttcaaaattagaagttctatctgcaaattcttttaacaaacaaaatgtaagtgaaagagtcaccctacctagtagtcttgtgccagtagtcttgttagatggcacccgcgttttttagtttgttgggaatttttctagaagttcaggatgcaaaggggtgtgactaaatgtgttgcacctgagaaaaatatcataccatacattttaagtaaaataatgttatttcttttttttttgtaaatcttggaagatatattgacgaagttcttattggggtctacaatacataaactgactgaacaaaatgttcttgcaaccattcgctacagggtatagtggacaaggaaaaattgtactccttcaa

SEQ ID NO: 37758 - DNA, 463 bp, Sorghum bicolor
  Intron number 2 from transcript Sb10g005180.1 (locus Sb10g 005180) derived from phytozome v7.0 (chr-ID chromosome_10; pos 4640026 to 4640488)
cctcaggtaaccttccgatgatgttgaagtcgtcaaaacttctttgcattggcagagacaaaattaacatggaccatcacattcttaaaaacatggactacctcgtggaggtgtttggttagaggtgttaaaatttaacaagaactataatatagttgtaactataacaattagtatctaattatagactaattaggtttacaaaatcgtctcgcaaattgttctctagctgtacttttagtttcgtaaatagtctatatttagtatttcatacatgtatccaaatatttgattcgatgcgacaggtattccagaaaacagcccgaaccaaacaggaccaaaaccaaatacacgctaagtcgccctttcctaagtgacttaacaacaaaatcccaccaaaccagacaaaacttgcagcagagagcctcacgccataccgtggccgtgccttttctatgcaggg

SEQ ID NO: 37759 - DNA, 563 bp, Sorghum bicolor
  Intron number 3 from transcript Sb10g029150.1 (locus Sb10g 029150) derived from phytozome v7.0 (chr-ID chromosome_10; pos 58967305 to 58967867 reverse strand)
caactagacacaggagactttccccaacaggtaagattctaatttacttagttaggtaacattgagcaatagtcttattatgaattgagtacagcgtactactatagaaacctagaaagcatgtatatcaaaatttagagtaccatacactaaacacaaatgatagccatatctctccaatagactagaaaactactaccatggtcataaatatttgatgctccgacaaaaatccattgaaaattttgaagattggtcatcaacaacttttaaaatgtataaaatcatattgcatacttaagttgaagagtacattcataatcttatgcatttattgatattagaactatgaattctcaaaaatgtaaaggtcaaatttgcaccacaaataccataaatggttaacaacgctaagtatttttaatgggagatagtttatacatctatgaatagagcattacaatcataagtattcttctggcatggttaaatggtaaatatttgtagtactcttatggcgttattgaattaaagttgtttattttggtataggaacatattgg

SEQ ID NO: 37760 - DNA, 1004 bp, Sorghum bicolor
  Intron number 3 from transcript Sb08g019525.1 (locus Sb08g 019525) derived from phytozome v7.0 (chr-ID chromosome_8; pos 50296902 to 50297905)
ttgttcatcaaactggcaaacttcgccgtcttctggtagggtttaattcgttttgctactttgtattgcttcgttatgattattgaatatatgtctgctatcttttacttcgctcatggttctcaatacctatatggggaatgtctgttgattgacgccttgtccattttctactgattgttcctatttattgtatgaggtaaaaaactattgtcaagtgtactagactttcactttgtttcagttttgatcagtctctaacttctgaattcattcaccaatcattttcttttgttgtatataacaactgcaatagagtatagagtatagttcaaaatgctattgttttcattatgacgtttttcatgttcaatttaagtcctttctctgttcaggaatacctgatgtttctggttgtacacttgtactggaagaacaccttttttttggtcagaacgtcatatagacaaaaaacaaagggttcaaataagtaagacaaaagttgtcatgggcttttagaacaatattgctgtgcatagcacccttatgacaagtatgttggacgacgcatgcatgtactgattttgttttaaagtaccatatcagtattttcccctaaaaatggtattatcgaaaattgtgttaggtaggagaagtgttctctatatccagtctttcaaaaatatgtaatataaatacacattggtctaaggaatgccaagacggtggggggaagatagttcattccataatttattttgtttatagtcattgtctttgtttcgtgtatcatttttgcttcaattttccattcatttcacggaatacaacttcatcctggattcttctgtaaatgtgattgctacttgtttgcttttctacatggtagactctaaatcattccattcgtacattgaggtctgcttcacaatttgttcattactattttctgaatttactatctggtttcacttacttcaaagatggttgcatttctgtccaga

SEQ ID NO: 37761 - DNA, 778 bp, Sorghum bicolor
  Intron number 4 from transcript Sb09g025940.1 (locus Sb09g 025940) derived from phytozome v7.0 (chr-ID chromosome_9; pos 55308336 to 55309113 reverse strand)
gcagcgactggcttgtactcagaattattgtcaaggtgttaatgcggtttgcactgtttcttcattaggtagttttagttgaaggatgtatgatgtatatttttctcttcataggcatgaatattcctttatagtgttactgtacactttgtaggcttgaatttgcgtagatacagatgctggtactcattgattgattttgaaaagctttgattgaataaattctgttctactcatcaaaataatatcgagtatatttctgcatgggtactgggacctttctttattagatcggaggctcacaaaccattttatctcttgtctgagtagctcctgagttttaatcactgagcatcgcaccattgtgttgtctgtatgccttaagcccttaactatctcatcaccaatctgtggagtccttggactcccagagctatggccttaactattctgtcacccatctccagagctaaggccttaactattacaccatccatatgtgatcttgaatacagtattgactccttttctgttcattatgttgtcctccatacaaaaaggtaacttttcaaaaaactagtgatgtggtggactgaattgaaattaaatggatggaaaccgcaggtttcagtaatcttattttcccacccttgacttttcctgtgaagcctgtgccagagagctatttatctaccttgtgttatcagtattttgtgaaaccgagctcccccaaactcatttgacatatcttctgcagcaatcggggtttactgaaaca

SEQ ID NO: 37762 - DNA, 513 bp, Sorghum bicolor
  Intron number 1 from transcript Sb08g002940.1 (locus Sb08g 002940) derived from phytozome v7.0 (chr-ID chromosome_8; pos 3202695 to 3203207)
cggttccgggaggcgccagatcctagccaccctaggtcagtttgccccctcaaatgcaaagcgtcctcattttcttcttcagcagctcgaaaatttcattttttttttatttgtagtttcttgcaatgtctgctccccttgttgatttctgttacattgcgtcttggatggggtccagttggggtgatgtgtatgtgcttttcacactcagtcttacaagtcaaacatccgttacctgctaccacagttcttctgttcatcgcattcatcttttgtgttattaattgttaatgtgattctcatgtttttatcccctttttcctaccaattttgtgcgcgcgttctctctcagatttttcctgggttggattacctaatcgacctaatccttaaatttcttaccgattaactgtgattaaggtctctttcgtcatcgattgagtaattaagttacttaaaattaaaattgttcatttcgctgtctgaatggtgttcatccaatgcaaaagggga

SEQ ID NO: 37763 - DNA, 698 bp, Sorghum bicolor
  Intron number 1 from transcript Sb08g017450.1 (locus Sb08g 017450) derived from phytozome v7.0 (chr-ID chromosome_8; pos 46687518 to 46688215 reverse strand)
gcttcaccaagacactgtgggtaggcaaggtataccagcttagatctttgcctaatcctgtattgcatgctcattgatggctttgttgctctgtatactgggcgttggaagttaggtgatttgcgcatcttgtaactgtgaagttaactagtgtagttcacctagattagtcaaattaattgtatttgttactatttgggctctgtgttatttataactttccttcctagggtttgttaaatagaataataataaggtgattcagcacattccgttgattgtacatctactacgccgtgcctcaccttcacatatatgaacatcaatttacaacactgaaaatcttctgtccagtgacagcatggaacagggctggctctgcccactggtgcactcttgcaggtgttattttttgcttaccataacactacgtatggcatatggtgttgaaaccagtaaatgactgatacagagttgtgtttcttgtgcttatgtttcttgttctgtgcaatctgtcttttatattgaattgtgcacaaatttcttccatgtctggccaatgtaaagcctgccctattatattcatacacaaattttgtactttatccagccattccatatttttctgactttattcatgttttgatgcttgtgtttttgtaggcgaatctaatttctgttctaagaagctacctaac

SEQ ID NO: 37764 - DNA, 803 bp, Sorghum bicolor
  Intron number 1 from transcript Sb10g013146.1 (locus Sb10g 013146) derived from phytozome v7.0 (chr-ID chromosome_10; pos 20627875 to 20628677 reverse strand)
gcaaagaaggaagcaaacttcacaagaaaaagaaggtaaaagccacatcttctgttactttgtgaaatgtagaattcgtgctttgcagttccaatcaaacacaggggtaaatgttattttgctattagttcacttaggttgttagggtcagaggtaaatataggagatagtatttcattcctgccaaactgaatttttaagggagttcagttcagttgagttcagtttgtaagagtgtggtctgaggtgctctcttttttgtcgcctttgatctctactccaatcacaataaaattcaagcgttgcatgtttgctccattctagtacacacgcaaccagcttctttccatatagaatgatctggtcttttaggctgcgctctagggattttataatgtctctaatctaatgaatctaatttgatgttctaactataaacttggtcaaatctctatccaattcaggtccttttttccaaatagaatttttagtctaagtgtgcctaacatgattagctataatatgatgaactaaaatgttaagatctagtccggtgacctgatctggccattgtttgcttctcacagaaactgcagctttgaaagtagttgaacctacaataactgattatgagacaagccgggatatacgcgtggctaacaataacaagaagctgcaagaactaggactgccaactcttgctgctgactttaataaatctatacctgaatcttctactacaacgaaggggggtaaaaaaactcatagtgaagattcggattcatcggagtatctccttgacg

SEQ ID NO: 37765 - DNA, 431 bp, Sorghum bicolor
  Intron number 2 from transcript Sb08g002560.1 (locus Sb08g 002560) derived from phytozome v7.0 (chr-ID chromosome_8; pos 2649774 to 2650204)
gggcagaagcacatcaacaaatcaaaacacccaaggtaaatttttccttcttaattgaagggacacatctaactctccttggtggtgtacttctgacgttctgagactccttgatttctttctcttttaacacacctggggatgtatgaattaacaaggttcatcagaaagaaattaaatcaaacacaaaatcatatatatgcatgtgaagaataatatcaaggcagaccagatcttggactcttattatgcgctcactctttactagagctagcagcgaatgaagttcatcagccatgaaaaaaaaagaaaacaaaaataaaactaatcactaaatcatgtgcatgttcagaaacctaataacgctgcaaatctataatgggttgtacaatcactaaatggattatacatatatgcagaaattactacag

SEQ ID NO: 37766 - DNA, 483 bp, Sorghum bicolor
  Intron number 2 from transcript Sb09g029000.1 (locus Sb09g 029000) derived from phytozome v7.0 (chr-ID chromosome_9; pos 57766331 to 57766813)
accgcggcgaggagctcctcttcaccagcagcaaggtgaattttttttctcttcttatttcccacactttactcttaccgtcgtctaataatctttgtaaagattcagcggccatgccgtttgatttgtttgtggttgaatgttcttctagcatttctgtgaaaagacatgtgctcaactgggctgcaaagaacaacactgaattgtgttcatttacttagaatttccattgtttccatagtccatcctgatggctggagaagccaatgacaaattaagctttgctatgttacctgtgagcttggactggtttgtggtcctaaagtttcataacggtttcctcggtttcctgtgctgacctcctattttctcatcgtccttaattggaccagtaatgggcctgtagccttctatctgctccaatggtctaaagcactttcatgtctgttgtttctgacgtgcaggcaatcttcaagccgccaa

SEQ ID NO: 37767 - DNA, 639 bp, Sorghum bicolor
  Intron number 1 from transcript Sb10g000890.1 (locus Sb10g 000890) derived from phytozome v7.0 (chr-ID chromosome_10; pos 577839 to 578477 reverse strand)
gcggcttccgtccccaacggtagtcccactgtcaggtacggctccctccccttccttttgatttcctttgctgttgttttttttttcccaattccaacaacaactagctagattctcgtcgccatcgatccgcgtgctttgtttcgtcatgtggcgagagtaacaaactatcctcttgtttgtttgttattattactctgacgctctgtaaagaacacaacggcgatctgtgttgggtatcaaaagctcattcattttcttttcttttgtcgacgattcgctgagtcgcgtgaacagaacgccacccaattaacgctagttcgtctcgttaaagtttcagatttaccacccacccgttccaagtctgtgcgtggttggtcaatataaaatactgccgttcgtgtgaactgaattacatactgttcctcttcttcttctgaaaccgtcgagttgcgtgaatagtgactaccatcgagccatgcaagttaccaacttgcagcaccagacacacttgttcaagcttctgatctgctgatgattcaaatgcacacttgttccaagtttctgatcagctgatgattcaaatgctgggcatgatctgcagctctctcgcgacgactgttcccgtccaggcggttc

SEQ ID NO: 37768 - DNA, 962 bp, Sorghum bicolor
  Intron number 2 from transcript Sb09g004940.1 (locus Sb09g 004940) derived from phytozome v7.0 (chr-ID chromosome_9; pos 6167232 to 6168193 reverse strand)
ctcctggtaagtccaccaaatccatggcgttttggctgattccatactcaacttcttcttggagttaaattatgagttttagtaaaatacctttatttcgagggaactatttatttggatctaaatcttagttactttgagaggtacgtacaccaattttttttggcagtgtcccgattcaaattgagtagagttcttgaaaaagtatataattttgacaaaatcttgaggctttattaatcacaggccatgtgtactacgttcagaaccctgtaaattcccttccccatctatttcgaatttgtagtagaccactgcagttttctttctgccgttatcatgtagtccttgtgttttacgtcaattgtcaagggtaccattttaaagtttcaaagagcctagctaatatatagggtactgattttgaatattttccccttattacattgctatttctgtatgctagctcaactctcgaatgtcgaacattacatatatacatatgatttgtcatacaaaaggtttgtgagattattacacactgaaaatatcctcggcgtggatcccatatatatatatatatatatatatatatatatatatgcagcaactcaatgttatgcaaataaaaaattaccacgtttctggacaaaagggaaatgaaatcaacctaccaaactcaatttcttgaatcaatacttttgagctagtaacagtgtttttctctcaacatcagcacctgccgaaaaatcagccagctcatgcacttgcctcttattattttcgagcgccgtaaaatttcactaatcattttttttttgtcatggactcacacgagtcccttttgctcatagctcacactgtcactgtgtactgctgcatgctgcgctgctgactgacaatggccacctacatctgctgcatcaggaggtgcacgagagccagcgcgccgacacggcgaa

SEQ ID NO: 37769 - DNA, 581 bp, Sorghum bicolor
  Intron number 1 from transcript Sb09g026570.1 (locus Sb09g 026570) derived from phytozome v7.0 (chr-ID chromosome_9; pos 55790711 to 55791291)
gccgtgtcccgccggacgccgcgccggaacctcaggtgagttgcttatgtgcgcgcgtgtctccgtaggagctccgcgtggaaggcgctcgtcttgtgttcgctgtattgcttgtgacattggagcgttggggtgggcttggcgatctccggggtcgtggatgggatcgtaatgctgtactacgttatctgcacacgttgcagtggctgcaaactactggagtcgtcaaccgtgcttgtttttttttctttctttctttttaatgtataagaaatggccgtttccagtccctataaacactattgtcatgtatgatcgcactgttctgtccatttgtaaacattagtgccaaaataactgttgttctgaaaacatgattgaattgtcttcgctccaatctgacgctgctgaggctcatgtttgaccgcactgttctaccccatttctaaacattgttgtatgttatatacaacacttagttgctagaatttgaaaagtatgtatcatgtatgtacaaataatcaaacttccattttctggtgttaggactggcgtgcaacctcatcagaagagcacaccta

SEQ ID NO: 37770 - DNA, 786 bp, Sorghum bicolor
  Intron number 2 from transcript Sb08g020610.1 (locus Sb08g 020610) derived from phytozome v7.0 (chr-ID chromosome_8; pos 51671312 to 51672097 reverse strand)
tttcaacagtacgaagcaaatcatctgtaccagtggtatggactattcctaggctttctccacctttcaaaatacataaatgaattttctgtctacattgaaaagaaccatattattttccatccagtttgtgtatgtatttctttcttgtgtgctagtatgtgcaagtacatggtttttgtcctaaaacaaagcagcatgaaatgtccctgtttttgttgacatatccacattattcattttgggaaagaaatatccacactgttcttttatttattttataccattaatattaatgtatgtgcctattgacagttatcaaagtgtacactaaagaacaattcagcacattgtggatactacaacatttcttttccatctttctttgttttagctatatatatctatactttagaaatttatacataaagtagccaaataatgttatccttttttgctcatcaacaacgacaacaaagccttttagactttgttcgtacctattaaataaattctattagtcacaactcacaagtcagggtaggttaaaagttatcctcttcttcttatatatcccaaaaatggtcattcagctaaaagaactggccactttagcactctatattccatgtcacaaaattggataaatgaaaaaaaatccttgaagtgtacattactgctgattgatcagcatacattttttaacatgttatgagcaactgttggatattttacgtttgtctcttattttgtctattttggttgctacaggccttccgtttgttg

SEQ ID NO: 37771 - DNA, 364 bp, Sorghum bicolor
  Intron number 1 from transcript Sb08g016200.1 (locus Sb08g 016200) derived from phytozome v7.0 (chr-ID chromosome_8; pos 43045141 to 43045504)
cgtcgtggctggctcgcgctctgagccgccggcgggtgcgtgtcgtacaagcctactaccactcctttttcgccttcatggatggagtgttcggtgagcacttgcagcgaccaaggtcaggtgaagaagaagaagaggatctgattgatactctcctccggatccagaaggaaggaaaccttcagttcccctcaccatgaggataatcaaagcggtgatacttgtgagtgtttattaattatgctaataaagttcttgttaactgatacttatctttaatttttgtacgaaataactaaaaatgtattgtacatttgtactccacgtaggatcttatcggagcaggaatcgaaacagcaacaac

SEQ ID NO: 37772 - DNA, 570 bp, Sorghum bicolor
  Intron number 2 from transcript Sb08g005410.1 (locus Sb08g 005410) derived from phytozome v7.0 (chr-ID chromosome_8; pos 7140473 to 7141042 reverse strand)
caaccaagctgcttgttgatatcctccttagcgaggtaaataaaagcttgtgatttttgttgggacttcaactgtgctagttttaggatattaggaatcaatttatctacatctagtctagtaagaaatatgcaaatctcttaaaaagttgggtaaacatatttggaccattcttgtaagtgcagtgttgagcagtggaaaaatctgccaggcacaaaccgaacggtccttaagtgcacttgagcagtagcaaatgcatgcatgtacaacttgtaagatgatgatagttgctgccagaatagtgtctaagatcttcaaatatggaccattcttattttgattaatatataccttacaatggcactagaactggcactgctctggttttgaatgatatatggacagttttacgttttgttctgtaacacattctataaaagtagaaaatactttattgtgaaagttcgctgaaataggtgaatagtgaagtctacttctcatatttctcttttcgggattcagattctgagtttagtattttgctttgtattctggcagtgggaagacagg

SEQ ID NO: 37773 - DNA, 645 bp, Sorghum bicolor
  Intron number 1 from transcript Sb10g020030.1 (locus Sb10g 020030) derived from phytozome v7.0 (chr-ID chromosome_10; pos 42869387 to 42870031 reverse strand)
cagcgcaggtgatttagattccgcccgccggcccccttcctcctcttacactgctacagctttactttttgaattttccatgatgggagacgacttcttccgtgcgcttggttgtcagcgcggtgcgattcttcgtgcgtagttgccagatctgcgtatacatccactggggacggttgtaaatagtgatccgggttgttgatgggataaagagcatgtgtcgtgtaaaattgggaaaaagatcgtagcttttaatttctgtatggttcgtttggacatacgggtgttcattctgccgtccctctaagtttgcttattagatccggagaggggcctggcctgctgctggtcttttttttttttgagtaattttgtcagcatcaagcaagcagcgttgttgtttagataagtgtagccatggtactcatgtgcttcagcatacaaaccttctgagtgcttgcagggccatcaggccctactctgtgacactagcaaatctagtatgtacagaacaacagtcttcagttgtgttgcaaatttttattatgtttgtggaagattgatattgaattatcagggtatcaagaaaatctgtatgactaaaatgcatttctttgtccatctacaggccctgttgccgaagat

SEQ ID NO: 37774 - DNA, 807 bp, Sorghum bicolor
  Intron number 1 from transcript Sb09g027830.1 (locus Sb09g 027830) derived from phytozome v7.0 (chr-ID chromosome_9; pos 56860019 to 56860825)
cttccctcgccactgtctccggtttcagcctcctagtacgtttcacattacgcacaccgtgccttctcgtttcgttcgtgcttaaatttgttatatacacaagcgttttactgttaccatattggttgagtttacagttccttcaaaatccgtaactactgtgattacagaagctgagaaccaaacaaacggagttacaagcttttcaattcaaaatcgatgattggcttcaactagcgtatttataaggaattgtattaacaattccgatccactgtagcacggtagccggtagggaaccttaaaattatacagtgattcttcaacatcgcatagtatttagaaactggcattctataaacctgtataacttgccagtacagacatatacagttcctttttcatcaaagaagctataaagcttgtatctaaaatttaaatatataagtatctctgctgccgaaattgtttgcatgcattgcatggcaggttagtccttcatgatttcgtcaactaaaataaatctttgcagaatggtggtacatgaagcagccttttttttcgaggggtagcaaacttatgcttcattcaagtataaacttgctctccttatccagcactcctggtgtagccaacatgtccttagcacaactagtagaatcgtcttcattttttttgtccactagtagaatcgtcttcattttttttgtccttgtgtgactatcttctgatccgatctaatgaaaactattgcaatattattgttcttcccgtaacttaacttgtatacttctaaaacagattggg

SEQ ID NO: 37775 - DNA, 774 bp, Sorghum bicolor
  Intron number 1 from transcript Sb10g022360.1 (locus Sb10g 022360) derived from phytozome v7.0 (chr-ID chromosome_10; pos 49962793 to 49963566 reverse strand)
cgacatcgatttagcagacatagatccagtaagaggtgaacttctgttcttcatttctgcatttccgggaagggtgaaaattttccacattccactacaaatttgacttccattattgcatagtagctttttagcaacgtttgacttcaagtatgaattgatactgcaatcattgtaggtcagattggagtgcatggctaccaatgaattgggtttcagttttgccctctgtgctctgcttcgattagctaatgatagattcagaatacttgttgtctgccctgtcaatttctaaacttaggatcatgtggggtgcaacagccaacagtaacagtttggtgtggttcaggatttttctttactctatatctgttggaaacctgaggaaactctatattacgataggtacctgaggaatctctgtattgcgataggcatgtgttagtgctgaatgattcattgctctaaaatttgtgatcacttaaactcatatgatctgcatgggcatcgttgaacaaaacacaatatttcatatggttaattgaaaactctggcaatggactactcactaccatccattgctcttcattaatatcttattttgagcattagtaattttccagtgtgttatattgccctgttggttgttactaggaataggcattaatgttaaaattggtacccaaatgtttctggcttcttgtctgaaatacatttctgtttaattgagcggcaattatgttttttttttctgcagaatttgggttcttgtcg

SEQ ID NO: 37776 - DNA, 874 bp, Sorghum bicolor
  Intron number 3 from transcript Sb08g021780.1 (locus Sb08g 021780) derived from phytozome v7.0 (chr-ID chromosome_8; pos 53434019 to 53434892)
tccctggtgatcttcaccttgccaggtctgctgccttcataatctgtcaccctatacatcatagtttcaattcttctttccgtttgtttaagaataatgtataatggtattttcaattaaattgggtcaaacagcaaccttaattttgaaatgtcattttgtagcatttgacctttgaatgacttgcctgtgtaaccaattgactgcatctattgatagcctgttatttttcaaacttgattttataacttcctgaacagagtgcatgtgtatatgtgtgtatagaaggtagtgggcaaggttttgtaagtgaaacttcactaggcattgcagggcatgaaagatcttagcatttgaatttcaagaatgcaaaacttatctccggcaaacaaacaaacaaacaaacaaatgaaccaagcataatggatcatgtttctggaatcatcctatacttgggttatgttttctccatgttatttaaaatgtcttcttcaaacacactggatttacagtgccaagagacgattttctctctggatgctatggaatgcccacccatgataggtgaatgttactagggacaaattttctttccttaaaaggttgtttagaagtatcatcctaaagcatattgtgctgcattagatcaaaaaacatgttaaatgatgtaaaatcacattccttcaaagttggaatgctactaattagttgagtgttcttcttaatgaaatgacatgcagctctcttgccttgttcgagaaaaactaattagttgaataaaccaagggattttatgctactcaaatcacttagcagtttgctgtgcaattgcttggcaggttatcatttaaggacaacccttttaggtgttctt

SEQ ID NO: 37777 - DNA, 778 bp, Sorghum bicolor
  Intron number 2 from transcript Sb10g026260.1 (locus Sb10g 026260) derived from phytozome v7.0 (chr-ID chromosome_10; pos 55654925 to 55655702)
cgaagtaccgaagtgaagaaccggtaacttgtttatttctaaaagaatgctggcaataattcatctgtatttttggtagctgaagctgacaaggtgttagtttcggtgaaatttggtgtatgcatcaatcggatgagaataaaatcgcttgtgtgcctttgattgtactgatcgatcctttttttccccaaaattaatacatgctgaaaaaaaaaaccattttggatagccaccaggtggagcttgatgccagcttttcccatatccaaattccttgtagaacagttgtaattgttccttgttgcttaggtaagtcaggttcaagatatagcttgcttgaaatcatttcatggccttgtttgagctttagactctacagacttgataggtgtatgataagttcgaagtcttgggctggaagaatcatttactcaatagagtaacataatatgttgttattttcattaagataatctgtgaaattgtcctaattatgttgaatcagcaattgcctctgcaagattaaaaacgctgcagctagaaaaaactagtcagcaagtaaaatgcgaattgctttgtctggaagaaaagaatatcaataaataaatttatgcttggttattaagtttgttctttttaacgaacgatcctgtacattctttggtaactgcagttggtatttttctgttcatggttcacaagtatttgaaggatttgatttgagttatcttctgctttggtctgatcttcctctgtctgagatgcaggacatcaacag

SEQ ID NO: 37778 - DNA, 777 bp, Sorghum bicolor
  Intron number 1 from transcript Sb09g006110.1 (locus Sb09g 006110) derived from phytozome v7.0 (chr-ID chromosome_9; pos 8935863 to 8936639)
agagccccctcagctccgacgctatcttcaagcaggtgagagcagaagcccatttgactgccgcgcctgttcgttgaattgtcagttactctgcgtccgatttaactttcttcaccatgcttgtttggtttcaccagttacgattttcaactcgtgtgtaaccaattaatcatcatagcgggggagttttccaggtgcatctacgcatctgggataaaggcgtcgccttttttttttcagagaatctgggagggaaaattaacattttgtgctgcatatgcgtgtgagaagctcgaacctagcatacagcgtgctgcccacagttccttctgttttattagttcaccaaccttttgatgacatagttaattagtggcgtgatatgtggattagtgtggataaaaaggaacttttttgggggagctgtgagttcaaatcacgtgacctcctttattgacatcatatgtgatctgccattttacaaacggatccagtacatgatatgtgtgctttagctcacatggtaaggttaaggtcatagtgaggtccctttggaacgacggaattttttgtgaaaatgaactgattcttccagtatgattcctatggaattcctgcctaaaggggccctatgtggctatgcttttctttattcctctaatttttgtttcatctttttgtgttttttggtgctgtcttatcagagtacattgttttaccatctagctgattgagcgcctgttagctaatacttcccttttggtttttgacagagtc

SEQ ID NO: 37779 - DNA, 735 bp, Sorghum bicolor
  Intron number 1 from transcript Sb09g028230.1 (locus Sb09g 028230) derived from phytozome v7.0 (chr-ID chromosome_9; pos 57191731 to 57192465)
tcaaggaggtgcgcgaggaggtcgccaagtacaaggtgggttcgactttcctcgcatctcctgttccttccctgtcagtgtggtttgtttgctctaatggataagattgcgagttgtacaagtatgcatggttggttgatccccgctgcaacttgttgttctgaatatggatttgcgaaatttgataatggaaattctgtcgtattgtttatgtactacatctaaaattgattgacgtggaattgtcaggattgatgaacacctggcagtactgattattttatttgactaattattttatttgaacttgataattcaatcggtgatccgtatggtggtcacattactttttgtgttgtagcagttgtttaggaaggctgtggtcagctgtgctccataactccattgtgttgtagcagttgtttaggaaggctccatgtcattaaccgacgagcttcatgattatgaaaaaacatcttcatggttgtgaaaaaaaacatctctggtagaggcaaacgaggtcaagttcccagttcatgttacaaatttctgttatttttctatgtcgttagttagacacgttatattgaagtatttgtgttatttagcaggatttgggctattacagacatagtatcactgtcgatctaatgcttatctagaataccaatgacataactctcattgtgttatgccacaggttggggctcctgctcgtgttgggcttgtagctcc

SEQ ID NO: 37780 - DNA, 1008 bp, Sorghum bicolor
  Intron number 1 from transcript Sb07g023350.1 (locus Sb07g 023350) derived from phytozome v7.0 (chr-ID chromosome_7; pos 58272711 to 58273718)
gcgtccgccgggaagccatcgactggatttggaaggtaggttcttgattgatctgagtgtctgtggtgtggttagacaggggatggaaaaaaggaaacatttttgctcatttcttactgcttaggagacctgtaggagcgcattccatgtccatttccatgaattaggctttgtttagttccgaaaagatttcggatttcggtactgtagcactttcgtttgtttgtgacaaatattatctaattatggactaactaggatcaaaagattcgtctcgcgatttccagttaaactgtgtaattagtttttgcttttgtctatatttaatgcttcatgcatgtgccgcaagattcgatgtgacggagaatcttgaaaactttttgctttttggggtgaactaaacaaggccttactttttttgtttgcgaggacatttccatgattacttgagttttgttcatctaagaagacgcttattttctcgtttctgcatccaaacacttgcaatattttatcttcctcacacagagcatagattgttccttctatctttgcaatgctgatggctgcttcaatcatttccttcatggtcgaattgcgtgcgtgtttaggtgtgtagccaagtaacttatgccaatgatttcagtactgtgcttgattacagcgaaacaaacactgttgtaacgtgccttgtagctatgccgtgaccatttttcccgggtggtgaaacttggggaccatctcggccaaagttggccattcgtccgcttcctgaatcacgagatactaaagatgcactgtctggttcaacattgttctttttatattttcgagaaaaacatgtagtacgcatttttaggccaaactcaaaatatatttttgacaaaatttccatagtatatttcacgtgaatctttactatacaatggcttcacttcttttccacgtgattagtaatgtgatccttgtgcaggtttacacatactacaactttcgtcctctcactgc

SEQ ID NO: 37781 - DNA, 558 bp, Sorghum bicolor
  Intron number 2 from transcript Sb07g022445.1 (locus Sb07g 022445) derived from phytozome v7.0 (chr-ID chromosome_7; pos 56977757 to 56978314 reverse strand)
cggcgccgccagctcttctgggacctccgtcgcaggtacggttcatctcctcatcgaagaaccgcactcatacttgttttgtttaatgctgacagaggacagaaatggttggtttttttccttgtcgattatgtatgacatttctataccacatcaatatttatgcagtagaagcatgtacaatgacaaaagtttgttcaatctaattgtatggtacttcctttattgtaaactgtaagtcattttaatttattttgagagtcaaaaaaccaaatttatataataaaataataatatttatgatactaaataaatatctatcattacatttttttcattagttatattttaatttcatagtatgcctatttgatgtcataaatgattgtaatgtttttttatagttgtagttaaacttgagatatttcaattcttcaagaaaatcagaatgtagtttggaacgaaagaagtacagtaaaattatttatgaaacatatattatgaatatttttgcattgtctagatagtcaactcgatatttctttttatcaagcagga

SEQ ID NO: 37782 - DNA, 516 bp, Sorghum bicolor
  Intron number 1 from transcript Sb09g024800.1 (locus Sb09g 024800) derived from phytozome v7.0 (chr-ID chromosome_9; pos 54300116 to 54300631 reverse strand)
aagcagaggtatttgagttgcagtatcctgtggcatgcatctacttttgatacttattaggtgtgattttcttgctgtggtgctgttttgatcatttgtgagtgggttgcgattgtgactatgattctagttagtgcaattaccttgacacaatttttattatgtagttaatttttaagagtaacctattgttttttttataaagagagtagcctattgtttgaattaaaatgaagtttatgcttatgatgataaattggttctaacagatactctgtcctgtttgtaaggctttagtagtgttgcattaactgtgtggaaacacacagctccatgttgctatgcaatttcaatactaaagccttgcattcagttgctaccaggatctacaaaatggcataagctattgtttattcaacattctttttttttgtttacatctgtatttgtatgcatcttctaatgtggatatacatcgcaggtccttccaccagtcccaaaaattgaaatacagtt

SEQ ID NO: 37783 - DNA, 988 bp, Sorghum bicolor
  Intron number 1 from transcript Sb07g029220.1 (locus Sb07g 029220) derived from phytozome v7.0 (chr-ID chromosome_7; pos 64303995 to 64304982 reverse strand)
tcttccagacccacggctcagtcgtcggcgtcgaggtagacgtctgcttcagtcccttccatcccttatggccttatctagtcggagtcaaaagagtgaacagaatgcagtttgcgaagtttttcttcctaagattagctatgcaatgctttcttcaaaaaaaagatcagctctataatagtagtaacggactaacggcaatcgagtttgacagtggatgctgacaaaattactggctgccatccagaatgaagagctagtgttgctatagtttaacgttgcttaataagagctagatcacagtttgatgtagcttaattcatgtagatacaaatacggcatgacttcatgaaaaattgaaaatctgaaatgctctcggtccttgcaaaaagaaagaaagaaagaatgcgggcatataatgtgttttacttcagcttcgaactatttaacctacttgagcagagcaagtcgactggagggagtattacccagcaaaccagaattctgctactatctgggaacattcggagttcttgccaggttgctgcaaactccattgtactagtgtgtagagagcttaattactagcaaggttctcttccctttattttctatctatatatgtactttaaaaagaacaacatatgggctaatcttatatgattacctagtttgtttttgggtcctgtgaatctaggctcagtagtgtgaaagcataggtgctgatgctgatagaagtctgaaattactttgttcccatgttgaaactcacgccctcttgttcggaggagaaaggaaggatgcttgtgttagattgcagtgccacatatttatcacctttgcttagtatagtggttagcattatcactcatcgatccaattcatgatgggtggttatctatttctcttttttgttgtaaaattatgtacggaagaaaatagtaacaccattaatgattatttttcttctttgatttcctagctttca

SEQ ID NO: 37784 - DNA, 857 bp, Sorghum bicolor
  Intron number 1 from transcript Sb07g028080.1 (locus Sb07g 028080) derived from phytozome v7.0 (chr-ID chromosome_7; pos 63059685 to 63060541)
cgcacagcacaagggagcagccggcagcagcacaggtaagcttgtcttcgtctccgatccagtgtaatcttttgtttttgtttggatttgtgatgatgacgacgaacgatggttatgcggtctgtcggaatatatacgcagttagcatgaattgctcgaaacaaggatgcttgtcttttataaagatatatactggaaaagcttgttctcgttgcttcagatggcctgtctctgaatattgtccttattatttacttatatatgttgaacgaatttgtatgtatatctgaatatttgtcctacacacatgtagtagaaagtgtttgcgtggttcactgacatgtagcctaaaggcgtattggcctaaggataagtatagctttggttgccaagttcagtgcactatgctgacaggaaaagatcttatctgttgcttgccttggataaagaagtattagtgcatattatgttagtgtttaagtcattgccaatgcacaagtaaattagggaacaagtaactagctagcactagcaggctgtacacgcaagcacaattcaggaaagctggaaagaaatggactactagtctgctacgtaacagttttttttttgaaagcacgtcggacgacgtgtgctacgtaacagtttcagaagaatttagttaacaagttttcagctaataggtgggcctgtatggatccaggcccattagcaagcccacgcaagcttgcaatttgttattaatcaaaaaaataaaaagagagagagagaacacgtcagcagagctgctgcttgagaattgagcttgactgactgactgactcctctccctgcaccagtgctgcggcaaagctaag

SEQ ID NO: 37785 - DNA, 289 bp, Sorghum bicolor
  Intron number 3 from transcript Sb09g025670.1 (locus Sb09g 025670) derived from phytozome v7.0 (chr-ID chromosome_9; pos 55102581 to 55102869 reverse strand)
attgtcagcaaggtgattttactactttagttttttaaaccagaaaacaaatctctcaaagtcgaatctaattgctgaaatatcataattattattccttgtcagttattctgtttacaaagtcggttgccttatactcctcagtgaacgagaacagtgtgtaattgcattcttctattccttgaagaggccaagttcttgttcagtttggacaaactgaacactaaatattcttttaccatggtgcttactaggacaacaacattttggagtctttccacgccttgaa

SEQ ID NO: 37786 - DNA, 721 bp, Sorghum bicolor
  Intron number 1 from transcript Sb09g024790.1 (locus Sb09g 024790) derived from phytozome v7.0 (chr-ID chromosome_9; pos 54296053 to 54296773 reverse strand)
tccggtgggttattgacgccatcgtctccctctgggtacgagaattcttgctgctaaaatgatttctttgcaatttgctttgcttgttctatgagaacatttgggattagtggcgctaggctgtttgatttgtttcttcgatgagaatattttggattggcactagcttgtttattttgcttctttcatgcctgacttgtaggaaatagatgttagctcagctgaaaaatgccatcccttgtgttggactagacagcttaggttgatacatagaactgctccaccaagaactcagtgctttttaacagtatgattttgctgtccatgttgtagtagcttctgagctgacctgagatttccagtcaatttacagtttcaccaagtaatgttgtttagtttggcgaagatgtcctactatagacttgctagtattcagttgtgcactgtgtcatagactcatggaaaacttgagtatttaggtaccatagaatcttgatactgaaattatgaaaccttgatgtagcttactctatggctcaaccgacatttacaagcttgtccatttgataattgggtctgtacataccacaaaatgtcatacaatcttcatgtttattcattcaatacatcattttagttgattaaattgtcattaatttggatttttacatctcttctgaaaacagctcctcacaatactgctgcctgttctggctctggg

SEQ ID NO: 37787 - DNA, 751 bp, Sorghum bicolor
  Intron number 1 from transcript Sb08g017700.1 (locus Sb08g 017700) derived from phytozome v7.0 (chr-ID chromosome_8; pos 47487757 to 47488507 reverse strand)
catcaagtccacctgcgaccgcatcgtcatcgccggtaccaacctgccgcctcccctctaaattggcaaaacctaattctagcccccaaggatctgaactgcgctgccgcgactcacacgtcgctgctggggcgcgatctgggtagcttggtccgcttgatctcgctgctgtgtgatccggaaggatctgaacgagcctagattcgtgcaggaatggtgttactgtgccttgcctttgtattgttgtgtagctgagcgtctgctggttgcatctaagtgcctatagtgatagtttcagacttgttaagcttttcttttcttttcttttctttgatttgatttgctttcactagtttcagattgcttaaggaatgaacagtgagagatctcgatttgccattttggtagctcagtcttcttcttgtatgacgagttacaatgttactactcagaaagtactcatgtaaattcgctagtaatatgctgttccatcacctcctttgcttcgggaacagaggctctgacagtagggaagagcatgcactcgccaaccttactgcgctgcaacctgtgtgcgtaggtagctagcatggatggactaataaccctctaggggtaaatttggatcgcaattgaagtagacttatgtactttttttatttctttgctgtcaatggaagtggtttcaagttttgtatatttgtacaaattccttctcacatgttgatttgcgtttttgtaacagtcgaag

SEQ ID NO: 37788 - DNA, 860 bp, Sorghum bicolor
  Intron number 1 from transcript Sb09g005650.1 (locus Sb09g 005650) derived from phytozome v7.0 (chr-ID chromosome_9; pos 7530059 to 7530918)
tcaacaatatctcactcggcggccgtggcggcggcgtgagtcgattctgttcattttctcccttaatattcagtaggttgaggttgagattgagatttaggaatcctttcattagggtttggcttggatataatggccatagtccctctgatccgcgggtcaggttcgaaaattttgttggtctctttttaattggaattttgttggttggtgtctcagcttgcagtgtttgatttgcttagagatcacaagttagggtttatttaagatcatcataagttagggtttattggatcggtatgtttggaaatttgagattataggggaacatggtttcttgagaaattttgtaagaacagaacttgtgggaacgaacagtctccttaaatggaacaattaataggcgttgttgcctaagcagtttagcattatatcttaactctgaaaattctagttttcttcggtctattcagaaatagtatagttattccgatatatataattgcattccttcagtccaatgttcaccaaaaggagcacaagatttatagttttcaaattttcacattccttttggtgtgaatgtgtgtgctttttaagggtcattattattatatattcctgtcatgctagctttttcagtagaaacttgtttttcaatcttttgctgttagaattgtgcatcttgcagtcagcttcattttttcaatgcaaaaggaaggaatgtagttcaaagtccaataaattcacgattcatgcattttatttatgattgttattgccattgttgaaattcttgtggtgatgggatggcttgtgttgtagaaccctgggcagttcaaactttactccggaggctt

SEQ ID NO: 37789 - DNA, 660 bp, Sorghum bicolor
  Intron number 4 from transcript Sb10g028430.1 (locus Sb10g 028430) derived from phytozome v7.0 (chr-ID chromosome_10; pos 58260460 to 58261119 reverse strand)
catttcagagttcaggtgatcttggaaccatccttgatttctcaaacatataaattgttgaatgatattgttttaggagcttgctagatcttgatttaacacttgctgatttataacatgatttatcataatgtatggactaatttgggatattcaaaatattttaaatgaatgtgtcccttgtgttacctctttcactgtggttgtcatgtttatgagaaatggagattggggcctgtaactgtccatatttactgattttcaggattctttagttctgttaatgtagttttcacattgaaattctgtgcattgtttgttttttttctgtttgcatgagctcctttctattttgatcactgtgaactgttctattgatgcattgtgtgtttgacctggtcctaacagcatgaaattgcatcctttgttgcattattgtctatgttacaaattgatatttcatataaataaatgcagaatgcatttacttttgggtgatctgcagaagatctctgcacgaatcaatcatttagcataagtcatatttctatcttcagctaggacatgtgttttcccccttctcttcataaatgtctcattccattctgatgtggtgttcattcaggaaaggggaagatctcagttctatatccaaacaag

SEQ ID NO: 37790 - DNA, 492 bp, Sorghum bicolor
  Intron number 1 from transcript Sb08g016955.1 (locus Sb08g 016955) derived from phytozome v7.0 (chr-ID chromosome_8; pos 45230894 to 45231385 reverse strand)
gagtatacaggaacgggttccattgtgcttaccaggtgttgatcttaatctttcattttgatgtttgtggtattaggaattactgctggtaaaacattgcgaaaagtactttctacaagtgcctgaaagcactgccaaattgttagggcttcctgggagcttttggacctttcaaaagccaaaaaaactcccggaagccaaaagccatgagcttctgggtttttggcttatgggagctgttttgcttttggaaagtccaaaagctagtagtctaaaaatgaccaattgttcgtttggctgataagtcatggcagaaagtactgttggctgatttgttatgagagaaaaatactgctgaatggatgttacaactgaggagattggaaatacaatacctttagcaccaacaacataaaagtattcttctgatgtttatttccattctcttggcttgcaggttgtggtgacagagggtgtgaaatcactttataa

SEQ ID NO: 37791 - DNA, 961 bp, Sorghum bicolor
  Intron number 1 from transcript Sb07g027795.1 (locus Sb07g 027795) derived from phytozome v7.0 (chr-ID chromosome_7; pos 62780570 to 62781530)
aggaagggatcgcgcggggccgagaccttgccgatgtgagtactcctatatcgtggcccgtcgctgtgctacgatctcgcatccgcttctgtcgattgcgttgtgcaaatgtagtgcttcgtacagtcatttcaggtttcaccaacggcgttattggtttggattgttctgtttctgtacgaagttgtttagtagtttcatcatgcagtatttctcatctcattttaagttagccgcttgaccagcatatatgagaagcacggagggtgactctatcacgcgtatctcaatgatgagcatcctccatcctagttggtttttatgtttgaagaggggagtacatcaggtccctaatgctgcgccatcataccttcctaggtccatactaactttgatcggtcttacaggtgcctcagttgaactaaacagactatttgtttcagaggtgcggaatattcgagttccagtaggaatgctggcttagtttcctgcatttggcggtcacttggtagagaaactttgacttctgatcaattcgagtttagttgttatttggaatctgaaattcaagtaggatgtactagattttttttcaggtttagttgttcacaatctgaaattcaagtagggtatactagattggggttcaaggtacaaaatggagcatcttctacagattatctgattttgtttaactactttagtgcctgattttgcatatttttggtgttccatcctaagttaccattactcaaagtcatggtttgccatgtgcgctgattcttttctaggaaaattattcactaaatttctcatttgcatgactaagtttaaccaaggtagtgacgtagtgtacaaaagttgaatttaatttgtcatatttgcactacattactaatttatcaattttccgcttttaatggtaggtactgaaacttctgccagtgaattccctatcttg

SEQ ID NO: 37792 - DNA, 705 bp, Sorghum bicolor
  Intron number 1 from transcript Sb08g009800.1 (locus Sb08g 009800) derived from phytozome v7.0 (chr-ID chromosome_8; pos 19256351 to 19257055 reverse strand)
tccgagctcgggtacgtacgtttgatccggcgcccggcgagatgcatccactgatctgatctattattatacatataatacgtactacattcctgttagaagtaactaattatgtactccttgattattgagggagactcgagataactagattatgaatcatttcgtctaacatttctagaatagtatcagatatttatatcgtttgagggtatttttagtttttagtaaaaacaaagctaaggaataaacaggatgataatatttttaattaggtcacattcattggacaggatattttctttaaaatggatgaagatggtgtaatcgaggcatatccatgctctataaaaagtttacgactaaaatagtcagacaacatatatgcctatattcaaactatttagtcatagtttctatcttaatatttgaatttaagacttattatattatttaatgccttcataccgaattcctatcaattttaaaatggtttatcgaattgacaaatggtttcatcaaactgtatactattttttttgttgggcacaccctttagtcaaatctaggtccctcactgcattcatctcccaagagaagacgagagatttaattattttgccttgcattgtgatgtgactgacaccgattaattcatggatctgaaattctgaatgcatatgcaggggccccggcgttgtggcc

SEQ ID NO: 37793 - DNA, 959 bp, Sorghum bicolor
  Intron number 1 from transcript Sb08g019180.1 (locus Sb08g 019180) derived from phytozome v7.0 (chr-ID chromosome_8; pos 49841242 to 49842200 reverse strand)
ccgctccctgatgtaagtatattttgaccagaaatgtgtctatgccgctttgcattcttgaatgacatggaatatgtcatagtttgaatggaaagcacattgattgtttgcaatttttgaagcatataaattacatgatatcagtgcagggccaattccatcaattgcatgagttccttgtaaatagtgttgaagcttcctgtgaacatttatcatggcaattatttctctttcatagaaatacatgaatcttgatactcatagaagatccaatgtagttatcattaaacagttttgttgaagtgaaagcattaataagttttttgggggaatttttgcttgtctcactaatttcttcattgataaattacaagtggggcaggtagaaaaaacaaaatgacagtatgtttagtggcaagaaagggagttcctacaatcctacctcacttttagaattgctgtgttggttagatgtggataaaataactgcatttttttctttttttttccatgatggcaaaaaccaaatttcattacttccacagcaataaaattgcaagcatggttagactaaataactgcattgtggctgcatttttttctcccagtcagtctgcatgtctgccttgaattgaagatgcattttgtatatggttgcaatatggttcgtcatcacacttactactttgaccagatcctacacagttataaacaatttaacaatctaacaaaattgttgtaaagtcatcagcttgtttaagtcagaatcacctgtttttcgtgagttttactcactcataattaaagctgcttcatttacgacagtcttctccctaattttttgtgggaaatttagacagaaattaaccccaaatttgtgactactagtcaagtaagttttgaagtacatgcttatatttactttctctacttataacagagtgctgctctagctttgg

SEQ ID NO: 37794 - DNA, 659 bp, Sorghum bicolor
  Intron number 1 from transcript Sb07g021570.1 (locus Sb07g 021570) derived from phytozome v7.0 (chr-ID chromosome_7; pos 55702995 to 55703653)
gcgccagtgcagcagtacatcggccgccaattcaggtgatactatatgatgtgaatcgtgaacatctctaaattttgacaaagttttggatgctatgttactcgcaattgctgcttaggttgttggtactcgccttgctagtgatcaaaatgtgtcacttgctctatttttagtgaactaatgatggtgtgggacgtgtggtcattcatgaaataggtcaagtacttcaggacgggaatggtcggaatctctttccattcccaattcatgttcaggaaatgttgaggaaaatgtcaaatgtgcttgccttttgtttgcataaggaaatggtatgaattctgtggaaaatacacaaatatgtgttttatttgaaaaatgactagtgttgacttgttggacacaacaaggagaaactatttgtcgcaggtcctgtcgttttatcacaagctgtgttcattacagcaattatctacaacaggctggctaaagtaaaaaatctgagcatgaaccaataggaccttgttcattgccattttgatttagttgctctttattcccgacaaatctgcttgtttcgtgccaatatgagagacttttccctcttcttttggaacatatactgataactaatttgtttgttctggtgagcagtgagttag

SEQ ID NO: 37795 - DNA, 753 bp, Sorghum bicolor
  Intron number 2 from transcript Sb08g000830.1 (locus Sb08g 000830) derived from phytozome v7.0 (chr-ID chromosome_8; pos 728973 to 729725)
ttgtttatcttcattttgccatttattcagttactgtaagtccaagacagtacttttttttgggtagaaagtccctgataaacatatataattgcaaaagaaaaattcacatatatattcattaaaagttcagtttgaagatccgaggttaattaactagtcatatccgtgagagtaagtatatagcaatgcaatgtctacccgcatgcacagcatggtcatcttctgacaagttgagcatgtgttatatattttgacaaataatggaatatatggagagctctgtactgtaagcaattaaataatcatgccttgatcaaatttgcttgtgctctataaagcctctcctgatcaagagttcactagttcaggatttattttcacttgcatgatctctgtattcagcttcatagcatgatgcgagttttttttggggggaaggaacaaattaattgctaatcaacatacctccaattttgttttaacttgacccatttgatttatgattctttgagcaattggatagttggatggacatgtacattagcaatgctgaactgcagcagtaaagcgacattgcaactactagcatattttatttaaacacttgcagaatttaattagattgtgatgatttattctcaatttcacagccttcttttcccaaaattccgcgacatgttttcaagtgatgagatacaataaataaattttatttgttacactttcaggtacctgaagcgctcagaaata

SEQ ID NO: 37796 - DNA, 811 bp, Sorghum bicolor
  Intron number 3 from transcript Sb09g030400.1 (locus Sb09g 030400) derived from phytozome v7.0 (chr-ID chromosome_9; pos 58928155 to 58928965)
aagaggaggaaaaggaacctgaggataaggtatatttctgatttgtactatgacgctcctgctaccacattctgtacagggtgatggtagcactctttaacatgcgtagcaccacctgtaattttgggtattatgacatttgcaatgctctgaacatttgtttatatatcttgaaaaatatggagtagattggtggaaatattttgtgattcatttagtttcattcatataaaacctgctcgatagcctactaccatttatttattttggaaattcttgcttgaaaatcagtgttgctgtgccaataagggaatgccattatgttcttcatgactgcattaattttggtttttaaggctcttctgcatttctatccattagttttgctcaatcctgccaaatgtaatggccctccattagaatgcattcattactattctttgtctgcctgtcagttttccagttatggaaaattcagtccggaacatgctatgtgcttgcaagttttggctccaagatttgatttgggatatttgtgtttcttgtaaaacaattgtgaacatttgattatggtagcagtatcgttactccctcgttctcctttttcccctttgggtggttttattgaatctttgtatttctgtaactcaacttctcttggccttttgggtgcttttgtatggatactcctatatgtttgccatgttcctgttactgatatggcatccctgcatacttactgggctttaattttttttatcaaaatagagtagcttgtgaattaatgtttgctccaaccatgatgcaggag

SEQ ID NO: 37797 - DNA, 990 bp, Sorghum bicolor
  Intron number 2 from transcript Sb09g030300.1 (locus Sb09g 030300) derived from phytozome v7.0 (chr-ID chromosome_9; pos 58884627 to 58885616)
catccccacatttctggaagagagtttcaaaagtacctaatctttacaccatttgctttagtgtctttttcatttcttataagttgcaagagctgatcaaagaaacattgttatacactagtttggcttgcttacatgaaaaaaggacaaggatgctttagtattgtggccaagaatgtttttcatttttcagaaacgaaaatcactgcacatggtctgttcacatgttattttgtatttttgtttcaccaatccgtttttattatcaaggttttagaaatatatctatgatgtgggtgtactatgaagattcatagctgaaagttaataaagtcattaattgttgactgcacttttttgttactagccttggggatttgagaagataatctatcccttagggatgattgcaatatatagaggcgtcctcttaggcttatggaccttgataaacttaacactgtcaatgttctatggaactaagttttgtgctgatcaatttggttccttttcttggtatatacaaagattctaacgcaccatttgagtagaaacaatatatcgtacatcattaagtttcaataagagttctttctttttttccccatagtgtacagatttgctaattctgttaacaaaaggatatgattagacagactcaaataatgaaacatcttaggaaaaagatgaatagctagtggtctcaatccatcaaatttaccattaactttttaaaaataattgcacaaatgtaaaaactaggggattaatgggcttgatcgcacaatcaaaatagcctgaggtttcacagtgccagtttgtttttctttttcatgcttcactggaatatttcagtggtaggtcctatttcttatcctgcatatttcttcttttatgtgtggattcttcctatgtcatttattatctcagtgatttttgacacaactcttttcaggtgccaggaagatctgctgaagactgcttcaaaag

SEQ ID NO: 37798 - DNA, 1060 bp, Sorghum bicolor
  Intron number 1 from transcript Sb09g003850.1 (locus Sb09g 003850) derived from phytozome v7.0 (chr-ID chromosome_9; pos 4340676 to 4341735 reverse strand)
actacgtccaggagctcatcgacaaggcgcctcaggttgggttgaattggtcacccggtttctcactccaacaaaatcttgcttttggtcccatgtcatgcaaactgataacctgatggatggaacattgaaattagagacagcatctcgttaatttaagcttctcgctgagtcctggctactgcgtgattagtatccggattcgtgtgatcaatatcttgagagtgatgagcttggaaatttttgttcctgggattaaaaggaagatctaaataccaatgtgtgccaaatattgatgcttttggcagccaaattcgattgactaaataattattttttttgcatgaaaattcaaagcactaaagagtgaatttaatcgagcatttcaagttgttctgcacagccgtaagtgacatggatgccagtgacttcccttacagacaattgcagattaagtggaacaactggtaagctggaaagggccacaaatttggttgttagaggttccacatcgggatacatttgaacttatgaaatggacatattatctatactattcaaattgctatgtttgatcctggaaagtgtatagtagccttgttcatattctaaatgtatcttcagtaattgataatgtggtggaaatgttaactgaatcatctttaacttttctctccatttaacatgaagtaggtccatgccagctgctagaaggtataaaatttctggtgtgggggtgctaataggacatctgttggtcaatcatcttcattttccaccttttaaattctaggagaatctaggaccggagattggaccatgattatccagtcacggatgaaagttgacaagttctccatttttgttacctttggggatactttctgaagttttaatgtatctaatgtctaagtttgcatggctcagtccttgcaccttgcagggcatgttttctagtccttgctgtcatttacctaatctttttcaatcatgtaactgtctaagcaagtgttttctcattgtagcttcctgaggatattgagtggcacttcattgggaa

SEQ ID NO: 37799 - DNA, 583 bp, Sorghum bicolor
  Intron number 2 from transcript Sb09g004310.1 (locus Sb09g 004310) derived from phytozome v7.0 (chr-ID chromosome_9; pos 5080816 to 5081398)
atcccctttggctaaggcgctgtttgctattggtatatttatgcctctgtgcatttgcttttgtacttctacaaactttatttatattcagttagttactctacatgttccagttcttgaaacattggtcgggttatattaatgagctgtttgaattttataacttggtgctaataacagtttccaatgctaaacaatagggttttctctctttttggtcagttcttaattttccttctcagtttatcttttatcattagctatgtagtttagctccaacaaaaaccatccagtcatagactcatagctgaagaagagattttaaagttaccatcctaagccttactcagattccatagagaaatttagtgaagtggacaaaagaccactattgatagcagtattgagcattgggatggtgaagtataaagtagtgtcgagcctgatacaagaaagagttcaatttcggaatttcttgcattaagtgtcatagtcttttactgttaactcttttgagacaacattcaaacattggaatctctatgcaggagtaaccaggatcttctttggatctgattttgtt

SEQ ID NO: 37800 - DNA, 821 bp, Sorghum bicolor
  Intron number 2 from transcript Sb09g029140.1 (locus Sb09g 029140) derived from phytozome v7.0 (chr-ID chromosome_9; pos 57919232 to 57920052)
agcccctcaagatctacctcaagaattaccgggaggtatcattcaattcaaacctccccctttcctccagctcctgttactgggtattcatcattattgtgttcaaacgcgaaggcactatatgtggtgtttaggatgcctgacattgaactagaggctctatatgttcatttggattttggagtcatcggagcattgtgcatatctaattgtagttccttgagcctctgataggcgagcaaggatcgagtgactatactgatgtaggttggaaattgaggcctcttggaaattactgatactgatgtggtctagagcatgttctttttataatccaatagtctacaccctgtattaactttgtggtgaaaaatgtgagcacactcaactacaagtgtgcctgttttccaacacaaagcatctggatgcgtgttggttgagaagttgtggggttagcaattagattgttggataaatgaattctcaactttgccagggctaagctaaataactcttcttactgtcaatgtcacctgtacttgtgtgatcattttgtttgcctatagtcttgcattgtgctccagacttattccgtacagaatcatttctcctatgctgatgggttgttttctattttcaccatggacaacgaacattgaatgtttattattcttgatggcattgaagatagaggtaatcttttgcatatctttgtgagtgtaggtaattcatttcctttttcgatgatgattgactgaattatgtactttttccaacatcttgtagggtgatacaaaaggttcgaaatcttctgatcagaa

SEQ ID NO: 37801 - DNA, 979 bp, Sorghum bicolor
  Intron number 1 from transcript Sb09g021970.1 (locus Sb09g 021970) derived from phytozome v7.0 (chr-ID chromosome_9; pos 51607999 to 51608977)
ctaccgcgttcaggacttcaccaacgaggaacagggttagtgcagcgcatgccgaccgacggctccctgaatttgttgccttcacgtttcctttgatccggcaatgctcagttcctttcagcaaaggagtagaaatatttgtgcaaacactatcgcaacttgttgaatttcctcggtacatgctctggggcattgtgttcagatgagatgtatgtcttctcggcaagccagaagcgtgtctcggttgaatttgttggcacagacaaagttcaggagaagctcaataacttcaatgagttaccagtgcatctgtttcgtacatgggagttagctcaaccggagcaccagatgaactaaagagtttggttccaagtaaatagtgtcttaccgaaatagctccatgtgcatctgtgtgcatccgatgataatagagaccacatctagatattttttggattacaattatgatattttgtacatctaactgtatctcgcttcttatctagaccctagatggaaaatttgtacaaggtttcaatacactgcggctcctaaatttagaagatatcacattgattcatgggatgaatttgtgaaactttcttacttaagaaggtaaaaatggaaacagtaatgttgccacccttaatttgattgatacttctgcatttgatttgggtactgcgaatatttatcatctctctcccttgtttctccagtttggaacaactccatttgaacaacaacaggttaaagcatgtgaagtatccatctaatctttcaccagatggacctcttgagatgcagctgctgtgccgtttgaaaatttgcaagttcttttagattttgttgtatttgccatataaagaacccaagattaactttagtgctgcactagtgcttcctgcttttcaaatgggattgaaaactgaagacactgtgctaatattgattttttttttaacttcaccaggatcta

SEQ ID NO: 37802 - DNA, 867 bp, Sorghum bicolor
  Intron number 2 from transcript Sb10g000460.1 (locus Sb10g 000460) derived from phytozome v7.0 (chr-ID chromosome_10; pos 264447 to 265313 reverse strand)
gccctccccaggcaagcaaagctctaatttatttacttcattgtattatataattactctctagcttaagtttatttattacactgcctaccaaatatattatcatacaattaagttttgatcattatattcagtatatatagtacgatatacaagcaaggagttttacactatatatcatacataagttcagatcatggcaatccaaaaatataatgcatgtcatatatatacacattggtcgttgtgatgtgtatggatatttatcgcatcccctcagtagccagctgattaccctgcatgtgtagattgtcgttgttactctcagcagccagctttttatcctgcagatcagaattatcatgaagaaaatatagatgcgttaatttataccatcgtcatccatgctatatatctttttcatacatatatcaacaacaactgtataatgataaagtgtatttgttatgaacttaattataatgttatctagaaggatatatattctctactcatgcacattgtctaaagtttatcctatataaaagtagaacttatctgaatcaaactgacactcgatcctttgttactttgtgttctgcttttgtgatgtgatgtactgtgccttccatgcattttggaacatgcatgtgtgcaacatatggaattgctcatctatagatcataccattaaggcactggacttgatattaagttggtggcatgatgtgttccaatgatctattaagaactctgctgtttagtgttgttctacattttaagatgatcgtcgttttctgaataatcacatacttcacgtcagctacttttttcaacatatatatcatctatatttcaggaggaagg

SEQ ID NO: 37803 - DNA, 612 bp, Sorghum bicolor
  Intron number 2 from transcript Sb07g027360.1 (locus Sb07g 027360) derived from phytozome v7.0 (chr-ID chromosome_7; pos 62426357 to 62426968 reverse strand)
tcatcatcctatctgcaacaccgacactcaagaaggttagcatgaagcactccttcaagcagcgtcagcatatattctgttttccccccctcctcttagtaaaagtgatcatatattccttctacaaaatgcagttctagtgctttccattaaccttttttcacccccttggtgttacggttttatccttatttgattcgaacaaaactgagcagcatgaggttttttatttccactctaaaaataaacgtttttttttgggacccagttcaagtgtttccttgtgttactgtgctctgtcattttcttcagcaggtcacttcacttcaggtgatatgtactgcgagtaatgttcaaagtttctgttctaggctatgctcttcccttttctgtcagtgaataagaatacaaaatagcaatatagacggtagttgtacttccaaaaatcattttcttgactcttttgactgaaaaagaaaggatccatctttgactgcagaattgttcagtttcagtagagggtagagcctggttgcccaagctttcaattacactgcaattctctgattcagtatctttctaacctctgtcaatcgttgtattttcagtgct

SEQ ID NO: 37804 - DNA, 832 bp, Sorghum bicolor
  Intron number 1 from transcript Sb08g019940.1 (locus Sb08g 019940) derived from phytozome v7.0 (chr-ID chromosome_8; pos 50932327 to 50933158)
cgtgcacgccgtcgagctccttggcggccacgagagtatgttaaattcagagcaccgattaattagcgccacggcgccaccatgaattctttcatgggattgtcgttgttgatcttgcctttgctgttaattctcttggagttcttctcttatcgatcggttgtgctttcctccaagttttcctgataaaaaaaaggtttatatactttcctttttgcgaggaagaaggttaattatatttttattgtaactatattttactattgggaatatatatagggtgacgattgaactgggaaatgagtctcttcttttttttttacggttctttgtcctctttttttttaactaagtgccaaaatctaagttacatactgttttggtacggtactcctcttggcaccttgcgaaggacgactatagttaaataaagtatgaatgaaaacattaaagataatttcagcatcatgccttttattttattttttcctagctacctacatctatacatacatatatatatatgtttaaggatttcaagagaaattttatatagcacataacgcaaatcttctaaaaggttttcttctttcccttgtctcaactctcaacaaggtttcatccttaattattctttgttatcatccactcaatccaaataaaatataatactatgcaattaatctcatggttttgtgcaagctgagtttattctcggcttgtttttcccctccatgcatgcatgtgcatcttcttggttctgaaacttcctttgatttgtgtttttttgctgcatcttctaggagcaacaccaaagtcagtattggaactg

SEQ ID NO: 37805 - DNA, 1022 bp, Sorghum bicolor
  Intron number 1 from transcript Sb08g008400.1 (locus Sb08g 008400) derived from phytozome v7.0 (chr-ID chromosome_8; pos 16231730 to 16232751)
cagctccaagcccgacaagcgcctcatcctcatcggtacgggagaccctccccctttccccttcttcctcctcgtcaacggcgttcgctggatccctgacacggttcctggtgccgtggggacggaaaaatcgcgcttgacgccgttggtgctccggatccgctgaaagttctcgcctttccagtgaaatcttggttatcccctatttctcaccctgcatttgtggcgaagaaatatggctttgtttgcagtgagtggatttttctacagctttctaacagatggaaggattcactagttgaatagcaagagaaattaatcatgcgctagtcgattagttctgtgctgttggatgttggtgtttttgtcataaattttataattcttcaaggattatcaaaaatagaagtcagataatcttagtcagcttgacctggtgtggaagccttttcttatgacaatataagatgagatgccccaatcgcaagtaaagatgatattctgctatgtcaccttattttgtttctttgacttttcattggttccattgagtgtgtattgtcgtccatatttttgtaacactgaggtgaactcccttgtgcaatttgtttttagtttttgttgctaatgagtgccacatttacatcgcaaaaactgatccgcattaactgaatggtattaaacagtggcattcaagacaagtaaattgaaacaaatgttgtcttctatatcgtttctttcttttcattatggccttgtttgttgtcatgctatttggtttgatatattttctggtactggtagtcaggatgaaagagggcagtattgtgtagggagatataaggtcaaagtgctttttgtggagagcaataaacacaacatttttataatattttgtttccttgttcacaacaattttactttttaattctattatgtagtgctcctgatttggagaatttgactccttttctggaaatcctgtaggcccacctggctctggaaagggaactcagtctccc

SEQ ID NO: 37806 - DNA, 981 bp, Sorghum bicolor
  Intron number 1 from transcript Sb09g018320.1 (locus Sb09g 018320) derived from phytozome v7.0 (chr-ID chromosome_9; pos 45858224 to 45859204)
tgcccgcgaaggagccgtaggcaccgagcaaggtaagattgcggaagcctttgcgttctacactattgttatgtacttgtttccatcggttttttgttctctgattttttttcggggtagttgttttccccttcggttcaccgtttactatatgatcggttcttgattcgattcagcgagtcgccgggtaaccttaggaatgtgtgcattgtattgtccgttgcctgttatgattacctgttccgagttcttgattcatcgtttgtgtagtgttcgttaggtcacgcgtttggcttatatttgctctgtggacagagtccattcagattggatctatatatgtttgatgtatcatggctagttagatatgtagatgagattgcttcctgtgatgtttgatgtatcatggctagttagatatgtagatgagattgcttcctttgttttagtgcttctccatagatcttatgatgcgatggcaataattttctcttttaatgtagttattttttctaattttagttgaattatactatgggttgagcagtgattagtctaggtgtgatcggattctgttaccggcatcatgatggagctgtagagaaacagaatggtagggcaagcttttgttttacaaaatataatttgattgtcaatttcagccaattctgtttggttagtccactagtatcagccaattctgttgtggagtattaggaattgtttttcttgtcctgtcgaaaccaattctcatttagtgctgtggttatgctatttgctttttcttcggccattatgtcccaagatgttcaaggagtttaaaacaatttgtctttgttcataatttgctatttttgtttctgcatataatcagtgttagctttattcaacatcatcttatggcttgtagagttttgttaatttccctgttgttaacacttaacaggcgaggggtttgaagaaacatctgaagaggctcaa

SEQ ID NO: 37807 - DNA, 810 bp, Sorghum bicolor
  Intron number 1 from transcript Sb10g028780.1 (locus Sb10g 028780) derived from phytozome v7.0 (chr-ID chromosome_10; pos 58634721 to 58635530)
gacgaacgcgcgcgccccctggccccccctccgaggtacctcccacctgcgccggtgttcctctgcgttgcgtgcgttcggttctcggccgatccgctcctgctctcgactctgcatgctgccaagagcacgcgacgagcggtggcggacgggtggggatcggagcttccactctcctccatttttttttctctttctttctttctgtcgttcttcctgctccgcctccgccctcatcggacgatctttagctcggggagtcgcgtccggttgtgctggagtccaatcgaggctgccatgggaattggcgctccagcgacgttgggaatggatcaggggcgcgtctgctgtggtcaaatgcatgctccctcccacatgcacgatgcaccctcgccaaacaaaaaccgatttagacataagacagattgttgcctctgtttcctctagtcttctagagaaattggggggttaaaaatatgttatcaaaatgagaccttgtcttggcctaggaagtatgattttcaaaaagtccaacgagtcaactaaaaaaaaacacagcaataatttttcgtccaaaattattcgttgcatcaattgcaaagatcatagttcttttttcttttgcgatgagcagaggtcacaccaacaaaaataagaaatttgcactacttcactcggttaatcggtttgtaggacctgactgggtgtgcactgtgtatagtattaggaaagttactggaactcgtcttttggtttcttatcattttattatctcccactaagtcactggcctgtgctcctttgcagaaa

SEQ ID NO: 37808 - DNA, 793 bp, Sorghum bicolor
  Intron number 1 from transcript Sb07g026930.1 (locus Sb07g 026930) derived from phytozome v7.0 (chr-ID chromosome_7; pos 62095109 to 62095901)
aaggatccaggtaaaaagatgtagctaattgtggatgttcggctttagcttcttacatgcagttggttgtaatgtggtgcgtgtacctagtcttttgtgtgtgcctgtgattatgcatgtatctagtctgatgctataaaattagccatgtttgtcttggatgtttcttagttatcaaggtccaattgttgctattctagtgttttagattatcgtcaacatggcgcgttgttagcattttaaactatgggccctactcctgtaaagaggcttaatgagcaagtgttctgtggcagttgcatgcctcatttggtatgcccacaattatcggcttatcgctagtattctttttgaaacagttttctttcttttaaaatgaaaccgtagcatgagacacatcactcaaaagggcaagaaaaacacaatcaaccactgttgtcatcttctgcctagcgtttcccagataccggaatactaacatttttgctgtctccggtgcccatgtaccagtgcagaagtggtatttgtatctcattgaatcagccagttttttttttttctgtttaatgtttctcttcactcttcagcacatgtcattgactactttcaggattcagtctcccctctagcagtataatttatctgctgtgtttactattgcttaatggatttgacattgtcattttgccgctgtttgctagagtgccaatgatttctgaaatatttaaataataccttctgcatactttagcaagtctgatggtttggaaaaacctttgtagagtcactgaac

SEQ ID NO: 37809 - DNA, 736 bp, Sorghum bicolor
  Intron number 1 from transcript Sb09g001310.1 (locus Sb09g 001310) derived from phytozome v7.0 (chr-ID chromosome_9; pos 1179532 to 1180267)
ggccgccgaggagaccttcgattgcctccacaggggtgagtgcgttcgccgcctctctgcctctgctgccattcttccccttcctcttcttctttatttgtattcagtatttcagtcatgctgcattccacagcccaggaacccttgtcagatgggaaaagtttcgattttgccacacgcatttcaaagattgatactatgttgcgcccaaaatgtttggtcgtccgtcatcgtgctcattctacgcatattaatatattattaatcatgatgtaatatgggattatggacaatggactgcagtctctctgcctctgcaagtgaatccagagagcgaaacaaatttgtagtgcagcctgcatatctcacattcagtctctattgagtttttctgcacatttctgtagcctgcttttttcattcagtcacgattgaatgactgaaatgacgaggaaaatctgattttgttactgaagatagattcacttcatatatacacgctagtatgagttcccaaccttgggcccgagacggttcaaatggtcgttaattagctcaggggatcttattactgaagactcgcctcaactttgagtttaatcaatgctatttcagaataatagcagtattgtattcctgttgtttactgccaaggaaatcatacactttttgctacattttagtggcaatcaggagaagttattatgacaaaacttcttttgtttcattgcagggg

SEQ ID NO: 37810 - DNA, 482 bp, Sorghum bicolor
  Intron number 2 from transcript Sb09g001310.1 (locus Sb09g 001310) derived from phytozome v7.0 (chr-ID chromosome_9; pos 1180295 to 1180776)
ccgtaagtcatacctccacaacctttatatctctgttttttcaacacttcttccttcaggcccttttttgacttggatatatcttaaatatcgttgtccaatcacctaggcattgccagttaggtgattctacgcttgtccagttcctaaatttggaccgtgatttacatcattacttacgaatactgcggatctgtagttgtagtcccaatccagtgtacagtcatctcaggaattctaatgtgttactggaaatgatgaactaaaaccatgcacctcttttgcatcttgcatcactggaaaaatcagtgagcaacttctggtttacacatcttttttcttttttgagagcacgtcaacagacgtgtgtttcattaagcagaaagagtttaaacatcacccgacaagatggtaacaccatggttattctggtttacacatcaaactgatacactttctcaatatgtatgcagctgaagaag

SEQ ID NO: 37811 - DNA, 695 bp, Sorghum bicolor
  Intron number 3 from transcript Sb10g030020.1 (locus Sb10g 030020) derived from phytozome v7.0 (chr-ID chromosome_10; pos 59750029 to 59750723 reverse strand)
gatttcacctacgctttgatccttggtcgcaggtatgctcgggctagtttgttactccctccattccaaattatgtcattccaagaatcttggagagtcaaagtctctcaagtttaaccaaaattatagaaaaaattacaaaaaatatgacatcaaatagatatactatgaaaatataattaatgaagaacctaataatacttaattggtatcataaatgttgttatcttatcctataaaatttggtcaaacttgagatgctttgactttccaagattcttggaatgacttataatttgggatggagggagtacattataggcattttttgttttgaaacagccagcgttgaatgcatgagaaatcagttgctcatggcgattaattaagactatagtggaccacttttgcaaactcaaattggggtgtgttatgcattagcctaccccaactcttgtggctaaaagggtttgctgctgttatttttgagtatgttatgcttgaaatataggaaatataatgagggtaattgagaaaaggaactcatcatggttaataattctaatttatgtatggggaaaagaatatttgagaatgtgtgctgtgtggaaatgacacttgttttcaggcttcagaaattactaaacttatatggtttgtattatccttgcagagactccgtcttgtagaaattt

SEQ ID NO: 37812 - DNA, 864 bp, Sorghum bicolor
  Intron number 1 from transcript Sb0816s002010.1 (locus Sb0 816s002010) derived from phytozome v7.0 (chr-ID super_816; pos 6023 to 6886 reverse strand)
ccggcggcaggcgcgacgccaagcttgagcacagggtaacacgcctttgagaattcctgctgattgcatgcttatcgatcacatccgtgtatgtacacatatatactttgttatttaatttaattttctgcttcccagtaaagcgatttattgctaaccaacgttgattatacaactcaaaactgtattgatgcttgttagggatagatatgtattcacatcgtttcatctgttcttgctttatgaatagatttgtccgtttctgttcttgcttccgtttatatatagtgcatgatcttttgacgccggtgtctgtgtcattgcattggagcagttctattcctgcaattacatatgaggagattttccggtgcaattattacctttttttcagcacaggacgtatatatatacctcatggttgctttggctttatagaactagcaacctgaatattttactgacaattaacagatggtaaagtccatatttatttttaatacttttgtcgctgtgaaaaaacataaatgttttatcatatactacatatacttataaaaatatgaaatgacttatacatcaagtagcatataacttcatgtatggagatcgaataaccaaattatctatgctttatgcaagatatttgtcgtaatgcatcttctgaaattgcttgaggatgattgtacatagggggttcaacctcacatttaagcgcaactaataggaactctaattttgcttttggtttgtctcttgttagtttaaataagcagaaatagaagttttaaaataaaaaaatgacctttagtttgattctcaaattgttgaagtagcaatgaaatcaacatgattggcttgcag

SEQ ID NO: 37813 - DNA, 435 bp, Sorghum bicolor
  Intron number 2 from transcript Sb10g022620.1 (locus Sb10g 022620) derived from phytozome v7.0 (chr-ID chromosome_10; pos 50658985 to 50659419)
tgcaagcaggacgacgcaccggaccccgtggtaagttcttcttcttaaaaaaaaaacactttgctactcccgcagtggttaattcggttgatatgtcggccaattaatccgtcgcgttcgtggttattaagacgcgctaatcagccacctcgatcgttttctctctcactctcgtcgttagtcgttaggacatcaatcgctgccgcgcgcggtccctcctttttttttccagctggcacctttgcttggctttgcttgctgcggacaaacaattatgcttatgcctgtcccatttcatactgctgctacttcagttatctttgagttttactatttggtagattctttagttaccttactattatctttggattaccctacgttaatcctcttcttgcgaaatgctgaaatcatggcttcagatcaacacctgca

SEQ ID NO: 37814 - DNA, 785 bp, Sorghum bicolor
  Intron number 1 from transcript Sb10g004600.1 (locus Sb10g 004600) derived from phytozome v7.0 (chr-ID chromosome_10; pos 4087101 to 4087885)
ctctgctgccgcgggaccgcctcctctgaggacctgtaagtcgcctcgcctgctccccggctgcgttgctatcccttttgcgtttctgggcttgtctgggttccgctgaaatcagccgcggtgtgtgagcgcggcgattggtgttggtgtagatagatgtttggggggttcgtcggggactccagggaattccccgcgcttggctgctcggttcgcggcgttttcttcttcttctttttttttgaccatgtcggatgccaccgggaaggttgcgaagttcctgttgatactagctcgtttcttgtttgggttcatgtgaatttgccgaatactaaagggcagtgcaaaatttaactgatccgggctccaatttggtggaacgtagacatcttgtttgatttcatagctacttgtttgtacaagcgatggcggtgaggtgaaattagtagggatttgggtgctccgatttttgttgtttgtttagtgacagaccaagggaaagtttaaactttggtggcatacgatgtcagctttattctgttcctcagcttcagaaataactgtggaatggcgtggaaatttggcatgttggtcttgtttgatttgatgaaccatcctaaaaattcatggtcaattttctatgctcgtattaggcaaatttgttctaggggcacaagggggtttgtatcagtggaactggatatgagttgaacacctattctatgcttggaagagtatatatagtagctcatcatgtatttaatcgctttgctttgtcaggtctg

SEQ ID NO: 37815 - DNA, 696 bp, Sorghum bicolor
  Intron number 3 from transcript Sb07g026480.1 (locus Sb07g 026480) derived from phytozome v7.0 (chr-ID chromosome_7; pos 61632861 to 61633556 reverse strand)
acgttcaagaaacgaggtttgtttctgttccttaatgatttcatagatgatttgctatggaaatgtcatattgccatttcagtggaaaaactatcaaatccaaagtaacaatgttaaatatctacctcaattgaggaatcagcaatctacaggatattttgtatgaatgacagtgtcagtgtgtgatgtcatataatagcacttgaagtctttgccacctcaaaatcaaaacgtcattctttttcttcttcggaatttcagatgaccttctatcaagtgtcattctctttttcttttctctttcttttttggtgtgtgtgtgtgtttggggggggggggggggtccttcagcctgcccactttgtaagactataagactacacttctgtgtcattcactaggaaatggaattatcaaatgattagtgatcatgttatagttcttgtaaatatgcttgtatcagtatgatatactttctatgcgtaatgtaagttcaataggaacaggtcattcagttaaatgcttgggtgactcggttaaatgtaactacctcagtagtcagatatacttgggtgactcgatgcatgtattgatccacatttctttttcttgctatggtatgctgttgcagtgtaaaatgtatggcatacttgtcttgcagggatactgtgctggagcagaaacctgaagaacaga

SEQ ID NO: 37816 - DNA, 922 bp, Sorghum bicolor
  Intron number 2 from transcript Sb07g022950.1 (locus Sb07g 022950) derived from phytozome v7.0 (chr-ID chromosome_7; pos 57755877 to 57756798 reverse strand)
atctaatcgtgcttcctgtaagttctcttgcagttcatcttttttatttggatgatcataaatggcgacacacatctcagtaatatatctgccatttaattgattcatagacgtgggacaaaattgtccccatcgacccatattattccattcctttgatgatgtcatgtttattgataaaacaaaaagcaaggccattctgaagtgcatgccatattgtacaggagttcatatggggtctgattggttgcctgtattaggtttagcctgcagcacaacctaagggagtgcatatagtcaccttatatgttctatttgaggtcttatgtttctagtgaaggtagagaatgtgaaaatatgctatttttgtgtgctcatcggtttatacaaatatgcattgtttaataggagagatttggcatactaggtgcaaattgcactgcataagcctggataactagtttactatgaaaggatccaattgaagaaagctgaaaacaagagaatcttcattcttacattcttacatagcgcctggtttttagatgtcatttatagttcttaatggtatcacaatcagttgtactggctactagcacattgatctttgagatttcagtcccgtttagacggtttagtttctagtgttgttttatctcagcatattggttgtccatagcaatgtctgtatatttatcagataaatcatgtgtatacttcaattatgaatctctatcttgctctgaaactatttttctgtacttagtatttgggctttataaatgcaaaaccgactaaatttatgctgttcaattgtgtgcagctacttgttgtattgttcttttattcttgtttcatttttatatgcttcatctttcataatccagggaggacctgctggagctgagcggctgcacaggtc

SEQ ID NO: 37817 - DNA, 839 bp, Sorghum bicolor
  Intron number 3 from transcript Sb10g003750.1 (locus Sb10g 003750) derived from phytozome v7.0 (chr-ID chromosome_10; pos 3255073 to 3255911)
ccgatattcctgttgctctttgcgtttgcatttaggtgagtgctggccttcatcccccaggttatcatttttcctacttgtaaattagttgtaaattgcactatatacatattagcacagcaggaacatttatattgtccaacaattgttataaacttggtacataattggttgatacagttctatgtttatcctgcatttgtagacaattaattcaagcagccaatgtcatgcactaatgaattatggtaatcacatttgaagacaattagttgaagcagccaatgccatgcactaatgaagcatggtagtcttaagctagaaagaagtgttgctaacattttacatgaaagcaaaaaattgtgattcaaatgtacagaagtgataaacccacacttccctttacccacatgaggatctggtgtgaactttaaatggacacagccacactaattgcctagtatctggacatgcctagcagtacaatgttactttttctaagaagagaagttgtaactaagctaattccgaataagcatgcttcttttatcctaacttgtcataagaaatattttctcaactcattggatcacataaaacctgctcattcactaacttatttgattacataccatttagtattttcttgtgataagtttattacagtgtcataatattcattggttttcttaagaaaggggtgaccatcgctccctacctaacatgcatgtctaagtgtctttcttttttttccccattgttttcgatgatatgcgcctctaaaagtttcttcctatttttaaggttggagaatcctagcatcaagcttctaggaatta

SEQ ID NO: 37818 - DNA, 825 bp, Sorghum bicolor
  Intron number 1 from transcript Sb10g030310.1 (locus Sb10g 030310) derived from phytozome v7.0 (chr-ID chromosome_10; pos 60006000 to 60006824)
ctgccgcggcgtcatcaccttcatcttcgccatcggtacggactagactacggacggagcccctccctgcacgcgctttcgcctttcctgctcctccttcaactcttgtccttccttgcttctcctcctctgatccgtaactccccgctcgtaaattttgcatttgcggtggtgtagccgatttgggcgcgtgcgaattccatcttttttacgtttctgcaggaggtttcccttttctttcttattttcgtttctgtccgagactccgatccccatctgccagcctgattcagtgcacacaaattggggcttttgagttagtccggccgtgattacgggcctctgaagtttcacttcattctgcctgttgttctttctcgccccaataatttcattcatggtttaactctgtttcagctttcaagtgtttgtaaatcactggattaattggtctgcgattgctcagacaacctcatctatctatgcaattgctcaaacaacacactcatctatgcaactattgctcaaacaagaaatacagaatcagccttgtctgactgaaaacatatttcttcagctatctatgttcttcagctactaccacatttttggtctagctgcaccataagttttgatggcttcgattttagtgcaatttggcaaacgatttccccctctctctctctcgtatcacaacttcacttttgcttaatttgttctgaagcaaatcttactatctctgcatgtttgatgctgcaaactgataatctgaaaaacgcactgcatgcagctgggctgttcctgggagcggtgaccggcggtctg

SEQ ID NO: 37819 - DNA, 1044 bp, Sorghum bicolor
  Intron number 1 from transcript Sb09g024150.1 (locus Sb09g 024150) derived from phytozome v7.0 (chr-ID chromosome_9; pos 53713873 to 53714916 reverse strand)
caacggcagcaaccactccgtgcccggaaacaccggtgagtcaacggccaacgtcttcggtctcttgtcctgtcatgtgtgccgtagtccataagattaaaatatttactatcagataaaattggaacactgtgagaccagtccatagaggagtccatagcaaaagatacccataagcttatggactacccatggaataaaaaaaaattactttttctcactccagagcatctccaagagattagccaaattattttctaaagctacattttgctattgttgaagaaaaaacatctccaacagactctgtaaatgactcttcaaatttagaaactctccatcccaccttattcgctctctacttttggatagcctacctcactagtcatcttttatagagtctgttggagtactctaatatctttttgtcaaatctagtttagagagtagctaaatcagtaaatttgactagtctttttggctaatctcttggagatgctcttactctctttcttagctttgcacaggattgtaaagagaaataattttttatcttatatgagacccactttatggactagttgttgactgaaacattgtggagacagtaatagctattgtccactgacacaaaagctgctcataagtagtccatatgctactattgccgcgttaacgtgtccactatccgtagcacacactccactagtgtcgagggaccaccggaccacttactagtttattgtttttggacattttttacttttcgtttcaatctttgcgtcttgactggacagaaatggcaacctagttgaaagttgactccaccggccacttcttttccaaaacatgggatctgtttctcattacgctgtatagaaaaacaaaaaatgtatgtctcctatggtgcacttaaatttgagtagtgtgggaatttctagaaacgtagccttatgtcctgtttgattctcataaattaataagattgaaaagtgctctaatactaaaataaaaaaaatatattgtagatatcagttttgattt

SEQ ID NO: 37820 - DNA, 557 bp, Sorghum bicolor
  Intron number 3 from transcript Sb09g029610.1 (locus Sb09g 029610) derived from phytozome v7.0 (chr-ID chromosome_9; pos 58247523 to 58248079)
ttttccctctcacaagcacaagggccactcctgctgtaagatgacacactctattggcttcaagttgcaagaagcaccaatttaataaacatcttcaggcttattgagtagacaggatctagagatctctatcagtctccagctttatttttattttaagctgatacacctctactgcagaaggcaccaaaagtctgtcgcatgtctagaaatgtccagtttgatttgccagctcttaagttttgtaagcagacatgagttccctctcttcttttttcaactgtcctatgcacatggtaattgatttggataaaggtagttaaactataattccttagcaaggtttctgtatcgtgtttaaattattaattagtgtcaggggcccaatcccccgatcccccatgatgccctccactactttaaccgacatgatgtcaaactcaaggctatccatgattatccatctccatccatatagtcatttcagacatctttaaatcagtggtctgaatcttgtttctttccttttgttgcattacttaggttcctattggagg

SEQ ID NO: 37821 - DNA, 1011 bp, Sorghum bicolor
  Intron number 1 from transcript Sb07g020860.1 (locus Sb07g 020860) derived from phytozome v7.0 (chr-ID chromosome_7; pos 53974650 to 53975660 reverse strand)
caccccaatcgccgacacccctgcgcgccgcgagagtaagttgcctcccccgccccgtgcgctcttcgtgatgatatgtttcccgatccgatttgttcgacggcagatggtagggctggcgagggagccgatgcgggattgagggggatttagggttgtagagtacacagtacagatcggtacttgttgtggaattcttcggtgcctttgccgttagcccttattgcgctctcgccgttgcgggtttccctttgtatagacgcagaaatttccgatgttcgaaaataatatggggtctggattcgagaataggagctgtttggtttgttggcgattgacatttgtttgatgtgtccactgtcattactgtaggaacttcgagtgctttacaactcctagcaacatttgtttaatgtgtccagtgtcatttctcctaagctcgctaagtaggaactcgatattattttttattaatggtgaattggagcaagctgcatggcaaccgaattgttttgccatgatgaactgatgatgtatggtaactgtattaagtttagatgggcttgtaccctgatgtttcatatatgagcactgagcagtttgatcttaagtatagttcattgttgttctcagtttgtgaaatcttctgtagaattcgtgtaagttgtacattagttactgtgaatctatgtcagactgtcagtaaacctttttgcccccgtttaccttttattttgtctatccagtttcctcattgctgattcaatagtttttctttctattattaacatcaatgtgcggtaaacaggtttgtgttagtaaattagtttctttagattagacttaagtgtttttaaagatacttgccatatccaacttgtgttacatgtttgtgtgatttttcttgcaagtgcacggttcatagctatgtctatcttcccctctgcatatctaaacattgccatctttactgcaggttgccattgtactgttgtagcttgccagttggtt

SEQ ID NO: 37822 - DNA, 959 bp, Sorghum bicolor
  Intron number 2 from transcript Sb02g038590.1 (locus Sb02g 038590) derived from phytozome v7.0 (chr-ID chromosome_2; pos 72788488 to 72789446 reverse strand)
gcaaggtacgacattcatgtctattgttttattctatatcatctttgaattgtctcacttccaacggtaactgaccgtctcaataccagttttcacaccccttgttacatagggacaattcccaagtccaaactctctgttcaattcatctccacttcatgcaaattagaactctgagaaatattgtaggctaacactcaaaataagcaagcattaaccattatttttcggccaggaaaaatgttggtctaattatttttccttggttgaaagcactggttgatatggacatatggtggcatatatacaaataatggtctcgaccaaaatattcttaggaaagtcacagacccttttttctggcatttgagtatggattgaaatatattattgcaatgaatgttagtttttttgtccttagtgtctgatgcaacaatccagttggttgactgaagcactacaagagttgcagactagggcagcgaattagataaatcattttttttcaaatacttgaatttcttctacagagttaattcatgcctatgatttttagtttggcttaaaatgattggtcctgtttgggagagcagctgctttccaagaattcttggagctggagttggaggtagattaggggtttctcggtgagctgtgttgtttccaatttagactaaaaaaaaggcttataccaatttgttttagcttacaagttcaagatcctgcaagaatacatgagtttgaactctcccgaatcagaccctctccctggaatttgcaaaagaaaatgctatttctcattttcataccacgagtgatttggaaagttatttttacttcgaagttgtaggtactttgtctctaataatcctgaaacataaacaatctgcctgtttgcaaagcattgaaactatttcatctgatacaggagcttcaaggacgaagtataagggtggacc

SEQ ID NO: 37823 - DNA, 500 bp, Sorghum bicolor
  Intron number 1 from transcript Sb05g008020.1 (locus Sb05g 008020) derived from phytozome v7.0 (chr-ID chromosome_5; pos 14410486 to 14410985 reverse strand)
cggatccaggttcgtattcgatcgttcatatatgcaaccacgtgtgtttcattaattattagttaagagattaagcaaggtagtacatgagttactgtctgagattaagccttgttttggaagactgaaacgttttatttactgaagctcttcaactctactagtaataatattctactagggctgggcggggctagaaagagaagagcaccgtgtttagttctttgagatcggctcagtagcaaataattaattagatggcatcagctgaacattaaaccagtataaacgggctgatgaattcaaaaagtagggaaattaaatggaacgaggtgagcaaatttttgttgttgttacttaaaaatatataaagatttattctgttcctgagatctcattctgaaacgatgacatcctagctagctggaccgcaacttgcttcactgtgttgtcttttctgtgcagtacgctaaagaaaaccctcataatcatctgggcga

SEQ ID NO: 37824 - DNA, 853 bp, Sorghum bicolor
  Intron number 1 from transcript Sb01g035740.1 (locus Sb01g 035740) derived from phytozome v7.0 (chr-ID chromosome_1; pos 59396080 to 59396932)
ggcctttctccaagaggtatataagcacacagcatgctagttaatcccgctgagatccacgcatgcatatttctttctgggtgctgatttttggacataccactactgattcgtcgagctgtatgtgttcttatcggttccgtaggggatgaactggtcaatctgcaggattaggtatttgatttcatttttgagttgcagctagtgaatcattctgtgattatgcagtaaataaaattaagtttgcttaggacacattactttttgaacttgttactggcttacagttttattagcacattactgtaccgcaggtgcatacctgtgattatgcagtaaatataattaagtttgcttaggacataacattttgaacttgttactggcttgacagttttattagcacattgctgtaccaaagctgcacacccttcatattatctgtcgaggagatatatcatattatctgtcgacgagatatttcatgagatgcaagcaagatgatagacgaacataagcttactttacacgcgttgtctaatgcaattttcatgtttattcatgctgtttgattgtatcgactagtttctttcttgagctgttttagtggtattttgttcacggctgaaacttattgtacttcattgtttgttcagttcaccagttgtttgcttgcatcagttactgggttgtttactcaaatagtgtgtatcaagttgttgccttaaacggctagtttgagcggcttaactgtgatgtgcctcctgtgaaaacaagttcttagttaagtttctgaaacattgttgctccattctcaggtacctgaagtacttgacaaagaagtacctgaaga

SEQ ID NO: 37825 - DNA, 906 bp, Sorghum bicolor
  Intron number 2 from transcript Sb04g005810.1 (locus Sb04g 005810) derived from phytozome v7.0 (chr-ID chromosome_4; pos 5685047 to 5685952 reverse strand)
ggtcacaggtgcagtctttctcttgaacaactgaaataatctttgtgttctactgtgccgctgtgtgcaccactttttttttgctgtagtgttagcttctggtgacttttttttttaactaaagcaactggcattatttttgtacttttggtaagaacctcttgatgttgatgattgtatcttaactgattcaatctcatcttggagtactatttctagttctagcagtttatgaaatctaaaatggtagttttcagagctgtcctttgaatattcttttgaagatgatgtgatggacatccagattataccttagcttgaggccatgtcaaccacaaacttgtgggtcacattagagcattgttaatcttttactactacgatgacatgatcatataactagagagccaaatttttaggtgtgaacacacttgatagggggaaaggcaagttaaggatcagccaatcacagagtcctggcaaattgaaccacttcagctatttgtgttttactctatggtaaacctatgctcgtataagtttgcattgttcatgctatacctatatatattgtggccagataaaaagtagggttcttgacacatgggcatgctatgttgcaacaatctgcctttttttataagcaacaatctgcctaaatgggtgtatcataaggtaaatatttttcttttctgtgggattttgagctaagtgctcctcgcgggctcattgatatgcttttgctgcacactttgagtgttccaataccagtttcttaagggatcccgtatgtttcatatattctttactccatgaatgggatttcatatcctctggaacttaccgcttcactctttaatgatacaaacagattgccgtgaagaggctcaagagttggagcaacaa

SEQ ID NO: 37826 - DNA, 485 bp, Sorghum bicolor
  Intron number 1 from transcript Sb07g024110.1 (locus Sb07g 024110) derived from phytozome v7.0 (chr-ID chromosome_7; pos 59113903 to 59114387 reverse strand)
acaaagacgagggtcacttggttgaagcagcagaggtatctgcaggtctaattatgtgtatttcctattctatctgttgtattactgatattttgaattgcaacacgtgacagaaaatataaaccctgtttgcattatgttattgctatgaatgccagacttgatggaatgttaaatgtaatttacgtgtttttaaaggtaaatatgtcagttttagacttagtactacagtcctctaaatttactgccattatcttgtttgtaccttaactctgttcttttcttccatgtctacctaattaaatgaattgacattagcatatttcctaattaaatgaattaacactagcatattggaaaaaattatcaacatgctgctcttacaatttctcttagtttcttgtattagcttcctaaatgtcacattgaaaattataaaaactgggacaggcatatcaaaaagctcggacggcagatccttccta

SEQ ID NO: 37827 - DNA, 736 bp, Sorghum bicolor
  Intron number 2 from transcript Sb02g031850.1 (locus Sb02g 031850) derived from phytozome v7.0 (chr-ID chromosome_2; pos 66649490 to 66650225 reverse strand)
tccgcgacaaacaggaggacaccgcacgcatcagggtaaccccttggcatcatcagcttctgcttctgttagccttttgtgcattattaaacattcgttcgtcggacaacaaactggggttgctgctgccgttctccggctaagccgcggagctcactaaaaaaaagggagatgcgcgttattgggcgtcggtgtggcggaggattttcggagtagcgagccaggggtaacaagaaatgggggatgttattattgtagacaataattttctgtataagttagcagttgattttgttccttctcgtcagttatgggtacacagtcagaattggagaactttgattgtaagagattaactgccttaaacaatcataattggaaactttcattgcaagagatttaacttccttaaacatgatgtttctttctttaattaatggagttaataggattgacgtaagggaactcattaattatgttaattttattataaaagagccatatatagcacaaattcttctatgacttcttcgtcagttcagcattggccatacctgtatgtttaaccattatgtaagttgtgaggcaaattaaatcctaaacttggtaaaatgcacgatgttcttcttaacatattttgtgcaccatattttctttgatagtatggctgaaatggaagaacttatgcgtccaaattttcgttaacatttggattcggcaattctgcaggttgaac

SEQ ID NO: 37828 - DNA, 662 bp, Sorghum bicolor
  Intron number 1 from transcript Sb06g020900.1 (locus Sb06g 020900) derived from phytozome v7.0 (chr-ID chromosome_6; pos 50303509 to 50304170)
ccgagacggactacttccctgagaagagaaatctggtgagtttgttttccaggatggcctggctcgggttaggtttttggtttccccgattagtcgtttggccctgatctgactagcacgcgggcggcttcactttcgattgttgctctagcggcaagatttgcagtgctttgattggtccaaaaactggggaatgatggctccattctgccgctggtgatgctcaaatgtggcattccatggttatgtaggattatactttgagttttactattggattctcctcatctgtgtacgaaatcgcaatgcactactgtggcgttaggaattcgttatgcatgaaaattttcaaatctgtgtgttttgggatgcaagtgcagtttgataggttagcattttcttccgtccattggttgcggttgatatataaggcttgagaaccatgtatgattaccactaaaaaatagaacatgatggctttagaagcattttctcgcttgttggttcaaacaggtttatttttggaagtcaccataacgatttagattgtgtttgactgccctatatttgatgatgttgctatttactttacgtgaattctgactaatgatttgctgctatgttcaggaggatctctggttatctgctttcccagttggtac

SEQ ID NO: 37829 - DNA, 846 bp, Sorghum bicolor
  Intron number 3 from transcript Sb07g003505.1 (locus Sb07g 003505) derived from phytozome v7.0 (chr-ID chromosome_7; pos 4266618 to 4267463 reverse strand)
tttacatatcctcaggttaggttttgtttattatgaaatactggagaaactgttcctgcacttgtgctctttgtatgaagaagaaatggcctgttttctgcattcatgtacttgctgaactttcaatggcatagaagtttctgattctttcttgcttctatcaacagtcagcacaacgacttctacatttataactataccaatataacatacgttccctaaaggacttcataaatgatggatttgctgtcatatgccttcttttttggctagagttcttccctttattccacataagcaacctctatggctattatattaaagaaattgttctgcaccacctgtacttgcctgatactccagatccccatgaatacttttgattttggcagttcccgaattacctcatgcacctcaagtttcagcaatttagcacccatatggttcaatcaagaggaaataaatgccaatttatagggcatagtagcgaataagtcacactacattaaaagtccagggaggaaaaatgccaaatataatactgaaagttataatctgcatcaaccctgaaatgccggtgtaatccttttgcaagtttattattttccaatcctttcaatgattcttgaaaaatctgcctttagtgatgtgcacttaccctacacgttggagaaatggaaaatgcctttagttctactctatgtatgtggtactaaagttactataatgtgatacctgtactctagcatcattcataattaattcaaatgttatcagggatttacgatccttatattgctcctaaatgttttctgttcttgatggccaggttttggagcagggatt

SEQ ID NO: 37830 - DNA, 442 bp, Sorghum bicolor
  Intron number 2 from transcript Sb07g003505.1 (locus Sb07g 003505) derived from phytozome v7.0 (chr-ID chromosome_7; pos 4267618 to 4268059 reverse strand)
gcgccgaagacgcgctgcgcggtctctgccacctggtaatggttctgttcttccgctcggtcggcctattataggtggctatcgcaggacatggtggaatgtatccgtaccgacgattagtgtctataataaggattagtgtctataataactgtagatcgactgtgttctgtgatggtcaataaggataatgtggctcgaattcagtttcagcatgctgcgaattaaggcccagctacaatccgtttgagccttgagaccatggttttatccgttttgctgacacttatggcttgacagcaatgtgttttttggtccaatcatattgggttaggctactgataagattcaaatattctatcagtgtgagatctatacgttttggataaactgaaaatctgtgcattaattttaatgaaaaaaaatctacttttgcagattt

SEQ ID NO: 37831 - DNA, 979 bp, Sorghum bicolor
  Intron number 1 from transcript Sb05g009125.1 (locus Sb05g 009125) derived from phytozome v7.0 (chr-ID chromosome_5; pos 18192695 to 18193673)
tacttggggaaggagcatttggagttgtttacaaggtaagattagggcatgctcagttttcgttaactacagtatcatgtctggccaacaaaaactgtgtagtgtttcgaaattaaatggtattactatatcaacgtggacagcaaccatcttcaggatgtggtgacaacaaacaaaacacccaagcatttcctgctttatgaaatatacaacggagtcaacttgtaccagatactgacaacatacatttggcagggagtgactaaaaatggacaggatgttgctgtgaagaagttgaagccttgttgtgccgacctagacaacaagcagtttcgaaatgagttccataccctcatgaagcttaaccatcaaaacattgtacagattcttggctattgttatgaaacaatgaaaaaaccttttatcatgccggatggaagtaaggtttttgttgatgagatacatacagcgctctgctttgaatacttgcacaatgggagtcttcaaaaacatctttctggtacagctgcaagctccattttcagtatgcctccaaagaatattgtcttgtatattgcatttgattaatgatttttttgtttactactatagatgagtattgtgaagttaagcttgactggcacatgcggttcagaataattaaggggatttgtgagggtctaaagtatatgcacaaggacctagaagaacctatttaccattttgacctaaaacctgacaacatattgctagataaggatatggttccaaagattgcggattttggtctgtccaggatctttggtcaagacataatacggaccacacacggtccatatggaacgctgtaagtcaaattcctctagtaaacttatctagtcccttttataacacaacaaactatgtggattacaaattcattgcatgtgtgcagtggttaccagccgccagaatacattgacagacgtgaaatctcagg

SEQ ID NO: 37832 - DNA, 978 bp, Sorghum bicolor
  Intron number 1 from transcript Sb04g007570.1 (locus Sb04g 007570) derived from phytozome v7.0 (chr-ID chromosome_4; pos 7929623 to 7930600 reverse strand)
ggcgactacgtcggtgcgtggctacgctcccctcgccctcacttttctcccacgcggctctgtcctgctcacggtttctctctctctccgttagctcgcgcgcggagctgtgctgatgcctgactcggccgatctgtgatatgggacgtttggtgccgctgaagtaggggagttttagatcatgcggtatacctgaaaggtggttggtttttgtgcgtctggccggattgttggaagaatctggttatccggaaattagggaacgtctttactgcttaacatatagtctactggagttcttgtagtttgacttgttatgggttgcttttgggtctagcgtgctaggatcttgttgccgctgttgccttttagctcatttagtaccaagaaaataattctcatatatcagcgtttgaattcctcctccagcagtttcataagaattttgagtgtgcttcagatttcagagagtggttgatttgttggcctgttgtttttgagctgatccctgttgtttttgagctgattcctgagcttgtcaaagggtgccacttaggtccacaaactttgaaaatgtatttctaggtacctaaacttgttaagtggtgcaccacatggccgaaacttgttaaatgatgcatcgcaagtccattttcagaccatgccaaccactgtggtgcatcacttaacaggttcaaggacccagaaatgcgtttttaaagttcatgaactaagtggcaccccttaacaagttcaggggccactcatgcatttaaatcatatgcaaatgccatttatttgaatgcttgaaggtaattttataatttcattttgtgttgaggggataaataatttagtagacattcattactttatttcatttgtagtacaagtaccataagtgtcatatttgttaatttgattatgtgtctcttgattgcagatcgtggctactattcagttgaaacagtttctctg

SEQ ID NO: 37833 - DNA, 660 bp, Sorghum bicolor
  Intron number 1 from transcript Sb05g001780.1 (locus Sb05g 001780) derived from phytozome v7.0 (chr-ID chromosome_5; pos 1939302 to 1939961)
tcgaacgcgccgcttcggtctcccgaatcggcgaggtaagcgaatcgcgatctgatgctgtgatgcaatgccgctgcttgcccccttcttttttttctttccttggaggaatttcatgcatgcgggctggattggatatgttggtggatgcgacctttcccaagattcctcccgcagaaacagaaatcaccttccatatgaagaaaaccgcctagattttggattttgtttccatgtactatgtaggctgtgagctcgttgggggttgggcaagtagctgcgaattagtgaaaattgcttgcagcgttctgattagttggtgtgtgcagcacgctgggttaaatttgctggtattgacttgcttcactgtatttagttaggagattcctctatggattttgtttatccaatttgtcctttactgggaacagtccagttttgtatatgtcatcattctctatgggctttgattcgtgtttgaacatttttgatgaaagattcgtgtttgaacttctaaagctattcctgggatcgttgtggaccaatagcatattcagtagttagtctggtctttatccattgggcagctcacagctgttttcaatgtatattcttctggtgagactttgtgacatccttccaattcttctcccagaaggc

SEQ ID NO: 37834 - DNA, 841 bp, Sorghum bicolor
  Intron number 1 from transcript Sb08g016910.1 (locus Sb08g 016910) derived from phytozome v7.0 (chr-ID chromosome_8; pos 45121822 to 45122662)
aggaaccttctcacggtttgcaccgccgccgttctcgcctcttgctgtctttgcgtgttttcctagttcgcttctcgtgtcaagaatgagttcatgatttgcttttgctttgaagatcgaggccgtcagggttttcagaggttcttgctccggttgtggttttatcactggatcggccttgatcgattcatgcatacttattttatttattgtagtgagcatcgacgaccttgctcctgctgttctttctatttatggaaattttgaggtgttgctagcactcctatttctttgaactttggcaagaagcgacgatcttcttcctcctgttcttattcgtctagccatttaaggaaaatctgaaattttgggactttctgtgctggaattagaatatatgtttttttttgttaaaaaaattggtgccaactgatggtattcttcgtgcctgccttggtggagctatccatggaaagttcgagttgttcagagcatgctctgcttgaacatcagcatttggagattttcttttctctctttttttttcaacttccagggaaaaaaaaggggtagtttgagctttggcatgatcacttcttttagttaacgaaacatcatggtttgaaactttcaaccttgatatgtaaatggcagcctaggacttttctggtccaaccttttgcaatccacagtcctgcttgggtgctttgactttgaatgtaatagataagaggcgtctctgtgattttgtgaagaaaaaagtagatgtgtgttctgcaaatcatttttttatctcgttttgacaggactcgtttgagctcggcaaaagggagcaggcccc

SEQ ID NO: 37835 - DNA, 693 bp, Sorghum bicolor
  Intron number 3 from transcript Sb06g032820.1 (locus Sb06g 032820) derived from phytozome v7.0 (chr-ID chromosome_6; pos 60911426 to 60912118 reverse strand)
gctggttgcctgctgctctgtgcatcttgcaggaggtaattcataatacggacatttctcatcaaaatgtctgttggaaccattcacaccactatcaagtaaatgctagttttgtttggttgagacttttcactttaattggctatatgttcagtgagttcgtacttacagtgaccaccaaagtgatatatattttgtgaagtaccgtctctgtttgttctttattttacatctgtcctttttttttcttggtaatatacaattcacatgttaggtcttggatttaagacgccaaattatgtaatataacttaggaatagagcagaatctgtaacttaatagccatagactctgaaatagtcacgaaagggcatacccaggtatctttaggatcatttgtgctgcgtttataaaatattgtatgtcctttcttcagatcaggacatcaggcaaggcagtgtaaaatgccgaaattgtcgctattgaaaattttccatgctgaatgcactgtgagctttgaaaacccaagcatgaaggatgtcttagtatcccaattatcaaagttaaacatgcatatttggcttcccattatgtactgcaaagtcaataatggtctatttgctcttcatccatgtatgatgttgcagtattgtttcaggttggagaagagaagcttgttttggaaattggtca

SEQ ID NO: 37836 - DNA, 898 bp, Sorghum bicolor
  Intron number 1 from transcript Sb04g007170.1 (locus Sb04g 007170) derived from phytozome v7.0 (chr-ID chromosome_4; pos 7327065 to 7327962 reverse strand)
cctcgaggcccagcgcaacgacctcaactcccgaggtgaaacttcttctcgattattacgacccccttcaaaccctagaatcgatgtgcccctcctgcgccgcggtttggtgtggtgttgaatcctcgatcgcgttgatggaaaccctacctgtggctgggtctgaatcgtggccaaaggcacggcctttagttgccttgttgggtttcgacgcctggttgttcgtcacgctgaagtttctaagccaaattatctaatctgatgatgaagatggcctgttaattactaatcagtgtgttagatttactgaagaatagctccaattgaatatgctttagatatttagctgcttgagcagcaggctgacttggacttttcagtttgaattgtggatgttatgtggatggtattgtcatagtggtaactgttgttttgctgtgtttggatcttgattttcgcagtgaattatgcgtaagatgtgcaggctatctgttgcttgtctgtgtttgcgaatgttgtctttcagttttgttctaccacattcttgtggggttgtcaggataatatttcaagcaggtttctgtattcctgaggttatccattattattcaatgcctgcgtttctttgacatgattgtggtattgtgacattctaagttctaacagaaatcataaactaaattcgcctctagctgaacatttgcaatgtcaaattatcttgatgatcatcctgtgcccccattacatagtggggtaatattcacaatgattgcacagtgatacttttgtttaggatttattgaattcctgctgtctctgtttcaggagcagcatctcctacatgtattgttttctgattaccatactcttggccttgcaatttgatttttcagttaga

SEQ ID NO: 37837 - DNA, 1036 bp, Sorghum bicolor; identical to SEQ ID NO: 36364
  Intron number 1 from transcript Sb01g037050.1 (locus Sb01g 037050) derived from phytozome v7.0 (chr-ID chromosome_1; pos 60600078 to 60601113)

SEQ ID NO: 37838 - DNA, 899 bp, Sorghum bicolor
  Intron number 1 from transcript Sb03g038450.1 (locus Sb03g 038450) derived from phytozome v7.0 (chr-ID chromosome_3; pos 66401655 to 66402553 reverse strand)
ctcgaaatctgcgacatcctcaacgccgacgtctggtgagcgcgctgcctctctcactcctcgtcgagccggcgtggggaatttgtagggggtttcggtcctcgctttggcttttgtgggtgttgccggtgcagccgccgttgtgttttggccagaattttgtggggtttgacaattggatgagaggaaatcaggagtctgctccgccatgcatattcgacgcacagtaaattgaccttaatactagatgttgtttattgcccttaactttagcccgtggcgtgcgttggggaaaaacaatttagctatagagcttggcttttgccatctcacatggttattcttgtaggtgatggtccttccagttgtgatttgtgaactttacttgcatataaacctgggagaacaagaatatttgagaatcttgtgtagaaagggcatcaaagtgataaaattcacatagggctacagttaggagtctagcatatattgtttttttttggtatgggaaacttccagtaagtgttgcccttgttgaaatgataaaatgagtgtatcaattaccttgttattttcttattacaattccatgagctgggtggaacaaatgatgctattgtctaactttacttcgtaatgattatttatgattaagacaaacggtggccccatgccattgacatgcagacaaacttgaaattgcggtttgtttttacctgtatggtgcataggttttgattttatactaagatttcatttagcctttctgcttggaagagccgtaatggtttcgttacactaccatgactggagaattttaaggtttattggttctgggcttctggtacctatcaactttatcgtactgattttgaacatctgaatcaggcaaacaaagg

SEQ ID NO: 37839 - DNA, 949 bp, Sorghum bicolor
  Intron number 1 from transcript Sb10g020470.1 (locus Sb10g 020470) derived from phytozome v7.0 (chr-ID chromosome_10; pos 44098116 to 44099064 reverse strand)
ccttaagactggtttcctgccgcatttcgctcactgtaagtagatccccgtgtgtatttcgtctttagctagcttggagaaagatcaattaattatattccatacatctgtgtttttgaatcatgtccttctgcgtgtgttaaattttgctgtctttttaccttttttataatacgtagatagtagtagattagtgggcatgaaagcctgtgaggttttaagatttatttcagcatcaggaatcgaaccaccaactgaacatgtgctgaagcgcgcgttcagagcatctccaagagactttgtatattcttcctaaatgttaggaatagcaattttggtgaaaaagtatcctccaacagtttctctagatggtcatccaaatatagccattgtctattccagatttttcgttagccaaatatagaagacgagaatgactctctagagtgcgcatgagatttagcaaaactgttggaaagtaaaaaaatatagaaagcgatttttatgcaaatggctctctaaacgatgatttagagagtgagatttagaaaggctccaggattcttatccatgtcactgcatgaagtgtagaatttgaaaagtttggaggagcaagcctttcattggtgatagcgttttttttatttcaatataggccttcacttattaccgaactagctacagcactaagctgacagcatcacacagtaacgacaactgtgagagcatatgtacatctattttcaattttcatttcaatagagaagtagtttcatatatcaaaacctatagaacccttactccattcacagtttgggattctatggtatggatcgtccttgtatttacaattttccagttatgactatacataccttattgaactaataaaatgcaccttcaaccttgctcagttagggagaccagatacatcaaagacacagacaaa

SEQ ID NO: 37840 - DNA, 573 bp, Sorghum bicolor
  Intron number 1 from transcript Sb06g032650.1 (locus Sb06g 032650) derived from phytozome v7.0 (chr-ID chromosome_6; pos 60782409 to 60782981)
cggtggtacgtgcgcaagtttgcgttacggaattgcttgacctactggttaattgcttgtgatgatcatgtgccttgtgcttggtgctttgcgcgaaaaatgcattggggatgttcatatgcttatgtgttagtgggatgccaattgccaaatcatatctgcggtttaatttgtgcaaatgcaagctttgatcgtaaacgtgttggtaacttagaactctgggatgatcacacggcacattgacgtttctgcaatggacatgtaagaagtttacaagcgttgtgcaatgcaattgttgatcggattggtgtgagcaaagaagagagggcaaacaaataaaagcactaattagtactaattattatttattagctaattaaggaggttatatagtggacatccaagaggttgggggtgctcccccccccccacccccccctcggccactgattgttgcatgttagcacgtaatttcatatatatgatgtcttattagtacttgaatctttttgttttgtgacgattggttctgaattggttggggcttgggatttgacaggtactttggagaaa

SEQ ID NO: 37841 - DNA, 601 bp, Sorghum bicolor
  Intron number 1 from transcript Sb08g019230.1 (locus Sb08g 019230) derived from phytozome v7.0 (chr-ID chromosome_8; pos 49896148 to 49896748 reverse strand)
cgcttcgtctccccgtgacacggtgagcaggtgaggggacggattatctcctgttcttggctgcttcccctttggtctcgtctggtctggttcggcctggtcgccattgtttcagcggaagaggtcgggttgggagccttgttcttggaggttctcccctctgtttcttggacatatgatgttctacttctgccgagatttggccatatgatgttctacttctgcctagattttgtgtgcgtgcgaaaaattcgtgtccttttcgattccgtggttttggttgcgctttttggttggataatactagtgtcggaaagctggcagctttcttggttttggtttgattattgttcttgcagtgtgcttgtgatgttgttgtttcaagaattgtttcggaaagctctgggttttttagcgctttaatttaatgtttggaatccttctggctccacagtttcctgcggtttgtgatctcgccttcaattttttttgtcacttgcatttatttcccttaacattttcttttacttcccataccctgacgtcctgcaaatgccaaattacaggtctttcttgctgacgcagcctggactcttcatct

SEQ ID NO: 37842 - DNA, 404 bp, Sorghum bicolor
  Intron number 1 from transcript Sb10g019380.1 (locus Sb10g 019380) derived from phytozome v7.0 (chr-ID chromosome_10; pos 41326910 to 41327313)
cacagcacgctcaagcccgtaagcctttttatcattatttcttgtcatcaggttgttgattccgttcgctcgctgattcatggcctagtggtgtctaatactctaatcaagatttgatcttaggccttgcagaagcagggctgattcatggcccagatgggttgatctgttctcttttgtgcatccctactcatcaaatctacaaaatactcttcttgaatcaagataatttagttttgtgttgcaggcttgataagtttctttttgtctgtttcttgattttccttggtagactaggttgaacatgtgctgctgcagtaacttctgatgatggaagcttgcaaattgcacaggctaatttagtggcgttggcgttgtgtgtgttgattcacaggagtgtatcc

SEQ ID NO: 37843 - DNA, 607 bp, Sorghum bicolor
  Intron number 1 from transcript Sb10g024090.1 (locus Sb10g 024090) derived from phytozome v7.0 (chr-ID chromosome_10; pos 52934216 to 52934822 reverse strand)
ctcagagctggtagatcacttaaattatcattttgtctaatgctctcatagaggtcttcatttccaatgctactggtctgatgctctaatgggcaagtatgatgaataaaaccatctgatctgcttgtatctaaacaaactttgatttccatgatgtctctaatggatgcatgatctgcttggccagaggctaaagtcattctctatgaaaatttgttggttatatacttcttctgttgatgccttattgttttccccgtaggcatgaatgtcgcaccactatctttgaattaagttatatagctttgccatcataattgtatctaacaaaatatgttaagcctgtcctagtaatctgttaggtctgtcctttttcttctgcaacatgatatccactggccatcaagtttgccagtttgttcattggtataggatgcaccaaaattttgacatcctttcaggatggtatatgcaatgctattttgtaactcatgtcatatgtgtaataaactttacttggcaggatgtgagcctaatgaattcactttggcatctgtccttacctcctgtactggctctcaaggcatacaccaggtcaagcaagtcc

SEQ ID NO: 37844 - DNA, 903 bp, Sorghum bicolor
  Intron number 3 from transcript Sb08g001370.1 (locus Sb08g 001370) derived from phytozome v7.0 (chr-ID chromosome_8; pos 1339597 to 1340499)
ggttcctcaagtaagttctgctcttctgtccttgccatcactaggttttgatacaccgcctagttccaccagtgaatttcttcaccttccaccattgaaattcataataatctcctgaatttagagccttaggttaggtgttctctactttttttttatgaataatagtaatcagcatagaccatctgatgaaaacttgtattggatgtggcatatatcaattgtccatccaatttacctgccattatttagcacaatggagcaatggaaattatcacccatcacctaatagactcagaagctctttgaaggattttactagtttaggaatacatttctgggctactatagtcttctcacgatcgtaagatttgcaaggagtttaattgatctgagctctgtattgacctttgctgttcagttgatcttgtttatacttgccataactacctatgttggtggacgattttaagctctgtttctgaaacagtctgtctgataaccttcaggatactaagccatcgattcataaaggtcggccttttctctttcgtttttttgctcttcaccataatccttcctttggtttgctgatgatcgaaaacatcaatgtttgtgactttgtgttagtttttcatgttgttttgaagtttcaatacaagacaaaagcaactatgctctgttccagcaaataccagtataaatcacggtttacttgctaatggatttagaattccttaattgttgtattggttatgtcaggaataataatgctatatacactcattatgtttagtgttccggtgttgttcttttgaggagaaactgtgctaccttcatattgtttagtattccctcatctccttcttttgcaattatctaattcctctatgcttgtataga

SEQ ID NO: 37845 - DNA, 550 bp, Sorghum bicolor
  Intron number 5 from transcript Sb10g000900.1 (locus Sb10g 000900) derived from phytozome v7.0 (chr-ID chromosome_10; pos 585138 to 585687)
tctgtgtgataaccaaggtatgcattttcagttttttaatagagttacagccttaccgagccaagccctggtccgaatccattgcaaaagaccaaattaacatgtgtttacttggttttatagcataacatgccctcatctcgtgtgtgacatagatcaatctcaaccgcaagatgcattttctgtttattgagtgaaattgacagagcactgcaagtgttgaataaaaaaatcgaaataaaatgtatattatttacatattagagtatgaagtttcgaactatatccgtagcattatatttgtcagctttgatatgatatatgtcgcacttacatatggtttgattcacacttgagatcactaatttccaataatgctcatttgagctgtgtaacactgcatcctgcatgctgctctttgtcagcggtgccttttgagcaaatcgaagaacatgaatatactactagtaactcttcagagtgctttgctgatcaacacttattgacattaccagggaaagacagaatacttgagaaaccaccagttgcc

SEQ ID NO: 37846 - DNA, 734 bp, Sorghum bicolor
  Intron number 2 from transcript Sb04g002280.1 (locus Sb04g 002280) derived from phytozome v7.0 (chr-ID chromosome_4; pos 2060710 to 2061443 reverse strand)
tcttctcaggcacagccaatccttccctttctcaggtcagttgagtctagcatggagaaattctctctccagtctttatcctagccctgcattgagttagttggagccgaccaattaaactgtactaaccagctagcaccttagagcactcattacattaacttcttttgagtttggaatagtgattggtataaaaggtggattaaaatgaaggataatttggaccaattaaactgtactaatcagctacaaccgtagagtactcagtacattaacttcttttggatttggaatagtgattggtataaaaggtgggttggccttgtttagttcccagaaaattttgtaaaatttttcatattccccgtcacatcgaatctttagacgcatgcatggagtattaaatatagacgaaaataaaaactaattgcacagtttggtcgaaattgacgaaacgaatcttttgagcctagttagtttatgattggacaatatttgtcaaatacaaacgaaagtgctacagtgtcgattttgcaaaatttttcggaactaaacaaggcctaaggataatttgaacctcaatagttttttaacctggcatagctactagcctacttctgaatgacgaagaataaaccggaaatgtgttatctctttcatgcctaatttctttatggtatcctgtattcctatgaacaggaaatagcaagttacttggggctagaacttgggaa

SEQ ID NO: 37847 - DNA, 765 bp, Sorghum bicolor
  Intron number 1 from transcript Sb07g020930.1 (locus Sb07g 020930) derived from phytozome v7.0 (chr-ID chromosome_7; pos 54289699 to 54290463 reverse strand)
tcctcgccgcagctgctccgctgccgcgctgtcaggtactgtgtgctactcctcggtttccgtcgctttggaaaagttgtacatacagcacttgcgtttcaagtttccattttgacttgctatggaggaaaagggaaaggtgcttttttttttcttttttttttcaatctgaagtgaggggattgattaagattgcggggtgccacctgctacgatctagtaattattaagttagctaaaagtctttgccttctttatttggggtagaacttggtcttgaagaagacagaatgaaaacttgtgactggcaattaagtggttgcgggagctaagtaattctcacggaagtttgggcttttcatcttatttttacatttaggccctgtttagtcatccatcacatcgaatctttggacacatgcatgtaatattaaatgtagataaaaaaaataaactaattacacagtttggttaaaaatcgcgagacgaatcttttaagcctagttagtctatgattagccttaagtgctacagtaacccacatgtgctaatgatagattaattatgcttaatagatttgtcttgcagttttctaacgagctatgtaatttgtttttttattagtttctaaaaacccctcccgacatcctttcgacatatccgatgtgacatccaaaatttttttatctcccatctaaacgggcccttagtcaactattgagctgagttttccttgaattggtttctgtaaatgcaggcgagcag

SEQ ID NO: 37848 - DNA, 707 bp, Sorghum bicolor
  Intron number 1 from transcript Sb09g027190.1 (locus Sb09g 027190) derived from phytozome v7.0 (chr-ID chromosome_9; pos 56285015 to 56285721 reverse strand)
agttcactgaggagtcgcaccagtggatcgaccgcgtaatgacccctctccctctccctccctccctctctctcgctctcgctcgctgtcgctgcggtccttccttttctgtcgctgtttcctggtttgatccttgtggcgtgtgggggtgggctccgtgcgccgtcgccgtgtggtccagcgggttctcttcatgatgtcccgtttaggttccaccccggatcggcggactctctgtagttcgttgaggcaccgggttctaattgaagcgaaattaattctgtttaccgcgtgcacatggtggacatattatgggtgaaataaatgaagaaagcaccggatcacgcactggtaaataaatgagcgaggattagtcctctgagaacagcttgttactgctgtttatttagtagtatgtttttacgtgggctggatggaacggatcaacacgtacggggagtggaactggaacttccgttcagttgggtgttgggttgggttgacgggctctgcttttggacattgaattgctgccaaaacagagcagagctcgtgattattaggctccgcagttaaatccaaaccaccgtagcagctattaatggatcttgggtgttttagcaggtcgcttactgtttgttctattagctagtgcttttgatgtgcgttgctaatatgatatttctctgtcttcctccttcaaacag

SEQ ID NO: 37849 - DNA, 914 bp, Sorghum bicolor
  Intron number 2 from transcript Sb04g023350.1 (locus Sb04g 023350) derived from phytozome v7.0 (chr-ID chromosome_4; pos 53082471 to 53083384)
agcttctttgacagcctagtcaagtatataacaaggtattattgttgtttgaaaggctcatgtctcttgtgtctcttgcataatgcttcatttagtctatcctgcagcctccagtcgtctagaacttcttgacaccaaacctggagctaaaatggtctttggtagctatcgctttaaaaaccaatagcaatttctgagatatgagcacgtcaagctaattgttattctatttgtatgtgccattattccattaatacttatgtggcgaagatgcaatctttaggttaacacggaattaggccttgtttagttccgaaaagtgaaaagatttcggtactgtagcactttcgtttgtttgtgacaaatattatctaattatggactaactaggatcaaaagattcgtctcgtgatttacaactaaactgtgtaattagtttttgttttcgtttatatttaatgtttcatgcatgtgccacaagattcgatgtgacgggaaatcttgaaaactttttggttttcagggtgaactaaacaaggccttactaaaactattgaagtgaggtgttttaaaccttgccacagttgactagtcagcatgctatatctgaatcttcattcaggggcgaagccagctgccatagctactagggtcttccctagtacacaatgtggtcaaagcagtggtgaacagtaattctctaggttttctagaaatttatcgatgtcgcttgaccccaatggcaaaagctagctccgctcctgtcttcattgacccttttattcccagattgcaaattctgttcagtttaacttgtacatttgcattaggcacttcgaggctaacattgacactaacagtttgtaacatgactttttatgttcgtgttcatctgtagtggtccagttctcgct

SEQ ID NO: 37850 - DNA, 867 bp, Sorghum bicolor
  Intron number 1 from transcript Sb04g034510.1 (locus Sb04g 034510) derived from phytozome v7.0 (chr-ID chromosome_4; pos 64351135 to 64352001 reverse strand)
tccgtgtgctcgacgtctcgcgcaaccagctcgaggtaacaaactgggcatcttcatgtatattaaggtcgatctactactactatttgtttagagtgcctatgctaatgccttttgtctatgaaccatgaaatgctgtttcggctgatagttgtggatgagcgttgttatgcgattgtttgcacatattccactgtttttataagatacatattccactgtcatcctttttcgaaaaaaaagaaatccacctttatggcctgcaaatggattaaccggaccatgtgatggctgattggagtttaactgtaaaaagaagtgaatgacttgtttttcttttccaacagttcttgtttgatggatgtgtttgagtgatttttttccccgaggacaaggagcaagtttattttgggtgaaaatcatgtaatatttgggtgacaatagctgaatttaaatgttcgtgcaaaaataaagtatcagatggcatcaggctgaaactgtgttatacctgacgaaactgctacatcacgcaaatatgattatatgattgattgactaaagtgtgtctatctttgtacatattagtttaggccctgtttggttccaccaactaaattttagttagctaaaattattttagctactcttgggtgattaattttggcacatcatcatttaaaaaacgacaagctaatgttatctacaaaatgctcaccatctttctcgagtactaattaaccaatagactctgaagggttttgagttgtaatttcacaacaggatttgttacatcctgttaattagtttttgtcccatgcttgattgattaataaaattctgtttcaatgtcattgtaggttattccag

SEQ ID NO: 37851 - DNA, 1047 bp, Sorghum bicolor
  Intron number 1 from transcript Sb02g037420.1 (locus Sb02g 037420) derived from phytozome v7.0 (chr-ID chromosome_2; pos 71706575 to 71707621)
acaccgagcaggccatcgagtacggcactaacgtacgcccccgccgcggccatccctcatctgtctccctttgatgtgcccctcaatggctcgatccgtgtgctccgttccgtgctgggcgattctagggtttggtagagctcgtgctgtgcgatctcgtgggtgcgcggtcgccgatctccatttcctcatgtcttactctttcgtttggctaccttacattccgattgagagcgacccttaacggatactgttggaggcaaaatgttcgcaattataactgctgcttatatggtacgaggtctgaaattgtagttttaagcggcaaaaaactagggctcattatgagttgttgagttcatttgagccagcatttgtctggtagacaagaagcacaagcatttctcaggaagcataagtgtattgtggtttgagaaaaaaaggatcctcataggaaacctgatttgaaccagcttgagattatgagaatcatacccatcatgaatgctttgaaaccttttaagcttttctaacctaaccaaaaaaaaaatcatgtatggcttatgatgtaattactcttcactaagtgggacaggcaatttatgtttccaatctgttttatgtaaatgggctgcagtcctcaggctcaggcaaccaaattgtgataataggaagaaggaagtgaggcactaagcatgttgaatctgtttttttttcttttttttttgcatgatggccatggacctggcatgctttacatttatgttgttgaccacacagattcatggaattgacccagatgacctttttctgccatgtggtattatactaatattattatgattacaactgaaagtggttcatgctgcacaaaatatttgaacaatgatttgtatgtttcaacagtatctcagtaaatagatatatcttttaaatctaatatgttacttttatgttttgcctgtagcctgtgtctctctttttatattaaggttcttttttgttgtaacaggttggtggagtgactcctaagaaaggtggaactga

SEQ ID NO: 37852 - DNA, 588 bp, Sorghum bicolor
  Intron number 2 from transcript Sb01g047780.1 (locus Sb01g 047780) derived from phytozome v7.0 (chr-ID chromosome_1; pos 70920391 to 70920978)
gaaatctaacctctctgctcgctggtgtgcacaaggtatcgctagatatatatatttgctcactttatgtttctttatcttaactcttatgctcatttcaatgcttattgtttgctaatgaatgtccgaggagtactgtttacttgactatcactgtgcatgtaactacagaactatatggtattcttgtgtatttctgaataataataacatccacactgggtacctgttgcaaattagctctaggaactgcatttgtagactgtcttgatgttataaacatcatttattcatgcttgaaggactatcctcttaatgaaatacgtgtccagttgcacgtttgtgaaaaaaaaatcatggctgaagaaagtacataagctatggttgaatctttgaattacagaaaccaaaaacaacagaccatctgtccttatatatatcatactaggctttcccatcctccgcaaccgcaaagcctcacaatctgtgttataacgctaaaactttggtgataatttgtatgatatctgaagccacttccttttcattatatgtgatatcattgtctgaaaaattttcaggtcagag

SEQ ID NO: 37853 - DNA, 961 bp, Sorghum bicolor
  Intron number 1 from transcript Sb10g028320.2 (locus Sb10g 028320) derived from phytozome v7.0 (chr-ID chromosome_10; pos 58173745 to 58174705)
gtcggtcggtcagtcggtctcgtcgtctgttgttggtgagtgacctccagctgcctcgtttgcctggatagatagatttccctctccgttggcttcgttcgcagtccccttcgttggttcagtccactcgccgatttgtgtgctgcggcgtgccacccagctaatccatccagtcccgaaacaatccgccgctacctcccgcctgtggttcatcagcacgcaaaatccgcccatctcagttggcgccgcgccgtagaagagagtagttagttgttggtgcccgaataaggcgttcgcgccgtgcggtttatttcccgagtttttttggtgggggacgaggagttcaactgaaccccgtctcccctcctgggccacgcggtattttggggtcgaaatcagattctgacacatgcgcagttattgaatctcttctgggggtaaggaatttttctaggatttgtttgagttttaccagaactggcacaggtgttgttattgatctcttctgggggtgaaggaatttctctaggattcgttttgagttttaccagaactggaagttgtggttgtggcaaatcattaggttggtgagttcgtttttagtgtcaaatagtcatgtggggttatagggggttcattacatacatggactgattgtggcattaggatgtttgttccctgcgatacaccatcattgtcgtgattgaaatgctcagtctattcaccatcactcacagaatttgcacactctgtttttgaaggagcaagctggaattgatctggttgccctattggtgtcttgattgtggcattagggtgtttgttccctgcgatacaccatcatttgccgtgattgaaatgctcagtctattcaccatcactcacagaatttgcgcactctgtttttgaaggagcaagctggaattgatctggttgccctattggtgtcttgtaggttgta

SEQ ID NO: 37854 - DNA, 607 bp, Sorghum bicolor
  Intron number 2 from transcript Sb01g011070.1 (locus Sb01g 011070) derived from phytozome v7.0 (chr-ID chromosome_1; pos 9953714 to 9954320)
ggttacagtatgtctctcatacccctgcaccttgcttgtttcggcatcccggtcctctcatatattctcggatagttgtgtgctgttagtgtgtttgcatctttgcttggcaaattaaaattagctaaacatgtagagtgcaaaccctggatgctagtttgagtgttcagacatgtgtggtgttaaggcgctggataatcgtcttctgcaatgtttttttatgcattacacaattagtcatatgtagatgctgcctggtgcaatccatggtttgtgttctccaagtaggcattgttttaggacttaggagtgcaaagtgtacttactgggatttgcaatgttggttcataaaatgagtgtgaaatctgaaatgactggtgaagtagcaataggatgactggttaactcactattgcctccttgtcaaaaaaaaaaaaaaaaaaaaactcactattgcctcttttgtttttaatcttgaatggtgagcatcaaaattagaggtttatccccttctgaagcatataatgcaatattattctgcgtgttccatttctttcttttgcctttatttagtttaggggaagtaagctagaaatattttgcagtc

SEQ ID NO: 37855 - DNA, 734 bp, Sorghum bicolor
  Intron number 3 from transcript Sb04g034700.1 (locus Sb04g 034700) derived from phytozome v7.0 (chr-ID chromosome_4; pos 64529582 to 64530315 reverse strand)
ttctccagttagcggtatgcattgttcatcagcaaacttttctcacaacttggataaagagtgaatatctctatgtggattctgctaggatcataagatatagcataattactgtgtgacataaacagtctgaaaattgcagctgaatggaacatgttcggttaatgctggacttggtcatgcatcttgctttgtttttgtttatatccaaactaaattgctctgttcaacagatgcacctttgcaacctgtgacaaagattttgtactaactttaaacttttttttgtacaactagataattatatgtgatcaagagaaatataggacgtgttgagcgattttacccacatatctccacaacaatttattctccatgttgcttccaatttgaggcagaaaagtaaaataaatctctttgattggcaactagagcacgacctttgtcttaaattccaattctactaactgaaccacatgcccctgcttggagttcccttatcctgctatcagaaggtctttaagctcgatgtgacaacatcaatcagtttcctgaaatatctgtagttcttgtagttcccctatctgtcagttaaacgatttttctgtagtttcagtgtttctttgcattgtcaatgtaattgtataacataggagtatttcaaatcggacttgtatcaatttcttgaaactgtttcaggtcttgcaactattcagcagcgcagaggtcaacaa

SEQ ID NO: 37856 - DNA, 630 bp, Sorghum bicolor
  Intron number 3 from transcript Sb06g029370.1 (locus Sb06g 029370) derived from phytozome v7.0 (chr-ID chromosome_6; pos 58009710 to 58010339)
ccaaggatcagattgttctgctaggtaaaatataaaatttattcaggagctaaattcgatgccttatctttagttaaaaaaaatgcatggcacccggatgcatgattggtactgctggctctcgcctggttcttcgttcttgtagcccatggttctttaaaaatctgcggcagcaacattccccgataaaggtgaccatttgtagtttaactacgaagcaacttgtgttagtgaaagaagtcagctgagttgggaaaaaacgagactatatggttcttagtctaatcacatgacgtcacacagaataatccagggataattaaacacaacccgtaccctgagttcaggcttccctgctgttttcttcttttttctgttttgctttagtttttgcttcttcctttgtcttgtttgttgtaaaacttttacctcttttgaataaattcctgtagaagcatttggcctctccagttcactcaaaaaaaaattaaacacaacccagttcatcattttcaaaaacaaatatgcactttcttgctcctgccattatatacaatttgtttcgaatatgaacttcccttgcatatgcatgcaggagggcacactctgggtacctcgcactgctcgtcg

SEQ ID NO: 37857 - DNA, 869 bp, Sorghum bicolor
  Intron number 1 from transcript Sb05g023230.1 (locus Sb05g 023230) derived from phytozome v7.0 (chr-ID chromosome_5; pos 55689745 to 55690613)
aatcttcagcaagctatcaactgggaatccaatttgtaagtttatttagttacttggccttacatttcattttactatgtgaagcaatggaactaccatagtttggcagtgagcactactttagtgtgatttgctgattttagatcactgattcgatttgaggtctcaaatataaagacgaagtgaagtggtactactaatttttagtagttcagttctatgaacatgtgtgctcaactatgtgttacagctgctatatattgtacagtgactattatgttgtattttacatgctaaaaatagactttatactgtaaataaaaagaaaaacctgaacagcccttcacattttgaatgcccaacctcaaaatcctagacccacccatggagacagacttagctttgaggatcagcaggttacctatgtcatggttttttatttatgtgtgatttggtagaaagaaaaatcatgtaccattttagtggttgattgaatttataagtaaggataggaataaatgctcaattgttcgataaatggattctttgtaaagccttgtttagttaaatttttttgggaaatcgacactgtagcactttcgtttgtatttgacaaatattgttcaatcatggactaactaggctcaaaatattcttctcgtcaattccgaccaaactgtgcaattagtttttattttcgtctatatttaatactccatgcatgcgcctaaagattcgatgtgacggagaatgtgaaaaattttgcaaaattttctgggaactaaacaaggcctttttgtaacgccaaaggccttgtctgtgtctattttcatcattctgagagcatgtgttgacgtatgtgcaggcta

SEQ ID NO: 37858 - DNA, 771 bp, Sorghum bicolor
  Intron number 2 from transcript Sb09g001302.1 (locus Sb09g 001302) derived from phytozome v7.0 (chr-ID chromosome_9; pos 1141723 to 1142493)
ggccgccgaggagaccttcgactgcctccacaggggtgagtacgttcgcctcttcctccgttcctcgacccctttattcgttgtatccagtcatgctgcattccatagagcccagtaaccttgttagatgcaaaaaaaagtttcgattttgcggaactcatgtcagacattgatacggtgttgcccccaaaacgtttggccgttgcgctccactctacgcagatagatagattactaaccatgatgttggattatggataatggactggagtggaatcgctctgcctctgcaagtggattcagagagcgaaacaaggggtgcagacataaccccagactataatttgtagtgcagcctgaatatcacacactcagtctttattgagtttttctgtgcagttctgtaacctgcattttacattcagtcatgattgaatatttgaatgactcaaatggcgacgaaaatatctgtttttgttactgaagatccacttcatatacacacttgtactgaagatcttactgaatttcttactggtcaaaatggtacttacctcaatagatcttactggcaaaatggtacacctcaatagatctcactgaagatcgcctcaactttgaatttaaccaatgctatttcagaatgatagcagtattgtattcctgttgtttactgacaaggaaatcatatgcttgcatttcttttgtgctacattttactggcaatcagagaagaaattgttatgacaaaacctcttctgtttgcagggg

SEQ ID NO: 37859 - DNA, 920 bp, Sorghum bicolor; identical to SEQ ID NO: 37427
  Intron number 1 from transcript Sb01g048720.1 (locus Sb01g 048720) derived from phytozome v7.0 (chr-ID chromosome_1; pos 71673149 to 71674068 reverse strand)

SEQ ID NO: 37860 - DNA, 551 bp, Sorghum bicolor
  Intron number 2 from transcript Sb01g043450.1 (locus Sb01g 043450) derived from phytozome v7.0 (chr-ID chromosome_1; pos 66619129 to 66619679)
agctgcacacggcgcttggcaccgccaagtggcaggtaaatctgtcgccctcatcgttcatattgaggttatattattattgcacggtccgattgctgtagtcccctaaattcattagtgttttatagcccaatcggtgtatcctagacactcagatgtgtaagttctcctgcttaaccaatcactgacaattgaacttagcatggtgtttgattcatttcttctgcttattatgagttgccatattccctctgggatcctccttttttgatatatatgtactgggcagcttcccgttcttttttttttaaaaaaaaagaaagagtcgccatattagcatgatgcttaaacaaccacattcatgaaaatgtggatgtgattgaggtgatcacagtacttggttggataatgtacccatccagttatgtcagtggccaaacctttataaaaaatatgtttgtaattatagtgcaaaatttgaagattactgctacaagtatcttcaattcaaaagctcattctgagatttggtttatccttctttcagcttg

SEQ ID NO: 37861 - DNA, 873 bp, Sorghum bicolor
  Intron number 1 from transcript Sb02g035910.1 (locus Sb02g 035910) derived from phytozome v7.0 (chr-ID chromosome_2; pos 70287542 to 70288414)
gaagaggatttcaaggagggcgggcagcgcaactggtaatccacactatttcttttggggaatttgcgaatttcacccaaaattatctgctctctgttttgcgtccgagctgggctatcacctgtcataaatcagacaggtcctttctctgtctgtgtctgtctcaccatttccttgtaacgtggccacaacaattccaagtatagtagtgactactagtaaaaaaaagggacatccagtgttcaactcacaacgatgcagagagggggagggcctggtatgagtgtttgccaagtagtacctactatatttgttcagagttagcactttatgctgtttgtcagcatgcatacagtggaacagtaattgcagctccataagccaaaatgttataaattctacggaacttccctgcaggtcttacatgtctaattgctatgatgaaattgcattatgtgttgcttaatctgttttcttcaaattattctcttattggtaacattctttgctcaattcaaaaaacatacactgtgttcttcctagttagttagtttagtttcttttagtctttttagttgctttgtaactgtactgcctgcctttcttaattcaattgctgtaggggtgcaaacccctctagtttctttcaaaaaaaaaaaaaaaaacacacgacgcaagttaaaaacaccttgtgaacctcttctttcttttctcaatcatacaagtgattgtttggcctgtgaatgtcaccagacttcataaaagatatatcacagcagctgcagttttgtcaaattaaccttgctggtgtatcttactatctctttacatcttaaaggatccaagttctagcaaatagcacaattgccactg

SEQ ID NO: 37862 - DNA, 568 bp, Sorghum bicolor
  Intron number 1 from transcript Sb03g025380.1 (locus Sb03g 025380) derived from phytozome v7.0 (chr-ID chromosome_3; pos 50928344 to 50928911 reverse strand)
aattggagttctgttttggttttggacaagaagaggtatgcttctttgtttgacattggtggatccatgcaagtattcataagttgatgtctgagacctacaaatactagtattttgtcgttgtactgtaagtgcaaatctaactgtatgatactttattctaataacaagtcatgtctataggatggttgatggtctaaagtaccaccatagcacaatctgagtttcatgtgaatattttataatgattgtattacatttgcatagtattatagagtggatgtttcagttgtgatttatagagtctgggtgacatgttctaagcatagggttctagactttcttgaagcaataagcatagtatattatagagtgtggatgacatttgtggtttctctcgtccactattctgaaaatgtagtctacagttctgccggaaagtttcgcaatagttttagcttcctgctatttcttctttctttttcacgtttggctggaccaagaaagttttctagactatggcatggattctgtgccatgtcctaatctttttgacctcatgcagctg

SEQ ID NO: 37863 - DNA, 694 bp, Sorghum bicolor
  Intron number 1 from transcript Sb03g025280.1 (locus Sb03g 025280) derived from phytozome v7.0 (chr-ID chromosome_3; pos 50714016 to 50714709)
tcaacgccacggcgggatcggactcgtcaggtacgacgaattcaaattcggaaaccacattattcaatgctttggctgctttgctcgcccgatttagttcgatgatgttcaacgttgaccacactcagcggataatcacgttattctttatgtcacgttgaaaaccaaaatcaatcgaagaaaatcatggttaatcaacctaactttattgactggaagtgttgtgactgaataaacctaaagatgtttggctttgccatctactatgtagggactaaggaatataaaatttgtcaaaaccagcaactaacagacctgtttcggatcacctttgttttgaccagagcatttgtttagttttctcaatggttactagttactactactagaaagaaagcagacaaagttgccacaacgtcagtgcatccgtaagaatagtctagttacgtcatcatcattgccaagccaatgtgaaatccttatttgtttggaggaagaaaacatttgacaatttttcacatatgaaaggttcttgtttatcttgtcaccaattacctaatactagtattcttcttgttgactagaaggtgcaccacaagttttctctcagctgctcctttcgtttgttttccttaaaataacttctcaataatatgcaggacacagtggcattttgtggatattgctgggttca

SEQ ID NO: 37864 - DNA, 700 bp, Sorghum bicolor; identical to SEQ ID NO: 36198
  Intron number 1 from transcript Sb06g024600.1 (locus Sb06g 024600) derived from phytozome v7.0 (chr-ID chromosome_6; pos 53694035 to 53694734 reverse strand)

SEQ ID NO: 37865 - DNA, 567 bp, Sorghum bicolor
  Intron number 1 from transcript Sb01g015110.1 (locus Sb01g 015110) derived from phytozome v7.0 (chr-ID chromosome_1; pos 14571760 to 14572326)
cgcatcccgtccctcgcgaagctcggcgctcccaggttcggttctttgtttcctccacaaatcgtcttttgtgctaattagttaggcgccttttgcttcaggagctggcgattgtatcgcactattctgggaaaagatagagcgcaattatttgcggtcaatcatggagggctaccgcatttatttatttttggttagaagaacaatttgatcctaactctggtgtgctgtctactaaaaaaaattcttttctcgacaacactggttgaaataagtttttgatatgcgattaaaactgttgagtttatgtggatgaactgtgatccaacgtatattatattatggatgaggtggttcttttcctggaaatagaatggaccgattaagatacatttcctttctggaaagggagcatgtgcccttgcttctgggtgtcatggaaattctttcatcttaaactctcagctacactgactaatgtgcaaaggaatggctaacaagcatctaaatgcccatcactgaccaatttgaatctttgatgccgaaaactgtaggtgtgcaaaattc

SEQ ID NO: 37866 - DNA, 980 bp, Sorghum bicolor
  Intron number 1 from transcript Sb01g010400.1 (locus Sb01g 010400) derived from phytozome v7.0 (chr-ID chromosome_1; pos 9208848 to 9209827)
cagttaaagaggctaataaagtatttcgctctgaggtaccattctcttaatattatttttttgttcaactatctttccatatttgaagatctatctattcaggctttacctagccttgcccaccattttcttgtaagctagcctacaccataaggagccgcgcgcttgagtttcctgaatgctcggaagaagttggtttccattcatctcaggcaaccaacaccacccaataatttttatgttcttaccatttggccttgcttaaggttatcttttcatcaaaggagcaacttattggaaagttcattctgttgaggatcacacagtacccttccagaaagaatgagttgccttttgtaatccttattagtcatgcttgtcagtacttataaaaaaatagactggacatgcatttttgctccaaaaccgagaagtgcacattttgccgttcctaagccatgcatgaatcaaactttgacgcatgtatcaatttctttccttctggaatgatatcttttttaatatacccttcagaccaaggtttgggattctgaacatggacctgtcatgccagggaagcaagctaaacaccaattatgggttatgagtttatgactgatgcatcttctttccattttttgatgataaacaattaatcagtcttttttaaaacaacaaataattttaatccatccttccaatggcatgataggaatagcctattttatttgcccagcaaaatcttattacaatttacatatggtctcttaaagataaacatgagacatttgaaagtaattccagtactcaatttagtacgggtttcactgttctggctaggatccaagagcctgaccaggtttattgccagtttctaatattggcttttggatgtcaaatgaagggtagcaagttatatgagagcatttaactttcacataggacactgcaataaccttttctcttttgccatgtttagg

SEQ ID NO: 37867 - DNA, 877 bp, Sorghum bicolor
  Intron number 1 from transcript Sb10g008880.1 (locus Sb10g 008880) derived from phytozome v7.0 (chr-ID chromosome_10; pos 9327122 to 9327998 reverse strand)
actacgccagcctcctcctccaccacgcgctgcaggtactttacttactgttactgatgatgatgacagtaatatcttaattaatcaccgctgctgctaatcatgagattcgttaccgcaccgcacggtcagcgccgcccccgattggctcagaactgtccagagagcttttttttttttgtcgtgctgcggaatctggccggtcggagccgcacgattttcttcttcttctcctggttcacactcgtggctacccctgtctgtgctgtgcagcagccggcccggcgcacgtggcgcgtgacgtctcgggtcaaggggggtttgaactttgtaccgtgtgtgtgtgtgaaaacatgctgtcctgtcggtccacacaggctgccatgtggggtccgacggatcgatggagttgataggtataatcacaacgtagcatcatgttactgtcagggttaggtgagcagaaactactcattaagcggctgaacgtaaccaccacattcggtcacgttgtgatggggtcgattgatctcctgcaaagctaagcagagccagccatgtcatcacgttattacaacgatgcagtgatgatgatgatggatcatctcgatccatccatcgatcatggcaggggcaatcgtccaggcagagctagcagctagctaggccaggccactctactggaatattagctggttggttagtactggtatggtgtgtgaacagtgagtagcactgatgatcacccagctaagctagctcgaataataatggtcgaagaaccatggacaaaaaaaaaaaaactgagctgctgcatgcatgcgctgtactttgatttgcagctgttcgagttcgccgacaagtaccggggcaagta

SEQ ID NO: 37868 - DNA, 869 bp, Sorghum bicolor
  Intron number 1 from transcript Sb06g030570.1 (locus Sb06g 030570) derived from phytozome v7.0 (chr-ID chromosome_6; pos 58969969 to 58970837 reverse strand)
tgctgatttgggtcctctccgccgaggtcacgcaggtgcggtgtggattctgtaatccttatgcgctttacttgtttattttgattggaggttcttggatcttggcttgggatgcatgcttgcttatcggattggtttggttcggttcgtttcgggcgtaaatgctctgtgcttatcagattatttttgttgaaccgccttggaggtgttgttctgcatctcgactcatttttaaaagtaacgcgcaaggttacctgtatagaaaatttctcaggggaatgttatgcatatggatatccatcattctgaatccccgagtcttaaaagaacatacggcatcattctgaatccccgaggcttcaccactggattttatttataccattaaaaagaaaagaaaagtcaattcttttgccttctactgtatataagtttggagctaacctccaaaatttcatgtatgtgtgctcatatggatatccatcaaatctgctgttaatggtttaacgacttgtacctgcctgtcgtcagtcttcagtgcttagctttgttcatgtaaactttgtcaaagtattaatcatgtggtagttgtcacagtccatctgtgcctgattgggggtggttctgatatgcttgatcacctacaatacatgattaaaggagataccatggtagaattagaggttattggtagtagaatttcgtcacctccaatgactgcaaaacacttaaacgcctcagcttctagttcttgattatcttttcttgatctttgtaaagttcatcttgcaaaatatattattttttcatcttctaactaaatcttttgtgcaggggatattcacaaagtacaaacatccgtttgcaat

SEQ ID NO: 37869 - DNA, 681 bp, Sorghum bicolor
  Intron number 2 from transcript Sb08g023160.1 (locus Sb08g 023160) derived from phytozome v7.0 (chr-ID chromosome_8; pos 55296610 to 55297290)
cctgcgccgccgtcgtcaagtcaatcctctgcgttgtaagccatgtgccatcactcggcctctgcaagctttgctcttttttatttttatttttataacaaaccgctcctcacgtgctcggtggtttgcttccctgggtttgatccatatatacattctactgtttttggggaggggcagccgggcagggtttcacttcagaatgatttgcttattgctccatgctgctgcgagtcttactactgtttctcttcacctgcactgcacttatatgtacaggaagattgaaacttttgcttcttctgatactcaactagtcaccaaagtactgtagaaaaatgctagatgcacttcacaaaaaacgtttgtagctaaacatgttcactttgctagcatcacaatggttgctgtaaaattaatgtccagtctaaatattttgtacaaactcagaccaaacaaaaagagaaaccatatttgagagtactctgcgtactctaagtagtagtataacatctttccaagtgactgaatttggttacaaataccctctgaactgactgaaatctagatgtctcactcagaaaaagaaagtttatttacatgacaatttagatgtctaattcaaaaaagcaagtttatttacatgacaatacactgaattcaacaactccgctcccagaa

SEQ ID NO: 37870 - DNA, 798 bp, Sorghum bicolor
  Intron number 2 from transcript Sb03g026080.1 (locus Sb03g 026080) derived from phytozome v7.0 (chr-ID chromosome_3; pos 52457357 to 52458154)
ccgtgcaggggcacacccagtgcatctccgaggccgtgagttcatccgcacctctctctctctctctctgagtgccgtgctcaatcctcactgtattatgcaatttactgttcatctctgcaattctagtaaaggatatgtgtctgacggtgcgattagtgcctatgagctgctgttgcattggattgtgggtgtttttatttcgctcccctgtcgctactttaatgtggctttggctactgtttggagtgcataaacctgtacatttttgtcgatattccctctccgtcctgaaatatatgggatccaagtttgtcctaagttgaccaagtttatagagaagtgtattaatatataccacacagaggtaaactatgaaaatatatttcataatatatccagcgatgctaatttgatgtcattcttcttttctataaatctgttcaaatttaacattgtttgacttaggacaaacttagcactgtcacagtcatttcttgcaattgttggtaagctatatctagaagttacagtctgcacgttgatttattcctttttcatattacgattggtagtttcaatagaagttttataaccatgatgaaggcttatgttagaatttgtggaggctctgatttctaactgagcagttcctttttatgtacagattatattataatatatgtaggactcttcggagttagtgcattcagattatgtacagattgttatatgtgcaaattatactattcaatccagtgctcatttctactgtatttgttttcgttcaggagaagt

SEQ ID NO: 37871 - DNA, 924 bp, Sorghum bicolor
  Intron number 1 from transcript Sb01g022330.1 (locus Sb01g 022330) derived from phytozome v7.0 (chr-ID chromosome_1; pos 27568587 to 27569510)
agaccatccccgtgccggagtccggcgacgccaaggttggatacatatacatatatatatatatatatatatatatatatatatatataaatcatctttcttgctgtgtgctgtcgtgagttcatttccagcggagtctctgtttcttggtgagttgttgatctattcaacagggaggggatgtgtcgtcaaaaaaaaaaaaaaacagggaggggatgatttcttgattgattgattaatttcctcggactattaattggactgcgtccggggacggggctgattgattttgatttgagtgccatttttatttgcttgcgaaaagatatagacgatgctcttcttctgttctccgaaacagggcatttgcgtacgagtcttgttattgcagtgagcggtccaacagatgaaggggggaatccgtgttttgcttatactgttagtgaattatttctcttggaagtcaattatatgggctgcccgggagaaaaaaattctcaggcttggtgtaaacgtggaggcctaaagctgtttctagtggtctccactgactgcctccttgcttaattgggcatcacaccatttctaagaaaacagcaacttgctttcgctcgctcatgtccgaaatcaaatactatatagtgcctgcgtgctaatatttttttttcttcaaaaacgtgcgtgctaatattaagaaattgcctcccgaatttccacccatggaaatcgatcagatgtctaattcaagtgggaaaacacaagaaccaggcttgtatcttatatataaggcatgcatatgatgaaattcgaaatttacaactgttttccatgcatcaactacgtacagtacatgagctgatcaaatgaaattttatcatcattctactaggatcttcagcagagcagcagcagcagcagctccac

SEQ ID NO: 37872 - DNA, 728 bp, Sorghum bicolor
  Intron number 1 from transcript Sb01g028690.1 (locus Sb01g 028690) derived from phytozome v7.0 (chr-ID chromosome_1; pos 50088442 to 50089169)
actgtaacggaagtggatcctgagatacgaatagagtaagcttcaaatttacctcgaaattgccagagcaactattagacttccctaattttgggactctttttgcatctgaaattgttgtgtttccaatttgatgcatcctgtcattcatcagtaaccagggctatgattagcactacagagatgagagatgggcaggtgtttccatgcaaccattttgtattctttcacattccatttggtttgatagttcattgttcaattggtttgatgtataagtcttctgcaatgatataattctatcagaactagcatcatactttatgctggacttgtaggacaaggaaatatgagtttgtgttagtaagtccattggtcccattattttatttttgtttctctgaatacaacgtgttctggaaacttgttctttgttggcctattgctacctatgattaacggtgtcactgtagtttgtgcattcattttgcttttacaaattgtagccagtacattgcagaagtaccatgagaacatgttgctgacaatgtgttttttcaatgttgtggaatttttttagtaaattcatgtgattattttgcataatcattgatatataccacctttgtgtctagatgtaacttagctggaatacgacagaacatatttcatgaataattgtataatttgcaggctcattgatatttcagagataaggctgaaaatat

SEQ ID NO: 37873 - DNA, 774 bp, Sorghum bicolor
  Intron number 4 from transcript Sb01g028690.1 (locus Sb01g 028690) derived from phytozome v7.0 (chr-ID chromosome_1; pos 50092551 to 50093324)
acaaagttgaagctgctggacaggttacattgcttgttttcatattgtttgtttcttttcctttttgctttttgatggaaaaataactgtacaaacagattcatgattcccggagtgtaggtctccagtctaatctctattaagaaactcaaaacaaagtagtaatatattgtgagaagagtaagttaaatctagtggatgagatgaagcatccttgtgaaatttcatacatgtcaggagttaggttcatcacagtcaagccagcatatcacccttaagcagtagccaacatcaacaagcttgagactcactccactagatttactagtaaatcctatcttcagtcgaagtttccatacatgcagctgtattacgcacatcacatgaatgcttatttacccagtagcaaataatttgggcacttgttctatttgttggtttttgagcacaaaggaaacatggccactattacggaatggagggaggacactgaaacgtatgcttacatgccttcaaaattatgctaaagacttgaaacgatcaaattatagtttttggttgctacgtgagcagttgtaatcatataatacgtagtgatgtactacagattcaatccagctttgttttaattagacaaaaggttcacccttgctagattgatcaaacacaggatgtttccaaagcaaaaaaaaatagtagatagttgtcacgttagtacagttctagtcagatttttggcatgatgtacacttatttgattactctgttctgcag

SEQ ID NO: 37874 - DNA, 423 bp, Sorghum bicolor
  Intron number 4 from transcript Sb09g006900.1 (locus Sb09g 006900) derived from phytozome v7.0 (chr-ID chromosome_9; pos 11113667 to 11114089)
tttctgctgttgtttgcttgggttacccactaaaggttggtctgcacattgtttttttttttgggttcccttgtacctgaatattaccttctatcagttaaaactcttaatctactgtccagattaggaatggatttgtattctggatttgtatttcctctgtagtttttattaggaaaaaatggtagtttctgtgactttatagttgctgttcacctagtatgttgtagtgttatgcagtgacctttttattacttacatttttgctctaagcacattccttgagatgagactacaaatttctttttgtccctggctgaacaagcatgttttctgctccttcctgtactgataacaatcaaattataattcgaagaatcatttttttccatctcaccatgctttgttcgacctagggagtga

SEQ ID NO: 37875 - DNA, 690 bp, Sorghum bicolor
  Intron number 2 from transcript Sb03g045655.1 (locus Sb03g 045655) derived from phytozome v7.0 (chr-ID chromosome_3; pos 72866949 to 72867638)
ataacattcgttcacagagccattttggtgtagaggttagttctgatcagagtttgcacactcctctatatcatgtactagtactactttctctctgctgtagaaatgaaaatgggggcacagttatactgattagggatatctcatatatgatgccaaacctagagcccagagcttgacacacaatttcatttgccactacatttccccgctttcgtgtttatgcctctattacatagtttgtttcaaaatatgccgtttgagtcctaattccttccgtcaaggatctttgactattaagaaactacctgaaaaaaatataaaaaaaaactattagaaatgaaaaaaagggaaaatgacataaagtacagtgaaattttggtataaataagaagataacttggtcaatatttttgtctgtttcaaccactcatgctcacagcctacagtgtggcatgtggcatcagtacctaatgtcacattgtggacagtgttgcaagtcattggattaattttttttgtataaatgtccagaatttgtcctcttggatatagtttttgttcttttttaacataagaaaggttgaggtgtgatgcttgattgattcgtttgtgtaatgtgccagagaaagtgctgttaattcttcagtttgaaccttgtcattcaggttagacagttacctgtgggag

SEQ ID NO: 37876 - DNA, 980 bp, Sorghum bicolor
  Intron number 3 from transcript Sb04g021020.1 (locus Sb04g 021020) derived from phytozome v7.0 (chr-ID chromosome_4; pos 49233571 to 49234550)
gccaatctgcaaaagctgctgcaaaggccgaaaaggtcagctctcttttcattgcattgttgtggatttggatcgcaaaatatgcaagttggtgtctcactagaaatcttaggtgtagttgtgaacattaggtggatgaaacaagagaatctgatattaaaaacttgtgattggttattgtttatgtatgtttgtaccacgcaatagctgtttagctgttttgacttcaagggaatccagtttggatgagctgagtatttgcacatagagggttagcatttgaagcattatatgagtcgctataacattattactgtcaaaaaggacagagcctcaggaagatctgtatgtaaattttttatgcatattggcttgctataaaagtactattgctgagttgaaacatgcttgcttagatgctttggagcagagctttgttatcttagattagatgagctcctaattcttcctctgagcagaacttggacattgacgtggtctctaatataacactttgattagcaatattataaaagatattatcttaaatagaggtatcattatgaaagtagtattcataataaatctagtaatgccaatctagtcctatatatctaaataaatattttagatattgatagttgaaaataaaaaaagtttgacttaaagacaaacctagatggacgttatttgtgataagaggaagtagctgtttgtgaaagggcatgcctacctttttgaagacagtatgaggggctaccttgcatagcttaaatatgtttatctattagatttcttagtttgactcacttttctcatgacctttgttcttgatggttatactcttgaactagctgctgttaatttcctctttaatgaaataacagacagctctcctgcctgtttgagttaaaaaaattgttattaatttcaaagatatgtccttgtctgatttccgttactccattttgcagtggctt

SEQ ID NO: 37877 - DNA, 590 bp, Sorghum bicolor
  Intron number 1 from transcript Sb07g025960.1 (locus Sb07g 025960) derived from phytozome v7.0 (chr-ID chromosome_7; pos 61099766 to 61100355 reverse strand)
aggttgatttctctgtttggtctgtcaggtaggctggcgtgtggcgtcatgatttatatatccaagtaattttggtttggatttccgcagtttctcttgtcatcgtcttgggctctgtcatttatttgcggatttgtggtaacttggtttggttgtcccgatcgataacaaagctgttcttgtgttcgcccaaaatctgtgcttcttcctttcttgcgcttgtagctgctgcgaagtccctccttcaatcgaactggggttcgccagtctgaatgcgatttttggttcatcttcaattttgtttgtttccagagtgctcacatatgtatgcggtgaacctctactgtcttgatttatgtgtactagcagtaatagtctctgtatttcacgacctattgtttagttgtattgatgcaaccgtagttggctgttcacttactatttttgaggcagcaagtagaagttccacaagctagtttccttttatgaactgaatgaagtaatactagctcatggcattaatgagctcagctgtatggtggtgaagtatgtaatgctctttgattttctttcctttctgcaggacagtg

SEQ ID NO: 37878 - DNA, 961 bp, Sorghum bicolor
  Intron number 1 from transcript Sb05g007100.1 (locus Sb05g 007100) derived from phytozome v7.0 (chr-ID chromosome_5; pos 12463560 to 12464520 reverse strand)
ggcagaactggtcagtaacagaggtaatttacccatatatccatgactgaacttgcatagctagctatccatgaatccatgattgaactttgcatattggagtgaactgtcagaagacactcagagaggctagatgcatgccatgattattctgagcatagctttttttttttgaaccgagggcgatcccccatttccatcaaagaagtaacggaaatacatcatccacacaacatttcagaaaaagcaagctagagaaacctgaagaaagactaaggtagtactaggtgcaactaatcaagagtccaatgcaagatccgtttaacagccaaagtgaaatttgatcaggctaccaccattacagtttttgcagcgaggcgagagagctgataacagaagtataaaaaaaacagaaaacaaaagaagctgcgatgagactgcttaaggaagatcaaattccacatcagcaaaacgtcactgtagagccacttcaggtctcctgatggtcatcacttccttcctccagagtccgtgccatgctttgctccgatctcttgttcagaagcttcctggcgatctgcatcattgtgttgaccccagcaagtagcgtttccttatcttccgctgagtacaaacctgcccaagagcacatgagtgcacaagcatagcaaacaactgaaattgttttttttttttataattttgtcttcacataccgatagtgtggaatttcttcccctcagggagccatttctcacaccaagtccagctctgattcagagactgtggcatgttgtctgcatcaaaacaggtagcaatagctgtgaacgtatattacattttgagcatagctgtgaacgtatattattacatttttagcacaatctggagaacccaataaccagcttctggatttattgcttcaggtttcgaagcaggaggccccaatactccgtcaaac

SEQ ID NO: 37879 - DNA, 791 bp, Sorghum bicolor
  Intron number 1 from transcript Sb03g044530.1 (locus Sb03g 044530) derived from phytozome v7.0 (chr-ID chromosome_3; pos 71881413 to 71882203 reverse strand)
ccagcagcagggccaccagacagagaggatctcaggtgagagatgatggacctctcttttccttgcgtttgttcccatcttgctttctgatcttgataggcacatccttgtcagtttgtagaactcatgctgcttggtctgtctagttgggtgtttgtggtgcatttgctagcagtaataatttggtaaagcaagaattttggcgccgattagtatggcagttgaactgtcaggcctctgaatccttaattcatagaagtttgatcctgattttgtatgctaataaactgaatacaggcgtgtcctttggtgttctattcatacctgtttgatccggttctcacgaaatatagccgaaaaaatcacttttttcacagacatgctttatattttttttggctgactggctgatgcaacgtggaaaatgtagaatgcagtatgatgcttatttcttacagtatgttctttcatcaaatttacctctttcagtggtcttttgttggtagttcctcaagcttggacaaatacaatcgtactcagtcactgagcaataactggctcatgatgacagttatgatttattcagttttgcataggtgcaaaattcacttttacactatatggcttacctagcatactttcctttcgatcattgtacttttatgatcctgtgatccctagcatggttctaggaccaagtatattcttttccctacctttctgcaaagccgtaatgctttggccaataaaatgcagggagtgctggtgacgtgttagaagataaccctgtt

SEQ ID NO: 37880 - DNA, 826 bp, Sorghum bicolor
  Intron number 3 from transcript Sb01g007690.1 (locus Sb01g 007690) derived from phytozome v7.0 (chr-ID chromosome_1; pos 6602125 to 6602950 reverse strand)
acaccatcagggtaagtgttttctcactcttatttttttgttcgcgtgtgacattgttttgcacgaaggctttaagggcttgttgctagttttagcgggttagtgattactatcctgattctaattggaaatgaagtgtcttcccttttcgtacataatgttatgatttgttattcaggcatcaattgaaatttctttagtttcttttgtgctgggcatcttttattattgagaaattattcttaccttttgaattcttattgctagaataggcttatatttgttggtggagattatgctgaaatgtgcatgattctggatgatgaagaaaataaatcggattcccattgattttacaatatgattttaacaaccagctacttctgacaaaatcatgctatatcaggatatactttgcctctttggtccagcaatctaatccttttgctgatgtttttgtcatcgtggttgattatttgatacatgcatttgttatgatgatacaccattttcagatcattatgtatggttctgtatcatcttaactcctttaaattgattcattcatttatttatattgtgatgtgcctatgatgtgatcaaaatatttgctactcttgatgggtgttcccatttgatgatcttaaccaccaagatctctgaggcccatcacattgcaattagaaagactcagttcatatgagcacttaagagtggcagtaggagttgctgatgtagtgtgttttattctactgtgccctgtatctaaccccccttgtttgctctgtcaggagcttgaggagaagaggaaggagaaggccaaggt

SEQ ID NO: 37881 - DNA, 672 bp, Sorghum bicolor
  Intron number 2 from transcript Sb07g025390.1 (locus Sb07g 025390) derived from phytozome v7.0 (chr-ID chromosome_7; pos 60482600 to 60483271 reverse strand)
tgcgttccacatcgccgccaagcagggccatcttggtaaattgctcgtcttgttttgcttatcgtcagagtcggaaaaaaaaaactacagtataattttgcggtctgctttgtcatctgttcagccttttttattttaattttgccttatagtcagtgaattgatgactaggggtttatggaatgggattagaatttggtctgttgagactgccttgttgactgttgacctttttatacatgtgattgtctagtattaggaacgtgattatgctgatctggttgactcaaaaaaatgcatgtgttcatttgaagaatgatttattcaacagttttagttggatacacagcattaataaggcagtgaagggattcttaccttcactacctttgtttaccatattgggtgagaaatactgtcaatccttttttgatttttccactgtgtctgttctccaataagaatttataatgtgatctatactgagttgctactattgcttttgtgcatgttgatgatgtgaatattggttagctgatcttatcccactctgttctttgtcatgaaacccatgttagggaataaggagtgaattgcaatcgttccaacgcttttaaggctaataatagccttctcccatttcttggttatttcgcagaggttctgaaggag

SEQ ID NO: 37882 - DNA, 866 bp, Sorghum bicolor
  Intron number 1 from transcript Sb01g017310.1 (locus Sb01g 017310) derived from phytozome v7.0 (chr-ID chromosome_1; pos 17815705 to 17816570 reverse strand)
aaccagaccctcgatcacttcaacccgacggtatctactgcaaatcgacgtgttctctctgaatttatgttgactcgagggtcgctctgtcgttcgttgggactgctgggaaacttgggattatatagcttgggtcccctgtctgggactctaggcgactaggccggtagcagagcacgtacaaatacaagctctggtacgagaacattccaaattaatgaagcttgagagatttgctgctggcacatcacggtgtacagctttgaattactctgtttattttctctgttaaatagaagatgccaaaattcttcctagttttcctgaatcatgcttggatgacttcgatgacaccattttacttgctcacgtgcacgtcatgtcacctctacaatgaagacaaaccaatggctcttcctgtatgtgatgtctagcagcgcaatgtagtacaatcctcaagtgttggatcagatcatcagatacccaaccttattaattattacctaattatttcttttctaaagcatgacgtggggtccctgatctgtgaaatttttgaatgaggtggacttgctacacagatagactttttagcctatccttcttacctattttgtattttttacctattttgtgtttctagtctgctgcaaagcatggggttgttttgtaattccctgcttcttagctaattcaatttcaagtcacaatgttgtggagctttgattgtaacctgctattgttatctcagtggtattatactccagaagaagagacagacgtagttcattgtatccatggtatggacgaggaatttatatgctttttatatatgcaggaccatcggcaattcaaacagcgttact

SEQ ID NO: 37883 - DNA, 1033 bp, Sorghum bicolor
  Intron number 1 from transcript Sb01g032680.1 (locus Sb01g 032680) derived from phytozome v7.0 (chr-ID chromosome_1; pos 55608761 to 55609793 reverse strand)
tggacgtcccgctcgccgacgacctcgattccctcgtacgcacgcacgcacgctccctggttccttctacctttgcctgcccgctgatttcttctgtctgatttattacatactactactgcgtaaatgtgtgccagcaactatttttgtgacgggtttaatctcctattggctcgggtttgcgttaaaatgagggaggagatcgttcctttcgtgctccctcagggattacccaacagatatgggtgcgaaggttgggtgaaactgaaactgaacagttggtttagcctgcaactgcaagtagtcctgccaagttcaggtagtttcagaacaattggttttactagtgagtttgcttattaggctatccatgagaaacacaggcaaaacgatatactccaatccgttactcctctgttcaagaatgttgctattttgccaactttatcttcagaataacaggagagattcagtcagggtttcaaaaatctctctgtgaaccagactgttaccaattccccctgtgggtagtggaagcacaaatgttgttatgcgagcaatactgaggctaacatattcagattcgtatttggtctgaattaattcaacaagcctgcctgcagagtaccccttactgagtggcagtcaggtgtccagatttaacatcaagatcacattgtttgaacttgtttagtagtcaaccttggcatgccacaaattttagggtccattctataaagctgcaggtgctttagcaggttttcctcctgggtgtgacaattttttgtatagatcaggcatgtggattagtctttgtatgttttatatgtatcttagaaataaaaaaaaagtcattgctttatataatattctgttaccaagtccactagtccagtacctcatttcaaaattgttaaaatggttgattacctgattcactattgtcttgtctagcataaatcatgaaaggtatagttcagtgctgtatttctgtgtgtggatacttatgcttgtcctacaatatgaccaggag

SEQ ID NO: 37884 - DNA, 425 bp, Sorghum bicolor
  Intron number 1 from transcript Sb03g026270.1 (locus Sb03g 026270) derived from phytozome v7.0 (chr-ID chromosome_3; pos 52876623 to 52877047 reverse strand)
aggcggcgcgacttggtgcctgcatcgagcccaaggtgatacaaaacttgtgctctggcgatctatcttcttgtaggaatcactgaaccactacgccgatttatctgattccatgtgtaggaaaaagtcgatggagtttttgtttgtgttttggaatggtttagacagatgaattcaagttcaaatcattgcctataggatgtttgttgtaatgcccaatagggatggcaccctgttgttttgagaggatacctaattagagacgaaactgtgcgtgtagttcctgcaatcagagttccttatatatatgctggcaaaccttatcttgatgttgcctgccctgcatgtgtgatgtatttgttagttggtgacagtgtagatagctgatgtctgtttggttaattcttcaacgatttcttgtagac

SEQ ID NO: 37885 - DNA, 1061 bp, Sorghum bicolor
  Intron number 1 from transcript Sb01g009680.1 (locus Sb01g 009680) derived from phytozome v7.0 (chr-ID chromosome_1; pos 8456067 to 8457127 reverse strand)
gctgctccctgttctcggggttccagcggatcctggtattgagcctctctcgatctctgatatcctcttcgtgttcttgttcttgttcgggtggattgctagaaagtgtggcggatttcgttgcgtcctgtcttttgtggtgtgatacaaatgctgctttcttgttcgccacaagcccctccttttctgttctttgtttatactagtgctttatgtatgccgataccgttagaacgaaatcatgattgatcttttgacggggaaggcaggcagagatctcgttccccgcctttgggatgtgtctatttcttatttctgccacgtcctgtcagatccacagtgaacttgttgacactttgggtctgatgttaagaatgacaaagtcttcccttgtaacaaaccggtcaaagccaaccttttcatgaattggctgtagttatcagatacctactcagatacaatcacagtgaacttgcactgtagcttcccgcaaacagaaaaattgcaaacgagaatcaaggagtggggcataccagatgtaaacttgtttttgcctattctttgctcctttccatattcagtttgtttggtccaggtctagagactacttggcttttggatgtttttgtcctgtgttgttaggatgttaagtacctttcaagtcatgctatggcccatgccattcttcttagatagaaacaatcaaacacgttagtgcatacatatttttgtgtatgcagaaatggggccatcctggatgagctctattattctctcttaccgaaccccctcccccctcctctgaaaagaaaatgcataattcatgggctgtgcagtatgtatgtattctgaaagcaaggtattacttgtgtatcaattaataatatatttagtactctcttcttccttatatttgtgtatgaacaagtaagtgtcttgcttttcaccatgccgttgacaccttttatacttcgtaagagttggtgtgtggctgtccactactgttaactataaatacataacccattctagatctgagcatcattcagagtggaagaaat

SEQ ID NO: 37886 - DNA, 735 bp, Sorghum bicolor
  Intron number 2 from transcript Sb03g025700.1 (locus Sb03g 025700) derived from phytozome v7.0 (chr-ID chromosome_3; pos 51661039 to 51661773)
acgtgcagaccaacgagcaggtcgcgattaagctggtgagttcactgttcatacaaagtgataatccgttcaatgtttgcgttctacatttgttaagtggagtgatccgttttgatgtttgcggtctacatttgttaagtgggtgatgataatttttttttcttcttctaataatgtgcatattttcgatagtgtagttactctatagctgtttggatattttgtctctagaaaatatcaactaagtttagcgtggaattgtaatctgttgaattctaatggtagattagtgatcacggatgtttatttgtggtttcatatgtttgttttgtgagtcgtagttctgcctataactcactttcatagcaaccttggactagtagttaatgaactgcgctcatgttggttccatagagttaaaacttcataatagattttgtgtaattactgaactacagctgaacactgagcattaatatagtccacttccttatttctttaacaaaaagagagaaaaaaagagaaagaaacagcaggttttggctcctatctgaaaatgattaatttgttttcttctgttctaaatgtaacccatttcatttttggtgttcactgaaaatgatttatttgcataggaattgttaggatgtctcatcttgatgatctctttaaacaactgcagggcttggactgtgcttactgacagacctctctctttgtgttgtccaggaaaat

SEQ ID NO: 37887 - DNA, 529 bp, Sorghum bicolor
  Intron number 3 from transcript Sb09g004760.1 (locus Sb09g 004760) derived from phytozome v7.0 (chr-ID chromosome_9; pos 5786880 to 5787408 reverse strand)
gcatttttctatacctccaagagtggcagccccaggttaattttgatgtctgttcttctagtaaatttcgtgattgatattatattcaagtattttgttgctataaactgtactgcctccggcccaaaatatagctacttctcggtttgtctttaagtcaaactattttaactttgacaagtttatatataaaaaaataattaacatctaggatatgacataaggtcattctgaaaaattatttgatagttgatctaatagcactagtttagtgtcctacatgttgatattttctactataatatcacatagttttgactcaaagcaaacctagaagtggttatattttggggactgagggagtaactgttttatagtttttatatattatagtaccatcagttgcagcatagcaaatttcaactgcatttttgtgctgttcaaaatgaaatgattgattgccaagctcccttcttttttcaaattttgttgttattcaagaggttagctttctgttctgcagggaccg

SEQ ID NO: 37888 - DNA, 624 bp, Sorghum bicolor
  Intron number 2 from transcript Sb01g050020.1 (locus Sb01g 050020) derived from phytozome v7.0 (chr-ID chromosome_1; pos 72985694 to 72986317 reverse strand)
gctcggactcagaaaaataaagcaacaggttttgctgtcttcactgcctgtttcttactgctatgcaattcatgttcatcatctcatgtttcctttcgaatgaaactgtgctgcgatgttttcagaggagcacatacctaatcatgaattggctttcagcaggtcttgtatctagaatacctgaccgttttcctgtttagtgccattgatgttatggccacaaactgtatcatttcatttgaccacctgctagtgatccataaccaattgtaagatgtagacataatttgaactagtgaattaaacagcatcccttttcttttgtagtatgaatattttactcaaatcagttaagttttgatgaacaaccagtcagatactatcctctatatgcaaacaggtgtggcattctctgccctgacaaagccatggatcttaatcaaacaattgcttttttttatataaaaaaagaggaaactcatcataaattcctgtacttgacctatgagtaccttttggttgctacattccccccctaattttgcagcatgttgtatctgataatatttttctattgtctgtcattcagaatatcatcttggacaactgaaggcaaaactagca

SEQ ID NO: 37889 - DNA, 485 bp, Sorghum bicolor
  Intron number 2 from transcript Sb07g004480.1 (locus Sb07g 004480) derived from phytozome v7.0 (chr-ID chromosome_7; pos 5719142 to 5719626 reverse strand)
tttcatcaggtaatcaacacatttaggcccatttgaattgtgggaatttttctgtttcccgcgcttttcctgtgagcacaattaattgattcctgtgaaattcctatacaattcctatgaaattcctgcatccaaaggggcctttattgtttatcaagctattttgatatccatgcttcatctgatgactacagtaaccttttttgggtaactagtatgtgataaacttggatttgttatcaacatgtgtatatatatatatatggatacatacaccaacaggacagcagcaataatgcactgatataaaatcaaccatgtactttaaactgctcaagataagataatatatgacatatgcaagcaaacagaaattatatatcattataaaatattcccaggctgatagaaactttggtattttgcatttaatccatatacttctggagataaaacaacatttcttcatttgattgtgtttgcag

SEQ ID NO: 37890 - DNA, 822 bp, Sorghum bicolor
  Intron number 1 from transcript Sb04g036640.1 (locus Sb04g 036640) derived from phytozome v7.0 (chr-ID chromosome_4; pos 66461468 to 66462289 reverse strand)
ggatctgcacacccacgagccgtgggaactccctggtacgtagttattggttcattccttgtcagttaattgacttgtttagtgcctctctccctctccctctctagcaagcaagctgctgccttctactagatgcctgctgggctggctaattaactcaattccgtgttatggaatgagtaattaggcacgcaacctctgtttattggttcagccttattaatccttgtttgttttgttcttgtttgtttattagttattgtaagaagatgctgctcatgcatgatcatatcaattcttcacgcatatttatgatcgtctctgagacgtagctagcagctagcttacgttaatctcattccaacagtgtttcttacttctaatacaagtcagcttgatcctagctatagcttcgacatcgataatccagaagggggctaatactactaatattggatccagtccttggatccacgtgtgcaattcgaggctttttttagggaaattcgaggctaaattaacaccgaatgctaaagattatcatgtgattgcttcttagctttgaggaaaagagaagctagcaaaagaaactgcggctgctgcttctaattcctatatatcagcaattttccctttcaatatacttccccctctctaatttggtttgcatctaatcaaaactacaaaattcccagccctgtttaagctatatgtcacaactgataaattgctctatatatttgaagttgtttttactgactgatgaatccatgcaattatattgcagacgttgcgaagctgagcacgaacgagtggtacttc

SEQ ID NO: 37891 - DNA, 729 bp, Sorghum bicolor
  Intron number 3 from transcript Sb01g038740.1 (locus Sb01g 038740) derived from phytozome v7.0 (chr-ID chromosome_1; pos 62228867 to 62229595 reverse strand)
ctgtgccctgtgagcactttgacactgcatttcaggtagctataagggtgttgcctgttgagcacatcctagttactttacttgactcatgttgctattttggaaggatatcaaattgcaaatggttaaatgttttgttttatgaaatctattgagaagtaccaacattgaattggactgtctccctaacacactaatttgtagaaacaatcaatcactagcacataatatgcataaaatgtgttctgttaggaaaaacaggttgtacccagcgaatgctgttgataccttttttttttgggaggagggattgtttatacggatttaatagaacttgcagaaatgccaaaatgtcacgtgcgtgctcttgtgtaactgttctttgagaattgagatagatttgggtaatttacttgccatgtcaatttcctggaataatttttgactataggaagcagctcgtttcggctatcgcctagctgtaggagtgtagggtaatatttttttcttgaaacacaggtgagctttgtatcattgcattaatagaagagaacagtaggttatgtgacagattcttttttctcttctaaaactatttttcagagaggtttatgttttttgtcttaaaaacacagttctctagttagtgaatcggtgtgacatttttttattatctgatgttctcctttgacaggctgttcaaaactgggtagctgatagggcagtact

SEQ ID NO: 37892 - DNA, 599 bp, Sorghum bicolor
  Intron number 2 from transcript Sb03g039740.1 (locus Sb03g 039740) derived from phytozome v7.0 (chr-ID chromosome_3; pos 67419276 to 67419874)
attctgcatcaggtaaagttactcgttattaagctgatacagcatgagcattctagagaggtaatgaacattgtgataccatatcactgtacgtactacttgtattggcatgagcaccaattttctttgtatagtatgttatcagtgtccttaaaagtaatgcggggctcaatatgagtatatgtggtttacgtatttatagttgctttggtgtttttttttaacccaattccactgctgatatcatgtcagcatccatcatcagtagcttttgattgttgctgtgccaggagttagcttagaaacactttagccattcaactattactttctttatttagtaatcactgcttttcttatatataagatctatcatcaacttggagaaatcattgtgaattatcatgtgacttcctctcttcattttttttccataaaaaaaaatgcaaaacagatatctaggaattttgctttgtgtccaagtacatatttaaacatcaaccaagtgctcttttttatgtgtgactgtggcttgaagaaataaaacttactcattctctgcagatcgaagctttgaaagaagttggggtcacagaggt

SEQ ID NO: 37893 - DNA, 809 bp, Sorghum bicolor
  Intron number 1 from transcript Sb10g025080.1 (locus Sb10g 025080) derived from phytozome v7.0 (chr-ID chromosome_10; pos 54288795 to 54289603 reverse strand)
cgctttcgtctcctcgggcatccccgacctcgacagtaagcagcttcttgctcaaaccctcttcttttttttaaaaaaaaaattaactaaaaaataataataaaatctcatgtatcgattgatgttaagtgaggaaactatcagtatttcggtatcggccatgtttgggcatatatgtttgatctgaccgttttgagttttgacagaaacgatagaattggaaattggagcgtttcagtgacctgtattcggagaagattttatttgcttacatctactatggccttgtttagttccaaaatttttggcaaaacgtgaatagtaccattttcgtttgtatttgacaaatattgtccaattatggcctaactaggctcaaaagattcgtctcgtcaattagtttttattttcgtctatatttaatacttcatgcatacctctaaagattcgatgtgacggggaatctgaaaaattttgcaaaattttctgggaactaaacaaggcctatgtgttatcgtttgccttgcctctaggttcggctatgtgcaccttgtgatacagatgctgagataattatattccgttatctaaaagatctgggatgtgtagactgtagaagtggtgtacagccatgaagtaaagtaattagcctggttggagtatgcttagaaattagatatgggtgaaaaagaaaaggaaagcatgcttttattggaagaaaaatgatgtgcatcggtagttactgaatcactattatttggtgccctctggcagggattttgggtggtggattccttctcggctcagtt

SEQ ID NO: 37894 - DNA, 295 bp, Sorghum bicolor
  Intron number 1 from transcript Sb03g033600.1 (locus Sb03g 033600) derived from phytozome v7.0 (chr-ID chromosome_3; pos 61855518 to 61855812)
gaatcgctgaagattactacgctgttcttggcgttgtaggtgcttcatcttgaaagaattcttttttctttttgtagtttaccttttttctgataaacccgttcttttgaattgtctagttttgtagatgtgcaaaataagcggtgctttttcttattattactttgaaaatatatcttcgtggcagcaattttgaaatggttaagcagaagaaacatattatgcagtggagctgtttgttgcaaccctgaagctgctgtagaacacttagaatttaatcctcgtatgtttgcag

SEQ ID NO: 37895 - DNA, 640 bp, Sorghum bicolor
  Intron number 2 from transcript Sb01g033960.1 (locus Sb01g 033960) derived from phytozome v7.0 (chr-ID chromosome_1; pos 57386855 to 57387494 reverse strand)
cggattcaaggtgacgctcttcactctctttcggctgcagatacgctggagcgcttttgttccttaattaaatagccttatagacacgagggatctgacaattggattagttttttccttacagtcttataccattttaaccttttggagagtaataactaatatagtgtgaggttttggtacaatttgtaataactgttccatgtgattacttgttggctggaaaatgatagctaaaagaaagtttctgttccatgagatatctgtacaattttgacaaccggattagttgtttatttacatgctaatagaaagtttctgttcttttataattgtatgttagattattgtccttaatattggctgtgaccatgactatctgaaaacgaacttcgatatatctttatggcaaatcttcaacactgttatatgcatactcatatgaatgcgtggaactcaagcgtgattcatcatccacacaagattcaaaaagtttaggttaattcatttgcatatgtaggattctaattatcttgactttggtatcttttgcgaaagcaagtcaatgtactgcatatcatataccatgaggttcttgctgttgatgccttgcctaactttattcttctaaaggagagca

SEQ ID NO: 37896 - DNA, 848 bp, Sorghum bicolor
  Intron number 1 from transcript Sb04g005650.1 (locus Sb04g 005650) derived from phytozome v7.0 (chr-ID chromosome_4; pos 5542614 to 5543461)
attcgacgggtgtccagggcggtgcgtaccgctaggtacatttttctcttcctctgaatttctggtcagcaagatctagggtttgagaatgtggaccgtctgaaatttgtgcaaaatttagaaccctgattgattgatatgctttttttattttgtacaattgagaaaatgaatcgtaccagctgttcttatttctaatgcttattattctccagtagataggtgtgttcagcacagttatggtcaaaactattagatagacaaaccagctacatatttgcaaattatatttgatagtaattaaacttaaaattttagtagtgttagcaatgctgtgaatttgggagagtggatactggacagtctatgtttggtttaggatatgtcaacatcattagaaggggtaatttggaatataatgttgatattggacagtgcaagattttcactgaaatgcttgctattcttctcatatttgtccactcttgcgtcaaaatttagtgacaatatttttctactgtaacatgtagtgaccgataatgtgatacaccatctataaaatatatactctgataggatcgattacaaacagtagcagattatcctgtaacgaagtagcagattatctattttgttcccaggactatgtagtgtttttacttttttgtttttcccggattatctattttccatagaaagagctattctgcatgttcatttttttatttttcaacttttcatagtagacaaatagagtttgcagcgagtgtgtcttcacccttgcttatgctgactgctgaccgtaaacaacagcttgcagtggtggtctggtgggtcttgcggtggtg

SEQ ID NO: 37897 - DNA, 905 bp, Sorghum bicolor
  Intron number 2 from transcript Sb01g013920.1 (locus Sb01g 013920) derived from phytozome v7.0 (chr-ID chromosome_1; pos 13059155 to 13060059 reverse strand)
gaagaaagtaaggatttgctccatcaaactcaactctttatgtttccatttttacaagccttggtttcttaagacaggcacgaataagatcagctcctttaggattggcaggaaattggtttgttttctcactagtccgaaggtattggatctaatcacctatgtccaaataaaccaatccaattttgacagttgtggttggtatcagttcactgagtcaataaaccaatcagtcatttcagttagtgacatcatgtattgagtcagcacagattaaaaaagtaaaagacaaacatttagttcttctcttatgtctagttcccacctctctctttatcttccctcttctctacctgtaaaataataaaacctgagttggatgcctcataagcggccagctttgcataaacactttgataccccccagcaccactaaacagtgttctttaccttcacaaagttgagaggatattaaataactggtttgatgattcttagtagagggtctagtttgtatgattatatcctattttttacaatgattattttctatgtttaattttctcctccctccatcccaaattataagtcattccaagaatcttggagagtcaaaacatctcaagtttgactaaatttatatgataaaataataacatttatgataccaattaagtatcattaggtttttcattgattatattttcatagtatatccacttaatctcataaatctttataattcgttctctaattttggtcaaacttgaaatgctttgactctccaagatttttggaatgccttataatttgggatggagggagtatatgccaagcatacatgaaacaaaccttgtatttttttttcaggactgttctattgctttcaactctgcttactagtg

SEQ ID NO: 37898 - DNA, 714 bp, Sorghum bicolor
  Intron number 4 from transcript Sb05g027680.1 (locus Sb05g 027680) derived from phytozome v7.0 (chr-ID chromosome_5; pos 62108267 to 62108980 reverse strand)
aagacaacaggtgcaggatcaacctacacacaattgcttaacctatgccttctttgctctgagatgttatgcagaataaactactttcaatgtaaatgctgagaaaaatgcatctgttgatgctatgaattaactgatagttcctacatttgtctgttagctgcacatatctgtgcactctgttaagttgttagtgtgtcgtttagaaagcttcactacatatgaaaaacataatctcctcctgggttcaagcaaagaaataaaaaataagtgctaatagagtctcatgatgagaggtatcaagttcaatgttagcgataacaatctagtgttttctctggtcctctgacccttaccacgaaccagtccataccaatgcgaacgtttccattgtgatcctaaattttagctgtataaaatttttctacttactgccatctgttgaagttgtttcttcatttcaaggaatagcttcacttttatagactacggtccataccttttggtttaatcaaataaagtccccagtggacatgtggtctagttcatcttgaatgtctattttgcagttctgttactatatcctattacactattgcagtactattatttactttgttcataagtcaatggtattttttttactacattgtccactcccagttaccgttttcatcttgatcaaaactagggtttttcagttggaatttggga

SEQ ID NO: 37899 - DNA, 619 bp, Sorghum bicolor
  Intron number 1 from transcript Sb07g003570.1 (locus Sb07g 003570) derived from phytozome v7.0 (chr-ID chromosome_7; pos 4340930 to 4341548 reverse strand)
gaaggtgagggagacgaaggtaaccacattaggctcagagtgttgaatcaagccgacctatgaaaaaacaaagtctcccttcgtttctctagggcctggcccaagagccttaaatcccatgtggaacagactccaaggctgggtcaagcacaccaaacaagggagttgcagcctaggagcgtagccgggccgctgggccaccatacaaacacgccctaagatgcattactacttttagtcaagtacaattaaggtaggggtgtactaagttgatagaactatatatatgcatcacaacctagtagtttttggttgttgttaccttgctgtattggggactgaaaaacactaatgatgatttgagcttgttttctttaatcaaaggaagatactacaagaatataagtgtatgtgctttccagtttcaattatattcagcaagaataacttatttatgcttcactatcatcattttgtgtagaaaggtaatatacattgcttcctactgactgggtagctacagggaaaaacatatatgccgttttgatacattgattttcagttgtgaatggtgttgggtgcaggaagaccttcgtttcccacaaccctgggtccaaac

SEQ ID NO: 37900 - DNA, 731 bp, Sorghum bicolor
  Intron number 1 from transcript Sb02g027620.1 (locus Sb02g 027620) derived from phytozome v7.0 (chr-ID chromosome_2; pos 62907464 to 62908194 reverse strand)
ccgccgtggccctcttcaccaagctcctcgtattgctccgtgtcctaggccttgtagctgtagctggtttctcctagggttgttttgtgttacaattgcaagtactgtgtatttccttgaatacctgaacattatgcgaatcttttgttcaatgctatgaaaggttatggtgcgaagtgtagaatcttcatattgttagatctgggcatgtagacatgtaacctgtacgttttgaaggtagttgtagttgtgacaagtgtgtctatttgcttcatataggtgtatacaatgttttcttcatgggcctcggtagatttgtgttatcctgagtatgagtttgtactattaaatctgtttgatattacattcaatcagcatttcttccctttcatacggatcaattctacaattttcattcagtttcacattttttactgtaagctgcctaatgtttcttgacaatttgtgtacacccttcttggttaattaaatctcaaggttctagaccattgttttaaggaagggttaatcttgaactaatttttcgtgtcaatttgtgtacacccttctggttaactgaatcatcaagattctagattattgttttaaggcagggttaatattgagcttctggttaactaaattgaatagtgttcttttcatttttcaatgttttttaggatatcaaaatcatgttatgaatcttattttccctttctgtggaaaggaac

SEQ ID NO: 37901 - DNA, 595 bp, Sorghum bicolor
  Intron number 2 from transcript Sb03g010670.1 (locus Sb03g 010670) derived from phytozome v7.0 (chr-ID chromosome_3; pos 11651561 to 11652155)
ccctctccatctggtaagggcactcacaatgcagactctaccatagagtctaaagttatttattaattatctcaaacaatgtggacttagagtctaaataagatttagagttttattttttctacttttttcttcaataaatatgccgtcacatcagcaaaataccataaataatatataattaattaccttgaactctgtgataaagtcttgcattgtgagtaccctaaaagctttctccgtatgaatgaggttgtttgagcactgcgaatgccaagtatacacgagacagaatgatatactacaccaatgaccatacagcttactaaggtcttgtttagtttaccctaaaaattaaaaacttttcaagattcttcgtcacatcgaatcttgcaacacatgcatagagcattaaatatagataaaaacaaaactaattacacaatttgtctgtaaatcgcgagacaaatcttgtaaacctagttactccataattggataatgtttgtcaaataaaaataaaaatactacagtgtcaaaatctaaaaaaatttggatctaaacaaagcctaattcccttcgatatatgtgcagc

SEQ ID NO: 37902 - DNA, 770 bp, Sorghum bicolor
  Intron number 2 from transcript Sb06g024230.1 (locus Sb06g 024230) derived from phytozome v7.0 (chr-ID chromosome_6; pos 53368855 to 53369624 reverse strand)
cgcgcctctccttcgatttgagtcccattcaggtgaaagctcgctctcgtcacgttcttctatcgcctatatctcttctgacacagggcgttagcaacatctctgtttttcgctgtggcatgtgatcattctgaattatgaatgatgaatcctcctctgagtcttttaaatatgaattgccaatattgttatgggaacatacagggggggggggactgtttgagtttgataggagcgattgtggaggccgcactttcttgaatgtaatgcatgtttagtatttgatgattcaccacagcagcaggaaaactgtattatgtaactgcaatggcttcggcagggatggtcttttgtgattgctttgtgtgttctccaattcataggacgatgaaaaaaatcttgctctcgttttgtttgacaatgtagtagcctatgtgttgatgtagaggttagaggcatttcctttcttcctcgtggattgatttctgagaaaagaaattgagatattataaatcgtgtaaggagcaatgatgatgcaaatgaattttcattccttgtgcttattttgtgataatggaaacatgaagtagtgtcatgtcatttcattgtagtattgatggctttgacacaaggtacctttcttaacattgtgtgcctttgcctccattatgtattaaaattcatggggcaatggaagttcatacataaacaaccatgtgttattctctgttccaggaagagtgctttcataggttgcagaaccggataga

SEQ ID NO: 37903 - DNA, 803 bp, Sorghum bicolor
  Intron number 2 from transcript Sb06g003090.1 (locus Sb06g 003090) derived from phytozome v7.0 (chr-ID chromosome_6; pos 6354016 to 6354818)
ccaagcgaggcagcttcggaagtggacatttcacagtaagcggctatagtattttgcgtattatatgtttgttttggaaaaagaaaatattctgcagcttatttatactagtttccctgatagtgaaatgctgtcttaatgtcctagtgctgtatactcaatatttcgtagtaaatgctgcaaaatatgtgatataaatgttgcaacacagccaggggcctgcttctgtacctgctattgagcatgatgaatacttcgctcacttatatgatgtggttatatctcatgtagaagaattagttgcagtattgctggacaatggttacttattatgaaatcatgtctgctacaaattttctggcttctgttgctgtaaatgcctgttttttttttggaaaagattaaatgtttgacctaaattggacatatactccctccgtccctgaatatctgtcgttctcgcttcccgagaaatgacttttattaattttatataaaaacatattaatattttttatacaattgacatcattagataggtctttaatctagttttttaataaatttatttggagatataaatgttgtacgcatttgctacaaatctagtcaaacttgtggcaggaaacccagaaacgacacttaaaaaggggcggagggagtatgatagacgcaaagctcattttgaacttttttgatttgtgacaaccatgcatattgttagtgttgtgaacaaaatggtaatcctttccttttgtatttttccagtggatctgaggatcctaggggtccaccagattcct

SEQ ID NO: 37904 - DNA, 676 bp, Sorghum bicolor
  Intron number 2 from transcript Sb09g005460.1 (locus Sb09g 005460) derived from phytozome v7.0 (chr-ID chromosome_9; pos 7047686 to 7048361)
caaccagcccgcccgcaagcagaggcgccgcatcggtgagctcttcgctccctcccctctttcagccttccaacacttgaattcaaagacgtatttttgtactgataaatagcctgtcttctcctgcacattgcaatagtctctttattgtcgtcgctaattaatctgtgcaagtatcagtttgttgcagtttggtacatttgggcttgtattgggttggtatccttattgacccacttgaaatccatgattgtgtagtttgtcatgctgaaaactgtaacacgagttagcagttccttgttcctaccacaacacctttaccttgtaaggatggatgttagctacttatctgtgttcatcctcattatgcttgtgtcatgctacttcattagtttgttattacttagacacttagtgcatagtaccaatcatgatgccgcgagatactaattagcctctgcatgtatctgatttgctatactactgttgtgctatcaatgaataaatcaaaataaaagttcccttcctttactcaataattgcactggtcttgcctctttactgaccactccccctcctctctttctttctcatgcttactcataactttctaattcgatcctgctatgttctttatgcagctcgtcaaaagaaggctgtgaagatattcccacgc

SEQ ID NO: 37905 - DNA, 281 bp, Sorghum bicolor
  Intron number 4 from transcript Sb10g005140.1 (locus Sb10g 005140) derived from phytozome v7.0 (chr-ID chromosome_10; pos 4618361 to 4618641)
ccaagaggtttgctgctcttgttttcccttgacaacaccaagtagtgtaagagacttgcttgtgttacaaaactttaccaatttgagagtggttgatgaagaaacaggcagaattatttgatttaaaatgctggataaatatggagtagttttgtgtaaacaaggattttctccaactcataactataactctacaaaacagtgggggcctcccctgctgtatttcctctaaaaaagataactacaactctattcttctatttcactgtaaattgcaggcg

SEQ ID NO: 37906 - DNA, 850 bp, Sorghum bicolor
  Intron number 1 from transcript Sb04g009830.1 (locus Sb04g 009830) derived from phytozome v7.0 (chr-ID chromosome_4; pos 12537909 to 12538758 reverse strand)
tccaagctgcatctgcaggtaagtttcatcgtcagatatggaacagttgatagagtaagtgattacttgattatcagattgcacacttggtattttggaagttcggtcttttccacaacaaatcatttcaaggatcataaatctgttgtgttccatttaaatggttatgttttgttaccacataggttacacagaataagcagagaagtccatatgtgaagaggcaaaaatgttgttttacttccaattctataactccctgtgtggcaacaataggactaattaaaaactattcaatatagactcttacctgaaatttagcatgcacctagaaggaatctggagcagttttgatgcagaaaacatgcaatgtgtggtttttttctgaaatagtatagctagaaggcagtggcaatcttgtcctgaaaaccacttatgcaacagaaaaacatgatatgtttacatctggtggcaccaaatttttttaatccctatagttccttaactgcaagtactgcgtcagtgcggagaaaacaaagctatgcatgtagctgcattttataattgaactgaatttaacagtagctttattgatatgatagccagtgcaaacttacagggacaacctttctgatgttccattgccataagttacaactaaaccatgtagtgaatgaattttaataatccatccatatcttgaaaatactaatttaataagttatatgtcagtgattctgttctggacttctggtataaagcatatgaataataagaaatttggttcctcaaaaagttgaagctgtctctatatgcaattctacagttcttgaattgctggagaactaca

SEQ ID NO: 37907 - DNA, 959 bp, Sorghum bicolor
  Intron number 2 from transcript Sb01g041310.1 (locus Sb01g 041310) derived from phytozome v7.0 (chr-ID chromosome_1; pos 64620125 to 64621083 reverse strand)
gctggtacgattactctgcctacaccgacgtaagtctccactctgaagccttctctcttcccgaattggcaagctagctttatctgcacgttgtcatgcttgagtaacaactaacaacaatgcaagctcgttaattattaaccgtttttactatatatctgtggcgtgtccgcctgtcgcttgtggttcttgcatctttatcaaagaccattttcacctgggtgaccaccaataaccaatgccgcacagaggatcgaataggagccggggaagatgacgaagctcaaagccattgttggaccacaaaatgcttcctccccacaaggccacaatgcacatgatcctccctcattccctcagtctctccggccggttactccagttttgttcccatgcgtgcgctgggacacctcagccgccccacaccagtacctaccagctgctagcagccaacagacattatcacacggaacaagtgacaaacactatactacacttctcgataatattatagcatcgacctccactaagctctgaaaatggttggaagcatcgtgatcatgcatcagttaatcatgtttatttgatgctctcttcttggaagctaacctctaatctgcaaggagccaagcggcgtggccaaactctgcacgcggctaacatgcatgcgtttttttgggccgaccaagtgaccaactaaactcacgcggcaatagtgagcctgtgctaagggcgaattagttgtacgcttattcgatgcgcttttcctgtgtgtcgcgtgtcatctgtcgctgtcgcctccacagttaatatgcttaagctttgatagaataaattatgggcgaggccagccagagtactatctgcgcatgcatgcagtagagccgtgtgtggtagctaacagcaaatttgcatggcgtccagtgcagaggccagccggaaccggcgctgtacaacgg

SEQ ID NO: 37908 - DNA, 1025 bp, Sorghum bicolor
  Intron number 1 from transcript Sb06g014370.1 (locus Sb06g 014370) derived from phytozome v7.0 (chr-ID chromosome_6; pos 39776256 to 39777280)
ccgccaagctcgacgagctcacctacgccgcccaggtctcgtctccccgccccgaacgcctctcctcattcccgacgggttattgccgcgctgttgcttctgccgtgtggttacgcgctaaagtcggatcgtgtgtgctcgtcgaggagccgcgatcccgcccccccctgcttatgccgcggattttcatggcccgtgttgaccgcagtgacttgttcctgggccacggtgattttttaggatcgaatgatcttcgctaatacatttgtatttactgagcgatgaatccttttcttcgcgtttatttcgtatatatgtagttccacccccccccccttttttttttcctttagactgtggggattcttcttagtaaactgttcatatattatttggatatagtctgtgaaatgtgtggatttgatcgctttcatgtgttattgtggccattagagatttggagttcagaagcacttgttgtccattttgtggcctgtttcttcctggtcaaagtccacggcaggaagctttgggtcgcagaaagtagctatctagaactggtctcgcagtcagcaattcaaagtcgtcatgagacgaacagatcatttgtttaacctggcgtcgcctgctggccgttattatattaataactgtgtggaaatacgttttctgaaatttaggagagatcagtttttcagcatattctgtctcagatgcgatgaacagttcctgcccttactgtctgcatcttaatggataaattatggtgaaagctgttgagacatgaatgtgatgttggattagacgcaagtgattgaagtttattatatggtacaagtttgacagtactacaagctgatccatggtttgaaatttcagaaaaattcacaagtcattcactttctcatgtgaattgtaataggaagagaagatttggggcctacaactgtcctttaatggaaattaaaattgtttaaaccacctttttgtaacatgaatgaacatggaatcgtactttgcaggaa

SEQ ID NO: 37909 - DNA, 1042 bp, Sorghum bicolor
  Intron number 1 from transcript Sb01g007880.1 (locus Sb01g 007880) derived from phytozome v7.0 (chr-ID chromosome_1; pos 6854277 to 6855318)
tcgcctgcgccctactcatcgtcctcacgacacaggtacctccttcctactactaccctactgcgcagattcagcacgactcaggccggtgaacttcactgacctgtgtatcaaagattaacacgtacagtctactagcgctgctgcttaaaataacgaggggacaaccagtcaaattatttttagtatcaaaactctggatgttaattagctaagtagcacttaagagttaagaattgactgatttttaatttctctgtcaattcatcttgacattttggcacgcgaatgtaacgtgcacacttagtctacaagactggaatcaaaagtgcaggcgtgcagctgataagtatatgtcaagatgcgccaaaccaaccagtctatatcgtatttgttctctcgttgccaccaatcatggccccggggaaaaaaagcgaaaaaggtggtctgaaaaatcttgtgcagatgtcaccatgagaccatgcatgtgtactaaggatggcctacaaataattggcaggaatttgtttgtttgcacacatgcgtcttcaacatgtcatagtggggtggggagcttcagaatccctttctgattgctggctctagcctctagctgagaaaacttttttttagtgaagaaacttagttagtttcaaaaaaaaaaaaaaaacttagttgaaacaagcagtctttgcggaggaatatacttgaaaaaagaaacttgttggaaaacatgggtatttgttaattgattaaacacttgtagccgccctaggttacaagcggaagcacatattctttttagtttcagtttttgatgagttaattaattaactagtacaggaggaaaacatgcgttttttgacgggttaattaattaactagttttagtcttgcatccatcattttgataaactagaaggacaggagatgctgacgcagtgcagagacaggtgacgttttgataactggtggggaaatcctaacaaatctgtcctccgtcgcatgcccactgcagatactggggtacggctgggctggg

SEQ ID NO: 37910 - DNA, 821 bp, Sorghum bicolor
  Intron number 1 from transcript Sb01g002040.1 (locus Sb01g 002040) derived from phytozome v7.0 (chr-ID chromosome_1; pos 1755742 to 1756562 reverse strand)
acgagcagcagctgccagcgacgcgcgcagcccaggtaaatcgactacaagccggatgcatgtcggcggctagtttcttctctgtcccctcccttacgtctttactgtcccttattgcgtactcgaattgtttgtctggtcacttcgtaagattattcggggatccagcagctacaataggtcaaccttggctggtttgctgatctagaagaagagcaaagcagcacgattgctggaatatagggcgatttttgtgttcctgctacgctgcaactgcttttagaatacagggcaattttgatcctcctgctatgtccccgtatcatgttttctgaaaagaaaaataccttatctccatatctgtgcatacatatagtatgctatgtgatcgcctcaacccgagttgctattatttgattatttcgtgcctgttacttcgattgttttttacagaacatgttgtcctgattgtagatcttagttaaacgattttgcaccttgtctgcaattagatacatgttttccagtttactttattagcttttgtgtttacaatcctgtgaagtgtggtgtaaacaatggaataatgtatcatgacaaataatgattgttgaaacattttattaactttctgaaattgctaagaatttccatgtatctttggttcctgacaatcatattggttaattacttttgctactgatgtcaacgtcaaagttttcagtttagttttgttctcatatttttgagtaaattcttactagtacttttgaaccttcacagcaggaataaatattgttattggtagtgtgatatttata

SEQ ID NO: 37911 - DNA, 640 bp, Sorghum bicolor
  Intron number 5 from transcript Sb06g021130.1 (locus Sb06g 021130) derived from phytozome v7.0 (chr-ID chromosome_6; pos 50488225 to 50488864)
ggcagttgagcttcaggggaaagcgggttctagaggtaactcctgtgagaaaacttatgtatctagcttgttatttcatctaattggttctcactactgacgtgattgatgtatattcctgtttttgctttccataagagcacaatgtatgctccagcaggacaatctggatgcatgcttaatgatagtgctagtgttagacagtttgagcttgacatttatctactaaatggaatttctaaattagcactaacaaactaacccacagtagtcatataccccctctggtcataaaaacatgtttaggacaggatttagtcaaactttaaaattacaaatatatatacttttaaattatttagtttgaaaacatgcaagtatatatgtataactgtattgaaagaatactcgcaaaatcttataaatgtgaagaatttttaggaattagtggtcaaagatatgcatcgaagactatgcaaagtcaaatgctgcaagtgtatttttttgattggagggactagggagtagttttttatactttgtcaatatttagccttggattttcagcaggggcattttttttaaagttctatggacacttcatgattttattattattattgttattgatgcagcttgg

SEQ ID NO: 37912 - DNA, 967 bp, Sorghum bicolor
  Intron number 1 from transcript Sb03g042030.1 (locus Sb03g 042030) derived from phytozome v7.0 (chr-ID chromosome_3; pos 69467722 to 69468688)
ccggggctagggttcgcgcggcgcggcctcgcgaggtacggctctgctgcctgcgctcgctccgggtgcccagatgctgcgttccgtttagtcgtcttggtccgttgctggaggagccagtgcttggtggggttatgggtgctaccgcctcgcgttgctggatttggagctaaacgcgtggttttgatgcaattttgagggtgtgaggtggcgggtggtggtggattggtgatcggcctaatgcagatgcaatcgggtcacttcgctgtagaattccattgctattgaagcgtacaaactgtttgtcgatgtatttcttacattttggcaactggatttttttgatttcatagcatggattgcctcgatttcatttgtcgtatgactgtcctccaaaacttttttttttctgtcacctagtggcactagaatgaaggaaactttggggtaatggaactgatgatcatggactcacaaatcattagcattgcttcttatggccgtactagtgactagtcattagtttcttccgtggcaattttatgtgtttgctgtagtaatcactgtcgtttatttagttttaaggagggctctaaacaacaaatcatttcttactttgactataactaaatatttcagatcccacatttattcatatttactagttccactattgttctgtcttgctacttttaataaaaaaaagaagagagagaacaagatcagacatatgatgcaataggagggagatctggaacttaaattatggttatgatgaagagattacaatgttgaaggtgacattaaatgaatattggcttgcctgcatgatggcatccgctaatgcagttgtccaaatttgcctgatttatgtatcatcatcagaaatctcaacttatcactgtgattatacctttgcctcttggtttcaggagaatttccataataattgcctgttgacatcgtc

SEQ ID NO: 37913 - DNA, 754 bp, Sorghum bicolor
  Intron number 1 from transcript Sb06g030600.1 (locus Sb06g 030600) derived from phytozome v7.0 (chr-ID chromosome_6; pos 58998966 to 58999719 reverse strand)
cagctcgagttcacgcagcactacccggaggcagggtgagtgtgggcaggttttggagggaatcagtgagttgataatttaaagatggcagttttttttgttctgatgcttgctttgactaaggttcagtgaagtaacctacagatctgtatgagtcgccgctttgtccagttctcttaacttttagtgacttaattggcaaattagtgaactttcccatgtacaacaagggtcatgtgtttttctgttatccattgaatcatatttacttttacatactagaagagtattattcttggggaaaacatagcaccacaaaatactgaaaggatcactatgaggcgtgaacaatttctctgctagaccaatccggtgtctcatcaattggcaacttttgctttgccttttgattttccttctctatgttcattaagcatgtctacctaattagcttgctttaagcatggtactgctatttcacaagctatcatggtcaactttcaggagcgctgatatattgataaattgcgtagctttgttacgaatctcacatgttttttttatttcttttttttccatttaaatgtggatttgaagttaaatctactatgccttagtcatgctgtttcatgctatttggcttgagtcgctgtaggggtaattagtcccatctttttgtttaaagcaatgacagttgtcatggtctctgattttgttctttctatgtttgtgtgaactaaaaggtgggttgagc

SEQ ID NO: 37914 - DNA, 453 bp, Sorghum bicolor
  Intron number 1 from transcript Sb06g028170.1 (locus Sb06g 028170) derived from phytozome v7.0 (chr-ID chromosome_6; pos 57018619 to 57019071)
ggtgagcgttataaaacttttatgtttcaccagccgccgtggattgcctcctgtagtttcaggtggaatcggagttcctccacgcgccttgtgtgccagctgttcattcacggtccagtttgttatctacttatctgttaaaacaccttatgttgtttaagttctatgatgttttgcataaacgaggatgattaccataaatcatgcagccttttgagcttggggatgccatttagcaaaattcaaatgcttgattaaataacatgcaaattgtttttcgacttggctttctgttatgaatgcctgacaatgtactgaggcacccaattcatcagtaaacatatagcaagtttaccctttgtggatcatgttgttttttcttccagcaacttcacttgcacaccctatgttgtttttcctcaactgatgtgttctgtgctctcatcaatacag

SEQ ID NO: 37915 - DNA, 659 bp, Sorghum bicolor
  Intron number 1 from transcript Sb04g001010.1 (locus Sb04g 001010) derived from phytozome v7.0 (chr-ID chromosome_4; pos 848684 to 849342 reverse strand)
agcagcaggcgcagcagctagggtttagaggccaggtaggccttgccttgtctgtcccccccaccgcggttctgggttctgcccttctggattcgaatttattttggtggtggtggtggtggtggtggtgtggtttttttttccgcacttggggccaacgcgattggtgggaaaccgtgcgcgccttgggattcgcgaaaaaggcggcgtgtttacgtggacttccgctaacggcagtcttctcccctggagtgaggagtgcctttcgttgtcttgtctttgctcccctgctgttcttcgcctggtcggaatttcattaatttggtattgcacatgtgttgtgtacttgtgtgtgtggcgcgtggggtttcgtcttgccccggtttcgattcggagtagttgtctgaccctgatagtctctcaatttggttttggtttttcttcagagtgatttggatttggataagctctgttctttagtatggtcgatgcggccgattcttgctttgcttttagaaaatccgacccattcattcgttttcgttttatgagcttgcagtcgatatgcttctctagtatgcgtttttgttgtttctggttctggtgatggtgaggttctagtagacttctgatgaacggatcaccttctgctgcaggga

SEQ ID NO: 37916 - DNA, 991 bp, Sorghum bicolor
  Intron number 2 from transcript Sb06g028990.1 (locus Sb06g 028990) derived from phytozome v7.0 (chr-ID chromosome_6; pos 57711261 to 57712251)
ctcaaggagaacagggaggccttctccagaattctgtaagccaagctaccttccaaaacagtaggttttagccgtattcgattggtagcacaccgctgattcaactgttcttgtttttacttacgtcagcagctaataattcaatgaaagtcaggaactttatggaaaacgttcagaacaaatatacaaggatgacatatattttttgatatcatgttttgctttctataaaagcagggtttatctctgtcaaaaaaatacatctttttgatatctgatagaaactgtcatgtatcaagaaaaaccatattgctatcattttcagttttcgagagtgtataggataatgcatgaggtgcctctccaatccttgtggaaaaatgtaatagcttcatgataacaattagtctgaggtcactctgtccaattgtttagtctaagcggataaaatcacctttgattaataaaagtaaatggtagcaaagtggaccaatcacatggagtagaggacaagagatcagatgtgtcttgtgacttgtggcctgcatggtcaaaagaagatggcaacttcattagaaactctcagatacgacacatgacattagaaatgcatggacatgtgcagaattactttcctcataggtttcagctcctcggtcatgcatctcaactctgaattttcatacagatggcgttgagtgtatggcatttggcatgttggtagtagaccttaaatagttatctacaagactttttgctcattaactctgtaaccattcccatgtgtaacaagagtaagaattaattcatccacaacacaaacactgacatcaactcaagttttagaaaaaggagacagtgcatatgataatcaggaacgaaatgtaccagttcctcttggcctcctttgttctctgagaacctcattttgtgcttccttgtggaaatggttacaggtttcgaccacgggtactgattgacgtctcccgta

SEQ ID NO: 37917 - DNA, 993 bp, Sorghum bicolor
  Intron number 3 from transcript Sb07g024080.1 (locus Sb07g 024080) derived from phytozome v7.0 (chr-ID chromosome_7; pos 59091194 to 59092186)
cttggccttggagacgtaaacccaacaaattgtatttttgcaaatattccatgcttttattttgcttttagtcctttcctttttataacgtctgctgttagtccttaaagcctctatagaataagtacttttagtacctctgtgtttgctctgctgagcttcatattatttgtcttgtctgtgtgtataaactcttgggcagaataagaccaaatgacatgttgattaacatttttaagctatctatatagatggaattaacatgcaaagataagccatcataccaaagaaagaagttatgtgagctcaagttccactgttcattgtctgccactttttggcaaatctttagtttatcaaggcagcaagctatgcactgcgcactcctctatcagcttgataatgaataagttttggtttacaggaatgcacttagctactgtacaaatctatatctaattggtcaggattcaagtgggtacccactttgtagctctgggtcactggcaaggtcttgtttggtcaaagcctatgccacaactaatcttaggcaaaacatggtagctgcaagaagtggagaacaattggttcatttgcattctgtttttcttgctttgaaattgtataagttcattttgatgagttttgggtcaatccaatgacccagagaaaagagaacttgcatccctactaattgggaaaatcttcttccttcctgcatgtattaagttcatgttgcttccttccttcctacgttttgtgtactcctgtggttactgtttacagtatttagtgcacctgctgctggttattgatgatcatagttttttttttcagaagcagcatgactgcttcatagtgatttgagtctttttctgcctattctgtaacttatcaactttgcttgtgcttctgagtaaaatccattcgtaccactgatgatttgaatttaatcacctagattcttgtttcttcctacaggccattccaggg

SEQ ID NO: 37918 - DNA, 701 bp, Sorghum bicolor
  Intron number 3 from transcript Sb01g044870.1 (locus Sb01g 044870) derived from phytozome v7.0 (chr-ID chromosome_1; pos 68030410 to 68031110)
gctaccttccgtccgtcaatttgaaacaggtatggtcttgtctgcccaatattattccctgtagtagcttgcaggattgtttgtactgccctgctgctgttcaaatgctttgaaatcttcagcatgagtcatgaaatcatgaaatgcattggagttccagtccatgtggaaaaggcaaagtatacacgaagaatgaatgcgtgaacttgttatgctaagctgattatgcaagtttcttttctgttttgatgcttgaatctgctttaacctttgtctgatgataggtttccaaatttgaggatgtgggcctaagtagtttgggacaggaaaccttgtgcactgtagaagatgtgctggtcctaaatatttgtactttttacattttcttgattcttgaatggttagcttttgcctattattttttctggctcggattgctattgaaaatgtgggcttatttatgtgtactggtgaggaagttttactgggttaatctttttggtagattccaaatctgacacaagtatatgcatttgatctggactggttatcatttttgagtcagaaagtgcttctggagttccgtttgatgttattgttgtgaatattgcatacctttctatatctaacctttgaaaaggaccattaataagttctggcataatctattgcactttcaggtcatagcaacaatagctgaa

SEQ ID NO: 37919 - DNA, 604 bp, Sorghum bicolor
  Intron number 2 from transcript Sb10g007810.1 (locus Sb10g 007810) derived from phytozome v7.0 (chr-ID chromosome_10; pos 7751445 to 7752048)
aggtacatcaatctcccggagcacgacaggggagggtacgttcaattcgttcgcgcgggtgccaattgcatgcggcccttttctctttcttattagtattgcgagaagaacctttctctcgttttcttaattaaggcaaataaacacaggtttgttatgactagtttattctctgactgattattgctgtgatgcagagtcgttcggaatagagaggtgacgtatcagatactgtatttggatatccaaaaaaattcaacattaaccttaatttgctcgttaactgattttttatcatcttaaacatgtatgtatccaaatacagtatctgatcaagatgcttacacaactcaaatgcgagggtgacatagccgaacaacttgcacccaagtatatcactcactcctcctctctctctcaattaatctttccagttttggttttcaaatggatattaactatgctgattatctttctttattatatttacttcatattatttttgaatctccttttctcactgacgatgcttgttgtttctctctgatgcatccttttatttgatgaataccttgatgaaacagtaaagggccagtaaactcca

SEQ ID NO: 37920 - DNA, 686 bp, Sorghum bicolor; identical to SEQ ID NO: 36331
  Intron number 1 from transcript Sb10g023360.3 (locus Sb10g 023360) derived from phytozome v7.0 (chr-ID chromosome_10; pos 51945141 to 51945826)

SEQ ID NO: 37921 - DNA, 1000 bp, Sorghum bicolor
  Intron number 1 from transcript Sb01g015360.1 (locus Sb01g 015360) derived from phytozome v7.0 (chr-ID chromosome_1; pos 14861013 to 14862012 reverse strand)
ctctcaccaacgagattgtcagcacggttatttgggtgagatccgctcttataaagctggttttaaggagtttcactagcaaagccgttttattttataccgtgtggcagaaaatggcttcaaacaaactgaagccggtggagaaatcctaccaaatggacccttagttgcaagctattcacattatcttcttttaatttcattccaagcaagttctttgcgattctcgtagcaatgcgcgagatatcttctagttatctaacaccacactcctacaaaacctctccattattaatggtctctaatttatttctagtttagcattaggcaaatggaattttattacactaaataagttttggtatcgtagtccatgtttagtacctacaactaaacaaattaattatccttgtgctattatttttattcttttttttgacacaatatagatatttctttctttaccggtgagatcaacttatcaattattccttatattttttatccatatttataatttctctttctctgtgcgtggcacgtccatttgtcttcaatacacatttagttaaaaccatagcttaagttatggtatctcttattgctagccatgtcacctgacatatttgatcttgattttaaattttgattttgttagttgatgtagtttcttaatcctcaagttaagttgaaaatcttatatgtacttatttcattttagttagaactcttttgtattttataaaataagaatttaggttataaattgaattcttatttactaaaatgataaaaaagaatttaattaattctgcacgattggcactcaataaaaatgtgaacaagaatataatttatgacctacattctttttttacattcttatgtttactgattacattctcatgagaattaaaatgtgaatgtccccttttacaaattgtaactataacattgtattgtaggatattttctctgctgggagtgaaacatcatcaac

SEQ ID NO: 37922 - DNA, 732 bp, Sorghum bicolor
  Intron number 4 from transcript Sb05g019725.1 (locus Sb05g 019725) derived from phytozome v7.0 (chr-ID chromosome_5; pos 48343327 to 48344058 reverse strand)
ttagtacaattaaaagtaagcatttcttgcttctagttttctgtttttctttgtcgtttctgaaaaatcatggtactatgatagtttagttttggcatctcgaggcaacatgtcatttttctaccctagatgaatatatgaaacacacaggcttgtggtttgacctgtggatggtgttacagaataggtttctatttcatatgccattctacttgttggtaaatgtctgttaaaaactagtcagctagcagtgagaatataaatagaactagaggatcaaagttttccttttaaacctcttcattaggtctctgttttcctcactagtagggcaataataggtggtgggaagtgtcaaacttgatgttcttaagaaatatatgtagactggtttaggtgcttggaactaattttgtttatttttgtttcttggatactagtagttggctttgttactacagtatggtcaggataatctgtcagtctaactttgtttatatagataggcgttgacaagaatttctgttgagtaactaattctagaattaatatggccatgtcgcttgtcactagaatttctgtttgaagcaacattcttgtttacctttttttcctaatcagaaatgtaaacctatgtctagtaattcttgtccaaatcttgtgtatataccttcactcattgggacatgtttggtttcaagcaggagcaattgacaagtgaggacaacagat

SEQ ID NO: 37923 - DNA, 958 bp, Sorghum bicolor
  Intron number 2 from transcript Sb08g000450.1 (locus Sb08g 000450) derived from phytozome v7.0 (chr-ID chromosome_8; pos 329231 to 330188)
gtgaagtcgatcaggtgtgccaatatatttccagtttgcttatctatgtctgtagttgcagcttttagtacccttaataataacttgatgctttggtactagcgtaagatattatcaaacaggtgagctgtacttggcatgtgtcactgttctgtattgtagagtagtgatattcctgtgtataaaatattgaagccaacgtatttgtttacccttaacaataacttgatgctttgctacctctagcataagatatatcaaacaggtgagctgtacttggcatgtgtcacagttactcagagtagctatattcctgtgtttcaagtattgaggcgaacatatttgtctaattcaaaatatgttagaatattttgttgagattaaaatatgaacattacaaagggagtatggtctctcttgactatcaagattttgtttaattggataccatttgtttctctagctggtggtctagggctgtcaaaggagtgcccaaggagcagagtggaaacatagaaatgattgtgtatttgagggagagaggcctactgtggaggtagtcttgcaaaagattgccaatgggagcagcctttggtgtatggctggagcttctgctctccaggagctcctttgcaggttgctcggtcttggtccttaatttggggcagggtagtcgttggtcgcccttttttgtgcatggtgtgtctgtacctttgtttttcaagggtatgtgtcgtggggtgtttcgatggtttttttggtcctttgtattgtgttttgttctctcaatgaaatgacacacagctctcctgcattgttcgagaaaaaaattgtttaacatttgctcatttcttctattattacactttctacatgtgctgatcccttttgggttatttattgtattaatgtttcatctacaggcatagaaaaagactcacaggtgtggaaccaagct

SEQ ID NO: 37924 - DNA, 951 bp, Sorghum bicolor
  Intron number 2 from transcript Sb01g005240.1 (locus Sb01g 005240) derived from phytozome v7.0 (chr-ID chromosome_1; pos 4363948 to 4364898 reverse strand)
gctactgtaagtgaactactcctatattgtactcagtatattgtactaagtacgtatcttctttctttctttttttttatcttggcatcattcacatcttaggagcagacagtttatgaataaattagtcaaatggtggtattaaaaaaatgttttgtgcctagtgtattctggttgctctatgtggatgaaaactcaattcgtcttgggatccatatagaatcggcatcatacatatacagttaaaagttttgcttaaggttgacgtggcaatgccattttttcagcagactattggatcatagcgttagtgtagaattaacagcatcaaatcaaattcctgctaattgggattatgacacttatatgttgaatggtggtgttacatttgtttaaaaaatgatatttgtacttcttgaaaatctaacctagtatttcgtgatcatgatcatctacgagacattttatcaatgtttgagttttcagctttaacaagaacaacaacatcactatctatatttccctaaaatggatgttcttgatgcttctgtctaacatcttcatgtcagcatcctacatttaaagaacagatagagctgtgcattgttcatttattcttggccttgtttagttccgaaaaaatttcggatttcgctactatagcactttcgtttttatttgacaaatattgtccaaacataaactaactaggatcaaaagattcgtcttgcgatttacagacaaactgtgtaattagtttttgttttcatctatatttaatgcttcatacatgtgccacaagatttgatgtgacgggtgatcttgaaaacttttttgatttcggggtgaactaaacaaggccatggtcaatttgatcgttggctacgatgtacaatactagtattgccggtattgataggcaactgacgatgacctcatcacaggatcccg

SEQ ID NO: 37925 - DNA, 630 bp, Sorghum bicolor
  Intron number 1 from transcript Sb10g022420.2 (locus Sb10g 022420) derived from phytozome v7.0 (chr-ID chromosome_10; pos 50097935 to 50098564)
ttgaaaaattgctatccgaggcgtcttgaataaaggtacttgctgtgcttgaaaaatgattttggaccttcaagcggtacttcatgtctgtgactgtccatgctttgaagtatgtacactcttcagatccaaaaattagtcggctcgtactctaaagagagtaagatttagttggctctgattgtataggcctgctagtttctttcagcaccgttcttttctttctagatcaaagcaccaaattattcaatgcgtacaaacacatttcagattcatgccaaatttagtgcagcagagtaccgcacttcaaaatttccccttaattaggtgtccatttaattaccagatgacggatttgttttctcagcgatacttgagaggtgtctacttggagcttagtacatatacaactgaagtcgcgtagcttcatgttggggtatttgtacacacaaaagatggtagtgattttatagaggagatgcaattcctagcctttatactcttcgtgtaactatttatcgggacgagtgcaatagacctaacaatttgtctttgtgtacgatcgagtattttgacacaacttatttcgtactctattatacagattcttggattggttacagaagtttc

SEQ ID NO: 37926 - DNA, 857 bp, Sorghum bicolor
  Intron number 4 from transcript Sb03g034385.1 (locus Sb03g 034385) derived from phytozome v7.0 (chr-ID chromosome_3; pos 62593388 to 62594244)
gcagcaactattctagcagtaattgttatattgactatgtattttttttttctgaaaaatactagatgcttgatactttgcttgatttatatattttttttctgctcttctatcttttggggctcatcaagtatgaggcaattagataaggatatgctagctttgccaatattgtctgtctttgagcgtaacagctgaagtcttggcactttattgttctagttgttatgatctgaacaacccattttcattgcaagtccttgtttgcttatgctcaatatggtctctccttgagcagttctgcattcacattggtatgattgttttgtggttaaatttgaaggaactaaagaaaaagaaactattatcgaaccacttctgagcttctatgttcgaaacatttgaaggagctgctttggcctttggtttttctcgttcatcccaaatagtgttgcctatcattgacaagtagatatattcccggcatgtaaaaggctcactgttctgttaatcagaaaaaccaaaatggtgagctgagacctgaaggaaagctaacttctgagctttgttcactgattggtgaatgatgaaaatttcttactggtgacaatcatgttacgaattgggtttttatgtgcgggatattggtttccttcatttaatatgatgtttaacaccagccttttccatatatgaatgtaaaaaagcaaggccttctaataggttttcagcctttttagatgtttagcagtatacccttgatcctatcttgtaaatgtcacttaataaagaacctactcatcactccctgccaatatgcaggtcccatcatacatctcaagatctgttgctggcag

SEQ ID NO: 37927 - DNA, 605 bp, Sorghum bicolor
  Intron number 1 from transcript Sb03g006155.1 (locus Sb03g 006155) derived from phytozome v7.0 (chr-ID chromosome_3; pos 6260875 to 6261479)
tagcccgcgtttcgctgatcctgccgctctcagtggtaatcgcgagacctaattcgcgaaattaattcttcacatcgcagaaatttacttgctacttgtcgtcgcgcttgggatttgctagtttttttttttgaacgagggttttgcaatttctgtcgtcttataatttcaattttcatccaaaaaagttgagatcggtacaaatgtattttcgtcgcaagttttgtagatgcgtcatcgatggcgaaaacgaaatgtgccagacgaaaggggatttttgggagtaaaacttgtgtagggttttctcggcaaggctctgccggcccacggctattaacttacggaaattattctgcaaaggcgcattttcatgaaggactgcatccttcaactgcaataaattatcgtttcattgccatttttgctttcttgttggtttgtgagacatggatgatggatgaatgtgactgttatgttttgtacagtagagcaggagagtaattttccactttgtattcttcccttgcgttttttattgattactatgttcaaatgcggaggagatttcaggaggcaactcgctccagcttgcggcggagctacca

SEQ ID NO: 37928 - DNA, 777 bp, Sorghum bicolor
  Intron number 2 from transcript Sb04g030610.1 (locus Sb04g 030610) derived from phytozome v7.0 (chr-ID chromosome_4; pos 60565766 to 60566542)
catttgaaggtaccaatcagtttgttacactttgtttgtcagttattttccttttttatgtgtaattctaccaggtttccatggtattagactgttaaaacaacattgaaaataagtattctagtgagtctaatgttatttgcaagatgcttcctgcagattttctttgcagactatttcctcctaagatgcaagattcatcatgttctgcttttttcttataagttttgttatagtgtttttaaagtagaattgatcttaggagtttaccctttaatgagtacaaacaataatgctcacagtaatttttaatgttagaggtatgcaaaagtcatcctacatatgattttccatgatatgaattactactttcaggctaatgtaaagtatgtgtagtctctcctagttatgcctttagccctgttagggtttgattttttatgggagccattgttttgatttgcctcagtcatctttatttcgttgaatctagcttctcttcaaccacgtgatacactgcaatcatctattgtgttgtaatgactgatcaccatgagctaaggtcttttaccccaaatgatggaactgtttagaatacattaaaatattaaatgttgtatggtgatagtttctgctaatcttttccattttactcggaaaattgcctgttttaccgtggaaatttctggatgccttgatgtattcagaactagtagttgctatggtgcttttgtgctaacttcaatgttatttgacaaaactcagaaatatcaagtg

SEQ ID NO: 37929 - DNA, 784 bp, Sorghum bicolor
  Intron number 1 from transcript Sb04g027800.1 (locus Sb04g 027800) derived from phytozome v7.0 (chr-ID chromosome_4; pos 57694184 to 57694967 reverse strand)
cctggctccagtgccttgaggtgcgctcctgattcccagcatactactccttgacttaggattggtgtggagtggacaatggagactgcatgctttgcgcattgcaaaacctttggttaacaacttattaggccagtctcaatgcatgtttcatgagagtgtcatgcatattaaatagggtgccatataagcaaaattgctgacttggcagggtcattaaatgaaggagtttcatcagatgagagaggagtttcatccccatgaaactcatgtggctcggttactagtttatagctgagtcatgaaactatgcattgagactggcctaggattggtataatatatgtaaattatgagccattccctgcatgtgtgataaataactttgagctggtgctagttgagtccaatgttttcgttctccaaaacaataaagaatgaactactcaaaatctagctactgacactgattattgaatcttatcatgcattgcattttctatatcctcagcagcctctctgtgaaaaaagaaaagaaaaaaaggtaccaccacacttcattcagagtaaagtgtagctgtggttcttcgagatctcagggcaactttagtgtctagcacacaccagaatggcagaacatgtccaaatcataaagcatagctaagcaaaatttactccaacaagcaattgtcagcacccaaacatgaggctcactaaatttcagcatgttggtatttttatttttctgttcattccatgtcttcatgttctgctaggttttcag

SEQ ID NO: 37930 - DNA, 890 bp, Sorghum bicolor
  Intron number 1 from transcript Sb01g020030.1 (locus Sb01g 020030) derived from phytozome v7.0 (chr-ID chromosome_1; pos 21974318 to 21975207 reverse strand)
ccgcgcacgtcctcgctggcaacgctgaaggcgccgtaagttgttcctcctctcaagtttgcttccactggactgccgcacgcgtagggaagtccccatgaggtgtttgattaaacacgcatacccatttcgggtgcctgattgcctgtgctaggtagtaaagtcggcattggtgagtgcccggggattgttggcttggctggtgttattttactggaattgtcatcctacgagcttttgatttagttagtcaaaatgttcagagtagatacctcatacctgagtgtaatatttctgtgtcgtccttgggcatttcagagttgcaatgttgctagccctgtcttctgcagcctggagagcggtagagcgtaactgttgtacatcagagcagtaatttgttgtttggtcctgggtctgatgtatcatgaattatatgatgcagtatggtcatgcatgcaagtatttgttatgttttgtagtctcaccttactagatataacaaggctagttagtggtgatacaatccaagcctttagtctgaacatgggtgttttttcaattctggaaatcagtgaggcagagatatggaagatctagccctgcatttttctttttgtcatttttttcttactgcatcctctgattcttgttcacttagaaaatttttgtctctaacctatctatggcggcttcatattaaaaagaagggaaaatcaaacaaatatacataagttgattccttaaccgtaagtttattttaagctggagctacagttacgtgctgtagttgtagttttaaaaagtaagtatggatgtatctattgtaaaaatcaaactcaatgcattggtctaacaacaatttaaatttctgaatgcatttctgaatgcag

SEQ ID NO: 37931 - DNA, 591 bp, Sorghum bicolor
  Intron number 2 from transcript Sb08g017730.1 (locus Sb08g 017730) derived from phytozome v7.0 (chr-ID chromosome_8; pos 47509109 to 47509699)
tgggctgttattcaaggtaatcttagttcgttcatcatctctgtcagtcgtgtgcagctgttagacggaaattttgtggtggcagtacgatataggggccatgactatgaattaattcatcattgtttgctccaacaattgcatagaaaacatggttttaacctctaggttgtcaattgatatcaaattttaacagagggtatcaaattggaattgcaaaatgtatgaataagcgaaatagcataaatggggatgtaaataattcaatgtggcatgcaggagcaaaatatagtctgttttaagtagctttgattgaacatgtattatgtataagtgctatcctgtcaataacttctttaactggatctcgttttctatcattttttttttgaagaaccttctatcaaatattttggaatattatatttcacttatcatgttgagatatatgtcaaggtattgaagtgttatcctgtattctagatggtttgtaattgttcagttccattgtgtctcactgttttttaacactgctataattctgtcatctctgcagcccacatcttctaacaatacgtgaacggatttctg

SEQ ID NO: 37932 - DNA, 779 bp, Sorghum bicolor
  Intron number 1 from transcript Sb01g039390.1 (locus Sb01g 039390) derived from phytozome v7.0 (chr-ID chromosome_1; pos 62807686 to 62808464)
aaccccaccaacaccgtctttggtaagtccccctcttttccttgttcttccctgaacaattccagttccttcttgtttccccactagtttcagttacctcgtactcctagtatatgaaagttgttttattttatttttttaaaaaaaataaaaactatcaacacgacatgcgctggctcctgcctctcagcagccattgaatcatgctctgcttccactctgttttggcggcagagcatgaatcacttgttgcatcttatgctatctatagatcacaaattcacagtaattttgagttataaaatcttcttctgttgttgttcattggacagataattttgtgggcctattggaaaaaatcacaaattataattatttagctatagaaaaataattgtactagtttattatgtataagaattgttctgaaagtatagcaactcttttttattgttgtttattttatataacagataatttgtcatcgtttttctataggaaaaactgttcatagtaacttaagagttgttaaatactaatacacttttcctatatgtcagatgtctagtttatttgttaatgctcatgtaaggttaattttgtcatcgtttcgttataggaaaaaaaatgaatcctcttttgcatacttgtcgtgtaagattattgtctaaattttcgggcaactgagatatagcaactcttattctactactactatactccataaattttctgcaaagaaataggcattccctaacacctctgtttctgccatgcag

SEQ ID NO: 37933 - DNA, 859 bp, Sorghum bicolor
  Intron number 6 from transcript Sb10g023700.1 (locus Sb10g 023700) derived from phytozome v7.0 (chr-ID chromosome_10; pos 52425156 to 52426014 reverse strand)
gttgccaaggagagcccatcacttgaggactcaaagtaagttgtttgtttcttcgttttgcactttgtgattctgtgttgctacatggtttctgtttctcatttggatcctggattcaaattggtgctctaagcatccagccaggcctactaattactcagatggtaatgaactgatcctagctcagttggttgttggtgtggacgtacgcccaaaccacctaagtcaagtcctcgtcagggcgaatttcggtgcctattttcttaattaaaaagggatctagttccttctaggttggttgagcttttgttacctagattgttgagcttttattacctagattgccttgagtgtgacaattctatgaattattggtacaactatgtttgctacatttttttggtagcataagtgtgtagcataattcaatgaattttttgaagtgtcttccgtcaaatatgtgaaggagccccccccacacacacacactaaagaaaacttatttatttgaaccttattgttgtttgtgccacaaacattttatagttgcacagtattttttttaaatgttcttgctttggcatttactattttggaactactactgtttgctttgacttccatcttgtgataattgaaactgtgctgtgaaaccaagtcttaccattagtttctacacaattttcttgcaacatgtatatatgtttccaactttccatccaagtcataccctaaatactttttctccataaatttgttctcttactagcgcatttaaatataaaagactttcttgcaatatcatgtgcttcattccaatccagagagaagaagaaaactcagaaggcaccaaaccagc

SEQ ID NO: 37934 - DNA, 460 bp, Sorghum bicolor
  Intron number 3 from transcript Sb01g045860.1 (locus Sb01g 045860) derived from phytozome v7.0 (chr-ID chromosome_1; pos 68939468 to 68939927)
cacttcctgtcacgggacaggctgcctcgtctgaggtatcaacctatctaacccccattgcaaattgtaattccttcttcttttctaaatacatatcctttacaatatatatttatatgtatagtaaaaaactacataaaaaagccacattaacttataattcaaaatggaggtactctctcagttctaaactataagtcacttttttttatacataggatttgttatgtatctagacatatattgtatgcaaatgcataggaaaatagatgtatcaaaaaaaatcaaatcaacttataatttataacagaggacttaacaatatgcctatagtctatatataggctatgcatgcttggccgattcagtttacagtggcgagaatgtttattacagtactgtttacccgatcgtctgacgtgcagaattcatcatcggcgagccagcggcggcagggtca

SEQ ID NO: 37935 - DNA, 591 bp, Sorghum bicolor
  Intron number 1 from transcript Sb06g002780.1 (locus Sb06g 002780) derived from phytozome v7.0 (chr-ID chromosome_6; pos 5447428 to 5448018 reverse strand)
tctgggagaaggacctcgtctataagggcttcaaggtctcatctctaatctcactcagccaattttcgagtctgctgattcccataattctgagttgtacaaagcttgacaagcttaggattcagtgaatgtagtttgacaagcttagcattcagtgagaagcacatttccttacatatttttactgttatatgctgacatgctgctttgattgttttgatctatataattttatatatgaacttttagctcgctctaaatattgcttcaataaggcaagagaatgtcatttataatttgatgatcttggccttgtgatcttaggaattatgtgtggcttactggcttgtagggtaatctgtgcactgtagttgctgctaatgtacagaaaatattatttttgtacaagttgcgttttgatcgttcttgaaagaagagaagaacaagaaacaaataaattatctggcaatacaaaactacaaattattctctctatataaaatgaggaaatgcatctaagttctatttttgttcactgtattgcagggaattccttaaaactttgtgaactctttgtttttgttataggtc

SEQ ID NO: 37936 - DNA, 995 bp, Sorghum bicolor
  Intron number 1 from transcript Sb06g026780.1 (locus Sb06g 026780) derived from phytozome v7.0 (chr-ID chromosome_6; pos 55780252 to 55781246)
ctcaagaaattcagctccagatcagaggtactaaaatcatttgccttctcttcttcctggttgcttttgttgtgccttatcatgtgtagattttaaaaacaattcttgaatttccagagtggttctttcatgtgcctgttttcccccctgattggagagttctacttctatgttcatgcatggttggaaactgctcatccttgaattattgatgcatctgaaaggtccagcttagactgttcttgtacagtctgctttgccgtcctgagctagcaaagattgtaggaaacaacgttctggcagtaggggcttcggcccctctagattcgtcaaaaaaaacaatgttctggcattgagatactctcccctcaagatctcaatctttttctttttataagttggccagttaaaaatgtttctttaaaaaaaaagaaaaaagaaaacagagtagctttccgcctgtcactgaaaaaatataaatatataaactacagtacagcaattcctgcatggtccaccctatcaccattgaattcggtagttgattggtgaaagcatactgaaacgggaagtattcagtattaacctagccatgtcgtattaatactgcacgaggtcgtgagggggattgttccaccaagaaataaatggagaaataataataaattttgattgattcttctcttctcttttatttgtccagctgattaactgaaaactttaatgtgcgactgtagagattgaaaaaatattttgatttaaaaaacgattactgctggtgtcagattgactgaaacgaaaaaattatctctcgcaaaagcagatccagtgctcattttacattttatatgttggtaccaaatttgcttctttttcgtttccattattgcagtactccgtccgtagtactactaactatacgaccgcatctttgttttcttttcgttgtaattgcacaaggcattccggacaaggaatccgtccacgaagacgcc

SEQ ID NO: 37937 - DNA, 856 bp, Sorghum bicolor
  Intron number 1 from transcript Sb09g025430.1 (locus Sb09g 025430) derived from phytozome v7.0 (chr-ID chromosome_9; pos 54859156 to 54860011)
gcgggaggatcaccttcccgtcctcgctcaagcaggtgagacacagacaaccaccggaccgtaacgtctcatcgtggtaatactggctcttttgatctgtttgtgtaaatcacctgaatctatatggctcgaacttgctgtgttcttgaggatttggggccacatggttatcgaggctgaagttttcttattacccatttctttccttgagaaaataaaaccagcagccacacatcctatgggcatgtttgatttgaagctctaggtgcaagagatgtctaggtgcacagatgtcttctgcgcctttttcttatacagtttgactcgatctcggttgatctctggatcggttgttggatttaatcttcttcaaattaaattaattttctgtttctaaataggcgtctatgcctacacaattttatttgtacgcagaaatgcgaacaatttgtatatctagttcttttgtggtctgtttacaaggatcagcagatccatgcttgtactaacaatttgtttatctaattcttattgttcgtggggcggcgctgcagtgttccttgtgcgttagaatttagaacggagccacatgtccatcttaatctctatcctcctattttggctacgtaacactatatttttggtggctagtgctaataaagtatggcagtagtggagaagttggcacaaacacagactttctttatttatgtttatatgtgatagctggatgttgtttggtatgccaatagcggtatgataatacctataaaagcttttcttctgtgcttgagtttactaaatattaatttaatgtatgcttatattatttcttttccacagcctggaccaaggg

SEQ ID NO: 37938 - DNA, 758 bp, Sorghum bicolor
  Intron number 3 from transcript Sb07g022000.1 (locus Sb07g 022000) derived from phytozome v7.0 (chr-ID chromosome_7; pos 56293873 to 56294630 reverse strand)
gcagccaaagattagttgcgcataacacaattcaggtacaattttttaataacttctttctttttcgaacacacaagagaatttctgatcatttcattaaaggagagttacaatcccaacactgtccattcaaactgtatttttttattaaaaaacttgttaaactgtttattggatgtcttcattttctggcatctgaacttcccttgggcagcttggatcaggattgtggtagagtgctctctagtttgtgtattttgtgtgttgcatctagtgtgatattcctagaagactccgagtgcttgcatggaggctattttactcacaatagttcaaatttatccttttatttgatggtgctggtgcttggtatcagcaattttatatcttcagtgacttgtagatacataataaacgaataaattggcgaagtgtgtgttacctcttggttgcagagatgccttttgactattttacaagctcagtacacaatttgttaatatctgtcagtacttcagactttctggcaacaacattagtccattattaagactgcattcggttcatcctgggaagtaatattcttttattttgcttattaattaaagatgcaattgcctgtgcacgctctcgcccaaatcggtcatttcttagcacttatcctcccaagtcccaacattgtgtatgcttggcacatgctcgtcagaataatctgttgttcatccaatgtcaggttaaaagctattggctaaactcgg

SEQ ID NO: 37939 - DNA, 871 bp, Sorghum bicolor
  Intron number 1 from transcript Sb04g031640.1 (locus Sb04g 031640) derived from phytozome v7.0 (chr-ID chromosome_4; pos 61591993 to 61592863 reverse strand)
gtcggaggtggttgctccagttccccgtcttgcaggtgagtagattggggaaaactgtggtttctcatacagagaacaggtttgagtgttctgaaattccagatgatctgtaaatgtccacacaacactattgcagtaatagaggttggaattattgcttaaccggtgtgcttttggattactcacttaggttgatactagtgacttctgttgttgaatgaacacaagcattggctgttattattttgctcttgtgtgcctcctagttgctgttgtgctctacagcttcctctacaatttattttcgattcacgtgtgaactggaagctgataagatgagggtatgaactgaaaactgatcagttgggttatgaactgaaaatggatcagatgggtgtgggcgtgcctactctgtcttataacactggtgaagaagctgtcacaaaggcggccgagagataaacagtgtgttgtttatataagattagaaattttgagccaggatttattgaacttgttctggtagtctagcataggcttccacttcttccaggagttgctatgatcaaatttgcatccatacagttgatattccttatctttatgttgcctggatgcatttccccacttacatctgctctaatgcagtgaatttataactgatacgtgattcgtggcttgacaaacttacaaaattagtaattctttgataagtctgtttggtaatttttaacgcaaaaatgtcatctaattgttcgcatttgtttgagcgagtagtaacttgtaaccttagattttcccctccgatcgattaagtagttctccatttgtcttaattttcacttcctttgtgtgcagcgacctctattct

SEQ ID NO: 37940 - DNA, 669 bp, Sorghum bicolor
  Intron number 1 from transcript Sb09g030950.1 (locus Sb09g 030950) derived from phytozome v7.0 (chr-ID chromosome_9; pos 59573652 to 59574320 reverse strand)
gagttctggggtggcctccctttctctctcgcaaactcaattcgccgcgataactgcgctttgtttgtcttgttttgcgataccgttgtttgattttcgtcggatgtttcaggacgctgggactagaacatactactgcatcttagggcgttgctgtgacatataaattctcctcttcttttttcttgtttatataattatatatgtttagttgatgtttgatgtgatgcttttgttctactgccagtagcaatgcggcaatacctattaaatgcttgaagtcagacacgaatgtgtttgtgcttgtttagggtcatcttataggacatgatgccactatgccactgaatttggtctgtgcgttgcgggatgattgttcttttgctacccttgttaaacagcatcagatcaatgtaaactatgtcagattgctctgtgattcttttgttctactaccattgcctagattaaatggttgaaatcatacatgaacgtgttctgtttgtttaggggtcttattataggacgtggcatcactgaatttgttttgcgcattgcgggatgtttgttcttttgctacccagtatcagatttgcattcttaatgtaacctatctcagattgcgccgtgttttgcaggtctcgaggttaagcctggaagcactgttaa

SEQ ID NO: 37941 - DNA, 688 bp, Sorghum bicolor
  Intron number 1 from transcript Sb02g027700.1 (locus Sb02g 027700) derived from phytozome v7.0 (chr-ID chromosome_2; pos 62984343 to 62985030)
gcggcggggttcacctccatagcgtagtgcacgtaagttccctccatttgctggtcctctccaggcctggttgtccatcgcccgtcgggatgtctttcttgtttttcgccttccactattgttctgtatttctgtggggctagggtttggttggcttcaggttagtcgaggcgcgcgatggggaatgccgaatgctcgcacatttggttttggtagggcacacaaaaaggggcttttggttgaaatgttttggcacatgacggagagaactggaggggcgctgaatctatgagggaaaataggggaatgaagtgagaatagaaattctggttgtgcaacggggctttattgtggctagcacttttacttcaaatttctatagtcataatttcttaaacgaccctttttgtcatagtttggacagtgagataaatattcagaccagagtaatttcttctgagttttgttctttatagtccttgataaaaggaccatgtatgatgtatgtatggtagaaaaaaaaaacttcagtttcattagtggattctttgagcaatgaagttaaaccctttcataggtttcgtgttattttctcttgaacaaacaatggaagtgtctgtaactatgatataaagtgttgttatctaattcaatcttccatgcagcacacatctggccaaatctttgc

SEQ ID NO: 37942 - DNA, 660 bp, Sorghum bicolor
  Intron number 1 from transcript Sb03g037645.1 (locus Sb03g 037645) derived from phytozome v7.0 (chr-ID chromosome_3; pos 65584957 to 65585616)
aaggttgcttccagtaacagcacgagcagggttagtttgtttttgttttttgttttgttttttttttttgcgaccaaagatgatgaaagttttgttttttttttggacatttctggaacaaacaaacagcaagctccacttcctattgtgctgaaactatgtcatctccacttccttccatccagtaactattgtatgctctgaaactgtgaactacttgttttttctgagattcatgtatgctctgaacattgtcgtcctttgccttcttcagttttcagtttcagttgcatctgtgtgtgtcatggcaaaaaaaaaaaaaagatttcctgccttttcatgtgtgcttttgatgaacgaactaatatatgtgcaagattgcatcactgctttggtattctaacatgtcctaataacgattggctatagcagcaagattgtaaaagcatgctctattatctgttttcctaaacaatcaattgctgatgtaaactagcacagatgttgtatctattgagatttttcttaatttttgttggaattgatgcttttcctattgttgctaaggtacatatcccattagtggtgtttatgtattgtgtgttgtaatgacaaattgctttattttcgtttgcaaggctattgcaggcttagcagtag

SEQ ID NO: 37943 - DNA, 566 bp, Sorghum bicolor
  Intron number 2 from transcript Sb06g017010.1 (locus Sb06g 017010) derived from phytozome v7.0 (chr-ID chromosome_6; pos 46142006 to 46142571)
tgcttcctgctgaacgggcttatcttcctggggaggtaccgtcgttcgtaattgatttttgattcccgactgaattttgttttttttgttactttggtgtgtgattgaattaaaattattagagcttgtgagcagtgtcacaatttactcttgagtgttgttcttagttgtcatttgtactgaaactacaagggtagcatcgtaaataccagtaaaatgctttgtgattggaatgccgctatgcatttgccttgaatgatgtaggttgcctgatgaaacagaaaaatgagctggatggagtttgatgtgctgttggagttccgctaagcacagtgggcttttgacctgtcttagttctctgtcacttcagttgtttgattaaaatgtcttaagccgaaggagatttatgttatgtatatcatgtcagcacttctctgctgatattgctccgaatgttccttcttagctattttgtgtgttctttacttcattctcacgaatacccatttaaatatttcttgtgcttcacagcttgctaaccctgaaatcggtggtcattccaactc

SEQ ID NO: 37944 - DNA, 980 bp, Sorghum bicolor
  Intron number 2 from transcript Sb01g020520.1 (locus Sb01g 020520) derived from phytozome v7.0 (chr-ID chromosome_1; pos 23153598 to 23154577)
agattctcttcaccgaaccgctcttcacacccaaggtgatgtatctccctgctcgaatagagcttgatatgcttcatgtttcggccttgctgatgtgggggtggctagggtatccaatcgtgaccccccaaattgttttaggacaactaaatttgctgaattactaatcgactagtggggcttattttttggcatggcttataagtactagttattaattaggttggggtattctggacttgtgtcttgaactcgtgacccaacatttttttttgtttttacatgattgtttttggagtttcatgatctcaaacatgactcttaattagatggtcatgccatatgtactctaaactttgatgtcaaacattttgctatattggggatgtgtgtgcatggtggatttaatgatctatgtggaagttgataacaatagttaaactatataactgaatttggtagtccttttcataccagagctgaaatgatggaccccgatattttgtggtttctgcagcctatgtgtaaggtcactgcaaatcttggtgttgtataggatctgcactagagcttactagaaagttgaagtccggcctccaggtcaaatttggtgtgcattttaatttaaaaattcgaacaagctaagattgaatcaatagtgtagtgtatctgtgtgccagctacaaagtattcaataatggtacctggtgggcttttctggtgtgatgttttgcagatgctggcatcatagcagcacatgtttggatattgtctcatgcatcttctaagtaggctttggacatatgggagctgcaaaataatatatcttgtacttaatttttttgtcttccattgttcatgttctgagtgtgtctaatgcatttctctagtagttcttttgtacatttgaaattggttataattgtcttcacatctcttaatgctctctgcagactcttcgggagcaattggtgcagctt

SEQ ID NO: 37945 - DNA, 458 bp, Sorghum bicolor
  Intron number 2 from transcript Sb09g008010.1 (locus Sb09g 008010) derived from phytozome v7.0 (chr-ID chromosome_9; pos 14862664 to 14863121)
gtcctccagaaggccatctccgaggagtacctcaggtgagactagacttcctttttacattttggtttgacctgatggaaactggatctgtgaaagtaaatgggacaggtctggttcggttcctcgaatttgagatcgaaattggtccgaattgttatgcgttgagtggacaccaagtgggggaaatggggatggggcgatttggttaacctttggggatttctcggttggatttaattcaggacaatcaaaatatgattcgatttgtggagactggagaaagaagtactagtttgttatcagctttcaagaacctgtttatttgttctttcattataattaattaattggaaaaatagaatttttttgctaaactttgcacttcaatttgtgacctttgtaatgtgtcaaagtaagctctaacaactggcctcttctgttgtattcaggtttgaacc

SEQ ID NO: 37946 - DNA, 700 bp, Sorghum bicolor
  Intron number 2 from transcript Sb04g018500.1 (locus Sb04g 018500) derived from phytozome v7.0 (chr-ID chromosome_4; pos 43278165 to 43278864 reverse strand)
ttgtgggggaggatctgcagagtaaactgtttgaggtgactctttgcttatacttttttttaatgtttgattgctattagtgtacattattgataccattttgcatctttgcaactgtgcatttttttactcatgcctgtcacctgacttcctcaactcgaagttatgatcttgtaaatttggcactagcgggatgacatgaaaaagtaaagtctgtaggtttactatggcacgagaacaaaattatgaaaacatctattaattttttcaaagtttagaagttgaagttcaatgaagacacgatcattggaattatttgctctaggtattgagtagattggatgtgagatatatcattaatataacaagtaaaaaaacaacatgaccattttacatgctgacaactaagagtataactattggcaactatcataggattttttttttaagaacaccaggtttttcttgtgttgtttgtgtggtactctaatgagtaggtccgaagaatatatgcactatttgcctatttgcttcctaccctcccaagcagatggattcccaagcgactgaaatcggatgcctggggatgcatgatgagccaggaaatcttgcctgggcttgaaacaagcacgccatatgtccttgaattttaccaatttgttaactttttaagttgttgactgtaggaagctctgaagtc

SEQ ID NO: 37947 - DNA, 858 bp, Sorghum bicolor
  Intron number 1 from transcript Sb03g037160.1 (locus Sb03g 037160) derived from phytozome v7.0 (chr-ID chromosome_3; pos 65181161 to 65182018)
aacctcatcacaggtgcgatcgggggatccattgaccttcttctcctcttctttctattgccgtaccactctggaaatggtaaaaatgataggatcggcatttagtctgatgccttgagatgtgaatctaagcgtggaagcaattggtcaacacctacctgatgtggatctgttcgcggatttgctccaatccaaatagttgacaacttgacatcactttagttttgttatcctgtgatctggaagcatgtgcttaagattgatgattaggcttctccatttgctagttttgcacagcgggaactttgtataagtctgatctgacaatatctttagtggttatactatctgattgaatttcagatatgtctgggacacagtcacacaggtcgattctggaacagtttggataggagtatatgactgcttttcttatggtgttattggcgtgtaaagcaatttcatagagtatgttaaaatgtgtagagggttatatcttagagttggattacatagctcagtgataataactagtaaaaacagctagcacgattttgagtatgcaaatttgtttatcaaatgggttttcatttggaaacatggtagcaaatggcaacgaatcagttacataggttactcagataacttaattagcaattagcaatgaaggttttgtagtctagtgaatcatttagttccatccaagtatatctgaacatttcttgattgcaaaggtcaaatgtctttacagaaggatgatgaaattcaagttttttcatggacaaagttcagcataaaagttctaacttcttttaatctgcagatcaggacttcagggaactcgtgcagaaggtccct

SEQ ID NO: 37948 - DNA, 484 bp, Sorghum bicolor
  Intron number 3 from transcript Sb03g006320.1 (locus Sb03g 006320) derived from phytozome v7.0 (chr-ID chromosome_3; pos 6448401 to 6448884)
cattcttctcatcgcctacttcaacagcagctcaggtcggttaaagattctcggttagactcgctcactcagtttttcctaattaatgttgggttacaaattacgaaaagtttgtgcttgctacttggcgatagaacatggcttggcgaaagagtttgtggcttttaaaatcaaattcatcaattgtttgtagtcagtacatcatctgagagtggggacacacctaccatgcacaatttctagttgtttgtcaaaaaagtaacaatgtatttgaattgtcatgcaattttgaaagcaaactgacttgagacagtatgtattgaattggcacctatgaattatgactgttctatcttattggcatgtactgtcgtttgttccagaagaccaaaacaaaatcaaacagtgtttccttgtacttcttgtttgacttattctttaatggccaggtgtaactgttacaagcagagagtctgtgaccagg

SEQ ID NO: 37949 - DNA, 822 bp, Sorghum bicolor
  Intron number 4 from transcript Sb03g006320.1 (locus Sb03g 006320) derived from phytozome v7.0 (chr-ID chromosome_3; pos 6448857 to 6449678)
tgttacaagcagagagtctgtgaccaggtctgaaggtacacatttttctctcccttccacgtctctttttgggtagctaatcacctgctgatgttatttctttagtcgtccaaaattttgatctctctctgaaacttgctctttaatgtgtcattagacttgcagcttgaaataatttttttctctctgattacaaggttgcaattgctattctagtttgcaactaagatgctcaactatttttacttcaatcttacaatatatcttactcttggctatattattgttatcttagcattgttcagtagtgcaggtgcagttacctgaaaatctcagacacaatctgtatgcttatccttaagagcaatatcatatgagaccctgcatttatgttgttctgcctcctcttttgctgcagttgtgtcctatttcctttgtagctgatttgatgtttggtattgttcagtaggctatgaaatatctagcagtgcatttaatactagtaacagtaatcaacctcatgataaataggatcccccccccctgatcactgaaactctgctgtgccactatgatttggttctttgattcttggtaactaaacaaaacggatttcttttgtccccctttctttactccctaatacaagtcaaactgcaagttgaactgaccaatattgcagtggaagtagaatgattatttaatttctttagtcatcttcacattttccttccccaacatgttgatgagggaagttttgtttcctcttaatctcagactttccatctacatctgcatccaggttcttgcacatcagaagtt

SEQ ID NO: 37950 - DNA, 853 bp, Sorghum bicolor
  Intron number 1 from transcript Sb01g028770.1 (locus Sb01g 028770) derived from phytozome v7.0 (chr-ID chromosome_1; pos 50216760 to 50217612)
cccaccatcaaggtcgttccttctccgcctccatcctgctcctctcccttaatacaaagcattgtttcttcgtcctaggtaatccgttcttccaatcgtaaatccgcgtctcaatgcattatttgcactccactaacaattagtccctgagttagtgatttgtgttgttggattttctggaggatgcatcatatagaatttggcacgttcaggtgacatttaaatggctagatttgagaaaataataggctttgtttagttcgcaaaaattttcaagattccccgtcacatcgaatctttggtcgtatgtatggagcattaaatatagataaaaataaaaagtaattgcacagtttacatgtaatttgtgagatgaatcttttgagcctagttactccgtgattggataatgtttgtcaaataaaaatgaaagtgctacagtggccaaaaacgaaaatttttacgaactaaacaaggccatagcaaaatgcagacttcaaaaagaaaaaaagcaaaaccatatgatgattggtgaattaaaactaggatcagatttgtctagcataaccggagtggacatttataaatgataaaataagaattcatgatgttatgaaagcaatattctgttttcattctcttaatctgctcattgattatgaccggaagaaatgaggataaaaaaatcatatcactgttagtgcatcggtactttgtcctttcgtgacttaccactcagcactagtaaaacactatcctgttgtttgactgagcaaattatcaagtggtttatataaaaggtggtatctagttgtttataagaggtgtcgacaatgtatttcaggtgggaagg

SEQ ID NO: 37951 - DNA, 639 bp, Sorghum bicolor
  Intron number 1 from transcript Sb08g001480.1 (locus Sb08g 001480) derived from phytozome v7.0 (chr-ID chromosome_8; pos 1439910 to 1440548)
caagatcgagaacctcgtgcgatccgtctactccggtcagtcagtcctcttccgtttcaaatctctctctttttttttgttcctgccgcaaagctgggatatttttctcgccttcttttttttttttcattttcggggccgacttgtctctaccggaaagcttcgattttgaccgggggcttgggtcacaatttcggggggattttgttaactgctgtcaataatttttgacgattctattctactgttatcgcgtggcatttcttttcatcatcatatactggaaccgctgactcccaaaattcaggatctctgttcccatcaatatcatctcgaattctaatttctagctccttagcaaatcctgaatgtagaattggccattcatatgatcatatcaagtaggcttcttttgtttatgccatttgtcagaaatcgtatgcaagtataggcacctgaagctccccattttgaattccgttgcaagctgatgctgtacaaccttccatcacactcttggtggtactccgtcctgtagtggtcctcttgtaatgcgtgtaattcgtgaactataggagtagctcagaagctaaatcttactccagcttctgtgattgtgttcccttttttcagaggttg

SEQ ID NO: 37952 - DNA, 722 bp, Sorghum bicolor
  Intron number 1 from transcript Sb07g025600.1 (locus Sb07g 025600) derived from phytozome v7.0 (chr-ID chromosome_7; pos 60696078 to 60696799)
caccggcttcgcctcctccgagctcgcccgccgaggtacgtctgcgtgtatacctacagtcctagtacactacactgcacacaccgcgcgtcgccttccccgcccgccggccgccgccagccatcgcgcgtcgattggttcgccgccgccgccgacgacgacgacggcgagtgctcggtactgttgtgttgcctgttgggaattattgagggatcgcgcacgcacgcacgcacgttccgtgacgaagccgatcgaaatctgccggaaagatttgcgcttttgactcttctggtggtgcagcgacgaagtaggggaatctggatcctctgccgtcgactcgcgacgcttttgctccagctcgacacagatttttttttctctccaacacacaaacacagtataaaatctgtaacctttttcgatcaaacatcgtgcctgcctttccgcacttacgcagtatctgatgtcctctgttgcctgggtgctactacaatttattatttactcattgttagttcattgcctgagctctttgactaatcatttcactggggaaaagttgtttttttttaaataattcttctgtttcagttggatgcatacgttggtctcagctaactttaacatattttgagttgagatggttctacttgtgatcagttgactgacactgaaacatattttcagggatcaacgcgccgacatcgcagtcgctcctgaac

SEQ ID NO: 37953 - DNA, 983 bp, Sorghum bicolor
  Intron number 3 from transcript Sb06g015150.1 (locus Sb06g 015150) derived from phytozome v7.0 (chr-ID chromosome_6; pos 42315916 to 42316898 reverse strand)
cgaagcaaccccttctcacttcaggttattgtgttctctctgttccccctacatatgtcttgctcaagagtacatctctctacgctctgactccgaacgatgttgtttttgattgggaggctatcattttccttcttttctccagttgtatttggatcttgtagtattcatatttcttcgcaaactgtgtccggtgggtcatatctgcttgcttagcagcaagtactgccgagtttagaactggtgtatccactttttgataacaactaagagggtagtaggtttgtacaattcaaggtggaggaggctgtgatcatcacaatgtccatggcgtttgatttctcatataaaagtttgtggtgcaggaacatgcgaatattttacaacctggacaagtcaaacttgagttttcttattttgttcatggcgattggcacctcatatgtaatttccaccctcttaaatccaggcggaaaaatagtcagacaaacgcacattctctgtcctattgacttggtccaaacctaaatttgcactcttttagggatggaggtagtaccatgttagcaggaaggaaggcttcactatctagattaagggagcctaacttctggcctctgcactggctacggatgcacatgaccactaaacttacaagtatcacacctggatttgaaccttgtggactgtcaaatatatttatatattaaaacaaaggatcaattgcactgcaatcacaaccgtactatcagcagaactagagaagcagccctctgccttgttgagatgccatcctatgcaattcttgtgcacagatctacagatttagtaggctggaacatattaatttacaatcaccttgctattagcttatcaaatagtacatgacctttttttttgttcttttacagcggttttaacactaaagcaatgatgtgagtattgcaggtttggtttgcatttccgttcaagtataaaggaag

SEQ ID NO: 37954 - DNA, 765 bp, Sorghum bicolor
  Intron number 2 from transcript Sb09g030640.1 (locus Sb09g 030640) derived from phytozome v7.0 (chr-ID chromosome_9; pos 59181595 to 59182359 reverse strand)
caaacatttcgtgtgagttgctatttacattgcatatgcttataaattgcctcaaatgcatgaaactgctgaatggttatacttttaacaactatcttcaccatatccgccacactttgctgttgtatgctcaggttgattgtgtcttgctatttattactccacaaagtcaactagctgtatgtaaaccaaaaatggcttataggcctattttcaaggaaaagtttgttgctaagatagtaaagtatccattgctaatccaaaatagtggtttacaagctactccctccgttccaaatcgtaagtcattctgacttttccagatacataacttttactatatatctagatatagtgtatatttaggtgtgtagcaaaatctatgaatctagaagagccaaaataacttacaatttggaacggagggagtatatgttttctctagcaatttactgcccttcttttgttattggattgccgtttcatttctctgtttgagattttatttattgtctatttcattttattgatgttctttatatttttgtttgtattacctgctgaaatttgaaaaaaaaaaatcttcacacactctgaaatgccatcatagctagggaggaattagttgtctgttgtacaagttgaattcaatggtggttcaactcttgcatcaagcttttaatatctacgcctatagagaagcagtctttaatgaaaatttggtgccgttgctgatagtaaattttcttgtagcctggtcagggt

SEQ ID NO: 37955 - DNA, 806 bp, Sorghum bicolor
  Intron number 2 from transcript Sb05g001870.1 (locus Sb05g 001870) derived from phytozome v7.0 (chr-ID chromosome_5; pos 2033410 to 2034215 reverse strand)
ggttcagtttcggtatgtctgtgctcggctcacctggggatttaattatttgtcgtacttctgactttcacattcggtctctagttctttgtgtttctgcctgcttaccgctgttatgttatgccactgctgtattttgttatgcgattgctagattctggactgaatgttgtaggcatatttgcattgcatcagtattgtcctggtggatccttgctgaccgtagtgatggttggtcttatttgattgtggaatccacatgcatttttcttgtgcagtgtatatttggagaactcacagacatcttatggatttcaagtggttttaatggtgctctattgcatttttcataccaaaattttattaaataaatgaaaggggttcctacctcaatttgaatttgaaagtatgctcttctgtaaacaattttttttattgcaaataccaaagtaataagcagatttgctttgtcaatgctgaagaataattttataaagtgctccagctatttgaggtttttgcagaaactaaaacctacctggctacccccttgtacacttccttggtaaaaatggtagtgtagctgctaatcgaaccttcatggcattggtggaagcaattgagatatgctagcatatgtaatttcttactgtatgttaagtggttgcagattctaccatatttctgaacattctcaacaaactgtgcatggatggggacttggatatatctcctgtcatgtcattaattaccttttcttttttctttcagccacgacattaactgggcttcattttgtgactact

SEQ ID NO: 37956 - DNA, 309 bp, Sorghum bicolor
  Intron number 3 from transcript Sb10g021600.1 (locus Sb10g 021600) derived from phytozome v7.0 (chr-ID chromosome_10; pos 47649378 to 47649686)
tggtggcgacgagttgattgaggagatccgcacaggtactttatttccttctgttgagtccttcactttccatctacatgaacgttttcttttgtattatgtgttgcatatttgaggaataattccaagttgaagaatacattttttaaaattcagttatcactcattcgtttgtctctctctctctttcatttcaatcagtgatcctttagtttccagcgtcaatatttgatattgtttgattgatctattatttccacctatatgcatataggaggaggcaaactaagctttgacaagtgcatagca

SEQ ID NO: 37957 - DNA, 751 bp, Sorghum bicolor
  Intron number 1 from transcript Sb04g030930.1 (locus Sb04g 030930) derived from phytozome v7.0 (chr-ID chromosome_4; pos 60934707 to 60935457 reverse strand)
ccgtcgccgcacggcggcgggatcaagcgcaggttcgttcggcaccacacgcgatcgctgccagatctaagcagcttttgatcattgtcattcatgaagcaagcccttcattgatttcttctccatggagtgtttgaattttgcatggattttatttcttgcgctagagtcacagctccagatttgtaattcagggaaaatggtgctaatcgcttttcctgctccccacctgctcttttcgtcattctgcatcttccaagaaagctaaagagagtaaaacatcgacaaccaattttttgtttctaacaagttaaaaatagcaagatcaaatgttctagaatctagatacacaaaaaatggttagctgttggtgaaatcttcttgagtaaacaaaaacaactagcatctctactcagtttaaaaaaacaaatacactctatagctactagaatttcagctaaattaattaattaattattagtatggcgccagagcaactaggcctattttcttgagctcaacttgctgcttccttgcaaaccctagttttatcatttttcgcaagatgcatttttttgagatgatcattcacgcatataacaatatgcgattgctcaaaaactaaatttatattaataatctctgatatgatctatatatggcactagttgcttattggtgcttaatttattaattaatttgtgtttgatatgcaggaagaaccaggcaaggaaggtggtctgcatcccag

SEQ ID NO: 37958 - DNA, 575 bp, Sorghum bicolor
  Intron number 3 from transcript Sb01g019810.1 (locus Sb01g 019810) derived from phytozome v7.0 (chr-ID chromosome_1; pos 21684527 to 21685101 reverse strand)
attgttgacgattttgcagatttcttctccgaaaggtgtcatttccattctgtcttgtgatgttaatgatacttatctacataaattgttgacttcatgactcggcagcaaatcaggttcagctgctgaaaatagagattttgagatagcttgagttacataaataaacaccggcagcaaccttcaaatgtgccctttcttcttctcagtaaattcagatgacggactgaaaatagggactttgatccgtactactctgtcttgatttgtcaatgttatatactccagtcatttgtacagattacttgagataaatattgtctcagagctcagcatatttcatttaagatactgccatcagttgtttactttaagcgtttccttatagcactacaatttcattttcatagtctcttaacaggcactttggtttggttccacttcccactatacaaaaaaggttatacacgagcacatcactgtaaaattaaatttgagacttgcagatttttttctgggtgtatgtaggtagctctgaccttgctgaaactgtcataggagctgccaacaaagat

SEQ ID NO: 37959 - DNA, 636 bp, Sorghum bicolor
  Intron number 2 from transcript Sb01g034860.1 (locus Sb01g 034860) derived from phytozome v7.0 (chr-ID chromosome_1; pos 58296049 to 58296684)
tcagccgccacctatctcacgctgataccagccaggtacccgctctgactactgatcctggatccctgattcctgaacccacagggagggttagccgagctacctgctcttccctatttggctgaacagcgatcagtcatgtaatctgtacccacttactcttcatcggtttgtttaatttggaaacttattttattgacgtttcccttcggttgctgctcggttgtgtttaactgaaatcagaaaaataattttctgaacgtaatctgcactcccattcagttattgctaatgctcttctctttatggggaagtgcaatttcatgtaattcacacaccgattcacctgcttagttgcctttaactgaaattagaaaagaaaaaggtttctaaacggcagtagttaatgcttaattcaaatttgatgtaagtatcaatgtccatttccacttccacctgtgctacactgttggaaatgaccatatataatataactacctcaatctacatactaagatccttattgtaccatttcttcatagtagattacatgaatagctctttccaggagattaactaactagaggtgttctctgtacaggacaatcccttttgcttggaacctggttaccgctg

SEQ ID NO: 37960 - DNA, 703 bp, Sorghum bicolor
  Intron number 1 from transcript Sb03g026310.1 (locus Sb03g 026310) derived from phytozome v7.0 (chr-ID chromosome_3; pos 53010157 to 53010859 reverse strand)
caccctgccacgccgcagaaggtgattgtttcttcttttggcacttgtggataatgttaaaattactatctattttgttatttctatttctgtttatgtggatccaacgttgctgcatttgtttgaacaattggtactttggctatacaagtttgtacttgtgggagtaagtaaattgtgcagcaacttagattgcctgagatagctaagctgatggataagtggtgttttatcatataataaggcacgtcaagttttgacgaggaggggggcatgctggggctatacactctagcaatgttctactttgtggactgagggagaaaggcaaggaaaagctaggaaagggggttaagcaagaaagaatgtccttttagattgtaccagtgatatatgcctcatgaaaatttaataaccattgacagagggattattaagtaatctaaagtaaaaactcctttttccaaaaaaatgtccaacatggatgtaaagctggtgctaaaatccatatgtggcttgtttaattttgagtgttggccaccatatgtagcttctcacaagacagatgataggttaggcaaatgatgctgacatgtttataggacactacagttttgctatatagtaatttttattattttaggggtttctgattctgccatctatgataaattgcgcttgcagatttacagctctagttatc

SEQ ID NO: 37961 - DNA, 737 bp, Sorghum bicolor
  Intron number 1 from transcript Sb08g017240.1 (locus Sb08g 017240) derived from phytozome v7.0 (chr-ID chromosome_8; pos 45759276 to 45760012)
aaatcccgccgcgcgcgggggctgcgctgcgcaaggtgaatccctgcactgcacccaccctgcatcttcatgcatacattttcctcgagcgtttcattccaaattaaagccccgttcttttttttttctcccttctctgggtcacttgctgctgctattttcagctaatctgttatgcatggccgtctattccattcatgctctactgtattgtactgtactaccaaatcaatttcagaagaatgtcatgtcatttctctcgtctttctccttgtattcaaagttaactcgcttgagcttatctctcgaatcgaatctacaagccattcagcggtgtttttctcttgtaacggccatggcttagccaaagcaagcaggataacatcagtcatagattttacatgtactggtacagacacctgcgtggctgcgtccacctatcactcttcaacatctgatgaaaggacgggcaagcagaacttgatgccacacacacacacacaaaaaaatcctcatgccagtcctttttcgtttttttttccctttctgaactcaaaggcaggagcactgccatgtcattaatcattatcatcgtaggagatggagcatgcgagatcaagcttctgctatcttgtcgagttcttgacgataaccagccggccgttgtgatgacgtttttctcgccgtcgcaatgcattgcaggaaatttcttccatcaactcaactcggtcttccgc

SEQ ID NO: 37962 - DNA, 1036 bp, Sorghum bicolor
  Intron number 1 from transcript Sb02g029370.1 (locus Sb02g 029370) derived from phytozome v7.0 (chr-ID chromosome_2; pos 64487560 to 64488595 reverse strand)
cgtcgccgcctctgcgcagttcgatttctccagaggtaccgtacctcacgtattttctcttctcttgttgttgcgacttgcgaggacgacttggatgccattattttgtttcagctgccaggtggggcattcttcctaactgcaaaattagtagtactattattatataccaaactatatacatctgaaacaattttatttatttaacctggcagcatcacttgtgtgactgtgtctgcttgtcgtcacaactaatccatagattgtggtcgcaacatgcaaatctcgaaatcgcttctgaagtcacaagcaatcatcgaaacaatttatttattcaacttgcaaatcttgaaatcgcttctgaagtcacaagcaatcatcgatgcattgtctgctcacccactgcagattaacagacaacatggctcagctgatgtatgtttgcagggttctgtgattccattccatatccatgcactaagatgacgctaattgtgctagtatagtattgtgttaggttgtcatgttaagggccactggcaaactagacacagttaacacctcatgtcagacgttcgttggtttgttatttctagcttcctggcacatcaaacaaacaatagtctgattctggtacaatactaaaactccccctcttcactccttgtcacctctcaggatgcattgctgctcctgcgctcagctttcagggtttaggaccaagcatcaaatatgagctgcaaactgtactgaatgctaacctaaaatggcaccatttactatacctaatattgtcttgcctgctgactcttcattgattttgtacctgatgaaattatctgtatactttgtaaactgtcctcatgttgggttacatatatatttctatggaggcctctgtagttttattatccttctaggactaggagcaggatatgctgactggtattttttagcgtaatgaaatatatcaaaaaaaaaacttattctgctattctcttaacactacatatatgataacagctgttcaaacagc

SEQ ID NO: 37963 - DNA, 812 bp, Sorghum bicolor
  Intron number 1 from transcript Sb06g016830.1 (locus Sb06g 016830) derived from phytozome v7.0 (chr-ID chromosome_6; pos 45931468 to 45932279)
cttttttagcgttcaagggcttagtgctcttcaaggtttgaatatttgataaatcaattcgccttccttttctgagaatggctagtgtcattaaaaaatcttaggaaaaaactcttttagattctgttatcttagcaatattcccttttctctctctgtgttttttgtgatataaagatgacttctctttcatttaagtggatcatataatgtgacttaacatataaagcctggcacctcacagaatcatttcctagtttttccccccatcgcttgatgctagtacattgcacaaaaacaaaatgattgctgtggatatttcttctggttcaaacaagcttttcataccaaatggttgctctgaattctgcgaatcaactttacccctgatagcttcctgtataaatattcaacaataggtatccatcttaatctaaacattcataataattatatattagtatcattgttacctttacctcttattgtaatagttaagcatgagcatactgcttttttttgaatctttgccaaaaaaaaaaaaaatctattccatatattggttaataagatgaaactattgctttacatctgcttttgttatgcaaaactgtagctgtatttcttatacttattgatttgcttctttaacgatttaggtacttatgtgtattaaagtgtgttctctgaaaaagtatttgtttgttgtgattctgtaatctgttccttgaccttgtccaatatgttgaacttctcatcgttgaatatataatgcagcgaacatctctggaccggctccagctggacttgcc

SEQ ID NO: 37964 - DNA, 1070 bp, Sorghum bicolor
  Intron number 1 from transcript Sb09g019380.1 (locus Sb09g 019380) derived from phytozome v7.0 (chr-ID chromosome_9; pos 48188528 to 48189597)
cagaaccccggcgcgcagcaactacctagtcccaggtccgcctctcgtcaatactaaagttgggtaccaatgccctagagtcagtttctagattgaatagtagttgcttctgtgttgctattgaattagctaggaggccgatactgaatcctgccaagtttatccaatggttttgttgtgagtaggttgttcgtattgttttgtaagatggggtgcactttggcattgtacatttttccacttaaagatgtgtaaatggtgaatccttcagtctccgtgattctttgcttgtttctttctcatcaactttcctcaggtgtaatgtgcgaggtttattgtaggttatggacctttgccttctgaccttttgttattattaggtttttttcttttgttcaacatagtattttaacatatcagtaggcatagttttagttcaaaccatttaatgcaaaaagtatctgccacaaagttggatagaagtttgttgggaagcatacgtctagtcattttcatttccaactttcatacaactgtaaactctgaagaatactgcctttgcgaaatgaattctcaaagccttttctaggtgaataataccagctcacgaaagacatgaactctgaagtttttactcaaggatcacaactggagtgaaatcacaattataatgtagtgaatagttacagctttgagcatatggtatacatcttctcatcaagaacctccctgaaagttactacacgtttcttttgtggggttatgctgacagaggtatagcagtggacaccaaaagctttgtatgtgacaactcaaattctgctgtttaaatgcccattcaacctatcaatactctgttataggacccttgctttatgagaaagaatgtgatgaatgaactgattttttttccatgggcaagatactttatattttgggggcataatgcaactaatgcttttaaaagcttgagtggatttggattgaaaggtggaagtattaatacttcagttaatcatgggtaatttcttgcagtgcttcctgcgatacggaacactaataatcattcc

SEQ ID NO: 37965 - DNA, 713 bp, Sorghum bicolor
  Intron number 1 from transcript Sb05g005170.1 (locus Sb05g 005170) derived from phytozome v7.0 (chr-ID chromosome_5; pos 6782432 to 6783144 reverse strand)
gtcatcgaaaggtataaccctatatattttgattgtgatgagcgaattacaagattattatttctacaagaaatttccttgcatcaaatcaaactacagtatagtgtgatatatagatggatagatcatcagtagcttgtgtgattgtgtgcgtgtgcaatgtgcaggaggaagccgcgcagggcaaaggacgcctccggcttgctggacggacgcgacagtggcgacgcctgttcagctcatatcgacatgttaagggcgtgtttgattggaggtgttaaagtttactagatattatatcattttctgttttatttgttaattagtgtccgatcataaactaaataggtttaaaagatttatcttacatactctttaactatgtttttagtttcgtaaatagtctatatttaataattcatgtatgtgaccaaatatttaatgtgatgagagttaaagtttacggtaatgctttgactctgacgtctggccgtttcgagacggggtgcctgctcactcagctttctgtcgctcgtgtctatccgcatgtgactcttcttatccactcattttcatccgcatgcagctctcctcgtccactcatctcaaaatatctaccgcatgactcttcttgcccactctctctcctgctacttgctccctcattcacttttctcttctctctctctctcagaaatccaccacaaccttcc

SEQ ID NO: 37966 - DNA, 925 bp, Sorghum bicolor
  Intron number 1 from transcript Sb02g037480.1 (locus Sb02g 037480) derived from phytozome v7.0 (chr-ID chromosome_2; pos 71764465 to 71765389)
gaaggccctctctcctgatcagcgcgccagcgaaggtgatgcctcgcgacctgcttcgagcgtgtctgcttcggttccggttctgtaacgcttgttgggggcgttggtcaccacatgttcgtcgatttgccaactggggattgcgctttgcccgtgctgctcttggctagctttttaagcagacacgtactggactcttagcagttaggagtagaactagaaatataagctgtgaaaaaattgtgcaacttcacggtagattttacattttattttaattcatgagattatgtagcattggggagtgatgagaaatgatatttgactcctgactaagatcagcagataaatggtgtgtttacagttaagtactgataatgaaattgatgggaggcatgtcagggtctttggctgttgtttaccatatgaagtcggagctgcttttgctgcttgtgataagctctgcaatgaggacatggggtggacgctgttggttggtgtgttacctctgtgtgtaagtgggttgttgtgggttagtcgtcaaggctattgtgttctggttttgcagtgttttctgtttattaagctgtgtgtctataaggttttctgtcaattctttcttcttaattgaaaggcagagctcctgccattacgttacaaaaaagtactgatattgaaagcatcagagcagatactagtaaaaataaagatttgtgtgctctaactttgcttttacatgagtgcaacaaagtggtctatacttagtttttatctggtatgtagagacttcaactagtaggatggctatactatactatttcttaccttctgggacaaagtggatttttattgttttgtttgatttgagtgtttgaaggtagaaattttcttgtttttttcagatctggctattcaaactacaata

SEQ ID NO: 37967 - DNA, 799 bp, Sorghum bicolor
  Intron number 2 from transcript Sb01g001770.1 (locus Sb01g 001770) derived from phytozome v7.0 (chr-ID chromosome_1; pos 1540392 to 1541190)
tcgagagcacctccggaagccgcgacctccaggtgagtttccttctcgattcccattcactgtcactaagtttgtggtgaatgtgctgcttgatgtgcgtgcatgagtaggcacttactttttggaccaagacgggacttctggttgcaatagttgagatgaagttgactgcaggttgtagttatctctgatggttctgaactgattgctgccccttgatatgtgcatatagatttaatggctaatttggcagtatcaactttgaaccctgttctgctgcactcatagcagctcttataacgtgccccttggtatttgtcgtggatagtaagatgtagcccattgactgccagtaactgaattgttcatttcaacttgtacattgttgagggtgtctttgattttaggaagcaattgaataaatgtgatataaggtcttgttttggctctttacataaccattacaaagcacatgatagtttgtgcaagtttcctgaacttttcagagccctttatagcttttaatatcaggaactttaatattgcaagtgagtccagcttcggctcatcatattcgttgtcatcatcatttaaaaagttctgctcatgttttgttgtattatgagatatactgtccatgtgggttgtcttcatgtgtatgtacttgcaattttcttgtttttttttcacttctgctggaaaagtagatcagcactgtcattattttatgtacttgattttgattgagtttgtaacttgggcaggtgagaattggtcttcgtgtccttactcggcccat

SEQ ID NO: 37968 - DNA, 906 bp, Sorghum bicolor
  Intron number 1 from transcript Sb10g004670.1 (locus Sb10g 004670) derived from phytozome v7.0 (chr-ID chromosome_10; pos 4155053 to 4155958 reverse strand)
gaccggagctgccaccccttccacatccgaccgtggtgagttcgctatcctttctctttggaagttgctggaacccctcgccttcgcctcctcgccttgattccgtgaacgggttacttggatgttggaacgggtttcttcgtggcgtcgattttcgcaacaactgcacagtatgattgttgcgttctcctgggcgcaatccttccgtttattttgatcgaagtcagcgcttactagaactggaactaccaacttctttcacaagaagattgaacctgttaatcacttaatttttcctgacgagttcacggttggtgtgagtcgcccgaaagttcgatctgattctgtagcccacgctcctagggagcaatatttgtatacgctttagggtgcctctgcattaatttggttcgctttaggggagatgttcttctttcatcatatttgctgttaatcctgctgttcgccttcctatttgctgccagttatccagaaactatcgtctattctaggatttctagtttgtgtggttgctttacgattttctctgtctttcgtcaatctggatctgatcatgatatctggaaagtccagtcaaggtcaccataagagttctttgtcatgacgtgtacttgaatgatttgagctcttcggtggaggtcatttcttgccagatcacatgaattggggttattttgatttctgaacatttggttctgttatttggtctccgaccaataactggagctattttgtctctgaacatctatttcgttctaattgtgtattcagacttgttcattcagttacctgcactgctgttggctagctgtttgattattcctaaacacaaaatgttatgtttctacagaatctaggaggccgccgtggcctgttccggcggcg

SEQ ID NO: 37969 - DNA, 725 bp, Sorghum bicolor
  Intron number 2 from transcript Sb05g027600.1 (locus Sb05g 027600) derived from phytozome v7.0 (chr-ID chromosome_5; pos 62026489 to 62027213 reverse strand)
acgagatcaagaaggtggccaagcagggacaggtatgtgtgaaataatgttgaagcacctgttctcttgtttgatccaatctgataccattttctttgggaatgttagttaatttgtcacagtgaatctgttgactgtgtcactgtgtggggttcggctccaacttggaagctttaagtttaagtaaggtgatattatagaaaagaacatgcccagtgatatgttaataatgcaaaaagtgaggtcatacgaatatcattcttcactgggtatcctattgccagggttttatcttgtgtttctgctttaatgtgtttattttttatctgaccaagttttggaaatttgaggaaatatggcattgtatttgtatctgattgttggtgtgttgccgggttattttttgtcttaatgtgccgatttttggcacgagttaaatcatgtccaaactgtctagttcagtgtaaaggcagctggttatacccccagataggatcagctggctgatttcgcttgctcaaaacctcgtgtgtgtttttttgttaaatgaatctatggtatgctctgttttttggctgcaattgcttttcaggtgaacatgtattatatattttgctttacctgttgaaaagaacgtgctgttttctggctgcaattgctttacatgctcatgtacgaatatattttgatatgctgtgaattgttcacagggagctgtaaaaatt

SEQ ID NO: 37970 - DNA, 743 bp, Sorghum bicolor
  Intron number 1 from transcript Sb05g027600.1 (locus Sb05g 027600) derived from phytozome v7.0 (chr-ID chromosome_5; pos 62027290 to 62028032 reverse strand)
gagcttcatcttcggcaagaagaagaccccagcaggtagcgcctcttctccttgttctagcttgcgattcgtttgattccagtcactccccgatcctcccctcctgcatataggcaggccccgggagaaattgggcgtctttctggtcgctcttggtggccaatcgagaaattcctcgcctttctcggttcccccgccgacgagagagccaaattccatatgcctttttgtgtgtttttttaatatataattgttatatatcctgctgctgatctcgttggggtttcttccacccctgttattcccagaattgtcacaatcatattactgtagttttcccggttctattattcattatcaatccatacacctaggaaaaccccaagatttttcgatttctaggcgtttctctgctctaatttttcaacaaggttattgctttgtttgttcccccatggccctgctagtgggtcatgttcggaaaagttcaaatcaaccatggaatgtatgttctgcccagttgtctcacctaagaaaccacagagagtagtcaataaccctgctgtattgatgctgttgcccattcaccttggcaatgtcctgtgcttctgttggtttaatttaatcctcaggatgtccgtatactctttttttttttcttccgcgaacaacttgcgtgtcaggatgtccgtttacatttcctcggatgtttaacaacagagctgctgcgggagaacaaacgg

SEQ ID NO: 37971 - DNA, 549 bp, Sorghum bicolor
  Intron number 1 from transcript Sb01g043090.1 (locus Sb01g 043090) derived from phytozome v7.0 (chr-ID chromosome_1; pos 66396232 to 66396780 reverse strand)
ttccctggtctcttcgccggcgacgagcacaccaggtactcccacctcttcccttcccttcccttatgctgtgcgaagctgagcaccgaaaccctaacctaaagctatttagctatttgattgatgacaatcctcgtaacttcgaagttttgcaaaaattattgggtgtgcatgtgtacacccatgtccctttaccggatccgcccctggttgtagttttctgttacagctgttatgattcaaagcttcacaactggtattccaagcaaatatggctttagtcacgggaagttagatcttggtgtaaatataaaagccgttctgcattctttgattcctgtgcctttccataatgtttcatttgcttttcaatgctggcttagcgttcatctgttattttcattctcaacaaaaaaaatctttaacaaacaattttttttataagaatgcacacaactgtctgattgtccccctacatcctgataaaatcctgttattttcctttttgttgcagatatctagtcttcagtacagaacttggtgtagatt

SEQ ID NO: 37972 - DNA, 953 bp, Sorghum bicolor
  Intron number 2 from transcript Sb01g047350.1 (locus Sb01g 047350) derived from phytozome v7.0 (chr-ID chromosome_1; pos 70447205 to 70448157 reverse strand)
cgggagttagataaaagtttgcaaggcatggcattttttacttctgaatcctgttttattccattgaatctcttcttctcgatatatatggcaaactaaacctgagaacaataatggttgagtgtcccattgcattaagaggatgcgtcttgtacttattatttatgcaaatggacttcagttataaattcccatttgctatactgctttctttctgattacatgtgcaatatttcctttcaacacatagagccacaaatattctgtaggattgcagcaattacatatcatgttaattttttttcagaacggcaaagctgaatttcattacttgaaagcaatgaaattacaaaaggttttgtccaacaaaccatacgatgcgcctaatcaaaagccaaattgaaatgaacacaaagggttcatccaactggcgctactccgacaagtccagagaatgttagcagaaccagcagaaaaaattgtctaaaccaaagcgctacctacatgcctatgaaggcgaccacagcgcacacgttgatctccaacaaccagaaacctgcaccatcttccaaaaaagcgcttccaacagcgaacattagacgaccgccatcctgttgatactcccatccgactgccacatatcatgttaaatgactgcctcttttgtttcatctcccaaaatttgatgaatgtcagtgtttatatgggctgtcacaagatatgtcaacctacaaatcgtggcaaatgaacttttctatgggatacctttagaagttactacacatagcattgtccagacaaaggcactgaattgatagttattaatgttgtggttacttcaatatcaactgattttatttctctgaacatgaagtccaatctttgtttgacttaagcttttcagcctgaaaataacccccttttgtgcttctcattaggcgtgcaactagaaa

SEQ ID NO: 37973 - DNA, 752 bp, Sorghum bicolor
  Intron number 1 from transcript Sb01g047350.1 (locus Sb01g 047350) derived from phytozome v7.0 (chr-ID chromosome_1; pos 70448185 to 70448936 reverse strand)
gggttcctcgaggacttccaggccagtgagtgctcttcctcttcctctcgctagggcacgcacgacacgcccgcctgtctaggtcatgggcttcctcagccacaccggattaaaattttcttttatttttaatcagggtttggtctagaaaatccgaatgtttgctgattgaacatgcatggctgattttagggtttcatgattaaatgatattgcaatgacaatatgcttgaagacatgctaaatgagccctaagactaggcttcgtgcctagctgcaccatagttactatactatgcaatttctcttgttggaattgccagttgtgtctatttttagttggcaacttgtacagccattagctttccttgatgggaattgctgcacgggcgctgacgaacaaacacttcattgtcaaatgtgaacttgttagttttgattaactattgcaaccatgtgacccttttacttgtattcaattcaattcttgttttatttggacatacttccatgtttgcttgcacctattgataaattgcagtgcagaaaggttggaacgttggtagcaggtagtattgttttgcaagcgaacataagaatggccttattgcaaatcttagtattttgttttcttgatttgacttatcctgtcagacggtaacattaccgataggtgcaaatttattcattgatatcatatatacagacattatttcatttgactactctcaggtgttgaagcattgccatct

SEQ ID NO: 37974 - DNA, 714 bp, Sorghum bicolor
  Intron number 2 from transcript Sb01g008260.1 (locus Sb01g 008260) derived from phytozome v7.0 (chr-ID chromosome_1; pos 7141716 to 7142429)
agcgcctcgtccagtctcccaactctttcttcgtatacctttttatacctgttcatttatgaccttttctcattctgcgtgataggatggtgcaaatcatggccctatgccaagaataaagcataaatttaaaccctaaagagacccaagtttttgtaaaaagaaaaaaaaggaaattaatagattgatttggtttggaagatagtaccataagtttgatttggtgacaatactacagaaaaaattacttccaacaattatacttgtacatgaagttaagttagatgctacagaaattaaaataaattttaaagttatctattaacttgtattaatttgttagggtttgctaatatgttcttttagtactaactcaagtcattgaaaagtgatattactacatggtaattaatgcaaaattacacatattatactatccccatgtcatcttaatcctatcatgaaactttttattggatatgcctgcctaatatacaacaattctcaggagtatgcacagaatgttttcaaagtagattaaaactacatgatagaatttatggggacctgtacaggggtacagcttgcatctgcaaaggggcggccctagcccttagtgcaaatcatctctgatatataggagacgtgcctgctcttgtgccatctgatttgagacgactctaatcatgtttttttttgcccctctggtgcagg

SEQ ID NO: 37975 - DNA, 624 bp, Sorghum bicolor
  Intron number 2 from transcript Sb01g015210.1 (locus Sb01g 015210) derived from phytozome v7.0 (chr-ID chromosome_1; pos 14715037 to 14715660 reverse strand)
aagggggtatgctactttacaatcttctgcaacagttgattactatagttttgtacccatgttagcgtgttgccaattttaccatgtactatctggcagttcttaacaacaagaatcaatacaaattttctaaatgttgtctgaaacatacaaacaccctgtcacaagttccaggttctattaggaatggttttgttgttctctattggccttgtataaattaaaaccttaatgtcgattagtaaatatgttttcgagcttgtttacttgtaactagcaatagtgcggtgattatccagctgtgtgaatactatacttgctctcttgtatgctcctttgtgtttctgtctttattatataaaaaaataaaaaaaattaaagaacatctttttcctagcggctagtagttctgtgccccctttctgtaacaccttagttttggtgtttttgagtttatatttcaattttctttgatgaatgttctagcattttgtttcttgggccatatgatattaaaggaaatttccttgtaattcaattggcacctttgctgtaacacctcagttttgatgcttctagtgtatcgaaagaatgttgtaggctttaagttcatttacttgcagg

SEQ ID NO: 37976 - DNA, 961 bp, Sorghum bicolor
  Intron number 1 from transcript Sb01g040740.2 (locus Sb01g 040740) derived from phytozome v7.0 (chr-ID chromosome_1; pos 64040180 to 64041140)
cctgtccgcactcagagcctggttgtcattccgtggtatgagacctaacttgcctcgatggatttttctcaaagtttcgttttccgggcaattaaatccaaacgtttgtttctccccatcggttcctcattgtttatttgatgcttagtggagcactgatctggcaattaatccatccgcggttctgttgggctcgattaacctattcagcacgcgctaggtccatctcagatgtgccccatagggttttgggtgcggtttaagtcccagataaggaaaaatgtgggttcaactgctcctgttcatttccaattagtatgaatctatggcttggttgttgcattgattgagatggtctagatattgtattgggtagtagctgtacattcaagagaaacaattgggccctttcatcccaaaaaattttgggtttgggtctttcattttgcataatggaactaaacaccatgcaaatattttggcaaaaaggtggctattctccattttagattttggcctcaagaggccaaaccccccaacagcaccaccaaaaaaagcctcaagaggccctcatggaactaaacagtaaacataaccctaaaaattttggcattttgcattccatcattccaaagtagttgccattttgtattttgcattttgtgggggaactaacaccccctgaatacaaaggtgcatattctcaaaaaaaatgtatgtgatcatgtgttttaagtccccattctccttagaatcaaagacaacagaggtgcatttgtttatgggtgctctaaggcatggacatttggccacagagaaatacaccgtagtccgtagatatgcattttttccccaagtggtgttgtccattttcctttcttgtctacttgttcttgatatactgttgttttgcttcgtagggagctcaacttgagtctaaaatattcagatattgctagag

SEQ ID NO: 37977 - DNA, 874 bp, Sorghum bicolor
  Intron number 1 from transcript Sb07g026090.1 (locus Sb07g 026090) derived from phytozome v7.0 (chr-ID chromosome_7; pos 61274484 to 61275357 reverse strand)
aacccaccaaggtatacatatacacactgctcttgtatgtatactattgctcatgccgtttgaattgctttactgttctttattattttttttaaaaaaactttggtttgtatttgtatgattgtgactttgtgaggatggtattcttatcttcgtctacggtttggtctgcaattctgcgtgttgttgatcttcctctttcgtctgttccaaccgatatctgactgaagcaatttatttatttattttttaataattatagcagattagaatatttttttttgtttggaacatatcaatttcatttacatctgttttctcaatctctcctaggattccattttattattgacaatcagtcataggattccactggattattctgtgtcacttaggagttattaggattgagtatattgtgtgttgctagctaacttgtggatccaacgagttcatgtatgtatttgttaacttaaattacttagtactacaaatcctttctaacacctcgatccatacttttcagttttcacttcgagaatgaattcttagttcatgttgttctgtacatggccgccttgatctcctttattctttgcccttattcctaccacaacctctttgatgatgttgtctaaggaagaccaaggagtagtcctttcagattcctctttccttttgtcaaaagctatttggaatccttgattccttacatgctgcctcttcatgaagctttacttattactatataaactgcgcctctaatcaacttccaaacttagaacttttacgactaataatccgttctagaatgttgcttgttgccaaatgctcatcgcctactgtgctgattcttgcagagtggtcatcgaca

SEQ ID NO: 37978 - DNA, 731 bp, Sorghum bicolor
  Intron number 2 from transcript Sb09g022210.1 (locus Sb09g 022210) derived from phytozome v7.0 (chr-ID chromosome_9; pos 51884394 to 51885124 reverse strand)
attgcccatctcgagaggctctgccgcaccacgaggttctttctctaactaggactctggaatatcacaattttaagtactgcaattagctgtacagcagaactaaagaaatggccgtcagtttgattattggccctaagcacggcacgttcagaaagtagaataaaaaaaaaaggaaagtagtagtgcagagctaaatgattgtttctcaatgatcataagagaatatttggtctagagtagggaattctctatagtggtcatataagaacagaaaattgcaatagttccttcattccaattaaagacagtactacttaaagaacaaaaggtacatttttggaatatgaaaaatggttaccttcattgtaccctgttgtcatttttttcattagctgttgatattgtcttctctcgctagtcacaactcacaatgataacaggagctgtatgttctatgatggttgtactagataatatgcaaaggcgattttcttttgttgatgtgaggaatctatttaagtactatgcatgccgactcaacaataaatgaatacttgcttcaattgttgacatacacatatgacatgttggagattagctgaaattgacttttataatgtcttcaaatttcaacctattaaaaacagtacaagcttgacgaactaatgccgtttgacactcttttgtttgcagcatttggacggttgacttagcatatctgttaaaca

SEQ ID NO: 37979 - DNA, 1021 bp, Sorghum bicolor
  Intron number 1 from transcript Sb03g028430.1 (locus Sb03g 028430) derived from phytozome v7.0 (chr-ID chromosome_3; pos 56291166 to 56292186)
cgcccaggcgcacatcaagctcggcaactacactggtgcgggcagtgctcttccccccacaccccctcatccttccttgctctctcctactactccgatagggtttgattcgattgcttgtgcgcttacgtgtggggacactagttcggcgcgcgtgtgaatgtaaccgcaagggtttggtatagcgccgcgcgttttttagaaggcgtttgattcgctgttttgttgttgtgacgactgaactcgtggcaattctagggtagggtgtgggaggttaacgtcagcctttggtgtagacctggcgatgaatcatgtgattcgaattttaaagaggcactatatgaattggggtttcagaaatggtcgggtagagttaagtatatgattagccagagttgggctcgttgttggctgttgtgtggccagtagagtatgaagattcagattacttcaaatgtccagagctaattatgatgtttggggtatagctttgacttgtgtgttgcaaggtatattcctagtgccctacttgttgcctggctgtgcgtgtgatacagtttatctcaagttcctggtttaactcaagttccctaattgctgtgtcgggatgtttgttgtaaggtatgtccctagtttgctactgtcgtggtgctgtgcatgtatttaggaatgcagtatttgttcacactaagaaatggaatgcaaagtttgtctcctgtttcatctgaatcagtaggaaccataagaaacgcatggtgtggctgtgataagaagtggtgtgtaaagtttggcttcagttacgtgtgaatcattgtaacctaattactaaaataataaactacatggtgttgtcattcattgcaacctcctttgtttgtgtaacaacaaagtgcacatgaggtttattttctgtttgtagtgttattgatgctaccaccattggcttgtatatatatattttttaaacacaataaatttatagcactaaaggaattaactaaacttgcagaggctgtggcgg

SEQ ID NO: 37980 - DNA, 955 bp, Sorghum bicolor
  Intron number 1 from transcript Sb05g008510.1 (locus Sb05g 008510) derived from phytozome v7.0 (chr-ID chromosome_5; pos 16198872 to 16199826 reverse strand)
cttcaccttgaaaagattaggcaacaactattctagtaagttaaacttccctccacatatctttagtcaatatgttgatgtagttgttcttgattcacttggatctgtaggatttattacataaatctatgactatgatccatccaactcaggggctgtttagttcctgaaaaattttgtaaagttttcaagattctccatcacatcgaatcttgcggcacatgcatgaaccattaaatatatatataaataactaatttcatagttcgcctgtaatttgtgagacgaatcttttgatcttagttagtttatgattagataataattgtcaagtacaaacgaaagtgctacagtagccaaaaccaaaaaaatttcaccaacagcccctcaacatagttgtctacaccaaggttgagatcctagttttgaacttatatgaccctagcaatcaatttatagaggatggagattgtacggagtctagtaattataacacatatgtaatcttggaaaatctgagtcaaatttctcttctcatgtatggaaagaattaacatttgagtatcttctaaaattacatcttttaattgggatcattcactcagaggatctattatataatggtttgctactttttcttgataatagacttccataattgtacatctatgtgagcatagttggaggtatgggtgtacagctccattaccatggttcaagtcacattaggctctattttgggtatctttttttttcttaatgtagaattacaaggttaggtgcctccaactttgtagttttacaagtaccttcatatttcaaaagtgttcttctatagagtaactggtgttgaattcacttccatttttcatgtaacacaaagtttaaaaatataatcaagtttgaatatgaaaatacatatttatttgtttttcttcgatgttatagtgccatc

SEQ ID NO: 37981 - DNA, 664 bp, Sorghum bicolor
  Intron number 1 from transcript Sb01g049810.1 (locus Sb01g 049810) derived from phytozome v7.0 (chr-ID chromosome_1; pos 72810554 to 72811217)
cgacgactccaaggccatcgtcgctgttgtcaagggtacgtgtaactagttacagtaccatccttgttcgttacttctcgttcatcctgacaacacgattcctgttatgtctactactttgcactagctagctagttgaatttctttttgtacaaaaaagaaaagataggagctttagttggaaatctccacaaaccaaactttacaaagatcatgcggggatcaatttttcttctagccatctaggtaggagtagtacttaggtactagagagggtctgggaatttcagaaaagcagatcgattaatttcgggacaataagttccctttatttccactgtactgctttctttgagaattgaagtaaaaatgagacaaaccaaataagaagttaacaaactgttgctgtatgctactaataagttttaatttccctggcaacatggattagttttcttcacgaactgcaaaacaagataattaaaaaatgtgatgcctagagctagaggatcggagatagaagaagaaacagcaaccgaacactgaagcactgacaactgatcgagtactgacaaccaaaccttttatgttctgaaaaatctgatatgcatgtctactctttttgccagacgctgctgagaaacctgcaactattggaggttca

SEQ ID NO: 37982 - DNA, 709 bp, Sorghum bicolor
  Intron number 2 from transcript Sb01g014220.1 (locus Sb01g 014220) derived from phytozome v7.0 (chr-ID chromosome_1; pos 13429071 to 13429779 reverse strand)
atcagaggaagatcaaaggaagggaaagaccattggtttgtagtgctctgccacatatttgcatgttttggctatctcaatttagggacaaatagattgcatatctaattcctaaacttttgtggtttagttgcgtcttttaacttgagactaaactttcagatttgctaaactgttataagttagagggaacagttctgaaacctgctgtaacttagcaaccagtgatgccgaagcactttgctctaataatggtaatgcttgatgatatcctctgtgaagcaatactaattcaaaactagtaaaacactttaaaagacatcatagttccatttaaattcaaaaggctagctcttcactaatttcacatgctggctgcaaagtcaaattatcaacctgaacatttgaggaaaaaattagcaacctgaaatagcatgtcatctctaattacggattaatatacaagttcaggtactacatatgtaatccttatgttcaggactaaaaacaacacagctcatttttggacagttttttcctataggtattaagtttcttctctagtaattaccagaaataccagacagctggtttttataaggtgtttgaggaaaagcatattcatataagcacggatagtcagaaatatgaattctaatgctgtcatgtttttattttaattatgaaccagataccgggcatcatttag

SEQ ID NO: 37983 - DNA, 823 bp, Sorghum bicolor
  Intron number 2 from transcript Sb09g014430.1 (locus Sb09g 014430) derived from phytozome v7.0 (chr-ID chromosome_9; pos 36172670 to 36173492 reverse strand)
cgcaaacgccgtcggtgtcaccctggggccacgaggtagccaacgcctaccgctttgctactacagcccatgctgtctgttcgatgctcagttgtgttttgtctacataattactattgctatttacatggtataaaccatacgcttcatcatggaaaacacggctgcccatagactcaattgcagttcctctatagaactacaactggaattaactactcccaggtctgtccccgagaaattggaagtgctgttataaatattattccctccattccaaattataagttattttaactttggagactcaaagcatctcaaatttgactaaaattatagagagaattatacaaatttatgacatcaaatagatattactataaatacataattaatgaagaatctaatgatacttatttggtatcataaatattattattttattatataaatttggccaaacttaacttataatttgggatggagggatactgatttggcgctcaacttaactaactgatgcgaacacatggtttcaagaatcccaagaacatactgtgctgtagaataaagattacacaaaagatggatgtcttcattttcattcacagtgcatgtacaaacacaatttcccaatcaagagctgctttttggaattgaattaactcttccattcttcttattttacatttttaatcatttcataatctgatttgtttttccaattttcctaaaatcttccttttccaaaaataagtttccaaagacatgtctgaaaagtaaaacaccattaatcatcaatataatgttttcacagggagga

SEQ ID NO: 37984 - DNA, 734 bp, Sorghum bicolor
  Intron number 4 from transcript Sb08g022280.2 (locus Sb08g 022280) derived from phytozome v7.0 (chr-ID chromosome_8; pos 54086608 to 54087341 reverse strand)
cagacgcagaggagaaggggctgatcattccaggcgtggtgggtaactcaaccttttggagcatttcttttgttgttcctagggaaatagcttgggttttttatttgcccagtccccactatcttatattatattcaattggaatgctaattttatattgccgaatccagaaggatgtgctagctgccattttctttcttgagcattgcataagaatattatcaaatgtgaattgtgatggtctgcctgtccatatcaggtggttgttgagaacttgggattataagtttatattctgagttgcttttgtgcctagtagtgccttcttggagcatatgcttcatttttaaagtgtttgctttgatctgtccatgtggtgactgatggataggacatcattaacatattgctttgagcctttgattaatggagtatatatattttaagtacaagaggcaagctttatatatcttattagaggagagcaaagcaattttgtctcttcatttcgactgcacaattataacttacagtcattggatagctcttctacaaaaagtacaaaagcatacttctcctagtactcatggagaatccaattggtattattctgcatggtacatagcaaccattgttctaacctggtattgttaactcccatcttagaaatagcattttgaatggttccagcacaaaacagaagccatttgtttggcttgataggtggtgctaga

SEQ ID NO: 37985 - DNA, 532 bp, Sorghum bicolor
  Intron number 2 from transcript Sb04g030100.1 (locus Sb04g 030100) derived from phytozome v7.0 (chr-ID chromosome_4; pos 60128746 to 60129277)
ccagtgcctctgccttcttccttccattagaacgtgtaagtttgtttttttattttatttataaatgagcattaatacattcccatgtaatgctatagcttatattagaattccaagattgttgatttaaaaatcgtaaggcttgcagtgcataacatttgagtctaactttaatttttgatttgaaatgacatgacacattgatactaaggaaagagtcagccggttctatttttacaaggctttacagaagcaaccatactaatcaccagactagactaactcattagcaaatgtgcagagttttcattagcaatgcatttttttcacttaacattgggtgtgttcttcaaggaagtttagagtgggaagaacgtgtaggagttcacacgtactaaaatataagatcataaagatggacacacgaccttttaagattcactatttttttttgtggtgctgttatttatttaaaaatatgtataaactatttccaggttgtcagagcactgaatttgatacgtgatagctg

SEQ ID NO: 37986 - DNA, 465 bp, Sorghum bicolor
  Intron number 3 from transcript Sb01g048500.1 (locus Sb01g 048500) derived from phytozome v7.0 (chr-ID chromosome_1; pos 71512608 to 71513072)
gcgcggctgcgacagacgactactgcgataaacaagtgaggccccgcccaccattgcaattgcgacgcaacaagctatcattaagctgcatgcatgtccggtgcgatggtgatgacagcatctccatctaaattatgaaggagtactatttagaaactcatttggataaaaccgtttttttatatctttgcacactccaacgacgtttctatatcttgttcacattttatagaatcattttctctctttatccttggatatatttgaagaaattcgaaatagagaatgtttatatttgaagactcaatcaaaaaggtcgttggaggttattttttttctgtaaaatttttaatcctataaattaggaatgataaagagtttattggacggggacatatgagatgaataacgattttgtttccgcgtgcagggcaaggtgtccctcatctccacgaacggtgtcca

SEQ ID NO: 37987 - DNA, 638 bp, Sorghum bicolor
  Intron number 3 from transcript Sb07g015170.1 (locus Sb07g 015170) derived from phytozome v7.0 (chr-ID chromosome_7; pos 37953498 to 37954135 reverse strand)
gccttgaaggcaagaatctccttatgtacaagacattactggatgacatctatagggacgatcctctcaaactctacgggtgcctatgacggtcattcgtcttctctaaattatgtggcttgatgtttttttttacggaggttaaacctctgctttttagaaagcaacgtaacagtacacagactggggttaccagttcaaaacagaaaagcataaaaaagcaaaaacatcctatgcctaatacatgcatgttagcttcagcttatttgccgaatctgccatccatgcagtagtatttttctgcacaataaatcaacgaacagtgctctcagccatggtttttctaccaagcgaacgggctcaccacatcacagatagactgaactagtcttgagccaacttgtgatggattccttcatcttgagaatttgatcctcgtccttctccttaagatttggcgctccatttctgcagtatgtggcttgatgttttgtacttttgtgcttgatattaagttttgggatgcagcttgcacctagaatctcaattgagtgatactgatttagtaatttattaggttgaagctgctcggtttctttgctgccgtatgttttcattctgaattttctaaatgcagt

SEQ ID NO: 37988 - DNA, 591 bp, Sorghum bicolor
  Intron number 2 from transcript Sb06g016130.1 (locus Sb06g 016130) derived from phytozome v7.0 (chr-ID chromosome_6; pos 44561617 to 44562207)
cgggcagatcagctccgcttctggtgccagtattggtaatgattcagaagcctttttttttctttttctttgggtcattgatgatacgctttagcttcatgcgattttcatttcctcaactgggtgttgttgggtggtgatccgagttcgaactcgtactaatagagagggttggatctgtcgaacatggtgctcgtccacaaaaggggatcgatttcttctatctagtaggtacagtgttgttgcgcttgatgtggaattaagtagctaattattataattattattgtttacccccttctatgaatcatagaattgtgtaaaacaaattcagtagcaaaccccattctccttgtatgatattattaaggattatatgtagcgagttcgtagttgtgatgaataagcacaccatcttctagctcgttgctgggtgtttctttgtttttttttttttttggtggtggttgacttcagacgataaactgaaactgaaagtctgcagtgtcataacgttcacttttgggtcttggtcttgctaagtttgactagtttcagcaatcctgcaggatcatcttggtcctccttgtc

SEQ ID NO: 37989 - DNA, 587 bp, Sorghum bicolor
  Intron number 1 from transcript Sb08g003920.1 (locus Sb08g 003920) derived from phytozome v7.0 (chr-ID chromosome_8; pos 4597401 to 4597987 reverse strand)
tcgtcgagaaagaccctaccggacgattcatccgtgtatgtaggcttcacttgtcaaagcttcgtttcttcctggatcagatccgttttatgtctttatatgatgattatatgatttgatgtgtgatgacatcgtgagctgagtatggttatgaacgcaagatttacctgcttttctgttttttttcctttcttaatggtgtggcaccgcggcgtgtctgcagtacgatgagatcgtaggatcaggggctgtcaagattgtgtatccttcgatcaatctcatctgttgatctttttgtttatttttgatttttgactggacacaatgcagttttttttgataaatacgaaatcaagaccacaagtccacaactgtcccatgtagatatatcatcaatcaactgatgaagctgaaaatgtgtgacagacaaaattgttgttacttttgtggaaataaaagaacacttggcaggaggaagctaattaatctatctatctatagagatccaactgctcctgtgtgttctttaattctgatttgatggatatatagctatagagccttcgacaagctggagggtgttgagg

SEQ ID NO: 37990 - DNA, 591 bp, Sorghum bicolor
  Intron number 2 from transcript Sb01g031190.1 (locus Sb01g 031190) derived from phytozome v7.0 (chr-ID chromosome_1; pos 53768256 to 53768846 reverse strand)
ccaacttcagaatcaaggtgaattatggctttgagatcacatttactaatatttgtttgttcagtttatgatagttttctgaaaacaaagatgatttggtggcattaattgcgatggaatgggctgaagatatttactcatggtgtgattgacctgttcctttattctttgctgagcatgtcattcatttatattcagctttcaaagtagtgttactttctcctgataatgattgatatggatgcatacatggtctcactcatataattgtaggtatttattttaagatctgcataagcttatttactctgaaacataatagatttggaagcatacatgttgtcaaatgttaggatcttcttaccttgttgcccaagaggcctgcatctgttttgctatattcatctagaatgttcaaagtagttgaattcaaaattgtagttcatcataagtaataattttttttagggaattcatcataagtataggtgatatcatattgttgttgaaatgaaagtcaaatatctgaccaatagttgttgattatatcatgcagattccagtctgtagcctaccttcagcaaatctggt

SEQ ID NO: 37991 - DNA, 564 bp, Sorghum bicolor
  Intron number 1 from transcript Sb01g031190.1 (locus Sb01g 031190) derived from phytozome v7.0 (chr-ID chromosome_1; pos 53768922 to 53769485 reverse strand)
tcgccaggcctgtgcctttcggtgacggccagaaggtgagatattttgcttccctttttttttttgcgtggctttctgtgatttttggtacgggagggatttggaaattatatgagcggcggtgttgtagtttattggaggattcgaagccgttttgcttgagttggtcatcttttctgtgctcatgaccaagtccttcctagttgtgacccctgaaacatttgtctgagctcaattggagattaaggaagaagaggctcaatacttaccacatgtagtagtatcttcaattgaaataagtcacttctttaccttttggaaaatcgcgttctttgtttcggggcagactcaaattagtggcaggtaaattgttgttcagaaaataggtttccccatctttggcttcaattatttaaactgttggcctttatatgaagattgctacattttatgactattagtagtgtataaggatatattttttggcggtagaacatgaacaatatagctaaaagtgtatatgtttgcaaattgtaggaattctggttggacaagagcaaaggc

SEQ ID NO: 37992 - DNA, 766 bp, Sorghum bicolor
  Intron number 1 from transcript Sb03g037790.1 (locus Sb03g 037790) derived from phytozome v7.0 (chr-ID chromosome_3; pos 65742237 to 65743002)
cgcccaaccgcaagtgcatcaattgcaacagtgtggtaaccctctctcgcatttttggttcactaattactaagctgattgggaggcgtctgctgttctacttcgcggatcggacatgagcggcagtggagtctgtctgtcgtttggaatgttacacagttagctcagatttgctaaaaaatatagagttctttgtgaactttgtctcgttggtttatattttcaagctgtacctgttggctggaagattattattatttctatctgttgtttccgacatcagaacatgacgtattcgttgctattttactttgatcacttgtggtacttctgtttcgtccctggtctgctctggattgtgaaactctaaatgttgctactgtttcctaatacacaattgcttgattcgtatgttgataggtagttttttgatttatttgggctacttatggtttcgttacttttgtctgcaccttctgtttatgtttgagaattaagttgcttagttgactgaattgctgagctttttagtattttaattgtcagtaagtactatttgtgttgcatttaccggtttatgtaatatatagtgtggcagtagagttgattttcccatttggttaactgttattgctacctttgatgttcagcacaaaactttatccagtgatgcattttgtctcagtttcttgcccaagtgttttctatatactgttctcttgatttcacctgaaccacttttgttttgttatataggggccacaat

SEQ ID NO: 37993 - DNA, 924 bp, Sorghum bicolor
  Intron number 3 from transcript Sb10g023040.1 (locus Sb10g 023040) derived from phytozome v7.0 (chr-ID chromosome_10; pos 51411494 to 51412417)
tcgaggcgctcaagtacatcagctatccggctcaggtatggttccttctgcttttgctgtatcaccttccttggttgttttatgcactgtccaggatattgtggtatgttaatacgtaataggttccggtaatatagttcctgacgcttatggattgagatgttctgatagagttaattgactatagggagctctgtggaagtgcttccttaagtgaacatttagggagaacattgtgttgtttggaaatgtagatgtggcatagtggcgattgttatggattttgtggatccatgggttcagccatgtggttctggatttgatattgctgtgcaggttctgcatttgatatcagttacctaacaccacacagggagtttcagctcaactcgatttgattttgtccccattcaaccagaatgacaaactcctttgttcacgtgaacttggccacaaatcaagttagatgactctttaagatcctctgaacatcctaatattgaaggacgtgtgttatgaatttcttacttcaagatggtatatgaattatttctatggtgttcttgtactaagtatgcagctcatatatgctattaatatttagatgactgaatgttctattatgtcagtagaattacaagataggctttgaagcacataaagttgtagtcattgtttgatattatgtgtcctcgcatttactgaaacaacgggataaagctatatttcctttcctttctgaataccaaattctttaatgtgtccccttgtgtggaatcaagttttctaatttagctagagcaatacttgaaagaggaatcacaattagtttcttttcatgtggttgtataacaatttccagtaaatgatgaatcctgactaattcactgttggtgtgaacaggtgttggcaaaatcttctaag

SEQ ID NO: 37994 - DNA, 909 bp, Sorghum bicolor
  Intron number 1 from transcript Sb03g028120.1 (locus Sb03g 028120) derived from phytozome v7.0 (chr-ID chromosome_3; pos 55898771 to 55899679 reverse strand)
cagagcgcgctcctccacgagctcaacaagttcaggtgcgttgttttactttgacaattgggcgaatgtggttccggccgagttggattgcgtggtgatttatacggtttcgatggtttgacttacctaaggccattcttagtggagatttttatagctttaattccaaggttgtcatgccatgtgaaatgaaatgaaacttggatgaaacaccgactgtcaatggagagtttcattccatgtttcataggcatttaattttaagactcatagagagttggtaatcgtgctaaaagagtttcatctagatgaaacccatttcttctctctcttcttaaatacagtgtcatgtcatccaaaatgcttatgtggcagactatttaatgtgaatgaaactcagatgaaacttctactgagactgacctaaggaccaattgtaccaatgttcttgagaaatttgtggctatgagttcccaacttttgcgatgtcgagtggattctgcaccctagatatacctctatgttgatttgcctcaccaaaattaataagaagcaacgtgaggagtggtagacggttcgtatactgctggatcattgacaggagaaaacacaaatatgaatgatatggaacttatatatcaaaatactcttatagttgagtcctagtacctgcactatcattagtagtggttgtattgttgacataagcatcggagtccttttctctgccatcttttggtacaattaaccctttgaaatcctatgacaatgaagaaagttttcttttgttggctttgtttgtactgaccattgcatcaaatcttctccaaattagaaactaaagaatggtatgttcacctatttgaatttcctgtttcgatgtgcactgaaaatatggcagccctgaag

SEQ ID NO: 37995 - DNA, 512 bp, Sorghum bicolor
  Intron number 2 from transcript Sb10g019710.1 (locus Sb10g 019710) derived from phytozome v7.0 (chr-ID chromosome_10; pos 42142815 to 42143326 reverse strand)
gcagtctctgcagtttgctttgccttcaaacagtaattggtaaacatttaagtttttctgatacacgagttgttcatgctgcgtctccttgtctatggtctgctgaatttcttttcttcaatcttcagtagttgtttattcaagaatgcaagaaaccttgtccttcggatcacaacaaaccttatctttttccgttaattagaatgtgtgaaaagaaaactgttcacacaaaaagttgggtgattttgatattcttaggtttttttatgaggggatactttaagattaatccaatgctataagctcttgatactttgtaaagagtacatccaaataggttttgattaatcttaactacaaacttgctgtttctttcgagtttgatacttctctgtttctgtttctggaaaccagtaatgttaagcgcatttgaatatcttaatgatacaaggtatcttagttattgaagctcaataccttttacagcacgtccaatatcgactgcagtaaga

SEQ ID NO: 37996 - DNA, 552 bp, Sorghum bicolor
  Intron number 2 from transcript Sb01g041440.1 (locus Sb01g 041440) derived from phytozome v7.0 (chr-ID chromosome_1; pos 64763586 to 64764137)
gcactgccgaagagcgcattcgcttcgagaaatctgtgagtgattgattcccttccgtgtttagatttgtgtggtgcttctagggttctggttttcctgcttagctttgtaaatctgaaatatgtagtgattgtttccccttgatgaggctcggttgtttagttggtcaatatgggttctactgccttattagatagatagaaaagcgtgaggtggccagataagatcgttgtaatattttgtaagttctagtgatgctctcaatttgatttcatatgccagtttagttagatgattactttcgaaactttaaatggctctgaaaagaagcaaagttttacttttgagtacataagttagagaaccagaaaccaggaaccagacaagacgcagaagcaaaattggaatatggatagtcatattaatatcaacttcagaaaattatgaagttaaggccaatagctgttttttcagcctttcataggaagggagttttactattagtttctttagttcctctctgtctcaatgatatttttttttcttgcacag

SEQ ID NO: 37997 - DNA, 833 bp, Sorghum bicolor
  Intron number 2 from transcript Sb08g000900.1 (locus Sb08g 000900) derived from phytozome v7.0 (chr-ID chromosome_8; pos 829402 to 830234 reverse strand)
ctccggtcgccgagaccagaagcatcccagcagttgtaagttactctccttatttttttttggcagatatatggttgctaaagattctaagtgtatacaaaactatcatattagcagaagaaaaatctgtttgttctttgaatttgaaggtgtatgtaaatgagtgatgatctagaaaatcagggcctaaagggaaaagcaaactgcctcattcatagttatgcggccacctagtatagaacataaacatgcttcttcaaaacactttgctccaatcctatctagtacctgatgtgcttgtttcacttcttttatttttacagatacggatgtgagagtatctgaagtctcctatattaacttggcattgcgaaccttccattaaatttattacaagtatgctaatggcacctaagttattttcaagtcgagtgatgtaaattagtttaactgtgattgtctagtgatatctgagtactgtcacaaaagtttgttttaggtttcatggcatttccccaacaatattctttggtcatattatttatctgtaaaattgttaacaccaaggtcccctctaaatacgggaatttagttatgaagatgcttgcagcctcattctgagcagtttatgaaccatgaactatgcatagttcacaacatggtgattaaattaagttgccatgggacatgaaccattcataggtcaacttgtgaattcggatgactaaattagcatagcattgcaggatctctgattgattgacatgtttctttgatacgtcttactatgctttgcagcaagaaactggcctgtgcaagaatcttcttcaaga

SEQ ID NO: 37998 - DNA, 852 bp, Sorghum bicolor
  Intron number 2 from transcript Sb04g009940.1 (locus Sb04g 009940) derived from phytozome v7.0 (chr-ID chromosome_4; pos 12791463 to 12792314)
caggttggtattccctggattatctctcttgattggttgcgtgcggctgatgcagacacgcagtcgtttggtttcttctgcagttagggcaactaaagcaacatattgtgatctgtgttctatatgctgtggtcctagaaattttcatttggttaaaagtggagaactgttcttccacgcttttcctgtcctgttttgaaattacgaaactcttagatagaggcctgaaatacaatgaactcaatccctttttgtctgataaatttagcgtagggcggattggacgtgcggttcagtgtttggtggtggaattgctattcttttttatcataaccaaagcattacccactagggcttgttctacatgctgcttgttatttgattgagcttacattaatgctttggggcgttaattttgtataatatatatactctttctggagtgcattgtgcatatatttttttcgagtgttgtggaggattgtagttgtatgggacatggatcatttcacatagccctggtgtaatagggacttgatataccttctgtaagagcatggatttgtgttttgttgtttatttattaaagttcactcgtacacactttgaatttcagatattgtagttcatttctctgtctggcagactttaagaaatgtggtgggtgttacctgggcttgtgggacttctgatgttttctgcccttttctctttatgctcactttggctcaactggatcttagtcttcagtgttcgtttagctaggttttctgacattttaaatacaatatttctaacacaatttaccatttgaaaggctagcgatagattcaacataaactctcagcttga

SEQ ID NO: 37999 - DNA, 972 bp, Sorghum bicolor
  Intron number 2 from transcript Sb08g000540.1 (locus Sb08g 000540) derived from phytozome v7.0 (chr-ID chromosome_8; pos 474806 to 475777 reverse strand)
cgtctctggactccagggactaggcgctgagatcggtatgtatgtctgctcatcatgaacttcgagcttatgtatgtagtacagtaataagttctgagataaaggccagctggtttaccttaattgtgcgcttttaattccttggccgatctgatgttgcaaaatctaactattgttgtgttactaccttctgtaaattgatgctttccttccttgtgtaagagtaagatgcttccaccagctggtgtgctgtgggacttcatatgtgtttgctgcctcaattagcacacctcacttagtttgttttcaccagacaggacataattctcattgttttgtttccatgtctgtataaacacctaaataacatttgaacttctacaaccgaaaaacttatcttaaattcttcaatttcccgacaagcactcttgtcgatgcattaaatattcaaaccatcaagttgtttttgagactagctgcaacttttattcttgtgaactcaaactgtctcaatgaagcgtttgcccctaagtaactttcagaatgttggtctctgcacatcttactaagctctctctgttttggtcatcagtaccaattgctatcctgaatcaatcagcaccaggttgctggtcagttagatctcctgtgtcacttggccaaggattaaacatattttattggctaatggtagctatgctttctaaaattggatttatgatgcaatgcttttagtcaccagcgcaacatgtgagcttcaggtctaaaagcaaaacatgttttccctagtgtgtcagttcttttcattgtattgatgtttagcgttcagtatatcatgtttaacttgtgaattttaaaattaataagaattcagattataccttttgctctttgtatttgtatacatgattttcttatgatcacttattttctccagcaaaaaaccttgcccttgccggtgtcaagtctgta

SEQ ID NO: 38000 - DNA, 662 bp, Sorghum bicolor
  Intron number 3 from transcript Sb05g023450.1 (locus Sb05g 023450) derived from phytozome v7.0 (chr-ID chromosome_5; pos 56009569 to 56010230)
gaaggtttaaactgtttgaaaggtacaccatgccctatcaaaatttatgagttgcttgctgattgtgtcaaactttgttgaaacctcgtctgtagacatccacatacatatattcagtacatttggcttgattgcttgttaaaagtgtatgtattcatttttcccttttgcctttgacatatgtactttacaaaccaatgttattttgattctgacaagcacagaaagggcttggaggcatcttatattcttatgtcccaaacaaatgatatagaccttgctacaagtttgtttaatcacagtccatataacttggattctaggaccatcctttagaattatctgtttcattatgcgcatggtctttctatatggttgctcataatactactgatattaaatgtgtagtatctctagtatagtttttgtaagctctagtacatgttgtatagatcctgagatttggtttaaagaaattgtaaggagattggacatagcagcctaatgctatttgcaacaacctgtaatttgagttgccaaagattaggtgcctctgcccttgttttgcatagcactgatccaactctcatctcctcgcttcaaatatcttcacaatggataattgacttactgtgacgaaactttgatattttttgacagtc

SEQ ID NO: 38001 - DNA, 887 bp, Sorghum bicolor
  Intron number 2 from transcript Sb08g006430.1 (locus Sb08g 006430) derived from phytozome v7.0 (chr-ID chromosome_8; pos 9827359 to 9828245 reverse strand)
gtttaaggtaaggttcatgttcaggatgacaaacccattaatgacttgaaatgtagatgggcagcagtggcttcaggagatatcatgtgtagctaagagcctaagatatgcagcttccgctgctcagccccaaaatatgaccagtgggttgtgaaacttcagcaaatgctcatcttgctttctaatctaacatgaactattgactgtgatctaagtacaactgcaacacagcatgaccaacatgcaaagtaagacatacaaaatgctgacaaagctgtatgaagcctttacttgtggcaatttgttatcaatctcttaatttctgcacaaataattgaaacagcaaaatcttagaagtgactgttaggaatatagagccaagtggtatactactgtctactattgcagccaagtgtttcaatgggtaataaaagagttttgaaacacttcctacgtggtaaagccaagaaaactagtaaacatcaccaagacactgacaacaggaagccaatactagaaaaacgaaataacatccaagcttgaagcttatgtattagctctaactgttctaacaatcacgaaactttctcttctaataatcaagaaactttggaattaaaatttgattgaatgaggcatttagactaccagacatgatgaatcatttaacatataaaaaaccgacaaatgaatcaaagcagatccactggagggggagcagaggacatgagactggatagactgcacgcgctcgagaaaggtcttgaactctggtattaccagacacgctccgcaaaggcaagacaactttatcccccttcttatgtccaaactcattcagattatgcaacaaactaatgtgagacatcttttatcagatgcagatc

SEQ ID NO: 38002 - DNA, 956 bp, Sorghum bicolor
  Intron number 1 from transcript Sb05g008850.1 (locus Sb05g 008850) derived from phytozome v7.0 (chr-ID chromosome_5; pos 17838199 to 17839154 reverse strand)
aatctaaaagacacgtttaaaaacatttgtaagttccctccatccaagcgcctcttgtatctcgtcgtactttaattattatacttatttattctgagttttcaagttcatattttcttagtttaattaagtccttcaactacgtactaatccaacattaaataccggatggcaaattttatttcggatgcagtgagagggaatctttctgtttatcgatagtattccttgtagatctacagagctcagctttttttctctcttctgtttaagaggcaatctttatttaagaggcaatgctgagctcagctttatctacagagctcagctttttttttttccctcactaccttaaagatgaaagaatttaagaggcaacctttatttgattttgcatgacaaaaaatcgtagtttcatagcactttttcattgaatctgagtgaagcgcacatgttcttgctagttgaaaataatttccatgtgggatttctaaaaggaccctgtctctagaaatacgggattctaggtgtagttctctttaaactgcaactcataatctatttctgtgtgtagttctctttctcaactgctcaaagaaaagattaaagcggagacactagaagaaaaccttgtttattagcgcaacagatgcaagtttgtctatatactacacaggttatctatttgattgcatctttttgccagtatttatttcatttctttgttgttataccattgtactttgttcaatacatttgatttacctttacaaactatttgaatcgaagaatctctttttttatatatgagaatcagaattttgtagcgaaatttgtgggggtcatgagcttagaattggatcccgtcgatttgtcagaacgttctgtcactgagcacttcacgagtacagaacactgattgagctgctataaacatgtgagtaggtgagaagact

SEQ ID NO: 38003 - DNA, 398 bp, Sorghum bicolor
  Intron number 3 from transcript Sb01g046250.1 (locus Sb01g 046250) derived from phytozome v7.0 (chr-ID chromosome_1; pos 69331662 to 69332059 reverse strand)
atagacgagtaagtgttattttggttttcagtggttgccaaaatttccgttaagcttttaggtttgtgcattgccttagaaacttttacattttgatataattttattttgctaagttttcaattatttgccttttccattttgtatccctgactactaacaagatcttatatagtagttgatatgacaaactagaggctcatttttcacattttctcttgcattcgtgttagaaaccaaattcttctagtatctaatagatatagatttactccttcaagctaggtatcaccctgtcaaatgtattttgtttctatacaataggcaccaatacttttgaatctaaatctaatatccacacagataatcgccacagtttgtttattcttggctggaaa

SEQ ID NO: 38004 - DNA, 627 bp, Sorghum bicolor
  Intron number 2 from transcript Sb01g046250.1 (locus Sb01g 046250) derived from phytozome v7.0 (chr-ID chromosome_1; pos 69332109 to 69332735 reverse strand)
ttgcttaaaatgtaagactgagacattttgttttcttatatcatatattattggctcttctttgtgtttcattttctataaattctaagaacactctttaaaatgaagtgctactttgatgtttccatgacgctgaggcttttcaaaatatgtatctatattagcttatgtttgcttatttttatatattcacttgtgtggtgggctgcacatatctacaattgtttgtggtaacaatatatatgtatctttttctcccgtaaatagttgtgtatctttgactaaggatggtcatactgtcattgagaagagagaaatttgcatagctgttattgtataatttgaattttggcatacttgacagtctggtatttgaaaatggactgaggttttgctggtctttatttatttttgtgtgcatggttgatcttggttgttgcttgctaaagtatggcattttccttagtggttatatgaatccttcagtttttttaaaaagttttattatattgaatggattgtgtggtcaccaagtttgctaaagtaaatacttttagcttccttttatctcgtaaaatctacctcatctgtgctgtttttaggcctcaagtgacgattgccacagcg

SEQ ID NO: 38005 - DNA, 708 bp, Sorghum bicolor
  Intron number 1 from transcript Sb01g046250.1 (locus Sb01g 046250) derived from phytozome v7.0 (chr-ID chromosome_1; pos 69332983 to 69333690 reverse strand)
ccttcaggcccttatccggctgcaagcaccatcaggtacgcccacccattctcttccgttcctgctgtgcgaaaccgaccacccaaaccctagcttaagctgtttgtttttggatctgttgtaactacaactttatagatgattgcacctagtaacttcgattctgtttgcaaaaattatcgggtgtacacccatatcctctactgtgtccgcccctgggtgtggtgggcaaggacaatgctggaaaagaaatgggcatggacaatgctggaaaagaaacgggcggcgaattattttgtgtatttggtctggcttgggttcagaagtttgttaacctctcttttgttttacattaattattaatgtgggggggggggggggtgctttcttattaacaaatagtaggattgtcttaagccataccgccccattcttaaatatcgagtatcatcatgacatgctgccatggttgtgtattattggcccttttagcatgttatggcagcatataccattctatcattttccattttatgatcaatataggaatttaagcttgtctatttgaatgcacatgctcctctgtacattactctggagctgtactgtgccatgccgtccttttctatttcatggtgcctgttgtaacaccagttgtaccttctctgttcagagactgattaggagttcaaggagcaaatcaatttg

SEQ ID NO: 38006 - DNA, 831 bp, Sorghum bicolor
  Intron number 1 from transcript Sb02g022560.1 (locus Sb02g 022560) derived from phytozome v7.0 (chr-ID chromosome_2; pos 55673045 to 55673875 reverse strand)
cgacgccgccgcaaccgcgcgccgccagccccaaggtcgcacctctccctctctgtccttccctcatgtcttcgattatgctgttcgccattgcttccctagtactcgactttgggtgccagggttctcacatgtttggacggtcccatatattatacccgtctaaactgtggcggagttcacttcttcgcgcttccatcgtgagaatcacgctattgggtataggttttccgatttcattaacctcgatcacggtgttggccgttgtgcgggagcacgcttgatccgtttgagttgagtgagtaaaaaatgccggttcaaatgccggagttcaggtgtttgttgaaatgcctctacgaatcgtgaccttttacttttactttttggtgtcctggataactaactaagatgtggtgcttgcctccttgcagtagccattgcaatagtacttgcaaaatgccatagcatgacattccgtatgtaacttgttgcatggtgcactgttgttgtggtattgaatatgtccttaactgttcaagacttttttgttgtatgcgtatgacatggtgtttgcatgcatcattttcggttagaaaaagattcacttactcctggtcttattggttatcacattttttttctgtgaaatacactgtagaagttgtttgttgctgggggctctctttgaacaatctgagctatctagtctgtgatttttttctctcttcgattcatttgaatactgcagatactttttgatatggattaaggaaacttacctatccttctatcatcatcttggtttgcctttgcagatcctgagctatctgg

SEQ ID NO: 38007 - DNA, 940 bp, Sorghum bicolor
  Intron number 1 from transcript Sb09g000320.1 (locus Sb09g 000320) derived from phytozome v7.0 (chr-ID chromosome_9; pos 148420 to 149359)
aagctcccggaccgacccgtcacggtaaccaaatccaactctctccccctttttctttttaattatatacatcacccgccgaatctcttctacactgaatcccctagatcttctcccttaccgattctgcctcttcaaatctcaaggctctggatgctcatccactgcttgtgtttccctgcttcttatgtagtaatcgcaactcatatgcccacaactttgcttgcttgcttcttgaatcaacctgtgtattcctactacactttctagtaccagtgccgcggattttgttttttaattaaaaataaaaaataatttaaacaccccccatgcctccatctattctcgttcttatttatttcagatttcagatttgaacctttaccacctgtatttttgagtcccagtggtcctgctgattttttaacaaaaatgacaaaagataagataaaataacccaacgctccttctctgtgttcttgcatctattttcggttttaccatttatttatttcagatatgcctgtattgctatacttttaagtaccattgcttctgctgtctttttaaataaaataaaacaactcatttttattttttttatttgttcagatataaacctgtatccctacacttttattctgcactgtatatccttgttttttcaatcagatatttttttttacccttcgtgaagtatacctgcataatgtctatttgctatgttccttaattagtaagtgttagtttactgaaacttaccagagatcacggatcatgcattgtctgcatgtttgccctcagcaaaaccgtatattgttttgctgttctttaattggtaacacattgtcgttagtctctttaggatatgattaaccatttcactcaataattgcttgtgccaattctaatatatatacacttttcctttgcagacacc

SEQ ID NO: 38008 - DNA, 612 bp, Sorghum bicolor
  Intron number 3 from transcript Sb01g028560.1 (locus Sb01g 028560) derived from phytozome v7.0 (chr-ID chromosome_1; pos 49802520 to 49803131)
cccaagcgccgcttcactgatttcggtaagcaaccttcgtcgtcttcagccatatagggttattcttcacctaaactgctatggaattggtttgttagtatttgctagtataattgaatgcttgattggccatgtttactgtcgcaagatgcactgtttactgaaaccaataatcgtatacttttctgccagcagaagctgtcttactaccattcagttattaacgaatttggttctgccagtgtgcaattgtattgcctcctatttaagttctcttcaaaatttctgctccatgaggacgacactccttaccttacttgctatgttgcatctgccgctgccattggggtctaagaagtatttgacttgtgtaaatggcatgatcatcttttgtgtttcccaagttgtggtgctagttcaaatatcatgtgcattttatcatgctttgcaacatgtattcaaaagtagaatgcaaaaaattagtaagaaacaattgccatttgatctcagaatggatttggtatttttcagtacatggaaatgactgaagtacttatctcagatgccaacaattattgttctctgcagctcttgtacggaaggaaatccaag

SEQ ID NO: 38009 - DNA, 1005 bp, Sorghum bicolor
  Intron number 1 from transcript Sb06g022060.1 (locus Sb06g 022060) derived from phytozome v7.0 (chr-ID chromosome_6; pos 51302405 to 51303409)
gagatcgtcgcctccgctcccctcgtcgtcttcaggtctctctctcccttacttccttcctacctctccctctcacgcgcaccatgaaccagtgctactagacaaggtaggctaggcttcgagaatataataatcctaaacaaataaaaagggggagaggtgaagctgggggaatttttttcagtcgtcctttcccctccgtatgagttgtaaagcgcattcttcttctgttccccttccgcgagaatattctttgttcatctcttagattgattcgagtcttagagacttaaagtgatgcgaggaagttacacgaaggaatttataattattgtagaggtcaatttcattacagatgttctaaccctcgattcctcgcagatttgctccaatcaatgtggaaaatgcagaattagggtcgtacctatcttatgtgttacacgaaggaatcattcacgtttgtactccaatcaatcaatgagtatatgtctgaaattcttctgctaatggattacaaaaatgatgcaggaggatccttttctagattaaaaggcactaagggtctgttttgatataaacccattaccgacgtggattgtagtgtgttacgagggattgggagggaaattagttcattccctcttcagtccacatgtattgggagggaatgggtttatccaaagccctaacaaatctaagtgggctgcagatttgcttgatgaagtccttgctgtttatttttatagttttgtttgtagcgagaatagctctctgttggaacacttgctggatgtattgctagcatggttaccttgtcactcctcatcaatgataaatctgaggcagatctatcactgtattctacctttttttttgtttttgttttgatccatattcatgtgctctgtgccttttttgtttcgatccattttcacctctgtggctgatttgcattttgggttacctgcagcaagacttcctgccctttctgcgtccgtgtgaagc

SEQ ID NO: 38010 - DNA, 507 bp, Sorghum bicolor
  Intron number 2 from transcript Sb08g005560.1 (locus Sb08g 005560) derived from phytozome v7.0 (chr-ID chromosome_8; pos 7605421 to 7605927 reverse strand)
tcggtggacgtggtgagtttcccttttttttttcccccctttcggcatttagtaacgatgccaaagtgattcatggaatacacgtcaattttgtgtgttgggggttaactttctgtgaaattggattgtcttgctgtgacatcggcagcttaggtgtgtacaaatatttcaattttcatttcctttaaggtgaccaaactgtgttcccatttcatactgccaagggctatcaccacagtttatagcgtatactagttgccaatggtagccaatgtttgaatttcctggaatcctaatccttcatccttgcaatatgcatttctctgcctcaagaatgatatttggtcaacatgattctctgaatgtgcttttgtagaagttgttatatgaaattggagttagataatagtttgttatgatttaatctatttgattcgtatcctattttcacttggaacttatgctatgtgtgtcttctgttcttgcttttgttaggtgaaaacaggg

SEQ ID NO: 38011 - DNA, 514 bp, Sorghum bicolor
  Intron number 1 from transcript Sb01g014500.1 (locus Sb01g 014500) derived from phytozome v7.0 (chr-ID chromosome_1; pos 13804923 to 13805436 reverse strand)
actgccaattttaaacatagcgtaagcctttgaaagttttttctttctctccttgcattttgattgatctgttggaataagtaagtggattctggctttcatactttgataagcttcattacgggccagtcataactgctaattgaacagattgcaaatgaaaaacacgccttcgcgtggtctcaaaaaaaaaattgaacagattgcaaactgcttgttgtgaatgtttttagacattcagtgagtttttatgcagctcccgtattttttttccttcagaactagtttatatgatattgctcttctccacaaccttttctattgtgaattttttacatggcatgagattctgatgccgtatctgctagtttgcagtgtgaacaatctgcattcatgacattgctccatatattttctgatactctgttaggttttgcaatttctctgtttacatcactacgtttttgctgttactacaggtagtgccaaacagatttgcgaagcagtttggagg

SEQ ID NO: 38012 - DNA, 641 bp, Sorghum bicolor
  Intron number 1 from transcript Sb09g018810.1 (locus Sb09g 018810) derived from phytozome v7.0 (chr-ID chromosome_9; pos 47164003 to 47164643 reverse strand)
gatccgccaagtgctcacgcagatcatcagcctcggtgacgccctctgccgcactctcctcttcttctctccccctgattgttttttcttctcgaggtctatggcagccagatcagtgcgtcgggggaccctgtagttcttggttttgtggtgaggtctttgccatgcgaggctagtacggttttaatgagcgggacaagtacttttacgatttccagtgggttttggccgtaagatcggaggaagagactgctctagattcttcgtctggttctatgatctgaactattataagttattcctgttaaccatgagaatgtgaagaatagagcaagagttgaattgccttcgagaactggattgtgtttttttcttaatctcttattatttggggcgcgaatgcttatgctctgttcaagaattgattaggtttcttgttggttaccctagatgatagttgtcgctaatagaaattcaggtttgtagggttgtgatattcaagaggggtagcgttgtacgcgtatcagttagcaaggctgttgatagcagttcaggtttcctgcaatttgatatttgactgttaattgcaacatgagtctcatgagggggttttaactttcagagtgtttctctttgcaggt

SEQ ID NO: 38013 - DNA, 855 bp, Sorghum bicolor
  Intron number 3 from transcript Sb04g004730.1 (locus Sb04g 004730) derived from phytozome v7.0 (chr-ID chromosome_4; pos 4519796 to 4520650 reverse strand)
ctgtaagttctgtaaggactaacactatactcagtttcattgggcagtgccaagtaaatagtttacagtggcgtattcaactcctcttgaattgccaagacttgctagctctttagggctgcgttttttcttcttagataaatttttgcagaagattgagcttgttatgggttgataatggagtagtgcttgagatagaaccaaatttaggagcgttggcctgccttgcaagttaaagtgtgtaaacggacttgacacttacttctaatcttgaaacaatggatcaaggataagacattgcaaatttcttgaattctcatagccatagtgtggtcctttatttttgtggcctcaatgggaacttgctggaatctatttctcatctgttggctgaataggagatcaaaacttgccaaaatttgttctcttgtcaaggctgaatcaaagacataattccctgttaccattcaaccttgtctgctatagcctataagtgaatgaaatatcagtatgcaaatccctggaaacaaatcagttataatggtgtgcatacctagcttataatgctagttgcatgacctatatcgttttttttatcataaaatttccagaaaagcagtgatgtgatatttttaataataaaattaaagtaccaaattgctaagaaagaagaacagaaatagcgattcgactttatttgactggaccaataggttctgtatatcgttgcaaaagacaggggtgactgacattcactgaattcttgtcttcctttcttcgtcgccaagccttgaattatccctgtttctcatttttgccatttgctgaaacaggtcttcaaagaaatatccaagg

SEQ ID NO: 38014 - DNA, 945 bp, Sorghum bicolor
  Intron number 1 from transcript Sb04g036010.1 (locus Sb04g 036010) derived from phytozome v7.0 (chr-ID chromosome_4; pos 65811427 to 65812371 reverse strand)
gctcagccaactagaatgtacgccccccccccccccctctatcccctccccatctctgctagggagtgcgctagatttcagctcttggttggatgttgatgcatcatgccagcatattatctggccgtagtctctgttagctggggcaagatttcggtgcggaaagaagatctcgtgctctgaagtggagtattttgtaccagctctaccggttggttaaccgggatgggtggctcagttggccctgtgtatcaggaactcttattggcagcaacaatcagaaactagttgagctagctattctagttcctagactgaagaatcatttcaatctgacaaaagttaactgaaacagcctgatagtggtaggtcaaacagcttagggcttgtttgtaatgcaggaatttcacaggaataagttcaatcttagtgcaaaaatacaggaacacggggaaaaaataaatcacaccttccaaatagggtcttaaagtagttctgtttttgcagatttagaagggcagcgtcgaattatggccttgtttagtttgcatttttttggtttttgctactgtagcactttcgtttgtatatgacaattattgtccaaccatggactaactaggctcaaaagattcgtctcgcaaattataggcaaactgtgtaattagttattttttaatctatatttaatgttccatgcatgtgccacacgattcgatgtggtggggaatcttgaaaattttttggaactaaacaaggcctatgtttccctaaattctgctcaggcgttaacgtttaaggccaactgttttctttctgaatcagcaatgcatggcataattgcactgtttacatattctcatgcaacgagtaacattcaaaattgctaacccagagttccaataaacaggcgagcgtcggattactgccatcaaagcggcacaa

SEQ ID NO: 38015 - DNA, 1023 bp, Sorghum bicolor
  Intron number 1 from transcript Sb04g019020.1 (locus Sb04g 019020) derived from phytozome v7.0 (chr-ID chromosome_4; pos 44440631 to 44441653 reverse strand)
tcggcctactgcggaaagtacaagggtgcgtacaatcaacccatcattacctcatcctcgttcgttccttgctcatatgcttctgttgttgttcgctgtactgtgtggtgcagatctgctaatcgatcgctgtggtattctcagatctagcttacttgtcctttgttgattgacatgccaatgatttatagagcttttttttttctagatccttttgggcgtaggatttgtgcaaattttgctagggtccccgcgcagtctggtatgatgggtatcgtctgcctgcttagctttaggggcttcgtggttggctgaaagggtagggcaggtagtgcgcctttatgatactactatataggttaatttgttatgggattttcttatttttattcagatccatgcggcatgtaatgcttagcgtacgtatcctgcctagtttttatgtgtcctcatcagtcatcatggtggatacaatatgtattactatcataataattatcaaattagcttgatgtgtctccatcatagtggatataatacatattagtgtcatagttatcaaattagcttgctagcatgtgctggtggtttgtattaaagattcaaatgatattacctggctattgttgttattgttgttgttgttgtcaaatactatatatgctttttcttgttgttgttgtcaaatatatatgctttttccattgtgtcattcttttttttagaatggagctattcaaagacgtcgttatcttcactagtcacatctgtaaagaaatttattatactcttgggatatatagtgttattgtattctccatttggttcacaatgttacacagttttatatttcaatagttctaatgttacacagttttatgtttcaatagttcttgagagtttacttccaacacgtcggtattagctaatatatatttgttacatgatccatgtttattgattgtgatctgatatcaatatctactgcttgttatctaaacatatttgctgattgtttggcag

SEQ ID NO: 38016 - DNA, 852 bp, Sorghum bicolor
  Intron number 1 from transcript Sb04g002410.1 (locus Sb04g 002410) derived from phytozome v7.0 (chr-ID chromosome_4; pos 2171586 to 2172437)
aggcaagtgaatttagcagacgaactttccttccaatgtgatgtatttacagtcacgtggaaagtctttggttgtcataaataagtgaagttatgtttcctctgaatgtattatgtatcctcaaattgtcttaaattcctgtttaccattttcagtgtgcatctaggtcctaggatatacaaagtgcaacgtataggttcatgtatttatttaattcacaaagcgagagtattcatcatccgtctgaattgatgaattgaaaatgttaggaaaaaagatacagttttataatacaagcttctggtgaagttctatgccaaaagaaagatgttgtgattctgtagttgtacttataagtttcaaaagtagtcatactgtcctggcatcttggaagtattattattccttgtaattaatttgatttgcagtggtttgaaatggtgaagttaggacttctcacttcgttggtaccataagatataacctttgtgagttaaaaatgttctgtcatgttccacatctaccttcagcatttactatggtgatgcaatactgtaatagtataacatgagtatggttactgtatattgtttaaaactttaggtgcaatagcaagatagagcaaaacctcaatgttttccatctcttataatcatcactttcacatggacttgtactcatcatatttattttacttccagcctgtagtgttgaaaaaaatcattgcatagaatcttctaggactctgaatgcaaaagttcagttcaagagctgtgttgcttatttgctctttgctgaccaactctagatgattagtgcaggtactaagtgatccagagaagcgtgcaattt

SEQ ID NO: 38017 - DNA, 1019 bp, Sorghum bicolor
  Intron number 1 from transcript Sb03g035830.1 (locus Sb03g 035830) derived from phytozome v7.0 (chr-ID chromosome_3; pos 63833751 to 63834769 reverse strand)
ggcccaacggctgcggcaagtccaccctgctgaaggttcctcctctaaactaggagacatcatttcgtgtctttcgctcccactttattcgtgcagacctgagaattgaaatcagtactgaatttctcagattggtgattgccttaagcgattgatttagcacctttgttatctgcattcaacagtcaaacgtggaatgcccctgttgcctccaatttgaaacgaagaaaatagtttcctgctgtgtgtagtgcccaatttacttggtagatatgaattagatactatcaattatgtccggcagtttttcgattagaagtgaaaatagaatacaatctggatggaatcgaggtccatcccctcaacctctgaaccttgtgagctgcgagcacagatttgtggggaggaagggctagttaaacttcatgaaaatgttcaagcaagcctttgtacctttgggggacccaaaattctcaggaaaggtttcggtgacttgtgaatgtgcatgccatttagtgtactgatgcaaccataaccatattgcccggcaaaatttccagtttctatcagggatcaatagaaagtccacagtaaagccaataagaaaatctaagaaaacctttgtacggatgtcacgaatgtcaattctgtatctcttttgtggtctggtgcatcatcacaaaggggttgagcaatggagcagcaaatgacagtagtcagagttaatttacacccattgttttttgggccagaatatagtttatgttacttaattataaataataatgtagttactgttacattcatgtggaagaaacaagcatgagttggttttatctacttgcccttgtaaagtccttgtaaagttgttagctacatgcattgtgctcatttctgatcactaggtaccagaactttgagaatttatttattcatttattatcactgtcactgtgaataaatgccaacaccaagtttttctaggttttagcaggttttctgaatccttcggctggtac

SEQ ID NO: 38018 - DNA, 636 bp, Sorghum bicolor
  Intron number 2 from transcript Sb08g007360.1 (locus Sb08g 007360) derived from phytozome v7.0 (chr-ID chromosome_8; pos 12881343 to 12881978)
ccagatctggcacaccggacgagcctccgccccaggtaccgtaccgtcgtcgtgcccctggcttagggccggttcgtttctcggctggaacagcctacaactatttcgggtctgaaattattcgatattttatattgggctgaaaatatttcgacccatttcaggccaggaatgccttaacaaacaggctcttaataaatttgttcttagttttctcatggattctggttgaaattggtcgtttttctatgacattttctcatgttctctccgcttgctggcaactaaggatgaaaatagtcgtaaacagtcgaaaacggaattataatataaaaaacgaacgtggtccgaaaatcagaatacttcgacattttaggaattaaagagtaaaaaaaataattcaaaatggttgtgaaaccaattaaaattaacaattttttatgtttgacaaaattcaaaaatggtatcataatatagaaaacgaaaacaatcctttcggaatattttagttcgcttttcatccttagtggcaacgcatcgtccacgcatcttctggtggtctcttagtactagtatgcatggtaacctctgaatctgatgatcggtttaatttttcgacgacagaattccaaccaa

SEQ ID NO: 38019 - DNA, 929 bp, Sorghum bicolor
  Intron number 1 from transcript Sb04g005480.1 (locus Sb04g 005480) derived from phytozome v7.0 (chr-ID chromosome_4; pos 5319762 to 5320690 reverse strand)
tcttcgtccgggaagcagaggccctcaacgcgaaggcaagcttcttccttttcatgcctcgcttgttcgtctttatacgccggccgcggcgcaaaggcccgaccctgatggcccggccgtcagttttctctgttgttaagacttgtattgccttgcctggttgaggaactatgcggacgaggccaaatcactgcgctctcaagttcttggtcagtctgaacctgtcgtttgttactgtgaacgtggtctctgattgggtttggaattcagctgaaatgtacatgctgcagttgttgccattggcagattacctatttttgtcttgtgaaatgcttaatttaggtttgatctaactggtaaagcaaatcgttgtagaacttcagtactctaggattgaaatagttttttttttaaaaaaaaaaattatgttcacattatatgcagttatggcacttggtgaaatccagatcttatcagggtagagatggattttggttctttgagcacccttggcacttctctacatagctttccactgtgtgttgattcgaagaactgaatcctgtctctatttgtttgtgtcaatttcagttggcatgcaaaaataaaatgtacttcctattatttatctaactgaataactaatatgatcaatcattgtttactgatatttcaccagacgcgaatgtcaaaacattgatttaagtgcttacaaaatgttcttacccaagctgaatagcacagaggctactggtggtattactgcacagacactgcaacgataacctttctgtgctatctccttcataatctcattacatgtgtgaattttcatatactgcaatagtttcacattcttgtgcaatctcatacacaatctcaatacaatcgtgaattctcataggctggacattatcaaaagccagaag

SEQ ID NO: 38020 - DNA, 955 bp, Sorghum bicolor
  Intron number 3 from transcript Sb03g001930.1 (locus Sb03g 001930) derived from phytozome v7.0 (chr-ID chromosome_3; pos 1751091 to 1752045)
aaccagcgagaatccggtaagcaaatagatccactctgaagatactacaaatcaaatcaatccaccgatatcacactttattcgatctgctgaccttagctttctgaggggaatctagtggccgatcatggcacaatcaattcattgggtgccttccacatgctggcccccattttgttttcctttgctgcaacgcatatatgccatgcctgctttgcggtcatggcatgcaagtagtatgatactaaattccactatctgcagtttgccagttcgaaagtgaattgcatccatgcacactgctgctttcagtaagtcagaaaagttgtcagcatttagatccatactgctactgctactcatcactctgccaccgtgtctatctactatgcataactttatgagaccaagggatacctttatactgatcaccatatttccaagttgctatgcacatatgacattcatgttgcttcttctcacaacactatatgccactatgtcatagccctgtctggtggccgagttcattgtacattgagggagtcaacatgcttattttggacctacatgtattttcccctaggatccatgggataggattccttgaatgctgcctattttccattcaatttatgtgccttctagaatgctggattgtttatatctgtatttccagacatgtccagtaatccaattacctggcctgatctaatgatttcttcaagcattgagtggaaattgcacttttcactaaagtacttatgtctgtgtttacgcacatgtccagtccagtaatacgattccttgcctgaccatagacttcttcaagcatccagtgcaaattgcacttttcactaaagtagtttttgttcaagaaaaaaaaaactaaagtagttttaaagccagccacagcccacactgattgtctttggttccttatgcagagacgtgt

SEQ ID NO: 38021 - DNA, 736 bp, Sorghum bicolor
  Intron number 1 from transcript Sb03g002950.1 (locus Sb03g 002950) derived from phytozome v7.0 (chr-ID chromosome_3; pos 2974296 to 2975031)
cgcgcttcttcttgcttccgttctcggatccagaggtgagggcagctccccacgcattgcgacgtttctttcagttccctgttcgcccccctttgctctggtttcttgggtcagggctgtgtgccgctcaactggcttcaggcgtagcgacgcggaggctggctgggtgtttgtttctccacacgttttcatttttccagcctcactagcatgagcaattcagaagagtgggtattgtgtgatttgtcggggtaacttcgatttctggatcaagagttttttttttctctgcagtgcgcatgtccttgactgatctatggtcgtgaaactgcaattgcacgtaggatactctgaatttattacaacgaaatgggatttatgtttctgaatttccaattaagatcaatgtcggtggcttggcatttctcgttctcatcctggcccgctttctgtagctttctaactgaaaacgcttaggatgcctgcatatctatctatttgttttaccctgcataaataccctgcataaatgtgacgggcatttccatgacccgtacttgcatcgcatcatcatcattgcacctgttctgcagcatggtacagtatcccgatggctttaaaatttgattcttagtaattgttggagtagtgttcagaattgtaatccttgccatgaacttgtcttctttacttcgatctaggtaccactctggccccttctcctgctgtcactgat

SEQ ID NO: 38022 - DNA, 582 bp, Sorghum bicolor
  Intron number 3 from transcript Sb10g025390.1 (locus Sb10g 025390) derived from phytozome v7.0 (chr-ID chromosome_10; pos 54679619 to 54680200 reverse strand)
aggtacagacttttaatatctgattttgttggcatgccaatgtcctgttttttgttgttttgattattttaattcacatgtctgcctctagcagatgacatgcatctctatctgtttttgatcttagtggcttagtgcattctcagttggtcatgatttgatacagattaacttctttgttggtgctctttttcttaacattttgatccatataacttatattttagggtgctcagttgctttataggaaccagcattactaaaagaaccatattccactgattaaattgacttgatttgagttctgaaaatgatgagatagggaaaatcaatgctatgaaccaaaatttttctcagtccatgcactgtaattttctcgtaagttggatattttctgaagagtcttcgttagaactcactaaattttagccagaacaaaggttagttgcgcagccttagggtacttttgttttattgttatcccattgagtatctgcaggaaaccaagtcactatttagttatgtttataatgtaatttggatgttgcatttctttattacttttattttacttaattcagg

SEQ ID NO: 38023 - DNA, 1010 bp, Sorghum bicolor
  Intron number 1 from transcript Sb10g003710.1 (locus Sb10g 003710) derived from phytozome v7.0 (chr-ID chromosome_10; pos 3207584 to 3208593 reverse strand)
ggcgttccccaaccccaacccttcgagcacccgaggtgagattcgaccccaaaaaaattcctttaatatttctcttgttttttttgtttttaatttattgccttcatgttcttcttgcgatttcctgtggcttgtgctttgcctctatttatttcgagcgtgtattttgcgtcggttgtgcgcgcttattgtcgaggctgatccgcccgatctatggttgttgggggtccagagtgggattttcgttgaattcgatgatgatacagttaagattgttgtttggttggcccgtttgtggttgaaggcgccaggaattggttatctaaggactagggttactcatcccaaatttcttcggttctttatgaatcgtctttccccattgctcacatagctaaaacagaaatactatgcgttacatgatatcgggatgtagagatcaggaacgagaatttataattttcataatcctatgtatctgattcagataaataaacctagcaaacaagaaatatgttcctaatttcttgattccattttaaattcctgtgtccaaactgctttgcaggtggtttattaaacctttgctttttgcaattgaaaagagccagattgtattgagagttgtgtcaaatacgaattcttaattttaggttttgtccaaaagaatatgtgttaaaatttcctgataagttggtattagttaggttttgtattattatatgctatttggtaacatctatgcatgttttgtatagctagctttttatgttcccaaagattctttgaaatttattagggtgatttgcaatatgtattacacaccacacggattgcagcggatttcattgtatgcatctgttgtgagtactgttgccttaatgccttgtggcttgttagttacaactacaactacaactgcatatgagtgcacatcttaaggtcagttaggatgtttaataactgtggtttgggttgatttgatttgaaggaagaaaagaagttaaacc

SEQ ID NO: 38024 - DNA, 595 bp, Sorghum bicolor
  Intron number 2 from transcript Sb09g020000.1 (locus Sb09g 020000) derived from phytozome v7.0 (chr-ID chromosome_9; pos 49045528 to 49046122 reverse strand)
caaactttggattgagaaggggcttccttccgcaggtatttttttaataactacatgggagttaaaattgcataagttcacaacatgactatttttagatagaactctcaacacgagtcatttaccttgacagttttccctgagttctgcttgtatgttgacttaggctactccatggggttatttggtggatctctaattatccttttaagatttgaaacaaggcatgttgtaaagactaaaattacaggagcgtagccattactatcaatgcctacatgtctctagaaattagtcatatttcagatggcttctgattgatatgaactttgaagataagatggctaggggaaatatatttgccgttaggaacagctggacacttacattttcagtttgcattaaccagaagtccaggtctgaggtgaaacaaaaacaaattttagcatagctctagctatattcaacggtcactttagtattcttgtggaagacattcatgtttactttgattaatttagtatttattaccagctctgaggtaccatacttaaaaacagggacgcagaaaatatactcctcttcagcaacctac

SEQ ID NO: 38025 - DNA, 866 bp, Sorghum bicolor
  Intron number 1 from transcript Sb02g027310.1 (locus Sb02g 027310) derived from phytozome v7.0 (chr-ID chromosome_2; pos 62529364 to 62530229)
gtgcgctcgtcgaggagacgaaggccgcgtaccccgtaagaagcatgcctgtcttgccctcgtgttaattggggaacctgagtgaagttcatgaggcgtgttttttgttgcacatttagggcccctttttggccctaaggagacgatttacttttagtttaacagtgaagagtttgatttttctattcatgttaaggtttgccgcgcgtcactaacaccactctctttgagttggaggaacatccgcattgggtattttgagttcatctgcttatcaggcaggggttttctattggcgtaatttggctttcaatgtgagttagcatgacgttttttttttcttttgtgttccggtcttactgaacttgttgtcatgattttgcttccctgtgcacaccctagttgcagtagataataagcacaactttttattgtgggattggcggcaaacagggagcatcaggagtcagttagaagcttgttttggtttctatgtgttacctgctaaactagaggcagcagatgggtttttgttatctggttagattattccaaggtgtttctgcatacaaagaaaggaggttctagaacaatggtccaagcgaaattgactgttgggacataacaccacacacttcttagttcttactgtgattaattgaagaaaaatgagatatatatgcctgatgttcgtgtaatgaatattttctatcctaaacaaaaagatggacattttggtgatgtctgtagtttgtttgcatgtttcttaatttttatttcacttcattcacatcaatatgtgcatgctatcatctactaatgacagcattgtgaccttgtacattttagaaaacaaacttcaagga

SEQ ID NO: 38026 - DNA, 734 bp, Sorghum bicolor
  Intron number 1 from transcript Sb02g032730.1 (locus Sb02g 032730) derived from phytozome v7.0 (chr-ID chromosome_2; pos 67395739 to 67396472)
tcgcggctgcaggcctcactgtgctgattgacagggtgagagatgccccagcttgggctcaatttgcctgcattctatgcatttttttttaattgcggcattggttcctctgatgaaattcaaatttcgactgtactcccacctagcccataaccttgattgagcttgaattaagtctgagcaatctagtattaaacagagaacaatcagatcgttagatcccccccccccccccccccccccccaccaccaccacacacacacacacaaatactgtactcagctgcggttgtgtgggggtggggaggagggaggtatggaaatcttcctctattttgcaaatttgttaaccaagattaactggtttctaagaaatttcagggttgagaaaggtgccatggcccccgttggcctggtttaagctcctcccctgttcaactgtggatttctattcctaaaaagtgctcaagcatgtgtcatgagtcacctcgttctcaatagtcctttggtttccataccacggcacaaaaactaattaaaggaatcattctaatagctaacataagaaatttagaacacacgtttttattaacactagtctatgtagacattatgagagtggtcagtatgtttcttcaacagttgcaactgtgcttggcactataatatgttaatgttactcatttcttatggactcctggtttattcacatataggttaagtttttgaaggaa

SEQ ID NO: 38027 - DNA, 909 bp, Sorghum bicolor
  Intron number 1 from transcript Sb01g045240.1 (locus Sb01g 045240) derived from phytozome v7.0 (chr-ID chromosome_1; pos 68390885 to 68391793 reverse strand)
cgcgctcgagctcatcagcaccaagatccacgccagtaagcaatcactccgccgccccctcgctcctcgtcctcgtcgtcgtccaatccaccaccgcgcgccgtccgtccgcccctttttctttctctcgctacttgagttgacctgcctgcttgctcttaataagtccccgacaaactttcgagctgcctctgaattttagcttcgtttcggtagtcgttagagctatagggggattcgacgtgcaaagcttttgccttttgggggcatctccgtctcttcttgactgaccgccctgatcggtaggtgtcaccggcaatcagaatcaggaagacgctaactagatgcacatgatcaacagatctttctgcggatcttcaataatggagccatgataaccaaggcccgtccgcgtgtgcgattctctgcgcattagtatattcgctctgcattttggaacaaattgtttattcagaacacaagtgacgaactaaacaactggagcagtttagctttttaaccgctggcatctttcgcttgaccatgattcctgcaagaagagaacaaatggagcagattttttttttacacgacttcctacttcccagtcttcagagcactgcaaaacattatagcctccctttactttttgcagtatctagtagtccccgtcctgatcactgctctgaataattcaagcttaaaggagtcactatgcaaaactgaacgaacgagacatgttttccccattctcaccatgtgatcggcacccaaagctgatacagtcactttccatgtctacatatttgacttctcttctcaaggtcgtcctaaccttcccgttcccgggtcgtgccacgtgaatcattggcagggaccaagaaaccgttgcagagcggtcaggcgtcg

SEQ ID NO: 38028 - DNA, 924 bp, Sorghum bicolor
  Intron number 2 from transcript Sb10g009160.1 (locus Sb10g 009160) derived from phytozome v7.0 (chr-ID chromosome_10; pos 9783834 to 9784757 reverse strand)
gcattattacaccttcagagctcttccgaggtgaatggctgaggccctgtttgatcagttttccactcttaaaaaccaattcttgtctttagattaaaatctgtattatgagaaaaaactggtgggagtgtttggatatccagttttaaaaatatgacttcatttatttctctatgtgtaacaagaagttgatataagctagatatcaacaacttcctgatttttagaaatatggcaaaaactaacaacaaaaactgatatgtttggatcccactcagttttcaaaaaccatagtgcagtagtatatcgaatgagagacctgtctgttcgtttgagcttttcaaccgaatttaacagtatttttctcttacaataattcagtcaacaatactttttgtaatagcttatcagccaaacgaataaggtggagtgttttctctgttggatctttcctgtcatcataattaaagaaggacaaaagaaacatgcttctcacttggcagatcggcatatcatatctaacctatatataatagttcgtttcccgatattctccccagatctttttcacatattcctaaacgtccatgtatatgtttccttctacactttctaccatgagaattttaaacatgagtctcgtttctcacacaagtcactaatttgaacttatttgataacgttgtgttagctagaaatatgttataaattatattttaatttaaaagggacgaaaaaaattctgctggtccatgtcaccacgcctcatgtcctaatcatggataattttctatcagcgagtttaataacacaaaataatagattcgttcataatttcatatatatacattttagattttagcagtttaattaccacataaaatttcctatcatactttgagctcacacttggtgttgtaggat

SEQ ID NO: 38029 - DNA, 634 bp, Sorghum bicolor
  Intron number 2 from transcript Sb03g001620.1 (locus Sb03g 001620) derived from phytozome v7.0 (chr-ID chromosome_3; pos 1463575 to 1464208 reverse strand)
atcttggtacgctcttgcaatccgtcgcccgtatagctgttagagagtttgagccgctgctagcttctcctgcaggtggagaattagccttttagagatgctatatattccagtcacctgtacttcatgcctttgagaactatagttgcagctgtccatcttgttttatttgtttcgaaacatttgattgacattgtggctcagcgaattaagtttgatgtagtactaaatacttccgaattggttatgtggggatgataatttgggaacaggaaatttggtgttggtcacattagtctgttcttcatcagagttgcctgtataaagaagcacattgtttagcttttgttctaagagtgttggaaaactagtgctactgtagctcttagttgccgtgcagccaactccacatttgtttaggaatcatatcaccagaaactcaggactttgtgctaatccttaaaccatgacctattgtacactatttaagataaatatcatggcaagatcatcttcgcatatttgttaggttccagtaatgaatttaagctcctgatatcatgtgtagtgcactgcttacgtttaactctcttgcgcagtcttttattgtcttcgtgagacctatcaagtttgc

SEQ ID NO: 38030 - DNA, 873 bp, Sorghum bicolor
  Intron number 3 from transcript Sb01g038200.1 (locus Sb01g 038200) derived from phytozome v7.0 (chr-ID chromosome_1; pos 61767898 to 61768770 reverse strand)
tgtcttaattgtgaggtatactttcttggtctagctatttcatcagttaaacgcaagatgttcaaggttttctctaggattttcattgcgggtcatttgcacacttggtactcacgcctgtacttcagcatttaatttccatgctcgctctgaatgagcaaagcatcatccgttgttgcattgctttatctagatctatattgagtttatctcagcctttcctgattgtattataaataggatttatattatactgcacaatttatttacttctcatttgctattttgtgtgtgtattcttttttatggacactgtttcaatagtaacttcactagctgtatttagtaagatttgatgaaggatgtgttttatcactggaagattggcgcattataagtgatacttcacttcatctttgcaattagcttattcatttgctaggtgacagtcttttattaaataatctttgtctctttgaaaaattgtcatgccaaggactcatggtctaaagtttagttgtctaaagttaagggctacactttagaacgctttagctcagttgtgtggtctaatgagctaatagtttaaagttaagggctacagtttagacatcactttagagtttagaccacccatttggagcctcaagtgctaactaaactttagaccatgggatccaactgattgaaacatcgttattttttaatagtttaggctcctccgtacctttgcattgggtgctgttagagattatatttttcttatttgtcactttatttatgtttttttttcaaactatttatgtaccataatcaaactatttatgtaacataataggactgtggtggtccactgaggtgtggaactcagtg

SEQ ID NO: 38031 - DNA, 764 bp, Sorghum bicolor
  Intron number 1 from transcript Sb01g001500.1 (locus Sb01g 001500) derived from phytozome v7.0 (chr-ID chromosome_1; pos 1365854 to 1366617)
ctgctgccacctactgcacctggaaggattaccaggtcagtttgtttttgctcagcctctttgtttagttctaattggtccatttccctttgttatagacaccggatgactgtgatttcgttgttattatttatttatttatttatttgatttgaagttaaatggcaagggtgtagagggaggtttggttaacttgtttagttttctagcagtataaaaaacaaatgaaggaaatttgtgaatatgagaaaactcttgattctgctcatagatagatagataagaaaaaaaaggggacgaagggaggattatgtggttatgacatggggaagtgggtaactaggtgaggaatataggaacatctgatggcatattattgctgtaagatctgatctcctcacttgagcttccagctgccatcaaagagagaagaatccaacaattgtctttttgtgaatgttattgagtagttttgaataggatggtgatatgccttgggttcttgtggatcaaaagcacttttctgtagtgtgctgaaacttctgactcattagactgggtaacctgattaataattatttcttttaagttgcattagatacacttgcttgtttagtttctgtgggcaagggatcatctgacataattcaaatgattcgtttgtttgaagtcacattacattgttcttgttatgaggatttgaaagctcatgttataatttaaatgcagattaatattattgatactccaggtcacgtggattt

SEQ ID NO: 38032 - DNA, 833 bp, Sorghum bicolor
  Intron number 2 from transcript Sb03g000260.1 (locus Sb03g 000260) derived from phytozome v7.0 (chr-ID chromosome_3; pos 111930 to 112762)
gcacccacgggattgttaggtggccctatcgtaaggtaaatttcaattgtactggttttgacttcatactcctatctcacaagtgtgtcctttgtccttaccatatccacgcctgcaaaatcttatacttttttttttgcgatatataataagcacgcaatattttgagtacatagttccatgttggacatgtattaaggcccgtttggatgggataaacgtttcagtttctaatgagagaagaatcacttccaaacggtcttttccgcaagtgattcgaaaccgaaacgtttcaccagaatcacttcgaaacggtctggtctttttagcaagtaatttgaaaccgaaacgtttcactgtttctacctacacatgcgaaacggctagaggctagttctcatctcattgcttcttacctttttggttcattttttcagttaattctttttttagtgcaacaagttaaaatggtttttattttaagttgttctccatccacaaaaaagtttagaattttttgaacatatttttatttaaatgattttttaatcgaaatcgggattgccagctaaacgatttcataaagcgattctgattcatcaccataaacggttcttgaaagaatccggatccgaaacatttctgcgagaatctggagccctaaatctcatctggggataattcaaagccagccccatgtaccttatctagtgtatctgctccaaagaaagttgttttggtccatacaacttttaatacttctgctttgatttcttagtctgtctggtcatttgtagttttactcttgcagcttgtttctgggaaagctgggg

SEQ ID NO: 38033 - DNA, 469 bp, Sorghum bicolor
  Intron number 3 from transcript Sb03g045900.1 (locus Sb03g 045900) derived from phytozome v7.0 (chr-ID chromosome_3; pos 73108229 to 73108697)
tgatatatttgcttcataaggtaagtgattttggaaacttctcaatcaatccacttgttcttttttctgtttcttgaaaggtattgtcagtatcatgcttaaggcccaacaaatgcttaaccaatctccttgttgttagtatgtatagctattctatccttcatacggagaactgaaaaaccctgaagtttccgttttaaaattaagaaaaaagtaatttggtagcatgggattagggttggtatctatttaatattataccagcaattggaatctcaaagcagaaattgctgtccatcgctgagaagtgtagcctccacattaactagaaaggtcactaggcgatttggttagagaagtgttggttcatcattattcattagttactacattgttgaagcaaggataatccggatggtgtcattgaaatcttcagtttgatttgaagcaggaatacagagaaattact

SEQ ID NO: 38034 - DNA, 560 bp, Sorghum bicolor
  Intron number 2 from transcript Sb06g003580.1 (locus Sb06g 003580) derived from phytozome v7.0 (chr-ID chromosome_6; pos 7758985 to 7759544 reverse strand)
gcctgagaacaaggtagcacataatccacttgtttctcactttggacaagctaggaataaaaatttctcatttgctgtaggtgggcacaatgttgtaaactttaactgtagtagcagcattgcatatcagaattttgctgttggcgtgacaggggacgacaggggataaatgaaatgatatcaacttacaaagaaatatccccatgttctttttttgttttagatgttgaaggattctacttttttgtccttttattagattctctttattggttgctcttgttgggtgtcatctacgcattggtctaccccaacttgcttgggattaaaaggctttgttttgttttgtagttattttagaatcaagatgctgatggcttataccacagtaccaaatttttttgttttcctcacaaatagatataaaattatatgtagcactgttttttcttctctggctttctttttaatgtacactaacctaaactaattgccctttttgattgagctagttttctgtcccttgcctaacagcttatgattcgtgatgttgcagctca

SEQ ID NO: 38035 - DNA, 692 bp, Sorghum bicolor
  Intron number 1 from transcript Sb03g035720.1 (locus Sb03g 035720) derived from phytozome v7.0 (chr-ID chromosome_3; pos 63733083 to 63733774)
ccttcaagatccccgagctcacctcgctcttccaggtgagacgcaatttagttcttgcttcctcccttgccaataggattagactccagtttgttaaggaattgttttacttgtatcccagtattgtacatggctttggtagaccagaaatggattcgtgattttgttttctcaaacccgtgtgttgactataccactaggccttgtttagttccaaaatttttggcaaaatgagcactgtagcaatttcgtttgtatttgacaaatattgtccaatcatagactaactaggctcaaaagattcgtctcgtcaattccgaccaaactgtgcaattagtttttatttttctatatttaatactccatgcatacgtctaaagattcgatgtgacagggaatttgaaaaaattggcaaaaattttggggaactaaacaaggcctaactaactaaactgctaaaattgggtatttcttttttagatgacacaaccgaacctttcgtcttgaagtctataaattgaaatggaaccattaggctgcacaacatgtatacattacatttatggctgtgtagtttgtcaaactgttttaacattaattcagctttgctgtgtcgacttaagggatgcaaatggttaacatggtcttcttctacagcggcgtcttcttaactttgtagacaagacccttgt

SEQ ID NO: 38036 - DNA, 956 bp, Sorghum bicolor
  Intron number 3 from transcript Sb01g008070.1 (locus Sb01g 008070) derived from phytozome v7.0 (chr-ID chromosome_1; pos 6982643 to 6983598 reverse strand)
atcccaaggccctcgaaattgcgcttctcctgtcggtatggctttgcgcatcaattgttctcacatgttgaggggattttttctgtttatttcgttctggtgtttaccgcgcctggttttctagttctatattctgaatgtgttgtatgggcgactgccattatgtaaaataggtatatgcacctgttacgcttggggttatggggcatgcaggtgccacaataagccaaaattatcaactggaaaggaatagaaaaaatatccatacatattaataggttattcaatctggccttgttttgaatggagttctgtcacagaatccgaggatccttgcacatgcggaatccttgaatggtcttttttactatatataaaacagatagaaaaatggttgttcaaatttctttgaccatatgccatgtgcttcatgcactggcaatcaaatgatggtcggggctccttaggtcgttagtaaattctctagaaggccattgaatattggtgaataagcaaagagaacaaagatattgattattttaaagcctgcttaatttgacacagaatgtgagaaacataatgggttataggtttactttgcttgagcttgagattctttgactttgtgaatctgtcatgcttgtaagaaataagcatgcaagatattactatatttgccagcatgcttacaagtctgcatctgtgcatcaactacaagtaacaattcaaatttgaaatagcctttgctgcagtggagaaaagttcttcctgtttgtatgtgttctaagtgaaatacatcacagtgtcttcttctctttgttttgcatcacaacatgatagcttgatggatctgcagtattgtcatacaaataagcactgattacatttttttttcaattcatgctaccattgtttttccagggagcaacaattgtggaccaaattgtgaacataac

SEQ ID NO: 38037 - DNA, 719 bp, Sorghum bicolor
  Intron number 1 from transcript Sb10g000270.1 (locus Sb10g 000270) derived from phytozome v7.0 (chr-ID chromosome_10; pos 75932 to 76650)
gggcttctctggcacaggtcactcctcgtcttaccttggagtcacagtggggggtggtgctggctcttggctggttcactggaatgattgaatgacttttgtagtactatttctttgattttggattttagctttttgggcttcaaccaagaaccatgcacagagaaacacagttcaggggtataacagtttttatactgagatagtactacttattagccagtggatccaaacagggtaaccctaattactagtcctagtccatccaaactgggccttagtaacacgctcaagtacaactgatgctgttagaccctatggaaatgagtatgcgggcagaaaatgggctgctaccagctgtagaatctcttgatgccgccggttaggataaaataaataggcaaatcaaaaagcacctgaagaaatactgtgactagaatgtaataaagagtttaaacccctggtacataatgccttaagctatctgggttatctaagtgagtttccagcaaggcaggatgacagcagctggtgcctaggcagtaggcactcttggcagttatctcttagaacaatgaaatgtgtgatatgttttttaatgtttgtaattgtcagtatgctagcctcctgaactgctagctgtgttttttttatgctagttgcattcttaagtgttctaactggtgaagtttctctgtgcagacagaaagatttcaaca

SEQ ID NO: 38038 - DNA, 866 bp, Sorghum bicolor
  Intron number 2 from transcript Sb09g002450.1 (locus Sb09g 002450) derived from phytozome v7.0 (chr-ID chromosome_9; pos 2665972 to 2666837)
aaggcgcaccatacggtcacttgcatctgctataggtatgaagaaaagtacacttcataagtgcttgaaagaaggaaagcttagacgtcactctagctcacttaaaccatatttgaaggaagcaaacaaaaaacagaggctgcagttttgtgtctcaatgcttgatgagagtacactgccacataacccaaaatttagggatatgcgtaacatcgtgcacttagatgaaaaatggttcaatggcacaaaaaaaacaaggactatgtatttgacaccagatgaagacgatccacacaggactgtgcaaaacaaaaactttatcaccaaggtgatgtttttgtctgcacaaaccaggccaagatatgatcatgaaggaaattgctactttgatggaaagataggcttatggccttttgttagagaggtactaactatactggctaaattttttcttatttgtctattcaatttcaacacataacagttattatcatacttgcaggatcaagcaaaaagaagaagtcaaaacagagagcgaggggatcctgtaaccaagactatgatagttgacaggcaaacgatgtaatcatatttgattggtaaagtactgccagaaataaaaagatgttggcctagagaaagcagaggtgaaacaatatggatccaacaagataatgcaagaacacatgttcctgctgatgatccagattggctcctcgcagtcgcccaaacaggactcgatattcggcttatgcaccagcctcctaattcaccagatatgaatatcctcgatcttggtttttttgcctctctacaatcgaaggcagatgaccttaattccagtagtttgaatgatctcatagcta

SEQ ID NO: 38039 - DNA, 832 bp, Sorghum bicolor
  Intron number 2 from transcript Sb07g025470.1 (locus Sb07g 025470) derived from phytozome v7.0 (chr-ID chromosome_7; pos 60561524 to 60562355)
gaaggcaaacaagttgaagcaatcacttcccccaggttagcacagctttaattgacatgatattgtttctgttctggtatacgaaaactccattctggttgtaatattgccttgaattacccacactgctgatcgtctatttggttatttatttctgttggattgatgtcatttgctttgtttgaagtatctgtgtcagttagttgtcccagtgaagataaaatttcggtccaaagatggttgaagactggttttagcttcaagccatctgacatgtcttcttgattagtgggtgacttgtggctaaaaccaattttaagaaccatccatgatggccaataatagctatgagatccgagggacttgtatgatctgtttcttcatcagctttcactctgaacaaagttcattgttttgtttttgtttgtgttttctatttgacgaggctgtgtcccattgaagattataatatttgaccatagatgaatgattgattagttttagcttcaagcctttgttgtctctactctttggcatataggcttgtggttaaaaccagtcgattctaagttcattgatgatgggtaatagctatgagatctgagggacaagattatctggcgcttattgatctgtgtcctaaatgtgcttgtatctttggtcatctgttttgtgattaccgattcccttttaattgttgccaaccctgttcattttgatctgtcgaatgaagtctcacatttaaagcacgaatccgccatgaagttctgctttttgactactcaatgtccattggtgcaggtttgagcgtccaggaggtttgattggatac

SEQ ID NO: 38040 - DNA, 878 bp, Sorghum bicolor
  Intron number 3 from transcript Sb10g004550.1 (locus Sb10g 004550) derived from phytozome v7.0 (chr-ID chromosome_10; pos 4037273 to 4038150 reverse strand)
tggccggcatcaccgacaagggcgtcgttcatctggtgagcacgggaaggttccggttagcttgtagatgccgccttttcactatttttttttccagatttttattataaagtgatgaagtcaatagctttgctccacccgcttctctgtatctcttttctttttagataaaatttgaacggaaatgtttaggctattttaattatatatcctgattttttccaagtgtaagtaaataatttttttggatattgaatctgtggagagattgctatagtacttgattggatgttgacttgtgctgaagaaaaagttgtcactttacaattgcacaacttgtcttgctttgcttctcgtcatctacgcatagttttattcaaaaaaaaaaatcactcgtcactttcctctattttttttcactgatcacgtacccgtgtgggttagactattaggttgttgctttcatcagaaatataaaatattcattatgatccgtgcatgccagtatttttagattagacgtatcatgcttttcatgactcatgctctttatccgtgagaagaacgtttgttgacaatttgattcacaccactaatcgtgtcctttgaggcgctaattgccattataacttaccttcacgttttctttaacttttttctttgccgtgtacctgtgcattagactttctgatcaatgacatgttagaattatccacatatcatttatgaaccacatctcatctgcaagacaaaagttgcttcgcaattctatccaaactactacttgtgctaattgccatcataacaaattaacaattgtggttttgtcaaacctccctgcaggtttcaagggcttattctttgcagcacctgaacat

SEQ ID NO: 38041 - DNA, 815 bp, Sorghum bicolor
  Intron number 1 from transcript Sb03g040980.1 (locus Sb03g 040980) derived from phytozome v7.0 (chr-ID chromosome_3; pos 68462078 to 68462892)
cgacgacgagttatttgtttcgtcgcggcagccaggtacgtcgccggactgtttgtgtttggtactttggttcggtgggcttgtgaattctgaggatattagtagcagcatatgtgtgtaaacgtggagactgagatgttacgtgtggtaagtttcgtgaaggggaaccgtgggatggccaagtttagtgtcatgccaatgcgggtgtgcgatgatgatttaagatttagtcaggtttcactgtagtctacccatcttgcttgggactaaaaattcacgactgtagatgtacaacatgtagaatgaaccatagaaaacttaattgtgacgagggttgctgttttatggctgctgtcacacggttgtgttggcagtcgcaaatcacaatattgtctaggctttgttttgttcatgctagtcatgtcgtgcattgtaattgccaaacatctgtatcaaagttactatggtttcaacagagctagaagtatgctccttcattttgaaaaagcaagctactgaacactatagcatctgctgcagttaatctttcaatcagctaagtgattgcttcatgttgtaagttgtataaaatgctaaagctagggtgccgtatttctagactaaattgctattttgtaaagatagagaggaatttgatctaatagaatagtagaataaataaattgtaatgggaacaacagtacatcagaactctactagagagttccaaacatgtttattttttctgctctgaaacattatccatttgttcttctacagtattggggcatagtaaatcaacagctgctacttct

SEQ ID NO: 38042 - DNA, 871 bp, Sorghum bicolor
  Intron number 1 from transcript Sb06g029530.1 (locus Sb06g 029530) derived from phytozome v7.0 (chr-ID chromosome_6; pos 58130441 to 58131311 reverse strand)
tgccctttccccaaccccgctccggtcctcccaaggtgagccccaatccccagccctgattcacaagatttgaactctgtagcagcgagtcaggagatgtcgagctatgtatgtttgctgggaagggccacatttctggatgcgaatttgctccatgcgcattttcaggattgcctagatgcatacctgtcactgtattgtcgtgttctttttaactgatgacaagatcaagttgaaatgatgcatatctggaagacttatagtctgcaactgtatattctagttcctatatcctgtagcagcaatattatactctgtgagtagaatcatcatgcattccattcatgttgtagaatcatacaacagcaaacgaatggaatggaaggatggtgtcaacttgtagtgttttgcttgtatcaatgagcttttaagcgattctgttaatgagtatgggacgttggtgaagcttctaggctgagattaggctacttatcatggtaaataaaaaaaataaaaaaggaggagagagagaagagtgtaccaatttgaggatattggagaaattactttgtaggtaggattaataaggaaactcaaagccttcatgcaatagtacttattctgatcttctcaaattcctggggacttgcttgtttattcatctttgtggttgagggtctgtttaagaattatagttggtctttctacatccttgcattttaatactgtcattaccaaactcgataaagaaaacttcgctacctgccccaggctctcctgcttgattgctgtgagtattggtgatatagtaagtgattcctctttattcatgttagatttatcagggctcatccctgctcgtggattcaag

SEQ ID NO: 38043 - DNA, 766 bp, Sorghum bicolor
  Intron number 3 from transcript Sb04g000810.1 (locus Sb04g 000810) derived from phytozome v7.0 (chr-ID chromosome_4; pos 669590 to 670355)
agcaacgcagaaggctttggatcagaaaccaaaaggtgaggggttttcacttccaggatcaacttgtttctactgttccattgctttggtgggacccttgcgggataaggggcggcaaaatatttggtgcaaaccacatcttcggtgcaatcgtgaaaaccccattaaaatcatacttaggagtttaaaaaaaataaaactatgcacgaaaaatagtgcatctatagatgtgcattgtcacaaaatttgagattcaaactcattttgcgaaaattcatatgaaaataacaaatttcatttgcatatgcactagatgacaaaattcctggatttttgtcctctagtgcatatgcaaataaaatttgttattttcatatgaattttcgcaaaacgagtttgaatctcaaattttgtgacaatgcatatctatagatgcactattgttgtgcatagttttaattttttttgaaaactcctaagtatggttttgcaaaggattttcacgattgcaccgaagatgtagtttgcactgaatattttgccataaggggcaacctttgatgctgttttccttgttatgacaaccattagctccatgctgtgtcaatcaggggcatccatttcttcttagcctatgaacccgaaccctatcattagtttcatgacctatctatagttctgaatagttgtatttgaaaatttgaatctttgcttgttaaatttgtgttctcattgaaacctgttactcgttgtgtattctgagaag

SEQ ID NO: 38044 - DNA, 598 bp, Sorghum bicolor
  Intron number 1 from transcript Sb04g012920.1 (locus Sb04g 012920) derived from phytozome v7.0 (chr-ID chromosome_4; pos 20740852 to 20741449 reverse strand)
caaggataccatccgtacggctatcggcgtcatcggtgagtccacgcatccctcgcgtatgttccatggtcgctgcatgccggccggtccctttctttcattattgtgacaactttgatgaatgaacatataccatacgaacatactcactgcggcaacggtagctgcagcacggtctcgctcctccgggccatcatggcctgcccttgttttttcaattccagcgaacttccttttcgttgcattatccttctcgatttaagcttattcgcttgagcttatcagccgaatctatcagttattcaatagtatttttctctaacagcaaatcaatcaatagaactatctatcataccttaacagccgaatgtatcagtcattttctacgggtttcttttgctttgtctttggtgcgcccaatcccaaagacgttatagatggttagttcatccttgtcacgagcgagctttcatgtccaactcgatctattattttgaatttggatctactacgtaccagtgcaagtagtagtttgaaccaaaactggaagaatccactagctaatttcttttttgtgggtgttacgctgttgcaggca

SEQ ID NO: 38045 - DNA, 868 bp, Sorghum bicolor
  Intron number 1 from transcript Sb03g008040.1 (locus Sb03g 008040) derived from phytozome v7.0 (chr-ID chromosome_3; pos 8533846 to 8534713 reverse strand)
gaccgcacgtcagtttcgagcaaggtgagtgccttgtgctgcccagctattgattgattcacattttaaaattactggttggaactcaattatgcgactagactgaacctagagtgtttacccaaattgggatgtgggttttgattgtagtggtttgttgctatctgtcattggactctgattcaagtgacagtggtttccttttctgtggatgcttttagcacgatggcctcgagtttttccatggtctgtataggatcttatgtacgctaaataaatatagtgaaaccacggatagccatatcaatatcagagtgcattcatgtatagagaaatatcgcaaacctaatagttccagtgctaaaatgaagtctttgaaaactataaattatctagaaactagaatgcatgaaatgtacacaccatatttgtcggttttatgtgtgcctctgttcccttttggacatgtacataatgctgttaccacttgctagtgtagagagattaccatcatgctttgcaagctcactaaaaaatttgtagtgaaagactcatgtatttttgagaactgtgggtctgagtactttgaacatggtatggtggccttctagaaacttggcttacatgaaacattttcttccaacattcatatgtgatatgtgtttagtgcatttaaaataatttaaatctaatttctaatgtgaaagatggaggtcaaaggttgatggcttctgagttatgatcttcttcagtatattttcacaaatgtgttcctggccaatcagattaacaaaggtcctttccagcattttctaattttcattaattgtatttaaataaaatttccagggtgcatccactttagata

SEQ ID NO: 38046 - DNA, 619 bp, Sorghum bicolor
  Intron number 2 from transcript Sb01g020990.1 (locus Sb01g 020990) derived from phytozome v7.0 (chr-ID chromosome_1; pos 24250071 to 24250689 reverse strand)
ggtataatattttctcctgaatattttgagactgataatgctattcatattttataatagtgcccagcatcaaaagtaaacattacacatgataaatcataacctgatgcaactgattctcaatctctcattgtatactccagtttattcagaaatttatgaaccactcactaacagttaatctgctaatagcgttgctaattaccatacaaacaattaactgtagtattaatgggtctgttatttgatctattgaaagaaaaagtgcatggaataagaataagtttccgggagactagcaatctggaacatcacttgtgaaagaaacttcgattgtgagggcatagaatcagaagttctctggcaattagtttgcttttttgtttaccaaatctgttaagtattatgtatatctgtagatattttcttctgcaatacctgcaactttactttggttactttgatacaaagatctataatatactatcaatgtctggataggcagctcataatcagagaaacatattcttgcagtaaaaaacgcatatgcattagactagaagactccaccatgtttttccatgcctaatttttttcaacatattaatggcagacagtt

SEQ ID NO: 38047 - DNA, 943 bp, Sorghum bicolor
  Intron number 1 from transcript Sb10g005990.1 (locus Sb10g 005990) derived from phytozome v7.0 (chr-ID chromosome_10; pos 5424973 to 5425915 reverse strand)
ggggcggaggccggcgagcccagctccatcctcaggtgagcaagcttcccgctcttcttccccaacccccccgccttgccctgctttgctttactctcctcgccggccgcgtgattggagacgggagggacgtggtgggggtagctgggtggcaaccgcgcgggcggcgccgtgccggttttcgcgcggcgctttgaggaggagttcaatgcttgcttgatttttggatggtggaatcgtgcggggaaggcgtttcctcgtataatttttccccttcggctgccatttgggtcgtcagattggcaggcaacacaaactggataaggatttgatttggttgtgccccgacttcaggcaagaccatctccatgggcgttcggcagcctaatcctctgcttcgtttgcagattattgtgctcgtagcatagaggcattggattttagaggtccttcattactgaaagaaacaaactggttggttcgttagcaatttcgtcacaacttggaatataatagcgtataaagtcctactccttcattggtactgtatgtatgcagtcaactatctgactctctggccgcttgatgtggtggcataattaaactacacactcgtttcaaaataaataaaataaacgacacgctcttttgtgcttcatcatagtaaactgaacctactagatttcacttcgcttaggagttagtatcaagttcaactttagcaagaatggctaattgcctatgtccatcttctttttattactagggtcatgaacagtttagaaagtagtaatggtttgatgctagagtagacatttttcaggagaaaaggaaaaaaacggttttgtgtagagctactgattcagaccagattggagtgcattggaagttctgaccatttccctgtacatatgttattgcagcttagctgctgccttttcct

SEQ ID NO: 38048 - DNA, 613 bp, Sorghum bicolor
  Intron number 1 from transcript Sb09g028070.1 (locus Sb09g 028070) derived from phytozome v7.0 (chr-ID chromosome_9; pos 57064335 to 57064947)
gcttcgggcggccgctgacttcgcgtcctacccaggcaatgcccctttccctagcttgcttcaatctgggcggatgaagttaattgctcaggttgtctctgccggcgccgggttatgcttggctctgatcgtgacaacggattggatcactttggggtggagctcgctgcgctggaaacctagtagcggatcctggctggggctgtattacttcggcattcgtttgattctcgcacggattctgctgtttgttggaagatatgttcgcatgctctgctgtagtggggaaatttcccgtagtgttattcgactagctcaaatttgttttttaaagctggagataccagtggcttgtactgcaccatccatcgacgtgtctttgtgcgtgagtgtgttttgatggaaggctattttctctactagaaagggaattacaagtaggtcaggcagatttatgacataataatggttacatatgtatgctgaagtggtgtgcatcgaagtcttcctcaaattttaagagcacttaaactttcgaaatgcataggcagactagccatgtgatgactggaggactgaatctacatgtcatttgttgcagggttgcatagtg

SEQ ID NO: 38049 - DNA, 1004 bp, Sorghum bicolor
  Intron number 1 from transcript Sb01g009434.1 (locus Sb01g 009434) derived from phytozome v7.0 (chr-ID chromosome_1; pos 8125496 to 8126499)
ccagaaccccgcctcccgcggtcgctcacacgccggtatccagctatatgcctcaccatttctagtgcttagctcgatggctctagtgggagtgttttggtttgcgtatgtagtttccgtcatattacggatgcttggcctttttctgcattcatcataaagtgagattttgtaagaattgcccgaaattcctgtctaagctctactacagtaatgtgcactggttgtgactcaatgcctgcattgtttttcaatcaatcattcttctgtgttaatcaaccggatgctggttatatggtttgggatgtagtctgcattaggtaggttagggacttagggtatactctagtagtgcatatagggtacgttgttgggctgaagatgtactcactttgtgttctttaaatgggatggcctgatgggatcatttttgttctctgttgagcttcttgaaagtgacatgatgtctgtctcgtgagattgcttgcacccttttttagtgttatcattgttgtatggattggtgtacaatttgcattagcaaagttacgcagattgaggtgggacttcccacatggtctagtggtattgcaagttcgtttacatcgcgtgttcatagattcattctccataaaatcaaatatatgctctatgtaacaactcatagaggctgcaaagatttcttcccctctttttaaattgcagcctgttgcatagcagctcttaattttatcctgcagcttgcccatttgtaactcagagtatgcatgtcctggcattgtatttgataaaatagatggttaaaatctcgtggttcagttggttggtttgtgcagttctggttttgtattgaactcttgttgctgtggttctcaaatttttctttaacttattttttccgactggtttgctagcatttaaacttttctgtccacttaggtaggctacacatatttgacattttatcatgtcagatacatatttcggccctggaactgtggata

SEQ ID NO: 38050 - DNA, 577 bp, Sorghum bicolor
  Intron number 2 from transcript Sb09g026840.1 (locus Sb09g 026840) derived from phytozome v7.0 (chr-ID chromosome_9; pos 56018636 to 56019212)
gaaagacggtatgtatgtctgatgttgcttgttgatcgtacatgatttagtagtgcatccatttccgcataataagactcatctaatttgtgtttgtgtcctataacttccatggtctagtacctctctctctctctctctctctctctctctctctctctctctccattcatagttgcatcactaacataacagatggcgacactgtattactatgatgtgcaacagtgttctgtgcagtgtgcagcacatattctattatttttcatagagatcaatgtctaaacctagtctgtacatgatttggatcttgagcaatcaaactgggtgtatcatttactgaatttaagagttaatttgacaaaactataattataatacctctttaaagaataaaataattagaagggatttttcatattttggtgtgagctgcattagggtatgcaaacctgctcctgtttatttggcttgataggcttatctattcatatgttatatgttgcacaactcatgccatttcttctattgcatgaaaccaggttattgtgagcatatcagacattcatccaaagga

SEQ ID NO: 38051 - DNA, 642 bp, Sorghum bicolor
  Intron number 1 from transcript Sb01g009690.1 (locus Sb01g 009690) derived from phytozome v7.0 (chr-ID chromosome_1; pos 8474069 to 8474710 reverse strand)
ctgatcagcgaaaagcaaaggtaattttgaaagttgtcattctattgggaactaaaaaaaatgacagtttctaatggcagcatttttttgggtccatttctgacacatctatcccggagcgagcagattgctgaactgaaatctgcacttgagcctttgtctgcccgtagtgagaagtactgcagcgaagcatgcttgacaagatatctagaagcccgtaactggaatgttgctaagtccagaaaaatgttggaagacagtctcaagtggagggcagcttacaggccagaagatatacgctgggtaaatccgccctttcatttttaccttgcgtgtattcctgaagttattattactatggtatctgaaccccggtaaagtaactaagcatcattgttactgcatttcagcctgaagtttctgttgaaggggaaacaggtaaaatgtacagggcaagttttcgagacagagaggggagaactattgtcgttatgagaccagcaaagcaggcaagaagtccctcttttaaagtgttatccttgagtgtctttgactcttttctttctgaaaaccgttgctctccgtaagctttgttcagaattcatctgtataccgttttcaaatttcagaacacatcatccc

SEQ ID NO: 38052 - DNA, 486 bp, Sorghum bicolor
  Intron number 1 from transcript Sb08g001540.1 (locus Sb08g 001540) derived from phytozome v7.0 (chr-ID chromosome_8; pos 1499241 to 1499726 reverse strand)
cgtgagacactcgacgacgacagactccaattctgcttaattcggaatattttgtcttcagttgccgattttgggtggagtttggggttggtggttgcctgcatggtgcaggcgagaggtttgatggaatgcccaacagggcctcctttcctttcttttgcgaaagaaaacaaacaccctgaagctttaactgaaacacagtcccatgtgcttgtatctgatgagattaatctcaaaaggccttctttgcctatttgtaaatgctttatttaccaaatcaatttcattttttctatttgtgcactagtactaatgtgtttgccttttgattgttctgatctgatgcttctccagttctctttaaagtggagatgctatgctgtagtagcttctgtttccatctgactcaactgacatgccaattatactctcttctccatttctccaacagacacactcattgcattagtgcttaccacaagtgga

SEQ ID NO: 38053 - DNA, 1039 bp, Sorghum bicolor
  Intron number 1 from transcript Sb03g000590.1 (locus Sb03g 000590) derived from phytozome v7.0 (chr-ID chromosome_3; pos 428979 to 430017 reverse strand)
tccttccacgtcgccaccaagctcggcttccacaggtaaccgtcgctcgccttccaggatcttgttccgctcggctcggtagcagaagcagatcgatcgattgccccctctccctgtccctgtgggcggcgcggcgcggtcgatttcgatttcttgcataggaatggatagaaacgcaagaaaaggtggattggattggattgctatttgctattgtattttgatgggggaaccgagagagagggtttggtgtgctcttgagcttttaccactcaccaggagtactatgtcatcttcagtgtagtagcgtgttcatttcagttaaaaagtatccgagcttccaagggtacaggtatccgtggtggttagagattccgtggatgaaaaacatgtaggattaactggactcttcatggttatcgtaggtacaactcgcaaactaacctgtgaaccagctggtaaagataaaatctgtacttattcaagaacaaggagacctgtgttttcttctattgatgcttatgatcaattgcagggctcctgaaattaactaaaacatccattctgtaacctgctatattgaatttgtgctcattgtgatttctttgtattgttgttatgcaaattactcactgacgaagactgaaatagtatctaataatactagggcatcctacagacaaatcgatagtctttacctgagtagtgtttggcagtttcctactaactagatggtgtgaaattctgatcagttatgctgtgactctggtaactcttgaattctgaagttttattattagttttgatattacctgtggctaaatacttgaggctcagtttgtgatattcctgtccaataagatattgatgttctgccagatcattttctgtacataggattgcaccacatatgtaaccacttgcaaatgccacatttgttttagttcactcccctactgcttgatctgctttatatgatccaacaagctctaaaaccttttccatattgttgctggctgccagattgttccagtacctg

SEQ ID NO: 38054 - DNA, 748 bp, Sorghum bicolor
  Intron number 3 from transcript Sb08g021370.1 (locus Sb08g 021370) derived from phytozome v7.0 (chr-ID chromosome_8; pos 52976007 to 52976754 reverse strand)
cagtaccacacttgtaactttcacttgttacttattgataaatagggttcttttcatttgagttatgtctaggaaaaggtggaggtttggtcgtagtgtgatgtctaagtgatagcatatgtggtgtcaaatctccttccctacttcaaactctacttgaaaagtaataataacacaacatattcataccaaaactataaagtgatgagtacagttatacaccatttccctgttggctgaggtgaaaaaaaaccccattcctcttttaatccagattccagactgtttgttgctaatcagggaagttaagtgtcatctcaaaacttatgctatttccatcccttattgtcactaaatggttgactatcatcacatctaaattaaaatagtaaagcttcttcgtcgtgactctgaacacctggttggtagttggtaccaatgtcctttttttttgtctcaaatgcatattttttccaactttattagtctaaattgttacacctcacatgtgttttgcgtataccttttttattgtgaatgttcactaattatttttaagctaacgatcttctagtttcaccattttttagaccttcactggagtgattgttgcagtattttattttattttatttttatcctttctgtttcctcttttctacaattttccatcaaggttcattaatttcgaggagtatggtgcaacctatgttttctaatttcatattttgtgtctggcagggtcaat

SEQ ID NO: 38055 - DNA, 988 bp, Sorghum bicolor
  Intron number 1 from transcript Sb08g021370.1 (locus Sb08g 021370) derived from phytozome v7.0 (chr-ID chromosome_8; pos 52977719 to 52978706 reverse strand)
ggtccgagcccgcccgctcgctcctcctctcgtcggtgagtgtttcgttccgcacccccaaccctctccgcctccccctgtgctttggcgtaggttgtgtgcgcttttgcccgtccaatccggagaattcgctctccccgtccacttcgccgttgggtttgttccccgccgacgcacccgcgcaatccaattccgccataattcgagtcggctcatccaattcgccgcgcgggaccaatcccgccgaggtgcgcggcggcgaggtttgccttccggaaattttagggatttccattcaaccctgtgtcgctggcgtcctcccgtttgggaattcttgtcgtaggtcgctcctgtgcatctatttggggcctgttggggagttgggacgcaccaatttcacgtacggaacagacggttcaaattcgcacagtaaccgaggggaattcagtgggctgtaagctggctaaataatgaggttgaggagagaagggaggagagaagagaagctgactgtaagtttacaggcgggaaacaagaaactttgtattgtgagagagataagtgggccagtaatagctagctattgtatgggtgggctgggagaaggcttgtttcttacagccagcaagtgggctgtattattaaacttgctctcagttgcgaaacagccgtgaaattttgtgcatagccgtggattgtggcgcctgccgagctactatggtggctgggggttgtagagtgtgtgccttgctgtttgcagaggcacaggcacttcacttgtagtaattagatttctcacctacactcatttgaattactccccatcaatttcttgccgtaacgaggtttaatctctgatttgttgttgaaaaacaatttctgtggtctctgagattcgtcacacttaggtttacagttcttttggtcggcttcatccatgggttgctacttgctaatgagctttgtgcttgggttcaggaaagtttat

SEQ ID NO: 38056 - DNA, 647 bp, Sorghum bicolor
  Intron number 2 from transcript Sb06g023480.1 (locus Sb06g 023480) derived from phytozome v7.0 (chr-ID chromosome_6; pos 52601546 to 52602192)
agcagaagagcagcgttgcatctggtatatatacgtatctgttcagcttcatattagatactttaatccgttgaaattattgcttttgtaagttacgttttactagtaatcgagagtctgctgtctgcaaaagccaaaattagagttaagacttaagatagcaggtagttctagctcagaaacatagaactctagtgctgttaaagctaaaaaactatatgctcaagttaccgtgtcatctcatgtgactctaggcacatacactgtgcaagtaataaggcagcacacttgaagagttgaagacgttttagaaaattactcgccgttctgtacctctatggatcctttagccatttgaagcaaacggcaggagcgctgcctctcaattaaggaaggaaagaaagaagtttatttacagttcgcaacctgcttagacgggctcagaaatattaacacgggctgaaaaacacgctaaacacacaaccaatgaacaaatccccggcttgctagcctcccctttctgaagcccggatccttcagcctttggcctccctaccaatttgtaacttttgattggccctgctgcaaatggccggagagcaatttgtaacttgatctgtttgtgcactgggcactgcaggcaaagg

SEQ ID NO: 38057 - DNA, 708 bp, Sorghum bicolor
  Intron number 2 from transcript Sb09g004320.1 (locus Sb09g 004320) derived from phytozome v7.0 (chr-ID chromosome_9; pos 5093705 to 5094412 reverse strand)
cgccaccacgcagttcaggaagctgctctccataggtgagattcggatcttatgtgcagttaccgtttccggatggatagtagtttatgggggggtgagatttgggcggtttgtcgagtagtattattaggccatgcgtgagggtatggtcagttctaggtgctcaaggtaaccgtcatatacgggtcttgacttgtggattgcatggtggcaaaattagtcattgcaccctcccattttctgactgtgtaaatttactgtctcgttagataaacaaaccctaccctctagcctctgcaacgtgcttatgaccatgtatgccaggaagttttaaaaaagctatgctcctgaaagcatttgatttcatgaactattctgcttgctgctgtggcaattattgtttcatccatgtgtatataaataaatatatattcatttgtttctttattttttggactggagagaattgtataaaaaaggtcatggagaggctgcacgcctcttctatattcttgtacatcctagatagcagctttgattgtactgtgagatttttgtatttgctggtgaatctagatgagtacctgatacttctttcttaactcatactgcaactttatgtgggagttgtttagtagcaacttgctgattgagtttccttcaatttctctagagcgtagtcccccaattgaggaggtgatcagcaca

SEQ ID NO: 38058 - DNA, 718 bp, Sorghum bicolor
  Intron number 1 from transcript Sb01g004270.1 (locus Sb01g 004270) derived from phytozome v7.0 (chr-ID chromosome_1; pos 3421153 to 3421870 reverse strand)
ctcaagacgctgaaggtgacattgtttgtgcttctaacacccttgcttctcatcttatcacactgtttttctatgccaatcttgtctctgctgccctatgtcggggccttttgtctggattcttttagatctgcaggctgttctgtcaaatgaagtgcatttagagtagtccaagctttcatctcctaagaggaaacatagatcaaagtttgctgctccatgtctgtctcatctagttatttcagtgttctatgcttgcaagcacgaaacctccagtttcacctctacatatgtttgtgctgggcagctatctgctctagtactagttttcattcagcactcttattacttttcatcatacatcagttcacatttggggtttgcagtccaagaatgctgtcattattttgttccaagaatgttctgtcaaatgcagtgagttaaattaaatagtctatgcttgacctctgaagagtgaagaggaaacagagaacaaccgagagcttgttcttctctatttctgtttcatcttgttctaccaatgttctacatgctgcatcctaagagtttttaatctggttcgaacaaatggttggtcattgtttttgagtctgcgcgtgcagaaagcgtagcgaaagatctgacttttgttcatgcatccgtggccactcacactcacacagggctgctcatcaacggcaactttgagacggcgccg

SEQ ID NO: 38059 - DNA, 599 bp, Sorghum bicolor
  Intron number 3 from transcript Sb03g038260.1 (locus Sb03g 038260) derived from phytozome v7.0 (chr-ID chromosome_3; pos 66194215 to 66194813 reverse strand)
tgcagttttatcttaccacctacaccgtgcatcaggtatgattggccacagcttatattttcctgtttgactgctatatgcaactttttcaatgtaatattcagagacttttgttctgccccttcaaatatcttttagttttttttccctgaggcactgtgaaagtgtgaatatgcctgtagaaaatagggcctgatccaaagtaaatgcttccatttctttttcgagataattctggttggcatgtgggggctgagtgcctgagttcaagcatcatccagcaacctgatgaaaaaattattttgatggcgattcatttatttgatatgaaacattactataaatcaatttcattgttcagctacccatgtgttttcagatgaaagtttctgttaattatcattgatgagattatggcaaattcattttcttttcattgagcttatccttcccaacatctgtattatgaacccttcgccagttgacactgtctgtagttataattgatgagattatggcaaaagccattttcttttcgttgagcttattcttcccaacacctgtatcatgaacccttcaccagttgatactgtctgcag

SEQ ID NO: 38060 - DNA, 996 bp, Sorghum bicolor
  Intron number 1 from transcript Sb01g019040.1 (locus Sb01g 019040) derived from phytozome v7.0 (chr-ID chromosome_1; pos 20058923 to 20059918)
cgccgccgcggcttcccctcctcccccgagccaaggtgagcttcctatctccagtcccgtagcgtgagtagcttccttctcgcatcgagtagcggtgttttgcgcgattatgtttggcctaggagctgctggatctgcacgcttggcccggttacgtacatgtgcgtttggacgatttgagttgtaatcggaggctatctttgggatgttttgttgtttgattgatgtgtggtcggagctagcaggaaagcgctggggcttagtagatcccatttctattagatttgcggtattgtgctcggggagaagatgtaccatgttcctgattaatcacttgatacaatgtttaatagcagcagccgtgctagattacgtagtgttggacggtataagaagtcatggatttagttttcacactctgtgagttttcacactcgtaccattttgtcatagatacttgcttcacggatagttctagtaaatgaatgggcagcttagctccagagaagttagattaagtctgatttactagtggctcaggagatgtctactgcatggcttaccgtatgcactgcctctgccatgttgtttttattgctgaagtagccatggtgcatgagcatttttattgctgaaatagccagggtgcatgcacatttttattgctgaaatagccagggactagggtgcatgcttttgttgtctgaactggttgcggttaggattttttctgtttctgtcttcggttacttgtttttgtcgtgccacagcgttgtcttttcccactttctattacttcttccatgcacttttagtccatgttatggcattcattgtttgattgcaccttttccttttctatgtgcaaatacgttttctttgacattgtaattttttgcttccggttacttcttccggacaactatactacatattggttttgtgtgctgcctttactgagtaaattgtgtactgtcttttttgtgtttcatgcag

SEQ ID NO: 38061 - DNA, 429 bp, Sorghum bicolor
  Intron number 1 from transcript Sb01g048840.1 (locus Sb01g 048840) derived from phytozome v7.0 (chr-ID chromosome_1; pos 71822053 to 71822481 reverse strand)
aagcaagtacgtgatccgaccagtagtgtcttcgcgtttttttttttgttggttgaaaaaactgagtgttctgtggaaaatttgacacgcggattaaggcaatcatattcaccagctttagccgtcaagttaatgcgacttaattagaaacaataacattttagccacatgatgacaattaatgtgaatcaaaataatggagaggcggaaactatgctgtagttggtgtcctcttgcgaatgaactttgttctgattttggaactgctgagacaacaacatacatgaacgaatgaactgcagtttctgtaaattgcttgcttctctgagttttgctgactttatgtgcaattatatctagtatacttactcattctacaatgatcaacacactcactgatcctatactatgataaatattgttttaggg

SEQ ID NO: 38062 - DNA, 961 bp, Sorghum bicolor
  Intron number 1 from transcript Sb03g030810.1 (locus Sb03g 030810) derived from phytozome v7.0 (chr-ID chromosome_3; pos 59116715 to 59117675)
cttcagctacacaagggtgagggtttaaatttggtgcattgcgcagcggatttggtagcttcccgtgcttcaattatcacgcaactaaatagactttgctctgctgtggcattaaattactgatggagtgaagtgatcagttataacagattaaagatcacattttgttgagtaaataaaccagaataatctgggcttggcaattatggtgttttgcattatataagtattcgaggccaatgcaaaccataggttctaatgtctagaaatctgcatgaggcttttggtgcttttgattgcaatgacattcttcttgacagttaaaaatcaaacagatacaaatgatgaacaaaactactctaactacagtttaaaattatagttcattttaggtttgtcataagtcagacttctctaacttttgagcaagtctatagaaaaatacagctagaatgccaaaatagttccattcagttctctatgaaatatgtcttaatagtgcatttatttgaacttatagatatgttttttctaaaaatttggtcgaagttagagaagtttgactttggaaaaatctaaagtgaagtatagtttggaatggagggagttccttgtagtgatcttcatgtatttggatgcagaaactgtgtagagagtgctatgatgccaaacacctttttttttggttccgatagagctgattgttagttggagtttgctagccagcagtctcaaggaccagtttgatattatacttaagaaatagtaaagctacttatgcagttgatccagacattcaaatcacatttatctttagcacttgaactagcagaacttgagatcaataagaacttgctgatgcatatatggttttgtgatggataatttgactgttggagtactaaggtattgtatatttgttgcagagattcttgacttctgtgattttatctcaccttct

SEQ ID NO: 38063 - DNA, 396 bp, Sorghum bicolor
  Intron number 4 from transcript Sb01g029940.1 (locus Sb01g 029940) derived from phytozome v7.0 (chr-ID chromosome_1; pos 52066613 to 52067008)
acgtgctcaagaactgtgctacagtcttgttcctggtattttcacaccttcaattttcccatgaatttcatctgagcaattcggtggatgaaggatcaaatagtcaaccgaagatgctattgtaggatgttttcttattaaaaaatgcttatctttagcaaattattttgccactcaaatagaaaattatgtagttggtagttgcgaattaacatttttactttcaccataatacttgaaggacaattgaaaaattcaaagatgctgagcaatggtcataatgttatgtttgtagcattcattttttttattttcatactgtacaaattaatttttaaacccccaaaaattcttctcacaggaggaaagtcttcgaggggtgcttcctgttcagaa

SEQ ID NO: 38064 - DNA, 884 bp, Sorghum bicolor
  Intron number 2 from transcript Sb01g030680.1 (locus Sb01g 030680) derived from phytozome v7.0 (chr-ID chromosome_1; pos 53256552 to 53257435 reverse strand)
agaacgtacgtatgtgtgatgctttgctaccagtgcctctggccatttctggaattcttgttctgtgatacttggatttggtgtgtttgcttgtccaaaatctccagttctcggcattatgtttgtgtgtgctttaggttgtcagctagtcgtagcaagcttgcatttgtggtagtcctttcgattgtaaagatctatgctgccaatttgctaaaaatagctgcaacaagcagtgctttttgttattgcttatcaaagaagcacagttactgcaacatccggttgctattcaatgtattcaaatttctgtttctctgcatatgtggaatttctataaatagatggaggacagcactccatcttccagattttcatggttgacatataaagtgaagtggagatgtggggtatggttttattttcaaatccagtttattttggagaaaaaactttagccttttctactttgctaaaaaaggaatgtccaaagaccatgacgtgctgtttggttcgcagaatagtaacgtaaacagaaatgaaatcagatcacatcgtatgtgtggccgttatgttgaaagctttgattcctttacgtttgcgttaccaatcctaaaacggaacagcgcctgagttcagctgacccacatggttggctgcgcatccattgtcattaatttggcaggcttgtactattgattatcgttgcttttgtttacatggtttaaagtagtatcgagggtttgatttgttcacaaattctgtgtgcatgtgttattaccatgttgtgcacttctactcagcaatgatgttcctatgatctctaataattattttaacttgtggtcacagatccttgccttaaaggacgtaatacgccccccaac

SEQ ID NO: 38065 - DNA, 953 bp, Sorghum bicolor
  Intron number 1 from transcript Sb02g030820.1 (locus Sb02g 030820) derived from phytozome v7.0 (chr-ID chromosome_2; pos 65830287 to 65831239 reverse strand)
gcggtcgcggccacgtccacgtagcctccggtccggtttgcatcccctccttcagagcccccctgttgtttgtgtcgacgcgaggtgtttaattctgcgttgccttgtgcgatgagcgcctagattgggtggagctcggtggaatttgtctagattttgggattgatgcgctctccagccgtagtctgatgcgtcttagttggattaggggatcatctgtgtagtttcagagtggtttagggattttatatttagtactcgctgcgctgttgcttgattttctgtttggatggaaactgtgtcggtggaacatggtgctccaaggaaatgaacctagtcaccctgggattgcaggaattgttatcccttatattatatgttgctgttgctaggttgtaggtgtattgtgtatatgataagtgggtagcgataggctaatgttgtagaaattgaagtgcatgcatacaacaatgagctaacaaaactataatgaaactgtataatgggtggtcataacaatctatgccattgccactgttggctgaaatgtagtattattgatgaaaaacaatgcgtatgattcaacattatttgtttgttaggtgtaagaaaaatggtccctctgttccaaaatgtatgtcgaaaagctctctaaccttgaccaactttatagaaaaatacatcaaaatctgcaacgttaaactagttttgttaaaaataacaataaaatatatcttcacagtctatttatttgatgttctaggtgttaatatatttttatctgaacttcgtcaaagttagagatgttaggaccaaactaaaacgatatacattttggaacgaagggaatatatttttgcgaattagaatactgcactatctgaatgcattgttttacctgaaataggtaagcattaacatattttgtttacctgcagatcccaagggcaaga

SEQ ID NO: 38066 - DNA, 950 bp, Sorghum bicolor
  Intron number 2 from transcript Sb01g046830.1 (locus Sb01g 046830) derived from phytozome v7.0 (chr-ID chromosome_1; pos 69960240 to 69961189)
ctcccgccactgattcaaaggacttgcgtgctaaggttagccaaactccaccctctttaccttttgttattatggtggttgatctcatattttctttcgcttcttttggttgcttctcttggcttaacattgtttgtggtaccggcatgtcagctgtatatttaggctcaccttccctagatgctctagtgaagaattctgatagcagtaatggaggggaaattatttaaatgcttacaagcacataaaggcgtcctatatgtactgagacttgtctagtatcctcttaatgctcagacacgttgatgctgtatatcatgcaattgcttaacatttcatccctgccaagggttttggggatcttacccagtgaatctgcgtattgcaatacctaatatactcagcaggttgtcatttgtctgtttcttctcattaccaatgactgtgatctagaattcagtatacttaataatatgctagggcatcattttaactaccataagcgatatatgtacatactcagttttttttttctcatggtgtatgtttttttgcacaagatgccacatgcaagcatcatgccacattcaacctttttgtatgtccttcacatctcgtatgccaaacacactgccttatgtgctgtattgatttttacaatttccaaggaatcaaaatttcagctaccccacaaaatgtattgcttgctatagtggctattaaatttcgaggttgtgtttcttttttgttactatgctttatttctagcttagaagttagaagtagaagcagacaattgaacacatttggtatagaagttaatgcattcaaccaagcatatcaacacactgtgatttatctagtaaaacctgattaacgaatttgtttaatgttttcaaccttttcctgcaatagctggtattgctgggagactcaggtgttgggaaaag

SEQ ID NO: 38067 - DNA, 939 bp, Sorghum bicolor
  Intron number 1 from transcript Sb03g031330.1 (locus Sb03g 031330) derived from phytozome v7.0 (chr-ID chromosome_3; pos 59713300 to 59714238 reverse strand)
agcctctttgccggcgacagcacccaccacaccaggtatgcccgcccgctcttcccttcctgctgtgcaaaactgagcacccaaaccctaatttaagctatttgccgatctgtattcggatctgatctaatcactacatgtgtacacccatgtcctttattgggtctgcccctgtgacggtggactaggctgtaggcctttagctagtgttggagctaattcatttgattcagctaaacagtcttgtttgttaaatggtgaaggttcggtcccgctgtccctcaaatataatttgttgtaaatggcctgggacattctaaagtccatcatttagttttagatctttcttaaaacatgctagctctgctgaacagtgttctttcagtgaaagcaaaggtcagacctgttccatccagagagagagagagagaggggggggggggggggatccagctctaacttactgtgatggatattccaaccgttctagtttattgcacttatgttttgccgtgtagtggagtcccagtgctagtttctattccaaaccttttgtggattggtgcaagtccgcacctgtctggctgtatcgaagcttcactgccatattcatggacgaagactataagtttatgatggagggttagtatgattgtccatatgcattcttcttgcatccaggccaaatgattagctactgtttatcttgcttttgataaaaatattgattcattagtgacacctcaggatcatttaccatgaattcatcttttttttttcatggatgcctttgatgaaagataacttcatggatttaagaattaaaatggatgcaaatgttctgaaccagaaattaaaatgcttgataatattttaattgacttcaaactttctttttatgctgctgatgtgtttattctcatttcattttgcagtcaa

SEQ ID NO: 38068 - DNA, 945 bp, Sorghum bicolor
  Intron number 2 from transcript Sb03g030490.1 (locus Sb03g 030490) derived from phytozome v7.0 (chr-ID chromosome_3; pos 58742063 to 58743007)
tcttccaaattgcttcttggtaagagccccgtgctcccctgtcttgtcatttagattgagatttttatgtcgtcaagaatggattaggtaggttcacatgagccattggggcccatttaaggttgcagatagaatcctacttaacagtctgtgtatcacgcatggttatagggtgtttggtaagtttgaggaacggagtagtccatcatcttttcactcacttttttgtttggtttgtgaaatggaatgggttgatccatgatccatcatcacttcgttcctcaaaaccacaagctaataattagtgtaagcatgaggagatgggaaatgaagtcacttcaccaaatttgagggatggactcatgatgcaccacctcatctaggatggggtgattcctcaaagtaaacaccctattaatagaaattctggctccttcaaggcttcaacagcctttaccatgcagcctatccatctttgagaaaagtttttccttagtaatacattttaagaaaatcgcgagtttgcaactaacattgtcatacgccttcccaaaatccagtttcaaaatgataccctgctgtttcctgaccctaagttcacataggaattcatgcagaataagaactccatccaacatatgatggcccggcatgaatggtcttttattagctcgagttatcttttcatccactttggtcaatctgatagttaacgttttggttataatcttatacaccatattcgaacattcagtagacaaattggatgttgatgacctatatggttattgcctgtaatcgtccgctcctatttttattcacgttttttattgtataactgatattatccgtgcttctagtactgatgctgatgcccttttgcttcttcgtggatatatctggtaacaagccaggagatctcaaggcttgcagtttccttgtcaa

SEQ ID NO: 38069 - DNA, 871 bp, Sorghum bicolor
  Intron number 2 from transcript Sb07g007660.1 (locus Sb07g 007660) derived from phytozome v7.0 (chr-ID chromosome_7; pos 12068692 to 12069562 reverse strand)
ccaggcgctcttcccatcctgcaccaagctgccaggtgagccaaacatgaacatgaacgcctctcaaaagttgtccctttgtaggataaccataggtctaccattatgcataatcgattcgacaatactgtacgattgtacatttgtactcgagaagtgttgacgattactttgacccactgaatttctgggaaattatagctcaaaaaggaacggacttgagttctgaagttgatgtattcagatgtaattccatagttgctctggccatttgctttcatcttgctaaatgttgtccttcacaagatacagtctttgaattcttgtttcatgtaccaccatgaaatcaaagcgaggaagtgaactttaggtggaggcacattacgtgttaagtattgtatcaatcaatgaatcaacagagtatttttttgcacagcattttctgtgaacatatgagttaaactttcagatatgtgatttgactttataggtgatgccaaacacaattgaccattttgcgctatcttacatttcatggtctgatatgatctgttgcatatgcacttcagccaaaggaaattgccatatttttcaagatttcagactatggccttttgcaatagacacttttttttgtaataatatcccagacccagttttgactttacgttgttcctcttaagacaatctcttggtggtaaaattactgtttctttaagggatgccttgactggtggggtgggatattttgaagaataaaagtcaacattttagcatcattgatcaagttgctttaatataagtactagcttatgatgtgttaaatgtatcttgtttcttgcaggagtactacgtttggtccatcatcttc

SEQ ID NO: 38070 - DNA, 887 bp, Sorghum bicolor
  Intron number 2 from transcript Sb03g041160.1 (locus Sb03g 041160) derived from phytozome v7.0 (chr-ID chromosome_3; pos 68707797 to 68708683)
ccgccttcattcacgtacaaaaggttatattcgttacccaggagagagttacaccctatagccctttagatgtacagtggacactaccaagagtttgttctttcaagtatatatggttatcgcatgaccatatatatattgcgatataattataatttgtttagaattaattttttctataaaaacatatatgactactacaaataaaggattatatagtaacgaaagtatcttttaccatgaatctagtaacatcgaccatgcactgtcaatctatgtagcttctagtatatttatggtgaaagctaaaaagtttgacaaaacatgaatcataaaaagtacatatttgaaattggagtaagatcaaatgtcaataagtatgatgcttctattttgctttggagtggtatatgcatgtctcaataagcttttattatgagcggcttgagtgctgcaagaatttctgggcattctagccagcctcttttcagttacatggatgaaattcctcgacacatgtcaagatcattttggtcactccattggtgttcagggaaattttgtagtttcataattcaatatggaccttgcatgaaaggaaagaaagaaagaaagaaagaaagaaagaaagaaagaaagaaagaaagaaagaaagaaagaaagaaagaaagaaagctgtataccaatagcttgcatttcttattgaaactaattgtgtgcttcctgacaaggagcacaatagaactgattttctgtactttaagccccattcttcaggatctatgcttattttttagtggagtgaacaaaagttcttttcttgttttcttagttggcaatgcactgattaaaatctctgcaatgcagacagttgtacacagtacctg

SEQ ID NO: 38071 - DNA, 861 bp, Sorghum bicolor
  Intron number 3 from transcript Sb02g004450.1 (locus Sb02g 004450) derived from phytozome v7.0 (chr-ID chromosome_2; pos 5027366 to 5028226 reverse strand)
tgcaggggattgaatctccccacccccaaaaaaaggttgcttcacatgtaggacctgatttccttatattacgtagaaattcttagttgattcacctattttttaggctcattgattttaatttttttccctacatgactatttgattctccctcagcgctcaacctgtatataaggtcgtactctgaattttgtgactgggcttgtggagcttatatgatgaatagcttgtgctcttctaatatctggggtatataagaaggttcaagtccttattttctttttctcctgggctatctttgatagtaagtcaagtagttttaagaatgcatctcacagtgagggacaagatcttgcttctaatgccactataatctttttcagtcatgtttaccaaacatttcttggctcatgttggcaaccttgaatgttggacactatgaactctgccttcatttatttgctcatccagattataggactctgccttcagcttttttctgtgttcctcatccaatttttatgcatagtgctatcttggtgtctcaataactggccttgttgttatggtgtcaacaaacacctagtacaatatgtagtccagatagcctacttttaatctgattaggcataacaccatacaaataagactgttgatttactctgatgactttatatccttggcattcttctgtcaaatcatgtattataagggtgaactttgtattctacttgtatgttttacctagaaattcttatccgttttcatattcttctctgtgtgctagtgcttcttttgacttttatttatggtccaccctttatgtgcatatacatttcaggctcaggttttagtgggat

SEQ ID NO: 38072 - DNA, 789 bp, Sorghum bicolor
  Intron number 1 from transcript Sb10g023850.1 (locus Sb10g 023850) derived from phytozome v7.0 (chr-ID chromosome_10; pos 52590876 to 52591664)
tctgcctttgtggggaaatacacaggttcttgctcgcactgaatatacttttgtactgtacgcccttttgttataaaagtcacaccttggtgatgcttcagtcttgaagattatttttgcatgtaagaatctgttttgtgtagccgtttgcgtcgtgccggtacacttaaagctgagtttttaacaaatttctgggctgtttctaagaaattatactgaaaattcctgttgaattcttgtgtttgaaacaagtcatctttaggttgaaaaacacagtttcgtctgccgatatagctgtttgtactataagtgaagacgcatttttgaattgaagttctatataaaagaaactagggccggtttggcggactaaagtttagtctattgttggataataggcaacacatagactaattgaaaaatctttttttttctaatgagttctgatgatcaattagcatttttgatgaaactactcaccaattagcctctctattagtttttataagatcataattaattcatgtttagaccttttatttggcatctaaaacatggactaaagtttagtttagtccatccaaactagttgtagttgattatactagacgggaacgcacgattttcattaagtgaagtattttgtgaataggacagtaggaagcagcgttgaacagtaggaactaggaagcagtgttgaacagtggggaagaatatagatgcaccattctttctatctattgcttgaagtgtacatacatacagtatatgatacgcgtgcgcgcgcag

SEQ ID NO: 38073 - DNA, 1001 bp, Sorghum bicolor
  Intron number 2 from transcript Sb06g017990.1 (locus Sb06g 017990) derived from phytozome v7.0 (chr-ID chromosome_6; pos 47441635 to 47442635)
agaagataccagtcacaaagtatctaaatctacaggttcttttcttgtgcagaatcctgttagttgtaatagtgtttttgggacagcaagttttgtacttggaaaactacaagtgcaagataatttgatattgtccatgaaacaggcatctaatggtgcacccatcaatgttaattgaatagttgctcaatgtgattgtgtgactacaaattatgcacttgatgcttaactgagtgcataatgcaagttcaaaaagattaagactggtaaaagtcttaatcttatttatttgcttccatggttctgataatctgatagcataaataatgttgattgaagcaaatatctctttacatccttgctaaggataatcactgcagtacaaactacaaagtataagctactgcttctgctttaggaactgttcctcaggatatatgaagttttattacaagaagtgagaataatgtgttaacacctactagttacatgaagtatgaatctaaccaaatgatgaatagatgtgcaatatatctcttttatgatttaaacatttccatggtgaaaatttagccgatatactagtcttccctatgtgtgtgatttgatgattaaggattgtgtgcttagtttatttatggaagcaaaaaaaattgtcacggaaaatggttcagaaaagatttgtgtgcttcatcaggaatagatcatagaccattttcctgtccaggaagtcgattgaacattattactcacctctaaaaggtgtgctataatcatctgtgtccaatatagatgccaatatgccataaacatgttaacgtagattagctgacatgatctgataatcaacatggctgaactcagaaatggtaatgagttaaaattaaatactcggatggaatttcactttgatgtggagaaatttgttctgtggctttgattgtgcatgagaatttacagcaatggttcacaggttggtattggccacaattatcatctga

SEQ ID NO: 38074 - DNA, 937 bp, Sorghum bicolor
  Intron number 1 from transcript Sb01g006270.1 (locus Sb01g 006270) derived from phytozome v7.0 (chr-ID chromosome_1; pos 5278505 to 5279441 reverse strand)
cgcttcagaaatttatcaagtgagtgatttcatcttctttctgttcatacatggattgccgtagaaagacagtaagattggctccttggcatggcttcatgattgaaatgttatcagattctttgtggaatgtttgaggacaccatcaactgcaaaatctgaaatgtcatgccgtgaatgggtggcattgagtttgttttgcactgccaatttctgaactaagaactggttttcagtatcagtaggaaaataatttttccctcagcaacaaaactcgaagtacagaagtatgataactttacaccattttatggcttgttggtttcaagctgctaacattcactatctaatgcaaatggtagttacagcatgacacacaatttatatggccaaaacatttcatgaagcccatctaatgcaaatgcaaagagtgatgatatttcaggcctaatgttgtgttttgcatcgatgggcaattttgattatcatataaagtttgggcagtgtttgtaaaggcttctgctcccagattatcatccagagagcagctggagctggagcgcattccaaaacctctcctgtgaatcttggactatgactatgtgattgtctgtgttctatatgattcagaatgctgatcgtcttgcgttttgctttcccacacccttttgattgtcgttacaggtgtagcgcaaagtagcatgatcagtatagtagttataggttgattgtagagtcccctttgtagttctaaaaagttttatgaaacttggttacttccagggttgcagttatatgatctcaaactcacctttggaattgtagtctgggtgttgtggacagctcaataaaatgtctattgtgcacaaattctgtactgaagttctgcacaaaatcgtttttggcttgcagaattggtggattttgttgaaggaag

SEQ ID NO: 38075 - DNA, 1045 bp, Sorghum bicolor
  Intron number 3 from transcript Sb03g004360.1 (locus Sb03g 004360) derived from phytozome v7.0 (chr-ID chromosome_3; pos 4646272 to 4647316 reverse strand)
ttcagggcccgtgcaagtcaccaatcaccatacaggtaacaaccatcccaattaagattgccaccctgccggatctaggattttatgtgatggtatgccgcataaaaaaaatttcatttgcaatttagtgagccatataccaattcggtaaatatgtttaaatttgcaacatagttgattatacatacactaataaaaagcataataagtcctgaatttgaatatcatgttaggaacttctacaaaatgtaatataaatatttccaacgtggtactacttatctgctcataggtaagtttttttatagcactattatctatcatcgtccacttcaagcaaattctctgatccaacgatctcgctggtctcttgatacgcaaaaataataactaaaaacgatatttagttcaagtacgcaagtttttttaggaaaaagaaaattaaatacttggccttggcgtcaggtgtaagtctttttcttttagaaaaagaagatgatctgtttggtccccttgctaaattttagctacctaaactttagttattttagtagttaaacttccaaacacagtgatttaaaagagctaaaatagtttagtcctactagtcactcaagagtagctaaaataattttagcttgataaaatttagcaaggataactaaacaagacctaaatcttttggtcttggcgtcaggccatttgcatgcagacgtatgtcgattttgtttgaagtttcgacaagacagcattacaacgattcggtgattgagcggctagggtaagcggtgctgccctttgaatcctgactcgcaaattcgcgaggcatgcgaaacaacacagtgctggcctgctggatcagtggcgtcgttttttctttgcatttacatatatattttctagcgtattggtctggtccacagtgctggtctgctggatcaggctgcatccatatgttttgcaaacagcaaacaagaagcacagcagctagcttaacttgtaatctgcagctggacggcaatattgtagcaccaaaccacatttg

SEQ ID NO: 38076 - DNA, 972 bp, Sorghum bicolor
  Intron number 1 from transcript Sb09g024550.1 (locus Sb09g 024550) derived from phytozome v7.0 (chr-ID chromosome_9; pos 54086598 to 54087569 reverse strand)
cgcgggagcccgggaaaccgcggcaacggttggaggtgagagcctgctgttctcgactcgagatccgtgtgcgttgttgcgttccaggcttctagagtctcaggtggccgttctgttgtgtgttccgcaatggcgggctcgtttttcgggagtgttttgtgctgctgagctcgcgattttcgtgaagcagcagtttccagtagcatgagtatacgacactgagtggctgggtgtttttgtgaactgtgatcgtttgtttgggtcgtagtgcgcgtttctttggtttttgtcgttgttgtggggaggtgggcgattctctgaactttttgagcttaatgttcctaaagcttgccaagaaaaatttcatccactagcaaagggattggttgttgcttatgcaaattttgtctcagtttcgttagctagtgtaagctcttgaaattaatactcattgcactttgtgattgcgtaattccatggttttcgtgaatttgcctcgacatatttgatatttccatgttaagtaccgaactacaagctgcttaaattttggctgaagagcagtctccgtctgtgtggactgtggaccaatcttgttgtgtttcatgctagattatagtaagttcttctgagttggtccaattggtgatccttatcattccagtatgctttggattctttcccgtatgtctctttcaactgggcctgaagatatgacatcctcatatttccatgtgtcaatgtacagggtggttgttaggatgtaacctgtgtggtcccaagatattagctgctcttagttgtgaaaccaagacatcccattggatggattttgacaagttttactccattttgcatgcgagttttgtaataccttcaacatactccacttcttagtaaggatcagtggtgaactaacagggaattaattttgcagcctagcccaaggcatctgcatactccggatcgttg

SEQ ID NO: 38077 - DNA, 1021 bp, Sorghum bicolor
  Intron number 1 from transcript Sb06g026610.1 (locus Sb06g 026610) derived from phytozome v7.0 (chr-ID chromosome_6; pos 55642958 to 55643978 reverse strand)
catccaaggaggagggcgccgaagccgacgatctggtgaacacgcttgcaaaccttctattaatgctgatgatttggtgattcactgttctgtatgattgagagtcttaagcatagtgacattgacattctgagttattgggcatttgaagttcgtcgttgtgtcatatgtctgttcacttgatgtcttggaaacggaaggcttaccttaggatgaagcaactgaaaccagttctctgcaagagaggagcgagcgtcgactgaaatctgttggccgtggtttttagatcggctaggacattagaagtgtacatgagcacggttgattttttaatgaaacatgcttcgtccatctaaactaaccccttctgatgccatagatcgaaaaatggaagaccgatactgtagtcgtctcatcctactgtattttcggtgtcagttcgactgtatatccatctggaatgaaattactgtgccttggaacattttttaattttagatactttatttgaatcttgctaaataagtaagttattaatgtttgctgctggtcatttttgtcattcactctttttcattaaaatatcgattgatgatattttcccaacctggataggccaaacagtttagctacagcatgctgcaaagcttatatatatatgtaatagttatgcttggcttccagttaatcacaaactgatgttggttgttcacatggaaaaatgcttgttataatggcaaattagacttatgacaacttactaagtagtgatcatgctaaagtcttactacttatctcagtattcaatgtaatatcttgtttgattttttctgcatgttctatgcatttccccatcctgttggctctcaaaagatccgttttgttttagttttgcatggctaatttttatatttgaatagccagtggattagtcactttgctcatctatgcattggtttccaattaatatataatgatctttgtaggacagtgaagatctcaaacttgagcgagtcctaaa

SEQ ID NO: 38078 - DNA, 656 bp, Sorghum bicolor
  Intron number 1 from transcript Sb01g014430.1 (locus Sb01g 014430) derived from phytozome v7.0 (chr-ID chromosome_1; pos 13738777 to 13739432 reverse strand)
tcaaggttttgattggtgatttccataaaagattggtgagcaattttctttcacactgtgtttctgggtattcagcttgtggaatactttttgaaagaataattttttttgaaagatagcttgtggaatactggaatgtgttcattacattcttagaagtcgagtaacttttgttactaattcaatactgtggtagtgtttccaatttatattagcatgctgtccctaggaatactgatcaaagatgtagccataaatgtaataacatcacgtaaaagactattttggcaatgttattctaaggcaatgcttctgctccttgggacagggacaaaatatttactgattttacaagctattggcagcattaatatcaaacagcttcaagtactgaaattgaattaatcaagctataccaactctttgcttcttaagttgctaccttttttgcatttggaatcaatttagtgtttcagactttcagtatatgctggtgtgcatcacttgtttaattataattagttgtgatatatccaacaaacttgcaatacagcgatgtagattttatagagttcccttaccaaatctgaactttcttctgcgttaatcttgctgcttcaggtcataccgggtaaatttgccaaacatttcagaga

SEQ ID NO: 38079 - DNA, 909 bp, Sorghum bicolor
  Intron number 2 from transcript Sb04g030940.1 (locus Sb04g 030940) derived from phytozome v7.0 (chr-ID chromosome_4; pos 60950249 to 60951157 reverse strand)
cgccgccgccgctacatccagttgacccgtgtgtggtatgctagccacaggctggacacgtcctcatctatttttgctgttggatagatctgcgatatatgcatggatgaacggtggtggttgttgcaattactagtgcttcttccgtaatctatagagcttagagactttgcagtcacttgagcaaccatggtagccgaattgccaagatagaagctgcaagattgaagctttcttcactagaaagagcaaattgcttgcattactgtcccctctgaatagtgtccatctattatttccagcaataccattttctatcattaccgtacctgctgccttcctctgcctaactatcttgaacaaactaatttatgtgtgcctagctatcgatcaatcattgcaggctagtatatattaaacagtcctcaaacacgcatctatcttgaacaaaatattcctttttgcactatcattaggaatcccagtctgatccagtaggttttattgagtggctcaaagtgctgatttgctactgcattgcgtgattgctggataaggtccttccagtttgattcacaacatatgtccaatacatgtaggactgtaggagagcacaaaaaaggcttggttactacgtttcttttttttttttaaaaaaaaaacaccttagtctggcgttagtaaacttttcctggagacatttgcaagctttggcagcaggagatggtgggtcccagaaattatgttaattgactgattaagaacttctgccacatatttgttatgttgccacatattgatcatgattaaaagcagtggatcttgtttgtgtacaagctagctgaatgtgacgctttcctgtgcacttttacagattaataattttgtgttcctgatcaccaaagcaag

SEQ ID NO: 38080 - DNA, 721 bp, Sorghum bicolor
  Intron number 1 from transcript Sb08g001190.1 (locus Sb08g 001190) derived from phytozome v7.0 (chr-ID chromosome_8; pos 1144312 to 1145032)
gaggttgaaaaggtcatgtactttggatattcttgccagtgcaaatatcctcgttatacagtcttttcgctatcttagcttgtattgctctattttgtgctaaaaggtaaaaacatgtatgttttttcccagaactttcatctctaacttttttctttctcatgaaagccaaattgctagtgtcatgcttcagtgtcagaattgtttcttgcttgctttctcataaagctgatctaatatcaacactttatcaaaagatatatctttttcttcaacacaccatagtcaaaacccactttgatgcagtttcgataaactcttgaaattttgatatgctaatataatatatgaagaaattgaagtttcaatatctacagaaagaccactacagtacaattaatttggcctgagatttcgttttagtccttttatagcaccagatgccgtgctatgtcccaatgatactggcatctttcttgacactatctatgtattcaaaccattgtgtatagttatgtcacatgtttgaataactttatagattttctaaaacgttacatgacatcgccacccatgattcaaattttatttgtggctagcaagtagtactttatgataaagcagtttagtttttttatcaagactacatacatacctatgagcttctgatgacaattgtatttcaggttgtccgcattatcgacttgtcctgctcagcctc

SEQ ID NO: 38081 - DNA, 760 bp, Sorghum bicolor
  Intron number 1 from transcript Sb10g026660.1 (locus Sb10g 026660) derived from phytozome v7.0 (chr-ID chromosome_10; pos 56121786 to 56122545 reverse strand)
agggggtcgtttccaccgtgcccctagtcgccgaggttgtcgccaaatcgatcgatccagcgatcactgaagaatgccttgaacttctgtcacttattgaagatgcagcatgcaagttttgtgagcctggtgtagtagacatggtcttccttcaaatcttaggccttgtttagttccgaaaaattttgggaaatcgacactgtagcactttcgtttgtatttgaaaaatattatccaattatgaactaattaggctcaaaagattcgtctcgtcaatttcgaccaaactgtgcaattagtttttattttcgtttatatttaatacttcatgcattcgtctaaagatttgatgtgacggagaatgtgaaaaattttgcaaaattttttgggaactaaacaaggccttaagcttaacagatggttctaagtgcacagaacttgccattaacctaatgcagttactagttcataaactcaaagtcgacactatgagtgtggagaaactgcaaggcatgattagcatggtaacttgccttgccaggctttttgctgttctccataagtccataatgcagttaaatttgatgccctgcacatgcttaccaccctcctgtctcaaaaagaatctccacttcatgattctttgagatcaataccggcatcaatttgggaatctcacattcgagttggaatcactgccattctccaaaatcgtgttgtatcctctgaaaagctgcacgctattcttctggcggagtgc

SEQ ID NO: 38082 - DNA, 605 bp, Sorghum bicolor
  Intron number 1 from transcript Sb07g025840.1 (locus Sb07g 025840) derived from phytozome v7.0 (chr-ID chromosome_7; pos 60953889 to 60954493 reverse strand)
gcgtcaaggccaacgtgctttccttctggcgccaggtgacgcccgcgatctgtctctgaatgctttgaattttttaccctgtagtttcgtcttagctgatgtgcgtggtttgctgtgcgtcaacgattgtgacatttgtgaccttcagatgcggaaaagtggtttgtgaccttcagatgcggaaaagacatttgtgaccttcagaattttgttttcccgtgggatttgtatctataatctggacgatgataacgatttttctattaggacaggagtgttacattattgtcccttttcaagtttgtatatgcattgttctgtcagctgatagcaagaatattttcggtgctttagttatacaatgttgacattaatcttgacgaaacttttctcatgtcaattagtaagtattggaaaatgtgctgtggaaaagtaatttttagccttccttggtgcagtttgtgttgtgatttgctagtttttactggaattgattacattttagttacttcttgtggctgatgattcatcctgttctacttcttctttgctaagattactgagattcttaatttctctcccagcacttcgttttggaagagaac

SEQ ID NO: 38083 - DNA, 749 bp, Sorghum bicolor
  Intron number 2 from transcript Sb03g026230.1 (locus Sb03g 026230) derived from phytozome v7.0 (chr-ID chromosome_3; pos 52815592 to 52816340)
ccttagagatagaggcaaagaaaggtaatatgtgcccatgtactatcattatgtacatatttttgatatttctgctctagaatcttctttcttttgggggtgccgtatcaatggtcttttggaaaattctatggatcattaatttaagtagtttgatatttggtgtatgaaaatgtgttctgtcatggaaaatgaaattgacaacaagatatctatctagaatccatctactagttttgaaattgaattgattaatgtgtctccatttcatggtttgctctttttgacaatattaattcatatcactgttctgctgttctcttagaatcatgactcaaaagtgtgaaatgtcctgtttgaaaccattgtagcatcctcagaagaactgcaaagaagatcatttatacagaatctgtcttaatttgtcctgtttaggagaagttacttcaggcttatgaatgtataatcttttatttgatttagttgttgtatatggaccttctggtctatacactgtttggttctctgatgcttttttttgtgtaaatgtattgcaacatccatggaaacattggaaagtgaccaatattagaaaccaattcatgatcaagtgcatcactacattactctgttacagtggagtaaaaatgaaagggcagaagcattgtctttcttggtgttcagacactcctgaatagtgttgtttgtttccaggtgcgggaaaaaattccaaatctgcgaaggttttc

SEQ ID NO: 38084 - DNA, 706 bp, Sorghum bicolor
  Intron number 2 from transcript Sb03g044240.1 (locus Sb03g 044240) derived from phytozome v7.0 (chr-ID chromosome_3; pos 71573356 to 71574061)
acggtgatcactgcaatgcgatgcttcccctttttgtgttaattaataatgatgttgtccatggatagcgataccaccgttttcaatcagctgtcgaacatgttatttagctcccttttgcctccaaggtcacccaaacactcaactcagtatgcaataacagacatggcatagcaactagcaaaccaatcaaattcaaagcctctttagttttagcaaaccaatcaaatttggatgctgtacttttccttctattattagattgaaaaaaaaacattaagttagctttgtagctgttctttctggagacgagatgaatgatctttttcatggaattcgttagttgtgactctggttgtgattaatcacaatttaagaagactgctttgatggagttaagaatactagagtactgcaagtttgctttttctttctgtgagaacaaattatgctgggatgtggtgctatttggattcaatgacacacaaactatgaggagttgcaacataatttttgtccaaaatggtgcagattttgatcttttggttaacaaaacctgccagttccctatgcaccttgtttttcatgctgtggactattaattttgagggcagtatatgcttatcggtcaccaaaatatttttttctgatgctgtcacgttatttttcctccccaaatggttatgcaggtgttttctatctgtac

SEQ ID NO: 38085 - DNA, 790 bp, Sorghum bicolor
  Intron number 2 from transcript Sb02g010020.1 (locus Sb02g 010020) derived from phytozome v7.0 (chr-ID chromosome_2; pos 14550520 to 14551309 reverse strand)
tcgaagtgttcagtacatacaactgcttcttgtaggttagtagcaactttttgtgtaaatgtcaaataaacatattaattatgtgcttcaggtctcacagttttttttttaacccgacatgccatatgcttctttttgttatataagatgtgctcagttaggccaccttttatagtccacctactttatcattttcatcaaaccattgggaagctaatttgaagttttcatcaaacctatatttccttgggtagaagtactatatttgccttgtagaggatagtcttgttaatgttgccactgtcttttggaacaatacattgtgattcacagccagtaactcatgatttgttttagtaatgtatttgttatatggagttgtgcaatttctctaaaacttttgttgggctttggtacttatctgaatgtttatgccctactacctttatagaaatatatgtatgttttcaaggcgggagatcctttgaaccagaatgcccttttttgatactaaaatatctgttggaaaccaaaattgttctttaaatgatctcaaatattaatttaataagcttcacagtgtggaatacttgatacttattattgacttatcttctttctttgtctgggcacttgcttttgtgtttatatagaaaaaaatatctgttttgatgagtacagaaaaatatgttttcacattttttttgcctaaactgcttaacttgacacaaaaacatattatttttaacaattctaacggttaagtcaatttaacacagttggtttcaag

SEQ ID NO: 38086 - DNA, 923 bp, Sorghum bicolor
  Intron number 1 from transcript Sb07g025570.1 (locus Sb07g 025570) derived from phytozome v7.0 (chr-ID chromosome_7; pos 60655981 to 60656903 reverse strand)
aggggaccgacgaggtggtgtctaggcgtgagcaggtgaggccgatgctgcgagcacgagggcgggtagggcggtgccgtacttaggatgtttagctatctccggaatccttggggtttgagttcggatgtgttggaataggctgcgtgctcctgccggaatggaacggtgttttttagtgatatatatgagtgagctggggattttcatatgtgatatgtgatatgtgatatgtgagtgagctggggatttgggcgatcagtgcatgtactggagcactagggtggtagtgatgtactggagcactagagtggtagagcgtggtaacgatgtactggggcgctagagtggtagagcgtggtagcgatgtactggagtgttagagtggtagagcatggtagcgatgtcctggagctctagagtggtagcgggttaggtcaattcattcttaaatcagtaaagtgttaggttggttcatagacttttattagaaccggtggtctgctgcaaattgatgatcatttcagtgccgtggctgctgatgcctgctttatatgcaccgctgagtattgatttgtgtcattgtgtggtctgtattgggcttaaaagtagcactgcagtagcttcctttgcttcttaatgtgaatattgatttgtgtgcgctgaattgggcttaaaaacagcactgcatgagcttcctttgcttcttaatcaactgatagtatcacggtcgattagtgatgtgcgacctcttgtaggctatgtcaagcgtcctagatgagtgatcacacttggtatctttgtgttgctttgctcttctgcccatattttgttctgtgggatactcttgagttttgctaaatggggagttgcatttgttattaacagacatttgtggttttaaacgaagaagttatatctga

SEQ ID NO: 38087 - DNA, 763 bp, Sorghum bicolor
  Intron number 1 from transcript Sb02g012400.1 (locus Sb02g 012400) derived from phytozome v7.0 (chr-ID chromosome_2; pos 20878345 to 20879107)
cctttcagtaagatctttataatccttcagacaaatcctttctgcagctccaagggtcacctatgtacttgtctttcattcactcgatttttttcctaccgtgctgaatacaaagtgatatggcccttgaatccaacactacacaggattaatggcgggtgcaaagcacgtttctaacttatttttgcgcttttgatgtaaactattcctaaggcgaggttttggagttgtagccgttttttagatcttttctcagtgcctgtctaggctctttctctttaatacaataggcagctctcctgccggtttcgtttcaaaaagaaactattagtttatagacgaagttgaatgattgccatcttaccttaagaaactaccagcctatgagaacaaggattgcctaattaatgatgatcataagcactagcaggatataagagcacaagcataaatacaagcaatttattggctatgctggatgaccataagcgttgggagaggcgattattgttttttttcgatcacgccgaagcgcgtatttcattaagcaggatagagtttgcaagacaaaaatgacaagaacacgcaaaccgactgaccacgacgaaacaaacaaactcaaaaagactgacgcggccagcaaccccagttaccgcagcccagcaacccctgaggcgattattgttgtcattagctgtactaaaaatcattctctcctatccaacaactgcagtgggtggcagagtgctatacaagttcgctg

SEQ ID NO: 38088 - DNA, 699 bp, Sorghum bicolor
  Intron number 2 from transcript Sb02g012400.1 (locus Sb02g 012400) derived from phytozome v7.0 (chr-ID chromosome_2; pos 20879165 to 20879863)
tatcacgatacaaaaatctgtgcgggacgagaaaggtaatgctatttatccttatatttgagttcagattaatagaccccatcagcttatgcagtgcgttatttggggttatatggtaaaagaattcaagtaatcagatatttagaggcttcatgctaaatttggtgctaaactgctaatactagtaaatatgcatgtcagtggcccttcttcaatcttcatgcaaaggaaaaggaaatgatctacacctttacaacatagatattcctctccttttttagtgaaaacagtaggggaaacccctatgtggtaaatatttatttatataaagaaaagcaaaacaggtctttctgagaaataaaagaagggctaaatgaaggccaagaaaacttaggtctgcccaggagagaggaaagaggaaaaggcagacaacaagaacaactaaaaaagtgatctgagtttgtttaaaaaaaggtgatctgagccaagaaggaaaggacaattagacattcctctttgatatactatttgaatcccatctgcaatgttaatttacattagcagtactataaagtgaaattagtattgcaactggttcctaaaaagaaggataaagataggtatttatttgtcagggaacatgccttgtaaacaaagtatgtgttactttactgcaggttaccgcacattaccttacac

SEQ ID NO: 38089 - DNA, 905 bp, Sorghum bicolor
  Intron number 2 from transcript Sb09g022350.1 (locus Sb09g 022350) derived from phytozome v7.0 (chr-ID chromosome_9; pos 52020299 to 52021203 reverse strand)
gtaatcagaaagaggtaataacttttaagcccttcttttgcataataaagagcccttgaaacaaacatgctactagtttgtgttaatctttaacgtcagcagtcagcttacgactttgtccgtcccacaaatagtatgatctcactttttgagaagtcaaatattttcaactttaaccaatatatataagaaaataattaatatctatagtgcataattagtatcattagaggaataatgcactgaataaataaacttatttggagatataaatattcctaatattttccacaaactaatataattaaacttaagaatctgccacgaatcccatagagacactctttttgggatagaggcctgagtatgtaacaagtactaagataaacaagaacagctaaacagaggctgatggtaatgtagaagaaagtagcatcacacagatggaaaaagaccagcttaagaggaactaagggatttttattaaaaataaaatagacactcaaattcaatttgaagaggactcgaatatggttgtgtttgtataaggatggggatgactctctaaatggatacccgcggttcttctctagtgtaatttaatgaataaaatagacaattccttttctcatttttttttcatttagttcatttagttacacaagagaagaaccgcgggtacccgtttggagcactgtccccatccttatgtttgtatgcatgatgataccattgatgtaagaatcttggttatggccagagtgccagacaattattcatttatccttttgaaacaaattattcatatatccttcatgggaagactcttcacttctctatggcgggtagttattatgacttttttggtaggttggttttgccctgaggaaactatttgaggaggg

SEQ ID NO: 38090 - DNA, 913 bp, Sorghum bicolor
  Intron number 2 from transcript Sb02g039080.1 (locus Sb02g 039080) derived from phytozome v7.0 (chr-ID chromosome_2; pos 73204160 to 73205072 reverse strand)
atttcggtgccggtgttgcggaccttgtcaaaggggtaattactttgatccctttcgatataattgactgagcacaggcgataatgattccttggtttcagataatgtaatttaactatattctacaataaccttgttgaatttagtattgctggtaaggcccccttattgcaggtagcactactattccattttgaccacaacataacaataccagagtatgtcatcgatgccctgcacttgagagtaacataagcggcgcaggagtgcaagatcagatcagatcacaaaagactgcagttctacaaagaagccatctcacggacccctctagttttattctggtatttattggcttttatggattgcgtgctgctagatctctgactgtgactgacagaacttattgattgttactttgttcatggagcttctagaaaggattcttgttgtgtctatccgagttaggtatcacgttacggtcacctctatattattatagtgaggacttgcttaatctaggaatgacttatctttcagtaatgtaacatcagtccctggtgggttagcagatccaatcagcatcgtgctgtatggtgttttatttgttttccattctttccctttcgttttctttgttgacagaatccttggattatggtcttacaccaatttatttgggatatggaagttttttgctgttgtttgttctgctaacaaacgatatgtaggttgtctaaagtcaacatttgtgccttaatatatgttgaagaaacttcagttgcttttgaaatcttggtttattcttttggagacgatgaggatattgtctcatttgactaaatcactaaacaatagtattgttgccctttttttaggtttcaaagcttagtcatctgagcaaactggctcg

SEQ ID NO: 38091 - DNA, 789 bp, Sorghum bicolor
  Intron number 1 from transcript Sb10g027220.1 (locus Sb10g 027220) derived from phytozome v7.0 (chr-ID chromosome_10; pos 56928472 to 56929260 reverse strand)
cgtcatcccggcggctcagccgggctcgccggaaggtactccgctctccttcgcatgctctgctctgcttttgctgcgccgacttcgacttctcgctggcgtcttgttcatcatcactcattaatgctctttccgttcgttgtttcctcttccgtattagtttcggagttggagttggaggactgctatttggtctctgtttgctcctaaatgcctcgctttaaagtttaaacctgctctttggctgtgtgtgtgtgtgtgttcctgcagcagtgacccagtgcgacgtgtttgatttgggagggttatctggattttttgttttgatgatttcttttcaaggcgttactgtcacgaactggaaactgtttttttctttcgattttggtccccttttttcttttgtctattattagttcttgctgtatgttgatttcttgatctttctccatcccgggaatagattgatatgtatttccacgcgagtggttgattgttttcaattaagatgtaaacatagttaccttgccattccagtttaagggcacttattatgagttaatacccctgcttgattctcccttgatatttcgttcctgaagtggatgttgtaccatccactttctgaaacattttctttttgttggcaaaagcatatgtcaccagttcgttctcccttgatatttcgttcctgaagaaacttgccgtattgaaacttgttctcaaaacaaaacaaatacttttgccattacagctgtggaggagcacaagtgcctgaactcggagttg

SEQ ID NO: 38092 - DNA, 798 bp, Sorghum bicolor
  Intron number 1 from transcript Sb09g028270.1 (locus Sb09g 028270) derived from phytozome v7.0 (chr-ID chromosome_9; pos 57210258 to 57211055)
ccagattccactcccaactactacagcaggacagggtacatacactatataccacttgttgttccatgggcggatgcaatcgggcttgggctttagctgcagcttttgccttgcatgctttagatatgtggacgacaggatcagtaccggaatttttagtcggccttgacgacctagattggcaatttgggccagcctttgcttactcagtacgaattgtactgccctgcagtggttatgacttgaaactgggcatctttaccagcaataatttggcttcagtactatatatatgcttggttgcttctgtcagataatttatttagttggattttgcttttgctatgttgtaatgcacacgttttgcactccttattttgttttcagttccagaggcttttgtgatatcattcctccagagaatgtatatactaataagttcttgattttacccctcgatacactcccacccatttgatgttgaagtaggggcaaaaagcttttacacctgggataatccttgctttatgataaaaatctttttccatgtgaatacttttggatttttgtgaaacactaacatttcgtatgttctattgtatgattcctttgatgcttattcttatgcattttttcttcccacaacacaatgataataaaaatgtttttttgtatacaaagtatagattactgctcctttgaaatttcgttgtcatgtgttttcttttatttctgtggtgacagctaagttatttgcttggactaacacacgcttctctactctaaacagcaaagtag

SEQ ID NO: 38093 - DNA, 965 bp, Sorghum bicolor
  Intron number 2 from transcript Sb03g009930.1 (locus Sb03g 009930) derived from phytozome v7.0 (chr-ID chromosome_3; pos 10708014 to 10708978 reverse strand)
gctacaaccacccccgcgatcgcggcggcactgaggtgagcgcggccggacggcagcctctgtgttcccgtgttgctctctcgctctctcactctttcccgatctgatccgtgtccgcgtccgaggggggtgctgctgcgggcgaattattccgtttcaggtagattcgctgtgtgattgaggtagttacggtctgatcggaccggagaaactagtggtttgggtaatgtggttcgttcagagcgggttatgcacgctgccctcgtggaattatccgtggtgtcttgttgttattagatattggatggcagcgctcaaagttttgagctgcctcgcttggagctgcaccttttgagtttccttcctttcacggttgagacagaatggttcctctttcttgtttgcttcaaatttactagtcctgggtttgtctttattggcttccagataaatgcatgtatagaaagccaattgctcagcggctgtttttccattttagatgttgtcatggtgattttgagttcctgacaagtgaccactcaacataaaaacttaccttttcttctcccaatttgtagttttttgttcctatatgttaattaaatgtgaaaactagcggtagccatctttgtattcaagatttatattaacaaaatgctgctatacttggtagtttttccggattagatgctttatgacctgctatacttgactttgagtgctgctattgctcaatatttacagttaccacctgtaagtctgcttctaatcccattttgctcatcccaaaggatttaggatatctgaggcctgctgcaactaaatctctagttgccaattgctaatgttttctgatagaatcctagcgaatgactttacaaaattctcctgaaacgtcaagctgataaatagtttctttttaaaacttatatttcaaaatttttagtttggtggaggtgccaaga

SEQ ID NO: 38094 - DNA, 617 bp, Sorghum bicolor
  Intron number 1 from transcript Sb01g021297.1 (locus Sb01g 021297) derived from phytozome v7.0 (chr-ID chromosome_1; pos 24822826 to 24823442)
gccaggcacccctctggcatcgtccctgccctccagtgagtcttgtcttgtgtgccttgggcgatctaaacctgaacgcgtgcggtagggccggtagctcctgaatcggacgtgttttacggatctaggcgcggtttgatcagttttatcatgggcttgctggtgcttttataaaaaaaaaactatttggtggcacctgaatctgatgagtcgcagtttaccgatctggactgttcgatcgctcctggttcttggtttaatctgtttatatacatacgggcctcgccggtgtttgatctgctggttttggtctattggggatggtcgcgatttgcgagtttggaaattcgtgtctgattcgggctcaacttagggaagttttagggaatgtgcttgtaaacggtgtgacaatgacaacgaaacaattggtttgcggatcggatgaagatacaattcgtaaacgtatcctgggattaagttgtttggatttgattttaagaagaaaaggaatttagacgattagtgacgcctatgtggccacttttacatagagttctcaccatccttccttcgatgtccaaggaacattgtctcaacagtcaatttagactgccagt

SEQ ID NO: 38095 - DNA, 565 bp, Sorghum bicolor
  Intron number 2 from transcript Sb02g032680.1 (locus Sb02g 032680) derived from phytozome v7.0 (chr-ID chromosome_2; pos 67359499 to 67360063)
ctacaggtatgtttctgagttttcttcttattttcccctttatggatgcacatatcttctgtttatctctgtgtcaatttaattgtcacataatgggatttgtttttttgtagaaatcataattaatatgtagttttgatctaacataggagagtttaacatctgttggttatgttctagttgcatggtgtactgaatcagttatggaatagagcatctccagttcagggacagcaatttccagaggcaccttaggagttcattagccttgtctataaaattttggttggttcaattaagacatgaattttgaatgagctctcagactttcgaagttttctactagtcatggccttaatttcagggcaagttattctgagataaataaacacaatggaaatggcccaacaaaaatgtattggaaatggtcgctctaattgtccatgatgcattgcaatttagtgttcccattttgcatattgtcaatggtttgtacagttatttgttattagtgttgcagcataatccttatctgctcagtatgaatattgcagtactacctgta

SEQ ID NO: 38096 - DNA, 834 bp, Sorghum bicolor
  Intron number 1 from transcript Sb03g039840.1 (locus Sb03g 039840) derived from phytozome v7.0 (chr-ID chromosome_3; pos 67478309 to 67479142 reverse strand)
gaagaggtgagctctggctaccttgtttacaggagtttctcgtgctatctatcctccatggtgtatccatctttccttcgcttgtttcggaattgcaattatcgctctctctgggtggagaagaatcttgcttatacaggtcacatcgccactgcagttgaggcctgcttttgttcactgtagttgcatgtgcttttgatttgatgatgatttcctctgctgttgatactcgcggtacatcttttcccagttttcttttcctctatgctcacttacgtggttgtgagcttttacagttcgtactgttcatagaacagtcgtgttcgttctagaaatattttgatcggttgtctagcagtagaaaatgcttcggtggtaatctacatgaaattataggagtaaaaagaggttgactgctttcatctctctttctaatgtcacgaggcgaaaaaaatggcgtcacctgttatgtcttgtgatgattcgtcgtggcttagctcttcgtagcccctgcgaccgcaagcaggcagcaagcttccacgtacaaatgtgtctagcttccattttcggaaccctgaataggcgattggttttttgcagagttctttaatggcatctcgcttccataattgggaagcaggcctgcttggttgatgtcatgtcttcatgcaaacaaaagcgcccgctacttttcctaacttgagtttcttctttgcttaagagctgtctaatgtagatgattccacctctcgagtaagttgtggttccaatgagtaagaatactctcttttttccctaggtttgcaagaggtaccggctgtactaccagcaggt

SEQ ID NO: 38097 - DNA, 1001 bp, Sorghum bicolor
  Intron number 1 from transcript Sb04g029440.1 (locus Sb04g 029440) derived from phytozome v7.0 (chr-ID chromosome_4; pos 59528865 to 59529865)
actccgccgccgccgaagtgctcaactacgaccaggtagtatggtataacacgacaacggcatgctgctgccttgctcagacacactttcttgctctgtgtcgtgagtcctagttgctttgcttcttgggtatgtagttgatgaattctgttagtactcctatatatgttgatcgagattctttttggaaagtaaggggattatgctgatcaagatagatacttcaaactgtatggttacttggaagaacgggcaagaggcctgtccaagagtagtatggtgtagtgtgcacatgcttcgtacctagtagttggcacatatcccctctcatcaaaaatacttgtcatgtttgattttgtacagtcttgaccaccaataaattcctgtggaatacatatctcttaaaattcatcaaatttatgagattataagttctatttttctgaattaaataatctataaggtggttccgaagaattgaaaggaattggaaagtaatctaataataaaatgaaatgaaaaacagtttctagatattagttttaatttatggtatcctgacagggactaaaagttactgatgtttgtaggttttaaagtgtaatataaaaaaacactatctaagatcttgtttgtatgcatgtgtattcatttcaatccacacgtgttagagtaaaatagaatagaacttaatttaattccagtataatccacttcaacacacatagatcgggaagaacacattcgcatacaaacaaagactatataagatatgcatatgcataaatgcgataaactgaaatgggtgtcttgctgtataagcattttctgactagagggagtatacttgatgttacgcagaataaagccggaaatattgtgtgtcgctaagcatactcttcattggtttgatcgatgcgggatggagcagctcacttgaattgtgccgtgcgcgcgcgcatgcaggtgttcgttagggacttcgtcccgagcgcgttggc

SEQ ID NO: 38098 - DNA, 1028 bp, Sorghum bicolor
  Intron number 1 from transcript Sb01g042000.1 (locus Sb01g 042000) derived from phytozome v7.0 (chr-ID chromosome_1; pos 65300577 to 65301604)
cacctttccccgccgcagtgcccctacacgaggtgagttccgtgctgttttcacatcgcaattcttcttgagataaatttctacttcgcgattttgatcgattccaggcatgtagttgtgtcataataatttgcccagttgcaaagattctcatttcttttgcttgcatatgaagttgcattgatttttccggatgaatttttaagaattttgaacatagttcctctttctatctagcctgccgattggtatagagatcatagaacagaaatgcttatttatgcagttaatgctttaccatatcaaactataggtctagagcaaagttcatgttccttttgccatatattccagttgcagcatccccaaccgttttgcaaataagctttgcattcatgtatttgcaaaaaagtcttaaaaacacttatctaacggtttggcatttagactttgcaattttgttaacttggcaaaaagagaggaaggattggcatatatgccaaacttgttcacacttggcattggaaaattggcgcgaagtgattaatgccaaaccattggagattgcctcttttcacctttgccatatttttttgagacttggcaaactccctcatttgccaaatcaattatgcaaaacggttggggatgctcttagtagcagccagcatatcttgccaaagccttaaccaattccttgtttgttcgccctttccaagaatataatttacagtctgtttacatttcttgtcctttttgattccttaatcacgaagacacctgttgcttcgtattaaaatgaatttgttgctaattcgagcatgtctgcatttgtatatcaaaataaacaaaatatatatggaagtatgtataactgtgaagtaggagtaactcccagatagaactgggaaacaacagctggcgtcgcttgctagcagcatcttaccagttactaccacaaagtgatctctgatcgttccagttaacttcatctcaacaatatgtgaaatcgtttttgtttcagtgcc

SEQ ID NO: 38099 - DNA, 1038 bp, Sorghum bicolor
  Intron number 1 from transcript Sb01g004790.1 (locus Sb01g 004790) derived from phytozome v7.0 (chr-ID chromosome_1; pos 3861073 to 3862110 reverse strand)
ccgaggcgccgccgcccaagctctccaagctcgaggttcgtgcccaatttgcttgctccctgcgttgactaaatcgcccccgccgagcgtgactagcattggttgtgatgccgtcttgacaaaggaattgactcttaccatcgttccgctgtgcttatccaatttcttcttgggctaactaggcgtttattagtactacctcgcttgtttggattgccagtctcaactgcatttcggatctgggaaaactttatgattgtggtgattttgaaatgttaataagtttatgattcagttagctctatttcttcttctggatggtaggtttgcaagtttgtaggattgagttagctctatttcttcttcttctggatggtaggttcgcaaacctaccatccaggctggggcgtatctgggaaaactttatgattgtcctagtgatagtgctttcactctgtaaaagttcctttcttatttggggatcattgccttcaaccttgtaggattgagttagcactatttcttcttctggatggtaggtttgaaactttgtaggattgcaagcaatgcacattattaaaattcatttttgcttcctgaattcttccaaattattgttcggactgcaagcaatgcacgttattaaaaattcattttttgcatgctgaaccatttatctgacttgtttgctgtgatccaattgcaaacctaccagcatctctgctgcggtgcttagctgcttattgaattggtttggtttgtttcctaatgtcgtcaaactatcattgcaatgtcgccttgtttagcctgtacaaatggcttggactgcatggtgttatgctggtcttttttattttcagaatttctttcttctctcttttttttcttccatattttagttactttcttgcttattatttcatatatttttgccatgttacttctcagcctttcaggcggctcagaataagagttgacatttgaatttttctcgtatttccagtcctctctttctttccacgctcccttgcacaaggt

SEQ ID NO: 38100 - DNA, 897 bp, Sorghum bicolor
  Intron number 2 from transcript Sb06g022910.1 (locus Sb06g 022910) derived from phytozome v7.0 (chr-ID chromosome_6; pos 52118718 to 52119614 reverse strand)
aggtgccagtgggtaggggtaagcagtctctatcctgtaaatgctgctgtaaaatgatatttcttctttaaaaaaggatccactttttttcatttctgactacgaggatactatccgcttaagatgcataatgcgtaagaacactgaatatatgcaacttgtgcaagatgttcataaatatcaatcacttccttgggtatacacaaacatagttcctttcttccttgttctgttttctgacttgccatgccaaaacttatattattacatctgaaagttgatctgaatagaattccactaaccatgtgtgcatatactaatactagcatgaatgatagatgactttgttttcaatctattagacttgagcatttggaccatgatcatagtgagacctgagttggcaatcactgtatgattgcggtctattattctatcgcttttgatttgtattctgaagaaaaaggaagggctatcaaaagacagcatgaccttatttcataacaaagcactattggcattattccaccttttttgttctatatatatgtttgttagctgcaataggtctgctgctgaaattaacaaaccctcacttacatattccttttgattgatatggttactgtaatattcaaattcaactaaggtatgaatgcatggtaactatttcatttgatgtatgtgatgaactaaattttttattttattttgatgttccatcagaactatagctagtagctagctaaataacagataatttctgcaccaatccgtctttacttgaatgtgcattttctatctaactaactgtttttctcattttatttaatattaccaacaatttggatatatcttgtagaagaaagtaaatacaagacgaaggaagccccaaga

SEQ ID NO: 38101 - DNA, 515 bp, Sorghum bicolor
  Intron number 1 from transcript Sb02g006100.1 (locus Sb02g 006100) derived from phytozome v7.0 (chr-ID chromosome_2; pos 7390827 to 7391341)
ggcgtcaacggtgaggcaacgggatccttcctactcttgatttggtccgtcgtaatcttccctcctctgctctcctgggacgaggaactgtcaatccttgtgcaatccccaacactgtagttccagtgcccccccttcggctgtaaaaagttcgtctttttgggtgccacaagtcaaactctatgcttaattgactttgcctatcgatataattagattttttttccttctgaaaagttgtttcatgatattacaattatgcagtgacttttataaatatgttatactagcagaaaacagttatcaaagttctgtcagaaatgttttcttttgtgaccaagggtttagagtctgggtagattgctccaaatttctatgtttgtcctgtcagttctgtttcatttagagaacttttggttgaaatgccatactggctgcaaacgaaaatgctgaaacaagaactgtttccatgtgtggcagctcccaaagggttattcccacccgagccggagcac

SEQ ID NO: 38102 - DNA, 645 bp, Sorghum bicolor
  Intron number 1 from transcript Sb03g042420.1 (locus Sb03g 042420) derived from phytozome v7.0 (chr-ID chromosome_3; pos 69799344 to 69799988)
gcgctccagaggccagagccttagactgatttcaggtgagcacgctcgtgcggtttcttgaatacagttttcgatttgattctttcctctgctaccttaatcttctctctgatagcacaaagaatcgcaatcgaatggctcttctttttccgggatttgggtagtaaaggttttcagacgaacggagttctcagatttcataaacatcgatcattaattttcccctttagacgccatgcggaaaaagcatcaacgaaatcatgtgtaatatctttctttcagctcgttgttggtcgtggtggaacgcactaggaatccatatttcttcagtgtcgctgagatttttttttgagggatctgtcgctgagattttcagaatcagaaagcatcttagctgctttaaagaacagtgcaataaccagcacacaggaatatcaaatactcctgtatttagagacgaatttattcgcctctacttttgctttctctctcttgtggtagttatttatttggaaatttatttcagctcttgttaataaaaattatttcagcttgtactctctgaacgtaactgctgtaaagtaagttatgtatttttcagttaacttttcccctttcacgatcaaagcagggggagcatagtcg

SEQ ID NO: 38103 - DNA, 847 bp, Sorghum bicolor
  Intron number 1 from transcript Sb03g003490.1 (locus Sb03g 003490) derived from phytozome v7.0 (chr-ID chromosome_3; pos 3724721 to 3725567)
accaccacctcttccccaaggccatctcccagctggtgcgtgccccgtgcgtccacctccactaggagcagatctctgatgtcgctgacttagggtttatgttccaactgtatacggctttagttcgtcgttcatactggtacattagcttggactagcatgtaactagatagttgtggttgtagatcaatagcacgtttgatctgtttgtgggtactccactggggcagtgaggcaagcaattgctttgctgcaaagattttgattttggcaaatgtacatagttgtactaagatggagatctttactttgcatttatttcatttttccaccgaatgtttgtttatcaagttgtcaaggtattagttgaatgttgcaatccaagtgctgatttgtttttacccaaatttgagccgaggtggtctggaatcgctgtaaagtttaagttttgtaatttgatcaaaggctctagcccagcttgattagaaatgggcacagtagttggtcggtttgtactttgtaagacaacaagtcaatgaccctgagtattggggggtctttgaaatgggcacagtagtaggtgggtttgtgcctattaggcattagccccaaatcttggtgggtttgagaattttactctgtattcttttgttgcctattaggtttacatataataagctatgccttgtttacacctttaagtcacaacagcctgggcgctgaagaaagaggccctccttttcttatgtgctgccacattttatgaatgactgagaatctctattgacattattctgctttgtcaagaccaggttaaaaaatatcatattagcgagttggagctatc

SEQ ID NO: 38104 - DNA, 475 bp, Sorghum bicolor
  Intron number 1 from transcript Sb05g022420.1 (locus Sb05g 022420) derived from phytozome v7.0 (chr-ID chromosome_5; pos 54282572 to 54283046)
atattgaggtagtacttatttgccttgtttaagctaattgttatcttgttgccataatgggattttgtttgttggcatttgtttttcatagtctctgtttctctcttgtgttggtctgaagaaaaatgcctataaaggaattaaatatgagctagattttttttttggatgcaaattgttgtgggctaggtgactaggctgtaactgtaagatatatgtttggtgtttctgtaagtaaaccgggtaaattttatgctttgccttcccttccataacaggatccctgaaacttgcatgtgcaatgttttgaatctacaacatgtattacaggataagataggtgtcctctatgtaatacttaactattgtgcagtgcaatactatcccagctgcaaggttaagagtcacaaagtcatggattatgtagaagagcttaccccttaataattgtatttttgattatgcagcaaataag

SEQ ID NO: 38105 - DNA, 984 bp, Sorghum bicolor
  Intron number 1 from transcript Sb01g004680.1 (locus Sb01g 004680) derived from phytozome v7.0 (chr-ID chromosome_1; pos 3751934 to 3752917)
gtcctgatcctatccacaacaggtacttcgatttacagattactctactgcactgcaagcttggttttggtgtttgagttggtcctttttttcccccttgtcatgaggaattttgccacttcacaaaagcagttgctatctttgtaccaatgcacaggtttcttgaaactagacgttttagacttaaaaatggcttctttactacgtatgctgaagcaacaaaatactgtaggtctgtagccttcatccaacttgaaatagcagaattccaacacgacatttttatcgtaacttgtttgtttagggctttaggtttgcggtatgggaagggaatgttcttgtttcaccagtttctgtctgctggcatgtagtctaaggtgaatgttttgcagtgccttcagtgtgctgtgtaatagccacaaaatgtttatttttttcagacatgtaattagtttgtctcaccatatgcacccatttaccatgttttgtctgaagattttcaagtaggatatataggtcagaaaagaaagaaaaaagaaactaatatttcacataacataaataaatatatgagtcaaaggaagggagggaaaaacaaagggagaatcatattatgagcaaaagatgccatgcgctccttttcctcatcactcccacattcccctatgatgatatgctaatctttcagcaaaagcaagcagataggagtaagtcctattcccccaatgagtaacatagatgcacatatcattcttgaaatcattagtctacatccatgaaagcagtcaaacaaagcgcaccaccacggttcatcatgataaataaacaacaaaaagtcttaacggtttcagtgcatcacctgctgaaacaaagaatgtgctctcactcagtccatgcttcaggcttcttccccttctaatccggtttcaaatccttgtgccttctccaggggaaccggcaagtcaggacgatcgccggaccgag

SEQ ID NO: 38106 - DNA, 613 bp, Arabidopsis lyrata
  Intron number 2 from transcript 485016 (locus 485016) deri ved from phytozome v7.0 (chr-ID scaffold_5; pos 12624598 t o 12625210 reverse strand)
ctccttctcctctccgtaattccaagttttgtcaggtaaagttatgattttgattcgattctggtgatacccattaatttcatgtgttgaatctcgttttgtccatttgaaatctgccgttacagagaaaatcatgtgtaggttactactttatgtggttggagagtgaatctcgtgttgtgatccttgtttttaggttggatcataatggtgtgatactatttagtttcttgaattgatcatttgatctttgtagtgagaagtctgcatttacttgatcttgttgatattgtgtagaatcaaaacatattctatgtataaggatcattgagattgaatcctggatattcgttctacttagatcttgagttgtggcgatattgtgcgaaaactgaagaggcttgttagcagtctagtaggtctattcgtttgctacattgtgtattgtgagagatctttgttgttctatgttctgcatctggttgtctatgattgcgtttgtattgtaaagttgtttgatgtccccttgcgatgaatttgtatttgttatttggtcttaataagatgtttgaagtgagtactttttttttttttttaatttgtgcagtcaaat

SEQ ID NO: 38107 - DNA, 620 bp, Arabidopsis lyrata
  Intron number 1 from transcript 912042 (locus 912042) deri ved from phytozome v7.0 (chr-ID scaffold_1; pos 9592689 to 9593308)
cactgtttccaagttagtttcttacttatgcgtatatcaatattgtttgattgtttgctaatcattagaaagagtaaggaacatatattcagcctttgtttcttctctgtgatatcaacttttttgacttagaaatcatagttttatcagtgaatcattagttatgtagccagtcttagttgttttcacttgttcacaccatcatgcttatccactacattgcttttgatttgctcaaagaagtaaccttagcatctaacgttggtattggtacctagtatcttatggttgttgttcttgaagttggaacattcttaagtgttgaaaaattcaattcttctggtgtataaaatgtttgtttcttaactgtgtctgcgatctaggaatcatatttttgtcattgagtcatcacttatatagcccactctattttcacttggccataccatcatgcttaaccccaacattgctttgatttgttcaaagaagtaaccttagaacccaacattggtatctagtatcttctaatgtaaaacacagtgtgatagttattctcgaagttgaaacatcctcaagtgtaaaagtttcgattttttttgtgggtgcagtgcattaggaac

SEQ ID NO: 38108 - DNA, 948 bp, Arabidopsis lyrata
  Intron number 2 from transcript 486241 (locus 486241) deri ved from phytozome v7.0 (chr-ID scaffold_5; pos 18626210 t o 18627157)
gatacttgtctgcgttatcgccaattcaggcaagtttcttactttttttggccttctttttataatgtgcctcaaaacatatccaactatcccagcgcctacgttttgtttggtattgaaatggaactgttgtactggagtatggaattggaacgtggtagagaataaacttatttccattttgcaatggatttaattgaaatttgcaatgcaagttcatttgatttacctgaaacttagagttaagcaatgtcagaaatttgggtgtttcattgattgatggtggatatagtttctcgatatctgttggtaccaatactcaattgggaagatgcttgtattcacatattgacttagaaggtgcatcaagtaagcatgctaatgttaatgttgctgaagtatgttactttaagtatcactacataatacatgtatgatgaatctttgctgaaaggatggctttgtatctttttttttattcgggtaatattctccgtattctcctcttttaattgccagtcccttttctttgatgactctggggtaatggtaagtctacaaactaagagttaaacactcgtcagcttgctttgttttgtggtttggaatctgattcttgttccgtagtcccttattttggttggtccttccacgtggtttatttggcgatagtgctagcctgctaggtgtgttcttgtatttgactcagtctccagtcctgtgtattctgaatttctggttcctgtttttggtatggctggtctattgagtcttgtagaaaacagtcatataatcttaagcttttcagtgttttcaacagtcactgttctttggtatgttatcgtttcccatcacatgagtcaaaacaactttattggaactaaaattgttaattatatcccctcttcatcatttctgcagcttgttcgcagcaacagccgtcgattt

SEQ ID NO: 38109 - DNA, 376 bp, Arabidopsis lyrata
  Intron number 1 from transcript 478033 (locus 478033) deri ved from phytozome v7.0 (chr-ID scaffold_3; pos 2995911 to 2996286 reverse strand)
attccatctgggtctcttggatcacaggttcattttactaccttcctttaatcgactttattatttactgaaaactacgtgattcttggctaatgacgtaatttgcaatcctcttcaattcaattctatatttatttttttaacttcttccttttaaagaactgtattatatcatgtaataaatgctaactctgacataagaggaagaatcttatcctcaactcttttttagttacttcaaccaaaagttaggatcttgtgacttgatgaaagctggtaataataaatacttataagataatttggtttgttttttcttaagaaaatgttgtttttgaaaggtgagttccaaatcggaaagaaggtgaagccatta

SEQ ID NO: 38110 - DNA, 151 bp, Arabidopsis lyrata
  Intron number 1 from transcript 933698 (locus 933698) deri ved from phytozome v7.0 (chr-ID scaffold_4; pos 14891821 t o 14891971)
tatcgagatcagtacccgagaaaggtcatttctctgttttttttttttatatgttgattaatgtttttattcttttcttttcttctcggtttgatttcgtgtaaccgggcatgcaggtttgcgtgtaagaggatatcgaaggagaagctaa

SEQ ID NO: 38111 - DNA, 700 bp, Arabidopsis lyrata
  Intron number 1 from transcript 340491 (locus 340491) deri ved from phytozome v7.0 (chr-ID scaffold_3; pos 1026635 to 1027334)
ggatttctccaaatagcttgttcttggagaggtagaggtttctgttggcaagaccttgctttgaattcttccagttcactgctaagttgtgtatttcgatagtgaaactgtacatgaaaggcaaattcgaagacgagttgagaggcaaaagaactcacgtgtcaaggattacatcagcaaggacacttcgcctgatatgttcactcttcatggcaacatcagtgaagaggaagtccatagtctgatcgcttggcttagaatttggatccaacacatcctggtttttctgcaaatagcatttatacaatgagttttataataaatgactgtatcgctgatcaatgtataatatcatgatttagataacttttctcggagcatacctgcttgtaatcattgacaaagtagcaatggggaagatggaccagcttctctgagtaatatgtgcatattgcagaactgaaacgtagaagagagtaaccagtcacagaacatagagaaaactaaggttggcacttatttagttattacctatttgggttatataaataagttgggatggggaagaatactgacttcaatcctaatgtattattagaaatatttgtttattttggtactttgcatttctttgcgtaacgggtcaatctttattgctcttgtaggtatcattacaacgttgcagactcaagacttgcac

SEQ ID NO: 38112 - DNA, 214 bp, Arabidopsis lyrata
  Intron number 1 from transcript 490718 (locus 490718) deri ved from phytozome v7.0 (chr-ID scaffold_7; pos 545956 to 546169 reverse strand)
aaacccacgtacgtacccaataattccgcgtaactaatagtattattgacaagttgtcaaaataatagtttataattttttttttttttttgtgtttataaaatttcttaaggcatatgaaaaaaatcaaaatgtattaagaatatttattaggaagataataaattaattaagagaattgtatggacgagaaggaaacacacgtgggagagat

SEQ ID NO: 38113 - DNA, 627 bp, Arabidopsis lyrata
  Intron number 2 from transcript 478320 (locus 478320) deri ved from phytozome v7.0 (chr-ID scaffold_3; pos 3938002 to 3938628)
gccgcgtcgccacagattttctaggttttctctctcacacacttttttttttgtcacaataaatgaggatatggatggtgatatcggtcaccagattcaacaccaacactaacaaaccatacattatgggctccggcctccggccattaggttttgttaggttacgtagattaacgtcctaattatcgaaaaaggaaaaagtatgagtctaccataacgctgacgtggaaatattagaaaactcattgaaattttgataggacggattttgtcttagattagtaaagttgaaaagattagtaactgctcaatttattttgaagattctgaatttttttttaaaaaaatttcatctttgagttacattaattaaactttaaaatcgaaaagaaaaaaaaatcaagtaattactttaatttacgatcatcttcgaaagatcaaatggcttgcaaatatggtgggataattaatcctgatcctgcgtaatatctataatctgcacattttatttacatatttcgattgttactttcgaaccatttataaagttttggttcaatttttacaccaatcttttgatgcatgtgtgcagcaagatacttgggtataaagtcaccaattccgtac

SEQ ID NO: 38114 - DNA, 787 bp, Arabidopsis lyrata
  Intron number 1 from transcript 475117 (locus 475117) deri ved from phytozome v7.0 (chr-ID scaffold_2; pos 1857269 to 1858055)
ctggtgtttaaacactctggtcagttctaagtaacacttcttctactattatcgatctcattgctatttcttcgttttcttccccctaaatattccgagctctttgattcttgataacttcaggtgtttccaatttttttttttaattttttttggttaatttcgttttctgatgttttaagattgtattttgcatgatctgtatttggattctattagattatgtgttcgtgaatttgtatgtgtttttgcatgtctggtttttgtcttcaaaatgttcaaatctgatgttttagtgttggtttgattcagcaaatcttactgtttttttttttttcatgttttccaactgtgattcatgatgagatatttgttctgatttgtttagaaaataagcatgtttgattttgtaatcatagtgtaattttctcaggaaagtgagcatgttttaatactctgtttcgatttgtcacacattcgtattattaatcgttataaactgaaaatacatggtcctggatcttgttgtcgtcagattatttgctttaacaatttattgaatgtgtaatttcactatttctgaaatgttttcaagagattaatttttatctaacaattatcattgtcaaaagctcttttgtgttgcaaactctaacagtattttttaagctccacattctgttaattagcatttagtatgaagagtgttcttagttgccttgcatgtttttgtaactcctatttgtttcagtttgttgatgaatgctttgattttgtaggtgaaata

SEQ ID NO: 38115 - DNA, 617 bp, Arabidopsis lyrata
  Intron number 3 from transcript 905903 (locus 905903) deri ved from phytozome v7.0 (chr-ID scaffold_3; pos 14317936 t o 14318552)
tgtatttggaggttttcaaagatataaatttaaaaggttagtaagatattcaagataacacttttgattaggtgataacaatatagagctactgtattgattttcaaattaggttgaataagtatagattaactacttactaattaaatatgtcataaatttttacacagtaatttggttgcttgttatgctgttggagctctattttgtatttgtttgttaatagaagtagtaagttgtgagattttctatactattattgatccgactgtttggttagcagtaataacccttactacttctaaatatgaaatagttaatttcatattactgaatatgatggtattaggacagaaaacttttggaaaacaaagttaagctgttatagtttatgtgtctgcgattttgtgtaaaaagaaaacatgaaaataacataaaaagttgggttgggtatcacttcttctctggaaacttaatttagtgattcctttacttgccaaacacacgttttcatacctccttggacatgttcagacataaagagagaagtaattaatatagtataacataacaattagaagagttaatctatactattggtaaaaagatgattacag

SEQ ID NO: 38116 - DNA, 420 bp, Arabidopsis lyrata
  Intron number 1 from transcript 478367 (locus 478367) deri ved from phytozome v7.0 (chr-ID scaffold_3; pos 4138471 to 4138890)
gaggtaattttacgttttgaattttgtatgtggcgttgggtttcccaattttggtataagaagctctctgaattgccgggtattatgaaacaattgcttagtttactagttggaagtgagtggtatgatcatcattaggtgctcacgaactttggttgttcaattggcgaaatttgattgaagattttcgaaaatttggtgaatgtttggatttccagaggaataattgaagaaaatttatagctcattgttttttgcctctcatttgctgtgtttttgtttgttgattcagtaaatgaaggaacataatgataaggatatgtattacaactaggctcttaatgcaccatttgatttagtgctcgtttgcactgctcttgattaggggttcgttacttggagaaagctgttttcaatctt

SEQ ID NO: 38117 - DNA, 485 bp, Arabidopsis lyrata
  Intron number 3 from transcript 488863 (locus 488863) deri ved from phytozome v7.0 (chr-ID scaffold_6; pos 8316053 to 8316537)
ttggtgtccttgctttctcgatccgactcttctctgtgagttcactgctgtttctgcttgattgattcatttcagtgttcttcaatatgttaggctttagatccgatcggtctagtttagatccgactactctagatccgatctcatgatttgcggttgattggtgtagcttctatcttccccaatgtctctgtgttaatgaaacagattgttgttgttattcggtgtagtggtggttcatatatctcagtagagtgatattaagtggcttaactttgaattattcattcaattcttgttccactttatatgacaattggaagaatgcttggtattagttaattttatttctctagtaaattcagtaattcgtcgctctactctgcagatgaggctaattcttgttggattttagcaaaatctcatacttttcaatttgattatttttggtaacgttcattgatttttttttcaggttataaagt

SEQ ID NO: 38118 - DNA, 280 bp, Arabidopsis lyrata
  Intron number 1 from transcript 489077 (locus 489077) deri ved from phytozome v7.0 (chr-ID scaffold_6; pos 9278114 to 9278393 reverse strand)
actactagtctttaccaaggtaagctaatttggaacccgagatccaagttaatttgttctcatcgaaaaacttttgtttcatctatattcaaatattgttagtctttgattgatcgatagaaaaaataagtattcaattgatcaattctttttatatatatacatgttttataaaccatcgatctccatctaaatttttgttttattgtgtttcatattctgattttcttgtagaataatatatcaacatacatagtactcttcttggaaggcaaggaac

SEQ ID NO: 38119 - DNA, 853 bp, Arabidopsis lyrata
  Intron number 2 from transcript 491589 (locus 491589) deri ved from phytozome v7.0 (chr-ID scaffold_7; pos 4325528 to 4326380 reverse strand)
ctcctcctctctctctctggatctcgtaccttgaggttcgtctctctctctgtttaacttgcgactcagatttcatagagatcgatcccccttttacctttttcctttgtgaaaactctacaatgttcgatattctcggacgttctttgttcgatctccttaaagattgatccgatcccggtaggaaactgattctcatgtttgtgcagcttagtgagactgcgaactatgtagattccattgtttgttcatcaaatctggggatgttttttgaattttagttgatcggaagctgtttttattattcgattttatgttaatgttttggtaaagtgatgtgtatcgctggatctgatgatttagatttgtcaatgttttgcatctttcggtccttgattgaacattaccgaatattcttctgcgattatgatgctttctcataaaccatggattcgagagaaaagagatgcttcattcgttgtatagatatataagtagagaggtgtagattattgctgaggaggatactcataaacttcttgtatagaacttactcgagcagtgatgaggacactagtaaggtgcttatactcagtaattcaaacttgaaatcgcaagaaatattaacattttggatatcttgtttgttacttgtgatctatatatacctcattttgtctttaatcaattgtatggagtttgggttcctattctctatattcactttctatctttcttatgctacattggtaccacttgttcctgcactattttccttttcatttgggctcacaagttttttttttttttcggtttctctttcactttttttgcagctgcagcaccggaaaag

SEQ ID NO: 38120 - DNA, 1028 bp, Arabidopsis lyrata
  Intron number 1 from transcript 899747 (locus 899747) deri ved from phytozome v7.0 (chr-ID scaffold_4; pos 2518383 to 2519410 reverse strand)
tcttacttacatttatgtgagggtattataacacattgggatagtattaatgtttgtagaatagtcaaaaagataatcgacaaggtcaagtcaatagagtgtgatggataaaatcatgaggtgggagtaatgagttaatggcacagttgacgacaggatgagtggaagacccacgagttgacgcaaagtcaagagctcaacaattgattttatttttgggtctttttaaagagatttcagaagccataattataacctatcacaaacttaagaaaaaaaaaaaaaagtaatggtaataccaagccagtcttattcattttctggtattgttgttaccttgtatttcttcttcttgttttcctttgttctacacattcttgcttctcctacgctcaaccgttgccgccatgatcagagggatgctcttttggagttcaaacacgagtttcggggaacaatgaactccgagatatttaatcatatgagtatatggaacaagagcactgattgctgttcttgggaggctgtcacgtgcgatgctaaatatggccaggtgatttcactttaccttcatgacgaccctctcaacaacactttgaaaccaaatagtggtcttttcaaactccgatatcttcaaaacctatcccttttaaattgcaagctttatggagagattccttcttcatttgggaatctttcccatctcacgacgcttgacctttcaaataatgaattagttggtcaagttccagcttcaattggaaacttaacccaactaaggtacctggtccttgcccataacaacttaagtggaaaaatttctgtttcatttgccaacttaacgaagttgatccaactcgatctcagttataactactttgaacccgagtttatacccgacatgagccgattccacaacttggagtattttgatgtgagcctaaacttatttttcgggccttttccttcgttacaaatggtttatttgtggagaaataacttcacgggacctataaattttgggaata

SEQ ID NO: 38121 - DNA, 777 bp, Arabidopsis lyrata
  Intron number 1 from transcript 937426 (locus 937426) deri ved from phytozome v7.0 (chr-ID scaffold_5; pos 12930941 t o 12931717 reverse strand)
aagaagacacaaattggagcttcactggtacagattcttactgctttatctctggatgaatttagtttttctgctttattcattcgaaaaacgagttcaatcgtatgtgtgatgatgttgcaggacgttgatggtatagcatgaatcaaggagggaacactcaggccgtagcaccaatggaccctaattccattgaggtaataacattctcttgcgtctcttttaagctcaaagtgatattttgtgcattgggtccatttttgcgttcgcgttgttgcgtgaattgaatttggtgattttagtttgctccagattatttgttactcttgttttctttggtagatatgttgatcttacagcaagttatgtttgttagttcaccattgtaatggttaagaggaattttgcatgtcaatatgtttatgcagcagaaaaaaagtaattttgattctaggctaggtatgtgaactctcggaatatttcagaaatccattctctactttaaaatagacctttcatcaattttctgttgagccgtatgattttcactagtaatttaccatttaagtgttaagtttggttaaggaacttagctattgatgaatgatgactctatgtttgaggtccttttagaaagacttgagagttgagactgtgtgggaggcctttagcatcttaagttgtaaatatagtcttgatctgagatgatatttctgtttcttttcactctttgaccattttccactaccaatgctttctctgttatgcagaatcgat

SEQ ID NO: 38122 - DNA, 729 bp, Arabidopsis lyrata
  Intron number 1 from transcript 946251 (locus 946251) deri ved from phytozome v7.0 (chr-ID scaffold_7; pos 10336657 t o 10337385 reverse strand)
tgctggctatcctgcacctggagctcaccattcaggtattatcccgttaaagtgctcttctttgtagttttggtatcatgatgctgttaataggaaaatggtttgtaaatgttgatggtttctatgcaagagctatggagtgtactttgtagcttgtttggattatcaacctgctaaatattgttaagtttgaatggtaatagaacaagagtttgtaaatgtttctgttttctgtgcaaaagctaaggatttttcttcaagttttctggattgtcatcctttgggaatactgtgtcagtttgaatgataatagggaaatagtttgtaagtgttgttgttttctatataaaagctaagaactggccttgtagtttgctagattaccagcctgctacgttttgtcaagtttaaatgataacaggacagtagtttcttaattgttcctgttttttgtgggaaagatacggacaaatgagtttagtattctttttttgtgctccattggtgtttattggtctaaatattgaaccttttaggtgtttttgaagtggcattcagataacattgatgttttaaccttaactatctagtacaagtacattttaattcgatagcaattatcatatgaacaactttgtggtctctttgatccgttctggtaatttggggttctccatgtaatacttttttgttttttaatcaggacattctagtggtggaatcggaggc

SEQ ID NO: 38123 - DNA, 298 bp, Arabidopsis lyrata
  Intron number 3 from transcript 476910 (locus 476910) deri ved from phytozome v7.0 (chr-ID scaffold_2; pos 17649192 t o 17649489)
acgcaggaggaaacatcatcttctttgcagtctgggtaggcactttctattttttataagtatctagagaatagtgtagcaagttcaccatgatgaggcagtcaccaaaattggcctactagcttgtcactttgtttcgaaactgcaagtttttgatattgctcaaagttttatttggtttaaggttactggtaaacatagttaattttcaatatttcttgtcattatttacattattctttctgttgtcctgagaaataaaaacggaaatcattgctttaaatgtgcaggaaagtcc

SEQ ID NO: 38124 - DNA, 553 bp, Arabidopsis lyrata
  Intron number 1 from transcript 497416 (locus 497416) deri ved from phytozome v7.0 (chr-ID scaffold_386; pos 5843 to 6395)
tagaaaagtccgccgttgtctcaaaggcttcgaaggtacgtataaaaaacaaatatgtgagaaaaaaagaattattgatttatatggtttttgcatttgcatatacaatcttttagtttacattattttgaaatattaaaattcagttttccataatagtttcggaaattttgagtttaaattaacaaaaatttaaaaagggtgattaatattgtgggtttatttctaaaatatacaataaacgcaattatcttgtatttttttcttttcagcatcctatgtcaattgctgtaactggttatattggttctgtcaactatagtttttttggttaatttcgtatctaagtatatagttaatattcgctatatattttatgtgtagggccacataaagttttgggttatgctttagtattatagatttaaaaacaaagaaaaaacactcaaactagaaattctgtttttgggtaaaaatggtaagctaatggtttatataaaaaaaatgaataaagtatggacttttggttgaatttatcaattaggagtggaag

SEQ ID NO: 38125 - DNA, 476 bp, Arabidopsis lyrata
  Intron number 2 from transcript 497416 (locus 497416) deri ved from phytozome v7.0 (chr-ID scaffold_386; pos 6555 to 7030)
aggagaaacccattgtggaagagaagaaagtgaaggtaactttttttttagtggtctcaaagctttcaccctctttattgtaaaaaaaacatattttaaatttgttgtgtttaatgaatttgacattacaaccaaaaaagaaaagaaaaaggagggggtttttcgttgctttttaggatattggtatgaaatattcattcttttttggtaggggtatgaatattcattttattctttattattctatttagggtacgagtaaccaattaaattatttattatttaataaaaaagagaatattctctttgcagtgatttcacatggggtgtattggtaggatttggttaaaaattttgatggtttatgaacgtagaacttcttatatttttatgtatgtggaattttgtgttaagttatcattttattaattttgcgaacagcctccggtggtcgtgacggtggttcttaaggttca

SEQ ID NO: 38126 - DNA, 580 bp, Arabidopsis lyrata
  Intron number 2 from transcript 897863 (locus 897863) deri ved from phytozome v7.0 (chr-ID scaffold_5; pos 14801369 t o 14801948 reverse strand)
aataaacaggtgatcttatagtttatatgtacaaatttgattatttttttttgtatttatggtttcactattttcaccactaatcaatttttataatcaaaaagtttggtttcaacttttgagaaggtaatcatcgatggtttggtatgtttctttttgttgtaaaaagatgaggtacctcccgattttgttgaggtacatgttcttattattttcaaatatgtcttttttcaaaagaaacactcaactgttgataacacagttgccacaaagtcagaaagatgacttatttcagggatgaattttcagaggaggctaatttttgtcgttaatacaatttaagtattcctctctttagattagggataacaaacttggctgttaaattcaggaattactcttcgttgccaatctctctccccaaactaaaatattacatatatggaagtagtaacttaaagtttttggtatcgaggtcattctaaggcactgagattcggactttggtatgtataggattcgttttccatgcactaagatttaattattgtttaatttattggtttttaggtttctttcc

SEQ ID NO: 38127 - DNA, 551 bp, Arabidopsis lyrata
  Intron number 1 from transcript 897863 (locus 897863) deri ved from phytozome v7.0 (chr-ID scaffold_5; pos 14802005 t o 14802555 reverse strand)
gtttggtatgtttctttttgcacataatagcaattagatcgagttttggaaaaaaatatggatcagcgtgacatgacgcatatggataccatgcatgtctatctattgtaaatcaaaaattatattattgttccgccttatttttgaaacagaaagaaattttcccttaaattttaatatattttataagatagtatcagatatagtagtaaatctaaaatagttgttattattccatatttttacggaaaaaattaaatattattttaaataatcatggataacaatgaataaatggcagttttacaaatatttatgattatgatagtgatttgcttattaaaatatgtaaattttcttttctttttttgtatttatcgtcgaaaaatttagaaaccctaaatcatgcaccgcctcctattcaatataaataccttgctcatggtattcaatttcagatcataactaacccttgtttttttttgttcttttttttcaaacttttttttgcttctacctaattttaatttttcttttttattgtagggtgg

SEQ ID NO: 38128 - DNA, 372 bp, Arabidopsis lyrata
  Intron number 3 from transcript 334678 (locus 334678) deri ved from phytozome v7.0 (chr-ID scaffold_1; pos 5814059 to 5814430)
cgagcctcggtgctgctgtcaaccatccagaagcggtacttatagaattcttaaggagaagaaatttatgaatattcaggttgagtccttggtactggaaacttagcaactttacccaaagcagcagcttatgctggggtaagttctttcttggttatttgattgtactggaggatgatcctctgaatacgtaaaactcttcacaattcttgttcattaaaatattggaaaagatgaaatcaagaagagaaactatgcatgcattgatgttctatgtttgcttctacttttttttggttttttactcttcatcttctgttataggctactgaaaagattctgtctgcaggtttcacagaagacattgatact

SEQ ID NO: 38129 - DNA, 241 bp, Arabidopsis lyrata
  Intron number 1 from transcript 943334 (locus 943334) deri ved from phytozome v7.0 (chr-ID scaffold_6; pos 22984388 t o 22984628 reverse strand)
gccgataggttctgtctcattctctttctccctatcattcaaaagcaagccaatttttgtttttcttcaataaaaatttaattaatctttgaacgtggtatgctaattctaggtttagacattaaaaaaatacagaccttttgtatcattatcgttcttcttctctgtcttagatatgtttttttttttcccacaattacttgcagctcaagtaatctgagaagccttagacttgtaaaat

SEQ ID NO: 38130 - DNA, 444 bp, Arabidopsis lyrata
  Intron number 2 from transcript 491439 (locus 491439) deri ved from phytozome v7.0 (chr-ID scaffold_7; pos 3693263 to 3693706 reverse strand)
ggaggccctcctttatattctcaaaggaaaggtttgttttttcttcttacctttggattcttctcccttaattatgtgttttaaccgaattggctgattgcattcatatgttgtttgctgtgatcccttagttatgtgttcataagttgttttctgtgattggttactaggtcttttcatgcttgactaagaaattgcacatcaactaactcatttgtttttgcccttttgatgctcacttagtacacacaccgcacttgtatctttatgattgtataacaaaagacattagaatacatatttgatatttgcaccaatgtgattttgtttttgactaaatatgacttggtatctcccaaactctctttgccttactttgtggttgtttgtttatcttgccaatgtgtaggtcatcctgctttgatcggacgtcaccgtccattt

SEQ ID NO: 38131 - DNA, 804 bp, Arabidopsis lyrata
  Intron number 1 from transcript 496649 (locus 496649) deri ved from phytozome v7.0 (chr-ID scaffold_8; pos 21479652 t o 21480455 reverse strand)
ttattgccggttggctcctcatcatcactacccaggtattctactttaaatcattttctcaacttcttatatactctctctcggtctctgtctttaataatttgatgttttgggatttttttattttccacaaagatgtgttgtaataatatcattattatttttaattgtaaccaataaaaagaggacagaaataaaactaaaattattaaacaaacaaacaaataattaaataatataaaaattaatttttttaatttatgtgtaaaacccaaaatatcgtacttaaagaaacagagagtatttttttttttttttgaaaatggcacagagagtattttatactataaatattactttagttaaagtcaccaaggaattgaagatttggaaacgagttaaaagatttatgatatttcaagaaatttatgtcttaatgttaatactttgcttctctacttcaatctagctaatcggttaataattagaagaatcaaaattatctgtaaattggaatttttgagtgacatgtaactttttttttcttcaggaaagaaaatttctttattatgtttatatattttaatcagcccatgatttcgttagagaacaaacaacaaataaaattaataattgcatgcaatatacaatataagttagacttttggttttaaaaggaaaatttgtcgggttgcgtgatatcatcggcgatgccatttgattcttatttcatatttggaagttattgatatataattgacgatttgatgtgaagtatacatgtaaaattgtaggtattgggat

SEQ ID NO: 38132 - DNA, 508 bp, Arabidopsis lyrata
  Intron number 2 from transcript 482477 (locus 482477) deri ved from phytozome v7.0 (chr-ID scaffold_4; pos 16680754 t o 16681261 reverse strand)
aggagctgaccgagtcccctggattggtgagtcctcatctaaaaatcatatttccattgactccatgtgttaaaccaagaaatttctattggaccgcaatcaaaataactccattggcatgatcaaatctgaaatcttagttttgcgggtgtcattttttatttgatgcaatggcttaacaaattcattcctcggataacaaccgttgcttaatcatttgattattcgacagcttttattgtaagtgtcttctttatttgtgggtatagatcaaattcttttcatgggtggcattccttgcttcctcattctgagtcttgggaagttttaggcttttagcttatgtgaaagtcttaatcgctgagaatcttgattcacgggtaaacaatattgatttgattcatcgatagcttgcttatatgatattgttaacttggagtttcttgatttcgtggtctcgagctgagaacttttttttctgggaatccacaggtgaactctagcccgt

SEQ ID NO: 38133 - DNA, 562 bp, Arabidopsis lyrata
  Intron number 1 from transcript 482477 (locus 482477) deri ved from phytozome v7.0 (chr-ID scaffold_4; pos 16681478 t o 16682039 reverse strand)
aaggatctccgttgctcaacgagggttttcttccggtaaatctcaatctcctctctctttctttgatctattctctgattgttctgtgtttttgatctgagattcttctttttgaacttattggtttttggtttgttcttgacatctgatcggattaaagcgtttgcttttttgttggattgattgttttagaatatcgctaatttcgtctatttctccttttcgtatcaaatctcagaaattgcatttgatttctcgagtctctgttaataatgataatctacttagaagtgttcacaaactgatatgttgatgttatttgcattttctctcaagttttatacttgaagtagttttgggtaagattttgaaaatctgcctgataaatgaatggttttactgtcggcctgaaacatgttgtttacagagaaaagaagatcttcaagaactttgtttttggaatgttgattatcttgccatgtaaccttattgattattctattttttgttgttgttgttgttgttggcatgtgtgttatagtggttttgaaggatttgaaat

SEQ ID NO: 38134 - DNA, 565 bp, Arabidopsis lyrata
  Intron number 1 from transcript 909676 (locus 909676) deri ved from phytozome v7.0 (chr-ID scaffold_2; pos 19065242 t o 19065806 reverse strand)
gctttctccaattcgaacccatttctctttcgctggtaaacgcctccaatattacacttttattttcctggcctccttgtaattttgctgggttcaagtttgttcttttggtcatgttgctctattgaatttagtgaattgtttgcctatttggagtatcagatggaaacaaatcgtttgcaaattgcttgagaatttcagcatgagattgtgttatttactcttctcgacgttctctgattgttttgatcagcactccttgtggaatccattcttttgtttgaggattatcttgtattattttgttttcgttttattgttctttgtcgattctaggattataaactagagtttttcagttggagcttttgttgttgttcatggtttgattgtttcatttgcgttgtggtttggatttaatgtaataaaactattgatttttagtaactgcagaaaccgaattcagaactggctctgcaacttcaggttttgagattgtgacctttttttttttttttgttaattacgtgtagggtgtggctgctcctggattcaggacaattca

SEQ ID NO: 38135 - DNA, 811 bp, Arabidopsis lyrata
  Intron number 2 from transcript 488897 (locus 488897) deri ved from phytozome v7.0 (chr-ID scaffold_6; pos 8440978 to 8441788)
aactcaattctagaggtgtctttttccttccttaactctaatttctctgcaaaatcggatcttttggtcatctgcttggtttagtaatttcggactccatgttagggcttttgatttcgttctccttggagctgggtgctgtaaatttctaaattgttgtggtgattgctaggattgagagtttccgatctggaagtggttgggtggcgataggatcttttccagtattggatctaaaccacgcttccattatgttgagccttgatttttagcatcacttagttaccttattcagatttgtcgactctgtttgtgttgagtatgtatcagcttcttcaatagttgatactttagcaaagtatgtagcgaatgtggtgaggatgagacagaattgatagaatcgtggtatactgcagagctatgaatttcttgtttggaacatgtttaggaatatatttgagtgccatattttgacttcttatcaactgcaaaagaaaaagttaatcatgtggaaaattcgtggctgttagtattgctacattggtagttcgactatgaccttttcttgaaatcctagttctttcttaactgtcttaattgagtaaatatacactaacggaaggagtcatttactctaatccatgattttactttttagtaacacatttaatatagaactgccttagtgtccatattcttgtcatcacgatcatgatcacatttatactttaaccccttcttatcagtctttatagtatgtagttaattctaaattttaaccctcgttgtcattctaaactgaacagtacga

SEQ ID NO: 38136 - DNA, 589 bp, Arabidopsis lyrata
  Intron number 2 from transcript 895816 (locus 895816) deri ved from phytozome v7.0 (chr-ID scaffold_6; pos 24031309 t o 24031897 reverse strand)
agcagtttcagaaagcgagagagtgagtaattttgaaggctcttcatgattatgtgacataatttttgcgacagaattttgcagtaattttgtaatcctatatttttatatatttatttttcgattttgaaaatattttttttttattaatgatatcgataccggtctcacctatgtgcatgctttagattctccgatgatagaactccttacaatttcattcaaaaaatatatagagtcatgaaagtaacaaacttgcttcttttccaaagtttgttctattaacatttcgattatccatttattttccgattgaattgaaaaataaaactaaataattttcaccgattaatcaagatgtagtatcaattcgttgggtttaatggaaacttcaaattaacgatttgataagaaaatttataatacaaatcttaggttccaataattccttaattataatcgatattttagatccaataagagggatcaatagacataattaacaaaacttaaatttgatggctttgcctactaattcactctctttgagacttcaaagacatgattttgttcttgttgttgttgcagg

SEQ ID NO: 38137 - DNA, 528 bp, Arabidopsis lyrata
  Intron number 3 from transcript 945138 (locus 945138) deri ved from phytozome v7.0 (chr-ID scaffold_7; pos 5537446 to 5537973)
ttgctggttctgctttggcttatactcttggaaaggtcagttttatttgatttgattgcttacagatacgaattaggtggttataggttttgtggatttgattctggatttgaaaatttagagaatgagtgatgaatcattgttttttagtaccaattgttgattagttgaagcgaatttttcgattctccgattgtgtattgaatccagttctagtttcgtgggattgatgattctgaaaacaagttgtttcacacaatgcacgagttcttgtgatttagtatggtcaacgattaatgcttcatgtttatattcctatataccattgttcttgtttctagtttatcattggtcttggttattgttatatgtcgatttatcatagaagaggaatgctcaatgtttcatgcttatattcatgtagtgatatggtgaacgttttgatggttgagtcactgtttgggattctcaaatttgcaggaaaatcgcaaagcatctaaggttgccacccgttaagctacattgcag

SEQ ID NO: 38138 - DNA, 719 bp, Arabidopsis lyrata
  Intron number 3 from transcript 473698 (locus 473698) deri ved from phytozome v7.0 (chr-ID scaffold_1; pos 17656790 t o 17657508 reverse strand)
aagaagttgagagcttgaacaagaggtgagtcagagatctgacgattttattttttatttacgaattttagaaaatattaatcaggtaaaaaaacaaaacggtacgataattaataaatgcgaaacaacaaataaagtacgaagaatctgtcaatttgttaccagatgatcctgtcgttagtttggaccgaccctatagaatgtttttttttttttgtttggtaggaaagagtttaattgccataattaatgtccttaattatgaagcatatttggtatctcttcaatttaatttccctttttgatgatcttcgtatcgttcacgcttctctaattttgtctttttattccttttttggtaataatacagtctaattgtgatttaaaacccaaaatttgttttctttgccatttaattgttactttgatacagtttgggtcaaattttgttgttaatgttttggtcatgactttgatcgtaggaagccttgttaattgattcaatctccaataaatctctggttatttctggtttagattggttattgtactcggtttaagttctatctagtacacatttttacatttaatgatacccttgagagaatctgaaagttactatgacatgtataagatagatttgggtaagttttgttgttaatgttttggttatgtaacccaaaatcctgttttgtaggaagccttgttcaaattacaag

SEQ ID NO: 38139 - DNA, 1020 bp, Arabidopsis lyrata
  Intron number 1 from transcript 920346 (locus 920346) deri ved from phytozome v7.0 (chr-ID scaffold_1; pos 6124722 to 6125741)
gtggctccttcggtcatacgttcaggtaattctctcctgaaatttccaaatttgtttgtttattaaaaatctttcgaatcaattcacaccagataatgtcgggtttagcttcagaaatttctggacttggctcatcgattgaaagatcaaaactttaatcgatattttggttattgtcataaaggacttatatgacactgggagtgtgaggagaagaggtgtcgaggcattctacggagtcagtcacattggccgaaaccaaaactgaggtgagcatttgggaatgctatgagattctgaataagtttattgtcgagagtgatcccaaactagacgtacttcagatcgaacttttgcttcagacagctgaagccatcagaacatattaccctgctgaagatttcgctttgattgcattaacaaattgtttaaccattcagtgatgttgtgttggtgggctgttgatgatttctcgaatgaattatctctattactggggtgtactttttgattaatctattgttcaccacaagttatataagatccttagcacaaaactttgttttgagttttataacatctgaaatttgattccatcacggttttcttgatgcagtacgtcaagcagactccatactatgatcatccgagttacaacaccatgtaagagatgtacaccaaaagttgtgggctcgacattgtattcatctcatggggacatgatgattacatttaccttgtaagtaaattacaatctcaacacttgttttaatctaccggcatataaggatctctttttgatgctattactcagtttcacagattctgaaggagagtcaaactacattaccatcacccggtctgttcatcattcaataccattctacggtatatgaacgacatactgattttctcaaatctatcataaaaaaatgagtcaagattataaaaccacgggttcttgttcttgtcttatttttgttcgcagctctttgcaaatcagaagaatacaagcatttg

SEQ ID NO: 38140 - DNA, 173 bp, Arabidopsis lyrata
  Intron number 2 from transcript 479143 (locus 479143) deri ved from phytozome v7.0 (chr-ID scaffold_3; pos 7118448 to 7118620)
cgaggccaagcgaaagggtcgtcactctggatacggtaaaaggccaaatgagatttcctgcttgaaatatcttgtctttctttgattattactggtttagtgaacattttcttttgtacctcttcaatgtttttttaggtaagagaaagggtacaagagaggcaaggctacca

SEQ ID NO: 38141 - DNA, 541 bp, Arabidopsis lyrata
  Intron number 1 from transcript 481701 (locus 481701) deri ved from phytozome v7.0 (chr-ID scaffold_4; pos 12057342 t o 12057882)
cgctagaatcgttcgattatctcgtcgtttggaaggttcgtttcgtataaaccctagaaaaatcgaaatcgatgattatgtttctgaacacaatctcgtttttgcactttagtttttcaatcgatgagtacaaaatcttcaatgtcgcgttcgatttctctgtttttgtggattttcatggttacgttgctgaatctgaatcgaatcgttcgtgttaatcgtttgctttgtttcgtttcgagtattgtgaacgattgtgattttttttgttaaaccctaaaccctgacgatattttgatatcttcctcgctgatttacgtttatcgatcctcttcttggatctaaatttcagaatcatacataactctgtttctgcgattgaaacacagcgattgtgaagaaattagtcacttttgttgtttcatgattttgttggtatacaagaaattgcaatcgatgatcaataatctcattataacttgttctgattgttttaaatgtatcaggagttgaaacagtgagagcagatcctgtttcgaac

SEQ ID NO: 38142 - DNA, 678 bp, Arabidopsis lyrata
  Intron number 1 from transcript 932461 (locus 932461) deri ved from phytozome v7.0 (chr-ID scaffold_4; pos 2682451 to 2683128)
gatctatatccgtacccaaactaggaaaaactttcgtgagttttctgattattttcgaaaattttagattcaatcctttgcataaagaagaaagatgtgtaatttgaatctttagggcagttctgatttattgaattgattcacatttccgctaaaacagaaaaggagaaatggaaattatgactcactaagacttagacacgaaaagcatctgagaaacaagagtacaacttttgattattcaatgatatgtgaagtaagaaaaagagtacaacttttgatttgtgagtttcgtacatggaaatttacaacgaagaaattgacgatcttttaggtgttgactgttgagaaccagagactacaaattcatgaacatttggaggttggttttgattattttcatcagtaatatcttcttcattagtttgcttatgagtgtttaaattctcttgctttctcttgatgtacaacgtggagtgtttgttgctggtcttaagaaagaaattattagtgacgctgaacagattttaaagcttatagattttggataagcttttaaaggcaaagctttactaagaagtatttgttttcctacatttttgtatgtctaatgtgtattgacttggtcttttcaagggtggaggcagatcttctgctagagacaccattggaagagtt

SEQ ID NO: 38143 - DNA, 298 bp, Arabidopsis lyrata
  Intron number 1 from transcript 489150 (locus 489150) deri ved from phytozome v7.0 (chr-ID scaffold_6; pos 9693205 to 9693502)
tcaggagtgtcgtaacatcgaacgccaaatccgaggttcttctatttacacatcttctctcgcgtttttcgttggtcaatttagggtttttgaaatctaattgaattagaagatgctagtttagattaattggattgaatcagatttggatcggattattttgatgggtgtcctttataagtggattttgatattcctgctgatgttaatttctcgatttggtcatctgggttaggtttgaatctatggaattttgaaagttttggtttttgttcagatatacagaaagaagagagaa

SEQ ID NO: 38144 - DNA, 575 bp, Arabidopsis lyrata
  Intron number 1 from transcript 331045 (locus 331045) deri ved from phytozome v7.0 (chr-ID scaffold_8; pos 4179271 to 4179845)
gagtcatccttgctaatcttgaaaaacatcttcaggttatacataaaacctaccattactgcatcgactatttgtttgcagttttttcacatttacgtattataagtatagatgtttgttttgaatgaatccccaacattttttgtattttgatcaaaactctttctaaattatcaacgcagaaactaaacacaaattagaaaaagaaaaaaaaaatcgaaaaattctcatcgtttcgattgtttattctttctaaaaatattataagcaagaatgaaaatgtttaattttacaaaacaaatattgcgcttcaaataatttaaacttatgtttatcatacacaaagactatatatttacatgacatgaattatggtaaattgagttttgttcatgttaggggttatcatctaaatttcaaatgtgtgcgtctatatatgctatcggatcttcttgattatttataagatatatagtaggatttgaacatatatatatactgtttaaacgagtttgacttgtgagctgcctgtttaaataggaaattgataaagacgaaaccgtgaggctagccga

SEQ ID NO: 38145 - DNA, 821 bp, Arabidopsis lyrata
  Intron number 2 from transcript 494387 (locus 494387) deri ved from phytozome v7.0 (chr-ID scaffold_8; pos 1344250 to 1345070 reverse strand)
ggggtgcttctctcgccgatcttctccgccgcaaggtaaacatatgtatatattaagtaaagattttacataagttttgattaaaaactcttcgatgtcatagttattttgtttgtgtgtgtgtgattctgtatttaaactattcacgccagtttaaagacaataattgttcatttttaaaagtcattatacgattttattttctttcaaattagataaatattgttcgttaattagttctttcatcttgccatttatataattttattgactctctcagattctttagtttgtatgattaaggattgttttaaatttagttgcaatatattctaaatcctagcctttgtcaatttagattattaatttaaagatttacattctgtaaattgtacatccataaaccagaagtccagaagataaaacataaattttaaatagaaatttgaaaacatccattaaaaaaaacctaaaacatcaaaaaaaaagccctaaaacatttaacctagaaatgcgaaataagtgcttttaccgttgtatcaattggagcaattgttgactagtacaatattttgttttatacagtaatttttcaggaaactaatcatattattattttctagtatagtactatagtgtagtttcttatgtttaataaaataattttatatgatttttttcttgtaattcactttttttttttttttttttttttttttttttttttttttttaataaaaattcacaattcttgtaattcacaattacgtacgtcttaatgaattattaacgattttgatatataaattgattaggctgat

SEQ ID NO: 38146 - DNA, 718 bp, Arabidopsis lyrata
  Intron number 4 from transcript 891767 (locus 891767) deri ved from phytozome v7.0 (chr-ID scaffold_7; pos 23074535 t o 23075252 reverse strand)
gtcagaaagagtctctccaacgcagccaatctgtagaattttctcttacttcacattctgataagagactacgtttaggttgattaggccaccggttaggatgttttaattaattagttttggtggtttactttatgagtttggtattcataatttcatttctatgttaaagtgttttttttttttttagtttaggttagaatctaagttgtatcatggcctatataaatataggtctttatgctaatgagaacttaacttccaagaattaaccttaatatccaagagagcttagggttacgaggaaggtagattacaaatctctctatttctcacgttaaacatttgctacgattacgagatcaaagtctaaagctttggcttgtatcacattcattgattcattcatataggtcctctagattttgtaaatatatttctttcaaaattcccaacaaagttaattgaactaagtggcaaataaatgatactttagggatcttccatgaagtagactacttttctttatccactacaccattgaattggctaaaaactagtgcatttgaacaagactttctcttacttcatattcattgaatcattatatatacttgaatgaaaataaattaccagtagctcttaattaaatagtttgagatgatttttttgacccttggtatcgctttaaccaatagtatgtcgttgttacagcttc

SEQ ID NO: 38147 - DNA, 343 bp, Arabidopsis lyrata
  Intron number 1 from transcript 489954 (locus 489954) deri ved from phytozome v7.0 (chr-ID scaffold_6; pos 20824453 t o 20824795)
tttcgtttgcatttttgtccagtttgtttggtttggtgagtggttgcacattgtttgaattggtttggcatacgtatcatcgtttcggccattttttgaattgttgattgaaatgtagtgaattatttatgaagcgtttgttctatatagcataattaactcttcattttcgtctagtttgtttggtttggtgagtagttacacaatgtttgaattgctttgcatatgtatcagcatttcagtctcacttttattagcatttcacatatgtgtttatggatgtctcaagtaactttacgtatttgcagggcattcaagcctcttttagaataggtttggctct

SEQ ID NO: 38148 - DNA, 841 bp, Arabidopsis lyrata
  Intron number 4 from transcript 488128 (locus 488128) deri ved from phytozome v7.0 (chr-ID scaffold_6; pos 5263765 to 5264605 reverse strand)
attcagggaggagactttgataaggggaatgtgagtttttctggctgtatccttgacagcacgagtttctattttttgttagcttcatctgggtccatgttctgtttctatctatctactttggttcatctcttgaaggatatattcttcacattattgcatatctcgaatttataagcagaaaattcaccatccattactgggtgtgtgctgagctctttaaaagatagaatgagccaagtatgctcctatccaaaaatctctttctgacttccatggagttccttgaatcctcccactctatatgttaataacagtgggtagaatgtagtttctgccaaatctcaatgttaattaagctggctcatatcaggatggcaggatgtatattaatttcttgtatgtggtacatagtataagtcaaatcttgcttgataaggaaggatgcttgagtttttacttgtgcggatttagagtcgctgttgaaaagtgcatgtttgggtacattagtaggaaaaagtctgagctatgacaatctttctatagacaatctctgatagctggctctttgatttgtagatcacttttgttaatcttagacttttgttctttgttatataaataatacctgggcttgaataggtgtggtagggaacttatatactggttcttggatatgcagctagctgtgggtcttttctgcatgcctcattagaaatatattgttatcttctgtttctgcacatctcagttaccgaatgtccttctagtgctagcataattccataataatgatacagaagtctaattgttgagcagggaactggaggtaaaagtgtat

SEQ ID NO: 38149 - DNA, 270 bp, Arabidopsis lyrata
  Intron number 1 from transcript 929476 (locus 929476) deri ved from phytozome v7.0 (chr-ID scaffold_3; pos 6969599 to 6969868 reverse strand)
ttcctcacatctcacataaaaggtataatcttcttttttcctcactgttattttttcttactgcttttgacagaggatattattctctttgaacattagggacccatcttctgcaatctttgttttttttaccctcacatgtaaaaagtttcatcatccttttctctgttttgctctgtttttgtcgtgtggtattgacatatgtcttttgtttcttttgatgaatggttcaaagaactgctcctggtccagtggtgggttggcctccgg

SEQ ID NO: 38150 - DNA, 568 bp, Arabidopsis lyrata
  Intron number 1 from transcript 328774 (locus 328774) deri ved from phytozome v7.0 (chr-ID scaffold_7; pos 5329749 to 5330316 reverse strand)
gtagcgtttgggctcagagctccaactttcctcaggtatttgatttcattgtcattgtgtttgatctcaatgtgatttagatcatgatactgttgttggtatccaatatgatatttgtctgattacaatgtgatttagatcatgtatcatggatcatgttttgattatattctatcgatgtttgtaatgggatatatatgtagtgtattgtgtgtgtttgtgtttctttgaatcttgttttgccgatcgatagatttgaggataatcttcaagtactgtggatctaatgaagtttaggtaaaagcaatgaaccaataattttatcaagaaaccagaaaaaaaaaacattgaaccaataatagggaattcaatctttaaacatttcttctttgtcctattgatatgaaatgctacaaggtcaccaagcatattttccaaagtcataattgtctaaagcttttaatagttttatatatacgtttcaaacaaatgatgaatgttgtctcatggtaatcaataatcgtgctttggtctttgatagttcaagggacaggagttcagtgatata

SEQ ID NO: 38151 - DNA, 729 bp, Arabidopsis lyrata
  Intron number 4 from transcript 492924 (locus 492924) deri ved from phytozome v7.0 (chr-ID scaffold_7; pos 10260331 t o 10261059)
cttactttaccaactgttctattgctcctttcctggtgaaatattttgccctcttctctgtttttttttgttttcatctaattgtctaaccaataatccccgaaggaaggcccgaaccacacctaccgttatatcctactgaattttagactatgagcgagtaatttggtttacggtttggtttttccggttttattaaactttttaaaaaaaccatttgtatttcggtttggttgttaatttttgttttagactaggtttgggccgtttggctgtagttaaataataatttgaaatataaataaggagttaattaatattatatttatattcatatgaataaaatataacattgatcgaaacaaaatttgtactgattggttaggtgacacaaaaattggtttcaaatttgttttttttttcttctggattttaaaataataaaaccaaaaaaaaaaattaaaaaaaattagaaaaccaatcaaattatgaaaaaacttcggtattgtttcgattaaatcattttgttttggtttggttcgattttaaggttgagagttttgtttcccatccctaagattctaaccatatcaggctatgtatcgtccgagttataagaaagaaaatatctcttgagattagattcataatttgatcaattatctcttccttctttaccttacctatgtgtcaggtccaattttgtggtagtgattttgatattgagta

SEQ ID NO: 38152 - DNA, 651 bp, Arabidopsis lyrata
  Intron number 1 from transcript 920765 (locus 920765) deri ved from phytozome v7.0 (chr-ID scaffold_1; pos 7710220 to 7710870 reverse strand)
gacacctgttgactccgctaagaacaggtcaaattctcgtttcttacttgttttgtctgttattgatgattgattggattgtttctctgggaacttggtaaataaagatcttttaggctttggctatgttgagaaaaaagctacaagaataggtccctctctgtcttgagtcttgtggttcacgagaatttgagcttaattatgataagaaaatgtcgttttcttggattcctacatcgttttctcagctggtcctaactattaccttggcctttaccttgttaccttggattcaattttgccctacttagatttcattagttcctcaatgttgttagcattcatgtgaagaagatcaaacaaatatctgagatagtctttaggagaggattctgctaactagtcaagagattttgaaaatcaatgtattgtacactagacgggtttctcttgaccaagtcttcagtgtttgttatacattgaccttcaagatctcttgactatatataactttgtgtcacctatttttccagttttgtatctttaatctcttgtttatagtcttcttgtattatttcttgtttggtttcttaggcctaaagctgacatatatctgtgagcttgtttgtaggggacttgttgttctgctac

SEQ ID NO: 38153 - DNA, 746 bp, Arabidopsis lyrata
  Intron number 1 from transcript 938450 (locus 938450) deri ved from phytozome v7.0 (chr-ID scaffold_5; pos 17368794 t o 17369539 reverse strand)
cgaagagattcttctcgaacgacccagacctcctggtaaaatcgattcgtgggttttattgctgcttcctattgattttggatttagaatcagtgtgctcggattaattactcacctttgactgtgatctgttccaacttgtgaccgtcattcattagccttattgtttagcttaagattattaaagtgagttaggtgaccaattagccgatcatatgtttgccgtgaggctacttctttgtgtgattgacatcagtttattgtttgcagtccaattcttgagcacgagctgaattgtgctctcacttttttggctgcaatctgtacacataaatgttgcaccttttcatttcatgattggaagctttagttttgatttttaaactcttcaagcttttgtcctgtgatcacaaccaagatcattgtgtttcagtgaaaagtgcaaaatgggttgatatttgtaaacaggcacaattttagctcctttttgatgttagtagagagctttattgatcaatctattcatttctaggtatacctcgtcaaagatggtgttaattagtatcttcttatgcagaaataggttgctatgactgtatcatttgaaagttgacaatgagttagccgtttggtcacagaataccttccttttgctgtgtaattctgtggctatttagttcaaaattcagtggttgttaggtatgcccggatctaaactgtgtgtgataattcaggtaccaaagcag

SEQ ID NO: 38154 - DNA, 845 bp, Arabidopsis lyrata
  Intron number 1 from transcript 891959 (locus 891959) deri ved from phytozome v7.0 (chr-ID scaffold_7; pos 24331584 t o 24332428)
tcaattcagcgacccggttagctactctttacttgcaggataatcaacttaccgttatcagaaatgtcaattcagcgacccggtggctactctaaatatatgagaaatctatatatataatgagagagttttctctccatctagagtgtccacataggcgacacatcagcgtacacgtcatcatacatttttaataggtataaaatgttaccaaaaagattcgaaccccttacccaatacatttaataggttcatttcaaaccaaattgccatttaaatcgttttaattgatatcaaaatttaaattatatatatgactttataaaactcccactcaatttatttattaaacgaagaaacatttaaaaaaatttcacatacttttatattatcatcttttaataaaagaaaatattttttcataaacaataacattgtttactataaataaaaagtaatataatataacacacaaaaatatgtgaatagaagttaatatacaaatagataattcaaaaatagaagttaatgaattaataaaacacagcacaaaaatatataagataacaatatgaataaaaattagaagcatatagataattttcaaatacatataatttatatatgagaagtagaaaacaaaaaaatatgttatcacgctagaaagacattaaccttttcaagagttataaaatatttagattaaaaaagtttatatgatagtaaactatagaatttagattacacgaaataagaatatctatttttcaagaaaaaagtatgtatccaaaatcaagataatatatatataaaattgtataatatatttaaggaaagaattgtga

SEQ ID NO: 38155 - DNA, 589 bp, Arabidopsis lyrata
  Intron number 3 from transcript 931826 (locus 931826) deri ved from phytozome v7.0 (chr-ID scaffold_3; pos 23351684 t o 23352272 reverse strand)
tgtcaaaatttaaatctgaagtcaaaagttcgcaggtaacatctaccgttagaaaatgtttctgatcttgcatacattagtggttgtttttgattagtagtggttcagaacctcaaacttgtggctgttttctggtttgatgtgcaaaagttggtgatgtcctcaaaaaattcttctaagttttctctctttattctcattatggatattgattagtttgagaggttgtgttgttactttgaaaatagaagatgtacaagccgcgttttttgagtaaattagtttatctaggaagagggcctgtttagtaattcaaactctcattgctgcagctgtttatgagttggagtcttaggcacttatagccagaaaaatcggtatattgtgtttatttgcataccattgtactgtacattttcatgtcatgttgtgttaaatcaatgtagcaccagcatctactgtaagtagtttaggcaaaatagcattgtctgtgcttccctgtataacgcagtaagaagatttatgataccaactcttcttcatgctttgtaaaggagcatcactttactgtattgcaacgtgagacaga

SEQ ID NO: 38156 - DNA, 1010 bp, Arabidopsis lyrata
  Intron number 1 from transcript 925831 (locus 925831) deri ved from phytozome v7.0 (chr-ID scaffold_2; pos 11449035 t o 11450044 reverse strand)
ataacaaggtttgattgatataatctcttcctctttatgaatttcttgaaagtgttcttgatgatgagtaagtgatgatcattatatatatgtttttttttgtaacagttcattttacatgaaggttaacaaatatttaggagacatgaagctttgttacatatttatggaataaagaagagatttttctttatttcgagaaagatgaaacttaagatatttttggaaaggggataaaaaagagagatctttgagagatttgtcagattgttgatagaaagaaaaagatgaattggttttagtgatttagacaaaaccttttgaaaaaacaattcaggttaatggttgaatttataagaccttttgacttgacttgtttattcatgttcttggcaatctttggtttatgataaaagctgatgattttctgtgcatggggcatgacacgagttgtgcagaagctgattgagacattgagtacgaaggagtaaatcagtttggttaagtcagctcttaaatcgggatttttctctttggttgaagaattaaatggaaaccttgtgatcctaagttgcttaaaatcttttggtcctaatgataaaaaggtttgatttatataatctcttcctctttatgaattttttgaaagtgttcttgatgatgagtaagtgatgatcattatatgtttttttgtaacagttaattttacatgaagcttaacaaatatttaggagacatgaatctttgttacatatttatggaataaagaagagatctttctttattttgagaaagttgaaacttaagctattttaggaaagggagaaaaaaagagagcgatctttgagagatttgtcagattgttgatagaaaaaaagatgaattggttttactgatttagacaaaactttttgaagaaacaattcaggttaatggttaaatttataagaccttttgacttgacttgatgattcatgtttttggcaatctttggtttatgataaaagttg

SEQ ID NO: 38157 - DNA, 514 bp, Arabidopsis lyrata
  Intron number 1 from transcript 898853 (locus 898853) deri ved from phytozome v7.0 (chr-ID scaffold_5; pos 19098351 t o 19098864 reverse strand)
tggtgaagctcatgaacggcatacaaaatattcagaaactttacttaactgctgatactctcgaggtcagttttctattttgttatatctggtctagttgtgaaagaataattgcaaagtatctagttggttttttttacttgttttcaggttcttactaagtgctgtgaatcgatgcctgttttcaacaacctcaaaatcttaggtcttaagagtgacgagggtcggggttggcaagcagtgccatctattctgagaaactgtccacatctagaatttctaatcattgaggtcaattaatagaccatgaaactacttgacaacacatttgttaaagatgttggtcagactcaataatcatattgtcttctttttgcgttcagggtctcttacactatgtgacagaaaaatgtggggatgcttgtgtctgcatttctcgggaagacaaaggtcgttcgctcatatcttgtccagtgaagaagttgcaggttagtgggtttcgaggaacaattag

SEQ ID NO: 38158 - DNA, 856 bp, Arabidopsis lyrata
  Intron number 1 from transcript 474909 (locus 474909) deri ved from phytozome v7.0 (chr-ID scaffold_2; pos 242690 to 243545)
ggatattttccggttagataatatctctttaattaccatctcttctcttaaaggaacaactaccaaagtctgtctaactttttgttcaagtttttattttctattttgtttattacatatcgcgatattgttggtgtagaatttacaaaacgctatatctatatgtgagtgttataataaatttgaagttttcaggtgagaaaaaaatatatggactccatatcacaaaaagtatggggagtcgaattattgtgtcagaaaatcaaagtcgtatttaaagtttagtgtatctctattaattagataaaagatttatttatacaaagtcagaacttgatcagactattgaatcctacgttactcctttccgatcacatttgttctgaattttattgttagatttgaggattacttcatgaacattgtttattttttcggtccttggtttctaggctgtgttaaactgctgacaaaatatatggaagagaaaaaatgttggggtttacgttttcttccaaatcaaaaatgtaaaacttcaaacattagattttcctttacaaaagtcaagttgttattgcaaaagtctctagtcaattttactctctttgactttgactttcacatgaagattaaacaaataaataaaagtatatgtaattatcctcaaatgatttcagttaagaatctcagacaatgaaaccatgcatgttgcttttgtgtcaaatataatgttcatggcgctattgactgatgataagttaataaccaacaaaaccattgatatgattttttgttgttgttgtggatgttctgttttgattacagattatctgtgaagaaatctccagataatcct

SEQ ID NO: 38159 - DNA, 549 bp, Arabidopsis lyrata
  Intron number 3 from transcript 935646 (locus 935646) deri ved from phytozome v7.0 (chr-ID scaffold_4; pos 22646901 t o 22647449)
ttggggtacgtactactaatcaattctattgagtacacttttatcaccgcatcgttttaccaatagagaatagattatacagacttaaaacaggcattcatcaattgttcgtatgcgcttacttacgttgagttgaatattatatataatttcgaatggatccacaatttcaaaaaaattaaactaattaattcaattgctaattgtagaagtaagttaactaaaatggaaggattttccgttcactaatctataaaaatttggtttttctttcaaaatatgactaaaaaacatataaatgcaggaattacatttgagtcaatcgagatcatcacatatatgcaaaagaaagaaaagaaaagatacataaaattatatcttcttgagactgattttcttgccatcatctttcgtattaaatttataatctgtacgtacaggccgtattggacagataatagatcaatatggctcagaaaaaaaaaaaagaaacgccagattgtaacgagaagaggaggaagcagagatagagccacagaagaagaggac

SEQ ID NO: 38160 - DNA, 868 bp, Arabidopsis lyrata
  Intron number 1 from transcript 909816 (locus 909816) deri ved from phytozome v7.0 (chr-ID scaffold_1; pos 274817 to 275684 reverse strand)
gtgttcctttgactaaagaagttggcttccatcaggttagtcctctatttttattttccttaaaattaaattaaatttccatttgaagatttttcatacattgtccttttttttggtgaaaatttatttgatttccatttttttaccttttcatagactgtttttatttttatgctttaagggtcaagatcttattaggtaggttttgtttaggaaacagaataacttaaaaatgcatttattatattaggcaaagtctataattaaacttctaactttttttcattaacactcatatcttttagtagatatcaaatgcaaaagctgttacaatcttttactttgttagtgcatgactgcattctgatattttttttttttaagtttctgttaagacttttatgtatatatatcacatcaacataaaattaaaaacatttatataatcttagtaaaatgtatattttgtatggcgataatctcggcactaatatagatcttaggcttacataagtccttgggagcactaaagcctatttaactctcaagtcaaattagtatgtcgttagtagtttttgtacgtgttacacttacattcctccgtgcattcacattattcatttaaaatttatttattctagtttcttttcacatttttttttttttgttattcctatgatagatcaggaacatcccaaccgaaatcttaacttaaatcatatcagatatatcaatttttggaatctctgtcccccactattttctcgatcttatacctatcgcttattagaatatatcattctcgataattcttttcacattgttgttttgattttgttgtgttgtaacttgtaacagattgatttat

SEQ ID NO: 38161 - DNA, 436 bp, Arabidopsis lyrata
  Intron number 4 from transcript 490275 (locus 490275) deri ved from phytozome v7.0 (chr-ID scaffold_6; pos 23419966 t o 23420401 reverse strand)
ccggccaccgcctctcatccgcccaccaaaaaaccaggttatttattaatgactctatactagttatgtatgaacaaataagggtgcataatgttttcaattacataaaatcaattttaccaaatgcatatactaaaattcttttagtttcatgtttaaattatgatatgaagattgacaacacttttaacttacattttgtccttagggtgtttttttttttcttagaacctataagaaatgcatttgttttttataactacgagattctaggcctatacatgcatcccttaccatttttctatctattagcatatattatacaccaaaaagaaattgtgttttgttggcgttttatgtatataaatttttgattaatgaaaacaaaattctcttgtcatagcttgctcgccggtgcttctcccgacgcgtgtag

SEQ ID NO: 38162 - DNA, 525 bp, Arabidopsis lyrata
  Intron number 2 from transcript 473593 (locus 473593) deri ved from phytozome v7.0 (chr-ID scaffold_1; pos 16174268 t o 16174792)
tcttctggtgatttcaatctctcttttctattttgtattgatttagttaattttgatgtttgtgagtttcatatttgttgtagctgatttgatttgtgaaactatgtttttatcgtgttttgcttttgatgaagcggtgtttgatttagggttttatattgttgtcggtgatttgtgaattgatgattttgagtttttttttttgttttctttgaccgttttgtttttggatcttaagagtggtgtgggaagatttttctttttttttttttttttgttgtgttaattccgattatttgtgttaaattttgaatcttagttatggaatttgattctgtgaagtgtgtaagaactttgagctggtcctaattttgattctgacaaaagatttttttattttttttctttcaaatttgggtcgtttgaagaggaatatacaagagtatacaagcatgaattattgattttgattcttatgttttttgtaggtttttgttgttttcttaattgaaaatcaaaaggtga

SEQ ID NO: 38163 - DNA, 819 bp, Arabidopsis lyrata
  Intron number 1 from transcript 470513 (locus 470513) deri ved from phytozome v7.0 (chr-ID scaffold_1; pos 1802229 to 1803047)
tctaactacagtttgtttctcgtatttattccaaggttgcttcttcttttttttcaaatgcatgtttttgagtttctttttgttcttacatatattatccctatgaagaaattattatactttagttcatatgtctccccaagttttggtcccaaaatctcaaagattgtaatctaatagatcttctaattacaaattcaattaagtttaataaaataaaataaagttcttcaaaaatccgatatttatatggatgtacttttccacttttccttctgccatgttcagcagaattaagtcatcactgtctttttattttattcaacttgaaatatcaccgatgatattattcgtatggtttatgttttaattatttgacatatatcacagccagtcagccatcatcatttgattctctgttcattgaattatttattacgctttttgcttctttttctgcaaaccatctttaagacggccctcttacacttctttattttcagttctaagtttcacatgtaggcaccagttttttttttttttttttttttttttttttttttttttttttaattcgaaccgatttttatgtaggcaccagtttttataaatacattgattttatacattataaataaatatacagacacaaatctgtgtacaccaatctctacagaatctaactcctgatttcttggtttgctttccttctttcaccagatttctggaccatctttttgtcttttgttaactgttaatctcaatcttgattcatgtcggacattgtttatttcgcaggtgttactccaaatataccaa

SEQ ID NO: 38164 - DNA, 750 bp, Arabidopsis lyrata
  Intron number 1 from transcript 492563 (locus 492563) deri ved from phytozome v7.0 (chr-ID scaffold_7; pos 8341017 to 8341766)
tcgagttttagtagtgagaactcggaggcgactcagtcatcaagcggaggggaaaacggccattttcaaccccaactatttgggggcgggtttttccaacccaaactaaggccccccgtcaatttctatccaaactcaaaactaattcaaattcaaaacctaaactaatgaaaattagccgatttcaacacgacagaagacggtgttagttcgggatttaacggctgctgagtcagcgatatcgtggcattgacgtggcggaaaagcggccattttcaaccccaactatttgggggcggtttttccaacccaaactaagaccccccgtcaatttctacccaaactcaaaactaatttaaattcaaaacccaagccgctgctatatttatgtaatcttgtagttgggtcgtgagagaaaaactatttatatatcgaaggtgatctatcattcgatagtccgactgtgtattacttaccatgtgatggatcttggggttgtatgatttctaaaacaatatggtattgtctccatttgtgtcgagttgaaattttaatgaatggcagtgtggtaccatagctttagagttcatgaattgttatgcggattgaaatttttgtgaattgtagtgatgatgattcaggtcacgagactataaacacaattgatttcagacaagttttcagatagaatttctgtacaatgattccactgcaggaagaaagacaaaatctttagacggacacaattgc

SEQ ID NO: 38165 - DNA, 665 bp, Arabidopsis lyrata
  Intron number 1 from transcript 952086 (locus 952086) deri ved from phytozome v7.0 (chr-ID scaffold_364; pos 6855 to 7519 reverse strand)
tgccggaaagactttcagggttggtgacattctaggtaaaccatcatccgaaccacattagttataacttttatttatatatagattcattcaagctatagttcaaaagttgtagtaacgtagtcgaacccaagtgtagtttgacacggtattggttttggtgattcaaattatattaagtttgctttagtaataccaaaaaaaaaaggaaaatatgtgtgattttttttgtttatttggtctcaggttcttaaatatagaaacagttaaaaaaaaaagaagaagacaagaaacaattctttacttgttttagttctttacaaatttatacgatgttgaaattgagataacttattctacaacaaaactcatttttagtaaccaaataatttcggactattgtcccataatcttcttaggtatggcataactatttacttaggttttgaattctttttatggcgatttgaaacagagttcaagtatggtcgatcacactcggtggatgaggttgacaaagccggatatgatggctgaggttgacaaagccggaaccattccgatggagacaccaaaatcgatcttaagacagtaggaacgatggagacaccaaaatcgatcttaagacagtaggaataaagtatttcatctgtcctacacctggt

SEQ ID NO: 38166 - DNA, 849 bp, Arabidopsis lyrata
  Intron number 3 from transcript 495713 (locus 495713) deri ved from phytozome v7.0 (chr-ID scaffold_8; pos 17383955 t o 17384803 reverse strand)
tcttttctcttgccaagaaaaaccatctaaggtttgtgtttaccatcgttttctcaaatccatcaacactaagtttcgtttcttgttcttgttttaaagtttgtggatttagttattcttcttgttccttctctttgatctcttatttaattataagatccaaatcttgaaatctacgagattggtatgtgtgtatatctatagatttacgagtaaaaaagatcactgtttcctcaaagtcttttttttgtccttcttcccgatcttggctttcatgtagttatgttttgggttcttgatttcaagattttcagatttctctcccctctgtgtaaatcttaatctaatctcttgttgatttatcagttcttaaatccatctgcagtctttgttggctaatcaagaatctacctcgtttgttgatttttcttcttcttacaaatgtttatgtctttaagtttatgaacaccatatctatctatctgtttgtttaaattactagttgagttcatcttaacttttgttctattattgtatctggtagcttcttcatctaattacggatgtcttaatctactttttcttatgattactcaacataaaataaactctctcgaatcagattggaaactgaaactttttttggcgtgcgaataattgttcctctttgtgagatttcacttcatcaaatcaaaaaaagaaaaaaaaatctttaatcctaattactttagtgtgacttcttcttccacatgaaataatgttcttctaccaagaagattttcaaatctgagaaacatgtacttgtgttgtttttgcaggagtaagataagagtcagacttaggtaggtg

SEQ ID NO: 38167 - DNA, 778 bp, Arabidopsis lyrata
  Intron number 3 from transcript 480380 (locus 480380) deri ved from phytozome v7.0 (chr-ID scaffold_3; pos 19631850 t o 19632627 reverse strand)
caacgaacttgtccggatcgctagtagtcttctttgtgagtgtttactttacttaggattttatagggaaatttggtagattactctgaatatgtttcttgtttaacactatggagattcttgcgcattgatgtccttaccgttctttgtttgagtaggattaagtgatattttggttgttcctgtttttgttaaaagtactatttgggtttgggattgataggaattggaaaagatgggtgatgcacatggattttacgtcgctggcaagagagtgatgctgcattgtaggtttcttatcaatatttgaagattagactctgtttccttttgcattgtgttggcggattagacagaacaaagctttgcttagcactgaataacaaatattttgttcatttaaacagtttgtttgattctcttgatttaaagctttttgcatattcatgaagcttaatataagggctgcaacaccaaatagactgcattgcgcagagactgtctatggcttggcataataaagttgcacaatggggttttgtttccttgtgctcccttcgagttgacttggttatcattcaaagagtgttagatttcatgaaatcgataacgagaataagtcatatatgatacacaatgacgagaaagaagaatcgatagttaggaatgtttgccactaagctcgatgaattttctctcagtgtcttattcggatgtgtaattttggttgcaacttgagacaggtacttgaagaggcaaaagagtgtcttttcaccgt

SEQ ID NO: 38168 - DNA, 683 bp, Arabidopsis lyrata
  Intron number 1 from transcript 945626 (locus 945626) deri ved from phytozome v7.0 (chr-ID scaffold_7; pos 7446291 to 7446973)
tgttgcctcaggcaaccaaggtatagattttttttgacctcgttatttatgattccaatttgagttttgtgtttgattcctttgaaaatttgattttatttaaaatttaggatcgaagtctaatttttgtgttgattcttctggatttgcaattttcttaatgattttgttgttgttgttgttgttgtcaattattcattttgaagaaaccaaaattttgtgtgattaggtgaatttcgtgtgtgaattaggtggtgtcttagatctatttaaatttgatctatctttgaaatattttagatgttgagtgagttaggttcgacttttttttctgtggtatgttttgtttttagtatttgtttgttgatggtgaacaaaatttgatctgatgcatgatttgtgaatttgagctagattttgtgttggtagattcgcctttccctctcaaattctacaactttaagctgatcgtgagttcgttctatcagttacaacttagaaaaagtgatttattatttctaaacaatagataattaatgcaccttgaaaataccttgattgtatttagatttcacccttaaggttttaagatagtatatgactcaacgtgtcggcgtagaaggatagtggcaggttttcatctgtctgttatggtacatgaatatgtgtaggctcaggtagga

SEQ ID NO: 38169 - DNA, 452 bp, Arabidopsis lyrata
  Intron number 3 from transcript 345680 (locus 345680) deri ved from phytozome v7.0 (chr-ID scaffold_4; pos 18948023 t o 18948474 reverse strand)
cgatttggacgtcgttgacctcgtcgctttatcaggtttagcatatttcgtatatattatttttttgtttcatcacattttacatatactgataagaccaaccatgaaattgggaacaattgaattataagaaaatcgcaagagtatcagaccacatgcatgtccatgttaggaagtgtatgagatgctacaaatttaattcttccaatttacaagaaatagtataaaatacgatgaacatcaaatatttgaggataatcttggaagaggcgtcgcacgtgataattattcaaaagtcaattaattttcttagaaatgatctaattttttcatataaattactcaataattaactaatttttaatggaagcaaattttcgagtctattaaaaagaaacgaaattctatgaaaaacaggagcacacacgataggaacagcacattgcggtgtg

SEQ ID NO: 38170 - DNA, 502 bp, Arabidopsis lyrata
  Intron number 4 from transcript 351718 (locus 351718) deri ved from phytozome v7.0 (chr-ID scaffold_6; pos 12650918 t o 12651419 reverse strand)
accaattgacacgaaaggaaagaagggatataagggtaagaattagtgttctgcctgactctttttctatacaacagtatcgtcagggctcttagtatttctttgaagcatctatgaagagtgaggcttttataagggcgtttgatgtcttcaattcgtatactgctgtggtagatctggtctacattttatggttcatagtatagttctctttttctttttcctgttcagttagatggttgcctcgtatatctagttttaagactttttgttcagctgaatgtttctttatacatctagatggttctatgtttttgattatcaacttgtctctggtctcttacatgcctttattacctgccaaagtagttcaacttcttttcacatatggattttggatgatgtctgatacatgcgataagtacttggttgtgcccaaatgaattattttgtgtatgtgtgtgtgtgtttttttttttggtttgggcagtgttggtattaa

SEQ ID NO: 38171 - DNA, 542 bp, Arabidopsis lyrata
  Intron number 1 from transcript 477983 (locus 477983) deri ved from phytozome v7.0 (chr-ID scaffold_3; pos 2810948 to 2811489 reverse strand)
caggtgtgtctctagctctcgttttgttttactttattggctcacttgattcgagctgggtttgttttgattagtagaatttcttgtagagcttctgtaatcatattgaatcactcgtgctttggagctgtgttatttattgatgaaactcatggtgacccagcaaattactgtccaattcaataggtatctcagtttttagagcacacagaagatgagatttgtaattttactcgtttctatggtttgtgattttactaatttcccgggggtttagcgtaggttcactagtttctgtggtgtttatcctcttttgaacagtgtaccatacccgataatctggagtagctattccaccatgtggtagaccttacttcttcagataaaacggatctcaattattgatacactaggaagttgcgttgttttgatgaattgtgatgaattgagatgaagggtttgttttctttcttctatacactctgggaactgccttcttactcttgtattcattgttcagagagtgaaagtctatcatttga

SEQ ID NO: 38172 - DNA, 526 bp, Arabidopsis lyrata
  Intron number 1 from transcript 478702 (locus 478702) deri ved from phytozome v7.0 (chr-ID scaffold_3; pos 5324360 to 5324885 reverse strand)
agaccactcagaagctcctctttttaggttgtttttcctcaccaagtttcagcatttctttgttttcttttactgtttctgcttcttcttcttttttaatgattgagcgtgcttctcctagggttttgtttgaactttgttttggatgttgctatttaatgctctttgtcgattttggttttgtctttttttctctgttttagaagaagtgttgtgcttagaatctgaagtttttgtgagatttccatttggtataatatgtctgggaatgttcaaataaggaatcttttttactgaaatggaatatgcaaaatttgggttcatgactagaaactgtcgtttaaaaaaatctttacgaatctagctggactgtggaaagagaatttttgttttgctttgattgagattgggcatctgggttatgattaagtttggattctgtctactgtttcaagatcaacataatgatagcaggcgtgtattctcatattattactgatactttgaaatgtttcagatacatttc

SEQ ID NO: 38173 - DNA, 470 bp, Arabidopsis lyrata
  Intron number 1 from transcript 319569 (locus 319569) deri ved from phytozome v7.0 (chr-ID scaffold_3; pos 20793792 t o 20794261 reverse strand)
ttacaagccctttcgctgtcttcgttcagatccaggtgagtttgttgttgttggttccgatccaaagtttggtccttttctctttcaaaattttgaattttgcttgctcttctgaatcacacgttcggattccaaaaaacccaattcgtttgttttttctcttacgttggttcagatcgaaagtttggtccttttctatttgaatgttgaggttaagatacgttttgttctctaaagttatgcaaagtactgatttttatgtaccgtatgaagcgtagaggagaagaaattgaacgtttgttgttgaatcaaacataaattttttgcatcatcaatgtatttcaggaagaatgaatggttaagatcatatagatcctatcagtttttggctaaatgtcttctcttttaacttgtttgatcaagcaactttgttcttaatgtttcttttatatgcctcaggggtgtacaat

SEQ ID NO: 38174 - DNA, 823 bp, Arabidopsis lyrata
  Intron number 2 from transcript 488583 (locus 488583) deri ved from phytozome v7.0 (chr-ID scaffold_6; pos 7055521 to 7056343)
ttactgccttcgccgctgaagctactcgaatcaaggtttcttctttcttcttcctactgagacatcacttctagggtttctgttttgtagtgaaatttgtgattctttctcatgattttttgggttagttcagctacaacggttgttgaaacactctaaagaagttgtttttatatgtgggtttttgtcttcttttcgttttcctttctgctgattttgaaattcattggctgaaaaatgcgtttgagatgaaagcttcaatctttgagatatgagttgaatatagattggtgggaaactcgttggtttgggaatttttacttgtcaatgaaacagcaatggtccccattaacggtgatattttttttatagaacttgttaaatccaaacaattggaagatctttgaaaagtttattagtttttgttggtgtgttttggtaattgcatatgtatttgtatgttcaatgtcagattccaattaattaacatatggttttggattaatatcatgttagattcagtctattggatcaaagttatagactttcttaatggggttttatgtattggtcgattgagttgaatgttctttgttagaatcaattagtcataactcataaggaatttgtaggtatgtaaatgaacgaagtttctacaatacttaattatattctcttgagctaatttgtctatttataaagttgttgaaactttcttgtgtatttgtgaaatgtttcaaactttttctaaaggtttgttttttcatttttatcttaaatcgatgcagagatctcaggtcaaggttactgtttcggattcaat

SEQ ID NO: 38175 - DNA, 684 bp, Arabidopsis lyrata
  Intron number 1 from transcript 488279 (locus 488279) deri ved from phytozome v7.0 (chr-ID scaffold_6; pos 5807908 to 5808591 reverse strand)
gggtatgttaaagttttagtctttttctcttacatagctctgatgatgatgattagctcttctggtctgaaattatgttctgttttgtcatgtttgtatctggatatgatcaaagtttaagactttttttaggaattttctatctggtcccatgtgggttttggtattaatggtgttttgctaagtgaaaacgaatgattttggagattttctttctttttctggatatatgttagatttggagatttctgttcttgtttgtttcttctgatacacactgtttgattgttcttttgggttattatgattttgctctgtatcgagtttatgctgatcaagcttttggttgatacatatatttagacattttcatggaactgtgaatgttgtacttggtttgagtcttttgttcattgtcttttcccaaattttgatttgttgtctacttttttgttttctgtttggaaacaacttggttgtgttaagatgcttaagctgtttattttagctctttgaatgtttcagattgtgttgaaacttttatttgctcactataatctttatgaaccaatgcatctctcaacttcagatccttgataacatttaaaaccaaaagaacttcagatccttcatagcttgattcagctctataaatgttgcttctctgctttggtatttgtaggt

SEQ ID NO: 38176 - DNA, 849 bp, Arabidopsis lyrata
  Intron number 1 from transcript 915722 (locus 915722) deri ved from phytozome v7.0 (chr-ID scaffold_8; pos 3080931 to 3081779 reverse strand)
gtgatcacttctttactgtttctatcactgactcggtgagtcaatcttatatattgttgacaagaaaataagcaatgtatatatattttcatatgataggcgtctatttgcatgggtggatggatggatctatatggtgatgaataatataccactaggcactagctagtatatattttttacgttttgaaatttcacttcttcttttttttattgttcgaattatttttcaagttatcacatttttatgtttttgaaaaattattacgctatatgttattagcgtattaaaaattataaccgcgtagacagctttttagaactctggctataatatcaatattttttatttttcttccttttaaatgaaatttaattcacttttcaactcattttcgtaatattattgtagacttatagttatgtatattgattattgaagtattggtttatcttttccgtagatgaatttgggatattaattaacggtaagaattttataatattattataaatttatatattgtttgttccctagcaaattataaatttgtatttgtccatgtccattagaacaccattattggtggtatcttagatggttcttaccttattatcttgaaattaaacattggaaaataaatcaaaacagattaaaatgctaagattggactcttagctaagaacttttggaagtgttaagagctaagatttgactcttaacttataaaaaccaaaattttaatcttaaacaatgttaagagctaaagttaagaacccaccgttaatgatggtcttaaatgtctatataaggattttgacctttatctatcaactttcaggatttag

SEQ ID NO: 38177 - DNA, 944 bp, Arabidopsis lyrata
  Intron number 1 from transcript 323821 (locus 323821) deri ved from phytozome v7.0 (chr-ID scaffold_5; pos 16276379 t o 16277322 reverse strand)
atcctacgtcccccgatcaggtaatatttacattaaaatctatattttgggttatatattatagatattggattctgtatcatttatataaatccttttgagtagaattttgacacggcaagtctcaagattttctgtctttcacacaattgatatgtgttagttttcaaacataagcaggagatttaagttttcccatagtattacgaatattaagaaaaactaggatcttcttcgcctcctcggcttattcgattcagtacttttgtctcttaaaaatttttgatggtaaaaatttaacaaatcaaaaaattgttaaatgatccgttaaaattctttctcgtgtactaagttacgttaaggaagcattgccataattaggggtgattttacaatctacacctaggacctatgtatacactgtattatacatgttgtttgaaacgacactgtactcgcacttttattaattacgaaacgttgaatggagacattatgaggacattttcaaactatagtatatatacataaaaaaaaaaattgtattagcattttcaaaatttgagatagatagttaatgataactgtttaaggaaacatcccatctagtctctagagaatctattcagaatccttaaaattttaaaataaaagatttttcctaagtttgataaattttcgtttccacagtagtcaaaaacagtttaagttgcaaataattcagagattcgcaacgtgtgtgtgacatgtgacttatttcctaatttccatatcagcacgtgtaaaattcacccactttgtcttctttccgttagatctttcgtcactcatctgttttgcttgtacgctttgtcttttttcttttattaatttgtttttcaagttacttatgaatttgtgacgtttaaattcaggtgcatatatctctggttgggccggacaaa

SEQ ID NO: 38178 - DNA, 635 bp, Arabidopsis lyrata
  Intron number 1 from transcript 328104 (locus 328104) deri ved from phytozome v7.0 (chr-ID scaffold_7; pos 1737370 to 1738004)
ctattagggaagctcaggagcctagaactcttcaggttattagagaacctatttcatcacaagttttaatggctgattcagctactgagcctcaatttcttgaagttacattgctagatcaagatatttggtattaattcttaggattttcgttgtagcaactaatgaattggggtaatttgatgactgttgaagttagaaaaccatttcgttctcatcgttttgagttgaaagaagttgtgactatttggttgattctggataaatcatcaatgcaattttttgactttcgaattgaagaactaggaccagtatatgctaggtttctgaagcttgtgtgtttgcttgaaggaatcaagcttccatgttggtgtactttatcttcaataactgttcttatcatttgtcgtagttgtttgatgatatttttgacttgttttgttcgtaaattagcttctagatggatatcctatcctagaaaatttcttttctagaggcaagttttgttacaaccaaatgtggaccatcacttatgaacttatggagtagcacttctttcacttcattattaggaattgatttttggctaatgtctttgtcttgctttgcacaataggaaatctccattgcagcca

SEQ ID NO: 38179 - DNA, 860 bp, Arabidopsis lyrata
  Intron number 1 from transcript 473195 (locus 473195) deri ved from phytozome v7.0 (chr-ID scaffold_1; pos 13145851 t o 13146710)
tggaggaaagagacgaagaagaagaacgctccaatggtgagttttttttgtctcctaatcattacgcttctttcaatttttcccttgtctatttttgaggaaactcaaatttttcttagggtttttgggcattttctctacgagattatgcccaagttagtagaggtcacgttgagttgatttcgttccttggtaacaatgatttgaactgttcttggttagaaactgggttcgcttgaattagagatttaagttttgatatagcttagagttttgaaattcatgattgttactttagggtttgaatcagtgattccgtctgagtggatctgttttgaattctaggaggtgtgtattgtttgaataggtgtgtgtttccatgttaaagttcttaaatccatatttgtaaattgtttcctttggattctgttgcttatgcttttaatgatctccttgttgatttggttttcgtcaaaggattcttttctttcttcgtagttcttgagttgtagtaccgttattgaaactaactctttcctttcgcattgatataattgatgatgaaaagtatactcatctctatatcaggctactttcgttgcactttggcatagtgtgaattctatgtgcttctatctactagggcaatggttgttgggtgttagatgagaaaatggatctaggaaatgacggagtcatctgttttcttagattcagtttatagattaatcttcggtataatgttagccgaagagaaaccatcttcatgtgttaaaacactgcattttaatggttatatttactccttttacttcctgatttgtaggctgatcctgaactagaagctattagacagagga

SEQ ID NO: 38180 - DNA, 496 bp, Arabidopsis lyrata
  Intron number 3 from transcript 922244 (locus 922244) deri ved from phytozome v7.0 (chr-ID scaffold_1; pos 14408977 t o 14409472)
agcgcctttgcaggtacatatctgcttattttcaagaagacttgttggaacctagattgtttggtgctttgagcttctccgcaatggttctttacagttgttagtttactttcgtctgtctaaatcgtgctagagttatgcattatgtatgtagcatggacagaaataaagtttagtttatccatacaaaaacgttttgtcaaaatttaaatagatgatcatactaatttggttcagttcagatccaaaactttcgaaacttacattgggtatgtaggatgatcatttgtttttaaaaagggtcaccttttctaaatccgtatagggccaacaagaaaactcagtactggctgttaaagaagaatgttcattatcgtggtttttgtctttgccgtagcctagaattttcatagaaggaagtttgaggtatcaaatgtgaccaaagaaccttgatttaataggtgggttcaggctgagtgtaggaaactgggtgata

SEQ ID NO: 38181 - DNA, 580 bp, Arabidopsis lyrata
  Intron number 1 from transcript 321134 (locus 321134) deri ved from phytozome v7.0 (chr-ID scaffold_4; pos 16175025 t o 16175604 reverse strand)
tggtatttaccaaggttgacgaatcgatacaaaaggtaagtactgttgttcttctggtttgatattttgttgatgttgtatgccctaaaatccaagagtttattgttctgtctatgttgtgtgagctagaaaatagctaaaagcctaaacctatgttcttttatcatcatcatcatcatgaacgcaaagtttatgctaataattgatgtagattatgtattttagttgtttagtgtatttagtagttaaaacagaattagggttttcaaggttcttttagactattatttttctttattaaactatatgaagagagtaaaaaaaagttttacatgagatgtgaaaatataaagaccaagagagaagagatagaaagaaagcttcagttccatcagatattttattagatttatggaaacctagtcacggtctaatccattagaaacccacaaatattcatgatagttagatctttccataaagtaagttgagattgtcaaaacttaccttttatttgatttgttttttcttttctatattttcagagtattgaactctggacagagttaaccaaagacat

SEQ ID NO: 38182 - DNA, 611 bp, Arabidopsis lyrata
  Intron number 2 from transcript 480102 (locus 480102) deri ved from phytozome v7.0 (chr-ID scaffold_3; pos 13510483 t o 13511093)
tggcttgtctctcagaattcttggggtgttcttaggtatctcaatctcgtctctttctacttatcttgcttctcaagtttagatgatagattttgggtctctctcaataattaggacctttatagggctgtttttagcagattcaatccaatcattgataaaagattgaatctttttgaatttgaaattgattatggatatatcttacataaagttggtagctttttagaagattgaatcatatcattgatgatagtatcgatgaactttgttgggttcttgagatttgctttgggatttggcaaaaaaatcaagtactgttgtgttcctgagatttggtataggtttacttcgtcaagtttgattcttttgaaattgaaattgatttgagagttcagatttgacgcaaggagacacatttggtcactctatacactatagttacccgagatcttaattagtgaaagagattgttgcaagagtctgtgtttatgaattgttgcattgttgttaacttgttattagcaaggtagtgtgagtgtaacaaggttcgattactaattcattttttcggtgattggattcttcttgcagcacactatccgttgatc

SEQ ID NO: 38183 - DNA, 717 bp, Arabidopsis lyrata
  Intron number 1 from transcript 485264 (locus 485264) deri ved from phytozome v7.0 (chr-ID scaffold_5; pos 14173840 t o 14174556)
taagatattacttttcatatatctatagcgttgcggattactgtggttcatcttttaaatattaataaatctgtgtaaaagtagaaaaaaaaaagtgataataaatgtctttagactcttagttaatgactaaatttttgcactaaagcctaaatttcacgtagttcgatgtcatttgttgctactttacgttttctatattgaaaattaatactactcgtcgacagtgatgttactggttagttattaatttcttacactatgatgatgccaaaacatttatgcaatcggcttcacgaaaatgaagtatccgtgtttgaattgcatggtgccgtaccaaacacgatagaaatttaagatccatcaatcatttatattttgttgagggatatatatatatatattaaaaagatatttttcaaatcaatcaaaaatcatgattattaatttctattattcaattcaattttgattagtttcaatattttaatgtgattatgtataaatattcatcaatatacaaaatatttttgttgaaaagtgttttattttctattgagttcaaatgtttctgatcactttgttttcattacatagatatataaccttcactggttacttgcttcagaagaacaaatgattttagtgatcaatgacaaaaagtttttactatggtaaagggctgtgacgcatccatcttgttagacaacacgacat

SEQ ID NO: 38184 - DNA, 317 bp, Arabidopsis lyrata
  Intron number 2 from transcript 496671 (locus 496671) deri ved from phytozome v7.0 (chr-ID scaffold_8; pos 21576216 t o 21576532 reverse strand)
tccaatcgtctatttgaggtttatatctatttgaaattgtagcaagaagtatccaattctagggttttcttttctagaatgcaaagtgaagaactttcaagttaagaagtgatacatagtttaggattttgaatcgtatacttgtatagtttctgtggaagaggttatgtttgcgttcatacatgaaacagtttttggttgtagcttaattgatatacttaatcttcaattcgtttagtggagttttcaaagctttgattcgtttattcggattttgcagagattaagagaagctgaaagagaacggcttagcaaca

SEQ ID NO: 38185 - DNA, 600 bp, Arabidopsis lyrata
  Intron number 2 from transcript 473475 (locus 473475) deri ved from phytozome v7.0 (chr-ID scaffold_1; pos 15201622 t o 15202221 reverse strand)
tctagcttccttcttggtgttcttgttgttaacaggttctttaattctcactctctctgcctctatcttttagattcttcaatgctaatgctgtggaatcttgactcttgtttccatgtgaagcagctttttttaattctgctgttactgttactgttgatgaaatttaggggatttcctttagatgtagttttaaagtttgcaactttgttcctcctactgtatatctgtctccacattggtgaatctggaacattcttatgcagaattttgcgtaaagctggcttactctaatgaaaagattatgtttttttctttctttgttgtgattcttcttttgtgttagtagcttttagttcttattacaagtttgcttttcgttggttctgacgttcagtgcctagaagaagcttgatcttttgtcacagttagacaatttcagaagataaaacaaactcaattgttaatttacttcacccatccaactagttatatattgagcttttaagccattaggctgatgtataacactttaatgtcctagcttctgattttgcatctattctttctttaggcttttggcaagttttgaaaccgtag

SEQ ID NO: 38186 - DNA, 626 bp, Arabidopsis lyrata
  Intron number 2 from transcript 894992 (locus 894992) deri ved from phytozome v7.0 (chr-ID scaffold_6; pos 18775140 t o 18775765 reverse strand)
tgctacgacaccaggtgcatctcctgcatctcctggtacgtgttgactttcttcatgttttgttaattttattttattcaatttgattaccgattatgttcgtaattaagtttgtctctagaagaatgattggaaaaatataagtttgaaaacaaatgagttaaaaatagtagttgaatgagttgaacaattttcttttataattctttccaattttttgaagtgaatgtgttgaatcattttttcagtttttttttttttttaatttcaaatgataaaaacttagctcaatattattttcaacctagttttattcttccaagtgtgtgttctttcattttttgggattgactgagaaggcatttaaaatatatatatatatatatattagtatgtggtacttcagttaagtttcattttgttagtttagttatcagatatatcatttcatattcaattagaatttcgttatactaataatttttattgtgttactcacattgcatttgtgttacacctttctatttttttataataaacgtacttttgtatgttaaaagatataatgtataaatgatgatatggatgcagtttccccatcagccggaacacctacgacttcacca

SEQ ID NO: 38187 - DNA, 498 bp, Arabidopsis lyrata
  Intron number 3 from transcript 952025 (locus 952025) deri ved from phytozome v7.0 (chr-ID scaffold_304; pos 4906 to 5403)
aaaggtaagcaattatgtatttgatttgaattaatatttgtgtaaatttacgtggaagcttctttattttcctaggtttttaaatttaatacatgtgtgtgtttataattaattaggcaagctcaaaaggactaaggataaaaaaaacctttgacctttgtgaagacgttgatgcatcatctatcagaggagagttagacaaatgtcctgttggactaaatctgatgccgactttaaagtttggatatattggggaggttaataaaattttattggatcaacatactgtatatacgtaaatatttaagaaaatatactatatacgtcaatcttttgggctttatatatatataagtttggatcattttaatatgattaatcagtcaacgtaacaactaaatatattttaaatcatttttttacaggaagtctaccatttaccaaaaaaagtggctatttctcccaccgatagcatccactgtatactgctaataggat

SEQ ID NO: 38188 - DNA, 330 bp, Arabidopsis lyrata
  Intron number 1 from transcript 488629 (locus 488629) deri ved from phytozome v7.0 (chr-ID scaffold_6; pos 7274722 to 7275051 reverse strand)
gctctttttcaagtaactctccttcttttagcttattcgatcctcttctaccagaaaaaatgctgggaaattctctgaattttgaagatcaatttgaattcccaacattttgaaaatttcgagctctaatcaaaaatttccatggggttgaaattgacaacagtgtatgaattgggtctgtttgaattgcttgattaacctggaaattttggtttttttccttcttcttttgcaatcacagtggagatttatttggggtttacttattgtttcttcttcggctctatctttgaaggttattaggtgataaatcacctttctcacagcaaa

SEQ ID NO: 38189 - DNA, 939 bp, Arabidopsis lyrata
  Intron number 1 from transcript 352546 (locus 352546) deri ved from phytozome v7.0 (chr-ID scaffold_6; pos 23443520 t o 23444458)
aacaacattatcttcttctttccttacaatctcaggtgagtcatcctctttctctctctctctctcttgtcagagacatacgatcacacacaatcatgatctgtctttttttttcatttataagttatcgtccaagtctcaaactttgtttgcaatcgaaatcttcttgtgggtttaatcatgatgcgttccttgactgagttttcgatgtattttttgattttgggtttttgatttttcctagagaacaaaacaaaaatagagtgatgactctgtttttatgttctctcaatacccacgcgtgaagtatctctcatcatcatcatcatcatcatcatcatcaatactactctctactttcgattttttgttttctctttcttcaaagcattatagaatcattaactactctccaaaattctctctgttttttctttgtttcccaaaaattcgatttgtttatctttttcgttatttggggttctttgactcaataggaaatgtttttttctctggctttacaaaaaaaataaaaaaatgtaagtgtgttattgggtctctcttgatttttgaacaaaacaaacattattgtttttagtttgaatttttttttggtataaaaaaaattatttatgagtacactctgttttttttattatatgattataagaagtttatcaatttgaattaatttattattacaaaacgtacgtttagagaatctagtactcattagagaatggattgacctcgtatctccttattataattgccaacacacataaagatcccctttggaagcctaataaactaatgttttgacgaccaaaaactagtttagtagtttatctttttataacatagtaaagcaaattattttattattactttcttatttctctaagatcttcttctttctttggataggatctcctctca

SEQ ID NO: 38190 - DNA, 447 bp, Arabidopsis lyrata
  Intron number 1 from transcript 921808 (locus 921808) deri ved from phytozome v7.0 (chr-ID scaffold_1; pos 12115652 t o 12116098 reverse strand)
aagaagatcctaagaagctcttcgacctttacaaggtatgtgcttatcggattttcatttataggacactcttaggttttggattacatttttttgctttctgctatattatcgggttattgctcaaatttcatggatttgtacacctatgtggtgtgtaggcttcggagtaccttcgatttctacacctaagtgctctgatcagaaggatggggatgaagaacagtatattctttgatcttattcacgatcattcagaacagaatattaagaaaggaggaattccggaattaatggccgagacatatcgaagcgacctacaggcaattctaatgctattatgaatttgttttgtttctctttacaagattattaaggaatttactcctgatttactattttaaatttgcagaaagccaaagcaaaggaagaaaaccttgctaaaaa

SEQ ID NO: 38191 - DNA, 377 bp, Arabidopsis lyrata
  Intron number 1 from transcript 903977 (locus 903977) deri ved from phytozome v7.0 (chr-ID scaffold_3; pos 4383260 to 4383636 reverse strand)
ggcggtggcaaaggcgagttctttttttccgaatttgtgttttttttttatttatcatcatttgggtagtttccgatgaaatttctcggttttacagaacgtaaaatgccaactggggatgatagttggaatagttagggtttctgattttggtgggttgtgaaatcgtcatgtgtgcaagtacatttagcattttggttatagtagaagatgaaaaccttggcaggtgaaagttaggtttaggtttgatcttgaatgagaaatagatgagttcatatgtccagcaaaatgctactgtttgtgaagttcttaggacatttgcgagggttatgattttgtatggctttgttctttaatgcagctgctgacttgctctt

SEQ ID NO: 38192 - DNA, 467 bp, Arabidopsis lyrata
  Intron number 2 from transcript 894371 (locus 894371) deri ved from phytozome v7.0 (chr-ID scaffold_6; pos 10809840 t o 10810306 reverse strand)
tatcgccgccggcgaaatctttgcttcttctcttagtcacttcagattccttttctagatctcgtcgccggtcattagattcattaatcactcaatttcgtcttctcttcaggtgagcttcgatttcatgggattttcaatcgaatttatagcttttaaggtctctttttagggttttgattttgccaagtagttcctgaatctacgagctggttttgttgtaattgagtggagattaaagttgggaagaagcttcgattgttgttttgagctctgaagaagtgaaattatgagcagtagctctagagagggatctccagattggcttcgctcttacgaggtttcagattcaatcggatttctgtttctatttcttttgaattctatagaaattcaaaattgaaaagtggatggttttgttacgcaggcacccatgactacttcattgttgtcactatcatcttcag

SEQ ID NO: 38193 - DNA, 509 bp, Arabidopsis lyrata
  Intron number 1 from transcript 894371 (locus 894371) deri ved from phytozome v7.0 (chr-ID scaffold_6; pos 10810406 t o 10810914 reverse strand)
gcggtgactacggcggcttccaccggcaacttctgttttgacaaccaagacttgaaaccagtctcaatctccttgaatttgatctgaaactgttgaattggattctgttgatccttcattaagctcatcaccgccattgtttctcgcttcttgtctcctccgtctctccccatttttcttctttgtcacacttttcttgtttcgcttcttcttctccttatctccctccttttgccagttccgtgtttcttacagatgtattattgggccttaataggcccataagatactgctttattggccccaaagataatagctacatgtttttttacagatgccaacaccattggtattcattttacaattttgtattgccctaaaaaccagtaataatacatcgatcggcgtttgattttcctatattaacctatgtatattagtatcactgatgggttattatcataaaacaagcaggcccataaggcctattgggcttttagtaaattata

SEQ ID NO: 38194 - DNA, 966 bp, Arabidopsis lyrata
  Intron number 2 from transcript 486432 (locus 486432) deri ved from phytozome v7.0 (chr-ID scaffold_5; pos 19467632 t o 19468597)
accccaaaacctcacttactctctctttctctctggtaatctcatcacctctctctatcttctttgttgtatagatgcatagctctaactttgattctttatgagtttactcattttctttgtttgtttagatggttacaaatgttttacctttactttttttaatactttttttgtctttgttgctgccatgtgagctccagctctgttcttgttcgtaggttatattcctttctatgttggttattctgattctttgagcataattgttgaggattgaagtcagttttgtcccggttgctcaaaagtttcgagctttgtatattgccagtgatagacgcagcttcaaatccgaacaataggaatacttagaatgaaatttgattgtggtacatctgagattttctaagcttagttggttgcaaatattgtacctttacttttacctgccatgtgagctccaactccgttcttcagattctttgagtataattgttctgaattgaagttgggtttgtctcggttgctctaaagttttgaactttgtagattgctagttagaaaggcagctttaaatccgaacaagtggaatacttaggatggattgacttagattggtgcttctcctgagtttactttaataattctgctttagaaatgaacagaagcctacagctttttcttttatagtctaatttaaatattttgaatacttaggtaatggaaatccagatttctagttaatttaaatagtgaacaattattggattatacataatagaattgttcggggtggtttgaaaagaaagtgatgacatttcaagaattctactaagtttttatgttgcttgatgtattctactttcaatctgaatgttatatgcgttagctgtaagttgttgcagaggtactcacagtcttttatccccaggatcttcatcgaggagcatcacccgggttttaact

SEQ ID NO: 38195 - DNA, 697 bp, Arabidopsis lyrata
  Intron number 1 from transcript 898320 (locus 898320) deri ved from phytozome v7.0 (chr-ID scaffold_5; pos 16758675 t o 16759371 reverse strand)
aagctctacactggttgcacaaacgtcatcaacaggtttgtttcaaccaaaatctgataggtgcttcaagttgtgttcttttacatattatagttgggttaagatgttgtagtgatgatgaattgaaactgcaacacaatgtttgtgttattcaatgagccaagaaatagtttctttctttttttgaggttgctgaaaggttttgggattgagactttgctctgtttcgaggttttccatagggattgggagaaatttttagctttagacaccgatgatcactatcctcgataaccatttatagattcggtacttggcttgtttcataaccttgattgatgtgctgcgttattcccgttgatatacataactgacaaagatgtttctattgacgtatctttgcaaacgaggtaggattatgagtagcataattatgtcatctttgaaacttagttccaactgaacattgggatgagactctttgaaaatgtaagtgagttggaataaaactttaaccaggttccgattgatacactggattcggtttgttacaatccagatctcatatttatgcaattttgcatgctggtttgtaattagaacatgatggttatttaagcagttctctcctaaatctgcatttgtttgcattgtacattcagatctccagcaggaccattactttgtggaaaaccaa

SEQ ID NO: 38196 - DNA, 326 bp, Arabidopsis lyrata
  Intron number 3 from transcript 313612 (locus 313612) deri ved from phytozome v7.0 (chr-ID scaffold_1; pos 13046345 t o 13046670)
aggaggctcaggtaaaacatggatgttgttatgtatatatatctgtggtaatcaaaaaggcttgttcttgaagaaacagtaacacgacatgtagttagtgaatttcctgacgtctataattaaaaactacatgatcatagaattcaatccttgtttttgttcataccaaatacattcattggcttaattttgtggcaattgggtttctttgtttcagttaacaaatggccaggatcttgtttatatgaagcttttcttttgggactgatcttgttggctgcgttattgcagctaagcattgggaagcagtggaaggaacttcttgg

SEQ ID NO: 38197 - DNA, 624 bp, Arabidopsis lyrata
  Intron number 2 from transcript 927869 (locus 927869) deri ved from phytozome v7.0 (chr-ID scaffold_3; pos 1083841 to 1084464 reverse strand)
tattaccaatcttttcctaattgcctcttttacaggtaagtagtacttctagttcttttgaaaattagataagaaaattataaaagtaaaattcaaagctacgaattattatgatttaatgttggaaaaaatcgactaagagtatatagtaatatagtataagagaaaacatatggattacttaatgatgaaccgatgaattatatgtaatgacacctttatatatatatatatataaagaatcgtaatgacatctggattgcaatatctagttgattgctccgtgattgaatttttatttttttatttttgttgaatactaagaaaacgccacatggttggaattttatcgatttgtagtttatggaaagtggagttgcttctcatattattgatttagaagaagaaaaaaaaaaagagaaattttcttaaagaattatcaaaaaacaacgggattacttaatcggatcactcagagattcgatttttgaaaaaaataaataaaaaaataaatcataattaggtttcgcatgtgtccaaactgtatacggaacaatttacgtccatttaatgcgttttaaactcattaatcgtttaaatttaaattaactctaaatcaggaac

SEQ ID NO: 38198 - DNA, 379 bp, Arabidopsis lyrata
  Intron number 1 from transcript 312706 (locus 312706) deri ved from phytozome v7.0 (chr-ID scaffold_1; pos 7278889 to 7279267 reverse strand)
caatatcgggttgctcggaacatccgatccaccaggtactttatcatctcttcctctctcactgccgccactcggtaaatagttaaaattcagttctgttttttgttttttttgcttttgtaagatttactacttttgttctgtttcttcacttgtaagtcagttcctttgaatcggaaataatttctccttgtagttatgctgacaagtaacaaaactaaagaataaattgatatagatattgattgagatatcatatatggttcataaaaatcccaaagaagatataagatgctatatctttcggaaaaaagttattattttccgtaagttcttattgttcacgaaagtttttattctctttattcagggaaacaaa

SEQ ID NO: 38199 - DNA, 386 bp, Arabidopsis lyrata
  Intron number 2 from transcript 338203 (locus 338203) deri ved from phytozome v7.0 (chr-ID scaffold_2; pos 2278617 to 2279002 reverse strand)
caggtcagtttcttttttcttttcctgtctgaatatttctttcttgttttggctaagggttgattataggagttgttataaaacctatgttttgtacaaaggcagtacctctaatgatacatttaaagaattctgtttttttctgaacctttcttattagctgtctccttttcctcttctcttgagtagtatttgtgtgtgtcatctttagctttaaaaagtctattttggtttctagctttttgtgactcatagacttcccctgaatagccaaccatttccgagcttgatcgcacacttttctccacatatcttgctttccctctacataattgcatctttggtttgattgttgacaaatctttggttttagtttaggtgttccc

SEQ ID NO: 38200 - DNA, 487 bp, Arabidopsis lyrata
  Intron number 1 from transcript 338203 (locus 338203) deri ved from phytozome v7.0 (chr-ID scaffold_2; pos 2279130 to 2279616 reverse strand)
cttcagatcagggagtgcagaaattcaagctagaggttacaaagcttgagaaacagaagaagaggcagcaagagaaggagaagcaggaacagaagaagcagcagccacagaagaagaagaagagatgagacttgggcagtgtcattgtctttggaagagatgaaacctttttgtctttggctactctgttggattctccaaggataaactctttagtcttttagttttgacagatagactcaaagtgtcctgaaacattgtgttctttggcccaatgttcgatctgaatcttgcttgtgttctcaacaaacaaaagtaactgaggttttgatttgatttccaatggctgaattttcaatatctgagtctctttagataagaaacattaattgcagttttggtgattcaaggtttgcacattttcgtatgatgtttcatgttttcgacttcccttattagccattaaggttccccattggagctgcta

SEQ ID NO: 38201 - DNA, 512 bp, Arabidopsis lyrata
  Intron number 1 from transcript 329901 (locus 329901) deri ved from phytozome v7.0 (chr-ID scaffold_7; pos 12387024 t o 12387535)
ctcctctttggcgtggtggacctgctggacctaaagtaaggatcatgatctctctacccttttcttttaaaccctaaaaatccaagctttaaggtctcctgtgttagatctagtcaaataggtacttgaatccacttaaaatgtaggttgatcttgtgtagttagctcttttgcaagtgggttttgtctcattgatgtgatcatctggtaacattatctatgtagatgtcaatctatggttaatactgaaattagttgatcatagaagttgaacatagctagttgatctctatgttttgttttgattctgtgtttggagcctaactaccaattgatcagagcttaattgtagacccttagttctggttaagattattgttacactgtttatgttgcccttgtaacgaagatgtttcaaaacttgtctctttaactttagatctgtttgatcattttccactatgtgttctctagtctgatcatggtttatctttgtttgcagtcattgtgca

SEQ ID NO: 38202 - DNA, 981 bp, Arabidopsis lyrata
  Intron number 2 from transcript 495766 (locus 495766) deri ved from phytozome v7.0 (chr-ID scaffold_8; pos 17690339 t o 17691319)
ccgtcgacgttggaacaatctatcttggtggcaaggtttcattctttaactttcttgaaatcggatccgaataaagctttgatttttatgtttctgggtttatcttaatcttgcttaaatctaatctctttgtggatttggggaagaacagacatgtgggcattgttagattcaattgttgttgttaaaaatctcatctttttatttgaatcaaatgattgcctatttcacacatttgagaacttttttcttttctttcttgttcttggaaaattctttgcttgtggatttgtgaaacttctttattatgattctttccagatgggattattcttgggatcttcttcttcttcttctctattcaaaagatatcttcttcttcttattttgtattccttattctttgtcttattgccttttgatttttctattttataaaataaaaataaaataaaaatccagctgtttttgtctacctttaaccttttgtttattaagactatatgcttctttattatctcattaagactcatattagctcatcatttttacactgtcattctctttttataaataaaaaccacaatgattagaattaggcctttcctttgggttgttgatgatgaagttttgattttgtttttttgcccttaaaagtggtaaagctgcacatggaaaagctttaacagagatttttctcatttgtgtttcttattgtttgtgtaaatatgtacatttcttttccacctaaagtcagttgtcatgttactatatttagtatacaattacaaaaaagaaactagattaattgtttactgaagataaaacaaacacatgttttaagaatatggagtagacaaataatatggttaaaagtatagtttttttttctgttggtttcaggatccgttacttttgttaaaacttggttgtttcttgtgttcaggagcatcgtgttaaaactgctagtggtgttgtgtc

SEQ ID NO: 38203 - DNA, 395 bp, Arabidopsis lyrata
  Intron number 1 from transcript 915525 (locus 915525) deri ved from phytozome v7.0 (chr-ID scaffold_8; pos 1523335 to 1523729 reverse strand)
gaaattctttttggagaaagtgagcaaatctgaagagacattgtttacatacgttacataatacagttgtacaagagagatgtatgcaagtttgtccgttttaatactaattcttctagaaataagaaaatacaaaatgttgaaacaatgtttctttggaaaagacacaatcttcaccaattccgagcttccatttttgagatcaaaaaatatattttttttattttatatttctaattcattattcaacaatatgtaactgaaaagtaaaatgaggatatcacattgataaacaatgcaacggtattcaattaatctttaattcaagtttttcttttttctttttaattataattttaggtatttcaaacctaaactcgattaatctcagaatt

SEQ ID NO: 38204 - DNA, 858 bp, Arabidopsis lyrata
  Intron number 1 from transcript 478481 (locus 478481) deri ved from phytozome v7.0 (chr-ID scaffold_3; pos 4589782 to 4590639)
tcgagctttcccgcgttatctctctccctctcctggtaatgtttttgtcttcttctagattgttcttccgttactaggtcttgaatccatttccacggatctctgatcttcaatctctgttttcattctctctgatcagttgttgagcttaaatttttctcgattcaaatttacgatttgtgtgtgttttctattaccaaatcggatatcttcagctcaaactcgagctccgatttcgtctcatgctgtagatctcgacttcttcttcttctttgtctatgttttgctgattgtattaagattgccagatactgaatagagagcttacttttacctcagctagggttcgtgtttgttgtacctttagttgctttttgattcttgtcaatagatattttcattgttcaatcctagtttcggattgattgaatatcgaattattcgtattcgaaattggtactaagatctagagattgcgaattttgatacagaagtcatttcgatgtttcagagcttctgtgctagtatccaaataagctgtaaagtggtgcttagctagtttctggtttccatttgtggattttcattcaaatacgaaatgcatatctaatgattcgtcaaaatggtgttactagtgttctgtagaattttcattaaacacttttagttgttgcctagtatcaactcatattgtagcggtagatatgaatcgatctactatacatgttttctaactgtctgttttcagttttctcctccttttggaagtttataatgtcattattttgttgatatatacacatgaatgctgcctggaatattaaagagtttctctaaattggttcaggtgggagcttg

SEQ ID NO: 38205 - DNA, 364 bp, Arabidopsis lyrata
  Intron number 2 from transcript 479325 (locus 479325) deri ved from phytozome v7.0 (chr-ID scaffold_3; pos 7817338 to 7817701)
gtggagcttcaagtattattactaccgacattacagtttggttctaacctttgctcttcctggtacaattcaccttcattttctgtgtgtttgcaaaacataatggaaaagtttccagttgttgagaatttctctaaaagtataaataactattgagtcttacttagactctatgtgttaacactgcacttttaggttttgaagatgggattttgaattgtttgtagaatgttaatggcttgaaaacactggaaaactactcaagtatcatagtttgtgtgattttcacagatgtgggtttaaaaggatgtttgttggtctatgctcagattcctatagtttctccggaggaagcgtctacttt

SEQ ID NO: 38206 - DNA, 755 bp, Arabidopsis lyrata
  Intron number 1 from transcript 941755 (locus 941755) deri ved from phytozome v7.0 (chr-ID scaffold_6; pos 9411754 to 9412508)
tctcatcactggggcacctggttttcttgccaagggtacgttctttctacaccttgtcggttcagtacttcgagtcttgtttttactatattaacgacgtaatgaaaatttagtaatcgattatttgcttcatattatctttgtacctagttattatagattcttgacatgcgtgaaattggttctataattgtacgattggcatcaacatagttttcttatatatggtgaaaacttaacatattgttaatcgtatattcaagacagaaggatatgtagatgtcccgctaattatgtgtttgtttttcttgtttaaatataaaaaatgagagtgatagtgataaaaactttaagatataccaagaatattgagtcctatactgttcatttcatttattgcaacacaatagatttttatggtccaataattatgatacatgcatcttacaaatattcaatgacttctgtatatatttaatttgagaaaacttaataattctgtatcatagtatttgttgcgatggtgaagtactattcatttataaaccagaatggatcttcaaaaaagggtgaatatataaaaccagtatcgccatttacgataatgaatatttaaacactctaaaaagggtgaatgactgaatgcctattcatgtgtagtatactacaagattaatttagtaacgaaaatattgtttttaattattattattttcatagttttggtagagaaaattctaaggttgcaaccaaat

SEQ ID NO: 38207 - DNA, 853 bp, Arabidopsis lyrata
  Intron number 1 from transcript 315886 (locus 315886) deri ved from phytozome v7.0 (chr-ID scaffold_2; pos 13288922 t o 13289774)
gcttctatcttgtgtatcctctttattcaccgctttcttctgtgattgatatcattgtggattgttgaattagtgaacttgcatgtatatatagctccttgtcttatttaggggtttagggttcaattagttcatttgcatttccattggattggtacatgttgattgtttattggaactcttagcttatataaattagtcgacttgtcttgtccattttcatcatttatgttgaggatttggtaagcaaaatgcattttagactttatcatttgcagtgaagagtgatgtaaattgatactagttagtaattgtttgaactgatactttatagaaatttctattgagatgagatatgtgtaactgtgtaagtatagggactataaggcaatgaatcctgacttatgtcgtataatcgcagcaagtaatatatggttatgtgtttagaaaatttaccattttcaatccgtgtgtgtctcttatacattttatttgtagaattgaaactatagaccatctatataccaaacttaggaatcgatgaaagtttgcttgtagttgttgattcaggtagttttaggtagtgatcatgctgatgagtgatggcacattggaataaaatgtaatagtttggtagcttaaagaacctcagattcctgttagtagtgagagcaaatattcaacatttcagtgattgagatgaagttgttgagaatagtttgagctggtgttgttaagctttgattgacatgagtattatgtggatttatgcatttgtaagtgttgataatctcttttggaatgttattttgttttgattgttccttatagagaaatcacagaacggatatat

SEQ ID NO: 38208 - DNA, 679 bp, Arabidopsis lyrata
  Intron number 2 from transcript 474728 (locus 474728) deri ved from phytozome v7.0 (chr-ID scaffold_1; pos 30727932 t o 30728610)
tgttaaccggtaacctattcttcgatggatcttattcattatatatgaacaatgttcaagtatttttcatttgtttttagaaagaagatgttgtgtatttttattgctgctttttgagtgaattacttgtgactctattttgttttgtttggttctgccgaatgtgttctcaaactctaataatatgaaaacctatgagatagggccatctattagaagtagctcatttttaaagctatttaaatggcattgggtaaacatttgggattaattaaattttggtgttgctagatttgattgaaaaatgttaatctgaattgctttactgattatcttcttatcttgagtcaacatgcttactctatgtaaaagcttaaggtttcaggtagccagttccatgatagatgctaaaataaaagttacagctgttgatgaaaaatggtgacttgtataaaagacttatcattgcttgcataccaactcatttattttggctttcgatattatgtactccgttcataatgttccgggatttaaatttcctttctaacctgtttgctgtttcttcaataatgcttctccttttcctgtgatatgcgtggttttaatgtttttcctgccactcatttttctgtgtcttacagaggcaacattggctttgctgaggcacccggactat

SEQ ID NO: 38209 - DNA, 695 bp, Arabidopsis lyrata
  Intron number 1 from transcript 319861 (locus 319861) deri ved from phytozome v7.0 (chr-ID scaffold_3; pos 23522008 t o 23522702 reverse strand)
gccgcactatccccgatattatcggtttgttcccgattcatttcctcaagtaactcgacatttggatatcctctatatattttttgaaaatgaagaaagaaaaggttttaaaatatcatgcacaaatgaaaaatatcgtacgagagacttgagaattaaaatgatactttataaattaacattttattggtaaagcatttttacacttatgtcactagatccaaaatattaacatatatcttcaatatgttaaaaaatatattcaaatatcaattaattaaatacttataatttcatttttacatattaattaaaagtcaaaattgtgacatcaatagctagtctctccattttgttccttccgtgtttcattcatatgccaaataattacgtatttttaaagatatatatgcatgcatagtccactcaatttttgtaggtcgtacgcaattttattaatggtatattagacgtgtttaaattttttttccttaaaattataggtctcaagttatatgtttgtatattctattttcttacagattttttcctttatagagctttgttcgaatgctttaattgcactttagaaaagacgactgtgaatatatatagtaacatacatgaatttatatagatttatgatgtttttatcgtcaggtgaactatcgggttttaaggatttcataccgcca

SEQ ID NO: 38210 - DNA, 328 bp, Arabidopsis lyrata
  Intron number 1 from transcript 311603 (locus 311603) deri ved from phytozome v7.0 (chr-ID scaffold_1; pos 1789563 to 1789890 reverse strand)
ttcttcaccgatcggtaaatttacgaaattctcaaaactgattctttctttctttcgtcttcatcttctcgttactctgattctttgtttcatgaattttgacctttttgagtcaattcacgactcagtttcgttttaatttgagatcctgagtttctaatttatctttaagctctctaaatttagcctttttcagaaaaaaatactcttttttttttttgtgtgtaatcaacaaagttaattactcttttaattaatggctttgcctactaattcactatctttgagacttcaaaaacatgactttgttgttgttattgtttgcagg

SEQ ID NO: 38211 - DNA, 374 bp, Arabidopsis lyrata
  Intron number 4 from transcript 470280 (locus 470280) deri ved from phytozome v7.0 (chr-ID scaffold_1; pos 849496 to 849869)
gaaggtaaaatctcactactactgtgtaattatcaatctcctacccatctcagtaacttgcagatatctagtcattgtatagaatcttatagtttatggtcaacaagttactcttttataagatgattagactgttccgggccgattctagacccgtcttttctcgatccaaacttatactcaggactcaggaggcctttttctttgatgagttgttttgattagattcttcttctgtatttgtaagactcaagaaacggataaatgattgtatctattgtttcctgtcaaatacatatgtgtttttgttcacttttcttctcattgcttctaccaaagtattgacacacaatttttttctccttggaagttgt

SEQ ID NO: 38212 - DNA, 544 bp, Arabidopsis lyrata
  Intron number 1 from transcript 929099 (locus 929099) deri ved from phytozome v7.0 (chr-ID scaffold_3; pos 5504658 to 5505201)
ctcatcctccgccttcatcgccttctaggcaaccggtatatatagatattggcatattgctatttttctcatttattattcaacgatacaagatcaaatagttatgtacatacgtgatacgaatgtgagtgtgtgtgtgtgtctctacgcataactagggttaagttagggttttatttcttccacatcaacgtgaaggttctgattcttgatcccatttttttcatattacacaattatatattgattcttgattggatatttattcagaaaaaaatgctagtttctttggattataattttaattaaattgaagaaatttcatattattttctagttctatatatagctaattaattaatagttctagctagggatcgagtcattctttttcaaattgtttatgatttactaaaatcaaatgcaagcttgttttgtaaccgaagtaattaaacgttggttttttcaagtcacatataagttcatgggaattctaatgtgtaatgcaggtggtcactgatcgctggaaggataccgggaagga

SEQ ID NO: 38213 - DNA, 160 bp, Arabidopsis lyrata
  Intron number 1 from transcript 903697 (locus 903697) deri ved from phytozome v7.0 (chr-ID scaffold_3; pos 3335165 to 3335324 reverse strand)
agttccacaaatcaaagactctcgacaacaaatatgtgagcttttttcttcttccgcaattctgggtttattcttactaatttagcttttgctcctacaaatttgaaatctttgtggactcactactccaaggtttgttctttttgacttttgaacgcag

SEQ ID NO: 38214 - DNA, 311 bp, Arabidopsis lyrata
  Intron number 1 from transcript 342434 (locus 342434) deri ved from phytozome v7.0 (chr-ID scaffold_3; pos 10294396 t o 10294706 reverse strand)
gacgccttccaagcccgtggtgatcgcggactgcggtgagctttcagataatatatctgaaggcaactatcttataaatataattgtaggttgcatggttttgatgtgttttggttctttgttcgtttagttttgacttttggtgttttaaatagcttagcctatcaatgaagaatgataagcatagactatcatttgctacgacgattaaaacaacttaggaatctgttttaagccttattgaatgtgtttttttttttttcaaatacgattcagagctcataggagatatttcagagtgcatcctagcc

SEQ ID NO: 38215 - DNA, 443 bp, Arabidopsis lyrata
  Intron number 1 from transcript 325441 (locus 325441) deri ved from phytozome v7.0 (chr-ID scaffold_6; pos 3319341 to 3319783)
ctgttgaagcagcagaagccacaatcaagcagcaggtttgtggtgttcatatttagcttctctctctttttatatctctgaaattgtttcaaatgagaaaacattaagttttagaagtactttctcaatcacttcatttcatcacttctaaggttccgtgtaagtatctataggtatatcaaagtagctgcagaaaaatgccagggaatggaaatgagttaaggagtatatttgtgttgtaggatccgtttatgaatttccttgtctcctttcattttctactgcaaaatggttggttcgatgtgaatccgtttaaatacttacttgggagatgattcggacaattttcgtccagcagattgattttcttggtcttctctgacaatttttatttttatctctgaccaggtggaagagaataacctcttaaaggctgaacttca

SEQ ID NO: 38216 - DNA, 310 bp, Arabidopsis lyrata
  Intron number 1 from transcript 328572 (locus 328572) deri ved from phytozome v7.0 (chr-ID scaffold_7; pos 4314851 to 4315160 reverse strand)
gtaaactctcctacggaagacacagtaccggcccggtgaatttgggtgtcctaagcaaatcaaagcccatgaaaaaaattattttaaattagatttttaccattaaaaagaatgttttagttgtctctaaaagcgcacaatatttttaaaaggccctacaaaaattattgtatataagaaaacttaacaaatttttaggtaaaaaagccttcaaattttgaggctctaatcggtggcttcggtggcttgccctctgcgccggccctgggaagacatcagtttctcgcagtacggcgagcattggcgagaa

SEQ ID NO: 38217 - DNA, 428 bp, Arabidopsis lyrata
  Intron number 1 from transcript 929672 (locus 929672) deri ved from phytozome v7.0 (chr-ID scaffold_3; pos 7718544 to 7718971)
gcaaagggaaatctcttgttcgtgctttcatgtgagtttggtttggtttggttcttagataaagatttgattttttttggtgctaagttcaacgaagtgagattaaagtttagtcttctctagcaatggattatggtttgtcctcatggtaatctgagattttggtaaagtggacgaaattgaattgtgttcaattctattgaactaagctattccgatctcgggaattcaaatttggctgaagttgttttcgttgactttgatcaattgggctaaagattttgtttttctactggtgttgcattgattttgttgaatcggatcgatatcaatcacattgaaattgagcattttgtttcttcttctcagttttgctggattattgactctttgcttgtcttgcttgattaggtgggattcaggatcaa

SEQ ID NO: 38218 - DNA, 564 bp, Arabidopsis lyrata
  Intron number 1 from transcript 491310 (locus 491310) deri ved from phytozome v7.0 (chr-ID scaffold_7; pos 3158233 to 3158796)
ctggtaaaatctttgtgttccctcttttttcgctgattcgattctcttacacctattaaagttttgttatttcaccatttgacaattttgcttagtaaagttttgttatttcactaaattgacagtttttgattggcctacacgtgtctggttagatgttgcgagggtcttttgttttgtgatgttcatattcgaatttggttttcagttagttcatctattcgccgttttgattaactttctagatcttttgttcaaattaggtcgagtttggtttctgtaatattcgattgctgcgtgtgagtttatactggtgaagagtttggtcttattctaactttactaatcaagactagattacccttttatcagtttttgcttctctaagccagaacctccaaatttgatgacataatagctgttatgtcatcgatgattcagttgttgtgagcagcctgctttggtctaattcatgtctttttagactctctttgttaatgatgatcagagttgtttttgttttctgcagcaaagatattgccagtggtgaagaatcagcatctg

SEQ ID NO: 38219 - DNA, 345 bp, Arabidopsis lyrata
  Intron number 2 from transcript 950092 (locus 950092) deri ved from phytozome v7.0 (chr-ID scaffold_8; pos 16563862 t o 16564206 reverse strand)
tgccattaagatctctcgtgaagttgatccaaaaggtgccagattcttccttccttatatgtttgatatagttgcttttctgaatttactttgttctttcttttgtgagatataattcactgtgatgacatagtaattatggttttatttctatggagcattgtatctatgattgagttgtggaagttgtggaagtttctattcttgtaattagctgtggaagttgtttaaactaaaatgatgttatccaatgactaggaataagactcagtttatgtttgattttggttgcaggttctgtttggctgcgaatgtgattataggttactcttgctggatttagga

SEQ ID NO: 38220 - DNA, 811 bp, Arabidopsis lyrata
  Intron number 3 from transcript 897856 (locus 897856) deri ved from phytozome v7.0 (chr-ID scaffold_5; pos 14770041 t o 14770851 reverse strand)
cagaatgtgagagtgaaacattttgtgctcagacattgtgatggccattcggagagaagtccactctgaaatacttcggtgaatttctaccggagctgaccggatcgaccggatcagccgatagggtttatcaaaaaatataaatatatattttgtgctgatacagagaattttactcttagaatattttaaaattcctcaccagcgctaatcgataaaaatagaaaatgagctactccctctgatttattttaagtgtcgtttacggttatttaacgcatatttaaaaattagttatttttttgtttgttttacttcgcattaatatatcatacattttttcgttggttaatagattaaaacgctatgaataaaactagaaattttatcaaacatcttcattttttttgttcaatatcaaacatctacattaaagattcaaaataagtgttgttttgaaacaaaagtttaaatttataatgatatttaatatgaaaagaaagtagtataataatattctctttcttccattttataatatgttatgactaaaaacacacattaaaaaaattatttaatattttattacaagacaattcaactaatcacagaaaatacggtataacaaaataatttaaaatattaatatatttaagttatatataaaaatttataaaatatctaattaaaaaaaaaattctaaaacatcttataaaataaaacaaaagaagtattatactacatgatccataaatgatatttaactacatgagcagacaataaattcgttccagtcccaggaacctgggct

SEQ ID NO: 38221 - DNA, 402 bp, Arabidopsis lyrata
  Intron number 2 from transcript 930601 (locus 930601) deri ved from phytozome v7.0 (chr-ID scaffold_3; pos 12253746 t o 12254147 reverse strand)
agtgagtcttcttaagatcttgtattcattgataatgtcaattgtttgttcgtatgcatgctccttatcactggcacaatgagacctgtatttaacaaataagctggtgaaaccaactgtagatatgaaatcttatggtggaaataaaaattgatctgtagcatacttgatatattggctctagcaaggagctctttataatgatttccagttttcctttttgttgctcaaattagatcgttggaagaaaattttggagaaaacaaaaagtttgattaggaatttactttttcaatgttatagatctccagtctttaaatgtctgtaatgctcatagattgtaagtagtttccattactaattcgtgtaaccctttattataccccctcagatcagtgaact

SEQ ID NO: 38222 - DNA, 725 bp, Arabidopsis lyrata
  Intron number 2 from transcript 480624 (locus 480624) deri ved from phytozome v7.0 (chr-ID scaffold_3; pos 22008740 t o 22009464)
tccttttccacttcttcttcttcttcttcaccaaggtgcgttttcgctttcaacgccgtttggtttttattggaatttggaatctgtttgctttttttttttttaagttttaaattgaatccggaatttgcgactttgttacttcgtttgtaaatcgtattcttctgtttagaaatcttgaattggctgtgtaatagaaagaatttcaatctcaatttcaatgtctcttattcaccttcgtggagtttttgtaggaaggaattattaggctttttgcttgtactgttaatgaatttcaagaaatgggtttctgatttggtcgaaaggagcttctgggtttaaagaacatgagataaagtgttaatcttttttactggattctttcacaaataaaaaggtttttgctttcatttgtgtgtgtgtgttgtggttgtttgagtctggtgtaagttagttggtaatcaagttttattgatctattacaatctagaacacaaaactaaaccctaagaaagaactacctatcttggagatttcttgaaaagatctctcacaagtgacaacctttaagctgttctccttcccattttatttgtactatgtttatcacatgcttttttgttttgtggtttgtctaagttgtgagcttcaataaacctgtggttattttttttattttctgcaattcctaattttatttcttgtatgcgtgaatttgtatagga

SEQ ID NO: 38223 - DNA, 773 bp, Arabidopsis lyrata
  Intron number 1 from transcript 920210 (locus 920210) deri ved from phytozome v7.0 (chr-ID scaffold_1; pos 5580158 to 5580930)
accgcctcctattcaatataaataccttgctcgtattcaatttcagatcataactaacctttgtttttttgttcttttttttcaaacttttttttgcttctacctaattttaatttttctttttattgtagggtggatgtatggaggggacgatgtgaactggtgtatggaaaatttggacctaattcaatgaataaacaggtgatcttatagtttatatgtacaaagttgatttttttttttttgtatttatggtttcactattttcaccactaatcaatttttataatcaaaaagtttggtttcaacttttgagaaggtaatcatcgatggtttggtatgtttctttttgttgtaaaaagatgaggtacctcccgattttgttgaggtacatgttcttattattttcaaatatgtcttttctcagaagaaacactcaacttttgataacacagttgtcacaaagtcagaaagatgacttatttcagggatgaatcttcagaggaggctaatttttgtcgttaatacaatttaagtattcctctctttagattagggataacaaacttggctgttaaattcaggaattactcttcgttgccaatctctctccccaaactaatatattacatatatggaagtagtaacttaaagtttttggtatcgaggtcattctaaggcactgagattcggactttggtatgtataggatttgttttccatgcactaagatttaattattgtttaatttattggtttttaggtttctttcc

SEQ ID NO: 38224 - DNA, 803 bp, Arabidopsis lyrata
  Intron number 2 from transcript 496438 (locus 496438) deri ved from phytozome v7.0 (chr-ID scaffold_8; pos 20541903 t o 20542705)
gattccacatagagccaggaactcgagagaaagctgtgagttggaggctctttatgaacatttagaatctgaaattagcttaggtttatgatttgatcgtgttatagcgttttggtgttacacgtgcgggagacacgtgcgaagtcaagaagaataaaagaaggaatatcagagagacgcgtggcaggggacgattggttgacgagagaaggccgttagcgtttatgataaagcagaatgttgctcatttcttcatcttatcgaataatttgtaatctctggatttctctagaactttctatggctaggtttctctcatcttgagagctagctgatcatttggtgtttcatgaacgtcgaatcgatcgtttgtattctggatttaagtaatcggagatttgaaattgtgtttatcagaatctattgtgtttatcagaatcgtgagtttgactgtattagatcgagtactggatcattttggactcaatttttttgtggaattttctggctcaagcatgaattgcagactctaattgttcaggatgattttatatagaacctagaggaaacgaaattagggttcctagtttttgagtagattccctgagactctcatgtgagccctagtgatgtttgttagtctgaattcatttgagagaagaatattttctcaagcgttttgagttgttgttgatgtttatgttgtttcatgacattttcttatataattgatgagtttgtgtgttgctaaatcggattcctgtgtagctcttggctgaagattctgctttgaagagattcaa

SEQ ID NO: 38225 - DNA, 310 bp, Arabidopsis lyrata
  Intron number 1 from transcript 951537 (locus 951537) deri ved from phytozome v7.0 (chr-ID scaffold_8; pos 22535527 t o 22535836)
aaatatcccaagatcccattggtagcaataaccaagctatagggaaattatgggaaaaaattaaaaaaaagttacaatagtcaaaaaaatgggagttgggaaattagaagcaataggtcattacaaggtataatgaatactattatttatgcggttaggaatttgaagagttgcataatccaagtggagaatatgcatccaagtggtgcgtcggaaattgacattgtaagtatataattttttctactctaattatatatgatatatgtttgtgtaaataactaaattttttgttctaaatgttatgcag

SEQ ID NO: 38226 - DNA, 667 bp, Arabidopsis lyrata
  Intron number 2 from transcript 326968 (locus 326968) deri ved from phytozome v7.0 (chr-ID scaffold_6; pos 12891065 t o 12891731 reverse strand)
gagttgtgaaggacttagatctttctatcgcgcaagtatgtctctcttttactttctttttattgtttctacaaacaaaatattttacactaataaccttaaacaaacagaaaaaatattttatgcatgattaagcaacagagaacgagtgacacatgcaaaaaaaatactagattaattatcgtccaattttatcagtataaaagcttcgcatctttttttaaatccgtattatttgttttctttttcattcatttgaaataaacaaccatcaattataaagaagatatatatcccaatgagttgattatactttagtttgtgggaccgttcacctccttttttatccatttttgaaactcttgtcctaatatgataaccctaccaaaactatacatatatataatatatgtatatattaattaataatatatatatataatattatgatatatggagtagtcgaaatcatacaaaaaaaccaatatctgtctatatatcaatgattctatcattccagaatcaatctccggccagatctctcatctacaataatagaagttttgaaatattgaaatattgtatataaatggaaaatagatttctttttaatcaattctttttcttctcagttttcagcgtttggctcattcgccactttaggagc

SEQ ID NO: 38227 - DNA, 213 bp, Arabidopsis lyrata
  Intron number 1 from transcript 326968 (locus 326968) deri ved from phytozome v7.0 (chr-ID scaffold_6; pos 12891725 t o 12891937 reverse strand)
tcgccgtttgtggctccttctcttttggtgttgctgtgagtttcttttccttacttttcttttttttttctttgaatacaaaattcataaaaatgaaaaaaaaatttgcatatataaaaaaaaatacttcataattacgttctatctaatttctatagtttttgattttttaatacagactggttatacttcaggtgctgagacaggagttgt

SEQ ID NO: 38228 - DNA, 568 bp, Arabidopsis lyrata
  Intron number 1 from transcript 947275 (locus 947275) deri ved from phytozome v7.0 (chr-ID scaffold_7; pos 19384169 t o 19384736 reverse strand)
tcgtcaaaaacttccaaaaagttgaaccttctagggtatttcagattcttacttgtgattcattgtatttaattgtgatagatagacatttgattatggaagctagagcttttgtttcttgaacattttgttgtttgctttgtgccaatgtcaatttgtaattcaaggcattaaccaattcaagatagctttaaccgaaccaaagagtaagagacctagccaattcagtaattcagtgaacgcattgtcttttgattatatagataatgattgtacattttagcgaatcattcgtccaaaggctttggatttagtccattggttagtctttggatcagctacttggatggatatggaacttatggcatgctcattggttagtctttggatcagctacttcgatttagtccattggttagttagtctttagttatatgtatctgaggccattgcgttttgatttgaacttgccattacttagatctgaggaagaaaatgtacttgtttgatttgaataagttagtgcaattcatggtgatgtaggtgacaccaaaggcgcatttcaaca

SEQ ID NO: 38229 - DNA, 502 bp, Arabidopsis lyrata
  Intron number 1 from transcript 485175 (locus 485175) deri ved from phytozome v7.0 (chr-ID scaffold_5; pos 13630603 t o 13631104 reverse strand)
cttagcgaccgttgtttatactccgccgcaaagtggttcgtttctcaaaaccctaatcttatgcaatctctcccattgttgtaatctcgagctcgctactgctctggttccattaaaaattggatttttcagtatcctttatggttttgctatatttttgtatcctgggctaattgtaaccaaatttggttaagaagaattgttgattcgaattcactttattgcgaatttggtgttggatacattccaatttgacatgcgggtttgtgggttttgtgttttgatatgtttgagctcgacactgattgaaaaatttgttcttttgataggaatttctgatttcggttcaatctcatttgtgaattatgagttaaagtttcagtttttagtactcgtattgtaatgcaatggtgatgcactattagtcagttccatgtttgatatcttcttggctttcaccattacagggcaggagaacagcttgtggggatagagcaagacc

SEQ ID NO: 38230 - DNA, 262 bp, Arabidopsis lyrata
  Intron number 1 from transcript 937948 (locus 937948) deri ved from phytozome v7.0 (chr-ID scaffold_5; pos 15429766 t o 15430027 reverse strand)
attcgtatcaatattcgttttcactcacattcaaggtaatatataaataatgatttcttttattttggattggtttcttataaattttaaatgtattgattatagtactaatcataaaaatggtttggttataaaaaggaaaagaaggagaaaataaaaactgtgaaaggcttaattaacaataatttttttgtgttaccatttgtttgtgtacaaaattttgatctaaaattttttttctatggttgatataaagtattag

SEQ ID NO: 38231 - DNA, 706 bp, Arabidopsis lyrata
  Intron number 1 from transcript 316828 (locus 316828) deri ved from phytozome v7.0 (chr-ID scaffold_2; pos 18637604 t o 18638309)
ccagactcttactctgccgagtacattagtggcgggtaattttgaattttataacaaagctgaaatggtcactcaaaaattagtccaaattacaaagcaattcctagaaaagcttatagttagcttgattcaacagatatattattatttaaatataaggaaaattccataaaaatatactaactttttttttccatataaattagaaaaatacactaactcaaaagttcttcctattaaattagaaaaaatctcaattctaaataatctccaaatatgaaactctatttccataaccactaaaatagaagaaaaatgaatctttttaatttggttaacgtatatgttacaaactgagtatacggttcaaagattgagtattaaaacaaaaaatttgtttatggtacgcaaaaaaattgtgtatttttatgggaaaaaaaatgtttgtgtatttttatggaattttcccataaacaaatttggaaaaattgtaggtttacaaagctaacaaacgctatcattttcgtctaatcttcccaatttatggtttcttgtcagttgagggtaaatttttcgtccggaaaattttttagcgagataactatttttgaaatggcggcaagtgattaaacctttaatagtttcttaaataatgcataaattggatccacccatgtgcataaacgttacaaaactggcagataca

SEQ ID NO: 38232 - DNA, 356 bp, Arabidopsis lyrata
  Intron number 1 from transcript 489752 (locus 489752) deri ved from phytozome v7.0 (chr-ID scaffold_6; pos 18552893 t o 18553248)
gatctcctcccattcccgctcataaatccgttctggttcgtttcacaattcaacaacttaatttgatttgaatttacttgcaataatcaaaatttagggtttgttacttagaattatttggctaattgtgagatttagggtttgttctagtgttcttgaattaagaagatgcaggaactatgttttaggaagagtagtgttttttgtgtacttgtgcttttaatgatgatatgtgttgatatgaccgatgatatctcgcaattgatcgattctaaaatctcttttttagatgttgtttcttagaaaaactatgtgaatattgctggcaggtgagtcgttcgccagttttcaaagca

SEQ ID NO: 38233 - DNA, 404 bp, Arabidopsis lyrata
  Intron number 3 from transcript 490753 (locus 490753) deri ved from phytozome v7.0 (chr-ID scaffold_7; pos 713658 to 714061 reverse strand)
cgaattggggtcggcaaggtacaacaaagaaccattgtgtttcttttttagattccattgtcttcaattgcattgtcttcaattgcattgctagcaaagtttaaagggctctatgactttatgggatggctttgcttcttgtatttcgatgtaatgattcagctgattgtttaactgacactgagcaatgcagctttgatctgaccatgaatactatgatatagaagaaaagttttgaccttttggattgctatatagtgaatttacacttctcttcattgaagtgtttgttagtctcttttatttttctttgtgattagggtgagcaaatcagctgtacctaaactcttgatgtccaaaactggtcaggttattaggggtctagaccaagggattcttggagg

SEQ ID NO: 38234 - DNA, 314 bp, Arabidopsis lyrata
  Intron number 4 from transcript 496440 (locus 496440) deri ved from phytozome v7.0 (chr-ID scaffold_8; pos 20556108 t o 20556421 reverse strand)
ctggggcttttcagaagctacggcaatcattaacggtgagtcttcgttccattaactaatttttcatgagttgtagggtttctgaatatttatgtatttctgttccttttagcaataatgtaataggaaaagtcagttgaactagtgttttgcttagtgtattctggcatctaggttttactatgatttcatttttctggcctaatattcttggtattggacaagtactttcttagccttcccggaaaaatttgactttcattattttctcaaatgcagacattgttaaaaaagttccacaaaggccccccaaa

SEQ ID NO: 38235 - DNA, 493 bp, Arabidopsis lyrata
  Intron number 1 from transcript 931493 (locus 931493) deri ved from phytozome v7.0 (chr-ID scaffold_3; pos 21350255 t o 21350747 reverse strand)
cgagacgcaggtggacttcagcgaatttcaggttaggaaaaatggatgattcctagattctcttaacttgcttctaataagtctggacataagaaaattgcatgagagaaaaattcaggagaagatataagtttatgtttgcttagttaactttgataaagtatttagagaaaggtgtgcttgaattttttagtacgagagagagttcaatctcctcttttaattgcttttagcacgaattcatcaattgggaaacattatcggagtactgtatagttccgaatttgatatttatagataggcatttgccaagttcttttcttttagatgtaatgtaagtatgattatatcttattgtccttgatgatatttactaagttttgagcttgaaacggagtttctatataaatacaaagaatatttatcttgagtattcaaatgtcaatctttgttgaaagttgctcatatatatgccaggactggcttgagaaac

SEQ ID NO: 38236 - DNA, 440 bp, Arabidopsis lyrata
  Intron number 1 from transcript 934625 (locus 934625) deri ved from phytozome v7.0 (chr-ID scaffold_4; pos 18804963 t o 18805402 reverse strand)
gcttttctgatcttaatccttctgagaggtacgctttgtctgatcgtcaataatctcttttttttttttttttcctcatcaataatctcttttatacatgatcttgcgtctatatattcgtcagcttccattttcgtcttccactatgtttctaggattttgtgttacttttgttagaaaactgtgatttttgtgctagtgtatgtttctccaagatcaatggaactcgttgcctaaaattcttgattttagttgataaacatcgaatggttctaattggctttcaatctttaaacctttttgattatggtatatatccaaagtttgatccttttgatgcaatctcaccgcaatttctcaggatttttgatattgttaatctcttttgattttttttttgtgaagcagcaaaccttctctgtcacatttagctccattag

SEQ ID NO: 38237 - DNA, 560 bp, Arabidopsis lyrata
  Intron number 2 from transcript 484186 (locus 484186) deri ved from phytozome v7.0 (chr-ID scaffold_5; pos 1014748 to 1015307 reverse strand)
ctaattctggtaaagtttccttttttcttctccatagctctaaagtttcttcttttatccaatttcattgcttcttaagtttctgttatgaatccaagctcttgttctttgtctgacatcttcaaaatcaaacctttcgaaatacccatttctgcttatgtctgatttctctgtgtacttttggggttagatgttggaaaaatttggtgtttgaatctatgttactccattatctcactatttgactgtttataggattgttaaagcctcaataattatcttaaatttgattttagatggttaaatttggttaatgttgattgttgagattgaaattcgaaatcttcctttaagtctaattagaaatcaatttcattgaattgttaagttatgatctcacaggttggctgtttttaggattgatttaagatggttggattgcttaatgttcagattgaattataaaccaagtaatgatctttcgtttaagtctgacttatatggttttatttggatcacttttagcttcgttgagctcaagagtttcaagcaagacaagt

SEQ ID NO: 38238 - DNA, 1029 bp, Arabidopsis lyrata
  Intron number 1 from transcript 923368 (locus 923368) deri ved from phytozome v7.0 (chr-ID scaffold_1; pos 25716664 t o 25717692)
tcgcgtatctcgtcttaacagcttttctacttacggtaagcttcctccgagtcccatttctcgatttgaagttaattctccgttgatctgtaatcgaattaggtcaaagctaaacgaagctagttacatcttgtggttcaagttggccatttattttttattgacagtgtctgtgtaatcgatttagaaaagatgcaatctagatgaatttggttgatgttgttcatttgcgtcatgtttaatttagtgataattaatgaaagtcaatcaaaaagtgaagacatttgatgtatgtgttaatgattcacatgatttgtcattacgccaaatgattcatgactatggtggatatcaggtacaattgcaacactagttacaagaatcactaaaacatgtctacctttttttgatcgagtaatgttagataaaaagctgggaggttatctcttatacttggggtttattgcagaaggacagatcatctggtaacttctttgtctcaatgtgtgttagtgtgtactcgttgcttattatacactcgtaatagtaatagtagaaatggtttctttcagacactatccatcttagaagcttttgttttgtgatatggaacagtggcaaggagtggtgtatcctcttcttttgatctatctcatttatcccggatctttggtatcgaacttgttattgctcctcaaaacagtggaaggtgtagctccttcctttagtaacatcaaaagctttgtccaaaccttcggtactgacaggtgcatctaatgtttccatttggcgcaattttgttgtggtaatcatctatctgttcgccatctctttcagcctatctaccaatctttattaaaactacataagatttgacttgctaattaactatatgcatcaatgtggtttatcctgtaatacattttcctactttttttttttggtacaagcaacttatgatctgttttagagctggcatttcttgtgactgcaggcactagtaactgaggagctggttttcccagcttg

SEQ ID NO: 38239 - DNA, 1036 bp, Arabidopsis lyrata
  Intron number 1 from transcript 471340 (locus 471340) deri ved from phytozome v7.0 (chr-ID scaffold_1; pos 4775307 to 4776342 reverse strand)
cctcatttctctgagaatctggtgcttagcttttggtgagctctctctctctctctctctctctcttatgaaactcaacgatttctcaattgcttgtcgtcgattctcttagatttgtccttaatactcgtagatttgttcataaatcgttttctgagcagttaggtatgggtttttgttgccgaatttcgattttgaatctgggtgatactatttttgaatgatgtgatgagtagattcgcttatattttgttcttttccgtgatttgtgtattgtttgtggctaattttggttatacttgtcgttgtgttatcatcggtggtataatttttctggggttttaggttagtttgattatgtaatcggactgttttacttaaagatttatcgattgtagttgtgatcatgtttcgttgattacgaagaaaagaagttttatgctcttattgttgtcgcttgatcgattttcacgattttcagtgtcttggtgcatgtgaattttgatgcaattgagattgtttccttttttatttacctgtctgattgaacaaatctttccatttactccttgttgaaatggtttaaggttcttagggggttttgttggtatcagggtatttgctttctgatttcgtcaaaaagatgttgacttcaaggttttatcgctttatctagcaaaataagtcttaatcatttgcaaagtcaagagagtttttactttgtttatttcttccacgtttgtacttcgtggctgattgagagagactaagtaaactaataaattgtacaattttgttgcgtgtattattttccttcgttatctgtttgaggaggactgagtaagcctatttttagtcacttagaccttttacaaatttatttcatgtttcagcattcaatatggactgtctgatattaatatatgtatattggttgacttgtatgggtcttgtaggtcatctgctttttcagcttgattgtcgcttgattctaacttcctttgttttatgtttatggtgtcaatgaataggtaaa

SEQ ID NO: 38240 - DNA, 680 bp, Arabidopsis lyrata
  Intron number 2 from transcript 496224 (locus 496224) deri ved from phytozome v7.0 (chr-ID scaffold_8; pos 19692329 t o 19693008)
caaagcccgtcacgccttcaaggtgatcctcgattttacactttcaaaccaaaaaaaaaaaaaaaacatcgctttcatcattaagaacttttattcttgtcgtttattagtttgggactattttcgtgtgtgtgtgtttttttttatgtataacgaattggcttttttctggattctggaacagtgatgtgtctggaattgaacaggactaagcactttggtcttaatctcgttagttgacattactgtgcacgaccgacatggtctaattttatatttctttggcattactgtggattaagcaggctcgtctgaattttgtaatttggcattattgtgtcgaccgacatggtctaatttggattatcgtggctgttactaatctttgagctaagtttggttgtgttctgattttgttgactgttgttgccactgcacccattattttgtgtgtttcaatgttggttattcatgagcttgcttggtatctttcgaagggttatgattttgtatggtggttctgatttgtggctcttctttcagttgcaaaaacctgtggttgttggtactattcatgcctttttgattttgattgatcctgaacttctgttttttctttttttttttcgtttgtgttgtgggcagattagccgcagggtttttgagttaataagaagtga

SEQ ID NO: 38241 - DNA, 527 bp, Arabidopsis lyrata
  Intron number 2 from transcript 477494 (locus 477494) deri ved from phytozome v7.0 (chr-ID scaffold_3; pos 673460 to 673986 reverse strand)
aattcgaggctctgtgtggctttatacctcttcaggtatcacattgctatgttatcactgtacttaatcatttcttaattattttgttttctgtacataagagatgaacctatgcaatggcccacttagtttcccaatttcgacaggtgtaacacatgttgtttggtctattactctaaattccatgatgagttgatggctgtagtgtctcctctattgctctaaactttgagtctaaggtttgagattggatacgctgaacaagtatttctgttggttcatgttgttgcacatgattcgttctttcctatttttttcctctggatatatttcatatatgaacacattaccaaaactttggaaacaacttaattttggagagcagctctatgaaatctctgctacatgttattcagttttcaaaactttaggattgttagcttatctttcagaattgaaggatttaagtttcttcttgtaataatgttgcaggagcttaagagtgtcattcaagctattccggagat

SEQ ID NO: 38242 - DNA, 769 bp, Arabidopsis lyrata
  Intron number 5 from transcript 488353 (locus 488353) deri ved from phytozome v7.0 (chr-ID scaffold_6; pos 6140161 to 6140929)
attgggtggttgatactccaagtaagcttactttcgtcccaagaaaagtttgtgagctgtgaaacttgtttgttattgttagcttgcagttaatttctgactggcttattagggttcgttagatgttcgactgtgcattgtgatagaagtgacaaaaggaaatcacttttaactttttatttatctcgaagatctaattaatatcccaatttagcgaaacattataggctcttgattggtataaataatttcccaaaattggtgatcatgttggtgatgaacttttttacgttttcatgatttagaacattcacctatatactatagtaatatttttccaaaatatacattaaaaaaaatgatcaataatctactaaaattagtttttagcgttgtatgattatttcgctgatactctgttcagctgtgtttctgtcattagatcatttgtttatactactatataccattcaagctttgtcatttgcataatgacttcttatatcggttattcggcagttctgcagccaaattgaaagattcttttcgcttaatattgttttgatcattctattgatccaaaaatttgattcgttttccacattccgcagtgttaccaaacaaagcagtaatagtctctgttttagacttgatgagaccctatgtttttaatgaaattgatttatatgttcaaaaaagaagaatgaaattgatttgtcttatctcaaatgcagtgagagatccaaaaacctggctagcgaaactgaag

SEQ ID NO: 38243 - DNA, 299 bp, Arabidopsis lyrata
  Intron number 3 from transcript 471732 (locus 471732) deri ved from phytozome v7.0 (chr-ID scaffold_1; pos 6483764 to 6484062 reverse strand)
gggtgcgtttcttctttcgatttctgtttttgactttatgcacaatgttttcgtatatgatcgatttagatttgagattctgtttgatgcgttttgttcctgcgttatttgctacttggggttcatgtttatgatagataaaccctaattttattgcttgggaggaattatggttgttttgatagatctctgaaagattgatatggaaactagggaaataaggatgtgtttgggcaatgatcacaagttatggttttgtaacagagcagtggctgcgtgggttgctacagagaacacag

SEQ ID NO: 38244 - DNA, 715 bp, Arabidopsis lyrata
  Intron number 1 from transcript 894629 (locus 894629) deri ved from phytozome v7.0 (chr-ID scaffold_6; pos 12451417 t o 12452131)
aaggagatatcagctcgatttcttgtctcgatctggtgagttgaaaaagaaaataatttggatttgttctttgctaataatcttgatttgagatttgatttaatgtatcttgattctaatgcaaaaatcgtcaatttgtttttcttttaattgatcaaggatcgaggttgaatgaaagagatttgacatttttgttactgttctgattttccgacaaaatgggacaagacatgattgtgtcttggtctgaatgttcaatgtttgttttgctgatattgaattggaggaaaatggaaaaaagtttttgtctttgaggcattttttactcatgtgaggctttagggatttgattaaacgtgtgtgttttgtttatacgaagattttgtttttaggtttaggtatgaacttgtcaaaagttggaatcttgatgattcttgtttgaccaacaagaaaatacaaaaccttttgatggtaaaacgttttcgaagcttagtttcatctttgccaaggaaggttttataatctactagtttctattcgtttatgatatctttatgttccttattaaactcatttgtattggaactgcgagaatggaacgcgtttttagtagtcccatttattttccttggctttgttttgtagctgtagcgtttcggaatgttctcttggcgttgtagttttgcggtgtttgactagtttcttcatttgtaaa

SEQ ID NO: 38245 - DNA, 580 bp, Arabidopsis lyrata
  Intron number 4 from transcript 936941 (locus 936941) deri ved from phytozome v7.0 (chr-ID scaffold_5; pos 10111154 t o 10111733)
tcgcttcaaagatttcttgagaagagacgggacaggtatgcaaatattcagtgcttgttttataaacatattgatagtttagggagtgtttgtgtttatgaatctggtttgttagtttttttgttaagttaaaggtaaacttatctttactcactaatttgttagtgtttgtgtgtatttctgagtgatacattagacgttgttgcccatctttagtgtaggttttatgagcttgaatttgaactaggcttgtgtgtttgattttggtaatactatgttgtaattgacaataacttgttctgaagatgttaaccctgaatgcaaaagtagccttctatctattaagtgacatcatcagatgatttcaatttagttgattgcttgaactgatgtttctatggggctgaggttagttgatagccaaagcggctgtaatattgtaatggagttgctattttgttcttctcactgttgcatcaataagttcttaaaatttgggtagattatcttccatcattcataactagctcaatgggtcttcaatgcttttttttcttctattgaaggtccacaaagccag

SEQ ID NO: 38246 - DNA, 469 bp, Arabidopsis lyrata
  Intron number 3 from transcript 478579 (locus 478579) deri ved from phytozome v7.0 (chr-ID scaffold_3; pos 4928764 to 4929232 reverse strand)
acaccgacaagttaaagctaaccgctttccaagaggtaactatgtgacttttacttgatctctgaatcatccatcgttggttatgttagctttcatctttaattgggaagacatttgacatatctttgtatcacttcttctgttcacacaaatattgctatatgaggtgatattcatatgtgtagttaatgttgtattgattctcggctcatgtgtttctacgcatatgttattcatttgtttcttatattcgcctcgagcaatgtataacttcagattagcagagctgttatagattatgatctggaaaactggaatagtatggaaacacacttcacttatttgcattcaggtttttgagtttgtttaaccaccaaattgattattttgcatttagttttcatttttctatatgttttcccccataaatctcatttataatcatcatctttttctttttgtgttgcag

SEQ ID NO: 38247 - DNA, 344 bp, Arabidopsis lyrata
  Intron number 2 from transcript 478579 (locus 478579) deri ved from phytozome v7.0 (chr-ID scaffold_3; pos 4929263 to 4929606 reverse strand)
gatttcctggttcttcatcaaattgaagacaaaaagtaagtttctttgctctctcttttttttttggtgataattagggcagaaactggtcaacgattttattcgagttacaatcaaaggaaaaagaagacgatttatgtgttgtacggacaaatgcaaggttttgggtttttgtctataatgagtttgattctgtaaattcatttctatctgaaaatctataaatatataacaaaacattcactttgattattaaaaaaaaaaaaaaaaaaaaaaactgtttgtggtatgttattagtctctagctttctttcatgccttaaagtttcttgtattgattaggt

SEQ ID NO: 38248 - DNA, 585 bp, Arabidopsis lyrata
  Intron number 1 from transcript 921800 (locus 921800) deri ved from phytozome v7.0 (chr-ID scaffold_1; pos 12076237 t o 12076821 reverse strand)
tcacttgagctctttcaaagcttaagacaaatcaggtgactcaaaaagactgctcattacttttgctagtgctaactgatggtaatttgtgagaaatagacttattaaagagactgcggttcaagtttgagttgttagttgagcaactctattgtcttcttcgcttattttattggcatcttcttggatttattgcgtgcagtctctgtgattgtagtgttgctggacacccagtataaacattcagaagcagacacctattactttgatgttgaaagtaatgagaatttgaagttttctgcacagaatctgaggattttttttctgcctctctatgcttacttttctgctttgctgattggtctgccacgtgctaagtcttgtttgtttgagagaatacttcatttctagttattggaaaggattttgttaaacttctttgtgtaccttgtcttgcgtaatctgagcatccgttgagtgtaaatgctgatggcttgatataaaaagcctatcttcttctgaattatttctccccaattttaatttcttatgcttatttgtttcattgtgtagccgatttggaac

SEQ ID NO: 38249 - DNA, 373 bp, Arabidopsis lyrata
  Intron number 2 from transcript 476239 (locus 476239) deri ved from phytozome v7.0 (chr-ID scaffold_2; pos 14775255 t o 14775627 reverse strand)
tagtgctttggattatcctctcattactcaaggtatgtttaaattttaattctttctattttaatctgaaactatacaagaaactagctttaggcttgctttgtgattgtgattcatttgcactctagatctttgtttttgagcttgttagcttcttgagattgcagtgttcatgatatactctagaatcaatctactcttattttggaaataaagtagaaatgtaatcactttcattgatgatgacactgatctctttatggcaaatattgttgctttagaactttattactcaacagcttctgtgtttgtcttcatctgacctggattctaataaattttcatctctcatgatttctctcagacctatctc

SEQ ID NO: 38250 - DNA, 604 bp, Arabidopsis lyrata
  Intron number 1 from transcript 899499 (locus 899499) deri ved from phytozome v7.0 (chr-ID scaffold_4; pos 780076 to 780679 reverse strand)
ttgaatttacgcattccctgtttcttctccggattatgtattgttttgctctggattcgaattaggctagtctgaaaatggattcgaattaggctggtctagtttgctgttgttccaattttccactttttgattactttacttgatttcgtttctcgtttaaaagaatgttgaggattatgaatggcttatcaagatgtccaggactagtatgaaggcaacgcagtctgcgtcgcagctaattccacgctacttcaagttcttccctgtgtattactatatcttggttcactttcaagatgtacaaactctgcttaatcaactaaagtgactgatatctagtgcatgtttagtcaagtctcctcttgacattatttatgatttgaaagaagtttccttaacaataacagaggaagtgatatgaaaatgtgataatggtatggatatctattactagtaagtgttggttgtgttgcataattgcgaagatgaacctaagtttcttgattgcttgatatgatactactatctatcccgctgtgtatcgatgttctttttagttgcatatcactattcagcttgacatgttctgtggcagtagtgt

SEQ ID NO: 38251 - DNA, 663 bp, Arabidopsis lyrata
  Intron number 1 from transcript 894802 (locus 894802) deri ved from phytozome v7.0 (chr-ID scaffold_6; pos 14038436 t o 14039098 reverse strand)
ttacggaacaatacttgatatcattgatcagaagggtaaagatcgactcgatagtcctctttagtggattgcatatttttgaatctttcttatttttataaggatctgactatccaattcgactgagatgtcattacttctactttcaagtgtgttaatgcgtttcttcccaaagatcttaatatgcaaatatttgtcatcaaaactttgggcatccaacagccaataaaagatgtttcaagaatgatgaaagttatgatctaggtttattttctaattattttttattctgaatattttctatgtacaatttactaataaacatgtattttcatttcaatggtggagcttttatggagttgaaattcctaaacttctaacaatgacgaaaaatattatgtttttgacaaatgtgagcgtaattggagtactttcgaaggggtatttactgcaaactacaagagatatgtttttattattaataaattaacaaatattgttgatttgttctcatttattagattttattaggtgcacaccaaaaagcaaaatagacttgatacaaaatggttgaacaattttgtttatgttcagtttaacatgagattgttggtgaaacgaagaagcagaaggagaagaatgtgaatatactagttgcaggtt

SEQ ID NO: 38252 - DNA, 507 bp, Arabidopsis lyrata
  Intron number 2 from transcript 946804 (locus 946804) deri ved from phytozome v7.0 (chr-ID scaffold_7; pos 13174332 t o 13174838 reverse strand)
accaggtgagattttctaatttaccatgctcgagtcttctgaatcgtaatgttcattgagaatgatgacgattctaatgggcaagaagagtatgtgatatcattgaaggaaaggtatgtgaatcaactgactctatcatcagtatcttgaaatgttggtgatggttatgactaacatttctctctttctttaattggagcgtcatcttgtgcttggtgtgatttcgtgaggctataatgctgctactgctatttgtttttggtaatggtgaatgtgtaaataatctttattattgttgttctgtctagatacagttgctagcagacttaaacttgaagaaaactcccagctggtggagttggttgctgatagcaatataaaattactcactcatagtgaaaattttgactttgttttgagcacaaggtacgactgtttgttgcttctttaatgtccaatttattatacatgatgggaataatctctatgatttcatttactttgaga

SEQ ID NO: 38253 - DNA, 557 bp, Arabidopsis lyrata
  Intron number 1 from transcript 941565 (locus 941565) deri ved from phytozome v7.0 (chr-ID scaffold_6; pos 8529083 to 8529639)
ctcggatcaaaaggtaatacatttcttcaagggctcttttccttttgcctttttttaggattattgcttgtggtaagatgtttggctaaaaagaaaacatatttgggtcactttaaacttgaggatggccatagacgtttgaattcagtatatttttgattatggtggtttgttgtagaagatcaaaataggataaaccttgaataatttacggaaaggaaagttgaatctgtagaagcaggaataccagaaactggtcatatatcaaatattaagcgaatagtcttcttaatattctcatatctgttgaagagattcttttaaggtctagggttctttccccaaaacccttatatgagtcttgaggattaacaaggatatgtgcataagtaaggtggatactatttgaaggcctttattgttaaaaatggtttggaaaatgcagattcttttgtcatggtttggtgtagtttaatgagatttcaacattgtttggggtgatggttcttgctgaaaaccttaataaacataatgcacacattggccttgtttccagg

SEQ ID NO: 38254 - DNA, 581 bp, Arabidopsis lyrata
  Intron number 2 from transcript 909881 (locus 909881) deri ved from phytozome v7.0 (chr-ID scaffold_1; pos 547111 to 547691)
aatttcattcctttctccaccatcccaacaaggtatctatatctacataatacatatataaacagaagtgttgaaacattaactagtggctgactctatataaattcatttgaaggatgcatttgttctctgcaaactagtgaaaaagacaagaactagacggagtggcgccatctcagaggatttcccggcggctttagatcagtctctcacttcagaccctatccttcaccactcccaggttacttcagaagttaaaatatgggagggaaacaaatcattaaattcgttacaagattaatgttggttcatacttcaattttataaaccaaaaaatgttttatttataacgtttcagccttaattattttcttaaaaatgatctataattaatttcattttttaaaaaggaagttaaagttttaaacaatacttttggttaatctggttcggtctttattacaagttgttcagataaaagtcatagaattactgtatttcctgttttgtttaaagtttaagattatttgatttgatatgaagtttataaccaaatttgaaatatatttgactatttttag

SEQ ID NO: 38255 - DNA, 678 bp, Arabidopsis lyrata
  Intron number 1 from transcript 942372 (locus 942372) deri ved from phytozome v7.0 (chr-ID scaffold_6; pos 13030757 t o 13031434)
gcctcagcctctcctttcagtctctcctcccacaggtgtctctgaacttggctctgtttggtgtcttttgtgtcgcgtggtttggtcgagttttgatttttggaaattcatgtctctgttggcatcttctgcttgaggacagtggtaggattattaggagcttgtttttctagtggctggtcaagttttctcgtccaactggttgcatattttcccatttgttgctgatgttgtgttaacaagttgaggttctagttatcggtggtaattagctctccgctcctttgtgatcaccgcagttttcagtcctttggtttagttcaaggcctgttctctgttgtggcttcctgttgtttttgcctctgtttgaagttgctatgttttgcgtcttcgcctcttccttgcgatttgattgtactttagaggagctagtagggctaatggcttatggtgtggtattagtttttcttattttgctctgcgctgctgacttcggggaatgaacttggttagagggagctagcaccatttgcataaattggcttgtgaggttccgttcagggaaagctcatcgagtgaaacaacaaagcgcatctcacatgacgcagagagagtatgtgattgatgatttggtgttttcaagccgttgacggctcggtctcggacctcttgcgaaag

SEQ ID NO: 38256 - DNA, 992 bp, Arabidopsis lyrata
  Intron number 1 from transcript 938355 (locus 938355) deri ved from phytozome v7.0 (chr-ID scaffold_5; pos 16979226 t o 16980217 reverse strand)
ccgtcgaggtgagctcccataatcattgagtttggttacatttcagtttttcattattttgctaccggaagtggaagatattcttttgtcccaatgttggattgtgccatgggtttgttctcaattgagggttaggcattatttgtctgaatttccagtcctttcacacgttttatgtagttcaatggttatgtagttttcgtattctaccatgcttgtttgcagagctttattaatttgcttaaatggaagtagttggaacattaatggttatcaattctgtgactctcacattgtttctgggctttgttcttcgtagtttcttgtacctatatttgattttcgtactcttcatctattaatattgtattggttgcattcattccttcttttttttttgtcttgaggtgacttgaatttttgagacaaaaggttggttacagatatcaagaaatagttgaattatcagggcaactttttgtttgatcctgttaacatcttaagccagtgttatatgcgctatagtatgaagtattatgggaaaccaatttacgctatctcgatgagccaagctgtaattgttgttctacaaaaatttataccgtttagctaattagttgttgtgtgatcactgatatcagagctgtatgtatcatgcttctctccacctggaaaaggactgtcaaatatttttcattaattctgttttctgtttatgaggagaacataatacgattgaaaaaatattctttttgtcttgttactgatggctcatcaatcaccacacggtaaataattatgttcattgcttctctcatatagcattatatatcaagctaggctagccaaaaagttcctctactaaatgagtgcttctggatgtattgcgtgtttcttcattccgcttgtctggtattctagcaattaagtgaaccagaatccttaatttatttgcaggccggtgcttctttggaatcgcttgctaaaggtgc

SEQ ID NO: 38257 - DNA, 1008 bp, Arabidopsis lyrata
  Intron number 1 from transcript 337082 (locus 337082) deri ved from phytozome v7.0 (chr-ID scaffold_1; pos 25518288 t o 25519295)
agttcttcacccctaagcttccttccatcggagaggtaatgatattgaaatagatttctctgttaaatctgaaacgcagattcgatttccaaatctatttgccgatgttctagcttgattatcattgattatcaatactattatcacttgaaaaatttcccaaatcaataatcaatcacaaatacttcgtttcatcttattctttgatttttgattccctgggattatcttccccaatatgcaaatcccttaattgattagagatgtgaatagatactttgtgaagaacatggtagatcactccatatcgaaacctaatttcggtgagatctgacttcaacatgtagccaacgatgtagttttgtttttcggaagtgatggcaaaacgagaaaggttactgtaataagaggtgaatcgaaaaccactaattgtgtcccatcttttgtaataatcgaatgaaattcattatattccgaaaattgattgtgaaaaagtgttagtaatggaaagtagatttgtatattaaatcaatcatgtcttttttactttaagaaagtattttatggttagaatataagtgaaaaatctcattttctcttaagatcctctttttatactagtgtctttgactagtgataaaagagagatttgaccggagtaaaacacactccctttagtcgattccaccctgttttcgtgttattacgtcctttctctgttgtttatcttcgaagctgctagggttcttatttgggttctatcgttttgcaagattcgtgttgtctcaacttgaaatttgtggagccactgctttcatgtttctcctgtggcggtcgggtttcatctctgataggttcttcaagtttgtcggctcgccctaagtctctcagatccagtggttacaattcgttgtggttcctctcgtgttgaagctgcgttctgtttctggttgtaagtttgtggtgtttgcagcttcatttgtctttgtttgggttcagatccatcac

SEQ ID NO: 38258 - DNA, 457 bp, Arabidopsis lyrata
  Intron number 1 from transcript 474951 (locus 474951) deri ved from phytozome v7.0 (chr-ID scaffold_2; pos 497606 to 498062)
tcttcttgaactcgaggctcctattaagatttgtggtattttcaaccaccaaccctaacaattttgttctctcctcttcaaaatttcctttctacgagaatttatgtttgattatacatggaactagagattgattagctaattagagttgttgaaatttagagaaatgcttatgaatcatattggtcaaactcgtgtttcttcgataggagagatttgtataaatgcatatgaatctgttgtttacttggtcagttatcatcagtgagatactaaatgaagctagaaataatcactggtcattgtatcgatctttaatttcggttaatgtgttcttttgtctccatatcagagattcagagctgatactgtattgttctgtgcacattttgtatcattttggtgaaatagcacttttataatgggggttggtttcatgttttaacaggagatactc

SEQ ID NO: 38259 - DNA, 523 bp, Arabidopsis lyrata
  Intron number 2 from transcript 473885 (locus 473885) deri ved from phytozome v7.0 (chr-ID scaffold_1; pos 23617629 t o 23618151 reverse strand)
cttcttcaatcgccgcctaattgcaaatccaaatcgtaatgcttccccctcttaatccaccattgttatcgtttcttcccacgatgtgatcatattcgattcgttatcgagattcttagattctcggagttttttcgcttgtttcgatgaataatctgcgtttcacatttccagatcatttgattgcgtttgattttttgtgctcattctcgttttttttttttttttacgctggatttgtccgtgaaggagagttttgaagacgcattgtgattctgaatttataatggtcgtcgaatttgaatttttggtttgaagatctagtttgatgttttcttcggctagatcgtttttgagtttgattccgtaatgtagatcggaatgttactgcaattgtaggagtctatattggacctatacattgaatttgactaacttggaaatcaagttctagattcttcagaaatttagaggtttctgattcttgaatgtttttttttgtattgtgtatcaggttttttgt

SEQ ID NO: 38260 - DNA, 883 bp, Arabidopsis lyrata
  Intron number 2 from transcript 948990 (locus 948990) deri ved from phytozome v7.0 (chr-ID scaffold_8; pos 6103591 to 6104473)
ggaagaagaatttgaagttcagcctagtcaaagaggtcagtcatctttaaagaaacgtaaagtttcaatggacatataaaggaagtaaagaaaaaaaaaaaaaaattttggagtatgtgataaggaatttaggacaaagtatgtggtgctattgcaaggtggttctatgatacaaaacttccatttaatacagttaactttgacagttttaaagaggcactcgagttacttggtcaatatagttccggctataagccaccaactatgtatgaattatgagttcatctgctgaagaaaaaaagtaaacgaaacagaaaaacagttggtggagcataagacagaatagacaaattaaggctgttcaatcacgcctgacagatggcatgattcagttttacaaaaagacattattaactttgttgttaactcgctaaagggatcaattttcatcaaatcatttgatatatcaacagttgtgaatgatttaatttgttgtatgatcaaatgacaaaacaaccacatttgtattagcttccttgtccagcttcttgtatagatctcatgttggaggatataggacaaattatgtgcatgaatggctacatctatagtcacacttctcttgtgaatatgatgagaaaattcacaaaccaaggaaatttacatggacttgatgttacttgatttgctacatcatttatcacacttgcgcagtataacatgctgaagaaaaacttgaggagctttgtgaattcccatgattggaatgatttcaagtggccagaagaagtatgagcaataaacgtaaaaaaatcattatgcaaaacagtttatatagcacaacatgttctatgcactcaatttgacaaagcctctagttaag

SEQ ID NO: 38261 - DNA, 325 bp, Arabidopsis lyrata
  Intron number 1 from transcript 934368 (locus 934368) deri ved from phytozome v7.0 (chr-ID scaffold_4; pos 17782192 t o 17782516)
acacagaacgcttaaggtttgaaaaaacgattctaattcttcatttgattcactttaatcactgtagtttctggttttttgggtaatgatttgctcaaagtattggtttttatgtaagaacatgataaagggtctcccatttcagtagctgttggatctcaactttttgtgaattgactttttgtatctcagctgcattttatgtgattaggggttttatggttagtgttgtagtggtggttgatttgattaatcaagtaaatgtttatggtttgagattttactttggtgtaggagacagtttgatttggcaaatagagaggca

SEQ ID NO: 38262 - DNA, 371 bp, Arabidopsis lyrata
  Intron number 4 from transcript 485207 (locus 485207) deri ved from phytozome v7.0 (chr-ID scaffold_5; pos 13825272 t o 13825642)
tggaaaggtgcccaaaaacatactttcttttcctttgtttttttccattgagcttctgtttgagaactagtaaatataaatccttgcttctctacaagttttttgctttcatgtttgggcgtgttctgagtattaagaataacaatttctgtttgaccccattggaaaatctgaagatgtagacagtataacactttacttaatggaccaaacagcaattttccatcttgactatttatctgcgtatatatctatgtccagtgatatattttgactgtagctgatgcaaatgctactattagtattttgttagcctgtggtgatgtgattttgctttaatgacagattacttatattgtgtttgcttgaaa

SEQ ID NO: 38263 - DNA, 561 bp, Arabidopsis lyrata
  Intron number 2 from transcript 928115 (locus 928115) deri ved from phytozome v7.0 (chr-ID scaffold_3; pos 1955082 to 1955642 reverse strand)
ccaccgtcgaattcgccggtaaaaatgtaacatttcctgatattttcggttgcttaggtggattgatagtttaacatgtaggacagaaacgatttgatttagaattgagtatgttgttgatttagctaagacgacaagaaattggtatggattcaaaaaatatataaagtcttttgtttgaattctgagtccagattctagtgtgacttatgaatttgtgttccattttaggtgattttagctattggagttttgttttctattatttgacttgtacctctccaactttctgaaatcttaatgattttgatgctttacatcagcaaacagaagcacattgtcttcgacattatcgcattggcctaatgtaatcgatacatcaaaatacagctatgacatacctagcttatttattcattaactgtgtcggctaacacaatcatacgtttctttaactgaccactttatatgcttatatttttgcagactttactttacttctttccttgtttgtcgatttgagcagctgcgaacgaaagggaccataaatatttaacccaa

SEQ ID NO: 38264 - DNA, 645 bp, Arabidopsis lyrata
  Intron number 1 from transcript 483351 (locus 483351) deri ved from phytozome v7.0 (chr-ID scaffold_4; pos 20802281 t o 20802925 reverse strand)
gcaaccatcttcttgctctctccccaggttcttattctctccttatcttcttactttctttaattcaagaactaagcttttcttgtgttttcgttcatatattagacagaataataatttgcacatggtggaaaaaatgaacttttttctttctttgtttctctgttctattgagtcaaaatctgttttttttttttctccttttcattaataaatatggaaagctggaaatttggagagttctgtttgttgtgtttaatgctatttacagagatatttaagcatattggtaagaaaggtaacaattgaatttcaaagttagataatgtagtgtatgtaaatagtctctctcctcttgactctttcactttttttttttctctttttctcttcttttgcatttttggatttcaaaatttgaaacttttgtgagttgctttggagcaataatgtctcggaaatcccatatattcactctccaaataggtctataatcgaatccgaagctcacaaccaaagtgccaaaaaaaaaaacaaaaaaaaaacaaagtgccttgattaagtaaatatagtactactagattatagttcaaattgtaactttttgagattaaaaatgtttttttgtttttggtttcagattca

SEQ ID NO: 38265 - DNA, 388 bp, Arabidopsis lyrata
  Intron number 1 from transcript 491996 (locus 491996) deri ved from phytozome v7.0 (chr-ID scaffold_7; pos 5987394 to 5987781 reverse strand)
gaagcccaaggaggaaaaagaatctggtcccatcggtaagtccttctttttcctttttttgaatatggaaattggtatgtcttttggtgaacacttttttagggttatgtttccttagtggtaattggatcttcattgatgcatgtggaatcagttttgttttctcagtcgtcttggattaatctttagttatgtttattatgtttgattcaatatgctatgatcgatgagttaggttattgcaatcagtttgccttcccacttagttcttagtttctcccatcactagttctggaatttgattcttgtgtaaaagattcaacaactttagtctctcttattgcaaaactaacttcatgtctgtttcctgcagttcctaacaaaggca

SEQ ID NO: 38266 - DNA, 366 bp, Arabidopsis lyrata
  Intron number 3 from transcript 478058 (locus 478058) deri ved from phytozome v7.0 (chr-ID scaffold_3; pos 3120074 to 3120439 reverse strand)
cttataccgaggtacatggttctcaatttcatcgttagggttttgtttttctgggcatatccctaaagtttttattgagatctgtatggagtaataaacccttgattagaatttcgaaattggatgattcgtttgttaatcagaacttaatttcatcaaaattaggtttagatggagtgtcttcgagaatatacaattggtgagaatgtttgctgttggaaattaggaatcttgtgctcatcgatataagttatcagtttgcagaggtgttgttactgtcatcgagaagcttcaatgacttaattcattttttatgattttcttatcatctttgtgtaatttaataggcaatagccttgtctccaa

SEQ ID NO: 38267 - DNA, 584 bp, Arabidopsis lyrata
  Intron number 1 from transcript 902293 (locus 902293) deri ved from phytozome v7.0 (chr-ID scaffold_4; pos 20976615 t o 20977198 reverse strand)
caggaaatagccataggactcaacagagaacattggtaagcctttgcatcaaaaacgttgatgatatgatagatcttgattaggtattttcttgaaaaaactttagttgatactaaagacacaaaaggtatcatctgttagaaagtaattggtttggtcaatttcttgaaaaactcttgcattcgaacgtgtttaaattagtaagctttgtgatggtgagtaatccgttgaataatgaactcttgctttcatataaaccatgaagaaataagtcactatttagtggaccagtcttctcaaactttgtagagtagagtagctaagtgataacccatgtaccagatgagattcgtatgcatataatagaccttgagagacgacagactaaatgagtcaaagcattatattccaatccttgtagagatgaataactttcagagattgttgctgtttctacttctctgcagagctttgttttctttttgggttcttctgacattggtatatagacatttgacggtgatgagactcttgtgtttgattatgcagcggtattgaggctaagcatcctaactcttctatcc

SEQ ID NO: 38268 - DNA, 519 bp, Arabidopsis lyrata
  Intron number 1 from transcript 915544 (locus 915544) deri ved from phytozome v7.0 (chr-ID scaffold_8; pos 1682150 to 1682668)
gtaaggtttattttttagagtgtttctctattaatatataggggataagaaaggtatagaagtaaatttgagatatgtgtgatgatgtcgattttgttatagcttatctgtttgaattgggccggacaaacaaataaaaatgactctagactaacagaaagattttgatgaaaatgaaaaacaaaatacactatgaaaataacaataaaagaaatatgtatcctaaatagtatatataatatgccattatcataatgcagatataatggatttagtttatagccagtatgctaattttagatatatatttttatattcttagatataatgtcataggctcatttcatggtaactcagtaataattcgaagtatactcttcaaataatttctttcaaataattatatattttgccatgaattggtaaaaaaaaaaaaaatcaagtcatttgatacccatacaattttttttttttgtcacaagagagtgttattgaacaaaccaaaggttggttacaagg

SEQ ID NO: 38269 - DNA, 787 bp, Arabidopsis lyrata
  Intron number 1 from transcript 890638 (locus 890638) deri ved from phytozome v7.0 (chr-ID scaffold_7; pos 12339377 t o 12340163)
gcagtagaggtaagtgtggtggcggatttgaaacggtgaggagtagtggaagagatggaggaggaagaaggtgggtgataagatcgagaaggtagtatggactctgtgtgggctttatcaaataatggtttatgtttagttaataggccttttatgagttgtattttaagttaagcttctccttcatagaaactatcaaaacgacggaaaaaaaatactatcaaagaacgatcaatgatgttttttttttctcttttttttttaatgatcaatgaatattatgaaacctacatattatttagtagatcttttttatttatgtaatttggataattattcttaagtttgttaaaatatgatactacatttttttatattatataatacaatcttatattataaatatatgccaaacttattttcccaaaacccaactatttttttatacaaactatacgcaaatacattttttatcgatcgattagatttgtacaccataccaatatattcaatcatgtaatatgtaacataaaatctatttttaatagtcataccaatttcaaattgatacacacacattcaaaacctatataacataagttttatatttaaaaaaatcggatgttaacaaaaccccgcacgtacgtgcgggtccggatctagtaatatattaattgataagtaagttgggatcagattaaaagttgaggaaacagtactttctagttaaacagaaatttcaatttctttagatctaaccctagaattcacaaagttactgatccgc

SEQ ID NO: 38270 - DNA, 692 bp, Arabidopsis lyrata
  Intron number 1 from transcript 941387 (locus 941387) deri ved from phytozome v7.0 (chr-ID scaffold_6; pos 7760335 to 7761026)
cggctcagtgacccagtctcaccatatcagcttaggtgaaatttttcattcaaacttttttgggatctgttgagttttcgtgtcttagatcgattttcgtttctgggttctcataaagtttgtatctttggtaatgatttgggtagaaatgttgatgtttctgatctaattcatctgtgagagctgtgagctatggagtttgtggactttaattcctgagatctgatgtgttttgggaggtttcattatatttagctccaaattgttgtttgtgtccagattctgtttaattctctatgtacatggatcgcaaattaggattagttctctatccaacaaataatgaatcataaaaatgttagctttagggtttcagtaatgaagagttattgataaggatgttctctacttctaaacatccttatcaatagtagatatgaattttgttttctgttgattgaagttgaatgtgaaagctcattatctttgaacctgaaaagttttagggttttagttgattatgattttttcaaatttgaatatactgattttgatggttaatgttatcttgttccctttcttattagtctgtcactttatctgctgcttcccacacattgctctttagaaagtattaacagtttctttcttttgtagataaatcaaaatctcgacgaggtcctgaacagaag

SEQ ID NO: 38271 - DNA, 510 bp, Arabidopsis lyrata
  Intron number 1 from transcript 917054 (locus 917054) deri ved from phytozome v7.0 (chr-ID scaffold_8; pos 16147339 t o 16147848 reverse strand)
ttctcgcaccaacgcagactaccttaaagtaactataaaaccatcattaaaaatgctttaaactaggcttattatagtttcaaactttcaatattcaagaatgtgctctatttcaatcagtcatggaagatattcacatggatattggtttgttctaggttttcataactggtttaaccttgcagctttcatctattaatattgttacccatattgccaaacgttgcaactctcaataactcaaatgaacaataaagacctgttaaaataaatcgagaaaggaacaaactccataccactcagactctctcacacatttattaagtgcttacacactcaagtaacataaccattattcccgatgttatatccaggaatcgaaggcaccctaagctattctgaagcgagcagcacttctcgcatccatacaatgaagaagagtgtgggaaaaataaaataaaaaggaacctgtcagaccgccgtgcaaccaccccggcaaggtagaactga

SEQ ID NO: 38272 - DNA, 988 bp, Arabidopsis lyrata
  Intron number 2 from transcript 470937 (locus 470937) deri ved from phytozome v7.0 (chr-ID scaffold_1; pos 3289451 to 3290438)
gcttgtagcgggatacagtgagtaccttcctctttctttccatgttacttatatatatacttcctttgcaactactccagacctctgtgtgttctttcttttgtagtcattctctagagatcttatgctggtttcttaccttttttcttccctctgattttctttattatcttacattttacagttaggttgtatgtattttgtaaagtagcaataagcaacctttttgttctcgttgttgaatatatatttccttgttgatatttgtgaacggtttcctatgttcatcccgcgatttagttttctgctatattgcttctattgagtctaattcgatttaaatctctgcagacaagctaaaaatgatccctcaaaaacatggctaatgcatttgtcttacaatatacacatttagatgcctcctatcaaatgtttgattgtttttgtcggccttcatgcacctgatctcgtctacagatagtgtgagctgactttttggtatcagtatatttggtggctgacgagttacgcgttttattctattacttttgtactaattttacataaaattctcaatctattcagtggctcccgttttatttatgtgtcttgtcttgatttggtaaaatgtggtgcaactcttatactagacttgttatcatgaaaaaggaaatataggcttatgtgatatgagcaactgtaatctttcttttcgttatctttaagtatattcggaagttaatatttctccagctgcacattgtttcatatgcagttataggtttcttttgatgcatattttagtatagggaggtgcactgtgcattttatttattacgatttcctgtttcttagctatgatacactgccttgatgtagtgaatatgttcctaccttttctttctctcttagtttcagtttttcatgatctattttattttaataacctacagccgtgaatttactcatcgtgtgaagtctgtgtcaa

SEQ ID NO: 38273 - DNA, 663 bp, Arabidopsis lyrata
  Intron number 1 from transcript 913460 (locus 913460) deri ved from phytozome v7.0 (chr-ID scaffold_1; pos 17667325 t o 17667987 reverse strand)
gagttcctacgattgaagttccgtctgaagtaatcagtgattctgttcctctatgggaagatttcctggttggtcgattcccttctactgctccacatgttgcaaaaatccatgtcattgttaataagatttggcctctaggtgacaaaacagtgagaattgatgttttcgagcataattctacatcggtacgattccgtatcagagactcctcgactaggttgagggttctgcgaagaggcatgtggaatattgcaggtctacaaatgattcttgctaagtggtctccaatcccggaagaagctcagcctgaaatcacatccatgccactttgggttacgttgaggaatgccctcattctttgtattcatgggagggtcttgggttcctaactatcccaataggtcttcccattcggctccatccagaaacagagttatgtagtaattttgaagaagctaaagtatttgtggaagtaaatctgacaaagtctctcccaagcactttccgttttaaactgaatcaaacagaagatgtcactatggagttttcttacccgtggttacctccccgttgttctcgttgtgaaaaatggggtcatttggaggatgtttgtgttacaaaaaagagatttccaagcaaagttaaagtggtggaaattga

SEQ ID NO: 38274 - DNA, 862 bp, Arabidopsis lyrata
  Intron number 2 from transcript 897003 (locus 897003) deri ved from phytozome v7.0 (chr-ID scaffold_5; pos 7055418 to 7056279 reverse strand)
ggtaatgtcaaatagttttttttttacatcattcaaatagtttcttaattgtaaagtaaatatgcattaattaaaatgaagttaaaatgtatggagtggaattttttggtgcagagggatattgttggagcaaaaccagcgagagacaagttgtgaagattcgacgaacatatcttgaagctgttctccgacaagaagtttcgttcttcgattcagatgtttccacttctgaaatcattcacactatttctactgatacttctctcatccaacaacttcttagtgaaaaggtatcacattttgataaaacaattttgatctgttatttgtgcgggcataaaacttattaagtttaagactgtggttgacttatggtataatttgatatatacaaaaaaatatcttaaaataccacaaaagtaattggtgttttaaacatatataactttagtaaagaaaaggttaaaagagtcagggttcattaagttttcagtaatctccccacggatcaatcttactttacataatcgtaacgatataaaaatatttgatttaaatgcaacagattagtaaaaaccattttattttcttatgactatcgtacattagtttattaacaaaataagaagagtgttttgttttagtaaattttttattaaaaaaaattcaatattaccacgagaatcctaaaattgaaacaaaacatatggtagtaaatttgtaatgacatacttttgtaaataaaaataatattttcaaaaaagtgttttaaacatgttctgtcttaattgttttaaaattatgtcatgttgaaattttttatcaatctattgctaaattaccacaggtgcccacattcttg

SEQ ID NO: 38275 - DNA, 738 bp, Arabidopsis lyrata
  Intron number 1 from transcript 933824 (locus 933824) deri ved from phytozome v7.0 (chr-ID scaffold_4; pos 15404278 t o 15405015)
cgcctcctcgcagcctcttctgaccatccccaaaggtaaaatcacaactgcccttgattggatcttgcttcatcggctctaaagttcactgctttcctctgagaaaatgagcaaaattactacttttcttatttgggtattgtttaacgatttggagtagtagttggtttagtttctggtgattgagttgcttcagcttgattagggaatgagttttgcataaacaagaattgtgtctttcattagattttacactgtttttgactgtgttattgtatctccgattatttggttttcataagtaggcaatgatcagtttttggagatcatagagatgtaagtttggaagctactgatccttgtgtaaacaaatttgagtctttgaggtctgacttgtggtgtggttgagcatctggtttacttgttgtggctgtcgtggtgacaccaaatctgaatggcggtgtatgctttgcattttaggatatatccttaatcaggtttataggatttactggaatgaattcatggaggttaataatgttgtttagaatgatttgtgataattgcttctttactagttttacaaaattgtttttttactagtagggaatcatccccaactcttcttcctcctctttcctcttctccttattggttgcttatgtttgtataatatagttttctcttacttttaatattgtaggttcagtgaaccttttgttctgtctgctcagatcc

SEQ ID NO: 38276 - DNA, 790 bp, Arabidopsis lyrata
  Intron number 2 from transcript 333097 (locus 333097) deri ved from phytozome v7.0 (chr-ID scaffold_22; pos 73109 to 73898 reverse strand)
ataccattgtcttcggttccatcgctgagttgttggtaatctttttttacttgttttccgtaaaacagttttctgatattttaattgatgtgagttttcatgtgacatgtcgtcatatgatcttaattgtttgttactttgtttacggttgcgtttgctttaacatttcttgtgtattatgtcaaatgaacccaactttttagcattttttaaaagaaaaccagcatttggttttatacatatactctttgcaataaaaaatattttatgaaaaactaaaatttagtttttacatataaatgaaaatttgtttttttttttttctttttcacatgtaaatgcaaacacaaacacataaattaaagttgaatcaattatggatttgccattttttgtgatggcatttgtggattttgtccttttttgaatagtttatggattttgccctttttcaggctacggaaacatgcgttttattcgttatgtttgggtttagtcggttgtggttgttcttagggtttagtattttgtataaactacgtatttttaccaaaaaaaatccgaaatacgtacatttttaagtgttagaaaatggcaaatccataagatttttgcaaaaatggcattttcaaaagattttggtaaaaaagggcaaaatgaacaataatcccattaaagtttgatacaaatgaggccattcttttgtttggaaagttacaagagtttgttttttttttttttttggtatcaatgttaagtaacgtgacaagagttaaatcttcaacagggc

SEQ ID NO: 38277 - DNA, 612 bp, Arabidopsis lyrata
  Intron number 1 from transcript 490167 (locus 490167) deri ved from phytozome v7.0 (chr-ID scaffold_6; pos 22843900 t o 22844511 reverse strand)
agttggtcctcctccacttccttccggtggcctacgtaagtaatactaattgaatcaaattttacattattgactattaataatataatccgaacggtattttttttggttaaggagaaaacaaaccgaaatatattgcatgttttggtctggaaaccgttttttttttcttcttctttttttttttttgggatattgaaagtacaataatcttgagtttatgttttgtattttttatttttgtttctgttttggtttagatatgcaaaccaaataaaagtccggttcaatcgcggtttggtttgaaccgatttggtttgttagactcgaacacccttatttaatttgttaaaacttaaaatatagatctttttaaaaaacaaattgaaaatatagatttaaatgtaaaatatacgtctatttgttatgatttcaattttggtttttttttatcaaacgtatctttaatcactttttaaagatataattaagttttagagattactaattagattatagagatcggttctgtttgaatgattatggctttgatttttttttttttttgtgtgagcagctggaacagataactcagaccaagcaagagatttt

SEQ ID NO: 38278 - DNA, 490 bp, Arabidopsis lyrata
  Intron number 3 from transcript 483189 (locus 483189) deri ved from phytozome v7.0 (chr-ID scaffold_4; pos 20071441 t o 20071930)
ggtgccaagtgttgagaaactacaacaagcttacgaggtaggtataaaagtcttccaatttctattgttcattatgtagttttattatcgtaaattaatgacacttctttggatttgataaaattgagtaaggaatttgtaaccatttgctctcttaacgttttctatgttattataaaaatgaaaaatatacttgaggaaaaatgaatttatgcgtagcgaataatgataaatattatgccacgataaacgttaaaataacttcaaagcttttttccccaatgaaaagagaaatgctcagctagctttgttcagttacaaaagtctctgttacaaacagagtcttagacttggtttactctaaaccgaaataattgaatcaaaatgtgttaaccaattggtttaattactctgatcaatcatcttcttcgtctcttcttacttatgaaacgagcagatacacaatctcggggaggggaagaagctatcg

SEQ ID NO: 38279 - DNA, 823 bp, Arabidopsis lyrata
  Intron number 1 from transcript 923290 (locus 923290) deri ved from phytozome v7.0 (chr-ID scaffold_1; pos 25263645 t o 25264467)
actctcctcaaagtcatcatcctcggcgatagcgggtaagttttccggtgactgactctctctctctctctctccgtatgtatctgcttctacatgttgatttagtgtttttcgatcagtaagtatatactttttctgggttcgaattttgattggattcgatctggattggtgtgatctcttaggtcttctggattttgattgttctgtaattacatggaattgaattgtgaagtgatgattagagattggattagttgaaattagtctcaagctgctattttaagttcatgtctaattctctcagtatgattcagatttggtgttcttatctatttttgactggagagaaattgaatactgaatcttgtatcatattcaagatttgtttgatcctgctattattataagcaacaaccttttataagaaatcattcggtcaagtgttcgcaatcaaggaagaattgttttcggcttagtttgtttcttggtgagtgagagtgaatatgttctgaatcatatatttatttgtcgtgatgcctggtgaagctgttgagctatgagtccaaaagtcttattgttgtgtttatcgaagttaagagactcattgggaattttgcagggttgggaagacttctttgatgaatcagtatcctaaattttctgtgaatggagtaaagaggaagttattgcaatgttttttttttttataatatatatgaatagattctcttgtctctgttttatgactaacaacaatctgtcctctttcgagttagatgagtttgtgtttctgtttcactttaacaccatgcctttagat

SEQ ID NO: 38280 - DNA, 457 bp, Arabidopsis lyrata
  Intron number 2 from transcript 480330 (locus 480330) deri ved from phytozome v7.0 (chr-ID scaffold_3; pos 18676944 t o 18677400 reverse strand)
tgtcattgctttggccgtttactaaaggtttataggtttggttgttagctcggtttcatatttgttcttgttcggaagaatcacggacaaacattagttgaatcgaagatgatgagatgaagaaaggaaaaatatcgtttgattcaacttaattgcttattacaacagagtctctcttttatagtgagtgtttacattaaaccgactcttaaccgattctaaattacggtttagtcaaatcgagtttcaatatacatttttagaaaacaaggtcttttcttttatatatatgggaagtgttcttaaacatttaaaaatgatttagtaactctttacgaaacatcaaaaaaaaaaaaaaaaaaaaaaattatttccttgtaacagtttagtaaataaataaagattttaaagattacttggagaagtggaaagagagagtcgaggtctccaaaaacct

SEQ ID NO: 38281 - DNA, 797 bp, Arabidopsis lyrata
  Intron number 1 from transcript 475338 (locus 475338) deri ved from phytozome v7.0 (chr-ID scaffold_2; pos 3712895 to 3713691 reverse strand)
tagctcgctttggatccagtggttttaagttaaaggttggatttttatttctgggtttgcttggttctgcttagtaaatgttggaaaaggaggagactttagaggatctgtagtcagatttgagctgggtttgtcgattttaccgggattttgattttggggttaatgtagatcaagaattgttactttgtttcatatccaaatttcaactctttttttggttcctgatctaaaaatcgtttctttaagctttctaaatgggttttgtcttcggtggtactgaaattttgtctgtagctgtattcttctcatagatttgattctattacataatcttaggttctgagtttgaaatcttggttttagtaacagtttttgtgttgcatagtgtgaagttataaggactgaaatctgttcatttttggtatgttattgagcaggttcttgtcttgcttttgctttatttgttctttctttttacatctttgtttgagtgactattggattttctcttcaaattgggtaataaaattttgagaatcttagtcttgtgatgtgctttagacacaatgtagaacaaagcagttacataaatggcccacattttgtcagtaaatttatgaaagggttttaaatgtttctacataatgacatctatcagagttttgtttgtctaaattagaggaaggatatgtccatcttctgcttttctctttcagaataacatttcaatcttatagttttctcttcttttgtttttgttgcccaggtaaatttatcgagattaaggattccaa

SEQ ID NO: 38282 - DNA, 528 bp, Arabidopsis lyrata
  Intron number 1 from transcript 935970 (locus 935970) deri ved from phytozome v7.0 (chr-ID scaffold_5; pos 806728 to 807255 reverse strand)
gccacgaacctcttctaatcgaagacggcaaaaaggtataatatatatgtagcataagtttttttaattaatattaggattggagaatcttatagttacaatggagcaataataggccccaatcaaaagtcttaagacaaaatcaattcttaagataattagctgttttattccttggtttttcatcttcttaaatagacaagccagatatagtgaaaaagtatggaagttactcctatttctaaggaaaatgagaaaaacttctcatatgtttagacatcattacatttctatcagagtaactgcttgttcttctgcagaacgttgtcgttttgagcaggtactctgataatttccacgtcatcaaattggtcttcatcaagcaatggtgtgattgtgaagttataattcatggatactcaatctcgaatgttaattcaatttttcccgaactattttgatttatttgtttttatttttccaaaaaccaaagagcttctggttagagaaaacgagtgggaaaaggtg

SEQ ID NO: 38283 - DNA, 566 bp, Arabidopsis lyrata
  Intron number 1 from transcript 485659 (locus 485659) deri ved from phytozome v7.0 (chr-ID scaffold_5; pos 16330557 t o 16331122 reverse strand)
ttaagtacatcatcctcggcggcggtgtctcagccgttagtatttcttcctccttaagtttttcagtcattagcttatttcgattttgtgttgcgaaataccacaattctcataattgttttggctttgagttcgttattgttattcagatagagattacggtgattgttgtgattctgattcgtagatttaaacgtccgatcggtggctctgcttctagtttatagaatcgttgagataaatttacaaatcgaaacttgttttgaatcaaacaatcgcatgttgattgatcgattttgcgacgtaaacatggatttaatctggtttcctctgcacagattgtagtaccctcaggatcctctttagtttctacagttgtttgttttagctcagattgatcgtagaacattgtcacatacagtgttaatgaagaaaattccaattggagttagttaacagagaaatgtagagaagcaaatgcaactctgattttggattttgttatttcttgttctccgtttttgtgtgtagggatacgcagcaaaggagtttgctaatcaaggggt

SEQ ID NO: 38284 - DNA, 862 bp, Arabidopsis lyrata
  Intron number 1 from transcript 897087 (locus 897087) deri ved from phytozome v7.0 (chr-ID scaffold_5; pos 10097738 t o 10098599 reverse strand)
tcctgatctccagaaagctattcaagcttatcaaggttagatctcaatttctcccatttttgctcgaatcattcgatcgttgcttttggtcctgggagatttcaacctttggaacacgatcatagctacgtgtgtatctgctagatgtattttgacttaaatgtggtcgcacaagctgagatttttgaggttatacccagtgtttggtttgttagtgaactttagtatggtgtgataggataatgcgaactaaggctatggaatttttttagttgttgtcaatgtttcgcggacacttaggccttagatcaacttctggtttttagtttgtaactgatatttgaatgttgacctgtgaacaaagatgctatctatcagaatagtttaacttcttattcgttcgttcgagtaatataacctttttggaagacgtaaattcgtttaggctccaatcaaatctgtgatttattgtacagaaagttctggacagggattggttacatgattttagaacggtctgcttagttctacgttaaattaaagggaagtgaggtccatttttacgaacgttgtatgaacttttcatttctggagtttagatacgctttagctgcatgcgctacttggattttcaatgattttgtcaatgaggtggtattagaagttgtatgaaggaaattcacccctggtgctatccagaaatctatgaattttatggcttctctccacattttgtcttctaatttacttttggctctagtttggccttggtcaaaattgttttcatatgatagaaaagatatggtggtgacaattttttcttttgctaactagtttggctttgatttgtgattgtttatag

SEQ ID NO: 38285 - DNA, 706 bp, Arabidopsis lyrata
  Intron number 4 from transcript 492531 (locus 492531) deri ved from phytozome v7.0 (chr-ID scaffold_7; pos 8103241 to 8103946 reverse strand)
ggactggcctcactgccataatcacaggtgtttcttctatcaatacttttttccccttttgggacttgggttttgtctaaatttttaatcttttctataacttccagattttggttcctatctggttctgtctttgaattgatttcatatgtagtctagatttttgacttttattgtttagacaattggaatttaaggtttttatgatcagggtctgtttttgatttggtcaactctaataaatatggaggttttcactgtttgttgttctaaagttgtctttttttcaataagtaaacaatcttttgctcaccaacatgtttgggaccatttgcatgtaagggaaagtaacaatttgacctgcaaaaagggttaggtgacttataggcttaagcaagaggccagagttgaacatacatatttgagtctagcatcgatttggccgaattttgtcctggatgtgaagtgatgcttccttatttggttagattgagtatgtagtttatcaactattggtgttttaatagaggtttgcacatgttctgtgtcagcctatcagggtttgaaaaggtttggttgatacaactttacaaagtggtctagcctgcatcgagttttgtggacaagttttgttcctaaagtttcttgcctttttgttcatatttttttaggagcatcaagtggtataggagtggagacagcgcgt

SEQ ID NO: 38286 - DNA, 735 bp, Arabidopsis lyrata
  Intron number 1 from transcript 490185 (locus 490185) deri ved from phytozome v7.0 (chr-ID scaffold_6; pos 22924396 t o 22925130)
atttcgtttaaaggttagagattttttcttaggctattgttttttctcttgcttttgctttggagatgagctttgactgattatgttgcgaaaaatggaatgatggttagtagtttactgattcttgggtttactttgttgtagaaagtgtatgaaataaagagaagttgagatgattcactaaaggttagatttttgtcttatgattatcgttttctcttgtttttgctttggagatgagatttgacagtttgttttccgaacaatggaatgattcaggatttaggattgatggttagtagtatcgatttctgatgtcaaagctgttgtgtggagtttactttgttgtagaacatagctcaaaactgatggttagctagatttcaagtagtatgataattgatttgagatcgagttataggcatatagcatatagatgtatgagaatcacgcacttgtgtataagttagtgtttgcaaagttaatatggaaacttttggaagcatgatcttcctctggtacttctctgcatataggctcgagtctttagattattatgtatcatttttttttgctggatatgttcttgtttagttattctttcaaaatgctgtttgcatttttcttgtgtcaagtcttcactctgtggtattctatttatgtttggatatttgttcagaactttctaatcaattctgtactggtttttcttatccagttgaagctttagtcaga

SEQ ID NO: 38287 - DNA, 268 bp, Arabidopsis lyrata
  Intron number 1 from transcript 481553 (locus 481553) deri ved from phytozome v7.0 (chr-ID scaffold_4; pos 10291173 t o 10291440 reverse strand)
cttcatcggaggaattaatcccacttttcacggtaaatttcggcctctccgttttctcttacgctgatccaattcaatagaatgttaaggctcttctaaacaaaaaacatttgtggtaatttttttttttgatttcgggttaataattggaatttgaaggataatttgcagaattatgtatatgttttgtggtgtatttgaacatatatttgagcaatggacctgaccatttttctccagaaaaaaaaactcaaactattgctgaaaa

SEQ ID NO: 38288 - DNA, 721 bp, Arabidopsis lyrata
  Intron number 1 from transcript 951098 (locus 951098) deri ved from phytozome v7.0 (chr-ID scaffold_8; pos 20802966 t o 20803686 reverse strand)
gagatcgtctccgcgtacccagtcgttgtcttcaggttttaatcgttgaaatttcccgtctttttcaactgtgtttcgcctttttttgccgtgactattcattttgttgtgttccgtttgataatttgggtattgctctcatctaatgaggttttgattaaccgaaagctcgagtctttacgtctgtgtttgtcgggtttctggagattttgctgctattttgacgcagagataccgttggatcgtcggttgctcgttttgtcttcattagaattaggtcacaggttgttttgtgtttccatagacagatatattgatgtcgaagatacactactgcatcaactttgggtcaatcatcgtaagatgactaaatgtctactggtttttactaaggggcaaatcaattgctgttgcagatgaagcttctaggttgagaatagattcgtgcaagctcctattataaccaatattttgggggcttaaatgtgccttgtggagtcttcaaaatgagcttaactagttatttggcgtagatctcttacctgaatctcactagtgtgcagagagcctgtctagttttctctaacaatcggactcaatctagttcttgctaggttctcgagtttttccatagagttctagtacttgattcacatcccagctctgatccatgttctatttcacagcaagacctattgtggttattgccagagggtgaagc

SEQ ID NO: 38289 - DNA, 869 bp, Arabidopsis lyrata
  Intron number 1 from transcript 901551 (locus 901551) deri ved from phytozome v7.0 (chr-ID scaffold_4; pos 17595156 t o 17596024)
ctttagatttcgcttagatataaagagtcagaggagtaagtggaatatgaaaggcttgccgtgtcgattagtagactaccgatgagtaatttgttattgaacttaaaatgtgtagtgaaatgtttccaaacttgtataacataatcactaatcacaacttgaaattaaaatggtctaattttgttgcaattagtgagtatgataatattagttaaaatgatccaagtcagtctgacgtgttacatcgtgtttactactttttacactgttgaacacgaaaacaaatctttgtatgtgctaaaatcgtatttagctacaaaatttgtgactatttataccctaaactcccaaattacagaacataacgtttcaaaatacaaacatacaaacacaaacttacgttgaagtttgtggtcattgtgatcgttaactttacgaaagattttagataatagacaagaaagttctcaatcaaactctatatctcatgtgtatataataatatgtttccacctcaggtattacgtcactcataggaccatatgacaaaaaaattcaacaaaacacaatgaaacatgcatgatgttgacaaaatggaccggtaaaaaggaggaacgaaacgcaattacgcaactcttgagacattttttttttacttttcttatccttttactgtttatgcagttgaaagattttcaaataaattcaattctcacacacgactgacgaacccaataaagagggtgatattcaaaagaaaagtaaaagtgtaaaactcagtgagttaaaattgcaatattcctcatgtctctgtctctataccgcagcccatgtttttttttgtagataggcagttcttggctgtttcc

SEQ ID NO: 38290 - DNA, 525 bp, Arabidopsis lyrata
  Intron number 1 from transcript 315086 (locus 315086) deri ved from phytozome v7.0 (chr-ID scaffold_2; pos 1057589 to 1058113 reverse strand)
cagcgccaaaggtctcgaggacgcagattttctgagtaagctttttgttcttttttcccttaaaaatctagtttttttcagaaatccttagaacccttttgatttttgttgatgggtattgtccaaaatgtgttgaatctgtgaatgtatatatgtcctttgacttttggatcaaagattcacaattttggtgcctatctgatgttgttgactagaacgatcagaattctctgtttgtaaaatatgtgaattcaatttatgaatcggattttgattcatatctgatattagtggagatcttaaaatatttgtgaaagtttgatcatagattcaaattcgtcttgatcttcttctaatcctttttattataatgatctagtctaatttttggttatggacatgtaaatcagtttcttgattaacatcaaaagatatacgcttgttctattgtaacattagccttgtgaatatataaaatcgatttgcatattcgttgacttattgcgcggtttatatatagataac

SEQ ID NO: 38291 - DNA, 532 bp, Arabidopsis lyrata
  Intron number 1 from transcript 486213 (locus 486213) deri ved from phytozome v7.0 (chr-ID scaffold_5; pos 18494291 t o 18494822 reverse strand)
ccgttttccgtcaaagctggtgagtttttgtcgctctctctctcccctccttcctttttttgtttgtctacatgttctgtctcattgtcgtgattcttgtatcttgtttaatagctcaaatgttcgatttttaattaatcttctgttttggatccggttaacgtatgaaaacactgtttcaaacccacatgattcaatgttacttactcctctgggttttgtttttctgggagtcattaatgtgttcgcatttcagagtttgaaagtactccattgtttctcggtcaaagctcactttttttttttttttttttttttaataattgctcaattatagttagttattgttgcccaaccttgtggtctatgatctttcctttatttcagctcagtttctttgacgattctgtaaaatccatttatttatgtttcgtgagaatttgggtttatgaaatcaaactgcttcctttttttttttttttttttatgattctcaggcggtcaagtttgaaaactcaaagcttttggattc

SEQ ID NO: 38292 - DNA, 815 bp, Arabidopsis lyrata
  Intron number 4 from transcript 491210 (locus 491210) deri ved from phytozome v7.0 (chr-ID scaffold_7; pos 2764509 to 2765323)
ctcaggtacattaattacagttggctccacgctgtcaaaaaaactaatcaattcatttgtgtttggtagtaactaattaaactttagcagagtagctaatctcttgttatgaatttggtggttcaaattagacgtttaaaagcatagtttatctgggtcggttagtttctagtaatttattgttatgacacaaaagatcagaataaatgaataataatacttggcaatattcacgtggccgaatctatagtttgaactttcggtattttatatgttatttcaaaatttctttacactagattgtagcaaggaacttgttctgtcactactttttcatttagaaggaatctatatccctattatatagtacaaaagacagttggtcacgtatgtgtctgaattacactttctttcacatacacaatctataaagtatgaattctgcttaatagtatttggtactagtaatacttatttttcaatccatttgatgatgatgttaataattatcttctcagggaagtatgcgtgagatgacatgtcactcgtttactcattgtctgacagactggattcgcactagttattttagaggtttcttgaaacatatgttttgtttgtatgcactagtcatcattaattccacgtaagcagcgtcgactaaaatcaataaaacaaacgaaattaaaaaatggtgacgtttcaggtcctatttatggcttactaacaaagtagtagtagaagaagtcttcgttcattgtcgttgcttccagcacaagttactgtgtaaactcctttcattatttcttaggttg

SEQ ID NO: 38293 - DNA, 807 bp, Arabidopsis lyrata
  Intron number 2 from transcript 895533 (locus 895533) deri ved from phytozome v7.0 (chr-ID scaffold_6; pos 22467491 t o 22468297 reverse strand)
ctcgcaaaatcttggccttcctgctcatccttcatgtaaagcatgctctcacatattatcaagctctcttcttataatttagaattcctgagattttttttattaaacatgtataaaattatcaggtattatttcagaacattgcctataaatatcacaaagtttatatacgatgaattatctcttgtcttaagtctattttttcttacaaactcacaaccaaaaaatccaagtcattgaaccatactttactccataaacaagtatcatcttcaatttcttatcacttcaattttttgttgtaaacacaaatcattttcttcctaaaaattctaagagcctaccattaatcacacaaaaatcttaactaaaaaatattatctcttaacattcacttttacaaatatattacttaaatattgctaagaggtatttcgaataagagtttcaagcttggttttccagacccacatgatggatcaagcacgtgtcaaaatatataattatttccttaacattatcaaaaaagaaaaaaaaaatgtttttctaatccaaaaaagaaaataataataatattaacatataataatttatacaactaaataaaacctaaaaaatgaattttggattttgaaattcttaataccaagtcgtatcattttaactgttataatacatcaattttcttaaaaattaaatattttgaattttcaaacgcaaaaatataatgaaatttattgttggataaactgaaattaaacataaattgcagaagatactcactcaaattttttttgcgagttccat

SEQ ID NO: 38294 - DNA, 934 bp, Arabidopsis lyrata
  Intron number 1 from transcript 900807 (locus 900807) deri ved from phytozome v7.0 (chr-ID scaffold_4; pos 14091830 t o 14092763 reverse strand)
ccaagagggaagactcttgccatcaacgaaatccggtggagggaagcttctgcatagatacgtttttttcagatctgagggcttgatgtggatcttgaggtaaaagcttcgcgataggaagtgtgggcagagcctgaatctggaagagggtcaccggaaaactcctccgtcttctgccacgatcgattgagtgttcgattgaaaaggggttcgagaagatttatgaaagtttcgagatgattgagatacgagccaaagtaagagtaaagcgaaatagagattgcgaaagaagacgagagaaagaacgaaatcccgacgccggcgagccaaagcttcaccggcgctggaaaacatggctagcaagagcttctcgatacattttctaactaccttaattgaaacattcaaaatgaagctctttttcgatattattacttactattaaacaagttttttttgtcacacattagagttcaatcctcatttgggatagagaaacattttttaaagtggaattgactaaaagctggtttggggtactgagaaagattatgggccaaagtaggcctgcgagttcaggtaaacgggtcgggtcgggtcggtattttcgggtttcgggttaattttgattttttaaatgtattcgatgataaccgaaactgatttcggttcggtttggttcggaaacgggttatttcggttttgtgtataaaacccgaaaataaccgaatttatttttctttcttaaattttgttttttatgggcttttaaatctaactaaagtccacaaaaattattttgggtattaattaaaacccaacaaaaacaaagcccacaagaaatataagcccataaaccctagacaattagggtttctcattctttgaagtggttgcagcggcggctctagttgcggttccagcggcggctcta

SEQ ID NO: 38295 - DNA, 982 bp, Arabidopsis lyrata
  Intron number 3 from transcript 894457 (locus 894457) deri ved from phytozome v7.0 (chr-ID scaffold_6; pos 11417998 t o 11418979 reverse strand)
gaagcttaggaagttacatcgatagaggtaaggaagttaagtttattcatcttcttttcttcattatattttgtaagtagagtcagtgccggcccgatcaatttgggtgccctaagcaaaattaaagcctataaatttttttttttttaaattagatttttacccttgaaaaaatgttgtagttgtctctaaaaacccacaatatttttaaaaggccctacaaaaattattgtatataagaaaacttaacaaatttttaggtaaaaaggccctcaaaattttgagaccctaatcggtggcttcactggcttgtcctctccgccggcctgagtagagtcaaagcaagaagattatttgttgctcttaataaagagctttataaaatagataaataagataaaaaaatgagacaactccttagagctttatttactgtaagagaggaaaagactaattgaaagctaaatgattcttggattaataattttatatctccgaagaaagagagttgctcaaagaggcaactcttcttatagttaacttcatatattgatgttcgttactatatatatatatatatatatatatatatatatatatatatatatttgaatctactttcttgaataacttaactacatgagtttgtattgaattggtctaaacttataaccttgggcttgtcatgtttgattcaatacatttaccattgtgtgtccacatttcactagaagtactaattcagggtgaacaaagttttatttcttgcaagctcaccacatgttaattgttaaacacccgagcgaaaatcgaagtggtccacacgcaaagtttgctcacagtagaatgtggaatccaattctggagctgtcatacgctcttaaccttagatccaatactaattcatcttccttttggctttattaatggtttatacaatatcacagatagtcgtccaaagtcattaccgtgggagacacga

SEQ ID NO: 38296 - DNA, 436 bp, Arabidopsis lyrata
  Intron number 1 from transcript 948468 (locus 948468) deri ved from phytozome v7.0 (chr-ID scaffold_8; pos 2118159 to 2118594)
ccaatctcaattcccaggtaatatatgttcatctatacactttttgagttcttctacacatgatcttgagaaaactccaccaatcattctaacatgtcatataacgtggatcgtgtagttagtcgtgttctaaatcaagttagatttttcattttggaatacattgtttgtttgtcaagttcatgttcttgattacaaaaaaagtaatcccattttagcttaactgtttctagatgtttttcgattcgatttggattataccggattgattttgtacactacaataagttgatttgattctccaaactacgttggaatattctaagagaactgaaaccgaaacctaatgtaaaaactaaaaaccctaattaaccaaacatgtttctacaaacattaataccaaagtttaaacatttgtagtttggtatgtttagga

SEQ ID NO: 38297 - DNA, 772 bp, Arabidopsis lyrata
  Intron number 1 from transcript 908097 (locus 908097) deri ved from phytozome v7.0 (chr-ID scaffold_2; pos 10778076 t o 10778847)
ccgctgcaaaccgtagacctaaaaatctgcgcctcgtcagcgacggcgtccacaacaaacgcctcaacaccgacagcctctttctccgcagcaggatcctcctctgtctccacagcaggatcctcctccgtctccacatcagaactctgaggctcagagtcacgcgtttggctgttcctctcaaggtaacaacttccaaaacgaattgccggatctccaggaggatacgcttgaggctctgactgctctgcttatggtgccggaccgtcatctgtttacaaccgttctctctccaacaccgttgccagacccgacgtggtatgactcttggtcccttctatagtggtttttttctgattgctttgtgtgttttaggatagaagaagtctgattgttttcaaaatgttttgtgtgtttgactgtttgcttgttcttattgttttgtgtggcttaggatagaagtctgattgtgtgtctgtcttaggattgattgtttttaagaagtctgattctttttaagaagaagtctgattctttgtttgattgttttaaaaagaagtctgattggttgaatgttaaaaagaagtctgattgtgtgatgtcgtatcagtcttcatgctgtgtttgagatgttatcacatatgttgcaggtttgattgggacgagaaatcaagactggtaaggaggattaccaaagtttttacaaacaattatgtgtataattgcttaaatgtagttttgtttaatcacttaggacttgttcaagaggcac

SEQ ID NO: 38298 - DNA, 260 bp, Arabidopsis lyrata
  Intron number 4 from transcript 907104 (locus 907104) deri ved from phytozome v7.0 (chr-ID scaffold_2; pos 1111281 to 1111540)
atacgtcttttgtaggccaagacccgatccagaaggttccttttcttttctgactcttaaaagtttatactgtttctacatatttttttgatacttgtggggatcataacaaaagcctaagtgattcactgtggagtgcatttgcctctttctttctcttgtttaaagatgtatagttgttatttttattttcttttgaagatggttgttatctctgtttgacatttatattctttggattggtttggcagttgactctg

SEQ ID NO: 38299 - DNA, 376 bp, Arabidopsis lyrata
  Intron number 2 from transcript 325967 (locus 325967) deri ved from phytozome v7.0 (chr-ID scaffold_6; pos 6132973 to 6133348 reverse strand)
ttgatcggaatcatttgggctactttacatttcaggtgtgaaaacaaaattcatcttatatctttacaagttcagtcttttttgataaatcatcttacacatctaaagattccatctttatcatcttagcttacatattcaaacacttctttttctcctttttcaaaaataaaagcgataatttagtagttagcttctcctattttaagctttctgtttgatcgttcttcgcatctagaaattcaatttatttttataatcgaaatgtgatagtccagtgatcttccacctattaagaatagctatatattatttttaatatatagtttataacatcaaatgtcatgtttatatttattttctccaatagattggg

SEQ ID NO: 38300 - DNA, 544 bp, Arabidopsis lyrata
  Intron number 2 from transcript 487514 (locus 487514) deri ved from phytozome v7.0 (chr-ID scaffold_6; pos 2646115 to 2646658)
ttcttcaggttagtttctccttcaatagtcttaagggatttacttcttcagttttcttattctctgcctctgctttcatgattgctttttttcattgagggctttttcctttttgctttatgaacgtgttcaggaaccaaatcattggttgggacactatttaagtcaaattggttgagattagatgttaacaggctcgaatttccggggctagtgtgctaaattctgaatcttttagctctacttcagtctaatgttcacaatagttactgtttcacctcacgaagatctttgtgctatgatattccgttggttctcacttcaaatcatataggtgtgcttataatttactttgattctctggctttgactactcaaaagttcttcaggtcactatgttaagtttagtcgtttggatctttatgaaagagataccttttttagtctctctatatgtcatcaggttaaaatatgttttgtttctctataactctaatttttggtttctgtttaccatcttactttgacaatcggtttttgtctg

SEQ ID NO: 38301 - DNA, 558 bp, Arabidopsis lyrata
  Intron number 3 from transcript 905490 (locus 905490) deri ved from phytozome v7.0 (chr-ID scaffold_3; pos 11375248 t o 11375805)
atttcatctttggtagcggccaatctatttaccaggtgatccgttacattcttcacataataatgttggttttgaagttatgaataggatgatattaatatcccaaatctacaataattttgcaattttttagaagccggatttgcctttaaaatggccaagaatttgttaacagtagacgtccctagttgtgatgtactcaatctagatatatcgttaaccactgagatgtttttacttttcctatgtccaaaaagaaaaatatcaaactgatgtttaattttatgaaaagtaaagatatgatttaaaaaaattgaatccaaactaagaatgttcttgattcagttttgatttgataaccattttcaaaaaaacacgaaaagctaaatatccctaatggaaccattcctaatattcctttagaattcacatacaattaatgtcccattataaaactaaaattcctatttattcggggtctatagtttcattaaataaaaggtgtgtgtttggtgggttgtagagttgtgtgatacaagtgctaggtgggcagctaga

SEQ ID NO: 38302 - DNA, 517 bp, Arabidopsis lyrata
  Intron number 1 from transcript 926218 (locus 926218) deri ved from phytozome v7.0 (chr-ID scaffold_2; pos 13658385 t o 13658901)
ctgtcttttacttccgttgaggtaatttcagaacataaagtcttgtcctttttaatgctccttctatttgataacataaagtcttgtcctttaatgctcctattgttttgaaatcgatcgatctcatgctagtgaaactatcctttgattacgtcacggttgtattagctctttagctttatgttgctcatactttttgttggttgcttttagtttttgtttatctcagtttattgcattgtggaaattgagttctattgaacaattgcttatgttagatcacagctctttagattagtgtgttcttctagtttaggtgatggtgatatgagaacagatttgtatgcgattgttgtgatactagttataattgacttgttgatttctcatacttaatgctttgttgacttcttttctttttcttcaattgagattcactttatactcttgtttagtttcagacttcacattatttataatgttggttcttacaggctatcaacgagcatatcctttc

SEQ ID NO: 38303 - DNA, 755 bp, Arabidopsis lyrata
  Intron number 1 from transcript 946749 (locus 946749) deri ved from phytozome v7.0 (chr-ID scaffold_7; pos 12772916 t o 12773670 reverse strand)
cctgctgcaaagttcaccaactcaccggctcttatgtaagttcaccctaataattcattaattaatccactatatattcttttattttctcgaaattgattgattatctatagtaaatgtgactaattaagggccggagttcatatgtgatttgtatatctcatatagtcaaactaagtgcacaatataattatggtttgttgtgctttttgtagaagtagcgttgtaatttggaatagaggttggtttatttagcacgggtcttaaaccatatcttaatcctaactagaagaagtcatgtcaaattaggatagtgtaatacaattgattgatttttttctatatatatatatatatattttaattttgagaaaccaagagaattggtcatgtatatgaaaaaaaaatgaaggtagtgttatgtagatgtttaagcctatattttaacaagtaaaatctatgcaaatggccgatattatatgatttgtttatttgtgtgcgtgggagtagttggaatttcgaaagaaagattttggaaagtcaaaagtaagttggcgaaagttagtaaacgaaaaagactcaaaattatattaaatggtcagtgataatgataaagcatctttagatcatatgattttaatatcgtatatttcttttaatttatggagtatatatttaataactgaatctatttttttcgtttgttaatataatgagcagatactttgtggtagcactatcggtggcttgctttt

SEQ ID NO: 38304 - DNA, 745 bp, Arabidopsis lyrata
  Intron number 1 from transcript 926656 (locus 926656) deri ved from phytozome v7.0 (chr-ID scaffold_2; pos 15609211 t o 15609955 reverse strand)
gtaaagaaagggtctccgtttctgcttgaatctggtgaactttgtgttcagatccctaatgaattaatcactcgtaacctcaaaagatgggaatctttcattattggtcaattcaatggtaaccttccctctgggggtgctcttcatgctatcttcaacggaatttggagtaatcggtaccgtgatatcactgtttcccgtttaggtgcaaagtcggtccttatcagaattccttgcccaacgactcgaaaacgcgttcttagtcaagggatttggcacattgagggacaaagtatgtttgttgctgaatgggaacctggccttaatcctgaaatgccagaacttacagaagctcctgtttggttggaattccgtggagttccccctcatttcttttctgaagaaggtttcgaacacgtcgctggtatgcttggccatcccctcttctgccatccatctactgtcaacatgactaacttggaagtgggtaaggtctttactattattgaccctactaagcctctccctaaagctgtgaatgtccagtttgagtctggaaaaatccatagggtggatgtctcttgcccttggctccctccgatttgctcccattgcaaccaagttggtcacaacatccgccggtgtcccactgcacccatcacttgtctggattgtaagtcttcttcccactcttcagaaaattgtcccaggaaaaaaaaatcctctggacacgcaaagagcaaag

SEQ ID NO: 38305 - DNA, 388 bp, Arabidopsis lyrata
  Intron number 1 from transcript 472970 (locus 472970) deri ved from phytozome v7.0 (chr-ID scaffold_1; pos 12140565 t o 12140952)
gagcccaggaggtatttctttgtaagtttcctcactcactatctctcctctgatgtatcatatatttacatggccatgtatatatatacatcctttaacacgtgtatgctactaggtttctgcagctatatatttgggtgtttaatttgaatattcctggtatcaagaatttggaatctttcttcttcttttttggttttgaaagataagttagtgaagaagacaacaagataaactttaagtggctgataaattattagttgtctattatattatccttcgtatatatacacacatggtactctgattttgcattgattcaaaataaagaaaaagtttgtgtggttttgtgacaggaatagtgtgagcttgagtcataactataaca

SEQ ID NO: 38306 - DNA, 1066 bp, Arabidopsis lyrata
  Intron number 4 from transcript 494969 (locus 494969) deri ved from phytozome v7.0 (chr-ID scaffold_8; pos 12495867 t o 12496932 reverse strand)
cttaagatcaagattactccagctggtggttacaggtttgtttccgtacgtattatatatatctcaaaagtctagttgctaacttggcatcaccgatcgttgcaattttgttcaatgttcataacgaaacgaaacaatatatattattattaacaagatagtctcagaagagccggaccaaaacacattaatatgaaacattacaatggaactcccattttttaggagccccacataaattttattttagctaaaatatttatatagttataaattttatatacaattaaataatttttttaatttctccacaatcacaagttattttttcagaatatttttgtactttgtttggaacaatagtttagtttaaattagtttactatttacactatagtttttaattaagacaaaaatactttgttttcttaatttaaatggggtcccggattttattggtccggctgtctcagctcgtgcaactttaacaaaaaaaaaagaaaagaaaatatagatatttcttgctggtgcaattattcacaagatatggctggtgcaattattaacaagatatggttggtgcaattatttacttttaacgaaaacatgaagatggctggtgcaattattagcaagatatacctgcaggcttggtgcaatatgatatgaaaacatagatctattatataaattaaagtagtagtgttgcataaaaaaaaaagatttttattatttttaatccaacaattcaatggactttgagtaaaatcgattgtccacttttttatataaaaacatgtgatgttcaattcgggtaaaacggggaaaaaaaaaaaatccagacacaaaatatgctggttaaaatggtttttattattttgaaatatgtaaaaaacaaacattatagatttggttttacattccttgctagtttccggaaaagaaaaacacgaattgaacacgctagaaaacaaactcataccgataatagatagaatcactcatgggtgttgtgtacttgtgtttaacagaggatatcagagaattggagtaaattttacaagtg

SEQ ID NO: 38307 - DNA, 789 bp, Arabidopsis lyrata
  Intron number 1 from transcript 932377 (locus 932377) deri ved from phytozome v7.0 (chr-ID scaffold_4; pos 2088624 to 2089412 reverse strand)
ttttgggagattccgtttgtattagacctgatcaggtactttcttcgttctttgttccagcatttgcatttgaaatcattgatctctgaaaatctctgagtatgcagctgtttgattggcagagatagagaaaactctctgaaaaaaaaaacgaattaggttcccaaatttgtttgagtttgttcgattttgattttggaagctactaccgaaaactgataccatttttattcggttgtatctctttttcttttggttacaattcaacaggagaatcaaaaacctctgtgtttttataccagagttccataggaggttcccaagtttgagagaggtggtgataaagaggaacagtttctacagagaccactacttcctaaaccaaaaaaaaaaaaaaccattggttggaattagggttaagttgagtcaagaaagagagaagcttaggttgtgttacactaacaagttcttgagggttattaggataaatcaaagtggaaaaattgattgagatgatgatgatgataatgggttgggtttatgtggagagattaagttaatagtgaaagattttagccagaaaacagggatatggagatggattgatttactttataactagtcattgattcatgaagatgtatttttgttgtgtgtttttgagtgctaattgtgtgtctcaaaagaaggtggtggaggtcttgttttacccaaacattttctgtttttgtcttttgctcttgtgtctgatcaggttacaaaatccattgaagggttgcttcctttgcc

SEQ ID NO: 38308 - DNA, 274 bp, Arabidopsis lyrata
  Intron number 4 from transcript 497425 (locus 497425) deri ved from phytozome v7.0 (chr-ID scaffold_409; pos 5342 to 5615 reverse strand)
gtcctttcaacggaaatttctcctgcagctttgaggtgagctagctacagtttctgcatcaaattaatctgtccaagttgtcttctataatcttttgccttcatctatttcgcattattgtctcttggttttggattgttggttagatgttcctagacatttgcaacaccattgattctatattccaattcatctatgagttttgatcttttacattcttgtcttagttttgaatttgtttccttatttacaagttcaccttttctatctcagg

SEQ ID NO: 38309 - DNA, 558 bp, Arabidopsis lyrata
  Intron number 1 from transcript 473845 (locus 473845) deri ved from phytozome v7.0 (chr-ID scaffold_1; pos 23136553 t o 23137110)
aggcttcttcaacttgatacttaatcttttgacaggtgaaaaatttaactataaagcatactttaattcgttatatttacgtatcactattaccaaaaacttgaaatcgaagaaggttaaatgttttttaatttccttttcttacatatgatataagttgcccaaattttttaataaaatcaattcaaagatctcaagggccaaatatcatatagttccacatataataatctccatggacttctggacaaggaccaaatgacacttaccacatatcaaacggagacagaccaaaaattcctctacattcaagacgccgtagcacaccgataaaaaaaaaaaaaaacaatttatcgatacattgcatcaagagtgtaatttggttaaacaaccaaaagagtttaatctcttataatttagaacatgactggaatttcgagacaactaatccaactattttgatttttaattattgatggtgtttcacaagtatttttacaagactaacctaaatttgttacaggaaagctggtgaagcctgacaaatcttcggcgaca

SEQ ID NO: 38310 - DNA, 381 bp, Arabidopsis lyrata
  Intron number 1 from transcript 487491 (locus 487491) deri ved from phytozome v7.0 (chr-ID scaffold_6; pos 2574650 to 2575030 reverse strand)
gattgcggttttacgacaggattctgtgtaaggaggtatgttaatctctgttttcgtacttactttgagcgatttaccttttgtccattgagagatctaacagttctagggtttgatatagcactgaagtttttttaaaaagggttttaagaaattgttctctttcttagggtttaagatattcttctgttttcttattctataaattgaagttatctaatttcttgatacaatgtgttatcaataagctcctacattctctcctgaggcctccactgtcaaaaatattcataaatctgattagtgctaattgtgttagtgaattatctggtttgattacatttcagaagaaggtatacaagaagggctagtttcatttgg

SEQ ID NO: 38311 - DNA, 316 bp, Arabidopsis lyrata
  Intron number 1 from transcript 494274 (locus 494274) deri ved from phytozome v7.0 (chr-ID scaffold_8; pos 535150 to 535465 reverse strand)
tacaggtaacttttgagatctgtaacatcagatctgagtttttttttttttttcaatttctctcacttttttagtcgaatttattaaaaatgaatatttttttcgaatacccatttcttcaatcttctgattaatcaatttaaacgattcatgggtctgatttcaaattcctctgcttttggtcgaaaacctagaaaaagaacagatttttgagcgacccatttcttgaattttgttgtttcatgggtctgatctatagtttttgattttgtgaatttttgcagaggagacacaccgttttgcagtgaagagtgta

SEQ ID NO: 38312 - DNA, 481 bp, Arabidopsis lyrata
  Intron number 2 from transcript 477945 (locus 477945) deri ved from phytozome v7.0 (chr-ID scaffold_3; pos 2579183 to 2579663 reverse strand)
cgaacatcattgccaaatatccagatagagttcctgtgagttattttatgcatgaattcgttttatctgtttcttggtggttccgtctcagttgccgtgcgattgtggctttccttagggttcgaatgattagtctaattttgacttaatcctttttcttcaattttctcgattttgctagactttcttggaatttgggttcaatcttagaatttgatggatacgatctgggatctgaaatttgactgatccaatcactctggtctctggtcaatgtcggagacgacttcttttatttgagatttgatttagatctttagttatcatcaccaacaacaaccaatacaaatttgatttaggggtttggatgtgttattggtttggtttcttcatcaattttccagcatttatttgatgggtttttttttttttttataactatttaggtgatcattgagaaatattcaaacgcagatctgcc

SEQ ID NO: 38313 - DNA, 575 bp, Arabidopsis lyrata
  Intron number 1 from transcript 913214 (locus 913214) deri ved from phytozome v7.0 (chr-ID scaffold_1; pos 15815512 t o 15816086 reverse strand)
atatatcaaggtatagagttcttataagtttgatttatatcttctataaaaacttcataattgggacaagtggtgtgagtgtccgatcttgtttaaccgattgaaacaaaactgtatagaaagttctaaattaaatggaaaggtaaatacatcaactaaaatcttgatttattggaaagtctcccaaatttaagataccttttttaatacgaagaatccaaaaccattgacaaccagaactcaatggtaattaatcgctttcgatttggtttctgtatttataagttacaacccaaataaattaatggatttagaaatttaaaattttttgactactacgagggaagaattaaattatacttcatttaagaaaagaaaaaagacatggttctaatttggggaaatttgagcaaaataagtatatttattcttagattaaaaacagaaataaaatgcgagtaatttaactatacttctagatattatttagtatgagcagtagtaagcttgtgagactgctattcctaacattagagcttctttcgtattttatttttcaagccaagaactcactg

SEQ ID NO: 38314 - DNA, 629 bp, Arabidopsis lyrata
  Intron number 1 from transcript 316359 (locus 316359) deri ved from phytozome v7.0 (chr-ID scaffold_2; pos 16157719 t o 16158347)
tctaagggttttactgggtttcaaaagcgtgggtatcgtttcttttcctctccctttttgtgattttactgggtttttaaagtaaagttcgaatctttccaaggaaaagttctgaaatttctgagttctcttcctctatgatcctcaggttttatactgtactctgtttgttctagttagctacgttttcggagataaatttctggttttgatttagggtttggacagagattatgtgataaatcatcgaccttttttcactactctctttagcttttctggtcaattgtgctttagctctaccaagacaaagacatgtgtgaggattcagaaaagaaaaatgagaaattagtagtctttacttgcttttttccatttttgtgtagttcttgctttgagcagcttaaagctcttttgatgcttttctctttattgatagactagcagctggacactgtttagaccttcttctttgagaaattgttctccagataaagaaataacatcagaaatcttaaattcttcacctgctccatatgattttggtttgcggatactaaataatacccaaaaaaaataacactttattgggctacttgtgttttcctttggcaggaagtcttggatta

SEQ ID NO: 38315 - DNA, 701 bp, Arabidopsis lyrata
  Intron number 1 from transcript 950171 (locus 950171) deri ved from phytozome v7.0 (chr-ID scaffold_8; pos 16934120 t o 16934820 reverse strand)
aaggagctcacatcaatctcaaagtcaagggacaggttttgtatttttcactctctctctcgctttctatttcttgcattgtgtaacgattctttgtctggttcaagttttgagtgtgattagggtttttttagcttctgattgctttcaattctagggttttgggtttgtctgcgttatccccagtttttgttcttaaaattggtaagcttgtgtatgcgttgtttatatatgtagtgattattgtgtaagcgtgacttttaaattggcttttaaaaaattgaaactttgaagcaaacaaaatttatttgagatttgtgaattatgttttgtcataattgtagcaaacagaacttgtttgttcataacaaaagcttgaatgtgtgtgtgtgtgtgtgttttttgatgagatagtgattatcttcgaataaattcttgcagtgttgtgactaagcttaagcaaattataaccatgaactctcattaaagctttttgtagtgatgcttttgaagtattgagcatctattcgttgcaatggaaatttgtactgttgtgatttgttttgcttatgtatcagtactcattgttaggcatttttcgttgttagttattggttggttatataatatacagttttcttatcgagatatactcttcttgaagtaacaaatcatcaatatttttcttgtggatacttagg

SEQ ID NO: 38316 - DNA, 770 bp, Arabidopsis lyrata
  Intron number 1 from transcript 894311 (locus 894311) deri ved from phytozome v7.0 (chr-ID scaffold_6; pos 10457207 t o 10457976)
aaaaaggtacgtatgatcccattaaattcaattttactctaaatttttgggtactgttttaaaacgtcatctaatctacacattctattattttaaaatatgtgttttttaagttttttcttttcttttcccagttatgttttaagttatctctattaattcttacatataagcgataagaagaattgaagacgaaagtgcgaaggaggagctgatgggaatcttaaaaaaaaaatacacgcagtgacgatttaagccgttctggtccccctcaaattccatctcttgactggtaaatttcgtttcatcaataccttttttttttttttttttttttttttttttttttttttttgtttcatcaataccttccgcttcaaaattaataatattgattacgaaatattattaactaatgtaaaaaacgaaactataatacgtaactgttttcggaaacaaaaagagtttacgtcatcaaacagaaaatctttacctcaatttttcttttggccccgatgtttttgcaccagccgtttcctaggaacgacatttccactattgcgtactgttttgttttttcttttgacttcatcacttcaacgtatatttgcatgtgcctatagaatttagatataaataacatttcataatgatacaaaaaaaaaaaagataataataataatatccatatctactcgatcgtttctatggtctaagctggtttgtttctaataggaacgatttgtaccaccgaacctcattggtgtcat

SEQ ID NO: 38317 - DNA, 648 bp, Arabidopsis lyrata
  Intron number 1 from transcript 915880 (locus 915880) deri ved from phytozome v7.0 (chr-ID scaffold_8; pos 4184888 to 4185535 reverse strand)
aatcggcgtatctctttcaccaagtatttctggtatgcatgtctttctcatgctacgaattattgtatctttgaatatataagaaattagggtttctgtgattttaggtaaattagggttctttgaagatgaatagggcatgatggtggttaaggttagtgactttagccatgcttgaacacgatttaagaatctctgtttattggaattgcaatttcaaagttttagaagaaaaaaatcaaattttacatcttcttttctctgcttttgccttcacgagtagagagatccatggacacactcattgctcagttatagagacaatttcatgttcttttcaaagttatctcctttttagggatgactagtatctactatcttagggttcttattgaagtttatgtattagaaattagggattttaagaatttggtttagtgtttgtgaaatgggttattgtctctttttcaaagttgtctccttattgaagctttttttttgtccactattttagtattcgaaaacttttgttgtttgcagtattcatgttaatttctttcttagatgctaattagtaacctctttactttcttactgcatgaagctgggtgcatgtagaagaagctcaaaggggaattgtgtacattg

SEQ ID NO: 38318 - DNA, 725 bp, Arabidopsis lyrata
  Intron number 1 from transcript 940182 (locus 940182) deri ved from phytozome v7.0 (chr-ID scaffold_6; pos 2799255 to 2799979)
aagattcaatccgcttttcgtggctacttggtaagtaatttcttctctcttagtataatactagtaattatactcaaattcgaaattttaatctataattgtgttttaacgaaattaagttcttgagccaaagtgtggaatagctgtctgatgttgatttttctacttataaacccaaattgaaatattaactaaaaaatagaaagaatgagaataatttgtatttatttgtaatggtccccgaaaaagactatgaaaggagacaaatgaatgaataatgataccaagaaacttgttagaaaccgatacgattccggattctctaccgagtaccgacactatttaatggtactacttactatagctaaaatttggtcccaaaaaatatgctaatattatctcaaacaaaatcttacctaactctggattcagctaagggcttatcctttgtaataaatcaatttttaccacaatttatttagtttgttttttctttaaatgataattggataggttatgtagttcaaacacataattcaaagattctctaatccttttgtttcggataaacaaattaggtgtgtaccatttagaagaaaatgattgtggttgggaaactataagtagatttaataggggtattactctgtggtttgaattaggtgtgtaacaaaattgtctttaattcaggcgaggagggctttaagagcactgaaggcattagt

SEQ ID NO: 38319 - DNA, 501 bp, Arabidopsis lyrata
  Intron number 1 from transcript 335144 (locus 335144) deri ved from phytozome v7.0 (chr-ID scaffold_1; pos 7976475 to 7976975)
tgagacaccaacggttagtacattttcttcacattttttatttagtatatatacatatgaatgctaacatggtataatccttcgttctatgaaaggattttcagaaattttaagggtatatatatatatatcattcaactaatttttttttggtaagtatatcattcaactaaatatattatcatctgcagttttctgtagactgtaatataattcgtatcttcaatttacaaacaaacattttactatatctttagggagaaatgattcactactatatctagaaaatttatagccatcaactttaattatctcgcttaatttggttgattagagagtacaactttttttttgttttttgtcaaactgtccaacttttggttaaatatctttctcacttctatttttataagaaaagagaaaacatttctcaaagaccgtaaattcctcaaaaacatatcaaagtttgggtttaaatttcttgggttgttgtctctgcag

SEQ ID NO: 38320 - DNA, 655 bp, Arabidopsis lyrata
  Intron number 1 from transcript 920960 (locus 920960) deri ved from phytozome v7.0 (chr-ID scaffold_1; pos 8554744 to 8555398)
tacgttatcactttctgtccttctcccaacaccaggtaaattccttaaacacccttcatctatttactttcacccaattcgtaaaaggtgattagaaataattttcctctatgataagaaggattttggcttgttgtatagtcgaagtcaatagatactcaataatttcatctataatcattaattttgctatacaagttttattttcgttcaatgatcgtttgtcacgcccatatataaggaggctttattggtttatggatttataaagatttagaaatctaaaattcaatcaattttaaaatcctaattaaaatcatgtgttattggttttatgatttataaatactagttaaaattctatgtttgcttagttaaatattagtcatttgttttggatttcaaaatccaaattttgttttaaatggatttgaatggatttataaaaaaacaatagaagaattcaaatccatagataaatacatgttatttcaaaattcatatgttttgataataaaaaaatttcaaatcctatataaatttataaatcaataaactaatagacttagacttagagacacgtgggaacttcattcattcacttattcctttatttgcagcctaaaatcagccgaggaacagagcacagagacaa

SEQ ID NO: 38321 - DNA, 748 bp, Arabidopsis lyrata
  Intron number 1 from transcript 471225 (locus 471225) deri ved from phytozome v7.0 (chr-ID scaffold_1; pos 4305021 to 4305768 reverse strand)
gtcgacattgatccgtttcttactctccgtcgccggtaagtcggttaccttcaatcttctttcttcagatcctctgtgttgtatttctctgtaattgtttcttccattaggctcttgatcatactcttttgaggcaaaaatgagttggcgaaatacagaacagagcaatcagattgttttctttataatctgtgattgaaagagaaatattttcttttggagaaatcggatgagtttcggtgttttctgggtgtttttttttccaaggattcttcataagtttgagattcttagattgaaacgggacttttggattgatcccattaggcaaaaactaagctttcttctgttgtgaagctcaactgcaatttgttgttttgagttcgatgcttgctaattgtgatttctagtaagtgaaatcattcatagttacacacgtgtgcagttcttggtttgtttggagggattttcagattttgtgtagttgttgagttttatactagagctcatttttcttcagaaaacgcccttgaggctctgcggtgaagcattgcattaccttgaaagctcatttgttaagaacatgctctgatttactttggcgggatttgcggactagttttgtttgaatttgtttgagtgttacagtagatctttgaggctctgcggttcatcacaatatcctgaaaactcatttgttagaaacatgctctgatatattggctggttttgcataggaacagttgaa

SEQ ID NO: 38322 - DNA, 770 bp, Arabidopsis lyrata
  Intron number 1 from transcript 938044 (locus 938044) deri ved from phytozome v7.0 (chr-ID scaffold_5; pos 15774363 t o 15775132)
accgcctcctattcaatataaataccttgctcgtattcaatttcagatcataactaacccttgtttttttgttcttttttttcaaatttttttttgcttctacctaattttaatttttctttttattgtagggtggatgtatgaaggggacgatgtgaactggtgtatggaaaatttggacctaattcaatgaataaacaggtgatcttatagtttatatgtacaaatttgatttttttttttgtatttatggtttcactattttcaccactaatcaatttttataatcaaaaagtttggtttcaacttttgagaaggtaatcatcgatggtttggtatgtttctttttgttgtaaaaagatgaggtacctcccgattttgttgaggtacatgttcttattattttcaaatatgtcttttttcagaagaaacactcaacttttgataacacagttgccacaaagtcagaaagatgacttatttcagggatgaatcttcagaggaggctaatttttgtcgttaatacaatttaagtattcctctctttagattagggataacaaacttgctgttaaattcaggaattactcttcgttgccaatctctctccccaaactaaaatattacatatatggaagtagtaacttaaagtttttggtatcgaggtcattctaaggcactgagattcggactttggtatgtataggattcgttttccatgcactaagatttaattattgtttaatttattggtttttaggtttctttcc

SEQ ID NO: 38323 - DNA, 1044 bp, Arabidopsis lyrata
  Intron number 1 from transcript 930532 (locus 930532) deri ved from phytozome v7.0 (chr-ID scaffold_3; pos 11736376 t o 11737419 reverse strand)
tttacaaatcttctccttattgctgcttctccaaggtacgctcactcttaatttactaataattaacacttccccttaacaaaattacaagtaaaaatcaaagatatatatgtgtgtgtgtgtgtaatctagttctgtggatagaatatcatttaggtctatattgaatctatttatacaagaggtaaatatgataatatatctgtaaataaacatgaagaacgatgatttagaatttaaatttacgttcgaaagagaaatctaagcacatgcaatcaaaatatataaggatatacagtctgatcaatcgtacaagattccttcgtgaatatgtgcttcatgaaaaaagacaaaaaaaactcatcctttacgataatatacaatagtattagccaatatttaatagtttttatgtggatgatatctacagtatatgtaatgaagtgtaacttgttgccaagtgttgaacatgtggacatgatcagcttctagcttgttggatgaatatgggatatgatcacatcttatcctactttcctgcagtctacgcatatatacataaatacatatatgtaagcatgctacatatgcatatcaatatgtcatgtaatgtgttttagtatgtcatctcatagagatctcacatcgaaaattatataaaatctgctataatataaatatcatgaatcagtatatttattgtcaatatttttaggttgaaagtactaaaacttaaacccatcttaatatatcacgtggaccactaaaaatactacattttcctagatatagaaatttattgaatgggagttaactgtttgaagtatcatattttgactgcttactttagatatttattatagttataggtgagaaagtcggccataatttaatgcaacaattgataatatttgactatatatgtctaatgcaacgtacttataatgtaaaaagaaaatgatacttagatgatcaaattagtaacgttattagattaaaatgcaaataggtatataaacagtgaggattacaaaggagggtttg

SEQ ID NO: 38324 - DNA, 428 bp, Arabidopsis lyrata
  Intron number 1 from transcript 354609 (locus 354609) deri ved from phytozome v7.0 (chr-ID scaffold_7; pos 9118453 to 9118880 reverse strand)
ctcttgaggtttttttcttttctcatttcttcatctctcaattaccattttttccttggaaaattttatagaggcataactcggaaactctgtgacacatctaatgtgttgttgtgatccaaaaagtcactttctttgagtttgttttgcttactactgaagaatgttatatagtccttgatcaggagtcaatgaggaatgttctttagtctctattggtttttttgattcagcttatctctctcaggaatgtttcattaggctctagtggattttgattcagcttattggtgtgtgttatgaaattgaaggttgtctaggcattttaaagctgactttaaatgcaatgactgatcttttatcttaatgtttagccctttttgtctgatttcttgtgtttgttaaatgtctgttaggtatcgcggtgg

SEQ ID NO: 38325 - DNA, 912 bp, Arabidopsis lyrata
  Intron number 1 from transcript 494217 (locus 494217) deri ved from phytozome v7.0 (chr-ID scaffold_8; pos 120960 to 121871)
aacactacaacatccatcgccggctcgcccttaacgttagtcttgtctttatctctttatcttcttcttatttttttctacatatttattcagtatttgattattttcgtccatatgaattatatatatatttttaaaaaatatcaacggtagtttcaccaattgtgttatttttatttatatgaattatatttgagtttttgatgtgggggagacatgttgattgtgtgcgggtccacgggtgaattaattacaactatgatcgtacttaaataggtggattgcttcaattgaatccctacttataaaattatacacttatgataacataacaatgtgtagtggtccatgcatgtttatacgtggggatgccagtttatatacttttccctcccccacacatttattttgttttgattcttcacatattcaataatttgtgtctacataactttttttttttgttccagaaagtacaaagtctaatgataaattgatcatttaaagttaagctgttaacatacacaaagagttctctctattcaattttgattttttttaaaacaaacaaattacttatgcaatttttttatattattatgagtagtatagtagatgagaagtcatttcatggcctaggccaatccataatagatgagagacacgtaaacactctgtttctccaggactatttaaaaagcaatgagaatgatttaatttgtgcgggctccaataattagctcacaagtcacaactataatcatcatcacctttttaaaactataatcctaactaagtggagctcaccagtcactacgtatctaattatgataagttaataacaaaacttaatggataatctatattattcttgaagataacgttggtgttctgcgtggagccgctaaacgc

SEQ ID NO: 38326 - DNA, 295 bp, Arabidopsis lyrata
  Intron number 1 from transcript 328581 (locus 328581) deri ved from phytozome v7.0 (chr-ID scaffold_7; pos 4343876 to 4344170)
aatccgattggcaccgctacaatctcaagcgcaaggtcaattttctgctgttttctctaacccaatttgacctcagactatttttgtatactttttccattttgctgtcgaaatgatttgttttaaggttatagaatcgttctcttgcaggggaagaaagtctctagattttatatgaaatcttgatttgaagcttatcatagatttggtttcttgtacgcatttgaatctttttgtatttatggaatttttgttgttaggtggctggagttcctggagttacagaagccttgtt

SEQ ID NO: 38327 - DNA, 499 bp, Arabidopsis lyrata
  Intron number 1 from transcript 478675 (locus 478675) deri ved from phytozome v7.0 (chr-ID scaffold_3; pos 5251728 to 5252226)
aacgactcaatcacacacctcagatcttacttcaggtaacgtcactcactgacccatctttcaattatcctatactgtttcagattctggtctaaatttgattcctttacgtttgatctctgcctttcctttttttttcaattcttcttagtgggtttggtgtcgaatcccgtgattcatgtttttgatgtgttagggctcgttgatttcgatttggatttagaattacgagttttgcttttgaaatttttagtagtgaatccactgttactagagtataattgaattggaagagtaaagttaggagaattcgatctccttttgctaagatctgggattcatgctctttgatttttgtgttccttaagttcaaattttgcattaggatctacttttgtttttgccgatcttgatcttgttcatgaatgattcccaccgacttatttgagtttaccggttatgcatgaatacagaggagcaacctgctagtttggacatc

SEQ ID NO: 38328 - DNA, 489 bp, Arabidopsis lyrata
  Intron number 1 from transcript 487890 (locus 487890) deri ved from phytozome v7.0 (chr-ID scaffold_6; pos 4224449 to 4224937)
ctccgatccattgtccctaaaatcaccaaggtcaaattccataaacctcctccagtcctccttccacagttttgatggttttattttttagtcaagactaattgggccagatcacaatgttaaatggtgcaaagaagaagaaaaggaaggaaaagaaacaaaatattcctcttgttttgaattatttgacgtttaaggtctttgcgcaggaattaagaaaacaatcaatttttctattttatctttgtttaatatattctctaaattattttattggtcaaaacattaaaactatgaagataaaactagaatttttacaaaatatccttcctttttgttgagttcttaacgtgacatgtatgttttcttcctgttggaaccttttgttgacactgttcattgataatggttattactttttgtgaatctgcatagactctagtttgagaaaatgtatctgatattttatgattattataataaaatcag

SEQ ID NO: 38329 - DNA, 352 bp, Arabidopsis lyrata
  Intron number 2 from transcript 476588 (locus 476588) deri ved from phytozome v7.0 (chr-ID scaffold_2; pos 16326343 t o 16326694 reverse strand)
ttcttgctgggtaatactcaatttcttctatttctcttctcttcttctgtttttgctccaccgtcaccattacaaagaccctgaatctcttcaattttcttccttttgccttaaagctccttccttttagcgaatagcttctcatatgttatactcaattcatcacagtctagggtctagtttctatttttggacataaccctagtttaagttacgaaattctctcaaagttgatttgattcctataaaaaaaaattcatcttttggaatgttatgtgtgaaactaatcataatctctgtcgttgaattttttgcaggcctgtggttagtctcgtttatcctctgtaagtga

SEQ ID NO: 38330 - DNA, 698 bp, Arabidopsis lyrata
  Intron number 1 from transcript 903465 (locus 903465) deri ved from phytozome v7.0 (chr-ID scaffold_3; pos 2377839 to 2378536)
ctattctgtctggtaacttggatcaaaataagttggtaggtgagtattttttataattatttattttgtatttaaatattacgttaatcattgggatatatatttacatctatgattctgttttagatgttctgggtcaattggttaacgttggagaagctcaaataattgatgtccatggtaaacctaccaagaagattgattttcagctaagagacactgagtaagcatttttgtttttttttttacataattttattaaaccttttcttctgatttattatcttggttttttaattctataatttttctttggttagtgataaccgtctaccatgttcactatggggaaagtttgctgaccaaattagcaaagttgcgcaagagtctcttggttctgtcgttatttgtttgataaggtgggccaagttaggagaatacaaaggtatgtaatgttattattggtgaataacatgaccctatataaaaccacaccatcatatatttatcgttgtttgccattatgacttgcagagattaggagtatttctaatgcttttgatgcttcggatgttttagtcaacccaattttgccggttgttgatgactttaggagaatgtgagtaatctacaaacttttacatacttttgtttttgtaatagattaaaattttgcttttaatctttaatttgttgtg

SEQ ID NO: 38331 - DNA, 496 bp, Arabidopsis lyrata
  Intron number 1 from transcript 487389 (locus 487389) deri ved from phytozome v7.0 (chr-ID scaffold_6; pos 2178367 to 2178862)
tatcttccattacaaggtattatttacttctcactttaccaaaagctgtcttaattctgtgattaccaatattgttgagtgttgacgtttttggtccgatcttctttagataaatctggaaatgacgatatttgttttaagtattacaggcaaattcatatgaatttatcctatatggatctctacttttgacccttttcttggtcattactcattagaaatctcaaatagcaaaaatatccaaaaaaaacatatgaaaatataatcttatcaacatttgttcacatatgaattgacattaatttttttggttccatttgttagtacgagtcttttttttttttatatatgctaattacaaaaatgtgtaaatgtagaacttttggtcacaatatataagttttttctaaatttcctaaatatatttttgtggtgttagtttcaataaagataatcttgatattatctcaattgttttaaacagattcagaacaag

SEQ ID NO: 38332 - DNA, 615 bp, Arabidopsis lyrata
  Intron number 1 from transcript 925672 (locus 925672) deri ved from phytozome v7.0 (chr-ID scaffold_2; pos 9980691 to 9981305 reverse strand)
tactgtgtggtacctggaaaatcaactaagcagtacgtcacttttggtttactccgatttgctttctattggtttctaaaacgtaggaatgtgtcaaaatcttaatacaacccggtttttttggttgattccggttcttttcctttggtttggttcctcctataggaaggctttaaaacactattcaaggattttcggtttatgaataataatatccaaaataaattttatatattatggatggtttggttcagatttggtttcattttagattaggatattagtcaaatattttttttcttagtatagtactagatagtttttttttttgctggctttcatattcaatattatttcggattgaaaagagttaattcatttaaatcatataaatattattgttttttcaaatcacttattttgggtagagttggatcataccgatttatccggattgaacaccccaaattaaacaaatttttttatgttgtctggtttcttgtttgattataattggtttacagcataccaaaccgggtcttcttatagattaaacttcactgaacttttttgattttttttgaatagggtcgttgccaaaattttaccaaggcc

SEQ ID NO: 38333 - DNA, 566 bp, Arabidopsis lyrata
  Intron number 1 from transcript 320379 (locus 320379) deri ved from phytozome v7.0 (chr-ID scaffold_4; pos 5214156 to 5214721 reverse strand)
gggatttctacagagacgcagcaaaacgtaagaagaaatgactaattttcttggttcacgaatttcctctttctttgaccgaatttagggttttgatctttatatatatctcgtgttacttccttgttcgtttgtattttctgtgcgttggtcttttttaatggatttgatgatctgggattctcgattttctttgagccagaagaatctcgttttgtttgaatttcatctcctttgaggaaaaattgttgctaagatttcgagcaatttcgtaatatggttgtagattaattgacaaatccgaggattagggttttgggatctatgattttatcttttgattcctgttcatagttggtttctggcaagtataatttgtatagttcggttttagataacagacgaattgggatgtgaaaacttgttagaatttagagatgtgattcaagacagattggtttcttatgcttattattcgttttgatttaagtgtttctgggaggtaattggatttctatctttgtgatattgttgtatcaggcggtttcagaggctgcacaaaagag

SEQ ID NO: 38334 - DNA, 757 bp, Arabidopsis lyrata
  Intron number 1 from transcript 355435 (locus 355435) deri ved from phytozome v7.0 (chr-ID scaffold_7; pos 14617710 t o 14618466)
tggtcctagtacatttgaagattccattcgtgagcctaacacagaggacgggagctatgctggagatgatgaaacagccagagattcgttctgaagatgatacaagacattttaaaagtttttacaagctttaatacagattgtaaaacctttaaaatagatagtaaatgctttatgaaataattgtggttcacatttctaacttaaattcatattcttttttatgcagtttgatattaaacatatcattggcgatcctgaacaatattctcatttggttctccccccaaatccagaagacaaggactggtttgaagtctttgaccttgtagtccaaggttataggatgaccaggcaacaatggattcatggatggattgaggttgcagaatggaaaacgcaaaagcctgtgaatcagcctagacaaaggcaaccaaagtctgagactgtaaatcagacaaaaccaaggaaatcaatgtctgatagtgaaacactagaattgatctacaaggcatgtttagaattgaacaagagaatgttggtggtggagaaacatttagggatcaaagaacctgatgccagggatgatgaagaaaaggaattcccagcttcgtcaagtggagttgtaagtggaaacaaaacgatatctttttaaatatatctttgatctataggatggtcaaatttgattatgtttaaatatatttttggtgttacaacagaacaaaaagactgaagaagagtttataattgtctc

SEQ ID NO: 38335 - DNA, 201 bp, Arabidopsis lyrata
  Intron number 2 from transcript 488115 (locus 488115) deri ved from phytozome v7.0 (chr-ID scaffold_6; pos 5193084 to 5193284 reverse strand)
aaaaaggtaaaacaatctcttctgtttttgaaggaaatgaacaattagttttcacacaaaaaaaaaaaatgaaactttttttgttttctagctttgcatttgatattcgatttgtatgtttatttatgattttgatgcaagatgattatatttagttcttgtttggaaaacaggagaaggagattaacggaggaacagcta

SEQ ID NO: 38336 - DNA, 225 bp, Arabidopsis lyrata
  Intron number 1 from transcript 948181 (locus 948181) deri ved from phytozome v7.0 (chr-ID scaffold_8; pos 307868 to 308092 reverse strand)
ggtaatattctcttcttttctaatttgtgtcgcatctcttatgattttttattagtttatttcgaataagcgtgcatagagagcttgcagaaattaaagagattggttagtgatatgataattttgatatcactaaactctacaataatcttttatcacttatttttttttcttgattcgtgttggaaagaggagtatttacacaacctggagaaaaatcttgag

SEQ ID NO: 38337 - DNA, 430 bp, Arabidopsis lyrata
  Intron number 2 from transcript 488346 (locus 488346) deri ved from phytozome v7.0 (chr-ID scaffold_6; pos 6104315 to 6104744 reverse strand)
tttaaacgtcctttggggtcttctcgtggcgaatcgtgagttcccttttcgaaattcaaatctctagctatcagacattatgctgctttttttttttttctttctttcgtgtttgtgatgtttgattccctttaaaaagtatttgaatttctaggtaagttggtgaactggtcagttttactaatctagattttgcggctttgtgaaatttctagattttgtttgtgatcataggttggatcttcgtgttgctttggtaaaagaaacttaatttttaagcccatgcaattttctgacatatagatcagaagactctagttttggttcaagattatctttttaatgtctctattgatttctgggttagctggttgtccacttattgtttgcttgcaatttactaagtgattagagcttgtttgccgcagat

SEQ ID NO: 38338 - DNA, 537 bp, Arabidopsis lyrata
  Intron number 1 from transcript 486397 (locus 486397) deri ved from phytozome v7.0 (chr-ID scaffold_5; pos 19285410 t o 19285946)
gtgatcgcggctgcttcttctttttccctcggtactctttcgagatctatctctcttcattttgtttcctctgtattgttcattgactcatctcaagttagtgcatgcctgtaagagccgaattaaattaactttaatggcgaaagcatttcgaagaattctttttggttgactcgttttgatttttaatcgaattggtttctttagctccatcgaaatttgttattttggttgtctctgtcttcgaattgttttgttcaatctttatgcttttttggcgtttggcctgaaattaatttcatttttttctctgctttgaatctaacgagacctgagacaattatttctgtgtcaagttttttttttttgaaatagtttttggttttctggggaattaaatgctgatttcattattcgtgatctttaaatctgattagtaactttaaaggtctcttctttttgcttcttcttccctgaaaatttcaatttttggtatgtctttattaggagcatctcattgtcatcaatcttacgcgg

SEQ ID NO: 38339 - DNA, 618 bp, Arabidopsis lyrata
  Intron number 1 from transcript 945887 (locus 945887) deri ved from phytozome v7.0 (chr-ID scaffold_7; pos 8657480 to 8658097 reverse strand)
cgatcttctccgtcaccaaagaaaggtgagtcatcatctctacttattggccacctatagattgtgtgtcagaattagctgaattggatagggtttggtgaatcatctttagtcactgtgtaagttttctgtttcttatggaggaattggtgacacacaacgaatgatgccaatgggtggatttgacatccttgaaaatcttctcctacattttgcattctgatcttggtccaaagcctgatttttgtatcactgtatttccaaattttcctgagaggacaagatccttgtgttctgcaagaagccattgattgaatggaagctatttgatgcgttttgtatcattgcatttgcaaattgtcgaggactcaagtatgaagactggataaaaacctgctcctgctttccttgtgtggactcatatatccatatgaaatattcttcttttcctcatgatagtgcattttatagagtaagtaattctatattgcaggcctgtgaggcgctcaagctgtgatccaaggcatcatggagatgtgttgaattacatactcaaatgtttgtaaatcaatctaaatcacctctcaggagatgccttgatggcttttgtggcgaagc

SEQ ID NO: 38340 - DNA, 540 bp, Arabidopsis lyrata
  Intron number 1 from transcript 479073 (locus 479073) deri ved from phytozome v7.0 (chr-ID scaffold_3; pos 6797922 to 6798461 reverse strand)
tgaatcggattttggtgccctaggtgttccttggtgtaagcactcgacaactctttttcttttaagcctttatttgttttgtgttcagcattgtgatttggtttttgtgtatccttgagaggcgtaatcactcgacaatctctagtgattccttgtggattttactcaaatgctttggttagatttgatctaggtttccatttttgttgatagtatttaggtcaatttagaaattgttctataaatctgtttcagatgaggttttagtatcattgaattcaaggcttgtagcttccactggttaatctctggatagtagtggttgtgctgtgtgtagacaaatcaatggataagaaccataaattgctctagctcactttgattacgagttttatactctgagatagcaatgttgttgttctcaatttttccattaaagcaacaggaagatgagttttatggcacttgtttataaacaaattgatttgttgtgctatggaagtatttaatttttttctttggcaaaaggcagatcgaaac

SEQ ID NO: 38341 - DNA, 411 bp, Arabidopsis lyrata
  Intron number 5 from transcript 474094 (locus 474094) deri ved from phytozome v7.0 (chr-ID scaffold_1; pos 25747746 t o 25748156)
gtacatctggtaagcatctctagtttgttgtacgacatagctgttatattcagggttgttgcttagctttggatctgtttgttatagactaatatttacttaggtcgtagagcaaaatcagctggctattcttaaaatgattttgtgaattgctttcattgaccaaaagtatgaacaaaccaagcagcgtctgattcttccattgtcattcttacccatctttgcaaatgacttataagttttaatgcctattaactatatagagaatcatcaccaaagagcgaaacggttgcttcttttgagtcactctcaggttctttcgtcattttgattggcatatttcttagccttttcattcagagatatgttttgtttgtttcatgtaataatgatattgttttggcaggttgg

SEQ ID NO: 38342 - DNA, 968 bp, Arabidopsis lyrata
  Intron number 3 from transcript 476161 (locus 476161) deri ved from phytozome v7.0 (chr-ID scaffold_2; pos 14411257 t o 14412224 reverse strand)
ttctgctgcgctaagacctccccggtaagtccgatcaatacatatttcaactcaaaatactaattatttttgtgattatgagaaaaatactacttattttgcacccaatgatataaagtgacgaaatggatatagaaaaagtaataatttagtaaaatggtgacgcgtaattgccaactggcgagtccgttaaaaaacctatgaccgtgtcagcttgcaaggcttgccttggttgacttatcctgttacgcctattggccaccggcccatcggaaaagacgcagaccaaatttgctttcacaaaaaaaaaaaaaacttattaccatatgttttttttttgtcttgcgtttacatcgtttttatggtcaaatgaggttgggaacaaaaactgttatagtcaaataaggtagaaactggaatgaaatttgcttttattaatttattatcagtaccacagagaatacaaatttatacgtaaatgataaaatgaataagaatagagaatcataaattccgcatatgtttcattctttaattctcatatcaaaccacagagacataagcacatgctttattcatcctcaatcaaaacatttcacccccaaaattttataatagttttatcaatcactatcccacaaaaaatatatatatattttaaaatataatctttcccatttttgtggagtttttttttctttccccttcaaaaaaatgtaagagttgagaaccaaatggcataatagagatctaggcctataaataccaatatccatctctctacttctgcattaactgatttcacattcttcgataaggattttttactctccagccaaaaaaaaaaaaaaacctcctctgcttttgtgatcctttaaggtttctctcatcagatccaattccatgtttcagcatcttcaaatttcaccgattaatattttttttttctttattaggaagaagacgaa

SEQ ID NO: 38343 - DNA, 253 bp, Arabidopsis lyrata
  Intron number 2 from transcript 896432 (locus 896432) deri ved from phytozome v7.0 (chr-ID scaffold_5; pos 2482127 to 2482379 reverse strand)
atcttccaaggagaagaggcgctacatatccattggtaattgataaggcctttctgttttaccgtatatctatcagtaaactaacagctctattcattatcggatatatcagattattggttatcaacttcgcataccttccaattgcatcgacatgactctcagtttgattgcttattcttttcagtattaataaacagtctcttggaattgtgtagttttttgataatctgatagtgttaaagaagaaagt

SEQ ID NO: 38344 - DNA, 263 bp, Arabidopsis lyrata
  Intron number 4 from transcript 334563 (locus 334563) deri ved from phytozome v7.0 (chr-ID scaffold_1; pos 5220555 to 5220817)
cacatagtgaagtaagttttgcaactagagataatgccattattctatgctgtatctttctcttgacaaaatgtattttcttacgttcttttccagctgagaaaggcactagtcaactttgaatacctggtgaggaaattatctctataagaagatttgctatctttgtgatgaacgttttgattaatagtttctttaattttttttttttttctcacatttctgtaggctctaaactacagagctcaatttcaactcgggag

SEQ ID NO: 38345 - DNA, 820 bp, Arabidopsis lyrata
  Intron number 1 from transcript 325255 (locus 325255) deri ved from phytozome v7.0 (chr-ID scaffold_6; pos 2389942 to 2390761 reverse strand)
tgcttttaaaccaaaatcggccaaaaacgacgccggttttgtggtggtgctgaagaaacgccggcaacagatttaagagaggaaaagataaaagccacatgggatttaatttaaggtcatttttagttttttcctttttttttggtcaaattattttagttatctcaagtaaaaatcttataaaaaaaaaaaaaaaggaaatgggcgtttgacttgtattaaaaaaatggaagtaaaggataaaaaaaggttaagggttaatgagagagagttttttttttttgataataaaatgaaagagagtttatattatttaataaattgtagtattataaacaaatctagaaattaaaaaaaaaaacacacagatttgagggattaaaagttaaggatttgttttcccatttaacttagtggcttgttaaattgatttctttgtccaaaaaaaaagaagttaaattgttttctaggtgtatttaaatactatttactcgcaacaaaagaaaaaaaaaaaaaatccctaaacgctaaagaataaactcaaaatcctaaaagaaaaaaaaagaacaaaccaagctaatctttctctttcgatatcggattcttttttttttttttgtgtatcgatatcggattctttcttgtcggaggaaaccagaaacctgttaagcaaggtaaaaaactaaaacttataacgttttcctgtttttgtacctcatgtttttttttgtatgttatactttgtcagtagctaccaatattggtcattgccaaagcagaattgttatgaaactgttgtgatgttgtttccttccaggta

SEQ ID NO: 38346 - DNA, 630 bp, Arabidopsis lyrata
  Intron number 1 from transcript 946319 (locus 946319) deri ved from phytozome v7.0 (chr-ID scaffold_7; pos 10637963 t o 10638592 reverse strand)
ataaggtaaagctacttgtgttccttttgctgtctgttagagaagaagatcctgtttctgattttccacatttgacccttcaaattattggtcggagagtcttgttcttatacatgtatctagtttagttagtactcttgaagttgaagggtttttgagttctggatttgtccaaagttttgagctttggttaacttttttttgagttaccttgagatctctgagctccagacatggttgctcaagagtttgatttctgagaaaaataaaactgatttgtatctctgtttaggattttgtgaattagctctgtttggacgatccatgtctatatgtctcaatctttgattagtccagagtttgtacaagttgttagatccagaattgaacatagattcattcttttgtttatatgtttttgttttgtttacctttcttttggcgtgacaaaagtatatatttttttactaaattagattcactctgcgtaacggctatttcttaaccactcttttaggataaaagtttccttctttaggcttttgattctcagacaagcattatgcttttagcttttgattatggttacctgtgtgttttactgatcttaaagcttgtctctttcaggag

SEQ ID NO: 38347 - DNA, 797 bp, Arabidopsis lyrata
  Intron number 1 from transcript 917774 (locus 917774) deri ved from phytozome v7.0 (chr-ID scaffold_8; pos 19476195 t o 19476991)
ggtaactgttcgtccggcgcaattagtcggtgagggtagttcgagggttaacgctgctgccggaaaatttaatggaaacctcttgtataggctttactttaagggtttagttagcgatgagaacgggaaggggaagatgacggacgtagtggctgggtttggggttgctatttgtgaccagagggataatttgttgtttgagatgaagggaccattgatggacaatggcacgagtcgtcagggagcagagcttaaggcattgatccgaggattaaccgaagcattgaagttggggattaagcatattgttttcttttgcgattctttcccgattttccaatacgtaagtttccgattttcattgtttattcattgaatgtttaatatgaactactctagatttatgattccgactttgtttatgtatttctaaagatgatctggtttgttctctttgcaattcgtttgaactttttgctgattcctttgtcctggaatctaaaagtgtagtgtatattgtaaccattttctaagccactatcatatgtctttggtttgcatttatatagatctgactgcgctaatctttactagttaggagacagtagaccgtgacttctaaggttctatgcttgtgttttgagagatggtttaaattgcaatgagttatgcttctttacctagcttttcctgtcatatgtttgagaagattgtgttttacttgaatgtaggtcacgggaaaatggatggccaagcaaaagaagatttctttgttgttagatgatctacaaagcatc

SEQ ID NO: 38348 - DNA, 1012 bp, Arabidopsis lyrata
  Intron number 2 from transcript 950749 (locus 950749) deri ved from phytozome v7.0 (chr-ID scaffold_8; pos 19343236 t o 19344247 reverse strand)
aacgaaaccttaggaatttcaacaagaggattaaggtaattttagaaatgttttacatttgtttctatgttttaaattcctccaaactatgtgttagctgatatgaattcttagtttaacatataagaatttatcttttgattcatattgttcttcaacacatagagtacatgtacacttaacctatattatgtattcaacatgtgtatatatgtgtcgcatggaaactttttaagacttgatatgtacagtagttgtatgaaacagtgacatgcacctgcacatttattgatgctaacccttccatgttctaatcaagcataaaatttcctattagtcaactaataacgaattctgtataatttcatacacaagcattcggcgatccgcataaatctatttccttaacatcaaatgaattagttaattttttttcaaaataattatttagacaaaacttcacatttaatacaaaactaaatggttcgttgaccaaggaagaaaaaaaaaaaaaaaaaacaggctcaatgtatcatatcaatcactcttatcacaaaacagtaacattgaatttttctttctttcttttcttttttttttttttgtgcaccacattgaatttttctttttaatcttatcttcaaacataaataagattttcatttgatatatttgagtatgtgaatgagaattaatgttctgtcacatcatatttgggtcttaaggaatcttttgagatagacacatcaagctccaaggttgctacaagtttatttctccattagtttgttttttacaagaaggtccaaaaatatattaagaaaaaatggtttcattcctaattaaagattggagtattcatatggtatactaatatattcaaaccgtgtctcaattagatgttttctgctcgagttataatgttttgaccgacaagttttaacttgtaaatgatctaattttcacattaattttgggacatgttttactaataaatatttttgctattagt

SEQ ID NO: 38349 - DNA, 360 bp, Arabidopsis lyrata
  Intron number 1 from transcript 334446 (locus 334446) deri ved from phytozome v7.0 (chr-ID scaffold_1; pos 4614567 to 4614926 reverse strand)
ctattaatctttttcgtggaaacaaatacggtcaggtatgaatctaatgctttttcttttttgggtcgattaaattgaattttgactctctcaactctcaagttatgtgtgtttcttactttccctccagaatatttttatactgcctatttagaaagaagagagtgtatctttttgtgttatttgattattattttgaaaacttgacttgttctgcattcaaaattgtcaaattatagttgaaacgtatttaaagtgttataattccttcaagttattgaatctttgtggcatggttggattttaacttggtaatagttcatacttttggtttgaacagggaatcatatcgatcaagcc

SEQ ID NO: 38350 - DNA, 495 bp, Arabidopsis lyrata
  Intron number 1 from transcript 944801 (locus 944801) deri ved from phytozome v7.0 (chr-ID scaffold_7; pos 4188818 to 4189312 reverse strand)
agtaccaggttcgtcttgacatttccttcctttttgtttttggtagaatcacgattggtattggttgatggatttgagtttgagactcttacaagttttcgttataaattgaagtgtctgtttggctgctaagaccaatgagatgttcggagaatctctattctttcttcttagttttagattccttagaagcttcagattcagtttaagtataaacttgtagtcaggtttaaagttttcttgaattagagaaaataagtttttagttgtttggttcatgtaagtaaatagaattgcgtttaattcacttggttgcgttggaatgttccagctgaagagtctaaattaaatttggttcttgggataatcaaccaaatacattgaaagtctaaatctttggtactttaagtagtgtgagccattgttgattttgttccgttcattaagagtgcttgcgcaggtgtttattacggatttgtggacagatcatacgcc

SEQ ID NO: 38351 - DNA, 711 bp, Arabidopsis lyrata
  Intron number 1 from transcript 487736 (locus 487736) deri ved from phytozome v7.0 (chr-ID scaffold_6; pos 3691398 to 3692108)
cttcattgttcttcgacgactttgtttgactacaggtacctgttttctttttgttattcttagaagatacaagatcccatgaatttctttttgtaatttctgggttttgtagccatagatctcctagatgcacagaaagtgtttgtggaaatgcctctcagatggttgatttaaattctattgcggttcatttcatagatctcgcccccaatttagtatcgggggtttgtgcaaagttaatagatttcgttcctcttttggttgtagtgtcataaaaatcctaagaaattgtggatccaatttcgaagtgccttaagtttttagatttcagaagtagtatggatatgaacattcatgaaatttttccttagattaccttttttcttcatatgatcttagtttgtttcacttcatgagctcaatatagattctacaatctgaagcttttcattgtttatgctttgagatttcacgcccaaagtatcaagtttcaagtgatagtcctataacatgaaactgttctttcggattcttgctaatccacagatttgttgattcaattttgtaattagggactgagcttagcctttatcatttcctttctttaatgtataagtactactctacactcctctgcatgacttcttgctttacatttttccttttttcgatttggttcaggcttagtcaggagctgatttgggatttgag

SEQ ID NO: 38352 - DNA, 538 bp, Arabidopsis lyrata
  Intron number 3 from transcript 471392 (locus 471392) deri ved from phytozome v7.0 (chr-ID scaffold_1; pos 5047123 to 5047660 reverse strand)
aacactccgaggtttgttttcttcttcttcttcttctgctctgtttttttttttttgttttaatttttatataactttttttttaagaaacagagctttaaaattgtaaaacccagaaaattgggtgcccttttgcctcgttttatttttctggtgggaaaattctgccggaaaatattattttgtatcagtccgggaaaaaatatgaaattattttcaaatgttcacaattgagttttgaaatttgaatttttttttctttttggtcatcgtttagtttactttttgtttttccaaaaaaaaatatataaaatatttaaaagtttgtactttctgtcttcctcctagaagattttccaaattttctttgcttggccttatttttcatcaacttgattttttttaaggacttatcttctctaaactttaattgataaataaatcccattatttgagataataaattttatttttgtcggaaaagagaaaactctaaaacaaaatttcctacattattattacagggtcgttatcgaca

SEQ ID NO: 38353 - DNA, 283 bp, Arabidopsis lyrata
  Intron number 2 from transcript 474975 (locus 474975) deri ved from phytozome v7.0 (chr-ID scaffold_2; pos 663169 to 663451)
ttgaattcaacggacctaaagacagtaagtaactctattcttctttgactataaatcatagagaattggttcctggtactgatgatgatgatcatagggttttgcatcgtttatattttagggaaatcagattatttggtgttttttcttagtatcaattttgattatgaagtcatttaaagatttggttctgctactgttgctgataattatatcaggttttgcatcatttttagtaacaaagaatttgttcatttggtgtttcgactatggacaggtatat

SEQ ID NO: 38354 - DNA, 483 bp, Arabidopsis lyrata
  Intron number 2 from transcript 487393 (locus 487393) deri ved from phytozome v7.0 (chr-ID scaffold_6; pos 2186163 to 2186645 reverse strand)
ctgtctctcttgcatcttaagcaaaggtatattcttcttcttctctctccctccaatcgattggtacaatcctgacgaaccagatcacagatttctcgattttaaatgttgggttgcgtcacttagagattcgcatctattatgaattttagcgtcatgggttcgcaactgtgagactttctggttggtgccactggagatttaatcaaaactgggtttttggattcaataagttttcttttgggtacttttcgttgaacccttttaggtagatttctgttgtcgaagaaaagtcatcgttttaggggtttaggtttgaggtagcttcaatttcgagaattcgagcttttcctgaaggatttagctcgctttgtgagtttattcgttttttgatgattcttccgttgtgttgcatatgcaggtgtatttaatcctactagttttggggatccacaaacagatcattagagaaggctgttacaa

SEQ ID NO: 38355 - DNA, 459 bp, Arabidopsis lyrata
  Intron number 1 from transcript 891050 (locus 891050) deri ved from phytozome v7.0 (chr-ID scaffold_7; pos 15186134 t o 15186592 reverse strand)
aagctaagaacaacgaacaagaatcgctcattttggtaagccacatcttcgaccttccactttttgtttcttaaagattattgaaatttcgttccttcttggtgatattcacagctggatttagtttgcgtgtagcctttagagatggattttcagctgatggattgtcatacataagcaaatcgttatttaggctagatattattaatcaaagagatgtacattagtaatcaagaaaaataatagtaatgaagaaaaaatattagtaattaaatcaactcttaaaataatagtaatcaagaaaaattttcattttactaaataaaattagttttcagatgatcgattaaatttgttttcttcaaattgatctgctcatataatcacaagccgtgcggatggtgtacatgttgaatcacattaaatacaatacgtgaagagagttttagtgatttgtgc

SEQ ID NO: 38356 - DNA, 592 bp, Arabidopsis lyrata
  Intron number 1 from transcript 920418 (locus 920418) deri ved from phytozome v7.0 (chr-ID scaffold_1; pos 6418504 to 6419095 reverse strand)
acggttttgattttcgccactggatctggaattaggtgggagactttttccatttcctctcctaccttctatagctgatattcaatgatccaagtgtgatctagtttaaaggtttcagtgcatagcattagctagatacaaattcaagtgtcttgaatctggtttagttattgatactgaggccaatcctctatgatgcttagttcatttgcttttatcctgctagctttgaagtttgagatcccctgatgttgatacactaaatctgttttttgaattcgacctatccagaggtgccatggactttttgtgtggcttttttctgctgtttgtgttgatctaatactgaaataaagagttccatgtaagaaaggtcaatgctctgttggtctctaatggagaatttggttatgtgtgtttcatcagctcatggctttttaggtgtttttgtttgttgttctaggtctggtcgaatcaacaatgtttagtgatgatgacagagattaagtaactgtcttaaattaggaatgtaatcgctcatgttcttatctctgcagccccatccgctcactgatcgagtcaggatttggtg

SEQ ID NO: 38357 - DNA, 715 bp, Arabidopsis lyrata
  Intron number 2 from transcript 944752 (locus 944752) deri ved from phytozome v7.0 (chr-ID scaffold_7; pos 3997147 to 3997861)
ttacacaatcacgggtagagtaaggatcccagcaagtaggtttcagccttttaccttttctttctttgcctcatagttttctctcgatagctcagtttgctatgtttttgttggtttatctgaaacctccgtttcatggcatttttccaaggagaaatacaattatcgaaaactaatttctattagtgagtctgcgattttcaatagcagatttgtagatgttattagtcctagctgttatgcaacttccactatgggtgtgtttgctctgtgaaactagtatgtcttgtgatattgatgtatattcgtggcttagctagtgtcagtaagtgagaatctagggtatgtattagtaattcgatgtatgaactttctatgtagtatgccatctctataagtcgactggctaaaagcagtgtttgcttaagaatattagcatatacgttctgatatcttcaattatgtttctagaaaaatgtatggtttctgtcatcattgtttttgagtgcttaagaattatgggcaatgtgatttgattgtttgagtagtgttttttggacaatgttttttctgtcattattgtctcttgagtgcttcatattatatctaattacatgatacttcaaccaccatctcgtatccattatgtaatagcctcactactccttactgccaacttatctgaaagttattatggcaggcaccgtgattggtc

SEQ ID NO: 38358 - DNA, 409 bp, Arabidopsis lyrata
  Intron number 1 from transcript 488920 (locus 488920) deri ved from phytozome v7.0 (chr-ID scaffold_6; pos 8540226 to 8540634 reverse strand)
atttctgtagccattagcatcgatttcagctcaaactacaggtttgcttttccctttttgtatcatatcccatccactgatcgatatttctcaattttctgatttgctgctctctctcgagtcaccgttatggagttcgattccctatatgatctgataattatgaaattcacagatgcttctaatatagtaaatctgattttgaattgacgaatagatgaacattcccttgatttgttcttctacaaatctcggtggtgatgaattgttaggtttgatgacaattgtgtttactcagtttttttttatgtgtttagttatgattcttcttgaatcgattctcatgtgatccccattattgtttatatggttatttcagattcaaggaaacaattattttagcttctca

SEQ ID NO: 38359 - DNA, 612 bp, Arabidopsis lyrata
  Intron number 1 from transcript 946959 (locus 946959) deri ved from phytozome v7.0 (chr-ID scaffold_7; pos 14181495 t o 14182106)
caagcttctccgaagagcgaaagtgactctcttctcttttctgaattgctcttaaatttctttaatttggtgtttcgtagagttctatttggttgccgatatatatactttcgaagaacgaattgttgtttatagatctgtttgtgtgatttttttttttcttgaagatgtttgttcttgattttgcaatttgaagagtctaatctcaagtttagtatccgttttgttggagatttcaattcacatagtctctgagaagagtttagttcctctttaccagatactcacaaatggttttagtgttatgcatttcttatctgttctgatttttaggagaatttgggaatttatatgttcatttgaatgatatgtagtactgcatggacttgtaggattcacaatatagttagaaaaatgagagaggagattatcaatattgactagttgagtagtttgatcatatggtagcaatcagttctgaatgatctatttatgatcgcaatcgattctgtatgttgttgaagccatcatttcttgtgatagttataactcaaagtttggtttttgtgaatattaggtgaacattcctaaaaccaagaacacttactgcaa

SEQ ID NO: 38360 - DNA, 604 bp, Arabidopsis lyrata
  Intron number 4 from transcript 475048 (locus 475048) deri ved from phytozome v7.0 (chr-ID scaffold_2; pos 1290899 to 1291502)
tgtagttagtattgtgcttaagcactatcagatactcagcaattcacgcaatccatttgaggtttattccttttagatgctttatgatctcttcgtgcttgagtcatattgttttttttgtccctgaaacgggtttgtgttaatcccttgaatctgccctgtggctatgcttcttgaatctacctgtatagctctctttgtgactgtcttgattattaactgtaaaaagtgacattgcttgcgtaatgatcaggttgagtttagacaattttgttagctccattgggtaaggcttgttgtggattagttgattgaaatctcaatgtcgattaagtcttcaggagctttgaatatgtcaaaaatgttttaagaaatgttcttttctctcctttccattttgggatttaaaaactgtttgtgaatgctattgactttggatgctattattatgtatttgtttaaattcattttcagtatgccgcaaacccattctctgtatgcttcatcaagttgacaaaaagcaaaatctatatataagtgatattagggtgttctactttccacattcttctgaggctcttatctaaactttgcgctctgcttt

SEQ ID NO: 38361 - DNA, 608 bp, Arabidopsis lyrata
  Intron number 1 from transcript 910852 (locus 910852) deri ved from phytozome v7.0 (chr-ID scaffold_1; pos 4390108 to 4390715)
tctcaacaccagcgtcgctccttgagggctcaagggtaagaagctttacccttttttcatagatttttcgatttcccccttcttgtttgggtttagttttgttcaattcatgagaaattttcctaattggtttgtgggttttgtgaaaaagatttgtttgagttctgggttttcgttattttccggtcttctggattagggcacgattttatacaaattccccgatgccgacaaaatcattggtttcgttttctcttctctgtattctgggctcttgtaaatcagatttgtaatggatttggtatttgtgatattctgaagaggattagggcatgaaagtttagagaacgttgagtatttctggtttgtcgtggattggaatggtatattactgaatagggttggtatcatgatgcatgtgaggtaaggttttaggaatatgtctaattctctcccaaggactggagattttgtgtttgtcccattaattgattctttggttgagtcgataagaagtcctagatggatgctgagtatcatgaactctcaggaaaagttacctaattttgtgggaacttattgtttcaggatttcccaatccataattg

SEQ ID NO: 38362 - DNA, 495 bp, Arabidopsis lyrata
  Intron number 1 from transcript 923452 (locus 923452) deri ved from phytozome v7.0 (chr-ID scaffold_1; pos 26121667 t o 26122161)
tcaaaagccatcaccaggaagcaaaggaagaagaggtacttaacaagctttccactgtatcttctgtcagttcatggatattttataggagttgatgcgtttggtaaatagactcgctgacgacatgcatacacactattagaagtaggcttgtatctagttaacttctgtatgccaacttgtgtgggtgatctgggaatcaaagagatatggctgagaaaatggcaaaaaggatagaagaagaaaatcaaggggacatagcagtagaaattagaattgaagttatgcaatttttctttttatgtctcgtttacctaaaagaatttcagcctttcatgtttctttcattacagacattattatgtaaattgtattcaacacgtcatgctcactttaccatctacttgtaattttgtattgatgtgtgcgttaatcatatatatttcttggagattttcaggtgaacatatcttcctagacagttcaacaccatct

SEQ ID NO: 38363 - DNA, 394 bp, Arabidopsis lyrata
  Intron number 1 from transcript 929255 (locus 929255) deri ved from phytozome v7.0 (chr-ID scaffold_3; pos 6163440 to 6163833 reverse strand)
ttgccggaatcgcaggtaaataactttattctattcactgctttattgttttggtaaagttttagctaattttggaaaacccaatattcaaattcctttcataattccataaactatataaccagatctggcttaggttccattaatatatatacccaaatcagtatatatgtctgcacttttcgtcttctgggcaccgaaacaacgttaataagattcaaatgttgtttctgatcatttttgtcggaaaattcaagaaatctgcttctgtagagtccaaatttatgcaattcacaaacaaaagatagaaactttttccttttgttaatatcactgtttcatcgttcttctatgttcaggcaacatatttgcatttgggctcttcgtttcacca

SEQ ID NO: 38364 - DNA, 480 bp, Arabidopsis lyrata
  Intron number 1 from transcript 358962 (locus 358962) deri ved from phytozome v7.0 (chr-ID scaffold_9; pos 78522 to 7 9001)
tagccacaggtttcacttaggtgagcaccaaatagatccatttttttatttgtttctgttgattaatgtcccttttcgatttgtttggagattcttattatttgttttgttttgtagagttttgttgtgaatctattatcttagtttattctttgatggaaataatttgtttttgtctctctctcgatctccaccttgtttgatgtatccattaactcgaacctgcattacaatattgggtcttcagattattacatcactccctgagacattcttggttgtctatatatttatgtcgaccaaaattgccccaatatttatgagattatttagcaaattggtaaggagattgttggctgggaaagttaatattgtaggtgtatttttcattatgaatatttttaattataaaaaatcattcactaataggtttggtttcctacagattgtgttggttcattcttcaatataaagaacaag

SEQ ID NO: 38365 - DNA, 548 bp, Arabidopsis lyrata
  Intron number 1 from transcript 470307 (locus 470307) deri ved from phytozome v7.0 (chr-ID scaffold_1; pos 970333 to 970880)
taaaggttttgttgtattctcttcgtttttctctggtaattaaatattctaagaaatataatttgattttcctgtgtgtatattttttgatgatttgtgatcgtttctaaaaattatagtttgatcttttcatgatccgttgatgattatgacggctaggtttatctcttttttttttttttttttttttttgttgattaggttttggaatctccgttcttcaattttagaaaacttaattaggtgatactgaatttgtactttttggataattgttcttttgtcttctgcacttgtatgatagtgtatctcttttttctgcataaacaaaatttagggttatttgatgtacgcaagtaactaacacgtccatgagctttaaggttttcacaaggggcttgtaatgttttcctttttcgttggctttgttagttatatacttatatgataaaatatttgcagacaaagttattatatttcagtcttctttgcatcaatcaataaataatattttgcttgttttctgcagagtgtattaactttcactc

SEQ ID NO: 38366 - DNA, 650 bp, Arabidopsis lyrata
  Intron number 1 from transcript 347015 (locus 347015) deri ved from phytozome v7.0 (chr-ID scaffold_5; pos 2941713 to 2942362 reverse strand)
gcgacacggtgtttgatcatccatcgagtaatcctttttcctctatcacagaattggaattaatttgaagtatactgacatttcacttctgttattcgtaattttcattgtgagatgtataactttgtctttttttctttgatattttgatgtaatttatttacatgtccttaaattttaatatatagttttacaagaaacaaatatggaatggctaaggctaagcatttgatcgctagtaccgccgactgtacttgttggaaagaaaaacacgtactgagttaatgggccgacactaaaagcccatattgatttaaagagaaattgaagagccttttcgttctttggtcttgaaaacgacacttatagaagaatgactcaattttttgttagaattatcgtagaaagatgccattcatagaagtgattacgaagatttaaacgcagtagaagagatattgatgcgttttgtttcttatagtcattgatctgttaaagtctcaatctttgaggtcatgaaccatggcagtgaccggagtttcttctgcttttggccgtcttttcaaacaagttataaataacccacaagcttgttatcgctacacgacccaaattcacaggtcagattcttgagcaccttgaaggcggta

SEQ ID NO: 38367 - DNA, 619 bp, Arabidopsis lyrata
  Intron number 1 from transcript 924324 (locus 924324) deri ved from phytozome v7.0 (chr-ID scaffold_1; pos 32231340 t o 32231958)
cccacccttgaagaattttcagtcatcggatacaagtaagaaaaaaattaatttctataacccaattctttatagtcggatcttatggctgtggaaactatttttgaactatatagttatgtgaattctgcaatgactctatagtaaaataaagtgaaaataatgcaaatttctgtttatattttatgacttagagtgattgtatttacaatcgatggttatgatttataatgtttacaggggacaacgaggtagaccaacgtgtcatatgttaccggaactgcgatgttggttgtggcactgataatgtgtgtcatcaacgttgtaagaaaagttgtggttacccaccgttgatgaattttcagtattctgatacaaggaagaaaaacattttaatttctagaaccaaattctttatatatatagtcggatcttatggctttgaaaaatatatttttgaactatatagttatgtgaattctgcaattactctatggtaaaataaaatgaaactaatgcaactttgtttttattatatgatttagtgtaattgtatttacaattgatggttatgatttatgatgtttataggggccaacgaagtagatcaacgtgtcat

SEQ ID NO: 38368 - DNA, 566 bp, Arabidopsis lyrata
  Intron number 1 from transcript 903326 (locus 903326) deri ved from phytozome v7.0 (chr-ID scaffold_3; pos 1774675 to 1775240 reverse strand)
tttattcatactaattgtcgttatttcttcttcaggtaaattttttttttaatcgttgtttgatatactaattttgatcatttaatctaccatatatagtgggatcaatatcttgttgtggatccttggtcggaattgagaaaaaacaataaaactgagataaatattaaaaaaagttccacttcttaaccagaggtggtgggctagtggttctagtctggtggagagtggtcatgttggtctaggtcagggattgattctcctcagacgtagaattgctcaactttatctttttggccacatgggtatgagtccattgtttacggtccatttgaaaacctagaaagaccctacccgtgagacaccttctccccaggattggtcctacaccccttcataggtctggggatttaccataagttatcaaaaaaaaagttccacttcttttacattgataaactcgtgtttgtgttatttttttttattttttggtcaacttgtttgtgttattatttagagaagttgtctttcttttctttttcttttgataaatagaaaacggcaaa

SEQ ID NO: 38369 - DNA, 339 bp, Arabidopsis lyrata
  Intron number 1 from transcript 355195 (locus 355195) deri ved from phytozome v7.0 (chr-ID scaffold_7; pos 12678201 t o 12678539)
cactgtctcgaatctcaacttgatattctcatcaagtaattaagtttcattaaaccattaatcattattgtacaaataacatttcaacgtattttcacaaaataaatattacaacgcttttgtaaactaacatgctttctcttcaaacattatctgtctactaaatttgacttcccgggtaaattcttttgtggtttaatgtgaattttactacagtaaacttactttacaaaaaaagaagagcgttttccaagtggaaaatttatattaagcggtttatatattatagtaatgactattgatttgttttttggttgtagcgacgtcacgagtctgtcg

SEQ ID NO: 38370 - DNA, 410 bp, Arabidopsis lyrata
  Intron number 1 from transcript 488674 (locus 488674) deri ved from phytozome v7.0 (chr-ID scaffold_6; pos 7516199 to 7516608)
tccttcgaccggcagatttatcatctgaaatcgttaattctattaattttctcataattcatcaccgatttagcttatatttgaaagatcatatcttttggtaattacaaggttataatgggtctctaaagtaaatgtggtcttcattaacttagatctgtctgttcttggtgaaattttgctctgttttgttttttcctttccgatttcttgttaggtttgtgtgtgaaatgatcggaccaaatcaattaaggtcaaaagtttgaaactttggcctcaatgtgcttggtggatgtgaagttttcagtgattgtcactttaattgcataattcaactctttcttgacaaatctttttcttgttgtatgttgtaagagagggatccctctaaacttcatcaaaagcatctc

SEQ ID NO: 38371 - DNA, 405 bp, Arabidopsis lyrata
  Intron number 1 from transcript 488536 (locus 488536) deri ved from phytozome v7.0 (chr-ID scaffold_6; pos 6901049 to 6901453 reverse strand)
tactttccattgaaggcttgatctagaggtaattcgaatcggatttttttgaagttttgttttctttgagatttcttttcgggcgtttgcgtttttctttccgatgaattttcgtatcgcttgaccttgttcccttttctgtttattctccacagtctgaatttgacctatagctagaatcaggatttgatttaccttgtttcacaataataatgaaatccttcttaggttagggctttacgcgttacttgtgttgtgtcaccaccagtttagaaaccgaaagttttgttactctcatcttgctcgttgtagttctgcaaccattgtaattgttgtttctgagttgatcctttttgtgatttggtcttgactgaagttcttggtattcatataggcgttttgaaa

SEQ ID NO: 38372 - DNA, 907 bp, Arabidopsis lyrata
  Intron number 1 from transcript 495275 (locus 495275) deri ved from phytozome v7.0 (chr-ID scaffold_8; pos 14892104 t o 14893010)
aaagctggtaagtcttggttcttgtttttttaatactttctctttgttttttctttttctctttttggttgaattgaatcgataaagaagtctcgtaaaccgctgcaaatccgatgagctagcgaaattcgaatgcgttgttcatattatccactcacacgctcattccacgagaatctctggaggactgtcctttcaaaatgtgctctctggcctctgcatcccacattccctattccctcggttcgtttttcatctgattccagcatctgccaaggaacttgaagcaccccgcatgaagttcatagcatacctcagaagagaaaagatcgagtaattttagggtaaaaccgccatactcaacatttgattttggcgcaggatttttttctatcttgggatgcccattctcccaccatccagcccattgatggaccatatggataatccatttcctgcccaaaagagtcacactcatccgagcactggcactacattcccttaaccccgacttagttgcatttcattcctcttgacttttctactcttggacatgcctctttggtaagctctcacagcagaggcagcagatcaaatggagagtgcaccaccgcgtttctgttcacaattcctcctcattttcagttcttcttctttgacatattaattccataatgcaaggtctgtaaaactactcatagtttgtagagtttttaggttctagggactgttcaaaatttatttgtgacagtaagtataaaggctatgttgatgctgccgtggaagggagtcttcatattagaattccttttggaggaggttcttgtacttggtttatttgataagattgttcttatgttctgatttctgctttttggttatttccccagggtttgcttttgtctat

SEQ ID NO: 38373 - DNA, 432 bp, Arabidopsis lyrata
  Intron number 1 from transcript 939294 (locus 939294) deri ved from phytozome v7.0 (chr-ID scaffold_5; pos 20688194 t o 20688625 reverse strand)
agattctgcgcttaaagttcattgacacgttggcaagtgttctctactgttttttttttcttactctttaatatgtttctgcagcttaacagatagtaaagaatggggaaccattcagatatattttgctagacgttggaatgtttattaaagttttgagccatatattgcaattttatgactgacatgttgatttttttttctgttccagctgtttgatacctgcaatgaagcagacacagtgtttgaaaacatgtctcatttagatttgccaagtgaagcagatgtctgctgggatcctctaaaactttttgttaagaaatctccaaatctgaagactctcaaaagcccaaaaagttcattgaacaaaccattaactatagtccaaccccaataggtactcataaaatcttttctttcaggatttgcacc

SEQ ID NO: 38374 - DNA, 739 bp, Arabidopsis lyrata
  Intron number 1 from transcript 941819 (locus 941819) deri ved from phytozome v7.0 (chr-ID scaffold_6; pos 9724815 to 9725553)
aggtttttctttatttccttcacttaaaatgatattttacggattctttattcaaaatacatatatagttaatataaatataatgcatgatccttattgaggcccaaattgagtaaaacaaattatgtctttagaaaattttcgtaaacggctgatgaacaagagggccgggagacggttttctgtatctcttcgttttgtctccgtcttctgtaaaataattcgaaaatggtataaacttaatttcttaccaaaaaaaaaaggagaggagaaattttggtttttgtttggacaaagaagaagagcacgtgaatttgttttattgcggccattgtgggccttggactatatgtcttaattagacagtttattagtttttttactactaatttgcgttccttttttaaatttattccgatcgatgctatttcttttttttttttgatgaaggttttagaaagcacaggcccatgattagttagagccggccatatagttaacattatttctttgtgacatggtaaaattagatgtgtaaagtgttaagaatcccacatatatcagaaataattactaatactagtatataaaatatgagttgatatactcattactaaatggttaatttgtgttggaaactcatgaatattcacaataggattaaaaacataaatggagtaacggtccaaagttgacaacaatgaacattaatttctatattgttattttgcttaggtgg

SEQ ID NO: 38375 - DNA, 398 bp, Arabidopsis lyrata
  Intron number 4 from transcript 480688 (locus 480688) deri ved from phytozome v7.0 (chr-ID scaffold_3; pos 22304130 t o 22304527 reverse strand)
gcacctccgacagaggtttcttaaatagtgtctaaaatttttttaaaaaataaaaataattaaaagtaagagagaaaatgagacacagtgtctcggagtttctcaaatgagacactatatctcattttctctcttacaattctgtattcaatactcggtattatttgattgattaaagtttttttataattaattaaaagttaaataaataatttatttattaaaaaaatattaaattattatatttgagaaacttttatagttaaacgttaaacgtactaatcacttcttcccctataaaataaagcctctctaatttcttatctccttcctcaaatcacactgcatcaaatcggaactgtaaccaaaaaataaaaataaaacgccgtcgtttcaca

SEQ ID NO: 38376 - DNA, 705 bp, Arabidopsis lyrata
  Intron number 1 from transcript 336289 (locus 336289) deri ved from phytozome v7.0 (chr-ID scaffold_1; pos 14592720 t o 14593424)
ctcggatttatcgctttgctctccgagaaaacaaggtattaaatgattgttttatgatataccattggcaacgctaggtataggttggattgagaagtcaaaagttgggttatcagtaattatggacttaaatttcgatgaagagttctagaaatggatctagatcgttgataatatgattcgattattgatagattcatcaagtttggtatttttctttgaagttaggttggatccttggtagttttgagaactcaaaagttgtttattagtgattctcaacctagttttcgatggagacaatcctagagatggatcttgatcattgataaaatgatctgattatcaaaagataatggtatatatgaatcttgatgatctttggtgattttgagaactcaaaagttgtttgctagtgattaataacttcattttttgaatgaaaacaactgtagaaatggatctaaactcattaatagtatgatttgactatcaacagattcatcaagattggtatttagctctgaagttaggttggactttggtgctatgaactcaaaagtggtttactagtgattcttgacttggtttttaatgaaaacatccgtagaaatggatatagatatggatctatatgaattgatatattcacaacgatgctttctttatttgtcataggttacttcctctgccacaagaagctct

SEQ ID NO: 38377 - DNA, 403 bp, Arabidopsis lyrata
  Intron number 5 from transcript 478461 (locus 478461) deri ved from phytozome v7.0 (chr-ID scaffold_3; pos 4500279 to 4500681 reverse strand)
gaccactgctctacctttttatcaaaattttcaaggtagtataacatccatttcttatttgattctcaattacttccatcttgtttcgaatccatgaaagttgttggtccacttccatgtttctatacagcaaaatatgcccaagctcattttttcaacatcactctcgcatacttccaaatgtgctactttatttagagagaattagctttttaaccgctccaatactaagatgatgcattgtgttgccagttattttatcctcaaatattgttctagtttggcactttgtacgagttcttctattattttgttgactttgtttagaatcttatctttcttaagaacttgtgtgataatttccgcagaagcagcagtaacattgcatccattggtcgcatcg

SEQ ID NO: 38378 - DNA, 591 bp, Arabidopsis lyrata
  Intron number 2 from transcript 342182 (locus 342182) deri ved from phytozome v7.0 (chr-ID scaffold_3; pos 8903944 to 8904534)
aggagaagaaaatcgctgtggtttttaatgaaggcaaagacatgatggggaggcacaacacagctttcatcattggagaggatggatccttgaaagaagtgaatcttggagaatctcgaaacagaaatctccaaccacttgtgtgctcttatgttccaagttcaatgcaacttgaatagtccattttacaatacttataatatctatttcttgctcttgcacttttacttgtttctttttctcttttgtcatcttctttataaaaaatatagaaatttaatttgtgtctcatccttcttttataagtatgacttcgtttttgccatatttgacttcgttttgttgccttaggttgcttaattaacttcttctgttgtagtagactcattgcaaaatctctgtttctcttcttacatttgttatgtttgtgttcttgcaaataggcagctctgctattgtgatttatgtagaacagagtaggctgcgtttaactttaaaatttgtaagtatgtatgcttagatttgagtttcccatcttaacttttggccgtatcagttttacagagagcaagtggctgctaggctgatacg

SEQ ID NO: 38379 - DNA, 928 bp, Arabidopsis lyrata
  Intron number 1 from transcript 480581 (locus 480581) deri ved from phytozome v7.0 (chr-ID scaffold_3; pos 21751755 t o 21752682)
ctctagccgtttacctcactggtttccaacaagtggtaccaacctgtacttcttcttttagtctctcatgtcttgattttttaagttttgttttcttttattattgcttaaacgaagcatgacatatgcttccaaatgtatgtatctaaacatgattttgagaacttgttttaaaagatgatcggatttggctttgttctcaagcaaagtatttttaaagattgaaaaaaaaaagctttaaagaatttaatcctattttttattcaaaactaatcaaggctttgactagaagcttgttttttttttttttttgcaaactgactagtagctttataacagagtaaattttctttttatttagatttactctgcatttatttcacttataggttaaaaatagaaagaaaaaattcgagattaaattttcttttttctctctagtttgttcctcctacttctatttactatccccgacattttaccagccacggtctaagtttttttctttttactaatttattacaatttaattaaatcttgcaagtgttaagaaaatttaattatttcacttagatggttttgggaaatagaatttttttttgtttgttaaaccgataggagttccggggttttgactataatatctcctagtactcggagttagcctttagatattctgattaaaataatacccctccgtacaaaaagaagctaaacccacaaaatagaaattaatatagaatttgatgtaattaatatgctttagctttttgtaaaggatatgctttattttttaaaaaaagattttatataaaaaaagagacaaaaagcaattaaaactagctttttttgctgtccaaaaaaaaaaaaatcgtatgttatgatattgatgatttttttcatgaactatcaaatgaaggcgataggg

SEQ ID NO: 38380 - DNA, 767 bp, Arabidopsis lyrata
  Intron number 1 from transcript 887884 (locus 887884) deri ved from phytozome v7.0 (chr-ID scaffold_41; pos 10965 to 11731 reverse strand)
ttgtccaggcctcatctgcaggttcgtttcttctctgtctcttgaaactttatttggatttgttattggttttgtgaataaaacatacgttctacaagatctagttttcaacaaatataatgtttattaaggtaaccaattcctaattatttaatcatcgttaatggaatattgaaacacaactcaaacaaatttgtggtaattttttttgttttcacaaatttgatacgggtttgtgaaagcatatatggtttggtagaaattgctttgctcgtattagtttgaagcaattctgtcacttaaaatttttttggttctttcgacatttatgaatgacgataaggatattgttagcggtggttttgtccgacaacggtggtggttatgatatatgtaaaccggtgctacttggtatatcgacagtggcggacgttacacgtacatatacatgcttggtctgttatcatttttgggtcaatgggttttgaaacgagatgagatttatatgaacatgcttcgtcggaatatagatggttgactattctaaaacctcttatgtggtctgtatttactactcttattcgtcccagtaagacacattatattttacttttagctcatgcgtaaacattatttgtctgataatcagactctgattcattcgttagttatagaaaagtgttatatgtagtgataaatttaacctcttttattttcttcttctttgtgtttccttgtggtgcaagcagctttggacctaattaaga

SEQ ID NO: 38381 - DNA, 706 bp, Arabidopsis lyrata
  Intron number 1 from transcript 947871 (locus 947871) deri ved from phytozome v7.0 (chr-ID scaffold_7; pos 23180743 t o 23181448 reverse strand)
gacgtagacatcaaaggtatataatatatatttttattttttttagtaaaattataaatttgtgactatctataatattcaatgattttatggtcttgatactaaaaaagttttcgtatgcattgtgagctaatatttcatattaaaccttgaaaagcagacccaaaatatttttgctaaatgttttttatatatataaatacgcttttgtaaaattcactcaagacataggtctcaaagtgaaaatattacttattaatgccaatcatcgtcatgaattattcttcctttaggacaaaaaaaattacttcttgtcgtttggaataagttcgaagaggggaatatgttatattcttacatatttttcttacataaataatcaattatttatacttctgataatataaatagctttttgtatggactatatatgctaaaattttagatattcaattttgaattaccgacaaaacatatttatattacgtgtgctatttatataaaatacgttcactgaaatctaggtctcaaagcaaaaatacaatttgttaatatcgatcattgtcataagttaatattttgtcatttgaactacgtttgggtagaggtaaaacgatactatcttcgttattattattaatataagaaatgattttttttttggtttcttatagtgcaaagggagatcaaaattcttagactgttg

SEQ ID NO: 38382 - DNA, 1023 bp, Arabidopsis lyrata
  Intron number 1 from transcript 488163 (locus 488163) deri ved from phytozome v7.0 (chr-ID scaffold_6; pos 5422905 to 5423927 reverse strand)
atctttcaattcttaccaccggagccttattagaggtctgccgatctacaactcttgattgattttctttctggtggtattgattgaatgattcagaaattataaaaaaaatcacttttttttttggggggcttgtattagtccccggagtgattgatattcctagtatctcgtagctgcgagatgatccgtgggattaaaatctgtcatttcttttgaatttccattatgtgtattagagcttcatgtaccatttcgtttcattcttctctttactggaatagtgattgatcggatatgaattgaccagttttgagttaatcctttgtttgatgagtgagataatcgattttgatcttgtgtatccatgtagtttattcattattaggtaaatggatgttttatcgtctttgggcacctcatattactagatacctggtttggaggatttatagcagctaaaaaggcatcagcgaaggaatctggaattccatttttgttatccaacagagctatgtttgtaatcttatcttaggagttttattgtgttttaagcatttctgatcactggattttgcgttggatagaatagtttagttttctctgagtcacttgcatcagcaaaggaatctggaatttaattttgttaaccaaaagacctatgtttgcaatcttatcttaggagttttgttgtgttttaagcatttctgatcattaaatttgtttccttggattttgcgttagatagagtagtttagttttcacttgatctgaatatcatggtagaattctgttacctcttggtatccgttttgtgtgcttatgtttttgtataggagcatatacattaatgtcaaatcttgatactggtagtcctttctttagtgttatttcttcaacatatttttgcttactactttttgttgttgaccagttgaccagaaaaaaagtttgccttgatgtttatatattaatcttacatgctatttacagggttcgcttctcaagtccttactcaaggaa

SEQ ID NO: 38383 - DNA, 873 bp, Arabidopsis lyrata
  Intron number 1 from transcript 946002 (locus 946002) deri ved from phytozome v7.0 (chr-ID scaffold_7; pos 9109055 to 9109927 reverse strand)
cacgcataagtactcagcttttacgcagcttccatgtatgttatctctcggttcttaatttatgtgaatttggattcgtttggctcagtcagtttcatgttcttggttcgttgttttttgatgttttagttctcaatgatgataagaatctcttgttggagctgatagattgggttttgatttggattgttgattgatttcttgattcagaagtccccattagtcttctgacggtttcttttttgtttggaattgaaattgggatctgtaaattgaattgttgattgatttcttgattcataaaccctaattagttgttggcgcattcttctttaatacgaatttactgaacattttggtaaagaagcactttctttggttagatttgtttagagacaactcgtagttgtagttgcaagtatctaagaacactttcttgcttcttgattgaataatgtaacgtaaataatatggaactcctactgattataaggaggattatgcagagttgtaggagaaagaggaagatagtagaaagttgtagtttaagaacatagagaaatttaaagggaagactcaagtaacgttaccaaagatgcttctgcatcgatattgcttctgtgaactatagacatggatctttggtttggctggtgaaagggcgtggtttggttgtttccgatgaaagattttcattctctggtctctcaatttcaatcatggtctcaaaagctagctgaatttatgtttatccatcatgttgttgtaataacattctttccatagcaatccgggttttttcaactttagcatcagttcaggcactaatgataattcctgaatctgtgcagggagagtgttctgcaaaaaggg

SEQ ID NO: 38384 - DNA, 336 bp, Arabidopsis lyrata
  Intron number 4 from transcript 482472 (locus 482472) deri ved from phytozome v7.0 (chr-ID scaffold_4; pos 16649940 t o 16650275 reverse strand)
cttctttattgatttttgtttactgttgaagttttgattttggcatattctttatttgatacttgtttgatcgttacatgttcctgattatctttggctggttgttaataaacacgatcttagctactatttcgacatcttttctcaattttggcagttaatgtaagctcttacgacattcctctttgggaaattttctttttcttgaaaaatcttccttgtttgtgaaatttccccattttgaagattccaagccaattcaggttttacttgtgtaaagatctgggctttgagaggaggttggtttttatgtgtaaagaatcaaaactcgtataa

SEQ ID NO: 38385 - DNA, 767 bp, Arabidopsis lyrata
  Intron number 1 from transcript 490714 (locus 490714) deri ved from phytozome v7.0 (chr-ID scaffold_7; pos 521782 to 522548 reverse strand)
gatcttcgtcttctagctccgtcttctctcgtttagtaagctttttccctcgcgtcttagactagatcggtgatttttaaccatgtgcaatcatctctcagtgatcttttttttttttttttaattttgagcgatttcgttgcttatattgacttctctccaccgatcgtttctctgttgcttgattggagacgtttccgtaagatttgttttatagattgtaaatctaagtgtgattgctggtctcaatttgaatttattcatgtctgattgatttttcatggtatgaatttttcatttggttgaatcatctaggtttggctggatttctagggttccgatcagcgtgagtcggagattttgatttgaatttttcataaaatcttccgaagaacttaataatttgactatagctgtgtttgtttatctcaaattcgaatttaattagtctataagtttcattcggtattggataagctgagatttgaaacgcatatgagtttctgggtttagatctggatattattgaaatttgtttaaaatttctacgactgaaatcgtgtatgattaataagtatggatttattcgtacgagtaattgagcttgtttttaagtttcgttcggatgaatctagatctgtgagacacttggatttctagggtttgaatctgtatgattggaggtttttctatgaaatagtatggagaaaagaatgatttgactctgaattttgataccgaattcttttttcttattctttttcaga

SEQ ID NO: 38386 - DNA, 388 bp, Arabidopsis lyrata
  Intron number 2 from transcript 483603 (locus 483603) deri ved from phytozome v7.0 (chr-ID scaffold_4; pos 21793172 t o 21793559 reverse strand)
atctgtaagttttcacattctcttcgttttaaacatcagaattcactatcacagttaaaatttgcagacatactaaaagatgatcaccaatcaatcccctgtttcatgaatgttctgtttcgtatgttttgtctgaatctcaggagttttaaatttgatttaagtctgttttttttctaaactatagattgaattttaacagtttgaactgaatcattaattgtttggtttagacatcataatgatcaatcaatcaatcattcccctgttttacggctgctctgttttttcctttgaaataaagattcaagtttgataaagtttatgatttgacactgattaactaaaccttaaaaatttggtaattattaacacaggtactacaaca

SEQ ID NO: 38387 - DNA, 943 bp, Arabidopsis lyrata
  Intron number 1 from transcript 490039 (locus 490039) deri ved from phytozome v7.0 (chr-ID scaffold_6; pos 21932761 t o 21933703 reverse strand)
gagagaatcgtcgttcacagattccttctttgatcttctcctaccaggtattgattctcttcactatcgtaatcttctttctccaatgttgaatttcgtttttctcgcgtcgattttttgttgcttggtgttagattctagggtttttaaatttccttgttctgaagaatttttctatatcgatttcgaagaattactcgttcgatttttgtatggatcgatgtggtcaatgttgaatctgaagcattttcatggaagtaatttcatcttacttaccttcacgcttaagatcttcgaatctagattaagtagttcaacaaattttgtaacatgcatttaggaacattttctgtattggctcgtctgattcatcagctttttgaaccatttatagactcattacaggcttagcatttagagttcttatagtttcggttgtgtgtagttcttggcactcttgaattggaagtgtgtttgttcttgtggtgaatgcgataatcgtttaccactttatcgtttaagtacctcggatgaatcttttttgaaagcgacagtgcgacacagaagtagaaatgatgtaaaaatagctttaagtaatcaactactataggaaaaaagtcactttgtgttgctacatgctaagacaagatgctagcgttagattagatatctgtttgctttcggtttctaagttttgattcgtcgaattgaagatcttgaaaatactagaagcagagaatttcaaaatctattgtgactcgttgaatattgatgtgaggaagctttcttgaaactattgacatggggatgctttgttgtcaaatattttgtgcttttttacattgtactcgcattagatcttgaggatatattgttgtttactaagttgtggatgtatttcttgatgtggatttcgtcttccaggtttttcaaactcggcaat

SEQ ID NO: 38388 - DNA, 152 bp, Arabidopsis lyrata
  Intron number 2 from transcript 471499 (locus 471499) deri ved from phytozome v7.0 (chr-ID scaffold_1; pos 5640612 to 5640763 reverse strand)
tgtagctgacaagaagatcagaatcggaatcaacggtgagtgtttttcttatcgaaatccaaaggtttttgttagttttgagtaatttggagtctgagttttttgatcttggtgaaggtttcggaagaatcggtcgtttggttgctagagtt

SEQ ID NO: 38389 - DNA, 641 bp, Arabidopsis lyrata
  Intron number 1 from transcript 354584 (locus 354584) deri ved from phytozome v7.0 (chr-ID scaffold_7; pos 8995735 to 8996375)
gaagaagaagttactccatcagtgcagtagttaaaactctattcggttgttttggggaatatgtaacagaccccattatattttgtgttgtcttctctttctgttcttattttacagaccacagtgctgtgtgtttatgataccatttgtttttctggttttgctaacatttgtttttaatctcttcttcttaaagctggcaactattaaggctatattaatagagttgattgatttagagtttgaattacatagactaaggggataagcataccataacaacttagccacataaattgttaccactcaatattaatttgcaccgtggaagccaaacattttcaagactattgatagaaaaatacataactatcaagtttttatgcaaattatatattaatttaatattttctgattatttatatatgcagtcttattcatgattgattgaaatttttaaaagtggatatttcttaatttgtgtgcttttaactaaaacgtcttatattttgaaacggagagagtacatttttacttttgtaatagtttttgaaaataatttactggatacttttggtttgagcttcacactcttgttgctcatgattgaatagattctttgcacctgaaacagaaagagt

SEQ ID NO: 38390 - DNA, 652 bp, Arabidopsis lyrata
  Intron number 1 from transcript 936061 (locus 936061) deri ved from phytozome v7.0 (chr-ID scaffold_5; pos 1482314 to 1482965)
atattgataggcttcttgatagttgttcagagtaaggattctgttttttgccctaatttcaatttcgatttagggtttttgttggatcagtcttgtgttatactttacttcactaggtttgtggtttagctaatctttgaaatggtgtaatgacttgtttgagattgaacatatatagagattgctctgaggatgatttttggtgattttgattgaagctttcacttacatgcttatgtttgaagatctatgattaacgttttagctaactacatgaacaagatttgtgattttcttgtgtacaatctctcaagcatgttcattttagtgtattgagtttcacaaaaatgaacatgcttgagagattgctatggggaattctggtggttttgatataattgaaagatctgtgatttacgttttagctaagccctgaataagattctgattttcttctgtgcaatctctcaagcatgttcatttagtgcattgagttgcatgatatatgttagagagattgctattggatttgcttggggtttcaattgtcttcaagttctttgttatgttcatgtttgaagatcggtgtgcttgttggtggttttgatcttttgatggttgaaaacattcaggattttcgactctgtagacc

SEQ ID NO: 38391 - DNA, 360 bp, Arabidopsis lyrata
  Intron number 2 from transcript 482168 (locus 482168) deri ved from phytozome v7.0 (chr-ID scaffold_4; pos 15322555 t o 15322914 reverse strand)
tcttccgtgggtcctttggaggtaccgtgactgttcttctatttcttttgtgttcaaacacttgtgacattcatccatggccccatcagaaacttttgattttgtgatagttggaaatgattggcacatcaattacgttttaaatcaggtttttattgttacatttttcgagttccaaatgctaataatgcacagaacaatatagagcataccctaagcaggctgttacttactagaacaagtgtttcctgtgcataattggaaacaaaattttggttttaccactaacggcctggtttaagcttcagtggttgttgttttgcagcttttgaattgcttgagaaagaagtggtggctatc

SEQ ID NO: 38392 - DNA, 370 bp, Arabidopsis lyrata
  Intron number 1 from transcript 482168 (locus 482168) deri ved from phytozome v7.0 (chr-ID scaffold_4; pos 15323266 t o 15323635 reverse strand)
attccgcagagagaacctgaaggttgctcagagaggtaaagagcaatctttacctctttcactattgtactgatttcttttttcgtaagtttgtcttttgattccgttcccgggttttcttactctgtattgttttgccttgttaatttcgatgaatttgtataaaaaaaacttcttctttcagacatttctcatttccggatgaatttgtgtatagaaagtcttcatatccacattgtttagctaaattactcaatttggttcgacttgtgattgctcctcctttagatctttattcgattttcttctaatcagtaatcacattgattctacaggtcaaagttggaaattttaccttgcttagttctct

SEQ ID NO: 38393 - DNA, 763 bp, Arabidopsis lyrata
  Intron number 1 from transcript 480508 (locus 480508) deri ved from phytozome v7.0 (chr-ID scaffold_3; pos 20921780 t o 20922542)
gtggcaaggtttgtttacacgttgagctaccaaatttacttactttctccttttgtcttcttctctctcaggcacttagaacactcacatttcgttttctctcttctgggttttttagtttccctaattagcatctaatctcagtgggaaattgaagggagattttgccattgcttcctgatttcttgaatcttttagtatctatagcttcagtttcttgattttttgtcatatcatgttcttgattttagtttgaatgcttaatttaattacaacttggaagattaatacttaaaaagttgtttcactttgtcttatgatgatccttcatctgaaatctacaagttgggtgtttcttttagtttgattctttgttcttcttgcataaaaggtccaagagattcccttcaaaatggtatctttttgtggctccatgattgatatataatgtccgactttttttagccataagttatctcttcttactgatttttctgaatcattgcacatgggagaatctcttgaggtccttgatattttttgttgtctggaacaaaattggaatgttccttttcttagctgtatctgatttaaagaacagaaattaagagattattttggtttctaaatgttgagctgattttggatgaaggataatggtggggatatgagaatggagcatgtggttttgtttatttttcttttaatttggatgtagactgattcgtttcttgcttattttcttatctcttgcaggagcatc

SEQ ID NO: 38394 - DNA, 517 bp, Arabidopsis lyrata
  Intron number 1 from transcript 916985 (locus 916985) deri ved from phytozome v7.0 (chr-ID scaffold_8; pos 15735713 t o 15736229 reverse strand)
tcataagtctgctaaggctggttctgataaaactggtaagagattttgacctgatttaaatgattgattcgtattggaacttgaaagtggacacattggcttttagttactgttgttttgaaagaatgttcttttggtttaatgatttgttattccatgcccattgttggatttggaaatgaatcaaagttcttgctagaagaagaacttagatgccttctcctaagaatggggatctagcatatttgtatgtatataagtatagattgttgaagtagttattgtcatgtcacgtttcttctattctacttccttttcgaagatgggtggaggtagtgctactttacttgctgttatgttcgaggctgcatttaactggttgacatgtatgtaaatttgtaaacgtaggtgtatttggttaaagattgctcacattcaattgaatagtctagaaagctgaaaaaggttttgctaactgttctcttacttttggattcagaatcaaaagctcaggatc

SEQ ID NO: 38395 - DNA, 374 bp, Arabidopsis lyrata
  Intron number 3 from transcript 484882 (locus 484882) deri ved from phytozome v7.0 (chr-ID scaffold_5; pos 11509595 t o 11509968 reverse strand)
tgaagttccatcttcataaggtataagctttttgattattcttttgatgctttgctttcttcttgagtttggtatcccctttgtcgtcttaggaacatgctggatttagctaggtggttcttagtataatgattttagtaacaaacatgttctgctgttccatagccttgaaaaaagataagtctagttgatacttatttgttcccattagtctatttgtggaaacaattagatcatgttaagttacatagattcagctactagttatgtgtattacctgcatctttctgcttgtgtgaaaattagtagcaactgttttaaaagaactacaagagttatgtatgtgtgtatatgcagtttccattggtttctaa

SEQ ID NO: 38396 - DNA, 486 bp, Arabidopsis lyrata
  Intron number 1 from transcript 942009 (locus 942009) deri ved from phytozome v7.0 (chr-ID scaffold_6; pos 10747729 t o 10748214 reverse strand)
tcgcttcacaaccgaccaacatctccaatacagatgtaagcaggcccggcccgccaccaatttttaagaaacaaagatattaggccttaataatttttaaattttttagtatcaaaatgaggcctcaaaaatatttgttattgtaaagtataggcctcatttttctaaaattttcagatttagtctcaattttaaaattttatctatttgttattgcaaaatgtgccccaatttttctgaaattttaagatttgatctcaaattttaaatttcttctacaaaatccattaaaaaaaaaaatttgtattgggtccaaaatttgacaggccggcactggatgtaagtacccataaccgagttatgtaacttttattggctgtctagtttccttattaagaaaatagtaatgaacctacaactaatgacattacatttatcacttttttattagtgacaaatcgtagcggcgaccacatctcatcagaa

SEQ ID NO: 38397 - DNA, 913 bp, Arabidopsis lyrata
  Intron number 2 from transcript 947504 (locus 947504) deri ved from phytozome v7.0 (chr-ID scaffold_7; pos 21135739 t o 21136651 reverse strand)
aatcgcaaatttctcaccgttgttcctgttgtcttgtaagttcttctctcaaatctttaggaggattttgtttgtatcaccttcattaggtttagaatcgaaaattggcttggctcggttcctatgatttgttgtagtttttgccttgagttatgtttggatatacattgatcttgatcttcattttccctacctacttgttcgttgtcttctcgtagcgaattccaatgtagagatgctttggttcatcagattatgtagtcgatgtttgaaaatatagatgctttcgttttgtttcgtagcgaatcccgatgtagagatgctttcgttcatcagattatgtagtcgatagatgctttcgttttgttacggtgctcattttacatctggttatgtagagatgctttcaaggagcttaattaatctctgtctatctaattacaattatattcctaggtagagtggttgttttgacattttgattggcataactaagtgtacattttgacatgactatcaaatattcttgcatatacacaagtcccttacattctccttattttgaaattctgtttgttgagtttgcttcaaaagtgttgcttatctattcactgattataggatctcagttccctattacgattgatatcactttgcttttaggattctttaactagttgcccaagaaccttggatttagggttttttttgcaatgtcctttagacatttatacaagacataattaaggtctgttgtaagattgctgaatctctcttaaaagaagcactactagattgtgtagtggaatacctcaattgctgtgtaatcaatgattggatcgttgtgacctaaaagtctgaccaaactttgcatgtaggtacttgattgcctctcacacaacagactatcagc

SEQ ID NO: 38398 - DNA, 857 bp, Arabidopsis lyrata
  Intron number 1 from transcript 470473 (locus 470473) deri ved from phytozome v7.0 (chr-ID scaffold_1; pos 1663844 to 1664700 reverse strand)
gttagcaaaggtgacaacttttcgttcatttcttttaaatcttctcttattatttcatcatcatttctttttcgtcgtctgggcttttgctgcttcttcttgttgttgtctcgcgggaaaccccaaaatgctttctctgttgtatctatcgagaatcgggcttttcgttgtgtggtcatataaacagagaattaatggcttctttgaagaaagttgttgttgggcattgaattctcaattgatgcctgtaatgtatttgttaatatgcctgttcgaggggttttcttggtttatgttccttcaaatctcaggctaaaatacgttgccggcgcaaaaattccctcttttttctcagagcgagagagagagagcgattggttgaaaaagatgtgtctttgttatgattccttagagtgtggttgcttttgtagcacaagtccttttacatttaatggcaatctgtcgtattaagtttttgttctgcgtagaagaaacagagagaggagatgaattcatgaaggggcttttcagctttttccttaaagcctttcttgtttattttcttggactttgcaatctcttgttttcttgctcctttaagtttttcttcatttgaatctttgtggataatatttttaaattgaactcctgtgtatctttgagtttctgtttgatggaagatggttaattacactctgatctgatgtgtagagccttaaagtctctgacttttgttgtattaataagccggattgatagtaaatgctgaagaaggtttagtggttgttaaagagcgtaaatgatcttaaagtgcttacctttttgtatttttgttttgtttttcggctgtgttagga

SEQ ID NO: 38399 - DNA, 265 bp, Arabidopsis lyrata
  Intron number 1 from transcript 933138 (locus 933138) deri ved from phytozome v7.0 (chr-ID scaffold_4; pos 11406334 t o 11406598 reverse strand)
gttaaaatgtaagttgtcttcaagtaatacccattttaagatgtgtccgtatgatttacctgtgttattactgatgctgttttgcgtttcaaatgaggccatagttactttgatgtgggaatgttttttaaataaagtttcttgctatgagtttgtattttcttgtttaatcatacaacatattgcaatcaagacattgatattctgtttttcttatggcagaacactgatgtaactgaagctattcagaaggtggctgcagctt

SEQ ID NO: 38400 - DNA, 353 bp, Arabidopsis lyrata
  Intron number 1 from transcript 924579 (locus 924579) deri ved from phytozome v7.0 (chr-ID scaffold_2; pos 704393 to 704745 reverse strand)
ttccggttcaaccggataaacctccgaagagtctggttcgtcggtcccatttgactaatttagggcttctttgggttttagcatttttctcatctcttttgacgatttagggctttttataatggtttactgagtttttgggatttgtggtgtgaccgtgtgagtgataagataagcttgttaaactttttgattatggataagaactcacgattttgaggatgcccattgttcttattggtatctcttatagctctttacttgagagtgagtttcaatggatctcttatagctctttttttttcaggtaaaatgcagacgaccactatcgggcctccacaacgacaagcttc

SEQ ID NO: 38401 - DNA, 352 bp, Arabidopsis lyrata
  Intron number 2 from transcript 925969 (locus 925969) deri ved from phytozome v7.0 (chr-ID scaffold_2; pos 12336715 t o 12337066 reverse strand)
ataagtttgcttatcagaagaagccaaaactggtactgaatacaaatcctggttttcggggtctttaggttttgtttttttttttattttattttattatgcttacttgatcaatacggtttctgtaggttaatgcttccaatgaaggtagtagtagcaatagtgaatcagttccatggacagaagtgggaatattaggtgagattttgagatttgtgttttgtaagttgtcttatataaattaaagaagaggctaacggtttttatggttataaaacaaatgttgccaaggagaagaagaaagtggtgaacaagaggaaaaaagccaaatccagtgacaaactgaaagagg

SEQ ID NO: 38402 - DNA, 1022 bp, Arabidopsis lyrata
  Intron number 1 from transcript 946720 (locus 946720) deri ved from phytozome v7.0 (chr-ID scaffold_7; pos 12644934 t o 12645955)
gctacggtttgtcattcttctctatcccttctctcgtttttcaatttttctcgtgaaacgaatgaagccagtaaggttttgatggatctagctcaggattagctgatatgcatcatcttaataaggatctttgtagattggatttgcgttggttcctgagagatttgtgcttaaatttgattaactctttactaatttagtttggttcccacttgtaatataccaattaagcgcacatatccaatcaaaaaagaaaattctgagtagagtttgtatcaacaaattaagtaaagtgttgtctactcatgaatcttgataggtttctgtggactttgttctctttcaagattcaattagtaacagaacatctactaattctttgagtgtttggtagtttttatgttcaatttattagtatttctcgagtatgattacgcgtcctattttcggagatacctttacgtgatgtggattggagatgtttgtgtctgtctttctgtaggaacctgttatggtttcagagatgtgtgttttaaaataacttggaatattatgtcactgaaatctaatatatcatgtggatttgtatgcttgaggcaggatttgactatatgggttccactattaaaaagattccatctttggcatgcatttgactggatttgactgaataatgttgctccctgaattgtatctccctatttagtactatatatatgtttgaaggttcttagacagtggtttagcatattactattcaagtacattctacttgttgttacttctgtcttgttaaacatagataaatcatttgcttttatgtgcggtgccctttgatatctataagacattgaaactgagaaatgctttgtgttgttttgcaatgttatgaggagacctagttcttcatatatgatgttcttctgagcattcttgaccttattggtgcatttcacttatataacgctcttcaaattgcgttttcagcatattgtgttgtggcgaaagattctcttagcaag

SEQ ID NO: 38403 - DNA, 727 bp, Arabidopsis lyrata
  Intron number 1 from transcript 325650 (locus 325650) deri ved from phytozome v7.0 (chr-ID scaffold_6; pos 4484147 to 4484873 reverse strand)
ctctaaacaaactgttgttggtgctgccgcttcaggtactcgatcttgcgtacattaaattttattacaatttgttgttgatgctatttttaaatatgatatttataattgtatatatgcattgaaaaccttactttttagcaaatgaacaatcctaatgttatggaaacacttgttcttttttttaaatatagtcaaccatgtctaggttttttataactataaatatctttgtctttcgaagtgaagattgttcaaaaaagaaaagcaatctctttgaatcataaagcaaatctatattcgtttcgtgaaatacaagaaagtaaacataaaatttaaatatgaaattagaaataaaatatagctctaaaatgttttagtcaaaataacaaatcctctttgatagatgttatacaataaattattagtaaaagcaaattggactggattatggatcaaatctcaaatccatataatttgtccactccaatactgtatgatacttctatttacatttttttgtttaattcaaatcaacgatcaccaacaaaacaatgtggaaattggaaacgttgaccgaaatggaacgcaatttcaaactttcagttttgcgctgtcttcctacttacactaactaaactttaatttaaaacttaaaaccacaaaaatatttaacactgagaactttgtagctttatacttgataaagaagagggaagtggtggcc

SEQ ID NO: 38404 - DNA, 277 bp, Arabidopsis lyrata
  Intron number 1 from transcript 934749 (locus 934749) deri ved from phytozome v7.0 (chr-ID scaffold_4; pos 19330487 t o 19330763)
tcgatagtgtaagtttttgagtcatagcttgttcttcaagaaacaaaaattggttatgctttgtttttgatgaaatcatagaggagaatcggaattgacatgttagaagtggtgctgattaattttgtataataatttaagacaagatatttttgataattcttaaatcggaattgacatgttagaagtggttttgctttgttttttttttttttttctgcttaacaatctattaagagcaggacgaagacacggctccagaaagcttacctttcag

SEQ ID NO: 38405 - DNA, 925 bp, Arabidopsis lyrata
  Intron number 1 from transcript 942017 (locus 942017) deri ved from phytozome v7.0 (chr-ID scaffold_6; pos 10795879 t o 10796803 reverse strand)
gaggtctttttctttttctctttctttttattttctttttatatatcatatttgtttgcttttggttcttaatttatatttatatgtagattttttttgggagggtcaaatgtgtagatctctctgtatgtttatgcatgagttgatgatcattttttccctggaaaatgcaaatttattttagctgatttggctttatattttgagggttgttggagataactaaggagaatcttgtgcatatcatatgtggatgtgtatgtgttttatataaattgcatatagtgttaattgataagtgtattgaatatgagtgaattgaataagatgtgataaatgataagtgtatgcatgtgtagagattttcctgggaaagaaaattttgtcaacggttactagctagttccttctgcgttggaggatgtgaggttgagattttatgtcactatattatgactatatgtgcatatatatttatttatataaagtatatgttttacataaatatgagtataagtctttaacaaaaaaaaaaaaagaaaaaaaagagtataagtataatcatcatgtatgcacctcaaaaattgatatattgaaagttgaaacagtatcaagttgtttttctttctttttttgctgagatcttttcttttctcatatatgaacataattatgttaaagttctttacgtaaatgcccgattctggaaatttccttaataaatgagtccacgagtgtgaaagctaaataacactcaaaagatgctttgcatttctgggaaactttttttgaaaaaatgttaataactatattattttctccaccaattttttgccttttttgttgattcagatttcttgtactaatagataacaactagcttatgtatctgtttacaaccattgtttacaggactcatcaaaaa

SEQ ID NO: 38406 - DNA, 779 bp, Arabidopsis lyrata
  Intron number 1 from transcript 341820 (locus 341820) deri ved from phytozome v7.0 (chr-ID scaffold_3; pos 7165221 to 7165999 reverse strand)
gaaactacttatcgtgacgacttcggtttcatcaggtactcgttcgctctgggatacgagaagaaggataagaactcgcatcgtagtctcaaaatcttgagatctattgaaaaaatcttgggatttgtaggtaatggatataggggggaattcagaagttttaagtttgaaatctacaattttaactctaattcatggaaggatattactctcactgccaaggggaacagaattaaggaataacaactatgaaaattgaacatcgagatgatactaggaaagatggtccgaagagcacctcctcgagtaaacgcttccacagccggttgaccaaaatgaggatcccaaatagcatgagcaaggcaaggtttagaagcccccattcccgacggggggaccagggaaactagttccgtgaatgccctcctttcctcatattcgagcaaggaaagctgtacaaaggaaaaggtattctaaagaacggggcgggaatcgaagtgggggacctctctaccgcttgtggttaacagtctgttgaaataagggctttgtaacctcccccaacttctacatgcggttttataaatgtggcgtgtctctcaagggaaatacttactggcttgctaaaaataatactagtattacttactccggcgggtgtctttgttgtgctcgaaggcgccaaaattcggcaatagagaaccgtgagttttttttaatttgttttgattttacaactgagagatttggtccgcgtcttagtctaccgtctcactcta

SEQ ID NO: 38407 - DNA, 693 bp, Arabidopsis lyrata
  Intron number 1 from transcript 494686 (locus 494686) deri ved from phytozome v7.0 (chr-ID scaffold_8; pos 4742242 to 4742934)
ccaaacgcaaagcttggttccgcgacatcaaagaggttttttttttttttttttttgacgtcaaatattttagaagtttgtttacgttcacttttcaaatgaaaccaaaatttttgggaaaacataaaagtttaagaactttgataagaagattaaaatatgtaccgcaaacataaacacattttttcttacgttttaaacaatatagaccttagttttttacccaaaaaaaaaaatcgttagtacttaattggactaaatggcgtttaggttcacatttaacacttattttctgaaaaaataaattcaattgttagtccaaagacaaaatttagttttgttaaaaaaaatcaaatcaaatccctagtgtctttgttgttttttcttttttttttgatgaatattaaactatgcaatcgcaaacaaaacataatttacgttttaaacaagttagctcgtctttttttttttaacaatatataaaaaaactgaatgcaaacagaataatcggtgcttgtgtttagattttacgaaactattttattacatgtaaaatcgcaaacacgatatattttgcgttcagaaataaaacaatatcaaatatctgatgtctttgttgtttattttgttagtaaaatatgtctcattaatttggtgatcataatgaaaacgcagggtgacgataagactggg

SEQ ID NO: 38408 - DNA, 658 bp, Arabidopsis lyrata
  Intron number 3 from transcript 930094 (locus 930094) deri ved from phytozome v7.0 (chr-ID scaffold_3; pos 9473476 to 9474133 reverse strand)
ctgacgaggccgtcgatttctaccatcgctacaaggtattccagatctctttcttttcattttaaaggtttgatcattgataatattagtttctaacgtttagtttaaacaagtgaaatatgattgaagtagtctacataattttggaacaacattttatcaaaacagtattagaataattttgaacaatgtaagatgaatagtgaaatcgaatcagaattaactaagttggtaactatataatacttagtagagaagtgaatcataaggttcttcatagagattttttcaaataagtttatcgattagaaaggctctaggcttttatttattactccctctgtttcaaattataagatgttttagggatttttgtttgtttcaaaatataagaagttttacaattttcaatgcacatattaaatgtaattaacatttttgactatttatattctgcagtcacttttataattggttgatttttaaaaaattaaatattaaatgatagttttttttaaaaaaagccaattttcttaactaaaacctcctatattttgacacctcctatattttgaaacagggctctacaaagtcatatttaaaatttgtaactaatgtttcgtttgcctatttaaatcaacaggaggatatccagttg

SEQ ID NO: 38409 - DNA, 824 bp, Arabidopsis lyrata
  Intron number 2 from transcript 325665 (locus 325665) deri ved from phytozome v7.0 (chr-ID scaffold_6; pos 4541590 to 4542413 reverse strand)
ttcataaaagttcacaggctctacaagagtgggtggtaagcaaagtctgtctatatttattttttactcaattatttgtaaaaatttgtctctatatgtgcttattgattgatgggcataaaaactatgtgttgtaggaagaagtgaagtctctagaaagattttctcatccaaacttggtcaaaattttgggttattgttgtgaagataacaaatcactcttggttttagagacttgcaccaaggaagtttagatcatcacattttcggaagttaagatcgatcacattttctttgaatcggtatatatacagataattttgctttacatagagtttcatgtctctctctcaacagaagaagagggattgccatgggcaatacgggttaagatagccattggaacagctcaaggtcttgcatttttccactcgatcatgaataccccgctacatctagaactcagattgcacaatattatgcttaacgaggtaatgactttatttccgttcttattcttattcgtcttcttcttcttcttcttcttcttcttctttttgtttgtgatcttagaaactaatacctaagttcggatttcattagcaatacaatgcaaaattgttttatcgtgaatcaaacaaacgaaattgtttggaagaggggacatttgtggcactacttaaatacatgcctcctgaacctgaatgtgctatgtcaggtacaccaaaatcttaagttttgttttacaaattctgattaatctttcattgttaaatgttaagacaactgtgtaatgtatgtagctcgtttgggaatagaggccg

SEQ ID NO: 38410 - DNA, 927 bp, Arabidopsis lyrata
  Intron number 2 from transcript 492523 (locus 492523) deri ved from phytozome v7.0 (chr-ID scaffold_7; pos 8077724 to 8078650)
gtgttccactcactaaagaactcggatttcaccaggtaagaacttgactcgtgttggtgtttttgataattggtcaaattttgttggacatttgttgatttgggcaaaaataggtagtaattgctggtgttttgtgtgaatgaaatttgagattcttgaggagttgattaagtgagaactgatgatgttgagtctagagaataaatttgattggcgtttttgttgttgttaagtgtagaatgtataagcaagtttggtgattgatggcaaaattggtgtttaatgattctgtgacatgggttttgaaagtattggtgttgaattaaagtagatgggtttcaatctattagtgaactttgggaatggaatctactcaacaaattttaagacttttagagttttgtttctagttttattaggggggatgactttaataccaaactttcaaaatttgaagaatttaagcattcaatgttttaatgttcttctaagaaaagcttctttgttctgtttttttgttgtttctagttttaggaggaatggctttagtaccaaactttcaaagtttgaagctataagcattcaatgttttaatgttcttggaagaaagcttctgcttaaaatctcaagctggtggttcatgacttcaatttcgtctctttgttctgttttttgtttggatgctattttggcaaaaaatttcctgtggtttggtaccgacaaatcggcgcgtgagtagctcaattgctaattgtaacgagtgggacccgcttttctgttttttaacaattaatgactcgttcctctcttttccttacgcgccaaaatagcgcgtgatatccacgtccttgtaacatcttgagtttttttttgttctgtttcttcgtttcagtacgacgtttacgggaacctctttggcctccttgc

SEQ ID NO: 38411 - DNA, 261 bp, Arabidopsis lyrata
  Intron number 1 from transcript 908053 (locus 908053) deri ved from phytozome v7.0 (chr-ID scaffold_2; pos 10313470 t o 10313730 reverse strand)
ctagacttagactccgtcacgtaggtcagtatctatttatcccaaaatctttgctacatgatttaaatcattttatgaaatttacttttaactaattgtgatttattcttgtcgtaatatttcgatcatcatttggcattttcttttagttaaaacagtatatgttaatgtcatctatcaatttgattacaataaactaatacatgtaatcttttaatgtatctagttcatattcctactccatcttcgggatacactccg

SEQ ID NO: 38412 - DNA, 565 bp, Arabidopsis lyrata
  Intron number 1 from transcript 487352 (locus 487352) deri ved from phytozome v7.0 (chr-ID scaffold_6; pos 2037044 to 2037608)
aatcctccggcggtcagaatcctcctcctcctcgggtattccatcctcatctcttttaattctactatccttgaggaatataagttccattttgatgcttctacattattctcccgcttggagtttcactctcgggtacactagcttaggatttttaccttctgggctcagctgtatttttctgtggaatttgattgatgcctataatgtccccaagttttgaaatttgcaaatattttctctgcaatgaatagtttcttctattttaaatgtagtcgatgtcactcatatatggctacgaatctaggattgggaatatgttggagacgagaacttcagaaaaagaaatgtactttacaaaacttagattgagatggcttcacagagagagatgtctcgtttaggattgaacgcatgctacttaccttatcatgcatcacaaatacattggttcacattaagtctttaaattccatgtttcacttaagacagctccaaaccgttctctattccaggaatgctattttgctttagacgttcacatgtagtatgaatctttgcaggg

SEQ ID NO: 38413 - DNA, 571 bp, Arabidopsis lyrata
  Intron number 5 from transcript 488831 (locus 488831) deri ved from phytozome v7.0 (chr-ID scaffold_6; pos 8214409 to 8214979 reverse strand)
tttccaggatcatatctgggcagcgcactgtaagttttgacatccgtggacatgtcatttaatcctcccttaagctggctattaaattttcagaataagttcgttggactggtattatccatttttcaattcgtttatatggttggatctctatttctgcctagtaggagtatcttcttctggttgtttctgagctccactgtctgtcatgattgtgagtgggattgtcctcctaatgtgatctgaattgttgtttatgattttccaactggtgtatgttatgcacaaggctcttttcttagagtcgttttatcaacataaactcaaatgaagattacgtgcttgtcctatgtttgattggattcatcattatttttttcatttcaattcagggaggcaggtcgatcttgatttgactttgcatgttttatgcatcatttgcatgagccaatttctgtagtcgtaggttgcatatttggaccttgcatatctagtgtgatattctgataagtcttgcaatggtgtttctcttgcagcctatttttcaaagatatccacgtcccgagaagga

SEQ ID NO: 38414 - DNA, 534 bp, Arabidopsis lyrata
  Intron number 3 from transcript 488831 (locus 488831) deri ved from phytozome v7.0 (chr-ID scaffold_6; pos 8215235 to 8215768 reverse strand)
gtagagccggtccagtgacgagggatattgagcaggtttttgttatcttcttttgcaaactcaatctaggtcttgtttatactgatttttttaggttttctgtggatttggaatatctctctctgacaaatcctttagttaggccaaaactttgataatttgatttctgattctaggttttagctaaatactcaactcttattccacttttggagtctccaagcttgattctagctatataatggagaacaaaatttgcaattcctgatgttgtttattgcatgttttttttaccagtctactgagacttctgttttgtgcaatttctcaggatatagtattattggttgtaggattaatattttcgtgtgtcccactgctgcttctctttgttattcacaatgttttatcatataactgtatctacagctgaaatcaccccttgccagtatacttcacctactttatttacgcaactttttttcatctattggctcaggctatcactgcccttaagaaaggagcttatttgct

SEQ ID NO: 38415 - DNA, 820 bp, Arabidopsis lyrata
  Intron number 2 from transcript 897011 (locus 897011) deri ved from phytozome v7.0 (chr-ID scaffold_5; pos 7217041 to 7217860)
agctcataaaaagagaaagggtctacgaggaggttgattttgaatttgcttctcatttctgtttgattttgaattgaatcagactttgggttggttttttatttgtcttccttttgatgtgatttggttttgtagggcattgagaagcttgtaaaaacccaccgttgaaaagagagaaacaagaagtgttttgggtttttatctcgatttagcttgacaggtaaagttttgattttttgtttcttaatcatcgcagatactaaatcgaattgccatggccaagaactccttcaagctttctaaatcctctgggttagttttgttcttttctctcttcttctttttactttttgcttgattgatatcactcgataagagtttaaagaattgttgttgatgatgtttacttctttggtttcttttgatcttgttttgctttggattgtgttgtggttctgatctttgtttaaggaactcaatttggattagcctggttacgagtttgagattggtttctctgtttgttggtgatcaacatctataagtgtgttaaccttgactggttttagttgttgtgcttaagtcaggtttttgtcttctgcattgactctgagtttcactcctatgcttatctatatttgctgagagtgttgttagaagtattgctaaggaagtgttgtttgatttcgcatacctttttatgctcttgtaaaagcttatcattttgtcgtcttgctttggccagagtttgtttactattttcttagactacagtttgcaatgtcttcgatgtataggttgaagcaactgttagagctac

SEQ ID NO: 38416 - DNA, 884 bp, Arabidopsis lyrata
  Intron number 1 from transcript 356803 (locus 356803) deri ved from phytozome v7.0 (chr-ID scaffold_8; pos 4899878 to 4900761)
tattacgggaacaagcaagaggtctcagctgacaagtaagtctttttttttgggttatatttcaaatcagaaaatagatctaatcttaaaaattgtaactacataagatagtagttttattaactacataataacaaataaaaaataaacataaattagcaagaacaatcaataattttttcttcacaattttcaaaacaaatccacgcatagcgtgggtattcatctagtactaataaaagggactatttgagccctctgagagtgtccacgtcagatttttcctaaacactatgtgaagatgccatgccagctctccctttttcctcaaaacaaagcactcaaaatttgaccacgtggcataagacaatgatcaaccccatcctgaacgattgctcttccagtcttctcaagtttttggtaacgcatcttataacctttaagctattcacatatcatctattaaccttcttaagattctttatcgaaacgtcattttctctcatcttctccgctaaagtctccatccagattgagatctacaaatcttaccccatcaggccatcacgcatctctctcaattccgcctgagtttgaattctcggggtcgaggattccgggatcaaataattcgagtggctttctgtagaattcgaaatcatgtccgattagtgtatcatgctggtaatttaatcatctttgactttcttaatgatttgtctttttggtgattctcagagatttaaaatattagaggttgcaatgtgaattcgtatatgagtgtgaaagcagaccaatatgtagtatttttatggctagaagacgaatcttattgacattttagtagagaaattcgtggacgtggtaactcaaagccgtgacgt

SEQ ID NO: 38417 - DNA, 414 bp, Arabidopsis lyrata
  Intron number 4 from transcript 327926 (locus 327926) deri ved from phytozome v7.0 (chr-ID scaffold_7; pos 729156 to 729569)
ttggtgtgccgtggttgcgcttgaaagacgtagtaatggcgatgattttgaaatttggggaaacgttgagtggactaatgttgtgcttacggttcccagttcatacgtcttcctgcgtagtctacagaatagaggttgatcaaatataagcattttctttttaattactggcaatatcaacaaaaaaagaaaaacacatttagcttcaaaataacaagtttttggcgtaggggttcactttgattgttaggggacaattagatatttaattaaaattaagggtcaatttttcaatattaaaaaaaaatgaaagatgtttataagctggttttggaaaagccctaatcatgtttaaccctaatgatcactttttgggtagaaaccgccgcctctgcggctacgacatccatagcc

SEQ ID NO: 38418 - DNA, 710 bp, Arabidopsis lyrata
  Intron number 5 from transcript 472977 (locus 472977) deri ved from phytozome v7.0 (chr-ID scaffold_1; pos 12175199 t o 12175908 reverse strand)
gatcgctaattagccaactgcatcagtcaaaacaggtattaccctttcaagtttcttagcatttataagtacttcaatgattttcatatagctgcctccgagtagacttagtttttctaaatataattagcttctaagcacctagcattcgtctttacatgggtaactgatgatgcttcagttaagagatcttttgcgcatatacttctcttgaaagattttccttatacagtaatttgttatcatatgtaagagttaaggcaaggttgttgttatttgagtcattcatttgatatatatggtgcttcagagagatattcagaaaattgaattctctcctcaaccagtatggaactgttataatggtcttaaattattcttccagattttgtcaacattgtaagtaaagtgaaactagtgctaggaaccctagaaatatgatttctgttgcatctggcccattatttttcagtgatagacccttaactggacttgaatcataatgaaaagcgttttatatgaacaaagaaatctcacttctgaaccctaccaaaaagaaaataacataaagaattctcactttaaaagtgctgcaatactgagtcattgaccaaaggtagtattgagtggcatagtacaagctgaatacttcttgtcttggaattgtggcttactggtttcatatgaactatatttgtaaacagggaaat

SEQ ID NO: 38419 - DNA, 413 bp, Arabidopsis lyrata
  Intron number 1 from transcript 356279 (locus 356279) deri ved from phytozome v7.0 (chr-ID scaffold_8; pos 405230 to 405642 reverse strand)
gaagcaaggtccttgctatcactgtggagttacaagtgagttcttgtttcttctatttttgattttcttgacatatttgactattcaagaactgcttctatttgaataatgcaaacgtttcttggagacatgaacaagattaagcattttaaaatgattttgttttggttttgtgtctgtgtttttgatcacaagaacacgttgtagggtccttttgctgcttttgatcactcttattgagctttgaatgttatcaaaggaattaggatcgtagtttgtgtctgaaatgctcagttatgttgaatcaagactctagtttgatgttaagaacttcacaggattgtttggttttgaattatcattgttctgagtgtttgataaatgggataattgttgcaaacaggtacacctct

SEQ ID NO: 38420 - DNA, 909 bp, Arabidopsis lyrata
  Intron number 1 from transcript 916691 (locus 916691) deri ved from phytozome v7.0 (chr-ID scaffold_8; pos 14096701 t o 14097609)
tactatcaaattgtaagtcctacctcgttgggtgatccctaaaacactaaccatgtcaaaacacttttggaagatacctatcgtgaccatttaaatccactaaaataaagtcaatacacccactaaagatacaagtaaattccctccaaatcatggtccactccaaatactactagatcgtgaaatgatctctaataaataattcataagcttcaatttttcacctaagaaaaaagtcaaaatatatcggattgggttgcttttaaataagacgaacttttaaaaaaaactgggcctatggttttgacccactaggccacttaatcatacgcatgggagaggaatcgaatttcctcaataatgttgtttataacttgcaccaccaccaactactccaagtctccgcatttaaattcgttggaactctaattagctatatctatctattctaaaataagcattatattttgccattatctatcaaaaaaccttaaggagatataaaactttatctcaactatacttcttgttattgccgcccctgggagtgtctttctcgggtagctgtaatatgaggaaggctttctacagcaataactgttgttttcctcttgatattatctatctaaattaaattaaactttaaaaatgcaaaaacgattatttgtcgtcacatattgactttttctgtctttagagatgcagttcatgacgacaaaagagatgcacttcatgttcctaacgtacacgtgtgaggttttgtttttttctttagccttttaattaatggtttttttttttaaattggtaggttttaataatagttttcggtataatatgttgtgaattgtttgtaatttttttttttttttttttttttttttttttttttttagttgttggtcttga

SEQ ID NO: 38421 - DNA, 468 bp, Arabidopsis lyrata
  Intron number 1 from transcript 353036 (locus 353036) deri ved from phytozome v7.0 (chr-ID scaffold_7; pos 967619 to 968086)
cttcttcttccactctccttttctaagccgacaaggtcagtttatattattttttcttcattatattggttcagtcaaacatatacatatatcaatatctatttgtatgtgcacaaaattcacatgtttctcaattctcatacatatttcgttggtgtttttagctagcaattttgattactctcgtatgagtttgaagatatcctagattttgacattaaatatttgattatcaacacaaaaaaaaaccttttagatgcatataaaattaagaagtttgtttttaggattataacgtgtgtattaacttgtaagagccgatcttgtttttaagaaacaaactctaattaatctctctctctttcactttgcgttacaattaacttaattaattaaagtgagcgttttcaatattcaatgcatcggctttatttatgcgtaatttattaaaattctacagaaacttag

SEQ ID NO: 38422 - DNA, 795 bp, Arabidopsis lyrata
  Intron number 2 from transcript 495546 (locus 495546) deri ved from phytozome v7.0 (chr-ID scaffold_8; pos 16695556 t o 16696350 reverse strand)
aacaagtaaagattgttttttgctttcaagcttgtttgattttttttttatgaaagggtttaaaatgtagaagctaggagatcctgtagctctgtagtgtacatttgaggggaaagttacgagacacatagcttgtttcttgctgaaagctatgttttagagactgagattgcatttttggttttgattcatgttccctgcaagaatctaggtgtctgattgtgatcattagcttgtatcctgctatataaagtctatggtttttgaatgtgtcaatcatttaatgttcttaacttacgttttaatcaatggggtaattttcagagagcattttgttgctgccaactttcagttcacgcttgtcgctatcttgatatgttttagtttgtaaggcattcttatggtctgtgtgtaccaaaactagaagattctgtagctctgtagtagactttatccagagagagttgtaccaaaactagaagattctgtagctctgtagtagactttatccagagatagttgcgagtcatagcttacttcttgctgaaagcttaggtttttagagactaagatcgcattattggttttgattcatgttccctataaaaaagctaagatcgtctcagaacgcttatattatatgattcttgcaaaatagtttggactcgccatttgaaatcatgcttggatttatagttggctctctcttagtgattgctatgcttttcaaaacgttttgtagctctaaaagttgtttctctcttgtttgtacaatgtttggcaggaagaaacatc

SEQ ID NO: 38423 - DNA, 540 bp, Arabidopsis lyrata
  Intron number 1 from transcript 486067 (locus 486067) deri ved from phytozome v7.0 (chr-ID scaffold_5; pos 17870088 t o 17870627)
ggtctcgggttccgttcaatcttggaaacaactacgtgagttctcttctaatttttgatttgcaaagtctcttcatttcttctagtacgatgcatctgtgagtattaatgtcattgaaagtttgaaatgtatgttctttaactgtcatgtatgctaataattgatagctaattcgatttggtgaggttttatgctgacactaagtttattttgcgtagtgatctatcacaatggacatttttgtgttaaaaatgtcgacagttgcaacttgcaaggtcgtcttgaattttttgcgttgtcagttgtcactgagataagcctgaaaacgttatcaacgcccatgtctgaaacttaatgtttatgttttactttgtgaggcaattaactgataatcggtgtatgcataatgcggaactagcaagatgttatgtaagattcgttttggtgtcagaaacatatagcattagacatgataatttttcttaggtttgttggtttgtcattcttcaggacggtgtgggagattttgacataaagagg

SEQ ID NO: 38424 - DNA, 334 bp, Arabidopsis lyrata
  Intron number 2 from transcript 329411 (locus 329411) deri ved from phytozome v7.0 (chr-ID scaffold_7; pos 8830450 to 8830783)
gaagataaacgtgcaaagattgaggtactttttgatttcctttttattctataactaattatccactaacacaagtaattgcatcctattacatatctttagtttctcactctactaaatggtgtttgattcgagagcaataaagcttaatttatgaaaatttacaaaattttaaggagacattgtttgacctaaaagcacaaactttcgatagattagtattgttcaaaatttgggagacgtttatttttttcttttcttttctaatacgtatatgtttttggttgcaattaatgaaatgaagaacgcacaactacaagaagagctcaagaag

SEQ ID NO: 38425 - DNA, 706 bp, Arabidopsis lyrata
  Intron number 3 from transcript 329411 (locus 329411) deri ved from phytozome v7.0 (chr-ID scaffold_7; pos 8830881 to 8831586)
aagaacaacgtaactcctcccaagatcatctcctggtaataattacattaatttaccttttttacttaattgatctatctttatccctctaaaatatacatatattctattatgtatcggttaaatcatgccagtaaaaaatatatagatcgatctccaaactgtattcattgaattctctgtagcttttaatttggcatactactactacatgaactatgtggacaatccaaaagtttgtatagttgatcaataattttgtgttagtcgtaaaaaaatcagtcttaccaattctatgtatttttgtcgttatgacgtacggttgtaaatttgaattttttcaatctcaagtaacgtaacgtcggcacatgagatttttttttttttttggtcacaatcggcacatgagatttattttattaaaaaaaaaacgaaatgttttcgataatcgatacatacacaaatccaaacacgaaatccattgactaaattctttcatgatctgttttaaaagtatcattcttatttaactaaaaaaatataattcctcagctgttttctatttatttttatttattttcttagctaggtattagttataaataatgcaaaagacttatatgcacttatatatctatcaagtattaatgtttgaactttctttaacttaggctacggagggcagagcggaaggaaggaaacggca

SEQ ID NO: 38426 - DNA, 514 bp, Arabidopsis lyrata
  Intron number 2 from transcript 471794 (locus 471794) deri ved from phytozome v7.0 (chr-ID scaffold_1; pos 6744667 to 6745180)
tctttcacacggcttctccggtcaccgacgatccggtgagtattttttcctggggttttctattgtctttttcgcactttctgtgccttacagagagaatcgaataaagttaaggacctacgttaaataaaaatagtagtggagctgatttcatttagagtttttgtcgtttttttattagaccctgtccttatcgaatccctcctttttaatcatgaacattattttttaatctatttcacaaagggatatcgcctgattaaaaggttgaaatctctagcaatcttttattcttcaatgaaattctagtttggtcaagtattttttttaattttaggcgttgaaaacaaatcagcaaagatggttagaaattatattgttaaaaggcaaatcacataatattttatttaataatttaacaataaaaccaaaaaaaaaaaaaaaatcaaagaaaattattgtgtgaaatgaggtatttaattatttttaaatgtgtaaaaaatttcaggaacaa

SEQ ID NO: 38427 - DNA, 918 bp, Arabidopsis lyrata
  Intron number 2 from transcript 473874 (locus 473874) deri ved from phytozome v7.0 (chr-ID scaffold_1; pos 23509248 t o 23510165)
gtcgtcttgttgttcatcttgctgataaagctcaggtaaattgagatatttgggttggctttggaattttgacctagaattcacttaaaggcttaaactttaagatgtgtgaagtagctgaaagtttgaagctttatgaaattggagtaaagtttgtgtttttattagcaatgtggccagcaatgtgaccaattttgtcagtaaaatgtgtatgtgtttatgcaagtagtgatattggtttgagaaccaagtttttgtgattgggaattagagcttcttgtgttgttaatcatttccagttctcttgctagttgctcaatccgattagaaatagttaacctataaccagagaatgcctaaaaagtatccactttggtgatagaactgtataataatgttttgattttggttctttagttgcttctgtgttgtcatctgtctgttctctttgcttgataaagagagttgttttagttgcattctagaaatggatatatgtctttgtgatctctttttggttttgtggttttgacttgtattactttgcatttgtttacttacttgtaagtgtgtcctcgtcgctttctttacttgcctaatgaataatttattcagtaagatgtagtttcacagttgccgtagaactttgtgttacatgttcactacttttggtgttaaacgtagtgttctatgttagatgttgtattcacaacttttaaaggttttgcttgctacatcccacttattgtcatgtctttcaaacattatgttagctgctgtatcgacattttctattctgggaagaaccctcgtaatgatatcagtcttgtagtttgaacaacactctgattttcattcattggtgaattcatttcttcgtcttgtatttatccttttcatatttctccttgcgcaggt

SEQ ID NO: 38428 - DNA, 1004 bp, Arabidopsis lyrata
  Intron number 1 from transcript 320337 (locus 320337) deri ved from phytozome v7.0 (chr-ID scaffold_4; pos 4220072 to 4221075)
tgtttgaagaaaaatccaaaaggacgtagatgcattaaatcatctcagggacgaattatttgtctgtgtggttatgattgcccttaataattatttatttacaataaatctcatatcatatttacgattagaagtcttatgacaaaataaagtaatattttatgtgggtttctggtgtaaccattattattgttatcgagttaaaaatatatattcaaatattgtaatgcatcctctatatattaaaagagagtctttggtgattatgtgtcaaacaattaatttcatctttttattctttatttatttaattctatcatttttcttgtcaaacacttttatttccatatactacttatttttatcattcaaaaattaaatgctaaaaatatataaatattaacaaaacttactaatacaaaagcagtactgtgtttttaaattaaattagaaaaagaagatggaaatttatgaaaaatatagaagatttatcctatgaatattattttagaacaagctaataatgtaaatataataacaacaaattgaaaaaataaataaataaataaataaaaatgataggaaatatacacacatgaacttaaactcaaaggaaaaccatacaagagacttaagacaccaatggcgaaccaaaaggcaaaaggcaccgaggttacattggtctaattcacatagaggctttaaaaatttaaggtgaagttgtcacgaaccagaaaatagaaattttcttatacgaactcaaatataattgttggaatgactgtaggtttttgcgtttatctagaattatccgggttaggttttaactagtctgaaatgcgttaaggtaggccaaagtggcttgggacttaaccgcttccactacaagaaattattccaaatttcaggcatattttttaccaaaaactaatcagaaaaagattgtctttgtgttttgttccggcaaaccaagaggtaaagaacactttatcaacaccatatct

SEQ ID NO: 38429 - DNA, 289 bp, Arabidopsis lyrata
  Intron number 1 from transcript 903036 (locus 903036) deri ved from phytozome v7.0 (chr-ID scaffold_3; pos 592343 to 592631 reverse strand)
actcggcttagcttcaaccttcttggatatctcgggtactcaattcgaattctcccccccaattttgtttaattttgtttctagagctcacaattagtcttctggatgaattattcttagcacaatttttatgataataaaatgagttttctgataattaataatttaggacatgtgatgatgtttcagtttttgattttgtcggattctctgtaagaaaagttctattttaattgttaaaagtttttgttcagggtaggttaccggtggatcacaagattactagctc

SEQ ID NO: 38430 - DNA, 701 bp, Arabidopsis lyrata
  Intron number 1 from transcript 489162 (locus 489162) deri ved from phytozome v7.0 (chr-ID scaffold_6; pos 9816839 to 9817539 reverse strand)
gcaatctaagaactctccctgcttggaagcaagaggtgagtttttctttgatcttctagttcgtctgtttagttgctggtgaattagggaaattaagcatcgcgagactcgctttggttatgaacatggaagttttgttattgtgattttaacttactgtagatagcttaataggtttcaatgtcgagtgaggttagagagatagtatattagtaattggagtagtgggagggagcttaaacagcttgaaaaattgtgagtatctgagaattaaccttgtgcaatgaaatcaaagtgaatgtctctatctaagctggtttaatactgcaaaacatgttggattgatgtgtatctgagatttagttatatgctgtgtttattcttgtttgtgaatgtatctatgaatagttattagattgataatctgtatataggcgttgccttgtagttattttgaaataaaactttattagtgttggtatcttccttggtctataattgcaaactaattgaagcaatctgcgttgagaatttgtctccttactaatggatgcatggtattgctttgaattccttgtccaggttctttgtgcgcatgctttccactatgattgttttactggaaataacgtctatctgtatatagttatattatgaggaaagctgctaacatgtcaagtcttaccaaactcaggtgactg

SEQ ID NO: 38431 - DNA, 709 bp, Arabidopsis lyrata
  Intron number 3 from transcript 478548 (locus 478548) deri ved from phytozome v7.0 (chr-ID scaffold_3; pos 4836559 to 4837267 reverse strand)
gcgaggcatcagattttacagatcttgggattgaggtaactgctataggctataattggctgtttaagttcactgtaagatggtcattttgaccctttgccgttatcgtttctgcaatctgattagagttggttctctttttgtaaaccaggacgatgaaaatgaactccttggagacattttttctgtgggtcagcttgttccctgcattgtcttgcagttagatgaagataaaaaggaggcaggcaaaagaaaaatttggctttcattgcgtctttctttattgcacaagggattcagttttgattcctttcaactagggatggtatgtcagttttgattcctttaatttcgtaattatgtactacttgggagctccgcctttgttatgtatttgtgggtactgatatgcaagtttattggcatagcctaagcgattcaatgatccagaacgagttgagagagttcatggctgatcgttattagactttatttattatgttgcatatgctagcagtttttaatgaatttaagctatatatttgctatattctgaactggggtcatactttgcaactcagtttttattgccgtagtgcttatagctcctttatataggttatggtgtgtttcaaaagaattatcttttatttcattccaaaatgctcgttcaggtgttctctgctaacgtgaaaagcgttgaagacca

SEQ ID NO: 38432 - DNA, 465 bp, Arabidopsis lyrata
  Intron number 4 from transcript 933091 (locus 933091) deri ved from phytozome v7.0 (chr-ID scaffold_4; pos 11046981 t o 11047445 reverse strand)
atattcagattgttcacaaagaagatcttgatcttgtaagtcagtaaaccattactccttttactagttgcaagtgctcacttcctcattctgcgacttttgttaacctacctgttgatttctttctttctttctttctataccgaggactcatatcaattacatttgctacaactttacttattttcctcttcttgcaatttaaaactgatcttgcttccatgtgctgaaatcatctatctagcctgccagtaactcaaaaaacttttgctagtaaatgtttaaagtgtttaatgcttcttcttttgtggcagcattatgcaagatatgaacgttttcagtacctcttatttagttgtcacttttgctaactttttcgttgacctaccataccaatttgagtttcttgatttcttatgttcatgagcagaaaaatcatctatctggcctgcaaaaaaaatatct

SEQ ID NO: 38433 - DNA, 564 bp, Arabidopsis lyrata
  Intron number 3 from transcript 348537 (locus 348537) deri ved from phytozome v7.0 (chr-ID scaffold_5; pos 17026871 t o 17027434)
cttccatagctgttcttgccctcatcttcattcaggtcttttacttttcaattttctcttaacatcaactctctctttttaatttgttgtaggagaattagctttcgttagagatatattcatatgctggtttcaaaaactaatcacgttagcgggctaagaaaaataaacatgtatatgtaagatagttacctaaacaatgtagtagatcttgataactgtattttgaattatgaaaagcgaaacatatcctaatacaatatgaaatttggtctacctatataccattaggttttcataatttttttgttcttttttacgaattatatacgtcaactttttcatatatttaaaaattagttggtataataactagcgaacatggttggcaggaatacaagattatttgatgatattattttccagcttcattgaagttttatctttcatttttttttttttattatgaaaaaataattgcttttttgattatatctcaaatcaaaacattactaatttgttttcacaggaacgagtgagttggtcactaggattcagcataat

SEQ ID NO: 38434 - DNA, 690 bp, Arabidopsis lyrata
  Intron number 1 from transcript 931663 (locus 931663) deri ved from phytozome v7.0 (chr-ID scaffold_3; pos 22368363 t o 22369052 reverse strand)
tcatcataacaagtcatatcccagcttcaataacggtgactaatttctcttatacatgcttttttttatgaatttattcatcaggtggttatatattactaagagatccatttacaccaggtagctagtagctacatcaagaattagcacacaaaaaaagacctaacaagatctacatatatatgactttgatagatatattatgtatatgtaatgacatataaaaatgttagaaattgttaacaagattttaaaaatgctgttgttctatgaatttattcagattatttttaaaattaaaaatgccgaatatatattgttgggaaccagttacacactatctattacatgaattagtaaaaataaccaaacccaagaagatgttatatatatgtacatatgattttgatagatatatgtatatgtaatgacgtatatgtgaagttatgaatcttgattggggcaaaccaaatttgcatctaaagaacggtttctttgttgtgtaatggaaactagactcacgtgcattttattttcatttttgatttttaacagaattaggggatttgggttagtagaaaaatcactaattttatgtctctttcttcttctttttctgtatagtatggtgtggaatcataatatatgctcactgatacgtattttttttttttgaagggaatttaaatc

SEQ ID NO: 38435 - DNA, 961 bp, Arabidopsis lyrata
  Intron number 1 from transcript 482804 (locus 482804) deri ved from phytozome v7.0 (chr-ID scaffold_4; pos 18370662 t o 18371622 reverse strand)
acggagaacgtcgtcattgagaagcttcccgtgagttttcttcttcttcttcttcattaaattttgcaaaattaaaaaaaaaaaaaaaacaaaattttagctatatagattattctgatcgatgcccaattgagaaacagagaaattgggttcgtcaagtgattaatcaattcttgtgatcagtttttgtttttatcaatgtgtgatgaattttctctctgtttttgattttgatgggaaaaaagttttgagctttatgatcaaaacccagaaatcatttatgagctaaagtttcctctgttttcttaactttgttgaagagttttttttgggtcaaagatcggattttaacggaaattcgcggtttatttttctgtctttttctcgggaaaattctaatagaaaaaaaaaacaaagtggggtaggggacgtagaggatacaacgtgtaattctcagaatatctctaatgattgcgtcactgatagattaacctaacgaatcataattcgtttgcatttttctgagattagttatatgaatttgacgagaattagtcaaatgaatttgagcagcctttgtttggtatggattactactttctacagtttccattgaccttcgattatgttgctggaatccttcaactgatgcattattgaataatcattcgaaaaggtctcagattttgtctctctggttgatggtgaccctttgattcttgttggatactaaaaggaatgatctttaatgttttaagtctcttttggttttgcaacgtttttcctgtgttttaagttccaaagaatgcatttgttgttgggatgattgcaatttatgaactttgactaagatttaactttctgtgtttgtgaacttcttctgcaaacgtatgaagccaaaaatcattaatctgtttgacttgattttctgatgatttggcggtttacagattccggaaat

SEQ ID NO: 38436 - DNA, 755 bp, Arabidopsis lyrata
  Intron number 1 from transcript 326109 (locus 326109) deri ved from phytozome v7.0 (chr-ID scaffold_6; pos 6854283 to 6855037)
cattccaggtaactttaatgttagatcattggtttgttctatctgccaaaccgggctatgttcattatatgggctatctaaacgtgatctaattcgaaacaataacaaattaattaaccaaaattgatcacatgaaagaaaaataacccattcttaaggataatttaaaccaattccaatttgcttaacttaagagcaccttcataaatagaatggaggagggtatatgaaacatattatattataaaaaaaaaaaatgatgagaaatgtaagaactttatgcaaaaaaaaactttactctctctcctctaaattttttctcatgtcaactcttcatttgtttcaatattttaaataaattaaataaaaagtattattattaaatttaaagattatggttgttaaccgataaagatgctttaacaaataaataaatatctatcattgtcaattggttttgatgttgaattgatatttgatgcgaaattttgtcgcaattcttttttttattgtaaaacaacttaacagtatcgatcaaacccaatgtgtagtaacttcgttatgattttagaaacaacaaagaaatcgaactttccatctcaaaaaagcgttcactctttacatatatattttggagttgggaccaaaagtgatcaaagtgttttgtgactcatagatacacatacaaaaattatgtttattgttattatatgttgtcaggaagtggtgtcgaacctaggacaaaacggtgtaat

SEQ ID NO: 38437 - DNA, 704 bp, Arabidopsis lyrata
  Intron number 1 from transcript 907863 (locus 907863) deri ved from phytozome v7.0 (chr-ID scaffold_2; pos 8760412 to 8761115 reverse strand)
atctggagcacgaaatagatcaaatagatcacaaagtattcgaactatgattcatacttaatactcagacctcgtagccggacttctttccgttctatcttataaactttaataaatcaaaaaatttttctgcttttaaactcttatttggatcaaaggacaaacgcttctttgtattttatgtttttagtcattatagctatttttttgattgaataagtgatgatccaatggttctcactcagtgaactttggactttgaaggtttcattgaattatcgtggttctcgtatgaatctgaggtttcaattgattagttaagtagggtcttaacaagagaattcctatcaataataaagaaaacaagaagaaatccctatccccgttccatacaaataccaaataaaaaagacaataaagataggtaatctagaagattcaagaggcctgtaacgatcaacacaacataaagacgaatgagcttacttgattttttggcatttaaccacaaagacgagctttcgcattttgactctttcatatctttaaataatattgaataagagacaagtttaaaactttatattccatatctgtttcaatcagtatttaggtctttttttgtttgagctgtacgagatgaaattctcatatacagttcttggagggggagtaaccttggtttacctatctcaataaagttt

SEQ ID NO: 38438 - DNA, 410 bp, Arabidopsis lyrata
  Intron number 2 from transcript 317222 (locus 317222) deri ved from phytozome v7.0 (chr-ID scaffold_3; pos 1048786 to 1049195 reverse strand)
gacggacgttacaacgaaagagacaactttatgtatgaaatctataattttgagtctgatttatggacaaatcactccacactggtatataaggttttttcaccttggcgtttctcttaagggaaacacttactggtgtgcttcagaaagaaaaccacaagcattaatagattacataatctgttttgatttcacaagagagaggtttgggccgcttctgcgtttgccttttgacgctgggattcatgacgatgtgactttatcttgtgtaagagaagagaagctttcagttttacttgagaacgacgtaagaaatccatatgtgattgagatatggattacaactaagattgaggctaacaaggtgtcttggagcaaattcttgacagtaaatacgggacctgaaattt

SEQ ID NO: 38439 - DNA, 956 bp, Arabidopsis lyrata
  Intron number 1 from transcript 344197 (locus 344197) deri ved from phytozome v7.0 (chr-ID scaffold_4; pos 4995454 to 4996409 reverse strand)
agagggtaatagttgaagatgcaaaactataatggtttatgatttaagagtgaagaagctaagagagtaaagataaggaaaaaagattgccagctacctggcttattgcggaatacatgaccacacatgcaaagtaaacaaaagaatactcagctacctaacctatatgtattacatgcccacatgtacaaagtatatgacgtcatgtcaaccccatacacataaaatctcagagttaatcggtggtcagactccagcgttgaatcagcgtttactaatcggcaccggaaaaacgacctgatccagacttaatgacccaactgaaacacccgacccggattgaatgaccaaacccagaatttaatgggccgagttaaaataaacacttaatgggtctcgttatttaagtaggccgaattgaattaaataaaaagtaaacatttggcccagtccaattcaggatctcattacccatctcgtaaaagtaaaacgcgtcgtcttcttcctatgtggtgaaagaaaaatcctctttgacctagggttttcgcgagagaaaaggagaagggatttcgtcgatagtgaagaatccggtgaaatcgataaagcaggctgagtcgtggattgattctcgttggaatgaggtatttttcaattgttttttgcttttttagtggtatgggtccgaaaatttgggtatgtggggatgttgtcggggactttatagggcttatttcgggttttcctttactcgaaagaagaagaaaaactttgcttgattcctttactcgtggcttaattcctttgtcagtgagtgaacatgtctttgtcgtttttatgacctttatttagtttaaaaacaagttgcagacactgttcttctattattggactgacattgttttttaatttttatttttgtagtaggaacattacagtgaaggtgtattgccatcatt

SEQ ID NO: 38440 - DNA, 775 bp, Arabidopsis lyrata
  Intron number 1 from transcript 933938 (locus 933938) deri ved from phytozome v7.0 (chr-ID scaffold_4; pos 15891311 t o 15892085)
ttccttgtcactgggaacagtgtcttgatcttaaggtaaacaaatgagattcatctttctattttttattttttgctttctagtttctaggttaaactaatcactacagaaacttcgaactcgtgtcgttttcgtgttttggattgcattaaatgtacattgggggataaaattttcattttaatttaatgtttttcttgtttctttctgatgcatttattgcttcagaccgtataaatgtttactcatagggctttttagtttcaggctgtgtttagggaaagatgtttgccttatatggaaaacttttgcagagatttaaatggtaaaaaaaaagttaaaaagcttgaccatgaaactaagttctgggatttttgcttttagataaaaacaaaagaaaattttcatagctatttgatgctttttatcagccaatctttgatctcctagatatgattattctcataaggaaattaaacaaacaaacaaatctatttgtttttcatgcgcaatgatttgtctaagaaattaatggccactaccacaaacacacatacaaaaagtacatagtcatttgctcataaatagatctaggaccaaagcttttgtcttaacacatctttggtgcattgcaatttgccaagaaagtaacttagaaaaaggataaaactttatagtaatatcaaaaagagcactttatgattgaaatcatgaggtgagttttttttttttttttgtttttagacaggagagatttactacataaactggaaaa

SEQ ID NO: 38441 - DNA, 713 bp, Arabidopsis lyrata
  Intron number 3 from transcript 471075 (locus 471075) deri ved from phytozome v7.0 (chr-ID scaffold_1; pos 3706179 to 3706891)
gccgcattaagaggtatcaatctcttcttccacttatgttgatacactgatgaaagctacaaatcaaattccaagcgtttggtcttggtttctatgctggactagttgttccatactgacttctgagtattggttttcatgctcattagcatctttggcatgtccatgagtgaactagaatctgtgtatgtttcttatgtgccgtaggttaaaactggatgagctttttggcccactagttagaaccagattggtctaagcgaggcttgaacaaatcctgctaaactagatgtagtttaagtttctgcgtttgccactggttatttggttggatgcattaagtcatctcttgcaacatgtatgatctatgatgcagaaaactcttaagcaaacatcaaatgctgagagaaatggaacagtacatccttttcactctcattagagattgttttgcttaatatggatatctacctggttatttcctcccctcgattagcagtagaataaatgaatagatttaatctttgaacttgtctgacatggttacaagaccaaataggcagaactgtatttttttagggggcatttctctgctcacctagtaaatactgctttgagaaatcttacaacaggatgtttttgttctcaaatgagttaaattttatctagtgagcaaatgcgagttttaaatccaaattttttcttacaacagg

SEQ ID NO: 38442 - DNA, 487 bp, Arabidopsis lyrata
  Intron number 5 from transcript 477705 (locus 477705) deri ved from phytozome v7.0 (chr-ID scaffold_3; pos 1530298 to 1530784)
gagtttgtgtaactgaaaattacaaactttgcttcatatgttgataattgatcccttaattgaacctggaaaaggaaaggacaagagagctgagacgagcaagatgaagaacaaagaatccagaaagtagaagaagaatatgaatcgatgagggttagaggaagaagaagaagtgttttttgttgaagggttttttttgggcccaatacgtttttactaagggtaattagattagtttggttagtctaggagagttgttaagacaagcttgtacttgtaatgatggtctagaagttgagtgtgtctaaaattaagaaggtaaggagtagggaatgggttaagtataagttgtttgttttcttttgtgtaagtattgtatgctgttcttgtaatcaagtgtgagaaatagtacaagtttaaagaaaacacatacttcttaagagaaaaatgagacaaagccactcaaagacccaaatctcaacattat

SEQ ID NO: 38443 - DNA, 557 bp, Arabidopsis lyrata
  Intron number 1 from transcript 887958 (locus 887958) deri ved from phytozome v7.0 (chr-ID scaffold_303; pos 200 to 7 56 reverse strand)
ccttttatcattggtaacgctttgtttttttcttccaattcagacagctttttttttcgggtgctttgtcggattttaggaaatgggaaattaaacagaacatttagtccgtgatgttttttaaatttcgtttcttttctcttggctttgacttgactatgtcaaaaatctcgaatttggagttttttctttgagattccgaaacgaaattggttaaaaaactgagatttggttgaaaaaatgaaacccagataatctaacagatctgtctaatggaaattagatatacaattgttttcatttaattttcaaagagacttttaaaatctttacccaaaaaaagaaagaaagacttttaaatcatgcagttaagtttctgaaaaaagcagataagatttttgtgaatttctggataagacaaaattagtttctgggagttacaaaacagttataaagtttaagtcagaacattgaaagtccaatctttggtttgtgtgttttgggtacattaaatgtaaaaactgtattcttatcatttatgtgctattgtataggta

SEQ ID NO: 38444 - DNA, 892 bp, Arabidopsis lyrata
  Intron number 2 from transcript 940713 (locus 940713) deri ved from phytozome v7.0 (chr-ID scaffold_6; pos 4966755 to 4967646 reverse strand)
gccgaaagacttgcaatatcgaaatactgatcaaggtatgcgtcttttttcctactttcggattttgactaacttccactagcttactggctagttagatcggctagaatttcattagctcccagcggttttcagctgtttcctgtgttctaaaaagtgttgtcgggtatagtagttctttcaaatcatgtaagagaaatcgatttcagagagaaagctaagagattttggtctccttcattaaacagaaaaatcaaatgtgtctaaaagctcccaaaccatattacccgaaaataaaccagagaaccaagttatcaaaaaattctcaggttaatcatgaatctatattatctgtttttttttatcaagaagattgtaaaaggaatcttgatgtctacttgttagcttttgttgtgttttcaagacagacaaggtgaattaccctcgttgataattggtaaaactgtcctgtctgaatgtcttagatttctgacatttgatttaattgtagcttatcaatatcatgtttgtagttttgttatatgtgttttcctcagctaaccttggctatgtttttttacatgatctgaccattgcaatgaagtatccatgcttcgtttagtgaaaaaatatctcgacctattcatacatgcatttgcttaacacagagctggtatctgtatgctactgtttatacacatatataattagctcttaagctgtagaagcaagcggttttgtgattcttatgagtaaaatttccttttgctccttatctatatcgttgaacatgtgtatcgtctgttctctgcctgattttgcatcccttaacttgatttgtggatttcttttgatagataaattttgggaaaagctgaaagcggctgctgag

SEQ ID NO: 38445 - DNA, 543 bp, Arabidopsis lyrata
  Intron number 1 from transcript 940713 (locus 940713) deri ved from phytozome v7.0 (chr-ID scaffold_6; pos 4967674 to 4968216 reverse strand)
atctcttccccgtcgtacgctctcgcgaccaccgtgtaaattctctcttctctcttctctcttccttccctctttctcttttgctgctgctgctactgttgccgcgaacttgatttttctttataaaccctaattggagtagtgtatgtttcgaaagggcttttactgttcattttccactttggtctgattctcgtcctgaaaatctctctgttatggtttagtaaattgatcagtgattgagttttcttaagattgttttaacacatgattacaaatgtcactctatatcatctttcgtctgatgcagtatttattcattactctgtgtgtttgatttcatctgatttgagtttttgtttggtttcagactgatttagattcttcaaagcaatcaacttcacagtcagttgtggaccgagaggtactgtctgagtctctgagatcgtaattcgtaaagcttctttttctttatttgcggatgttatattatgtacacttgaaatgtgatggaacttggaatcactcaacgcagttaagtga

SEQ ID NO: 38446 - DNA, 639 bp, Arabidopsis lyrata
  Intron number 1 from transcript 890129 (locus 890129) deri ved from phytozome v7.0 (chr-ID scaffold_7; pos 9667924 to 9668562)
ttggaggagacgacttcagaaatttctacaccttggttcttctccttcctgttttcttcactgcttaattcttcctagctaactattttgttttcttactaacgtccattgtcgaagaaaccttagatattcaaattaaaaacccaatataatgttttattttcatttttctccatgaaactattaatattttatcaaatccaaacttaagtgtaagtagtttttgataattcttttctcatagcctcatctactacacctgatgttttccctccagtttattgaattgcataattgttattagtttgattttactttattaatcaaatttgaatttggattatattacgtacgtacatgttcaagacggttaacttgaatattatattcacttttaaatttgcataaatatcaagaaagtaaataaatatcttatttgacccttatcttaacgacttttgaatctgaattaataatagtcaagccagtatttctagatactcttatatttatggaaaatgtaactattgcctttattctaatttaagcttcttcgtctttacttttctttattgattgctttactattttcataatcgatattctcttatacggttgttgacgtgcttaataaaggtt

SEQ ID NO: 38447 - DNA, 266 bp, Arabidopsis lyrata
  Intron number 1 from transcript 352380 (locus 352380) deri ved from phytozome v7.0 (chr-ID scaffold_6; pos 22428046 t o 22428311 reverse strand)
tgttcaagttgttgaattcctcggtggcgaaaggagtaagcagtttctttccatatcgcaaaactacaacaaagacgattcttctaaaataaattcagagaaatcaaaaatttcgtcattgaaatcaacactttttttttttccttttataatacctatccttgccatgattaaatttttctttatcattttttagattcactatagtcgatattattgttctccttaaatttgcaggtgcaactcctaagaaaattttgagtcac

SEQ ID NO: 38448 - DNA, 368 bp, Arabidopsis lyrata
  Intron number 1 from transcript 485256 (locus 485256) deri ved from phytozome v7.0 (chr-ID scaffold_5; pos 14088842 t o 14089209)
cgtttctctccacgcgcctcctcctcgacccctccgtacgaacatcttactataattagattcttgtgttctcttctaattacatcaaaacgacaatcccgtttgtcattttcctcgctactattttttttttgccacgttggatattggttagtggtgttaaaactcgttcgcgcctaatttgtcgtgtcaccattacttttttgtcaaacaagttacggacgcttgacacgtgtctacataggagctttaattaatactcacgtgtttgtttttagtcaataactaactaccgctatttttactaaacgactacgttttgtgtaactataggttttgatagagaaagaaacggtggccgtgactga

SEQ ID NO: 38449 - DNA, 584 bp, Arabidopsis lyrata
  Intron number 3 from transcript 315978 (locus 315978) deri ved from phytozome v7.0 (chr-ID scaffold_2; pos 13968837 t o 13969420 reverse strand)
tgcaggtataactctattacgtctctattgcatttgttacattcgaatgagcaaatgaaatttgaaagcatagatttatctgtggtacattgaagaaaatgagttagagaagagaatgtgcatgacattgtgtttcttggtgtttgagtttgatgattattgggttttcaccacttctgtaatgtgccaacatggtttagtgtgtagaaaaatatgatgtgcagggcaaatagttgaccaaagtggatcacattctcctccctgaacactatcaactgtcccgaataaatatttatgcattgtctttgtatgacatactttgtatttctgcaagtccttatgaggatacattgatggtagttatcttacgaagttgagttctcatctgaaacaataactaactgattgttatttaggctgacatagtatattatgcattggcaatatgaacgcttatcatgttgttttatgtttttttacagcagaggtagatgccttaccataactaacttctgtttttcacaacttggttttatattttttgtgcaggctggtgagggaaatcagcccttcgtttgtaaaat

SEQ ID NO: 38450 - DNA, 852 bp, Arabidopsis lyrata
  Intron number 1 from transcript 330308 (locus 330308) deri ved from phytozome v7.0 (chr-ID scaffold_7; pos 20699460 t o 20700311)
gtgatccttacgtcgttgttcactccggtaaacaggtaactaaaacatcctcaaatcccataatttattctctaccattttggccaattctctgttttctaagtaattttgcatctttgactaaatctggtgatgcatctagtagaatctgatccgtttattgaactgttggtgggtaataaaagcatttgctagttcttttgtgatttgacagtggatcattgactctttatgttagatctcaaacataatcatcaagaacttagatttaagttgttgaatttaatcaagatttggttatcaatagttagttatacctaattttataagataatatgaagtctttgacttttgatttggtatatgtctgaatagtactagctatacctgtcttaacctaatccaaattaataaccagttaatatcttctctgaatagagttgagttgtataattgaaaattttgcataaatgtaaatggagaagaagacttttgcttctttattttttttttccatattagcgggtccttgtacatgtgatgatttagtcttttttttgttcaaagtgatgatttagtctaagccatcaatttttcttctttttgtcaacttcaatgatcaatccctcctggttccaccacgaaatgattgcttgtgttgtcgccttttgagttaccttaagcattggctagttcttgaatcttgattcttttgtttgtgatgtgtcttttggcttatttgatagttcttgattctttactatgatttagtccctaatcttttgtttgtgatgtgttttttacttatgtgatgcagaagctgaaaacacgtgtggtgaaacatagtgtaaa

SEQ ID NO: 38451 - DNA, 479 bp, Arabidopsis lyrata
  Intron number 1 from transcript 941738 (locus 941738) deri ved from phytozome v7.0 (chr-ID scaffold_6; pos 9320803 to 9321281 reverse strand)
gtgcgctcggcttagccaataatcacctactctacgtgagtttgatctagcctctagtcgttttttcatttcttcgactattaccattgatactatactcggtatttccattatcttcattagtttttgctgggcgcatgatttagtagtgagattgatgattgcttttgaatcaagaatttccttagagagaaatagtgccagtttggtactccaccatgtaagagcttgctaggtcttgatagtagcattagtcctaggtgcaattactgaatttcgtttataaggaacagtggtagtggagtctttaatgcttcttatagatcaggttggatgcatataagactgttttttctgtgtctggcttctctagtttcttgatcaacaattgtaaatttacatttaacatgatttttggttcgctgagattatctgtttttcttgatacaagcgagtgaccaggcctaaaggagggataa

SEQ ID NO: 38452 - DNA, 505 bp, Arabidopsis lyrata
  Intron number 2 from transcript 948309 (locus 948309) deri ved from phytozome v7.0 (chr-ID scaffold_8; pos 1039827 to 1040331)
gttgcttgaggtatgctttgattcatgcaccaaaagttttgttttttgatgttagtcctcaagcttcattctagttcaagttctagaaatcattagtttctaagattcttgaatctgttggattctcgggtttatgtgtgttttcttgaacgaggactcatattcaaagattttgttttgctttggacgaaactaatattacttgttgtggtttcgggcctgcggaaattactggttttggcccaaaacctcctggaatccaaaaaaaaaaaaaaagttttgaaatttccctcaattcccaccattttatcttttccaagtttttgaactagttgatttgtataaataacggttgtgatctactagatgccctgaatggcattgactaatatcatgtgatctttggtccactgattctcttggttttatcagtatcaatgaatcttctacaatgctttttcttttttgcagtttagcagagtatacaatatacaaactagagcag

SEQ ID NO: 38453 - DNA, 263 bp, Arabidopsis lyrata
  Intron number 5 from transcript 486060 (locus 486060) deri ved from phytozome v7.0 (chr-ID scaffold_5; pos 17847494 t o 17847756 reverse strand)
gctgcaagatattacaaggtactacatgtctcttttgagcatgaattagatattactcttttagtacggatactgagaagatagttttattggggcacttcttcagtatttcctccatagttcctgttgctttatgcatgttggatcctgtcggatttgtttttttctttctacactacagtaatcttaatattgactttctgtatttgtactaattggtacattaatggttttttacttttgacaggaaattgctgagtatt

SEQ ID NO: 38454 - DNA, 333 bp, Arabidopsis lyrata
  Intron number 2 from transcript 486060 (locus 486060) deri ved from phytozome v7.0 (chr-ID scaffold_5; pos 17848092 t o 17848424 reverse strand)
aaaagcagctaattcctataagctcgccaaatcatgtaaatttccaaaaataataatcagccgaccttgatttttgcttttgtgtgtttgatttttgtttcatctgattgatttcgtgggttttgtttatttgtgatgatgatgatggtgaagaaaaagggagaaattgagacgtttgatcttaggtttataaattgatatgtgggaattataaattggatattcaacattttggccttatagtaagtgattgataagtatcttcttgcttatgtgtttgatttgtgtgattgttcaggggatcaagctggaaaagcttatctaaaacttgct

SEQ ID NO: 38455 - DNA, 259 bp, Arabidopsis lyrata
  Intron number 1 from transcript 896376 (locus 896376) deri ved from phytozome v7.0 (chr-ID scaffold_5; pos 2141575 to 2141833 reverse strand)
aagaagaaggaagcaaaggtgaataattgattttctctttagtgattattgatcacgtggttttgtgtttgtgtctttaattactgcacacatttggtaaaaatggatcttttgtttttgatcttttaagcttaggtaggcgtcaacgaagaagaagaacaacattaaaagcaattaagagatttttgtttttgactatttgtttcttgtaacaacattaaaagcaattgagagttttcttagaaccgtgacgccgtcg

SEQ ID NO: 38456 - DNA, 942 bp, Arabidopsis lyrata
  Intron number 1 from transcript 314295 (locus 314295) deri ved from phytozome v7.0 (chr-ID scaffold_1; pos 24707837 t o 24708778 reverse strand)
ttgctgcaaagcccgtgcgcagcagtactaggaaggtatttatttctctttttactttcattatctttatccacaaaatgtcaaaagaaatttagaactggtcttataccaattatatgattgttcttgactgtttgttctgtatagagtggaaaaatttcaggctaatgtgttgtatttgactggtcttaaatgtggtctaattgaggattgcggtatctaaaattccctgtaattgtttttagaaaaatgtgtatcttatctggattttggtgtatttccgaaatctttttgtataattttgggaaaaggtcttatttaatactgttcttcttgactgtttcttctccatagagtggaaaaagttcagagtaatgtgtttatttgtgcctggtctcaaatgtggtctattttgggtgtggagtttctgatattattcgtaatttttttcaaaagatgtgcatcttatctggattttggtgtatttcataaaatcttttttgtataatgtggaagtgaaagtgattggtctatttggtaagtctttatcatgtcatttgagttaaaaaatttacaagtgtttcatgttagacataaccatgcttattgtataattttagaaaaaaggtctataccaattatatggttggtcttgactgtttgttctgcataaagtggaaaaagtttttagagttttatgtcatttgtctctggtgggtctcaaaatgtggtctatctattgcagtatttgatattatttgtagacatattgaaaagatgtgtatcttatctgatatttggtgtatttccttgatctatttggttagtcgttatcatttcatgcttatacaaccatgtattagtgtatacttatgtcaaagtcgggttttctatgcatgaacaaaagagcacttcagtggcagcaccggtagctgcaaacct

SEQ ID NO: 38457 - DNA, 506 bp, Arabidopsis lyrata
  Intron number 1 from transcript 931116 (locus 931116) deri ved from phytozome v7.0 (chr-ID scaffold_3; pos 18448863 t o 18449368 reverse strand)
cgacctttcgcttctctcgaagacgcttgtgaaaggttcgtctaattctgttttttccagttgatttttttacagaattgaattgattttatgggttgttcttgaaatctctgggcttattgatttcctgaaatggttctttgagtgaattgattctctggtagtcattagttttatagattctatagaggaatatccaactcatagtgtctctatcaccattttatcataaaggccaatgttgcggttaaggccactaagcctttgaagaaaggtatgaactttggatttgaaaatttgttataaactgaagtggtatcgtgagagacttttggtgaagcttgatagaatcatgttttgttgttttttttggttgacagaatcatgttttgtaatcttagacgatttttttttgtaacagcggctggcttacaagtttgatgttgttttgatttgggcattgtgatgcagtctcctgggaaagtacatttgttgttggagtactg

SEQ ID NO: 38458 - DNA, 888 bp, Arabidopsis lyrata
  Intron number 4 from transcript 476660 (locus 476660) deri ved from phytozome v7.0 (chr-ID scaffold_2; pos 16584125 t o 16585012 reverse strand)
ctcataaaggaaactcatctgagcttgattatcaggtaactttttaattgcttgctacttcactgtttcaagattattattatgcttcctaatagttttatattgattggtttacaacttcaacacattgaatgctttccctaagatattagtcttcttggtcatgatattggctgtatgagcattaagtttttcatggttttgagatttcatagtttgagacatgtttcttggtactcttagaaagataattcctttagatattgaagtggaccagtttcgttataaatgatcatgtgaggtatggggcctgacacattttgtaagtcaatagatatttctctcccctctctatctctcactttcactcacacacactctctctctctctcccatttgcctcttgtctcgtgatcttaaaatctaaactcttatcctcttgtctgctacaatcagttttttatgtgaccccgtaattgaaatatcgtggttttcacatgtaatgccacaatataacatcttttgtttatgcatagactgatgcggtaaacgctgcccaaattaagagtcaatgttaagaatagcgtatgcttgaacttttatttggaggttcttgcagttgacagtgtagagtacctaaaggagatggatcttcatactcaccgtcgattaagttgcatttaagtatagtgcaatgtctataacttcgaccattagctctacatctgaaagagtttataagattggaacaaaaagaccattagcctctattgtacaagtttttgaatgaccattgtattctttatttttcttttctgagactgacatgtgctacatacatggatctctctgttgctgagttctttgtttctgtgcaggtaacagaat

SEQ ID NO: 38459 - DNA, 509 bp, Arabidopsis lyrata
  Intron number 2 from transcript 482448 (locus 482448) deri ved from phytozome v7.0 (chr-ID scaffold_4; pos 16578283 t o 16578791)
tggattcttcctcggagactacccaaaaagcccaggttaataatataagctggccttcttagaagagaaacattcttgttggttctgtgtcttaaagtccgtatctttttcttattccaagcacttgtatcagctgcaaaagtttccaatttatcgttttgaatctctgttattatttgatttggtgactactaatagcttaccttgaaatcagctagttgattggtcacattttctagttaagtagctgtgttagtgctactattatgctaagacaaaattataagtcttagtctttagttcttctgctacaaattggtaaatcaacactagtatgtctttgttacttttcactgagctagttttagttcacaatgtatagctatgtatgccattagttcttagtcgtaatttctgctatcaatttatagtgaggtggtggttactttaagttgtttgtgttcttgggtgcagggggatcagaaatcagtgtcacggagacagtggat

SEQ ID NO: 38460 - DNA, 884 bp, Arabidopsis lyrata
  Intron number 5 from transcript 900336 (locus 900336) deri ved from phytozome v7.0 (chr-ID scaffold_4; pos 10562628 t o 10563511 reverse strand)
acatatattgcttctacaagaaaaatattggttacatatgggattttcatgttcttgcaagcattggatcagattctaaaggtaaaaaccatttatgctttttctatttcttttttttccgtgggagttaatagagagagagaagaagaagagcattgaggattttaatgtagaaagatatttgtagaagacatctttcaagagaaaggataggatgtgtttgggtgtttatgagcatgtttgacttcagacatggtggatctaaccagaagcttttgatggataagaaacgtggaagcaaaagaatcataggtttttcttcttttctcttttgggtattggaatgtgtctgaaccaaaaaagattctcacgttgttggtttgaagaaacaatgcaggtaataatggaatgtttgagactaaggttgagaagcagcttacttgtgactgtgaggtctttgttaagtttttgttggatttaagaatcaaacttgcttttgttgtgtaaaatggttttgtgagaaatgaaaaactaaagtagattgttttgtctctggaaagtgaagctgaaatgcagagtgtcaagatactaagatgagattgatgagaagtctaagaaaggtaacagatgtttgtgtattcagcattttatataagactctgatgtttgttatgtattgtctaatcaaaaaccagttttcagacaactttacaattgctctgtttcattacgatgggatagcaagtgagtggaatgacgagtttgagtggagctaaatttgattcaatctgaatgtaaggttgtggcggagacgttttcagatttgacgttttcagatttcaaatatatatagaactaattatgtttttggtgaatcaggttaa

SEQ ID NO: 38461 - DNA, 772 bp, Arabidopsis lyrata
  Intron number 2 from transcript 904517 (locus 904517) deri ved from phytozome v7.0 (chr-ID scaffold_3; pos 6623466 to 6624237 reverse strand)
aaaaaaaaaacaaaaaaagagagaaagatatccaaatcgtgcgcccaacgttctgcatccaaatgttacgacgtcgtttcccaagcagaatcctcaccgtccatcagaaggatactttatggtctacttttctcaagtagtacgtgtcggataatgacatgaacactagtaataatttaagtgcttcatcattggatctcacacatcttcgttacttaagattgggaaagtttttttttatttttttggtaaagaagaatgtaatgttgatagatgtataaaaatattatctcacaaacggaacgtggccatgtggggattatacaatgcatttgtagacatcttaaatagtctctaatgtgaatatctataagttcttaactcgcatctgcaacaccctaaatcattatgacgcttaagtaaatccaaaagcttcaagatttgtagtctctgatccagttttttattatttttattacatggatgcgaaaacggtaaacagcagcgatgtatcatttacgggaatcaaagggacggtatatagaaggcaatatggtaacacaatggtaggatgcaagaggcttattttgaagtatatcgacttaacatcggctgatggtgccggtcaaactcctctatctattccaactagagactaatcaaaacaatataagtgagatttacagaattttagatttcagttttactataacaagtaagaaagaaaacggtggaattgtcggattgcggtacatcaagagagaaacaagaa

SEQ ID NO: 38462 - DNA, 970 bp, Arabidopsis lyrata
  Intron number 2 from transcript 477538 (locus 477538) deri ved from phytozome v7.0 (chr-ID scaffold_3; pos 805968 to 806937 reverse strand)
agaatttagtaatttccagaaatttagggcttgattagttttcccgctagcaccctcctagcggttgctagcggtcggttgcggttgttagcggttggtacaaatcatagaaaccgcttcataccgcttcaaatcgctcgaaatcgctgaatcgaaacgctccttcccgcaagcgtttgcggttgtaggcggtagcggttggattttaaaaaaataaaaaatcaaatgtttacttataattattaaaaaatatattaatcatatatgtatctttcatctttgtatcacgttctcatcataaaccctagtcaatattctaaaaccttattttctcaatgtcttccatccaaactgatgaaaatcaataactaaacgtaagtatcatatatccttttattcattcattacctcatgtcatgtgtaactctttgaatattttttcttggcatcattttttttcttttcattatgtattgctttgctttttgattgaatatatgtttcgatttattttcttgaatagaaaatcacttgctttttgattgaattcaacgttatttacagtttgtcccattacttgatgcaatttttggtgttaacccagtataaaatactatcttattataaaatttctttatttttgaataactatttagtactttatttatggttttaattattaagcatgttcaatttttctaatattatcataataatatattggtatttttatttctttttttgtaatattttttattttcggttgttagcggttggtacaaatcatagaaaccgcttcataccgcttcaaatcgctcgaaatcgctgaatcgaaacgctaaaccaatcgttcaaaacgcttgaaaccgcaaccgcccgcttccgcaaactcccgcaaccgtaaccgcaaccgctgcgtttaaaccagtcagacccttattcgaagcggtggatcgaattcacttccgtt

SEQ ID NO: 38463 - DNA, 456 bp, Arabidopsis lyrata
  Intron number 3 from transcript 488691 (locus 488691) deri ved from phytozome v7.0 (chr-ID scaffold_6; pos 7564368 to 7564823 reverse strand)
cttggattcagtccagtgagatcaaagataagaaagtcagtggtcttcttcatcttcagtgccttttttcctttttaattgactaatgaggcgacttggctcccttgcattctcttaaatctacggctgtgtttagttatctctcctgtctaaagttcatggtgatgattcatgttataactaaagctttcctaacatcttaaagaaaaagtctgatattttattcatttgagtaaggtgctttcaccggtggttttgtctgtcatacttttggctaccctctaggctctagctagtttaattttggttcatataagctgaaaggagtagcttcatctctagttttacttttacattccttaaatattgttctgttttgaaggaatcttaatacccatttgtttttagactgaactgatcagattgtctgtcgtttgacttaggtcagtgcatcat

SEQ ID NO: 38464 - DNA, 866 bp, Arabidopsis lyrata
  Intron number 1 from transcript 907336 (locus 907336) deri ved from phytozome v7.0 (chr-ID scaffold_2; pos 2640038 to 2640903)
aatcaagtaacaaaaaaaaaaagaacataaagcaataatatcccatcttgggaatttataaaagtcatacataatttggtgagactcaatttaagagcttcatttcccatttttcttatttgttcattcttcacaatgactgatggaagaagtaatctcaatttgtaagttccttagatattctcaattttctattttctattttacaatatctaatgatgattgtgaaaaaatacaataagaaattatattattttcaattgttttgctttcagattagttttctagaatttttatttctgaaattataaaggatgaaatgaaaatcttgttaaggatcatgatcaaaagattttactcattttatctaggttcatttaatttgagaggtccctttacctctcatattaaatcaatttttctatatttttggttaaaatattttaaattcaataaaaataattttaaacataaaaacatagatatcttttccactttaactttacgattgattaaatttatttgatccatttcgactcatcctattatactcgagtttcgtgtaaattatggtttcactaaagtcagtttggtttttttaattgatttatgattttattttacgtttatcaaattttttcccaaattttataatccataatatttgataatttgttagaattttgatgtgattttttttatagaaatatattagatttagaatagtcaagataattgtttttctaagtcactgaaaaaccaatccttgttttcatattttgtaataaataattaaacttaaaacacgatgaattattgacccgcaggcagaccgggtcgatcaagaaatctggtgacccaaaaaa

SEQ ID NO: 38465 - DNA, 395 bp, Arabidopsis lyrata
  Intron number 2 from transcript 472216 (locus 472216) deri ved from phytozome v7.0 (chr-ID scaffold_1; pos 8501325 to 8501719)
ccggtgttaggtaaattctcgtttaactgtctctgtttgcttccatgaggctaattcaattgttcgaagatgttgaaacttttcagaaaaggctctgttaaaaatcgtttctttgattcaaaatgttattgatcctgttgattgattctaaatcacgagtgctttatgtgtgttcttgatttgccatgttaaagtctcttgctttggtgttagttgttgttaagagctgaaatgattgaatctttttttttactttatgttgtatgtgagattaaggatatatgattgtggcagctcctgatattgttgcgaaatgtttgtatcgaaccttgagttttagagagagatgtttgtatttgtaatctggtgtgttttttttttgtgttgcagagcga

SEQ ID NO: 38466 - DNA, 730 bp, Arabidopsis lyrata
  Intron number 1 from transcript 348782 (locus 348782) deri ved from phytozome v7.0 (chr-ID scaffold_5; pos 18205654 t o 18206383 reverse strand)
ggttaagggagtgttagagagcgtgaatagccagagtgagtttaaaacgatctcgatcctttgagtctaatatctatggaagtttggttaagggagtgttggatctgtggatgttaattaatgaaatttgactatacaaatatgttgtctgtaatagcgaatattggcatatggtgagttcatcgacacaacagctcattgtgttggtctgacatatggcatcttcatgcaaatctcatttggtttgatcatatcgttttttttccacaattacggaactattttcttatgataataatgatagacttagaattcgtattatgctttgcagttttccgatttagtgacttttcttgtaaatttgtttcggttgttccgattcttctgaaaatttgttacatttttagtagttgtgcttcacaagtcaatgttttgaatgaagcgttctttttaaataagtggatagtattttgtttcttcgaatcttttttaagttatcgtgagtcatagtcatcacgttaaatggaaagtgtaaaatcgaaatcatattattagtccgattttagagatgaacgaaggagtatgattttgatatcacaacattctctttttaaaatgttcatatcgtacatccaggttgatgtacagatagttcggacatgggttctccagcaaattagttcatatgtgaatggcttctgtacagattacatatcgtacatccaggttg

SEQ ID NO: 38467 - DNA, 501 bp, Arabidopsis lyrata
  Intron number 3 from transcript 927299 (locus 927299) deri ved from phytozome v7.0 (chr-ID scaffold_2; pos 18377828 t o 18378328)
aaggtaattaattgtttacaagatgttcttccttggtttgagggtttttattcctttttcgtttcttatggtagagtgcatacccgtatagctgtaagttgatgtgttttgaagctacgtacttctttttatgcgggctactttgttttcttgtttatggaggtagtcaaaatagtcttctgataatctgagtgttagatttttgctttgagagtacaacatgtttatgtcaagcaatgattgctaatgctcttgtagattgttggtgacagtactgataagtataatcctacttagtcttattatcaccacattttattttgtttcctactgctgttgcgttagtagatgctaagttaaaaacttgtacagtttttcctcctttgaataagatcttctctctatcaagattttaacgttttattgagtagtatatgccaatcatttgcttcattccatcttctaggaggagttttcaagttggagctctttttgccggaa

SEQ ID NO: 38468 - DNA, 579 bp, Arabidopsis lyrata
  Intron number 2 from transcript 941228 (locus 941228) deri ved from phytozome v7.0 (chr-ID scaffold_6; pos 7060792 to 7061370 reverse strand)
acccgaaaggcgaaaggcgatttgggctatctacggtaagttactgcacaaaaccaatggttgaagaactgttttagaatatctgcattgatttgaattgtagaataaagtgatgctcaaagtagatttctacaaacaatctaatgtgtctcttggttagtatctagattatttttttaacaagaaagttctaagaatcagaaatagattcctagaatcttagactcctgtagaaggataggtctctagttagtttgtgtggttagcttgtgtctaagataagtccattaacaccaagcatccaaattttgtaccctttgaagatttaagacccaagaaatctagcttagttactaatatggggttttaatgggctttttgggcccaatgttcttaaactctggagattttactctgctgaacaatgttaactcatgaccctctctaggaaatactagtatccaaagcatctgaggaattcaaaactatcaaatatcaaaagttgttttcttttatgtctgatttgtctcaatttgatggttttactcggtttttgtgcagtttggtgtagaagaactg

SEQ ID NO: 38469 - DNA, 503 bp, Arabidopsis lyrata
  Intron number 1 from transcript 943135 (locus 943135) deri ved from phytozome v7.0 (chr-ID scaffold_6; pos 21928166 t o 21928668)
ggtaggtatccgagctctctctttctctcttcatcgctctatgtttcttctttctctctcgatttctagattgtgcgcttactgcttttgttagtcgatcggatcttttcttctattttggttgaatctcttcggcttactttgtaccttcgattatgaagctgatggattttttgctctggtagttaatcttaaatcggaaggaggatatcagcttttggattagaaatcggattagggtttagctgatttgttggttttaattggcttgtgtagaagtgacctagacatttctcttgggaattcgtgtgaatttaactctcaggtagtgagggattgtgtatttagtagaattctttgctaaatttcgcatgttgttggtatgtttcgatttgcttctcccacgtgtgcttttctgctccttatgaatgatgattttgattttagtggtaaattttcgttctctaggaaaaattagttcgtggactgacttggattctgaa

SEQ ID NO: 38470 - DNA, 787 bp, Arabidopsis lyrata
  Intron number 2 from transcript 943135 (locus 943135) deri ved from phytozome v7.0 (chr-ID scaffold_6; pos 21928709 t o 21929495)
aagaagtagcttgggctactcatttctccttacatgtgcttgttaatctatggatttaactcacctggttgtctctttgttttctttgctgcaaactgatatgttcttgcagttttagattgctatggtttgaggagaaattctcttgtaatgtctgttatattaatatcttgcaggcatgtcttctccccactctagtttatctaactttgctggtaaatccacaattggaggacagattctttatcttagcggtcaggtggatgacaactttatgacatctcttgcctccgtcatatagctcgacttgtttttgagctttgaaatggtacgtatactgcctttaatttcaacctcacttctattttttttattcattgatctttttgttattatgatgatcacaattccaaagtctacttatttgtttatgcattttcttcaaaattctcctaaaataaaagttgttagaaatcgttgtttcacggccatggttttatggccctctctagtaactatcatctacaaatccgatctactaaccaaaaaaactcaaatggtttgctcaaaactttgtacatcgtgtgaaaatgcaggatcttgggtgatatcttcatgggaccatatcacactgtgttcgattacgggaaagcaagagttggattcgccaaaactgcttaaacatgatcacttctttaatacccttttttatatgatgtttgtgaatgtgtatttagacaaaatcttaaaatggtttgtaataacttaaacataatgctatcctaga

SEQ ID NO: 38471 - DNA, 512 bp, Arabidopsis lyrata
  Intron number 1 from transcript 948551 (locus 948551) deri ved from phytozome v7.0 (chr-ID scaffold_8; pos 2656986 to 2657497 reverse strand)
ttgtcttggctccctctcccaaacgagaaaacaaagtaagagctctaaaaatttcattaatatacaaattttttcttacaaaaagttatatattttagcgagaaatcatgacaagattcatgaatttgaaacgcaaagaatgacttgttcatgtcttctaaatatggtttttttttttttttttttttgaatcttttatctcatatgtaatagatcctagccatgagcgtcatttttagtgtgtaaatgatgcatatgaataacgccttgatctaacttattgttatagcttttttttttgttttcaatattaataaaaatattaggtcccttagtttacttaaaaaaaaaaaaataccaacacaacaaatatgtgattaatataaaaacaaaaatgcattgtgagcttgtgtaactgcaatatatagaccattcttcgaatatataaaggggtgattattttttttttgcagcgaggtagttgttgaagccgcgctgttgaataaagtttg

SEQ ID NO: 38472 - DNA, 383 bp, Arabidopsis lyrata
  Intron number 4 from transcript 495289 (locus 495289) deri ved from phytozome v7.0 (chr-ID scaffold_8; pos 15007870 t o 15008252)
ctaaaattgtgttttgggatctgggaggtcaggtgagttggaaattccctggctcatgtaattgatctctcttctttgtatctaattctgtgtttctagttgactttattcggctttgctctataagtcacatatacattcgaagagcatatgcttgtaagttgatatgagattaataggttacaaggaagatacctttgaactctttccctctctaagttttggcctgagctttttttgcagttgagattttttcttgttgaaaactatcggttgttttgattcacaaaccctgattgtgaaaaaggattagtcgttaatcaaataatgtgccttttcccccatatggcagcctggtttgcggtcaatttgggagaaatact

SEQ ID NO: 38473 - DNA, 988 bp, Arabidopsis lyrata
  Intron number 1 from transcript 315557 (locus 315557) deri ved from phytozome v7.0 (chr-ID scaffold_2; pos 9172283 to 9173270 reverse strand)
cctattggcgttccaaaagtaccttttcgaagtcctggagaaggagatacatcttgggttgacatatagtgcgacttgtcagatatatcgggctatatgggatttccccattttctccctcgatcgagatatcctctgtttcgctcaaaaagattgattgaattttcaaaaatttgtaacgcgaagcgcaaaaaataaagtggaattaaatgcagggagtatttaaattgatattagattatcaaaaaaattttatggtttacgtgatcggactaataaaatgaagtatccaggctccgtttagcaaaaacccaattgataattaatatataatatttttataattactacttatatgatatgtaaaattatgataaaaattctataaaaaaaattgaaacagggcgatctaaaactgttgctcaaatcaaataatataattcaaaatttgttgactatttgacagaagacatgtgaaagaaatgaattgaaaaaaaaggagacgcggtatttggttcatttgtcctatatgtgcaaatcaaaatcgggcaaatttttccttttactcggggtagagcataaacctaaaaaatggaataaaaaaaggaagaagcccgttcaggaacaagaaaaaaccatcgccatttcaactgaatctcgatgaaaaaaaaatatcaatgaatcaaatgagtctgacagggttaatcaatcgttttattagaggattataatatctaatacaaggtacaaggcaccaaaactaaaattttcttttacttttgggagcaagcccttccgttataagttagaaagaaaaaccctctatgaaaaaaggggaggttggaatcgacacattgattttttcacaatttttgttgaaccgtatgcaccaaaaggtgcctgtacggctcctaaggaataaaaatttatcataatcaaccgactttatcgagaaagattattttttttaggccaagaggttgatacc

SEQ ID NO: 38474 - DNA, 530 bp, Arabidopsis lyrata
  Intron number 2 from transcript 890516 (locus 890516) deri ved from phytozome v7.0 (chr-ID scaffold_7; pos 11680313 t o 11680842)
tgtggacatctgggcttatcttcggacaaggccaggtagtgatctatcatctatctaaagtttcttgaaaattaactccattgatcgaccaaaattcaaagttaatgcatttttttttcaaacgctggaaataataggtttcaatgagatttcactagttataactttaagcgtgttctcattttcctcaaaacatttactattccatgaaaattactcagcctttggtattgatttgtctgtatgattagatgataatagcttccctgttttatcagattttcacaatatcatactttcactgtgttctcagttttcttcttttaatctgcgaattactgtgttgggtgatgttattttggtggagtgtaaccaaatcttatgtcgctctgattttattgtgctgataactgctctgttttccttcttctcatgtaacaaatagtgttctcgatgattgtcgtaaatactgattagctactttgcttctgttagggcattgttgcttttgaaacggaacacggggtaat

SEQ ID NO: 38475 - DNA, 599 bp, Arabidopsis lyrata
  Intron number 2 from transcript 495150 (locus 495150) deri ved from phytozome v7.0 (chr-ID scaffold_8; pos 14183425 t o 14184023 reverse strand)
ctgctactcaggctctcaagtttgatcttcctcaggtatgattaatgttattaatgcattatcagtaaaagatgattaagtagcatggaaatttgtgataagcagataaggaagaagttaatgtgtaatgtagtagatatgattcttgtgattttaatggtttcagtttttttttcaagaagcaattactttgattctttcttttattatgttttgttttttctattttttccttagggtactttttttttggtcacatatggtaatgttatcatctgattggttttgtttctagtgtgcttttggtcgctgctagaattatttgtcggtggacccaatttgcattatgttttctgattctggtgaattttcaacgtcctttatgaattgccgttcattggatttggttcttttattatctctgcatattgatatctttacttaatgttaagttgagtgattagattagtatagaaagtacatgttgaataaaaaaaatgaggtgtaaaaagtaaacatgatcttcttatcctgtatattataattatatctaagatcattcttaatggagttttcattttcctggttcttcaggttaa

SEQ ID NO: 38476 - DNA, 424 bp, Arabidopsis lyrata
  Intron number 3 from transcript 496044 (locus 496044) deri ved from phytozome v7.0 (chr-ID scaffold_8; pos 18977198 t o 18977621)
caggctcactgagtcagaacgagaacgaatagccggtgagtgttcttcgaggcctatatagtctttaatgatacactcaaatgatttgttcttcaactactctttcgttttcgtaaaaaaaaaaaaaagtttacacttagtgtgtatttttctaaataatccataacctttatcatctcaagccaaatttttatgttagtttcaaatgtcatacataaacggaaccaagtgtatcatagttgcaaaactattttatgaaaatgtgaaaatcatttttttttaaaaaaaaatttaaatgatgtagattcgttttgatttttctctttacatgtaaacgtgaacaaaacaattgactcattcaagcctaaaacccttcctgctattgttagatattgagggagttgtgtctgtgtttccgaacaag

SEQ ID NO: 38477 - DNA, 568 bp, Arabidopsis lyrata
  Intron number 1 from transcript 338701 (locus 338701) deri ved from phytozome v7.0 (chr-ID scaffold_2; pos 9240501 to 9241068)
cgactctaatcgtgtttcctccgattggtattcaggtaagaacgagaaccatcccatgatactcatcaagaaagatgttggcttgtatagcttgagagtagatcttatatatagaaagatcaagtgggggtgagtacaagaacacaccgattttatttctgaaaaatttagagtaaaaaagaaagaaaaattgatttacagaacatattttcgtaactttgaaaatgtagtaaccgaaaatcttaacaattagatgatctaatcccagccgaggtgtgaatttttgaagaaccttcactaagtaacaaccattaaaatttttaaaattgatgacatcagcagaccaaaaaatcctagaaatcaccataatttcacaaaaaaacaataaaatgtttatttctgaatttcgtggaaggacgtcagtattgaatattcaacgaagaatcgagttcctttagaaatataatccaaatatcccatttagttatcaattgagtgtgaggtctcgaatcctttgctcatttgatttcaaaataaagcttctttccgttaattcttagattttgag

SEQ ID NO: 38478 - DNA, 869 bp, Arabidopsis lyrata
  Intron number 1 from transcript 926207 (locus 926207) deri ved from phytozome v7.0 (chr-ID scaffold_2; pos 13605997 t o 13606865 reverse strand)
acggttactggtttcgctttttcaatcgcccgacggttatctttcctttcgattataaccaaaaatcatatttattttattttattttttggaaaagctgtttattttcattttttttaagataatagtttatttaaagcagaaataatttaaatttttatataaatttatagcatatatatatatatatgtatgtattgacaaaaaaaaaccaatatataatgactcaagaaaataaactaattaatttgccaactcaagtcaaatattatatgaagtcttacccaacggaacaagtcttatgaaatattttggtcatatagaactcaagtggcaaggttattaaaattaagaaactcgtcattatcttcggcacgatacataataatggtgggtttgttaataggtatccgtcagatctaaaagtagtagtattataatgtttcaaattgaattattctgatatcaataatgtagaaactattacttggacatcaaagctctagtaataaaataattttgccatgtaaatcgcgcttcgttgactttagcattatataaatggtagatggttagtggttacctgttagatttagatctgaagtttagttttaatagtatatacatatcccaacagctaatagtttgataatcaaaagtgtagttgttatataacccgccattacttgaaatctaagctcgatattttacaggaaaagagcatatatagttttgaagattatattcaactttttctctttctttcttttcttccttttttcactcctttttctgatctacgtaaaacttgtaataattacgtatgtcatggagcctttgaagataaacttaccgttccacgagcatcc

SEQ ID NO: 38479 - DNA, 469 bp, Arabidopsis lyrata
  Intron number 1 from transcript 946473 (locus 946473) deri ved from phytozome v7.0 (chr-ID scaffold_7; pos 11423702 t o 11424170)
aatcctgaatagtaagaaccttcttcttcttcttcttctctgaatgttcagatcgattatagcttctttgaaatttgtaacttgttaatctgtttgatcaatttcttgatttggagtctcgtttcgtggattggagttttgattagatctagaataaatattggttgagatctgttgtttctcttcaatacacagatgattctcctagtttgaaaattctaggggtgtgtgtgaatccatagtcgatttggattatggtgttttgagattgcgttttgaatttcgggattctgaaaaatggcgtttagaaatctatgagtttcttcactatgtttagcacctatgaaatatgtcttaaacttcctaatatagctggagaaatatcaaaaatgcgttatctcttacatgtgtcttatacttcttttgatttgcagtgactatttgttcaagcttttgctcattggtgatt

SEQ ID NO: 38480 - DNA, 1000 bp, Arabidopsis lyrata
  Intron number 1 from transcript 355242 (locus 355242) deri ved from phytozome v7.0 (chr-ID scaffold_7; pos 13003547 t o 13004546)
ttggctcctctgaaatctttcaagaagtctccaaggtaacttcttaatctttgaagaaatctttgtttgttcatatactgatgagttaagattcatgtatcgtgtaaatcttgttatcttacttagttgtccctggatttaagtttaaactattagaaacgatttatcaaattgttgatcatcattatcagaacagaaaacttagttatcatcatattcatatacatagacattcgtgtattttatttatttttttttttttccaatttcttaattaattgcaactaggaaatatatccaaactttatcatcatgtcattttcctatattttctaatatacacttaccttataaacatatatatatatatatatataaagtatttgtatataaaaggtactcttagttgtcttttataatgttttcaaattcaaattgttcttcttaacctggaataataatttattttgttcttattttacatatctttcaaatcatatcaatttttcattttatttctttaaattatttcattttccgtatattttcattatcatcatttcatatttgtctatatattctattacatataccgatatacgtttggtttaaagatttctcggaattcagaattttctgatatatatgtttccgatatggttatggtttgttttcaatcacagtgattgaatcacaaaaaaaaaaaaaaaactaataatataaatggtcaacaagtcggttggacacttcactaagatatttataaatttagttcaataaaattttaaaatatataagaaaactaaatattctgttaagaaaaaattgaaaattttgaaactaattggcgcctaaaccatttagacataaacaaatctccaactccaacatccgactattttacaattttaattgtttcatatatttctatatagatagataacctttcgcataatgaaaataacctcataataaatattgtaattttcacaatagataa

SEQ ID NO: 38481 - DNA, 915 bp, Arabidopsis lyrata
  Intron number 2 from transcript 907175 (locus 907175) deri ved from phytozome v7.0 (chr-ID scaffold_2; pos 1581874 to 1582788 reverse strand)
caaatttctggtttcttcgtctgcagatcctagtaagctctagatcctacactgaagtcttctatttttgtgcttctaacgttttcctttttcctttgaccaatttttttatttatactataaaataaattatggaaaacatattataaaaaatttgattggctacgccattgatagagatatctgaaacccataaaaaattattggtagatagatatatgacaacacggcacgtcctttgcgggccacaattaatgtcattggatagaattgaatagaactattttcaataaaattgataagaaataatttcaataacaaattggagtattactttacacgtaaaaagtttattttttttggtatgcaaagtactcagacaaaatctgaacagaaagagtcattaaagccagttagtttactttgtttttgcatgttttgtatatacaccacgtgagtcatgtgcatattgtacaaattattgcttacccattattgtgtttggacggtcccaatttgactcgttctattaacccaattgtaaattgaaacgtcatacttttttttccttcctcaaaagtcacaaatatacagtaatcacagcttatcgaatttatgaaacgtcgtactttatagtggtgttttatttagtaaacgtgtttttctattgctttaaaaaaaacacgacattatgcgatcatttcgattccactctagccagaatactatcaagaatgttaatttaaactagcaaaaagaatatacattagtaaatttgaagtcataattatactcaaatcgtgattattttatttttgaaatatatttatgcttcatagccatataaaagtacaactttaatttaaactgaacaaatgcgttaaacatgattccaggtccattgttctataaggg

SEQ ID NO: 38482 - DNA, 292 bp, Arabidopsis lyrata
  Intron number 1 from transcript 478001 (locus 478001) deri ved from phytozome v7.0 (chr-ID scaffold_3; pos 2851245 to 2851536 reverse strand)
ggtctccttctcggcgacatcgaggttcccactctttcttcttcttctcttcgaattcggatttctccgctttaaatgtttcatctttcttggattcgatattactctagtttaattgaattgatctcaattcagtccaaaagtttggcttttgctgctctctgtaatctctgtttttgatggtttaaggcttgaaccccagataatcaaatcttgttgtgtttatgaaaactcttcgttgtggttttggaaattgacttagtactcaaagaacggcgaaagggccacagct

SEQ ID NO: 38483 - DNA, 578 bp, Arabidopsis lyrata
  Intron number 1 from transcript 933727 (locus 933727) deri ved from phytozome v7.0 (chr-ID scaffold_4; pos 14999432 t o 15000009)
tctacttctcgtagcctcaccgatttcatctctaggtatacatgaatttcaaatataatatgacatatctccctagttattttagaggtaattttactttgaaatttgatgagagaatttttttagtaaaaatctctaccctgaacttctttgtccattaaatttgaaattttgaagccttagacctttagttattccatatgttctgagtgaactagaatttacctttgtcaattacgaaactttgttttatgtatcttttatgtacattaatcaaatgaatcaactctcctttttgagtgattatcaaccttttttaatgtttatacaaagtaattcagctaggttttactatttacaacagtcataagccttttttttttatgaatttaaaacagtttcaatataatgcaatgcccatgtaagaaaaaagcttagctttaaaactattaaaactagtttcttagcgtttttaggattattataatatatacgcaaaaacgttattaatctctactgttacataatcccttgtatatgcagtgcgaagttgtcggacaatcctccaaaagctctga

SEQ ID NO: 38484 - DNA, 1053 bp, Arabidopsis lyrata
  Intron number 3 from transcript 485429 (locus 485429) deri ved from phytozome v7.0 (chr-ID scaffold_5; pos 15345500 t o 15346552 reverse strand)
ccaataccaagtctcggctgcattggctttcttgtgttggtttctgttacttgcttcagctcttttcaatttttggagtttaccttctttatactattgacattaacagacttataatatcttcttatagtcatagataggaatcataatcataggacatgaatgtacattttatatacaattctagagacatgtcttgttaatatcaaataaatttaccacttttatatacacacactttacaacaaaatgggtttttttcttccaagctattacattgcaactgcatttgaatgatgaattctctgtttttgccctctgtttgtatatttagttacaaggaaacgacgacgttttaggtggcagttccttttgaaaaccttaatgggccgagactttctccaatcttaataggcccaataaatctcaccaatttcagatttaaagtacgaagctcaacaaaaacctaagttgtccttttcggttttggaaaagagaagagaaaaggaaatatttgctaactagtttttcggaaactctgtttgctctataaaagttgaaaacttgaagaagagaccattacaaaaaaagtcacaagttgcttacacacatcgattctataatgttagaaagtatgcaacaaaccgttgacgttcttagctgcattagaaggtatccatggattattgagatggtgaagtcgaagcttttccatgaaatttgcgatcaacacgacacgcaaaaaaaaaggcgatgttacttctgttgcgattgtatgattcctcctttttgcacaacttgctacaaaaagaacgatcacaaaggccacactttgattcaagtaaacagtttttctttaactgtttcaaaaacttgctttattatataagttcaaacattcgttgaaaacaatatctaactatggtttaatgggttttgatgtaattgcagacatatagaagttcgtaccagacaggagtaaagaaagagacgatgtcaaaatatatggatatatcagggatacatatatattcgatcaacgggtttccgatt

SEQ ID NO: 38485 - DNA, 436 bp, Arabidopsis lyrata
  Intron number 1 from transcript 313750 (locus 313750) deri ved from phytozome v7.0 (chr-ID scaffold_1; pos 14335719 t o 14336154)
gacacgtcgtgaggtaaaaggattaacaaattatgattataaaaatggttataagaaaaaaagaagaacaattatggctatatatagatcaaatttggcaaacaatagttaagctataagttaattatggactatttcaatctacgatgactatatccgtgacatagatttatcgggtatatattatctttcgaaaatgcacgtaacattcgatacttttgtatttttcaatcatggctttttgaccgtttataagaaaaatttctttcagacattttgttcacagtaaataaatgaggcttcagctatatattaaatactatatactctgtgaaagaaacatggagactgatactattgtagtattattactaaacctgttaaatatgaacttaaaaattacactttcttatgatttcgatgtgatggtggatag

SEQ ID NO: 38486 - DNA, 444 bp, Arabidopsis lyrata
  Intron number 2 from transcript 915736 (locus 915736) deri ved from phytozome v7.0 (chr-ID scaffold_8; pos 3176178 to 3176621 reverse strand)
tggaagaagcgtggagaaaactcaccaatcagaaggtatatatatatgcatgcatgtaattttctttaatacgaaaccacaacagtttgaccagacatatttttatatttgatgaaaaactaaacctattctatttccaatgatcaagatcataataacatagttctttccaataataacacaacatttagtattacaatttgtcacttttctttttgaatttattttagtattacaaccacaacagaaactttttgaatttttttttcctttacaatctgtcacttttcttttcgattttctaaccgaattacatacttaacctataaatagattgttttttttaatgattaaatgtaatttatatatctttttaagtttcttttcgtcttcttttgtttaaatgtaggtaggagactgagcatttattttccaaaagcgggc

SEQ ID NO: 38487 - DNA, 788 bp, Arabidopsis lyrata
  Intron number 1 from transcript 919466 (locus 919466) deri ved from phytozome v7.0 (chr-ID scaffold_1; pos 2717617 to 2718404)
gcttccctcgtcgaatctggttggcaggtactctctctctctttctcataatcttcatctatctaatcctgcttccgattatctcgttttccggcggtttccttagttatctccgtctcgctgacttcagttcaccgcattgtgatacatgcggttgttatccacctctctggatcgcattgatccatcggattgaatttggtttcgtgtcgattgcagtactgttttagatctgaatttgactatgctagttccatatcacgacgaattttgaccgtatttttagtttccgtttgtttgcttagagcttaaatggatgtagatattgatacgggacctagacacacatgtatcataatcaagtctcttttgtgctctctctcttcgatcggttttgcttacggactttccaatggtcggtaaccaaaatcgacaaaaacgcggttatgcattggttttcgggtccataagagtatttctcatttgatctttccttccagagggattgttcttgtttcttatacatactctgcattttgggtgtcttgtgtccctaacttggatcactgaaacaagtgttggtaagcaatagtgtttcctggaatatgttcttcaatactagtttttgcttaatgaaagtatttgtttcctttccttggtgttttgcgcgtattgtctatcatgagttctccttcagcacagaaatgctgtatctatagctgatcatatgtttcatttctgtggttgatgcagtaccttgtgacacattttagcgacttccaactggc

SEQ ID NO: 38488 - DNA, 735 bp, Arabidopsis lyrata
  Intron number 1 from transcript 337782 (locus 337782) deri ved from phytozome v7.0 (chr-ID scaffold_1; pos 31383520 t o 31384254 reverse strand)
gagtacgaaaggtaaaaataaattaaaattggatggtcatagtcctcaacaaccaatcaaatagttttccattaaaattttcagtttattgctatttgctttttttttttttaataaaatgttgttacaaaaaaaaatagttttattacacgaaggagagtttcccttcaaataatattgggaagtatgaagttagtttattacaataataatcaaaagaaaaatcattctaacatttggaatatacatcaatgataaatttttaaaacaataacagaaggaccactcaaagaggcaacaatctaatgcaataaatcatatatataaataaaaaaaattagaccaaaattttactcataaattaacaaataagattcaaaattcggaacataatttaaaatattttatcactttatactaattgtttaaaaaaacaatcaaatcaaaatctcgcacgtagtgcgagtaatcacctagtatagaatgataaaggtttggatggtatatttatattacctagaacttgaccatatttctttactttgttaaaatttgataagtagaaatcgacatacattctttagaaaaagtaatatttagttatattatcagaatatatggaaaatctagtatttaatgtaaatactctaaatttgattggaagatagagatttcttagtaggttgttgatgttatattttgataattggtttcgagtcttgaaaggggtttaca

SEQ ID NO: 38489 - DNA, 545 bp, Arabidopsis lyrata
  Intron number 1 from transcript 473940 (locus 473940) deri ved from phytozome v7.0 (chr-ID scaffold_1; pos 24337525 t o 24338069 reverse strand)
tttcgggttccgctgaaacgcctcgattcggatcggtatgtgttttggtttcttattctaaaaatcgctcatttttatttattgggtttcttagaaatttcccttgaaatggatcatgttgatttgttttcctcataattgagtttgttcgtttagattaggagttataattaggttttgagattagatcgttgtttgaaattctgataatgatccaattctgcatcagggcttatattagttttggtttttttttctttctctgtagcataataatgttgaatcctccttaccctcttcgtttagattcgtgtagacaatgcaaaatgataagattagtgttgtgctttgggaagtttatacctttactatgttatgaagaattagtttaggtgttcatgaatcaattttacattgttagaggaacgactttaatgccctttggattgttgattttgctttgttctgggtgttctgtttatttacttgtgcgaagttcagtaatatttaacaaatttttaaatgtacatttgttgtaacagggc

SEQ ID NO: 38490 - DNA, 904 bp, Arabidopsis lyrata
  Intron number 1 from transcript 906782 (locus 906782) deri ved from phytozome v7.0 (chr-ID scaffold_3; pos 23403809 t o 23404712 reverse strand)
gaaatacagaagaactgcgatgtaagagcacttgcaatggcagctctatgcgtcgtcccagtccatttatttttaaaaaaaaaatcaaaaaccctcattaaacacagaaccgttcccacacgagagaacgtttcttcaccgtccctcactgccacgtgttctcgcgtgattggtcgcgtgttttttttgtgccgtcgattgattttcgccttccttttctctcgtcggcgaaagctttggctcaagctttgtccagctatttcatctcctcttctttcaaatcgtgtcttgtatttcactctcttccactccgatctgttgtatcgttgaattgaaaaagtttccaccaacaaccgatataaacgaggtaggtttttccatctgaaattttcagatttagaggattgtggcatcaattttgatcttccgctatgaattgatttggattgttcttttgattggaatcaatttttgagaattagaagtgtggttgctatagtaaaagctataattgattttgttttactgtattgatcttaagtcatcaatttgttatcttcttttatcggatctcatctctttggaatttgttatctttcttgtggctgattcggatagtcttaacctcgtagaccaaaacagggtaacttcatatacaagctctgtttttttttttccgatatggtgtaatcaatataactatgatcgaatatcaactgaaatcattcttggaaaaaccctccttaaccttatttgttaacacaatagttatgatgctatagaagaatgtgttatttgttgatacaatagttctgatgctagagaagaattatgagttatgtattgtttcattttgaaacgtctaagagtttctgtttatattgtccattttaggcacttgtgg

SEQ ID NO: 38491 - DNA, 686 bp, Arabidopsis lyrata
  Intron number 3 from transcript 949876 (locus 949876) deri ved from phytozome v7.0 (chr-ID scaffold_8; pos 15433920 t o 15434605 reverse strand)
ctgtgattcaatcgctcctgcgaatcagaagaaaagtgagtttttttctttctctacaagatgaatcaaaatccttcttttactttctttggtacttgtgtttgacattaggattactcctggtttcttgagagttacactgttactctgacgtagattcattgttttgttcagccatatatatatatatcatgtggctctctttaggtgttgctttttgtcttttagattttgggctctgcagtctgaacttatttcctgtatctatctcaccctctcttgccacttgcaggctatcgatgatggatggtatgaagaaccgtgcgtcgtgttgttaattatacttgacatcattgtgagaggtattgtagtactatttgatgctcttggagttgcttagctaacttaattatatttgtcttagtacatcaatcaattctcagatgagagaatatggaaacaatctgaaaaatattgttttttctttcattttgcagctagcacagagtactggcagtctcttcagtttgaaaagttgactaaggagaagagaaacgtacacttatatgtgtgttcctgcagacagttttttttattcatttgtgtatgttgttgttacgcacaatttgtgctgaacgtttttcgtcacaggtgactagaggtggaggaagcgtctgggtttctat

SEQ ID NO: 38492 - DNA, 636 bp, Arabidopsis lyrata
  Intron number 2 from transcript 922881 (locus 922881) deri ved from phytozome v7.0 (chr-ID scaffold_1; pos 22367398 t o 22368033 reverse strand)
aacgcaccgtacagtatctcatcggctcgggcgtcagttctttttctatatttttatgatgaaagaaaatgcttatactattcgcagtttgattaatcatttgtagttctttgatttatttagatcatttttcttaaggtgtagttatgcttatgttgtttttgggtttgttcctttttccggtttttgatttggtttggttaagttttttttttttttgtttgttatatatggaaacctaaacataaccaaaactatttgccacttggtttgtttcgatttggtatgatacaatttaatttggtttttggttggccgattaaaaaaaaaggaaaatcaactgaaaaatatatattaataattatcttcgatgggaattatttagtaatatataatgtaatatatatcaaattttaataaattctggttttttttggcagttcttacaatagagttagctttgggtttatctgtttctaaataaaagaacgaattgatcataaacatatttcaatctaaatattttcgtttagtttacgtttggttggtccggattagctttggttggttcgggttaggtttatatattgggaatttttaggatccaggaacggagaacaatccatacttaggttt

SEQ ID NO: 38493 - DNA, 855 bp, Arabidopsis lyrata
  Intron number 2 from transcript 494441 (locus 494441) deri ved from phytozome v7.0 (chr-ID scaffold_8; pos 2028983 to 2029837 reverse strand)
ttggtgctttctttgccatcttcacatcttttttggttagtttctgtttctgaattacgaattattttctaatgaaaagcaagaaaacttctgtgatttgctcgtgaccacaaaaaaaagagtagatatattctcttctatgatttgtactaccaataaaacaaaagatactaattttcattgtttagtaataccagactagacgttgcttattctttttttttttggctttttgttctaaaactttaaattattaaagtagatattaatcggattatctatatagtatatatcaatcaagtcttgatagaatcttttttggcctattaagtatgaatatattatggcgaccgtgtagtgtataactttgtgtagccaaattatttataaattatactcttatagttatatatcttcttttcttgtattttgaaaattctggatgatcaaaaattatgaaacaaaacaaatacaagagtttgactttataagaagaaacaaaaaaaaaaaaaaaactaatctaatactcatctgaagactgaaatagagcatagcattaaaaactaatcaaacacacagtttcttaatctggttgagtgcaatacttcactataggagtcttaaattcagttttttcatatcgattttggttcagaccattcagtatttttttaaattttttttttttggttatacaattataccaagctaaacagatatatagttattagattggtttgattttgtattggaactgaattttaatcaattgttcagttcagttttttgaatagaatattttcctaagtccaccatgatcatccatgatatattcctgactaaatgaatgaaggt

SEQ ID NO: 38494 - DNA, 297 bp, Arabidopsis lyrata
  Intron number 1 from transcript 940494 (locus 940494) deri ved from phytozome v7.0 (chr-ID scaffold_6; pos 4085224 to 4085520 reverse strand)
gctaaacgttcccgtatcatcgaactctctcgcaggtattactcaaatcaacccgtttaatgtatctcatccatttctttgttttcgatctccttggttttgtttttggctgcgcaatgttcttaaggttattgggtattgttttgaaagagaaaagtttccagctttatggatgaaacgagttgattttgtcaattgaagagcttttactcgattggtcaaaattgattgaatgggtataatctgttgaaatgttatgtagattgaggcatagaggtcctgactggagtgggctac

SEQ ID NO: 38495 - DNA, 642 bp, Arabidopsis lyrata
  Intron number 2 from transcript 355876 (locus 355876) deri ved from phytozome v7.0 (chr-ID scaffold_7; pos 21823669 t o 21824310)
atttgggttggtaagtgaaccatgcagcttgatggtgcccacgtcgagttcttaaggtttgtttttctctcatcaggttttagtttctactagtcagacggactgagatctttgtgggcatgtggaggtataggttagtcataagattgattgatgatgttgaatgtttgtgcttaagatatacatatgtggatgatatagactttatcttgttacatttatggataagatagacttttcttgttagatttaatggatgtgatagagttttccttgttagatttaatcgattttgtctctgtatgtaacattctttgcagagggagttggccatactggaaagtgagttgagaagtgctggttaggctttggtcatttctggcacaactggaaggacctcaaggttgttaggtagctcgatataatccaatcaccatgttaagatcttaggaaataggttgtaccatgaactcactattatgaccatcatcttctttggtactgcagttacacataatttctccctgcatttttttgtcttgttcacaatctaattgatctattgttttttggaggtttgagttatgatctatctcatttcttacagctaaagaaagaggtactccaactacacgacaagta

SEQ ID NO: 38496 - DNA, 562 bp, Arabidopsis lyrata
  Intron number 1 from transcript 494645 (locus 494645) deri ved from phytozome v7.0 (chr-ID scaffold_8; pos 4205603 to 4206164 reverse strand)
aacgattttgaagctttttcttcaaccatctccaggtttgcttcgatctacacggcgtcgtttacacctctccttcaatctttctttctttagtttttccgatttcaatttggtgccgtttttttttggttctccgatcgctgatttcttctgatatttatcgatgtttttattcgtaaattctgtgtaattcaattgattgaatcgaataattttggttctcttgcatttttgtttcttctagtttctaatattgtttttttttagggtttattctcaattcttatctgatttgaggtttttggtgtattgatttgagtcatgaattgagtgattgatttagaatattatgtctttgagctgtgactgtgatttagatttgatttaaaacagtttttctataattcttggttttgataattcgtaaatcgggaaaatatattcgagcttgttcgtcgatgtattcgatgatgattgtgtcgaatttaggaactaatttattatgctgaatcataattttggttagtttgaaagagagagaggtagaagaagattcaaggga

SEQ ID NO: 38497 - DNA, 458 bp, Arabidopsis lyrata
  Intron number 4 from transcript 479552 (locus 479552) deri ved from phytozome v7.0 (chr-ID scaffold_3; pos 8861865 to 8862322 reverse strand)
tcgaatttgcctcgaccggagttgaagcaggtaaggattttctgttgaatttattgcgttgcttacttgtggaactttattaatggccactgtattgattgaacaagttcatttggggatggagttatataatgagtttgaatcaatattaagaggaaacacataggtgattgcttgaattgttttgagttctgaagcctagggttatagctttattggagttaaaataccctttatctcaaataacaagcccttgcaatcatgttgtatgcaaagttatgtggttgtaaattttttaagggtttatgatatcattgtgtttaaccggtcacttggcaaagcatttgaagccttttgttgattcatttaagtttgttgctaattgtgaagcttatgctgcttctcttctggttttgttgatagatctgggcaattgcagattcaaagagacaagggta

SEQ ID NO: 38498 - DNA, 1024 bp, Arabidopsis lyrata
  Intron number 1 from transcript 484471 (locus 484471) deri ved from phytozome v7.0 (chr-ID scaffold_5; pos 3214112 to 3215135 reverse strand)
aaaaagacaataaaaacggtaatgtttattgattattaacgatttatcatttattaatgtaataaaagttgaagaaattcctgttttttggtaaaatattaacgggaaaagaatgtttaatctgggaaaaacattttcgtataaagataaaagtgaaaaaatgttaattagaaggaaaagaaaaagagagcgatgttaatggcgatgagttttattgggatttgtttttataaaaacagattgaaagataagagaagaagagagagagaggtacctcttgcttgcttcttctttctctcacgcacccctttgaaatattcttcttctcttataccttttggattcgtcttcttcttcgattttgagtttgatttctaattttggatccagagggtttatcatctgaatgattctgaaatgttttattgaacatattgcttcatcggtgcgttttttttcgtcatttgatttatcagagtttcgttattgcatcggttttatgagttttaccatgtatgttgttgttgttgttgatgatgagctgctgctttttttttttctggggatttgatgatttgtctcctcctatgagaaatgtttttttttttttttgatcagattgatttgatcacaagtttattatcccatgcaatctctctggttcattttgtagttgtggttttggatcattgatttgtttgatcacttgaggaagattttgtgtcagtgttcgatcatttgtattttgttcaaatcttattctagtgatgtttgcttgaaacttgtaacactgagaatttttgaggatcatttttgtttccgaatcatgatttggttgatcgttgcttattcttttaactggaatcagtcataacttcttttgaaccattccctgataaacttctgcactttgtgttctattgatgcttaagcttaagagtctagcagtatgtgtatgtccttactccttactgtgtaattgattcgctttctccattttatgtttcaggaaagggtaactgca

SEQ ID NO: 38499 - DNA, 871 bp, Arabidopsis lyrata
  Intron number 2 from transcript 480744 (locus 480744) deri ved from phytozome v7.0 (chr-ID scaffold_3; pos 22746330 t o 22747200 reverse strand)
ggttcccgaatcggctcttcaaggatttcattgaggtacacctactcaaactctgcaactggctctctatacagggccgtcacaatgagtaaaaaaaaaggcatttgccttaggcctcttctaaagtaatcaaattttggccccaaattttaaataattatatagaatattagtaaaatatttttatttttagtgttatttttcttaagtttgaaattttgtttaatatatcaaaactatttttatttatctctaataatttacaatataatgtttttgaattttagtatttttatagataaaaaatgttaactaagaaaatagaatacaaaaattgtataaaattatatatttatagttaattgtacaaaatgttattttcatagattaagaacatagtgttaaatatctctagtttagtaaaaaaaatatttttagttttagttataagttataacacattttattatgaaaatatataaaccatctcgttttttttttttttttttttttttgctttaaaccaccaaaactatagacacgaccatgtctctatattataatttttcttaaaatatatttagcaactgtatattagtatccatttggtcaaatatggacacgaaattgatctccgagctcgataaagagcttgtcataactagattacaacgaatggagtaataattagtattgatatgttaggttttatatttaactttatacctacctttaatttttttgtgcaaaaacttatatttatgaacccctaatcattagttaggaatcaatttggattcttatttgttaagaaaataaataattgtcatatgctatagtaatatacctttttttgcaaaatgtgaaggtg

SEQ ID NO: 38500 - DNA, 538 bp, Arabidopsis lyrata
  Intron number 2 from transcript 917562 (locus 917562) deri ved from phytozome v7.0 (chr-ID scaffold_8; pos 18560998 t o 18561535 reverse strand)
caaattgtagagaaggggcactgtaagtgatggaaaactccacctaataatagttcgtttgttaacctttcaccatcagttttttttcttcattcatgttttagaaatctattttatttcaccaacctttgaaaattcaacttcttacttcttgcaagctaaacgcactgtttttcctctgtgacttagtcagaaattcgaggtgtttatcttggatttgagttgtaggacgtagataattgattttgtcacgagtatatgatcaacgatgatattattcgtttttagtggtctagtttctcatctgataaacttttcaaacaacatgtcatatagttgttgcttttcaaacaacatgtcatatagttgttgcaaacgattaaacttataaattatattgattaaagtcagagcgaaaaaaaatcgtttaggttatataattttccattttctaacggttaaattagtggcggccggtgttagacattgtttttgttttctagggttggtaagtacaataacaatacatttcctggag

SEQ ID NO: 38501 - DNA, 659 bp, Arabidopsis lyrata
  Intron number 1 from transcript 917562 (locus 917562) deri ved from phytozome v7.0 (chr-ID scaffold_8; pos 18561539 t o 18562197 reverse strand)
tattacgggaacaagcaagaggtctcagctaacaagtaagtctttttcccgggttatatttcaagtcaaaaaatagatctaatcttaaaaaatgtaactacataagatagatttagttttattttttttaggtaggatagatttagttttgaacaatcaataattttttcttcacaattttcaaaacaaacccccgcgtagcgtgggtattcatctagtatatataattaagtaagtagcaaattaagagaggctaaacaggtttagtttgccgagatttaaataatgattctctaccaacaatatacattttgttttccaaagccataatattccatgttaccatatctatgggctcaagtcactctaaactattaaacaaagaaaaaagtcactcaatcctaaaaagtggacctcacttcaatgaaattgaaaaagaaaaataatcaacaaactcgatcgatctaccaagagaattaaaacaaacactccagcaaaagttaataatcaaacacaagtggacctcgcttaatccaaacaaaaacccttcacgtaaattaaatacaatatggtggttcaacttttcaacaatccacatgaaatattttatctttttttgtttgttcttatacatttgattgaagtaattgggagagaga

SEQ ID NO: 38502 - DNA, 886 bp, Arabidopsis lyrata
  Intron number 1 from transcript 325545 (locus 325545) deri ved from phytozome v7.0 (chr-ID scaffold_6; pos 3951882 to 3952767)
tcggtttgcgatctccttctgatcatagtttcccggtatgtaatttctgtgataaacgagatttcatttgattagatctccttatctttgaacatgacattttttttttggtaggaatctttgaacatgacataattcctagtacaaatatttcctcaaaatgatgagttttttacgcatccaatttatacctaatttcgttttcctagaacagatattggatagagcaaattttctttttccggtagagattgtaactcttgactattgacggaaaattagttgtcaggattttgaatgtgtttttttttttgtttttttgttaactatgagttgaacgattttatgggttttaattcaaaatcaattactaagtaataagtggaaatagtagattagtccatatttcttacatattaattctaagctctatacttcatatatgattgctaacacgcattctaaatatgatggattctttttagccattcatatcgacatagcctaatatataattaattttgggttagtttgttaagaacaatttcggatcggatctggttaacgtgggtggattcatatcttatatcttaaaattaaaacaagactctagtgatctacatgaatttttggtggtctagagaaaaagaaaaactttttatgtgaaacatagtaaaatttaactttaattagatgctgccacctcatagagaagtagtagatcatcttcaattcttgtgctgacacattatcaccccatttaactttttcatttttatttatttgtatgttctttcttaaagattgataaaattgtctttttaatacgaacttcaaatttctcgcaacagaaagaagaggaggagaaagttgaggctgtggaagt

SEQ ID NO: 38503 - DNA, 1013 bp, Arabidopsis lyrata
  Intron number 1 from transcript 336279 (locus 336279) deri ved from phytozome v7.0 (chr-ID scaffold_1; pos 14538959 t o 14539971 reverse strand)
cagcaagtgagtggttacgttcgaccactttatgaacctttaaatatcactttggaaaagtattataattaatataatgatcaaaatgtctttgcctgtatatattaaaccgtggtcacaaatgtgacattaatatttcattttacttttaacgtttccgatcatcttcgacaagctacctggctcccactacaaaaaatttccacattgatagcacatgatgatagctcattttctttgactgctatgaaagataagttttttattttaattttatataatagcactgaaacaacgctaagatagaaaatcaccaaataaaaaactaaaatcactcgttccgccaaaacttagcgaaataattcacttagcgccatatggctctgatccaaaaaaattaaagccaaagtccaaaaaaataaaacccttcactttaccctatagaaaacatatctccaaaaaaaaaaacatcccaaatcgaagaaagagatttgggatttcgtgtgaagctcgtcgccgacctccaccgtgaagctcgttgccggcctccaccgtaaagctcgtcgccggcctccaccctaatttctatatatcttctccatcctctttctctcctttacctcttcgctttcttcctcgattcttcttttcttcctagattattcccttctccttagctctcctttacctcttcactctcttcctacgattatacagctctggatatattggattttgatttcgttggcctgaaaccccaaaccagtttcgacgctcggtgcttcaccattcaattaagtcagcctcctccctctttattcttttctttttcctccgcatgtacgattttgttagggttcaattgatttatgagcacttgagttagattttgttagggttcagttgatctatttgggttagattgatttcttagaagcttttggccgaagttctgatgatgcttttcatgccctccaggtgttcgacgaattgcctcattattggcttgcttg

SEQ ID NO: 38504 - DNA, 492 bp, Arabidopsis lyrata
  Intron number 2 from transcript 944165 (locus 944165) deri ved from phytozome v7.0 (chr-ID scaffold_7; pos 1565451 to 1565942)
gcattgaggaaaatacagagagagaataagactaggtttgtcttcactcacactcattgcatctccctctctagctctgctctaattatggtttagttcattagtgatttgctttgactgtctttgtttgaggacttgaaaaagttttaagaaagcaaaaaataagtgctttgtgaattaggagtttatggaagaagataaactattcttcctttgattgttacttctttgtatatctgattactttgagcttagcaaaactatccaatggttgttagctatatgtcattaaccttaaatctgcaaagcaatatctgttcacagtccgaagccattatgttctattctttgatcctaagctttgtttgtgaacttgttgatctctactaagcttccttagaaggtctaagttaggaatgtgtggatttttaatatgggattgctttctcttatgtaggatttcccgtgaaaagaaagagaggcgcaagctta

SEQ ID NO: 38505 - DNA, 446 bp, Arabidopsis lyrata
  Intron number 2 from transcript 491865 (locus 491865) deri ved from phytozome v7.0 (chr-ID scaffold_7; pos 5532657 to 5533102)
tttttcttctgatcgtcttcttcctcggtggtttcatcaggtttttcgacttctccttcgattctgatttcggcttttattcggtttattgtgattcgctctaattttggcactattgctgcgtagttagggttctgggtttcttcttgatgatttcgatctttagagtttggaaatttgaagtgattaagtttcgtgaatttgatttcatgatgtagctgacagatctgcatagtagagtgttcttaagttactagatcttgtactatctctctgttttctttttgttagctgagatatacaagtgagagtgtttctctttcctttgtttccattttagtttacttcttcaaaatggaaatgatgaatggttttttcccgaaacctaagtcttttttttcttcttgtcacagaactctataggtgtatcatagaagcgagaaggc

SEQ ID NO: 38506 - DNA, 743 bp, Arabidopsis lyrata
  Intron number 1 from transcript 497403 (locus 497403) deri ved from phytozome v7.0 (chr-ID scaffold_349; pos 7825 to 8567 reverse strand)
ttcgcttctctctttatcctctccgcttggcaaatgtgagcctttctctttttctctatcctcgacctcttctcgcgtttcttcgtcttccttgattcagatttaggttttcttaaaaggaaatagctttgggctagatctaaatctgggaattgagaagctttgtaggctcgttttgatatctagggtttcgtgacaatcgaatattttagctgaatctatcaagatttgattttgtgtttcgatttgtatctatttctaattgatttgtattgaaagctcgcagactttgaattttaggctttgagtgatctctggatacttcaaatttatcaaagtttgaatatttatgtatttgtgttatctatcaatgtgtgacgttgtttggtcatggttgaatctgtctttggcttattacccgcatttagggcacatataatcgcttgcttggattcgtttatagatttctttagctctattgttcatatggttagactgtgtgtattggttttgtttttccaatgtatagtggtctatagagaggcatcattagctctaaatggaagacgatcgataaatgtaaaataagattgttctcgtactattcatttagtcgttactatggttttaatttgttgacttgatagctatatatgttaagatggtactcatatatcctctacttcttttcaccatattactaaattttaacaacgcttatttggggaattttaataggttca

SEQ ID NO: 38507 - DNA, 227 bp, Arabidopsis lyrata
  Intron number 1 from transcript 496360 (locus 496360) deri ved from phytozome v7.0 (chr-ID scaffold_8; pos 20229005 t o 20229231 reverse strand)
ctagggtttcaaaatccggtaagtaagatttgttcttgctcttcttgcctcattttcctatctctctttgattttctctgaatttcatgctttttttacagcagattctcgaaaccctaatcgtgcgaggtatttattattatttcttgatcccacatttgtttctgtacctcagacttaaatttcaatagctttaggtttacttgtgaccaaaatacagtgaagcg

SEQ ID NO: 38508 - DNA, 441 bp, Arabidopsis lyrata
  Intron number 2 from transcript 908019 (locus 908019) deri ved from phytozome v7.0 (chr-ID scaffold_2; pos 10063949 t o 10064389 reverse strand)
ggtcaacaagcttctttactcgtggaaaacaacttgtaagttatcacgtttggtttttgctttgttatctttttaagaaaattaaaattaaacttttcttctaaagactactagagatggtgtggctccggatcacttaacgcttatggaggacacccacaccaacaaaaaaaccaaaaaaatttaagaccaagtagctaagcaagtaatcgaagtttgccggaaaaggaaagatgagtatatcttatctcaacctcctctcgatgatgacgggcaacccccaaaagtccctttggaattgatgaaccaaattgttcttgaggtaattatgtatttgatttacattattacattatttttatattttcaaaatatttattactaactaattgttcataatttttaggaaactccaaagaccaagggacgtatctttgggtt

SEQ ID NO: 38509 - DNA, 508 bp, Arabidopsis lyrata
  Intron number 3 from transcript 907367 (locus 907367) deri ved from phytozome v7.0 (chr-ID scaffold_2; pos 2835093 to 2835600)
ggtgcaaggtaatgcattatgttcttttgaggaacaatcagctctttctgtcttttaatgtttttcttgcgtttttgtatccagtttggttactagtgaaaattacttataactatttccgctgacttcatagatagtgttttcaccacgctgtaacatctagcttttccagcatcgtttgaacttgtgtcattgcttgttctgattctggatataggtgatcttgaactagaataagcctacttctttatgagtgaaaatcccctagtccaatgtatggattcattcttcagttacttctaacacctccagttaaaagagagctagttgttcataatatcatcctttgatttttctagtaataactcagtgatagaaactcttgtgaggtttcctcagttgtcttcaggtatcagtcttttagctgaagtggtttacggctatctgaaaaacttgtttctctctatgtctaggtctattgaaaacatcgctcctgtaactgtgcaaa

SEQ ID NO: 38510 - DNA, 467 bp, Arabidopsis lyrata
  Intron number 1 from transcript 938862 (locus 938862) deri ved from phytozome v7.0 (chr-ID scaffold_5; pos 18990426 t o 18990892)
tcgaagcggcgccgatattgagaccgttcgcaaatgtttgttttcttttttctcgatctccgtctctctgatctaccttcgtatcttaacttgtgtgagaagatttcctctggtttaggctagatttggacactgaatctatatgatttttattacgctgtggtagttcccatgtttagggttatttgccttcgccgttactggattattgtggtgtcttgaaagagatctgtgttagggttttcgcttgtcgtgattcgaatttcgtttgctgcagtaacaactcgcctgattttgcttattgattcttgttagtatcagattgatgttcctgcttttacatttgaatatgccttctatcttctttttttctcttttcgtgaaatttcttttgttcttatgaatttttctactgtggtaatcatctaacgagatttttttgtttttgtttctgctgggtgtagtca

SEQ ID NO: 38511 - DNA, 761 bp, Arabidopsis lyrata
  Intron number 1 from transcript 494831 (locus 494831) deri ved from phytozome v7.0 (chr-ID scaffold_8; pos 9939934 to 9940694 reverse strand)
gttgtccaaggcttgagcgttgttccttctttcttcaggtgcttattgatcttccatctcttatggtttcgtaattgtttgatttgattattcgatttgatcgattgattctgtgatctgatttgtgttgttgttgttttttgttttctggaattttagatttttatatcatatcaattaggtttcgtgtgttcaaataaattttatctgaaattttggttcacgtatcgttgtgattatcttgaatcgttttttttttctgttcaattatgatttttttcctatgatcagactaattagtccttaagatgaatttgaagagatttgtttttataaggcagatccattagctatacttatttttgtcttcatctttgaaattactatgtaatttattgtgtaatttaatttcgcttaagatttattactgatgaacgcatgctatgaagtttattagatttaatgcgccttttattactgatttttcatggtaattgcaaaatatttattttatgatcaaatataattgcatttaaagtggttggaacgggtcacatgacacaaattgtataactctttggtaatagttttgttctgtcaccgagtaatttggtattacaatagtatcctctttggttattgttagttaggattttatttccctactccagtttgagttatatctcttgagttgaattactctgatttcagtattaactagcttatgtactgttggtgcaggtttttgttctattgttaag

SEQ ID NO: 38512 - DNA, 627 bp, Arabidopsis lyrata
  Intron number 1 from transcript 342507 (locus 342507) deri ved from phytozome v7.0 (chr-ID scaffold_3; pos 10958182 t o 10958808 reverse strand)
gcaacctctccttcatttttcaattgacggcaaaggtgagttctttcatctctctggtgtctctgttttgggttgatgttcttgtgtgcttcaatttctagctgttaatctaaaaatgaatgtgggtttggtggtttgaatctgttagactcttgatttgcatttacctatcagtctcttcttcttcgattggtttttactttcaagataaatatgtctctgtttagtttcaagctagttttaagctgaatatatgagagatcgttgaaatgattaatttctaggaattgttgaaatgtaggattcattgcaaaacatctctggttcagatttgtatgcttcagtttttatctgttatcgatatgtatatgggtttgttatgtctggtagattcaagggaacaagagttcttctatctcatttggtttggttgtttaattcatgtgttattggttgtgaaaagtgcagaaccagcatccctccaggaacttcctgtgttgattatccttgctcttagatttaacggaacgagattctggtaacaggtgagttctataaactccttagtgttggttttcttgtttaattcgtgagactagtaatagctgcttgcttgattcaggtttc

SEQ ID NO: 38513 - DNA, 679 bp, Arabidopsis lyrata
  Intron number 2 from transcript 490693 (locus 490693) deri ved from phytozome v7.0 (chr-ID scaffold_7; pos 453725 to 454403)
tggatttcaaacgacaataaccaaaaccagagaacacgattaaggactctacgtttcggtgagttctctcatttattcgatcctcttctatatatctccgtgttcatttaccttttggtgttctttctagcctctatgcattttaaagtttttacctttggaggtttcacattctctcctaaaacgagtttgctttattttgttcagcttcgaatcttctcgttttctgtgaatgatctgaaaaatctaaaaaatggattaggatttaaactttttatctgttcaaactcatttatgatcccaaatttgttcgtttcatgtttataaattagaatctcttgtttgttttggcaactctctcttttctatgctttgaaagatttgttacctgcagaagtcaattccattgatttcttgaagatacagtatctcttggtaacttacaagagttggagattttgtcttgatacgatgaatttctgagaggctctttcttaaatctgtgtatttgaatcacctgtgtagtcaaagtttccttctttccgagaatttctttattggacacacaaaaattgtagttcattatattcgcatttgtatgttgtttcactttacatgcatatctagttttactaacgagctttacaattctgttctgtctcattccagctaaaaaaag

SEQ ID NO: 38514 - DNA, 383 bp, Arabidopsis lyrata
  Intron number 2 from transcript 488835 (locus 488835) deri ved from phytozome v7.0 (chr-ID scaffold_6; pos 8224467 to 8224849 reverse strand)
aatttgatcatctctttctccggttaaagtctcaggtttgtgtttccccctttctaattaaagcatcgtcctttttggttcttcacctggtttcatttgctagggtttacttctctgctcttcaatttttagggttcttagtttcgttgcatttttgttctcgatcgtttgttttgtctgtttgccccttttatcaaatctgctgattgtcttgctatatgtttttgggattagtgagagtctttaattcctaaatttggaaaattttagagattaattgataaagttttaagctttcttgatttggaaaatgacatgtttgcgttgtgagtgatttagttgtttgatgaaatctcaggacttctcagatttgaattatatac

SEQ ID NO: 38515 - DNA, 577 bp, Arabidopsis lyrata
  Intron number 1 from transcript 934360 (locus 934360) deri ved from phytozome v7.0 (chr-ID scaffold_4; pos 17750798 t o 17751374 reverse strand)
agcagtgaaggttccgccggaaaggtacgtctccgcatttgtagttttcgatgaaatcgagctgtgtttaccttaccaatcacgctcctctcttccttgatccataattggtttttaaggtccaaatctcggtttattatcgttggatctgttagatcaaattttactgaagaagattatcagtttcactgttgctttgttgtgttgtcttgatcttgatgatcctctcgcatgcattgtttattttgaacatgatctggaatttacagaggatttcgattgtattcaagaattagtgtcaaaagtgttaagatttgcttgggaattcagaaaaaaaaaacagtgcccaattcgctgtgatagatttcacatttgtacatgctaatgtgtatcaattgctggtttggtttccctgaatttcgtagaaagatgacattgttaattgctcaagaaaataaaagctttgcccttggaatcacaattttggtatcaaaaatttcactttggtatgaatttttgcacacattattgtgaatttacaggcggctgttgaagctaaaggattgaacccggggtt

SEQ ID NO: 38516 - DNA, 615 bp, Arabidopsis lyrata
  Intron number 2 from transcript 485891 (locus 485891) deri ved from phytozome v7.0 (chr-ID scaffold_5; pos 17177291 t o 17177905)
ctcatacgatctgcacaccactaagaacaacagaggtttgatttcctccttctcattcttcatttttggttttgcttttcttggggaattcttgaaattataatgggtttttaggaatcttgatgttcaaaattgagtttttgcataattcaagaagtgtcggtggaggcatttatttgtaactaattgttctgaacttggttttgtttaacactatgttttttgtaactgaatttttttgtgttttcttcttcttttcacacaagaattctagaagatagatagataaaccaagaatgctaaattaacggtgacttttgactttaagaaccctttagtctactgtgattgaattgtacatagaatggtcctcattattattactaagccttatcaaaaaaaaaaaaaaaaaatcaaaaaaggtgggccaaagaatgttcaaatttttgattttaaggtggttccaaaatttggttcaaattttcaaaactttttcagaaacttcctctgttcaaactcttgtcattttcctctatataattatttcattagcccatctctcattatttattctttcttatatccagctagctagagttgcaataattgtaaaag

SEQ ID NO: 38517 - DNA, 373 bp, Arabidopsis lyrata
  Intron number 3 from transcript 485891 (locus 485891) deri ved from phytozome v7.0 (chr-ID scaffold_5; pos 17178129 t o 17178501)
ttccggttagttctatgctaacctacgccctcttcttatagccaattagtatgattttaccagtgtgtacatatttaaccacaagtttaatgagtatactaaatgaaaactgtgtcattttgggtggtttttagttagatcaagtttgttaatttcccgctcattatttggttagttttatgctaacatacgcactttcttagttctgtttttgcctgattttaccatatcaaaaagtttctgtttttatagttagatgaaaccctttttttggcgcttaattatttttctgtagaatttgtctaacaatgtttcttttattgggggtgaaattgcagtttgaggacattgttaaggtggaaagaccaccaac

SEQ ID NO: 38518 - DNA, 734 bp, Arabidopsis lyrata
  Intron number 2 from transcript 933542 (locus 933542) deri ved from phytozome v7.0 (chr-ID scaffold_4; pos 14168910 t o 14169643 reverse strand)
cacagacttgtcggtgataggtaattcccactccaagaggaagtctcttcttctgataatatatttatctattccaaatataaaatagttgttttttgcctaaatatgtctgtataatgtcttagtttgtgttaaaggggaaaaacccaaaacaaaattgctgtataaggtttgattttatgtttgataaaaagttaaaaactaatacaaaaattcactaaccagcagttataccagatcaactaaattacccaatagtgcttcatgaaactttttggttcaccttctgattcggtttttgaataagcctttagatgatttttgatgtagcatgcatatattagtcataacttttatcataaattaggtccatttaataaggttgataatgcgttattgtagagtagtttcgaacgtgtttgacatatgatgccatcgtagtatccaactttttcaagttttagaaaaagttcaccatctcttagcacaaatgggaaaaaattacttttgagtctttttactttattttacaaaagcttttatgttgtcggtaaactaatagaatgtaagaacagaaacttaaatttcttcttttcctgtagtgtaaaaacagtgaaacggaatgaatgatatagtaaactaatagaatgtaagaacagaaacttaaatttcttcttttcctgtattgaatgttgtcaggtgggatttaatagcaggaagagtggtcggacgaa

SEQ ID NO: 38519 - DNA, 786 bp, Arabidopsis lyrata
  Intron number 1 from transcript 935111 (locus 935111) deri ved from phytozome v7.0 (chr-ID scaffold_4; pos 20711679 t o 20712464)
tgtctctcatatctttgccctccaacaacaggtaggtgaccgagtaatcgttagtactccatcgatcttcatagactatttgtttaatcactatggaatttattgattggtatgagatttcgtgcatgagattgaatgttctccaaatcttgatgaattagcttgtaacaacttctttcccatcatatcgtttgttttcacattagggcttttcttcctttttttgttttgcgtaaattttcttaaaaaattaaagtttgatattttaattatattgatttagcaaacgttacaacgataaataatcagttttaatttccaataaatttttgtcatgatgttttcatttcttgtgtttgtcattttcgattcgtcaaaattttgaataaacaacattgtattttttccgtttcataaagatagatgttttgaatattttgtgtatataaacaatgcttataaacaagtaaatgtatatatatctctacataaatggatttacaattcttggaatatgaaactctatatataagtatgtaaattacatgtgtattaagatacagaaatacaatatagatttacaaaaaaattgcaaaacatttttttggcacaaaacatcaatttaaatgatgaaaatagactatatataaacataaatattcacaataaacggaagaaacatgtactatttatgatcttacaacttttgaatagaattggatttcaatcttgtttaacttagcgtttgatgcgtttatataggtggcttacttgcaaggacaagtc

SEQ ID NO: 38520 - DNA, 881 bp, Arabidopsis lyrata
  Intron number 1 from transcript 940231 (locus 940231) deri ved from phytozome v7.0 (chr-ID scaffold_6; pos 3005703 to 3006583)
caacaataacgctgctcttacttcactcaatcccagtaaaagctttcttctgaaatcgaaatcttatatctgttagggtagtggaatcaggtttataatgatgatctcttgttttagattcagatttgatacatttgtgcatcttgttgaagtaatcttcccccattgtgtgtgttttcaggtcagggaacttgcaaatatcctttgaggtaatcaactttaaactatctttgatcaatttagatttatgaaagatggtttggtgattttgtgttcttcaatatcagtttccttaataagagctaatcttgttttggtaagaatgtatttggttcttagattattcaatacgtgaatgggattgtctttttgtctggcattttgaatttttatattctatggaatttgtagtgatctttctttctttcaatgaacttatatggttttggacaacgaagctgtttaggatatctgtttctgcaccctcaagctagccactccaacttataagtcatttgtttcatctagtttcgcttaaaagaatgaaggaggatgaaggttttttttgcagtcatttgcaaccatatcctgttctttacgagaagtctggtaaagaggatgaatgttttttttttaatctatagaactcttttacctgaatcttgacataaggactcatgcaaatgtagtgtgcaaataggagaagatggttggccaatttagagtttctcagaaaatatttttttccttcaagttgtttcctgttagtatgtttctttagattcttctgatttggatatcaattgggtttgtcatgtatccactattgttactcgtttttgatagcttgggttagaaaacaaagttgttgtgcggaagtc

SEQ ID NO: 38521 - DNA, 468 bp, Arabidopsis lyrata
  Intron number 1 from transcript 894745 (locus 894745) deri ved from phytozome v7.0 (chr-ID scaffold_6; pos 13319810 t o 13320277)
ggcttagcccagtaataatacccaaaatcagaacaaacatactccttcaccaaacacgtcttctcagccgaacaccgaacacaatcgtctttctctcacccaactctcatgtgtcaacatgattccttcttgaatcatcgccgatgtcactccacttatgggtttatctccattttcgttcagctttttaagataagcctcaagcttctttcctcaatttgatttttgtttagctcacatctcctggattttcaatcccgtctgtaatgattgaaagtgatgtcaattccgatttttgaattctgttatagatgattactccaattgttttatgggcatcgaatttttactccggtttggttattatgtttatattgatttccattttctgttgccatttagtatttgattttgattatgtttttctttttcatctgaatttgcagatatttaaccaaggaacaatag

SEQ ID NO: 38522 - DNA, 619 bp, Arabidopsis lyrata
  Intron number 1 from transcript 934793 (locus 934793) deri ved from phytozome v7.0 (chr-ID scaffold_4; pos 19542157 t o 19542775)
aagacatcatctccaaggttttgtctcttttctcaattcttgacttttctggagattattcttatgggggtttgtgattaatctgtttttgttgttcttcttcctcaaatttgagagaatatataatgatagatgattctatagaagagatgtggttgtgtgttgataagcttaagttacgagaaatacttttgttgtgtcttctcttctgctgcgagtgagatcatgctatgtatactataagagattgtaaatttaactcttagattactttcagatattttcaatttgagtaactacattgttgaagttatggttcagtacttgtttctgcgtacttgccattaatcagataatgatttcattggttgtttagtttatatcacagtaacattgagctcccctttagctgatcagacagaagcaaagcaatcatctgacaccagttttttttttttgattctctctgtggtctaagatggattctctttatgcatcttgagaataacagagagttgaagctaatgagctttccctgattctgcatttgttgtttcttgagctaacactgtagtgtgttgtgttttgatgtttcttgttcagtcttttcactgcaagc

SEQ ID NO: 38523 - DNA, 645 bp, Arabidopsis lyrata
  Intron number 2 from transcript 334551 (locus 334551) deri ved from phytozome v7.0 (chr-ID scaffold_1; pos 5145896 to 5146540)
tccttcggctcacatctgaagaattggaccaactggttagtgttctagtttattgaatttaggggttgtttcaaattttgtaagatttgtgttttaacttctgagcatggtgcgatttaaaatactaaatactctctctctctctctctctatgtgattcagtgattgatgagatgcttttgttgtttgttttcatggatgtttcctttcacatgttagattaggtttacgattgagtgttgtgaattttgtgatcacttgattatgttgtgagaggttgccatagatggaaatagatcctttttggagctgaattatgtccattttgattgcttcgcttacttaataaatagatgattgtgatctttaattgtacaggttacatttcttcttaatctgctgagactcttttcatactttgatttcctgaagttagctgtaatttaggtagaagattcttgccccaaaatttattctataatctagtaacttggaaaaagacagccagaaattactgtcttctaagcttatatgtgcgatttaattattttgtgttgatttgtgtttatcaactctggttttaatttgtgtatttcaatctctctttcaggcaaaccatctccatccactcagaatttccttttc

SEQ ID NO: 38524 - DNA, 127 bp, Arabidopsis lyrata
  Intron number 4 from transcript 479621 (locus 479621) deri ved from phytozome v7.0 (chr-ID scaffold_3; pos 9241548 to 9241674)
cattgtgttcaattgctatccaaggttttgtgcaagtaagtttcttgtttgattatgcattaagggaagctattttctccttcagctttgaacagcattttttgcctttttctttgcagtgaaaagg

SEQ ID NO: 38525 - DNA, 662 bp, Arabidopsis lyrata
  Intron number 1 from transcript 478351 (locus 478351) deri ved from phytozome v7.0 (chr-ID scaffold_3; pos 4082839 to 4083500 reverse strand)
tctcctcttctctctcgaatcttcttcgattaaaggtgatcttatgcttttgaatttgcctggttttttgagctaatcgaatttgttttcttgatcgttttgatgttctttaaaacaaaaattgttattgttgatttgatttgatttgatccggttgtatttgaagaagaaatcgattcaaagtgttgggtttatagattggggtaaagtggaggattctcagtttgtttagccttttatttgtgaatccatgtttgcctgattcattttgtatttctgattctctgttttttttttaaacctagagaaatcaaattcctttcacttttgttttattgatgtctggctaaatttgcgattttttttttctttttttttttctgattggattttatggtttagctctgccgagctcatgttgcatagagtctgtttgttggcaatagaatctgtttatgtatttactttgtttgagttattttctgaatagtactctaagttgatatgtgagaaagaaccttgtttctaatcagtgaagatagttggagataaaaacctctaatgatttgatatataaaaacaaattaattttgcacagaaatcaaattcttatactgcttcttcctgacaggaacaaggtctggtttacaaaagtcacagag

SEQ ID NO: 38526 - DNA, 933 bp, Arabidopsis lyrata
  Intron number 1 from transcript 311551 (locus 311551) deri ved from phytozome v7.0 (chr-ID scaffold_1; pos 1556412 to 1557344)
caatcacgttggttaaaagcatcggaaactgtccggtgatcttaaacttgctcgatatcagcggttgcatcagagcgtgtaaagacacagccttgaagtgcgacaaagagaagtttgagcagtgtagcaaaagcttgtctgaagaggagattcggcagatgaataattgtctggagaagatcaaactattggaaaactgaacttttgtagactttttttcttcgaatttgacccctaagtttttgaaagtgtataatctttcccctttttgtggatttttctcaattctgaaatacaaagggatgagaaacagcatcattccctgaaacgattgtttgtgatttgaatcattggtttttttttttatatgttgaaattaaaataagagggtgtgaattgaggagatttgttctaaataagcgtatttatgtgaaatttgaaaacttaagggcacaagtgcaaagttgttgaattttgaagcttttaataaatccaaaatttataatctggagagaacctatctctgaggtccaaactcttgggtggaggagaactattgaaacggtatgggtaaatctagctcttcaaagtctcttactttaccgattacgtactcttgtgcgatcatttatattggtttttatcggtgatgtaatcttcaaagtctccttctttgtttatgcatgttaactgttcgataaaatgcctcacagagtttgtatcctagctcctcagattttattcttaactttagcttagttgccttttggaaaatttgtgctgtgttagtcatgcttttagacccccatcactagtattaagtttgtgtggaaaaaagaacaggaactatttttgtgtgcgttggctctagtatcttcatagataacctaaatagttagagctaattatggattctgtgttaatgtgcaggaa

SEQ ID NO: 38527 - DNA, 576 bp, Arabidopsis lyrata
  Intron number 1 from transcript 929394 (locus 929394) deri ved from phytozome v7.0 (chr-ID scaffold_3; pos 6645526 to 6646101)
cggatcttaacactgttttagccgcactaaacacggtatgtcgtgtgagttaatttaatccttatcttcaaattcctattgcctcctttacctaatattttgattttttccttttgtcatttataaatcctaataatttaattaaataagtcaaataaaataaataaaagtggggtagagatggaaacaaacctcagattattttcccgtgttatttaattctccagctggaattttgctgtcaaggtaacaaaatcctaactatagtgagaaaattggcaaaagattaatcctagaatggtcatagtagattaagaccaattagtggataaaatggtcttaatcgagttagttagtggataaaaatttagttaatgtaatctctttgtttagttatgtaatcttctttttaacaatatactattaattaatatagatcgcttttaactttaaaaatgacacatggtgaagaatgagttggagacagtatcacatgcaagacagagattggttacttaaatctgagttttgtactttttaactaaaataaatgggtggggacaggtgttcgtaggg

SEQ ID NO: 38528 - DNA, 631 bp, Arabidopsis lyrata
  Intron number 1 from transcript 484101 (locus 484101) deri ved from phytozome v7.0 (chr-ID scaffold_5; pos 474415 to 475045 reverse strand)
ttcaatcctctcacaactcattacaggtaatgcaaaaaataatttctccatgtgctgcgattctccaaagttttaatttttttttatttttgtgtgttgcttagttgttcttctggtgttatgtttttctttctttggtcaaagctctaattttaaaaaatgacatttttattgttggatttgagacagtgaacaaagctgtgttcttgttctaagaagaaacaacaataatagttaacattcacgcctgtaaagagcttatgattgataagtgtgttttttagtattaattaattaatttctctgacaataattagtttttttttttaattcttctctgtaagaaaacctttggaaactgagcagagttgcttcttttgagaaccatgcgttgagaagaaatttcttctttctctctttggttcttgaatttgcaaaaacatgtcctttttcgtgtacaggtttctagggtttgttttagtataaacaatgtttatggtaaaattcttaatcatataacaacactacgcatgctttatgttatatgaatgcaaaaaaaggctctaacttttgatttcaccattgtttcttcttttgttaagaggtttttcttcattgttgtagctcagat

SEQ ID NO: 38529 - DNA, 688 bp, Arabidopsis lyrata
  Intron number 1 from transcript 938099 (locus 938099) deri ved from phytozome v7.0 (chr-ID scaffold_5; pos 15998227 t o 15998914)
ctggcaggacttctaactccgtcatcctttggcaggtgatttactaagatgtgtattgaaggtttctccttgatgcgatttgagttgggtttggtgagaggtgctttgttatgttatttatgaggggaacaatgggaattgtagggaccatggctgtttatggtagatgttcataattatgactctctgactcagattatggcttcttgtttacttgaagctgttctggctttttcctctctatcaacaggcaaatagttcggttgatttcttccatgtttccaatgtttcactggtttcagttagttgcagtgtgctagattgaatgttgaaaatggtttcagtttttgttatgcttatgtagcttttatcttttcgattcctgatattgttgtacgcattataacgctttagaggacctctaacagtttgatggagtagaaggcatgttatttgtgttcttctcgctttcctaactattcaacagtgatcagttttcacagtggattgcaagctttgcagtaatcagagcgagctttcaaaggctgacttgatatttgaatagcgtgactctagatgttttggttgtcgtgtgctttatttgttctgattatgttcataccctgcaaaaagttgaattctttcatgattaatttagtggagtattcgctaaaactatttcaggtat

SEQ ID NO: 38530 - DNA, 453 bp, Arabidopsis lyrata
  Intron number 1 from transcript 919920 (locus 919920) deri ved from phytozome v7.0 (chr-ID scaffold_1; pos 4435192 to 4435644)
gccgttctcagctggagttactaatctacgaggtaattatctctctctgcaaagtttttcattttgggttttgctttgactctccttattttggtttagtgaacactctagattttgacttctgtctagtgaaaatgacttacatcagttttagggtaaactaggtgaacactagagctgtctgggaagctctagattggcagattctatgattctgaggctaatctcaaaaaccctaaaaagttttggtttttgacacataagctcttgttagggttttagttcaagaccaagaaatttgttcttattgttcttcattaattggttatcttcagaaagattctttaatctctagaataattatgttagatttgattatatagtgatgggtttgtttgttgtttaataacttctacagtttctgcgattaataacttgtacatcactttggga

SEQ ID NO: 38531 - DNA, 614 bp, Arabidopsis lyrata
  Intron number 1 from transcript 477698 (locus 477698) deri ved from phytozome v7.0 (chr-ID scaffold_3; pos 1483297 to 1483910)
cgagaagcttccgattgctctgtatagtctctctccgtaccaaccagtgaggttttttgtttgtatgtttcgcattctgttcgcttttctcatgcattctctcttcttattattgtgttgatcaatgtgctttcttagtccgcgaatttgggatttagatgtctcagaatctgttttgttttcgaaatttcggtgagttttacaactgtttaagcttgaaactttgaaaaatgttggaatctgttctgctttccgatttgatgatttcgccggttttgttttgcttggaattgggataaaccagttttttagggttttttattggtgagatttttagatgattgccgattaaggattgggtttattcaaaattcgcagtctagattcagttcttgaaggatagcaatataaaatcaaagcataaattgatcagtttccttgttcttagagctcttgcattgatgtgtcttagactcttagtttggtgagtagcattttcatatttatgaaccagattctattttatcactagaaactagtaaatttttttttttttttggttcccattaacatttttagtgtgtatttgcaggttctgttgaaagtgatcttga

SEQ ID NO: 38532 - DNA, 506 bp, Arabidopsis lyrata
  Intron number 1 from transcript 489694 (locus 489694) deri ved from phytozome v7.0 (chr-ID scaffold_6; pos 17624715 t o 17625220 reverse strand)
ttaaagtggagtatttggaagaacaacaaagccaagaaatttggtaaagacagcttttcttattttgttgtttgtgtcaacaaatccaaacaaggcttttgatcatttcattttgatccttttccttattctgggaatctacaaattccttcaacgtcactttttttgttttgtttatattttgaaagtgagaataaaaaaaatattgaccattgggtgttgtttctctcaatttattcttctgggtttttttgtatattcttcaaaatctgcaaatataaaaaaaaaaacgtgttgagctgttaccactttctttttttgtttcttctctctcttttgtcttttaaatttcttcaaaatttctcatttttcactacaaaaactttttgttttctctcattatctcgggaacagagttttttctcttctcttctcttcattacatcttctcttccctttttgttattacagtaacacgcgtctccttcaatcctctcgctgtcaat

SEQ ID NO: 38533 - DNA, 945 bp, Arabidopsis lyrata
  Intron number 1 from transcript 901619 (locus 901619) deri ved from phytozome v7.0 (chr-ID scaffold_4; pos 17950781 t o 17951725 reverse strand)
gctccgttcgccttctatttcgacaagtactgtctactttcttttctctctacatatatatcaacttctctcataacataagccaatgttttgtttgagtagattcaagactatgtacagaatatcaatgacaacagaatatcaatctagtatgatatattgaagaaaaataaattagcctaggattattaattttggtttgtgttccatgttgtgcaaacgcaaaagaaaacaattatgaccatattctacaaagctagcggactatatatcaaaaacatgaaagatcataacatatatatatatatatatatatatatatatatatatatatatattgagtatttttaattttgtttttgttggtggtgcttggacgttagtgtgttgaaacttgaaaagatgagagtagcaaaaagaaagaatgaggcttttgacgtaatatatgataagaaagggtcactcatatgttaaaagacaaaaaagaattgtaaccgttttatatttggtttttctgtgttttctgccaatgtcatgcactgaatgtgagtcctatgcctttttttagtgttgtttctctttacaaaaagatacactaattcaattatttcgtgcgtaatcaaaaagttggtatgcttccgtaattatgactgtaatcccgtaatatttacacaggtttctacataactaatttgaaatgaatatagtcagctgtcaattttccctcttttcttaaaattttcttatagtttagatgattctcaaatactgtatattatttttaccacgattcccatataagccaaagtccctaataaaaataaaataatgattggaagtgtgtttgaaatggttggaaatattttctctatggttaaaaagtaaatgttacgacgatctaatgtaatttatgatgtaaaacaaaacaggaaggtgagaccgaag

SEQ ID NO: 38534 - DNA, 589 bp, Arabidopsis lyrata
  Intron number 3 from transcript 950175 (locus 950175) deri ved from phytozome v7.0 (chr-ID scaffold_8; pos 16950225 t o 16950813)
catttccagtgggaactgaggtatattattcgttttgaggaattcatttgacttcaacatcatcggatgtttggatcacattctccatcttttattgtctgttgttgttgagtcgacgagattttcaaggctgacgagattctggtatttatgtttctttgttgtatatcaggaagcatttgaggaaggttgaatgctctatgggaagaaattctttgtttttggcactgcagaacgtaagatgtttctctcgcttatctctttaacttgtttaaataatctttggcacttgtggttctttctaaatttctttgaaatctattaggctgtgcagtatgctctctttctttctttagcatttgcttctacttcctgtttaattttttctctttttatatttacagctgacttctgcgaagatgtaaacaagactgtctatgtcccaacagttgttgtggtaagttattgtttacatctctaccaatggtttgtttgctatcactgatcatatattatctttattctctctttctaatattcttctaaatacgcagattgaatcaccttttccgccttctgagaagctagg

SEQ ID NO: 38535 - DNA, 379 bp, Arabidopsis lyrata
  Intron number 3 from transcript 486312 (locus 486312) deri ved from phytozome v7.0 (chr-ID scaffold_5; pos 18948480 t o 18948858)
ttaagcagataggtgttattggctggggatctcaggtactttcttttttttggtctctttatttgtgtctctgtttttcacctaatttgtagctactggtgcttcttgtttgattgctttttgaattgcttacgttggatttgtggatatggattcttgattacgtcatgttaaatgaatttggttagaaaagggaaatgaatacagtgttttcatttttcatgcttttgagttttgatgcatttgagttgcatattctttttctttagcaacaagattaatgaataagctgcatattctttttcttcagcatctcttgtacaaaactcgttgtctatgtgcagggacctgcccaagctcagaatttaagggattcact

SEQ ID NO: 38536 - DNA, 1009 bp, Arabidopsis lyrata
  Intron number 1 from transcript 928322 (locus 928322) deri ved from phytozome v7.0 (chr-ID scaffold_3; pos 2798928 to 2799936 reverse strand)
tggaagagaggtttgtgctttttagtgcccaaaatctttatctcctccatttttctgattttctctcctcctccttttttttttttttttttttttctttttttttcgggtcttcacttccatgccgtcccgtttaaatatccccggcgatactctttgtcggagttaatgagtaagacgatcgatggatgattcagcttttgggttgggcccttaaaacattcaggcccaatcttttcaaggctcgtaaaaagatgagcttaaaccaaatcaaatactatgtgatttctattagacttcggttaaggcaaagtattcagtttctactttctagccgtctgattctaccggcctggcttagttttaaaacaaaagaaaacccaaaaaataagttctttaataccgaagctacctagtaacaaggaaaagatttggattcagaaatatgtacaaattaatcttctaattccacacaagatataattgattgactccttcactaaatctcattctctcctactcgctgaattatcctttcttttgctcttcgtctgcttcaccaatctatctctccctccgatcgatttcacaatgattaacgcgaaatatattcgtataatcattggaattattggtacgttctgccatctctctcaatttatctatagccgtgtgtaacatcattacatggtactgattccatgcatcagtgtacttgtactagtgattcaaagcagatgttttcacggaactaaacaatcaattgttaatccatattatacaagcattttttgtgttgggcacaactctaatggcggatctctcaataaattaaagcgtcgttatgatcgatgcttatcataatttatacttacatgcttcattttacctctgtgtgtttgtatagatgtaaatataattaaagagagagagagagggactgatttaattagcacagtttcgagatatatatatatactgacaacttttctctggcttcatgcaggga

SEQ ID NO: 38537 - DNA, 988 bp, Arabidopsis lyrata
  Intron number 2 from transcript 946143 (locus 946143) deri ved from phytozome v7.0 (chr-ID scaffold_7; pos 9719723 to 9720710 reverse strand)
ttcgttatcggcaaggaatctttcttcccttccaggtttagcctcaaatcttcttccatataataaaatttccatattttaatatatttatttacctcaaatgttagaaattgagtttgatttgtcttttttttacctttaatcgtttagattttgttactgtaaattaatctctatgatcgtgacttcattagcttccatatatttctctttttgtgcatccatgtttataataaatactgttcactggttttttattttttttttataaagctatttttaatttttcgggtttgatttattcaattatacttttcattatttttttgcgttttctggttttcatttttgagatctaacgttttggttcatcttctgttaaagcttttaacgaaagtttggtgatctaaaattcctttttgggaaatgacaataatacccttggaagcactaagaagcagagagttgtgtcttttgcctttcctcaagtgctctgtttcttaggtttttcacttgttgtttagcttttggggtgaaaatataaacgatttttctcaatctaaaatcttgttgtgttttttttttgttaaatataagatctcgtaattttctttgcctttctttgacccaatcttcaaatctgggctactcgttttgaaatcacaatatttcttcttattttctgttttggtccctctctttagttttattttttggtgtgtgtgtgtgtctgcgttttgattctgattcttaaatatgtaaatgggtacaactagtttccctttctaaatttcttccttattttttaacacaaggagaaaaaaaaacaaatctttcttcatttcgtaatctcattaaactctctcaaagtttataactttattataccaaaaatcacctgtggatttattaagctgttcctcatcatcatcataatcatcaatcatgcccaggaatctagaagatcgatcagcaaacggatcaccat

SEQ ID NO: 38538 - DNA, 907 bp, Arabidopsis lyrata
  Intron number 1 from transcript 339407 (locus 339407) deri ved from phytozome v7.0 (chr-ID scaffold_2; pos 15073413 t o 15074319 reverse strand)
cgtctctgctcgggtatgtttctctgctctgttatgttaatggtcaaaattttagtcaaaatttgagtcaaaactagtgactaagttgatttgagtcaagattagactagtgattagtgatgaagtggtcaagatttgagtctaaaaaactaatgaataagttgatttggttttgcatttgaatgtttaaagtcaaattgtggatggaacgttttaagtcaacaagagtctttgcgttttttttcataaaaatattgtgtggtgcctatgattgatgctggagaagtgggagtcattagattaaattaagacaaaaagacaaaagtcttggaacttgaaggtacgaaaacattttaccagtggcaagaacgttttattcaagaaagattatgaactttattattcaagattgtaattggcattaagtttttttttctttctaataaagtttgtgttattcgatgaccttatttagaaggttctctgtttagtgtttattttgttcgaggaagatttaaattttgttcttgtaacgaggttattagaaggctctttgatttttttgttctttttaagtttcttaaagctttttcggaaatgaagaaaaagagatgataaaaaacgtgcaaacttccattaataggtcactccatggaatgtgattggacgttaacatacctaaacctaaaaaaaaaaaaaaaagtggttgaaaagtgagtggtagtcaagtgtggtctattttattgttgccaatctcatgatactcttcaacctcatcgaaaaccacttgtccttttcttttcctttacatgtgacaaaagtttggcttcaataactttttttttaacatttggtctcattcattttctcaggttggaaacgagctcggtgcaggtagaccgtacaa

SEQ ID NO: 38539 - DNA, 506 bp, Arabidopsis lyrata
  Intron number 1 from transcript 473756 (locus 473756) deri ved from phytozome v7.0 (chr-ID scaffold_1; pos 21805061 t o 21805566 reverse strand)
ctcctcctaactctcctaattcttctactcgcaaggtacttgtctctcccgaaacctgctccgattttatcgagcctgtgagctaaagtttctatgctcactcgttactaagtttgagttgagaattgtaaaagaatttttcgatttggttgctcttgaagttgaattttagctatcttatatgtcactgatgatgttttagtggaaaatgtgaagatcgttgtgaaattttggatgaatcgagtcattttagctgttaaagagacgttttttgatagaagctcgagtaaactttaactatcttatagacacctttgtgaattcgttgagaaatttagggttatagctctggttttccgaagaaaactccgaattgtaaaattcattgtaacatttcagtataagctttagaggtttaagcagattaacttctatctatttgtgttggattcaatttatattgagatacttacatgttttctcttttgtatttgagcaggcttgtt

SEQ ID NO: 38540 - DNA, 381 bp, Arabidopsis lyrata
  Intron number 3 from transcript 490319 (locus 490319) deri ved from phytozome v7.0 (chr-ID scaffold_6; pos 23689548 t o 23689928)
ggaagcttgtatctttgttgaacgtgagtttcttacttacttctttgatattcacacttgtctggatcatcaagtttttgtcttcctgagtacttctatggtcactgaatttctactgtttgatgtttttccattgagtttcaaaagttttgttttttatcttcaatgtggatggttaatcggttttattggcatgattctagttgaagtttttttttactccagttatctttgtggtgtgaattatgtttactatgtagactgttttaagctcagtttcttctgctagaatcagcttttgacttctgctcaatctctgtttttgtgatgaccaattatttcttccataattttcctcctgcatttcatttgtgtaggcat

SEQ ID NO: 38541 - DNA, 865 bp, Arabidopsis lyrata
  Intron number 3 from transcript 481027 (locus 481027) deri ved from phytozome v7.0 (chr-ID scaffold_4; pos 400597 to 401461)
ccatttatccgtcgactgccagagtttaaattctggtacccttttgcctgtctccttacaacttatcagtgttcaagaaagcgctaggcgctaagcgggcggtgacccaatgcctagcgcctagaacgcctaatcgaagcctaggcgattttttaggcggtttagacgtttataacataaaacataataaatataatatcatatataaaatttatataaaatatctaataaaacaaaaaattatgaaattataaacaaaaactagataaaacatttaattgattttatatattaaacaatatatgaatatttataactatatatatatatatataaataaaactctaattgaaattgaaaaaatacattaaacaagatctatgtaattttagacggtcaaggcggttatctaggcgtcgcatgagagcctagcgcctagtcggggcctaggcgaccgcctagaccgctttttagaacactgcaacttatgctttcaattatgttgttggattatcgtcattgcatatcatgttctttgtgataagtcatatttaaaattctattagcattcaggtggtttaccatataccatctttttaaccaagtgtgctggtaatgcttgtgttgcagcgccatattcaattttgttttctgttccttatatgctcatcgggattgaatgacataatgtataaacactatgctcttagttatatataattgctcagttttttttgtcctaatatcttcctgaatgatacatccaggaagaaacacttggtcattgtcataactctacacataagaacacggtagcttcttttcttttcagtgacaattggattgaatctctgacaggtactcc

SEQ ID NO: 38542 - DNA, 393 bp, Arabidopsis lyrata
  Intron number 1 from transcript 347200 (locus 347200) deri ved from phytozome v7.0 (chr-ID scaffold_5; pos 4474833 to 4475225 reverse strand)
gataagtttgggtcgctctattctggcgagtgagggtaaagaaggcagaaaatggggttgaaattatcattgtcttgtgatcaaaaagataaaaccaaaaatttaattagactcagatctgatacttctcacccaattatctctagttcgtattacgagtcggcttttattggttatgtgcttagaagaagtttgatcctttgtcagagttagacaataattatttttgaatttggattatcgtgttttcctttttattgattgtgagttttttcttctttgtgcttcctgatcgcttcattgtcaatcaatggtagaagagtttcctcatttaactttactttgtgattgttatatgactgtaggagtttcctccagctgctggaaggtacc

SEQ ID NO: 38543 - DNA, 341 bp, Arabidopsis lyrata
  Intron number 4 from transcript 922923 (locus 922923) deri ved from phytozome v7.0 (chr-ID scaffold_1; pos 22865801 t o 22866141)
tggctcctgaagaagcacttggtgagcttttgcaggtatttttcatagtctctctctcttactctgctactgttttgttatatatatatctggaaagagttttaataaatgattgtgctgtaaccattgaaccatggtagtggttgttttcttgaaaaaaatgacaagaacagtttctttagaccgaattgcttaaaatgatctgtttgtgcatggtgataagtttgttttgcttatcgtagtttacaacaaatccacattaatttatttaacttagtgtcttcatgtttgaaatttttgacactcgtgctactttctttttcgtcgaaggtgtcccttgg

SEQ ID NO: 38544 - DNA, 840 bp, Arabidopsis lyrata
  Intron number 1 from transcript 338919 (locus 338919) deri ved from phytozome v7.0 (chr-ID scaffold_2; pos 11899856 t o 11900695)
tgcagtccactcaatccaccaccaccaactagtaagtttcttatgcatcacaatcatttcatatccattttctttaagaaaatcgagatatttattgaatctttctcattcttttatttttaaccctttacttaggcatatcaaacaactacagtagtagtaagctatgattttaacttatacatatatactaaaaattattaaatgaaaaatttagtgtatattcaattgattataagggaataattagcaaaatttaccttttcccaccactaagaatgtgtacttgaacctccaaattttctcacaaatttatatttatgaatttttaccttctattatacatactttattatattttgaccccaataaaaaagatttctgagtccaccactactgcttaagacatttttcatgctctatagtctttattatgttcccgcaacatcatgattcacgtactaaatagaatttttttcattttagcttagggaataggaaaaagaaacaaggaactaaaagtcttgtcaaagtaaactaatgacatcccaattagtctttgtttctgtcactatcctcactgacttggttctcacgccctttagcgtttccacctcatctttatgcttatcgctctgtctttatatctctttgtttaaatcacttcctctgctcttctcaacacaaaccaaaaccataaaacacgttgttcatagatcaaacaaatcatgtactatcccctcagttcttgtttgatgttcttcatccccttctccttattctaccatcttccttgtgctgcaagtaagtgtgagagtctgtttcagtgtgggaacatca

SEQ ID NO: 38545 - DNA, 360 bp, Arabidopsis lyrata
  Intron number 1 from transcript 937805 (locus 937805) deri ved from phytozome v7.0 (chr-ID scaffold_5; pos 14778388 t o 14778747)
caaccaccgcttcttccagagaaaactccgtcaaggttcgttaacttctatgtctttgcagattatcacaagtcaaaacatatatgcaaaaccaagatatatagcagtatgttccacgcgtatagtaaggaagaatacctagattagtcttaagtttttgtctaagatactaaagtatacaataaagtttgcatgcatggtccttaattaagatgttacttcatttcttccgatttgtttcgtgtaatagattatatataaaatcacaagatttatttatatgaccccgggaataattcaaaaactaacactgatcaacgtccatattttgttattatgtataggaaattgaaggagaca

SEQ ID NO: 38546 - DNA, 867 bp, Arabidopsis lyrata
  Intron number 1 from transcript 913571 (locus 913571) deri ved from phytozome v7.0 (chr-ID scaffold_1; pos 22117338 t o 22118204)
atgtatcataggtctggtcaagatcttgtccctgaaaaaagaaacgcaccatgacaaggcaaggacataacatcttaagagagcacgccaactaggtctaactatccaactctagaatacaaacacacataagacgaaagcatcaaagtctatatcaatacgagctgaaatttaaaatgcaaagaacttggcaatagtagtatagcaataacaagaagcaaagacaataaacaaatttactttgtccaaagtctatgtacgttcaaaatatgagagcaagtgaacttgtaccttaaactcaaagtgttgggacttttttaaaacatctcttaggctgccctggacagtggcaacaattggtatacattcacttcatctgtgaacacgaaagaaaacccatacacatagagaaatatgaatcgaagttagcccctaaaactgagatgctaggatattcacaaacaagtaattatgttttatctagttcaattagcttagatattcactaagcgaaaaaaacacaaggagttcaaaaggacaaacatttgctttgatagaaactccaacgtacgtagaaccaaattatacaagtactcaactttcttgggagtaaacttgaaccgagccctgaagcagtaaaacagctacagatttagagcaacacaaaatttgaaacccaattctcaattaccctaaaaaattgaataagttgaaatcaaacgagaaacaaatttctgaaaatcgaagcaaaataccacaaaccttcagcgaattcacaggaatctgcccatcttcttcatttccattgagttctccagtaataattttgaaggtattcttctagattctccgacaaatcaacttccc

SEQ ID NO: 38547 - DNA, 307 bp, Arabidopsis lyrata
  Intron number 1 from transcript 927083 (locus 927083) deri ved from phytozome v7.0 (chr-ID scaffold_2; pos 17379244 t o 17379550 reverse strand)
ggaagaaatctccaggtttgttataaatttataatttgttacatgcatatttatatattatatattatatatttatgatcatatattttcttctctcacattaatgggatgtatatgcgtagtcataatattcagtaattcatttgaatattcttataaggttatttatatgtttataggtggtatgtaagagtaattcaatacaacaatctaagaacatgtttagatatgttctttgcacaaaaaagtttagatatgttttgtttcttaattatcggttttaattgattgatacataattaggaaa

SEQ ID NO: 38548 - DNA, 320 bp, Arabidopsis lyrata
  Intron number 3 from transcript 943396 (locus 943396) deri ved from phytozome v7.0 (chr-ID scaffold_6; pos 23259375 t o 23259694 reverse strand)
tggattcttgaagttggatacagtacctgtcactggtgagacttcaatatgttttttttttggattttgagtttggcttcttctattactgaattggaggagtaagagaagaaatgaaatattgaaagactttgcatgattagattattactgttctttcctcataggtgtaagccaatgaaagatttaaggtggagaaaacttgtagtctaaaaactcgtgtttttgtctctgatgtcagtagtagagaagcagagcaagcttatttccctattttggaatgaatgtttaagtaccagttaactattttttcaggtgcc

SEQ ID NO: 38549 - DNA, 521 bp, Arabidopsis lyrata
  Intron number 1 from transcript 496795 (locus 496795) deri ved from phytozome v7.0 (chr-ID scaffold_8; pos 22041981 t o 22042501)
ctccgatccatcgtcccaaaaatcagcaaggtaaataaaaattctgaccttttttttttcgaaaccttttaagataattgtaatcagaatcagaatggtcaaaatcaacaaaagattgatcatattttaatgagtaggttaatgtattattatatgtgttcataaagaaaataacctttttaatcttcttgatttaccccaaaatctaaccctagctatcggtttttgtgttctttgaagattttattgaacgattaattcaaaaaaattgtctaagaaaaaaccacaaaagagtcgtccttttttaatgagtgaattgattatagattgatttcaaattcagccttttgtattttaatctttttaacattatgtgtttgtttcttcttgtttgaaaaccttttttttcaagattgtttaattattgcgttcttacttttaagggaatctacagaaccggttgaaaagtggataaatcatttaaattaaaataatgattattggtatgttcaaaaaatcag

SEQ ID NO: 38550 - DNA, 302 bp, Arabidopsis lyrata
  Intron number 1 from transcript 936257 (locus 936257) deri ved from phytozome v7.0 (chr-ID scaffold_5; pos 2435688 to 2435989)
ccaggacttaggaaataccgaaaaccccagaccaagtaagttattttcttcttgatcattttgtgctaagattcgaaaaactcatataaacagagctttttcaaaaactatttttgatatatttacaaatttgttatacatagattaaaattaatgtcccattttcataaatttgctaacttcattaaatttgctaaattcattaaatttaactttattaaatctcaaaatcaagaacccaattcacaaattgattcattttttcaggtaaagttcaagaactgagcgtgtacgaaatcaac

SEQ ID NO: 38551 - DNA, 294 bp, Arabidopsis lyrata
  Intron number 1 from transcript 479854 (locus 479854) deri ved from phytozome v7.0 (chr-ID scaffold_3; pos 10732098 t o 10732391)
cagaagcttcaccggagatcagagacgcgaaagtaaattgtttcttctctttcgagctgacttagaattcgtaaagttcttctccaaagattaggatctttgaggaacaacaatacatggttgattgatttattgttttttatttgttttcagatctaatcttatatcatatagttttcatattgtttttgattaactcttagtcttatgatttgatgtgtttgaactgatttcatttttggttatatgaattttgaaggtgaacattccaaagacaaagaacacttactgtaa

SEQ ID NO: 38552 - DNA, 565 bp, Arabidopsis lyrata
  Intron number 2 from transcript 947710 (locus 947710) deri ved from phytozome v7.0 (chr-ID scaffold_7; pos 22258575 t o 22259139)
atcaaatagcgataccactgctactattggtgaaggtactgtgctcttttttgcccccttatagtgttactgtaaaaacacctttattcattctgctttacagtttctgggattttaaattgcataagcttttgagttttttgtatgtaataatcaattttcacgaaatgtcatgtaacactaaaggctctgcgaatagttgtcgtcgtactttcctcgtattagcctctgtttttgtttcgtactgctaacatttatcctgttattttttgatatcttccgttctatgctgactgtgctataaaacaagggatgtcatactttttgattatagggaccactcctgttgatgtgtcttcttcacaggctcaatctgaaagtacgatataaagactcctcttttaactttgtttccaacatcagcttattttttctttttcagtttatatctttcatctatgacgtatctacattatagaaatgctgtttttagatcatgtatttatatgtccttccttttttctctaaaggctcttctccacgttcacccacctccacgtcaggg

SEQ ID NO: 38553 - DNA, 363 bp, Arabidopsis lyrata
  Intron number 4 from transcript 313246 (locus 313246) deri ved from phytozome v7.0 (chr-ID scaffold_1; pos 10555923 t o 10556285)
ttgaagcatcttgctgatttaaaggttagagtcttttctttatcttttttgttttattttctctatttttgaggctagctctctgtttaacttggtacgaaatgttctgctaaatgaattgaaatttttaacaatatgtactcatgtaggtgccctattttaaggagagaccgtcatttaatgaattggcattatatataaccaatttaacgaaaagacgtatatcggatatactagaaaaggtttggaattcatatgttcttctttgtttctttacatatgtaaatctttccgtggccattttctgattttcttcccatgtttgcagagcctacaaaaggaaagtgaagcagaactgaaacg

SEQ ID NO: 38554 - DNA, 428 bp, Arabidopsis lyrata
  Intron number 1 from transcript 348800 (locus 348800) deri ved from phytozome v7.0 (chr-ID scaffold_5; pos 18304134 t o 18304561)
attcctccaaaagtcggttctacggtaggatctatctctatctcttcctcgatattgtttattgcaattacgtgttttgattcgtttattaacttattcgatttgtgatcgtccttctcctttaagcgttagagttgttgttctttagttgttgatcgatgatatatatgtgtgattaaaaacagattagatctgatgattaagtgttcatcaccagttttagattcgtgggaatttcatctgatcgatctgtcgtagtaacttagcggatctaatcgatatgtcatcgtaaattaatggatctaacaagttgtattcatgatctaaagttttcagtgtcgtttttttttgtcttaattgcttacacgtttcctgtttaataaaacttggcaggggcgaaaacaattgtcttctggcaattcgaggaa

SEQ ID NO: 38555 - DNA, 657 bp, Arabidopsis lyrata
  Intron number 6 from transcript 480532 (locus 480532) deri ved from phytozome v7.0 (chr-ID scaffold_3; pos 21107451 t o 21108107)
gtggtgttccaaataagagaacacgtacttctgtaattctgattattttttgacataacatcattttctgcattagccgtatggagttgttatcttggttcgtacttgaacaaacgtcttacatgctataatgcagtcttctgtttgcatgttattgtgcatgcttctgatcaccgtaaaggtgcatcttttgaacaagtttttgtgaataaattggatagtggttacaatttgtagttttagatataatatagaagcttcgtcatttaaggcaactttagctaccaaaagtagtattttttatatatgtcggattgcatgcaaatttaagtgttatatcaaggaatgatatatcatagcatttgtcttcttatatttaaaaggtcctcaactatttttgcttttacgcttgttgtattatcacaatactgttatgacctgaatatatttgataatatgaaactaactgttattttaaaaagttttgataaaagtttatagaaatttgcatatttgatagtatgaaactaactgttatttttttaaaagtttatagaaatttgcgtctgatagtaatttcaaatctcagtttacttataactagtatgtgcgtcctattgcttcaggaaaccttaatctctttattttttggttcag

SEQ ID NO: 38556 - DNA, 631 bp, Arabidopsis lyrata
  Intron number 2 from transcript 484722 (locus 484722) deri ved from phytozome v7.0 (chr-ID scaffold_5; pos 6492283 to 6492913)
ctgccatatttttttcaattttttattctgtttcggtgtataagcaactgaatttgcattttgttagaaatgttattcaagtatgcattgtgattgatttttagaatctcattatttcaaaatccaatctagcttcgacatgctaatagataataatatgtattgtagattctctcttgttatgtgatcagagacgttatgtcgtgccatgaaatcttattgccgaaagctcctctttgcttgtttgtcgttgtaaggagtaattgttgattcaacaacctaatacattatttctttgatgcctaaagtctgttcttttaagtagaatctttaaacatgttcaaagtttgaattggtgattttgtgagttgttatttttgactttagattggttattcgttgttgaaatatcttgctttctcatgagattttcgctgctctaaatatctcacgtaacgcacatagatcccaaatatacaatttgatcatgtcttacttctagttctccaagcataatcgtgtgaagtgcatactatttatcgtgatcgttctcttgatatggtttcttctgctttagtataaacaaaattttgaattgtaatctatttctacattatatgggagagctagg

SEQ ID NO: 38557 - DNA, 612 bp, Arabidopsis lyrata
  Intron number 3 from transcript 479182 (locus 479182) deri ved from phytozome v7.0 (chr-ID scaffold_3; pos 7296845 to 7297456)
ccttcgctttcgtttcaaggtaacacaaaaaagttcaaattcttttctcttttattcacaccaatttcgttcacttttttttttttttaatcctcagtttttctaaatcgtctacagtttctaatctgtgtgactgttctaaatcaatcttcattcatcatttgaattctgatcactcatcagtattttcgatattaatttctgcgttttcgaattcgattcgataagaatatttatttcatttttattaaaaaaaataattatagtatatgtttttcccctaagtcacggcattggaaaaaaggaaaaacacagctgttccttgcttcatgcccgagattaagcaaaaataaatatattttttttcctttcgaatcaatgcactatataaaattacctacttttgacagtatctgaattaaacatcaaccaaacttcaaactctcctctttaatcctcttctttttgtattcccaaccacgtgatttttgattcggtaattatccataatctacactatgattaagcattaaaagttctcttctttatcgattggtgaaaaaaattaaagtttgtgattttggcttttgcagattatttctagagacgagg

SEQ ID NO: 38558 - DNA, 594 bp, Arabidopsis lyrata
  Intron number 2 from transcript 491048 (locus 491048) deri ved from phytozome v7.0 (chr-ID scaffold_7; pos 2099429 to 2100022)
cacttgtcagcgatactattggtgtctcttttcctgtaagcttctcgtttcgattcggatgcttgtgttttgttgggctccatgaaagttatatatttatgactcttattaactctccaagcagtgaaattgtaccaaattgctactatcatatatatgctttcagaatcatctctcttattcagtgaacatgttctcaacccaactttgatcttttaggatttgtcaaaatcagaaattgagatatatatatatatatatatatatatatatatatatatatatatatatatatatatatatatagcttgattctttacttgtttttgtcatttgcttcataccaaataaattttaaaatgaatttattcttgttgttgatttgggattcactgatagaataatgattggtcggctgttttcttcttaatgatattcttcttcttctttttggatttcacttcatgatcacgattcaatgttaagacttggttttgcttcttaatcatattcttcctgtttcttttagctttcactttatgttcacgattctttgttaaggatttttgcttctcttaacacgctagatcaaag

SEQ ID NO: 38559 - DNA, 551 bp, Arabidopsis lyrata
  Intron number 1 from transcript 325332 (locus 325332) deri ved from phytozome v7.0 (chr-ID scaffold_6; pos 2732127 to 2732677)
agggtagaagagtttatagcaaagattaacaatgaatggaggcatgagaagcttagggctttgaattcagtttattaatatgtttaaacaaaaaaatggattcactctaattgcaatgataatgattttgtatgaacatgtacatactttttaaccaatgtatataacataatttcgcagtgagtgtattttctagagatgttgtatgatactgagtggctcgtgcctctttgatcttataatatattggttctttactttctgcaaaaagcttttgattcttctttacatgaaaaaggaattgatgctactactaatcatcaccattaaacaatacaaaactactagtagttagttacttagttacttcatacctgtatttagcaaacaataatatcctgttatttttctgcatttaaacaccgtcgtttcgtaaccgcgccatctaaatttgctcctagaagttttccagagatgggagagagaacaaaaatcgaggttttgatttattctgattgatgctcgatctcaagatgttcttccccgagaca

SEQ ID NO: 38560 - DNA, 438 bp, Arabidopsis lyrata
  Intron number 1 from transcript 492720 (locus 492720) deri ved from phytozome v7.0 (chr-ID scaffold_7; pos 9203381 to 9203818 reverse strand)
gaaggttggagaccaggtagaccctcgattcatgtgtcattttcgtttctggaaattgggaaaatcttgtttaaggcttataataatactcagttttggggttttagggtttggtgtccctgtgttaagttccgtggaatcttcgagcttggattaagacctgtgtgaatatactgcttagtgatcaactcatgttcttattgatttaggattcagaacatttgaattataattaattttgtttcagtttggttgcaatttgttttcatttataagctgttggtggcttagtacagttttgtgtttgattggctttagtttctctttaggcttattaggccagtaaattacctttgaagtataaagttgctgtcttggattaaagctctgaccgtctgtctttatcttaggtgtgtgctcttctttctggaggaggtt

SEQ ID NO: 38561 - DNA, 631 bp, Arabidopsis lyrata
  Intron number 2 from transcript 887450 (locus 887450) deri ved from phytozome v7.0 (chr-ID scaffold_96; pos 11874 to 12504)
ctattctatttctctcgccgttgctctcattatcggtataccttctttgttatggtttataccctttttatgttactctataacacattaactagaagtctaccctttttgcgttttactctttctttggtttctttttatttcctgtttttttttctctttcctatattttttttagtttgatttttgttcctaatgttccacacgatattggatgtttcttaaatcaaacttaattatccccatttattttcattaaaaaagtttagtattgtgtataataaaaactcaattaagaaatgtgttactattccaagtgatgagcacaaacgttctaatatcatgtaatattagtgcaatataattgtgggagagaatattttagatcattcttcttaattatccataaagtaaaacgacgaataatacagtattctaagcatattcaaactacatcttcctccaaacagtccaatcaaacaaaagacaaaaaagggtgatctaaaaaaccagatagacctaagttctttcccaagtaatatagcagtaacgtacgaggtggatttttaactccttggacttggtctaattaatagactcaacctcgttgaatcctatcaacagatactta

SEQ ID NO: 38562 - DNA, 827 bp, Arabidopsis lyrata
  Intron number 1 from transcript 943324 (locus 943324) deri ved from phytozome v7.0 (chr-ID scaffold_6; pos 22947919 t o 22948745 reverse strand)
atctcctcgactacatcgcagataggttacctatcttctctctatctcttagttaccactcgtacgcactctacgtttgagttgtttcatgggaatctccaaatgctgttttatttagagaaattgatggctttagacacaaaatatgtgtcggtatatattttgagtgagaaaataatatctgaagtttgtttgttcctttttctcgtgaggattagggcaataataatatcgttcgttgatttatatttttttgtttatcacgatttaattgaaactctactcttgtcttttttttctttttttttcttaatactggatctgctatgaatgaactttggatattcaattactcttactcgagaatttatgtcttgcaacttaaagttttcttttaatatactctaccttagggaatcctatcacaggataacaatgttgatgcctttataatgttttacaagtcaaaaagttttatttgaagtgactttatatgacgctgttataataatccttttagttctcacattgctcgatcgagtcttgtttttgtttcacaccgttaccgtcatcatacttaattacttgtcctttgacatggttaatgaaacaggtagttattaggtactaacttaaccatttaccaaaaaaaaaaaaaaaaagtggttaggtagttattacttattagcattataagaagattataagcttgtaccactcttatcatatcattagagtttgaacttttaggtcccaattgaacaaatggttttctcttcttatttactatttgcagatcaaggaatctgagaagtcttggacttgga

SEQ ID NO: 38563 - DNA, 483 bp, Arabidopsis lyrata
  Intron number 1 from transcript 477023 (locus 477023) deri ved from phytozome v7.0 (chr-ID scaffold_2; pos 18283602 t o 18284084)
aaaccgaaggttcatcgctcatcaaaaatccccaggtaccccattgcgtctcatctcgatttttgaatcccgatcatgtccttttcgtttcgtattgaaggtgttcgaccaaatttcccacagagtataaccgaaacattgacatttacgtgaaaaaaggatttcgtttttgtatttttatggtgccaaatgttagttataaagataacggtgaagtagactagattaagtagcaacttttctatgaacattttagtttcttcttttggtctacgcaaagcttacagatttattgagaattttgaaattcgtatcagcagtgtttactcaaaatatgtatgcaaataagtaactaagaaattgcttagctgaggatcctctctcgttgttattgttctagttggcttctgatggaagtgggatttttctgttttgttttgtttcacaggttcttaaatatctggaaagcaggtgcaaagtaca

SEQ ID NO: 38564 - DNA, 312 bp, Arabidopsis lyrata
  Intron number 2 from transcript 471558 (locus 471558) deri ved from phytozome v7.0 (chr-ID scaffold_1; pos 5864523 to 5864834 reverse strand)
tcttctcctggttagttttctttattttgatatcttttttataattggtctcaagtatttcacgttttggttaccaaatgattagagttttggttaaaaaacaatgcttaattgtgttttcaagattttctttcttatctttcacgtttcaaaaaataattcaaatggctacatttgttgcgttttgatgttaccgatgtttgttcatttaaaataattcaaaatttcagaccaagtaggcaacaaaatcaagaaaataaaatctcattcgtttttttttgctatttcttatgtgaagggtcttgaagatac

SEQ ID NO: 38565 - DNA, 467 bp, Arabidopsis lyrata
  Intron number 3 from transcript 493171 (locus 493171) deri ved from phytozome v7.0 (chr-ID scaffold_7; pos 11690740 t o 11691206 reverse strand)
cacgaatccaacactctctccttcacacctccaaggttcaagtgttttcttacagcttcgtgttataaaaagtttgatacttttgctggttaagttcgatttctgttttagatcaattgttcgaggtcttggcgtagaggattgattttgagattatgttattgaaaagttaggattacttgaattagtgtttaatttgagagggtttctggctcatgtcatgcaaaaagctcttaacttttgatcaattaggtggctgacataaccatggaagcattcatgttcagttctgctgatataggctctttctgagagttctccctttgtataataattagattggttttctgatcaaatttggaattgggcattttgcatttgcatcttcattaagtgtttaagcagaaaatttatgattctgttgttttgtagacttgcctggtttcacacgaagtgtatacaaacga

SEQ ID NO: 38566 - DNA, 443 bp, Arabidopsis lyrata
  Intron number 1 from transcript 342859 (locus 342859) deri ved from phytozome v7.0 (chr-ID scaffold_3; pos 14056103 t o 14056545)
cctcgctgaaaaatcggcagagtataaaaacagtacgtaataaattcagactagtctgattattgttcgtataaagttatataatactcaaaatcattgtatatttgtaacataacgaccgtgaaagcatgcaacgccatttgagtattcttgaaagttgaaacctatttattattcgatagatcactttaaaagtttgtttatgggtcatgactatctcatcttcttatctctactatgcagaaaattttcttttattgtgaaaagacctaatccttattcacaaagcttcaaataattttggtctgctttagctacaaaaactcatagtactagttgtaacaacgtttatttttttgaatatatcattaagaaaaattacgaacatatatccattttgactaacagggggagacgaagtaaagcaaactgagcagtttgga

SEQ ID NO: 38567 - DNA, 536 bp, Arabidopsis lyrata
  Intron number 1 from transcript 927711 (locus 927711) deri ved from phytozome v7.0 (chr-ID scaffold_3; pos 565729 to 566264)
acaagaagaatcaagtcttcttcaataaagctcaggtttccaaatttctcttctttatgaatatttttctcttgtttcttaagtttgaagccgagatatattatcatcaattggtggttctgttccattgtattggctgctttgatttgtaatcaaatgttgtagctttgttaagaccactgaacattgatttacatcaattagctgatagcttattggcttgttctggaacaagaatttggttaacctgtcagttattgttttaaagtttggatttttattctttgaggaaccaaaagtatcaaactttttggatggaatatgattgttagccagtttcattgtaagtttatgctgagaattcttatctttcactgagagatatttgtgaaacttatccttcacactgccaatttaagtagctgacttccggtcttgatagtaatgtgtttgtttgaagctacatgggatctgaacgtgaacctgatctttttcccttcatgtctttatcgaatgattaggtgaacaatagagac

SEQ ID NO: 38568 - DNA, 506 bp, Arabidopsis lyrata
  Intron number 2 from transcript 942013 (locus 942013) deri ved from phytozome v7.0 (chr-ID scaffold_6; pos 10759778 t o 10760283 reverse strand)
tcatcatctcatcatccctttcgtctccattagaggtcaatcttttaaactcaaagattccacttttgttttactctgtttttgcttatatgtgtcaatgataagtgagagtcaaagtgatgatctttgttgtgttgagtaataatagagagattgaatgagaagatagaggaaacgtttgggtgagagtttgtgctttttattgaattcagcagtccatcgatggaaaaagtgacgtttggtgcttctacattttatgcattctcttactgatcagtatattggttctatataagttaacagattcattcgatactgatatgtcaccttgttatgcgcagtttgtctcaatgaaaagtcatatcctgttcttagttccatactcttgtgaacaagatctctggatacatgctatccaaaatcgagtcaaagtctaagagacactgaaccagatgatggaatttatacggcttattattttaggggtagatttgattggcccaaca

SEQ ID NO: 38569 - DNA, 358 bp, Arabidopsis lyrata
  Intron number 1 from transcript 942013 (locus 942013) deri ved from phytozome v7.0 (chr-ID scaffold_6; pos 10760285 t o 10760642 reverse strand)
tttgaaaggaagctgagaattgcaactgcttacaagttaagactcactcactctccatttccatatttcttcatcaatcgagcttaattcaactttgtcgccttttaattttgtcactttgaagtgtttagagttgtggatttgatgttcttgttattgattcattgattcaaacgtttgaacaaattatgtttggtagtgtatgatgagaaacatacagatctattgattatgggactgtgacattgagattattagattttcgattgtcaatgggaatactaaattgtatctttcataaacatcgttggctcttatgttagttccactaatctctttcacctcattgccaccaatt

SEQ ID NO: 38570 - DNA, 682 bp, Arabidopsis lyrata
  Intron number 1 from transcript 493082 (locus 493082) deri ved from phytozome v7.0 (chr-ID scaffold_7; pos 11192414 t o 11193095 reverse strand)
tccgtgaaatcaaacctaagaacagaagaatcgtacttttttaaacaataccctgtttctacttcttctctgttcttcaaatgtgcaatggtttttgtgtgttttagattctgggtttgggttttttgattgaatttgaaagttaaaaacttgaaaatggcgaaaagttgtaatcttttttgtttttttcttttcaatttaaaaatgggttcttcattgaagtgctctgttttttttttacctaacaaaaagatttgatttttgatattgaagaatcagaacaatgcttcttcttctttttttctctcagggtcgattccgttagttaatttttactttatttggtgtcacgaattggtacaatatatgctttttttttcatgagataccaactttatacttttaaactcttagaaatccagtgaaatagttgaaacacgaatctgaaaaagaaaatggaacagaatcaaatttcaaacttctatcacaagatgaatttaaagaattgaaataaagagttttatgaaggtttaagagatatatatgtctacatgttttcttgaggtatatgttgattatataccaaatggtaatgttgattttatgagatagatgatgaaaattgaataatattggttttggtgtagggagctggtggaccggaggaggaagagaaccggtg

SEQ ID NO: 38571 - DNA, 488 bp, Arabidopsis lyrata
  Intron number 2 from transcript 893437 (locus 893437) deri ved from phytozome v7.0 (chr-ID scaffold_6; pos 6225494 to 6225981)
tttacaatactgctgagctatttccttccagggaggtacttgtttgttctctatttccccttaattagtttcttctaatcacataatgatacaaaaagaaaaacactttttaggaacttatattgaagttttttttttttaaatttgaacttatgagatatattcatggaaaatactccgtacgatttaatttctgggtgtatttttttgtcatttcatttacaacgtaaacaagatgtgcaacaaaacaatttttcgttgcaaaaataccacaagatgtttggaaattttaattagaaataaatttttttaaaaaaaagtcaaaagagactttaagttttgaactgcatattttgtggtcgataaattgttgaaaggagaattaacacaattcattatctagctcatttcaaggttaatgagattgcaatattaaatttgaaatggaaaaaatacaggaagacattgtgaggaagacgatagagctg

SEQ ID NO: 38572 - DNA, 527 bp, Arabidopsis lyrata
  Intron number 1 from transcript 495588 (locus 495588) deri ved from phytozome v7.0 (chr-ID scaffold_8; pos 16882874 t o 16883400)
ctatcggtgagtttttttatctgtatgaaatgaaattaatagtgttaactggtgttatgttatggtaggcaacgattggtttgatttagatagcgtaacgtgctggccattaaaattaaatattttcactcatttatacagtaactaaaaaaaattgtcaggcgttggaatataaatcaacacgtagataatattacacgtagttctaacaattgaattagttgtggattttgagcccaaaaaaaatatatatagttgtggacgtcaatgtttgaaaaactgttttttttttcagcagaattatttctaaaaacgatgtactagttgtaaaaacgtactatatttttttagaattttatttaacattggaaagaaaaaaactgttttttttttcttttatttaagataactcgaacttgttgctatgacatatgagaatttctactagtatttttcagaagaaatttaatttgttttttttttgttgcttagctgagaaatttggtttaccgttaccgcctccgtat

SEQ ID NO: 38573 - DNA, 914 bp, Arabidopsis lyrata
  Intron number 1 from transcript 896246 (locus 896246) deri ved from phytozome v7.0 (chr-ID scaffold_5; pos 1462556 to 1463469 reverse strand)
taaaggcaaacactttagagccggcgacgttcttggtatacttcacatccttttaattaatcaagcttcatattatattatcttgttacacttacaccacaaacaattaagttttctaatcttcatatccactagtgatgtatacatattatcgctggttcttagtatgggcaaaggtgtgtttttgtataaagtacacgacaaatcaaacttttcttatattttaaggttacagatattataaagaaatgtttagcatatataattagggtcaatattttaaatagtgtctatcttttactatgattgagcctgtgatatcttttactatattattgatatagatatgtatgtatttttgttttgccaatcgtatagatatgtatgtatacatcttccatttttctagtttcgattatttttaatcgctgatttaatttatgtgtataccgtatatttcacccaaaaaaaatgtgtataccgaatactgttacatgcgatatgttgtaccatataatattctacagaatgtaaagagaaaattcatgtgcgtttacaattaataaaaatatgaaaaatagtgatgaatcaaaattgttttcgcatgaagaaatatctcaaccaacgttatatgtagacttatgtatttaattagtgaatactattgtcgttaagtactaattcaaatcatttatttgattcaagtgttaatatgattaaatgaatactattgtcgtggttaagtacttattattaagtggtgttgtgttattctcatttatcacaagtaaagtttttggtcaatatgccatgcacatacgaaatcgtgttttagtgtcggtatacggaatcgtaattaacttagcattttataatttccgaaatttgctgcagtgtttaactataatccgagg

SEQ ID NO: 38574 - DNA, 651 bp, Arabidopsis lyrata
  Intron number 1 from transcript 487414 (locus 487414) deri ved from phytozome v7.0 (chr-ID scaffold_6; pos 2258595 to 2259245)
acaacaaatctgattagctaccagctcaatctctggtaagccaaagtttagtttctcacatcgttgctttttccgcctttttttcttgctcgatggtttgtccttcttaatgttgtgattcgccaagtggtgaagatcgatgataagtcttattcatgtttgtttgcgctaaatgattgaaatacgaaatctaggttttctatgtgttcatttctccttactatttccgttttctgtgttctagtggttatgattgtccttgcacagtgtcgagaatggttaagttgatttagagtaccatttctattgtctacatacttcgtttgttgtttcatcaacacattttccttgcgctttcataaaatcagataggatttagctgtggcgaaatgatactgtaaagtctacgcttaatatcttcttagagttttggatcttgtccatcttttctgctggaaattagcaaatgttgtctgacgtgccaagcgtatagcagcatttgataatgtgtggtctcacttagagttgtgtgtaagtccggcgttttgtatgactagtgtgagtatttacatgagtggtttggcaactgaagtttgatttttgaccttttaaacagaaatcaaccgagtactgagctggagtaaggtgata

SEQ ID NO: 38575 - DNA, 504 bp, Arabidopsis lyrata
  Intron number 2 from transcript 487414 (locus 487414) deri ved from phytozome v7.0 (chr-ID scaffold_6; pos 2259272 to 2259775)
cagagttaggaacttatctctgccagtaggcttttacgtatttttcttatactatttgtgtactctctctctctctctctctcttgcgcttctttgctgtatgagatctacatgatatttactggtagctcacttgtgttgtctgtcgtaactgatactgcacttttgtcattgttaatgttgttccatctctgtttggatgaatagtgggttgcgtttattgtggaaatgtatcatatgtgtttttttttctcctgcaacatgttttgacttattgtgatcctaaattttcaatccagttctagaaattttgattgaaaaacaatgaaggctctctgggaaaatattattgtaatgattcattcccgtcatttgttgccacttaacagttcttaaatcagaatactttgtattaaacctgaaatcttgccgaaatattcttgttaaaacggtagtggtatctatggttttctacctttttggtcagattctgctttgttacca

SEQ ID NO: 38576 - DNA, 507 bp, Arabidopsis lyrata
  Intron number 5 from transcript 487414 (locus 487414) deri ved from phytozome v7.0 (chr-ID scaffold_6; pos 2260502 to 2261008)
aatcaggttagtgatgtattgtggttgattttccatgtcattgccatgtcttaacataggctggaataactctcttttaagtttgagtttcttggcatggattgctcattgcttagagtcatggtttcatatattagcattgacttgcgtcatctttttgtttctttttgatctagagtatcagtctgttatagatacaaatgagagttttgtgctgtatctaaataattgtctgttttcaccattcctttattttcttattaaaaacatttaagatggctgttttgttagactgggcagaattatatatgtgcacagtgtacatgtttttagatagatagcgtgtcacaaaaaatatattttcgtgggtattgatttctaactttttattttctactgtgcttcaacttaccaggttttttctttgaaatgattattgacatttcttcatctttttttgctcaattattagcctaatccaggactgccatctacacatcaccggcg

SEQ ID NO: 38577 - DNA, 515 bp, Arabidopsis lyrata
  Intron number 1 from transcript 487067 (locus 487067) deri ved from phytozome v7.0 (chr-ID scaffold_6; pos 780562 to 781076)
caatctaacgattgggtcaatctggtgaaactttaaggtgtgattaccagtgtgttttttttttcttcccttgattttattttgatcatgatcgttgtttcttctatttgtgttgttctaagttgatcgttattgctatttcaaatctgttatcgattgttatagaatttgtttcctgtgttttttttgttcgttctcgatagtgaagtctgtgtgtgtgtgtgtttggtttgattttctttgtgatattgatcgtctttgtctgtgtagattctgatgagtaataatggtgtttataagaattgcaggaaaaaaaaaccctaatttttgtctctgtttatttccactgattttgtgggtagtgattgactcgtagttgtaccttctcttatctttttttttttttttttatggtttgtgtataagtgtgaagacatgttgatatataaagacttgaactttgatcatttttttgattacaggttgagatcagataatttaattggaagacttaa

SEQ ID NO: 38578 - DNA, 384 bp, Arabidopsis lyrata
  Intron number 2 from transcript 907996 (locus 907996) deri ved from phytozome v7.0 (chr-ID scaffold_2; pos 9898728 to 9899111 reverse strand)
gattctgtggcggtcgttggctatccagaaggtagttttaatgatttttaagatgtttgttaatgaagacgaattttttatgtttcgattgatagatttttgaatatcttaccaagattggttagcagctatgttgggtatacataaacatatttttttttaaaaatccatgatactttgaattatgaatggccttgagaaaaggattaatatcttgcattgcattaattacgtagaaattattgttatggggaatatgtgataggtggtgagtcaaaacaatttctcttctgtgtacttgtaaataaatggttagttagttacgtacctgctcaaatgttgaatgcaggtggtgatagtatatccgttacgcaaggtgttgtg

SEQ ID NO: 38579 - DNA, 771 bp, Arabidopsis lyrata
  Intron number 2 from transcript 492505 (locus 492505) deri ved from phytozome v7.0 (chr-ID scaffold_7; pos 7981302 to 7982072)
tttctcctggattgaagaaaggtaataaaccctttgctcactttttaaaattgagaaatagaggagtacatgagttagttaaggtgctgacatcggcatcactgttcttactatgagtttctggatagcaatcataggacttggagggcaatcaacaaaatagatgagaaatgtggttgatgattttgaagagagatagtgatcaaacatgtggtttttgacttctggttgctgagaacgaatagctatttagtcctgtacggttgagtagctatgctaaaagcaggattaatacaatggtttcttgactcctgaagtagttaaggccacacattacttgacatgattggagttcattgagcttctaatctttagagaagtgatactactagggtttcagttaacctttcttggatcagactgagctaagctttgtcgatgacagacaagtaatcatcacttggaagtgacactatgtttgatgttttacgaaactttaactcgactgaaaagaaatctatgtgcaggttttatgggcaatttctggtttgcattatatatcttagtgtaaaatgaccccagctttgtttagtggcttttatcttcctctggctacccttttttgggatctttaagtttcattccctattactctcaaccgagattttttagatcgcagcatctagtttctcgttagatttcgatattgatcaccacttatcaatcttttttgcaggagcatctctgaatacaataaaaagaacggtaaag

SEQ ID NO: 38580 - DNA, 960 bp, Arabidopsis lyrata
  Intron number 4 from transcript 321431 (locus 321431) deri ved from phytozome v7.0 (chr-ID scaffold_4; pos 17807067 t o 17808026)
tacaaatactggcctaagaatcctctagattacaggtactttcaaatctaatcaatccattcattatatatcaattgtgttgagaaaagatctcattttatgagctatgagctagtcagaagcatgcatcatacgggctgcggtattcacatacgggctgcagcgttccaggagccgacacgtggagtgctatttggccgtccacgtggctagtctgacgcaaaccgatagtctaacacgtgaaatcctgctctgtcgggtatctgatagctaacacgtggacccttgcccggttataaaaaaaaaaaaaaaaaaagaagcatgcatcatatgtttttgagaagggcatttgcccaatgccacaagaaaccacagaatttataaggccacaatttagaaaaaaaaactaggcttacgtatttagtttaaaatgtgtttgagcactttattttaaaagtacatgataatatgattttaattcttattttatgaaaaattctccgattgcctaatatatttttataaataaggtacaattattaatgaaataaatgcgatatttttgaactaaaagttctaaaataatttttgccactaatggaagtgtttagttttcgtaaacaatggaagtttgttattcaaactcttgaatcgattatcggatattgcttaggattccgattttagttgcttatgcaggaagaaaattttaaaagttgaaattgatagtcttactttctagcaactatatcacaaaacaggttgaaataatgtatcacaactatgtcaatttgatgtatgatttattagaaaaagggaaaaaaaaattctaaaaaggaccacattttttattcgccatagcctatgtgagccaaagcactgacacttgagctaatatgtaaaagtacgtatgaattcactgttgttaactgatttcatatttttggttcagggaagcaa

SEQ ID NO: 38581 - DNA, 413 bp, Arabidopsis lyrata
  Intron number 3 from transcript 488075 (locus 488075) deri ved from phytozome v7.0 (chr-ID scaffold_6; pos 4995611 to 4996023 reverse strand)
cttactggtacgtctgatcgattcttggtttattcagagtatatcctttttcttttatatgagcaatgatgctgatttgatgatctgattttgcctgtatataagtcttttctatgacattcttatcaatatttagtctgatactgaggaagttactgtttgtggtttaagacatttgttttgttagatcagttttagttctcagctcagttttcttaacaatcgactttggccttgctttaatctgtagaccttctattacgtttttctgtttctttcgtttgatcagaatatgtttgattagaaatgaaataggacagatactgatatttctctttccatttttaagaggaatgattcatttctatctatatatagtgtgacgtgcatactccgctgggcaagttacaaag

SEQ ID NO: 38582 - DNA, 689 bp, Arabidopsis lyrata
  Intron number 1 from transcript 313108 (locus 313108) deri ved from phytozome v7.0 (chr-ID scaffold_1; pos 9752047 to 9752735)
acgagagaagctcctggattgtacgttattttatattttgttttatgaaacttttttgtttggataatctttttaaagcatttttactgttcttttcatttacgttttaatctttcaaatgtgatgttcttgtctgatgcacatttatgaaattctttttggtatttttcttagtttaaattttctaatttgtattttttgtgattaaatgtctaattcctttatacgcacgccgtatataacttataattcattttcctacatcgattcatgtgtttataatttatttagcttagatattagatgttggatcatcatcatacgagcacatatatattgtttttatttataacaaaagtataacaagtgttagtggctagctttatggtaaagatcatcatgggacaagacataaactcgtttgtttctaaagtttgattttcactagaacggtattcactttcatttggttagtagaaattctgatcctttaggtccattaaattaatttgaaaaatgggctacgtaatatatattaatccagtctaaatattaagagttgaaatctatttattgatcggcttcaaaatttagtaaaacggtgctgttttgttaaattttggattttaggctcccttttataatagttttcttcttggagttaggcacgtcatccgtccgcattagat

SEQ ID NO: 38583 - DNA, 406 bp, Arabidopsis lyrata
  Intron number 2 from transcript 487455 (locus 487455) deri ved from phytozome v7.0 (chr-ID scaffold_6; pos 2429424 to 2429829)
caaggacttggtgtcgagattggtaacgcttttttttttaaatttgctcattcttttcgctgttaaatccgcttgcatgttatttctgtgcttgccctgctggttgttaaagagcttcaagcttgagcaaacgtattcctgattaagctgtttgattttgtgtgtatacttgaacttgaacttgaacttgaacttgagtccgtaatattggtatttaaattgttattcctgattccctgatgagttagtgtgacattatatgatggaagggtttattcactagatttgtgatgaactaatgactggtatagctctttattctcttcgttatctgcttctttctgatggatgattttgtttttcttatgtagccaagaatattatcctagctggtgtgaagtcagtg

SEQ ID NO: 38584 - DNA, 346 bp, Arabidopsis lyrata
  Intron number 2 from transcript 493832 (locus 493832) deri ved from phytozome v7.0 (chr-ID scaffold_7; pos 21439992 t o 21440337)
tactcacaatcgtacacttccaccaccagatcaaggtgaaacaaaattgcagttttttatttattttaaatcttgcgtgttcttcggctagagattttagaactttgttacattttgtagtctaaaattggccttttaaagttgtgatcttggctagagactgatcttgaacttgctttgattgagcaatctagttactgtctttaccatggatcacttcttagaatctctaggcaaattgttgttaatcggattcaacagtctccaattttcacgggtcacgtctatgtttttgtttgttttggttgtagtgataactacagaagtgaaaaacatacttatacgc

SEQ ID NO: 38585 - DNA, 308 bp, Arabidopsis lyrata
  Intron number 2 from transcript 495675 (locus 495675) deri ved from phytozome v7.0 (chr-ID scaffold_8; pos 17229758 t o 17230065)
ttgctcacacaaaccactcaggtatatatttacaaaaatatatatctttttgtttttaatgggtggatataacagtagctacacaaaaacctattatcttcatgattcttgattatttttatgaatcttgattacgttcttgcagttataagttttttaaataatattttgtgggtgattcttgattattttgattcttgattagttttctcgcattttaaaaattaattttgttgttgtgggtaacagtcatttaaatacactcttaacaatggcttaagaaacattttctttgcagttgttgggat

SEQ ID NO: 38586 - DNA, 673 bp, Arabidopsis lyrata
  Intron number 1 from transcript 484750 (locus 484750) deri ved from phytozome v7.0 (chr-ID scaffold_5; pos 6995347 to 6996019 reverse strand)
ccattgaagctgccaaatctttaccaacttctcacgtaagttatctaaatttcaaattcctctgtttttcttctttgctctgtttttatttttcttatattaatcgtattagaatctttgaatttaattaagtcataatagttttttcttaaaacgaattatttgataatgggaaacgtaattatcaaatttaggcaacttgtttggttggacagccaaatctccgtactctgacaaagtacacttgcatagatatgtacattttaattatatctatgtatattcatattaaattggttaaattactcttacgcgttttacaagttgtattttcctaatgtttctcttatgaaaatgactttgcgtctaattttatttacttttttttttctaattaatttattttgctttttaaaattcgatttttgaattttactcatgcggtgataaagcgtcattgtcggattagatttacacgcacgagtatagctggtctagaaatttcggaagaaaacactttaggaatattctccggttactaaaatcccggtttattattgtaaagaaccggcttgttccgtttaatctattatctttggttttttaataaccggttatttgtttccttgtcttaacagtttagctcagtggtcgtgaagataaccgcgatttg

SEQ ID NO: 38587 - DNA, 652 bp, Arabidopsis lyrata
  Intron number 1 from transcript 478409 (locus 478409) deri ved from phytozome v7.0 (chr-ID scaffold_3; pos 4308607 to 4309258 reverse strand)
tcgtttccatcaatcctttgtctttcattccacaggtttgttttacatttcttgttgattccaattctggcttcttcattgtgctttctcttgtttatgtctttattctaattcgttgcttatcaaagctcaaactttatgaccaagatttgagagattctctaaggagagaatctgaaaagatcacacctttccctctgaatttgagaaagtttctgtctggttttgttcttatagccaattgtgatttatgtctgaaggttttgactttatgagttgagattgaaggagagccactcttaagatttgtgattttctatcatagcctcattttatagctttggtagatatgttttgattccaaattcatcataactaaaattgagaagattctgtcttgttgcattccaatgaggacaaaaaaaacagtactgggtcctatatattctcatgtgtttatcttccttttggttaagacaaactgataagtttgagcaaaagagattctcttttctaacttgtcttatgtcatagttttcttttgtagctggtaccttcttttgaggcttttttaaataatctaacggctttagctgattggattcaatgtttctataaatgtctcttatatctagattcttggtttatttgg

SEQ ID NO: 38588 - DNA, 462 bp, Arabidopsis lyrata
  Intron number 3 from transcript 477638 (locus 477638) deri ved from phytozome v7.0 (chr-ID scaffold_3; pos 1268936 to 1269397)
cacctagctgtggagcattctcaagcactgccatcgtaagaagtctatttagtattgtttgtctaagactacatagtctattattccataccacttagtatataccaaggaaatggattgaatgactcacatcaagaatttgggtattgatagtttagttgagagtaaaaaatcttaaattgcatatccattatttaataacttgacccatctaaggtggtgcttcttttcattttaatagaaggtcatgtgtgtttactgttacgttatcttacatttcagtaacaaatattcatttgatttatcattaactagttcatcattaccttacctgccttgtgtaaatgtcttattagtggattcctctcccaagtacttttaggtttcttcatgtgtttggccttttcttttgtcttactaactggtttcattaattgctttgttgcagtgtcttttctaggt

SEQ ID NO: 38589 - DNA, 966 bp, Arabidopsis lyrata
  Intron number 2 from transcript 912043 (locus 912043) deri ved from phytozome v7.0 (chr-ID scaffold_1; pos 9594360 to 9595325 reverse strand)
cgtacgagaagagtgcgacgtgcagctactcgtgggtttgatatgtgtcgtcctcacgctctccttctcagcgtaccttcgctgcttcgtcgggtgagtggtgtgtctgagtttcttccatcgttacacgtcatcaaactctctctccttctttctagctctacggaccagtgtcgtttagtgagaccatcgccgatgcttacatgatctctctttctatcttcttttcgtttttttccttttctttgggtttgtgttttgaacattttggtttctttgattagaggtttgaacatgatttggacctgtgtcgtttagtgagaccatccccgatgctctgtatctgcttttcgtttatgttttgaacattttggtttctctaataaacaagattttctcaatattaattgatatcgtagttataacaacttggaagatttatcactttatattttacttagataaaatgcgtaaaagtttatgatatcggattaagactaatcacttgatcatgttcttaaaagtttcaaattttagctcaaagtgttgaaggaagctgcaaaatgtagtgaaacgtttagatagttatttgatcaaatactaaaccatgcaaagagcgaaattttgtaaccagtaattcaagaaaacatctttttacagtaaccaaaagaggtaagtccttcgtccagtccttatcatcagtcatcacctctaacgttgaaacttgttcaacacgtacggttagtatttaccatggttagagaaaacgtatggttaaaataaaccatggttcatggttaaaatttaaccatggttaggttatataaacccctccttcttccctctttaacaaactccaaaacctcacagagacaaaattttctcactttttttccagattctgattttttttatcagtcatcgtttcaaaatctccatcgtttcctgaaagattcagagatatca

SEQ ID NO: 38590 - DNA, 237 bp, Arabidopsis lyrata
  Intron number 3 from transcript 479980 (locus 479980) deri ved from phytozome v7.0 (chr-ID scaffold_3; pos 12073738 t o 12073974)
gaattgcttttgacacaaggagctagggcttttgcgtttgagtttttcctactatctttgattcatttagatagaccatgtggaatttatttctataaactttttttattaattaacaaaaacaaaaccaatgcaatttatattattctatattatttatgctttatcgtttgctttacttaattctcgtgatgcaagattgaagattatattgtttaagttcatctcacactaaag

SEQ ID NO: 38591 - DNA, 577 bp, Arabidopsis lyrata
  Intron number 1 from transcript 492634 (locus 492634) deri ved from phytozome v7.0 (chr-ID scaffold_7; pos 8696585 to 8697161 reverse strand)
atagatctctttttccgtcgcgagaaaaaaaaaaacggtttgttttttcttctcttgctgttcatgtggatcgggtttttgttttctggatcaacgagtttcgtatctttgatgttatggatctgaatttctctattggatccctctagttctgacctgagcaagcatttgtgcggtactgttgttcttatgacctagattcgttgttttagatgttgaatttagtgtttcagtaatcgattgatttgatttctctgggttttggtgatgatggatcgacgtgatgatttggagatattcattgttcctgtacattgttgttaagatgttttcaagtttccagtgtcttgattattcactgtttgtgtgtgtttgatactgtaattacatattatgggaaaagtttggaatcttaactgctaccattagcgtgttggtttgtttaatcattacttaacatacttattatagtatgttgcttgtttctgcaagttaaatgttattggctacttttggagccttgagagatacctcacgctagttcttgttctttcttttgcattatttcaattcataa

SEQ ID NO: 38592 - DNA, 477 bp, Arabidopsis lyrata
  Intron number 3 from transcript 480225 (locus 480225) deri ved from phytozome v7.0 (chr-ID scaffold_3; pos 14758366 t o 14758842)
taccagatcgtgtatgaatgattctatccttcttctcattacttacattacactttttttcgtatattattgtatagtgaaaagttgtcagaattaacatggtcctactagcgtgatgaaaaaaaaaaaaaaatcacatggtcctactagtgataattattgttttttttcatattcggtgcaatttcaaattattagtattatttttcttaaccttgggggtggccaaaatcttgatcttatcaaaagtagtggggtcttgtaagattatctaagacagagacttttgagtcaaaaagttaaaactttttcagctttgaaattttcttaatgttcaaataagctatatagcctatgtggataggtaacataagtgactcactctttattttggggttttcaaaatttaataaatttgtttaaattgattttgttttatcagattctttgttgacaacataccaatccgaacgttca

SEQ ID NO: 38593 - DNA, 813 bp, Arabidopsis lyrata
  Intron number 1 from transcript 926491 (locus 926491) deri ved from phytozome v7.0 (chr-ID scaffold_2; pos 14889690 t o 14890502)
ctttttgttaagttccttgagtatctcagcgagaggtctacttttattcctgaagttggaacatagttttccttaaaggtcgcgttttttttattagacttttttcccacgttactaaattaggtttaacttttgctattagtaaaaaaaaaaaaactttagagagcaaaacgtcgtcattgcgagggttctcgtcttctcgttcaatctcggtctcggcgtctgagtcctgcttgagcaagccccaccgtgagctaatctaatctctgttatgattaattacattcttttaggtgaaattgaaccatgtatcatgtttttttttggaatttcatctgagtgagttagataaattctgttcatagaaagcttagaaaaaaaaccttaacttggtactaattgaatttggaaagtagaagtatttagttatatgtaatttcttgtttttgcaagttctcttattcaatctctttaatttccacattgtagaaagttcgacttttttttgcttccccaattcttataatttgtgctatgaactatctgtagaacaggctcaagtaaagaaaataagccttatggaataagatgcatgtgaaattatccatataactgaaaagcatgcattgtcacctgaccatcagcctgctggtatgacacagaaaattgtagcccaatgccatcctcttaggcatgcttccattgtttccattgaatctttgactagtacagcattctctcttacacttttgagttaccgataggtccaaattgacagcggagaagaaactcttagagatccttcaatagaaa

SEQ ID NO: 38594 - DNA, 488 bp, Arabidopsis lyrata
  Intron number 1 from transcript 490489 (locus 490489) deri ved from phytozome v7.0 (chr-ID scaffold_6; pos 24669701 t o 24670188 reverse strand)
cagtaatagtcgccgacactgaagtgggacctgaggtaagaatactatattaagagaaatagaaactcgtacttataacattaattaatcaaatagtttaactactacatgcataaataaagagaaaatagaatcaaatcaatattaagaaagaaataaagtgacaatgtgatttgagaattgagatcttatgggttgactttgcttcaaccctaaggtcgcccatgctgtctctaaatacacgtgcagctgtttgttaatataaatccacatgaagacaaaacagaagctgtctttgtccttggtatatagaatagccttttaagtcctttatgactacgaatctaacaacttaacgaatcgagtcttataagagtatctctacgttaacatataataaactgaaattttttggatgatttagttggtctaatatgtaatgatcatggtcaggaggacttacagtgtgaaaaggagcaaaacagccc

SEQ ID NO: 38595 - DNA, 515 bp, Arabidopsis lyrata
  Intron number 1 from transcript 916386 (locus 916386) deri ved from phytozome v7.0 (chr-ID scaffold_8; pos 12083921 t o 12084435 reverse strand)
gaactacaaaaaggtttcagatctctcaaaatcaatattcctttcagattacttctcacccttattccccgatttctgagatcaaaaaccaatgatttctcaatttctcaatcaattgaacggtgttattcattagaacggtgtatttctcaatttctccatatctctactgagcctccgtcgtttgatttgaatcaaaggtaagcttttcgactattttagattatgaaccaaaaaccatcagtctaatcttctcccacctcatctcaatcaaagtataatccgttggagaagtttgggctattataagaaagcttttttttcctttgatccaaagagcttacctttttatgtgattctaatctaaaatattgcctgttgcaaactttttagttcaatattcaatcgtgatcaatccgcatgtcacttattcatcaaaaaccatcattttaatcttcttccacctcatctcaattaaagtatcgtatttctttttgtgtgtttgatttgcagat

SEQ ID NO: 38596 - DNA, 974 bp, Arabidopsis lyrata
  Intron number 1 from transcript 896306 (locus 896306) deri ved from phytozome v7.0 (chr-ID scaffold_5; pos 1800579 to 1801552)
agagtaagtatgttagcggcggaggagtagataattggagactagttttaaggttatttaatgtttttaaaacatattaatccattataatcgagaaatttagattatattgtctttaaaattgcattaaacacatgaaaacaagatttaagcttaaattattttttataaaaaataatgaacataaattagacgttttgaattttaaatccataaaaaaaaattgtaaaaaaaaaatggactaggtgcaatctaggcggctagacggccgcctaagcggacaaaaaatcgaatcgacgattatttttaccgatttgaacaaaaccgctgcggtccctttctgattagtgtctaggcggctgatttttagaacatgggccgtatgctatagagtgtatgaaaaaaaaaagcagttaaaaagataggttttttgagttattaagtaattaaattaattgtttaacccaaaatgttttgtttatactcaacaaactcgaggattctataggactatcgcatctgcgaaatgtccgtttgtagtttgtattttttttttaaaataaaatgggaaaccatgtctacctcttcctcaccaaaaaaaaactcaacaaactatgaaattttgactgacgttaatttcttggaatcaagattaaaattgtgattttttgttgttttgtatttttggtcaacgtttttgttgttttgttgttgttattaaacacttttatacttcaaatgtaaacaacacaaaattaataaataaccgggccttagattactagtatatttataatataggcccatttaaggcccattttttcaagtttttcgttttagagaccaattatctggcgggaagagccaaaccgccggtaagttgtgaacggcgaagacggaagaccgatgctacgcttaatctctcttttacctcaaagggtgtctccgattagaagatttgtgtttcaacagag

SEQ ID NO: 38597 - DNA, 809 bp, Arabidopsis lyrata
  Intron number 1 from transcript 494374 (locus 494374) deri ved from phytozome v7.0 (chr-ID scaffold_8; pos 1228331 to 1229139)
tagaggtcgttggaaagcttgctctttcgtcgttggtatttattctttcactaatttcggtttctctatgttttatattctttatcatagagttatactctacaattaatttgattaatcacagtagttattcgttgatgattaacaattttttttttcgaagtttttaagattatcgtatatcttaaaaagttgccatgagtcttggaaacttttcaatggttacgagagaagtaaaagtttgtgacgtatcttatcctaattaagaatagaaatatataaatttgaggtcataaatattttattttcatataaaagcctgcagagacttaacagtactaggccgatctctagtgattaaaaacaatattaactcaaaataatccattgtttcatatatttatgtatatataaattctctttgttctagttttaaattttctttcggaattaaataaataatacagaaagttatacgaaaaatattattatatatatatatatatatatatttccacattaaattttttattctgttttgttatatcttacgattttgttctttttttttttgaaaataatattaaattagattcaaaaaaaaaatatcgtttttacatccagtgcatcgttaggttgagatttaagagcttagatacataaacaattagaaactataggagtctaacttctcgattcgaaccagagttgcagtcctctttcgtaacgtcgattttgttcattttttcttccatcaattaatgaaagaaaatgttattttatgataagtgtacgaggtgtttgaacgg

SEQ ID NO: 38598 - DNA, 771 bp, Arabidopsis lyrata
  Intron number 1 from transcript 489345 (locus 489345) deri ved from phytozome v7.0 (chr-ID scaffold_6; pos 10970339 t o 10971109)
gttgctctcttcgggatcagtcttgcccaacagaggtataaatatatcacttgttgatgttttgattttatttttaaactagtccatcaaacctggctaacacgataatttgtttaaacctagctcatatatctacgtaaaatgaaacatttgttaaaatatacgatttaacaacaatttcatagactcaaactcttgagataattaaatactattaaacaatagtgagtctatttaataatagtgaatgtaattatattccgtaattcacatgttttacttttaccaatcacacatctctacatattgttattaagttatttatattttgttaatgattattgacaaacaataaaaattattacatccttaaatatgagttcttagttaaataagtattttttatataattaatacatattctgtcatttcatttcatagatgtgttctgatgatgctcgttatctactatccaacatgcattatatttgggtttcgattcttcgtttgcattaaaatttagtgtgttgttttttttcaatataacctacaacctttataatgtttgaacaccattttttaattattttttaaaatattttaaaaacaagaaaaatattgtattttttaaaaactgattttttaacgtgtcacataaaaacgcaaacgcggaagttggtatttaaaactatcaatctatatttctttctttctctaaatgttaattatatccactaatttgtttctcacgaacttttgtttttaattaga

SEQ ID NO: 38599 - DNA, 892 bp, Arabidopsis lyrata
  Intron number 1 from transcript 352245 (locus 352245) deri ved from phytozome v7.0 (chr-ID scaffold_6; pos 21407244 t o 21408135 reverse strand)
attgaatcgcaaaagcgaagaaataaacaaatctggttaaaaccagaaacaaagagtgaagagaagactctctctctctctaaaagatacgagagcgataagagagagagaagagttattcacttttgatttttaacttgttttccatttaatcactcaaaatgtaatacaaggtttaggagaataactatcatatctgagaccacagagttaaaagctataaagagaaaaatacgataaaccgacgatagtttcatgatagttcggagacaaagaatgtatattgaaaacacaaccacggaaaaatccggaaagtggaaattggtcattataaatagtttaaactttaaaatttaaatcaattatataagttttaaaaataatttttttttgaaaaattgttagaaatacccattttccagtaccacttttaaaacatatactctccgtaaagattttatcaaaaatgctcataaaatttgatatctacccaaagaagtgggtataaccttataaattttatgcaaaaactatatttatacgtatgtaaaatcgtataaataccttataaatactctataaatatcttgtacaatcttataaaatactttgtaaaatcttagaaatatttttcaaaaccttataaatctttataataccttataaaacttataaatacttggatcgagtttccaagtcatagttatcatctaaaaatacttcataaaccttataaaatatttttttaatttaataaataacattttaaaaatttgacttctgcatgaaacatttttaaaaagagacaccaatacaaacatttttttttttcgcgctaacttttgtgcgtgttttagtctgaagaagaaggctccgcctcccaggattgaga

SEQ ID NO: 38600 - DNA, 381 bp, Arabidopsis lyrata
  Intron number 1 from transcript 930461 (locus 930461) deri ved from phytozome v7.0 (chr-ID scaffold_3; pos 11287330 t o 11287710)
aacaggttcagtattcgcctttcttaatcctccatttcccttaattatgccctcagtttttctaatttgaatctctgtcttgtaatcaatttgtacaatttgagttgttttctttatcttttgcttataaattgatgatgggttgctttttaatttcgtttttccaactacaactgttaaagcctcaaccttttttttgtcggtgatcatcatgtcaagttttcggcaatctcttaacctgttgttagaatgttgaatttagatttacttatttattaggatccagcttacttggataatagagaagattattatatcatgatgctatgtctaatgtaatttttctctaggacagggtgcttgcaaggaatcttagtaaaa

SEQ ID NO: 38601 - DNA, 879 bp, Arabidopsis lyrata
  Intron number 2 from transcript 480475 (locus 480475) deri ved from phytozome v7.0 (chr-ID scaffold_3; pos 20722628 t o 20723506 reverse strand)
ggtatgtgttttgatctcttttatctagttttcttgtttgatattgagactaggatttggcatttaggttaatcggtttggttccgttcggaatttttggaattttggtgtttatgttatgcaaaattctcaccgaattagatggaatgaaagttcggttcggtttggttcagttcgtaagggacaaattttggtaggtacaaaattgatgccgaattagaatcgaaaaccaaattcggttcgactttttcatcagaaataactttggctaaatttggtatattttggttcattttggtaaaatttaggatacagttacaataattacggttaaatttaggatcaaagttcggtattttttggtttggtagttccgaaaccaaacggaaccagttaccgaatttcatcattcctcttgccaataggttttcaaccaaattagctaaatttaggttcggtttggttggcttattcggttctgaactggtacattttggatttgcctggttattgtttttgatgatttcggttcgatttaccgtaagaagaaacagaacaatgatgtttggttaaatttggtatattaatagttactcctctcatggttctacatagcttgtttggtgctttcggtttaatttgggtaaaatttcggttattcgggttcagtttatgaattatgatagtatattagtaattttacttaaatttagaataaaattttggtaatatcgtttaggtggttccgaaccaaaccggttgagctggctaattcggtttggaactggtacatagtggatatgtatttgatatcttgctttcagataaaagttcttgtttgatgttgagactgtatttgcagatttgctaaagtttcag

SEQ ID NO: 38602 - DNA, 753 bp, Arabidopsis lyrata
  Intron number 1 from transcript 934690 (locus 934690) deri ved from phytozome v7.0 (chr-ID scaffold_4; pos 19094630 t o 19095382)
gaccctaattccattgaggtaatcacaacttgcgtcttctcttttaagcttaaagttttttcactttgcagaattattggtctttctttatatgcaagttatgcaactggtagtttgtgcattgggtcaatttttgcgttcgtgttattgcgtgagttgaatttgttgattttagtttgctcctgattaatttgttactcttattttctttggggacatgcgggtagatatgttgatcttacagcaagttatgcttgttgttagttcaccattgtaatggttagaggaattttgcatgtcaatacgtttatgcaggagaaaaaaagtgattttgattctaggctaggtatgtgaactctctatatttcagaaactcattctctactttaagaatagacctttcatcaattctgtggagcagtatgattttcactagcaatttaccactatcaaaacagctcaaagatgtaaagtacttttactacaacaaattctattaagttttaggtttggttaaggcacttagctattgatctctctatgtttgaggtccttttagattgacttgagactgtgtgggaggcctttagcatcttaagttgtagatatagtcttgatttgagattatatttctgttcgttgtttgtctgtgtttgttttcactctttgacctttttagttatttctttatgtggtaaaaaattcccagaccattttccactactaatgctttctcttttatgcagaatcgat

SEQ ID NO: 38603 - DNA, 393 bp, Arabidopsis lyrata
  Intron number 1 from transcript 944820 (locus 944820) deri ved from phytozome v7.0 (chr-ID scaffold_7; pos 4260925 to 4261317)
agattctttctcttctcgacgtcagctcctactcaccgttttcttctttctttccttttcctttttgttttcatcttcgtggtatataactcttactcatcttctccagacgtttgattgcgacactgtgcaaatgctttcttcttgtaattcagaaagccttgtcttttgtattcaatccgttaagaatgaatgaatccattcttggataaatttttagactttagaactgccttgagctctaatttatgaaagtctgggtttttttcgaaatgttgtgaactggattttcttttatatctcttgaattcattttcaagtgtgctgagattttggagttgttgagtttaatgatcaatttattgtcttttccttcagaaagttgaacacctc

SEQ ID NO: 38604 - DNA, 718 bp, Arabidopsis lyrata
  Intron number 2 from transcript 470153 (locus 470153) deri ved from phytozome v7.0 (chr-ID scaffold_1; pos 426435 to 427152 reverse strand)
tggcttggactgttgttaatctcgctcacttcgttgtaagtcttcttcttctacctttcgaattcgattgtttttatgctttagagatgattgtttcacttagggttgtgactttaaattcgaaaaattaattgattgattgtgttttttgatttcctgagatctggttgtgaatctggcagtaatgtttgaattgatctctgtggttattagtagttggttagggttcgaatgaagatgcaagtaccttctgattttgaattgatcagtttggttatcgtaaatcgtcgatttcgaattaagatacaattaccttctgatcatttcattgatgagttttggtatcagcgattttgaattgatcagtatataaagtatcagtagtgttgactgttgatttgatcaggctttgaattaagatgcaattcacttctgaattgaattgatcagttttggtatcagaattttaaagttgatcaggcttcgaattaagatgcaccttctggttaatgaagtgattagttttggtatcagaaactgtaattacctatggcatcaatgcatttcctttaaggtctaactgttggatatgatgaggtgatttgtaatttggcattgcttgataatgaaaacctaatttagtctaattttactctttggaaactgtgaaatctgagtagcatttttggatcaggtgacgtatcacagcttccactgg

SEQ ID NO: 38605 - DNA, 432 bp, Arabidopsis lyrata
  Intron number 2 from transcript 470684 (locus 470684) deri ved from phytozome v7.0 (chr-ID scaffold_1; pos 2404839 to 2405270)
tgttatttcggtttagtccaaataaggtgtgattggttatggtggttaaaagatatgtttctttgtagctatgattaaactattacagagtatgcaaagttctacagatccaaaggattcgatggtacctctggattactttatctcaagatctgagaatgccatatactgtatcattttgtctaacagatgcgtgagactaatttgatttttttcttttctgtaataacctcttgttaattacttaagtctgctccagtcactgtcacaagcggttgtttttgtcaagcaaccttatctctaatcaatggttttgctgtatcaactggtccaatctttgaacttaagaaaaaagtttctttcttgtttttatggattcttaagttatgtgggattgtatcatattgttctgtttttcgagaaactaaaact

SEQ ID NO: 38606 - DNA, 328 bp, Arabidopsis lyrata
  Intron number 1 from transcript 934879 (locus 934879) deri ved from phytozome v7.0 (chr-ID scaffold_4; pos 19860084 t o 19860411 reverse strand)
gagtcactttcgtggtacttccaaggttatatttctcttttctcccttctctccggatgtttgtaattctgcgttttttttcctgttgcgtgctttgattgtgatccagcagctttaagatttttatgcttagtagctgtagttaagaagtaccaattcgaattattattgttcttggttcttccagtatgtgagtacgctgagttttaagatttttggctttgttttattaagattattatgtctttttttctgctttattggatctagtttcagatactgtaagttgtgatacaatcttatattctttactgttggtttcttcagg

SEQ ID NO: 38607 - DNA, 472 bp, Arabidopsis lyrata
  Intron number 2 from transcript 891351 (locus 891351) deri ved from phytozome v7.0 (chr-ID scaffold_7; pos 20385830 t o 20386301 reverse strand)
gaagttgaagacagtggttgattctgattttcctggtaattttagttcttgtcaaatttcatgatttagattacaagtcttgttacagaatcgtgattggtgcatatgaagtttagtttagtgatggagttacaaataatcttatggatttgtaaatggtgctcatagtcatagtgacacctctactcatagtcatagtgacaattctttttcttgttatatgtatggaagagcaaatttcaaaaagcattttgctcttggttttggatgaaatataactgtggtgattcaaatgctgatgttcgtggtatacattttgtgatgcatcgaaaccaatgggaatggttacgatgtgatagaatttttcaaactgcaatctggacttctttaccttgtgttaatatgttgtttctaaccttttctttttttttatgcaggaactgagaaaaacaatctacaacagcactttcct

SEQ ID NO: 38608 - DNA, 344 bp, Arabidopsis lyrata
  Intron number 2 from transcript 894454 (locus 894454) deri ved from phytozome v7.0 (chr-ID scaffold_6; pos 11408732 t o 11409075 reverse strand)
ggaggtggtgatgtaagttgagatgtctttatttttttgaaaattattaaaacatcttacataactattaacaaacctcaacacacacaaatatgctcttccagattttgattttaaaaatatgattttgtttttttagttactatttcactttattttttggagttggttaattactatgttttcaaaatttgggttatgatactctttcggttagaaaaacaaaatttctattaaattcttgtaaatattaaattttctatacatacattttgatttttttttctatatatgttttgacattttcaggcagaaaaagttaaagtaatacaaacattactatt

SEQ ID NO: 38609 - DNA, 1052 bp, Arabidopsis lyrata
  Intron number 1 from transcript 902495 (locus 902495) deri ved from phytozome v7.0 (chr-ID scaffold_4; pos 21772334 t o 21773385 reverse strand)
gtttttgtctttaccctacgacgttgttttcaactgtctgtctcgtgtcttgagaacccacgatccaattctctctctcgtagggtaatttagggtatccactcaatccacagacgactcgagaacccacgatccaattcttttagcccgtgtacatgggcggatctacgtagtggaagagggggcagctgcccccagtaaaatatcaatatttttgtatttttattgattttagtaaagattttttaagtcaaatagtagaatgaagaaacttgccatcccttaatcccatgatctgatcccacgatgccccttctttctttttttcttttcattttcatttccttttttgcttattttctttccaaaaatcttaccattaattgtttatctttcctatactatacttaatattaccaaaatcaatattattttcattttcattttgtttaggttgctttttcttttctaatttagctttcttttaaatgtctttttaatgtagcattttcattggtttatttccaaacaatgtttttgttttattaaaattatacacattctctaactaatatcttttcccagagttaaagcatttttcaaaaatgtgaaatagtactgtttataccatttttaatgatgtaataactgaaaataaaattatagttagctattataaagttaacaaatattattatcctttaccatttagcatttttttagaaatataaataataataataatttagcaatattaaaaaagtatataataaattattttttatcttaaaaagtcggcatattactttgcccccggtaaaattattttctaaatccgccactgccgtgtacttaagagaaattaccccaagtcgtttttgtctttaccttacgacgttgtttccaactgtctgtctcgtgtctcgagaacccacgatccaattctctctctcgtagggtaaatctttccaccgacaagtcctacacaaatacgcgatcggttcactcgcatttgaggtccttcactcattcttcccgattcggtgtccaag

SEQ ID NO: 38610 - DNA, 370 bp, Arabidopsis lyrata
  Intron number 1 from transcript 920502 (locus 920502) deri ved from phytozome v7.0 (chr-ID scaffold_1; pos 6749745 to 6750114 reverse strand)
aaaactctgattctaatcagattgttgtccctgaggtttcggtttcttcttgtctcttttcttttttggctcccacactgtgttatttctcaacttcgagtctctccacattttatgcttaatcagtcttgttagtctccatgaatttgatttgcaatcccttttgtgtatccttatccgctgaaactcccattagtaaacacatgtctattatgaatttgataactgcccataaagtttgattgacttcaaggggacaagagtatccttaattaaggattcaattatatatgacttgtggttttgatgtttgtggtctatataaataaatgcagaagaagagctggaaaaacttcttctcatacttagg

SEQ ID NO: 38611 - DNA, 654 bp, Arabidopsis lyrata
  Intron number 1 from transcript 491956 (locus 491956) deri ved from phytozome v7.0 (chr-ID scaffold_7; pos 5851203 to 5851856 reverse strand)
aaggtctttctctcgttctcgtgtctttttgatgcttttgggcaagtgggttttgatttgtgtgcatgttacatgtgaatgtgtgtgtgagattaaacgttgttgcctctcgctctctcttgctctcaactctcgaggtgcttcttatatagtataaggcaacgatggtttttgcccttctctttaggtggtgtggttttcttctagctctttgttttcatgggtcctttggttggtctctgcttagctactctcacattgggctggtaaagctaaggtctttagcatgataatgagtcttaatgtatgctagatccgttcttgtagaaaatggaatgacttgatttgccacagtaatgttttaggccgtctgtttatctgtaatgataatgcgtctctttttcatgggccaagtggtagctttattgacatatgatatgtctcggttagctgtacgtatatgcatacctctgatgtcaaagtttgatgcaaccttgttcttgtggtatcttgtagctaccaatgccatctctagcttttcttggtatagatgctccattagagctctatttgaaagtaaaaaatgatctgacttacatttttgattgtatgatgttagacaagttgacaccagctgcatttgagaagcattct

SEQ ID NO: 38612 - DNA, 353 bp, Arabidopsis lyrata
  Intron number 3 from transcript 932797 (locus 932797) deri ved from phytozome v7.0 (chr-ID scaffold_4; pos 5431178 to 5431530)
agggagaccctgaattgcttgtttttgtaccgtatgtcagttatttgttgttcatctttgaaactggcattttgttttttcacacgaccttctatttctggctgaatacaccgtttggcgtttgtaaaatcatttaccgacctgtgacttcaaatttcttctaatattattggtttgcatatagcaatatagtttatagagatagatcattgacttgaaagaagcttgagaggactagttacattccattttttcttactatgaaattgtttaatactttttggatggctgctcatttatgtctgtccattattgtagattcacatcagacgtcaagatcaagagcatatcaa

SEQ ID NO: 38613 - DNA, 416 bp, Arabidopsis lyrata
  Intron number 2 from transcript 927738 (locus 927738) deri ved from phytozome v7.0 (chr-ID scaffold_3; pos 646451 to 646866 reverse strand)
gcacggtactatccgatatcattgtcttgttttgattggtctctatgcatttggggagatgattaatatctgttataggcaaaaaatggagaccttttttaattttgttttgttaattcttgtaagatttgaaggaaccaataaacattgtttgtcttatcattcataaccaacgaagctttgtgcttcttatcttgtgggaaaattctctaagttgagaatcttgattacaagttagccaatagctcaaagttgttttcttgaacaggttttggttgtgttatcatggaattggtcttggtctggtccttatttcagtagtttgatgactaactaaatggtttaaaattcacaaataagatattaaaagctctttttcaccagaatttgtttcggttctttaaactgggtctcag

SEQ ID NO: 38614 - DNA, 368 bp, Arabidopsis lyrata
  Intron number 2 from transcript 474857 (locus 474857) deri ved from phytozome v7.0 (chr-ID scaffold_1; pos 33077213 t o 33077580)
gcgttggtaagtactcacttctgagctcattaaatgttcgattagatccttgacgattgcttttagtgatctgttgatgatagttttcgaatttgattcgtgcacgttgcatctgagaatatagtttgattttggaatgatttaggttttgtattttgatttgttctcgatttgtgtatctagagctttgtttgttagtgtttggtatttcttcaatcatcttgagaattggattttgtgttgcatagagaaactaatttgatgaatataactatgcaattattgttgagtttcattgatgaattttgttccaatcttactattttcaggttttgcacacatacaagggaaacaaaggtgccaataag

SEQ ID NO: 38615 - DNA, 794 bp, Arabidopsis lyrata
  Intron number 2 from transcript 915417 (locus 915417) deri ved from phytozome v7.0 (chr-ID scaffold_8; pos 896201 to 896994 reverse strand)
tgaagagttattagccactgagtaagtgttcctctagactctcatttgtgagttttgcgacatctttaatcgagccttgccatcttccatatgtgtcattccaagtttttatatatttcatttttgtaactgaaattctaaactaatctttgaaatctatactcaccatgagaattctgtactggtgttgagaggctcgtggtctagtggttcctttgtgcttgggggccctaggttcgagccctatcagttaggaacatattttcctacctcaggatggtggccggatggtaggaaaacaacattattagaatatgaacttccaactcaaaatcaattagcaattagtggatggtctatatctcttatccctaataaacataagtcttaaggcgtaaattcgcattcgcttattaaaatgatgcttatgggttaatggactttgggcttgtttggggtttatgcgctctcactagtatggcattgggctcgcctctcactattctagatgtttaagatgatatgcaggtgtgctcctataggattagtcgatccgtagtggtaaaaaagaatgtgcatccagtggaaaacgattactgttatagacgaataagccataaccattgaactaccgtcacttggttatgcccctatatattaacacaatataaatgtgttgcaataattccatgctagctagctgagtacttgttgtaactattctttttgggtcaatatcaaaagattttaaatgtgtttgaatatgatttgtagagctgatagccccctaaagg

SEQ ID NO: 38616 - DNA, 722 bp, Arabidopsis lyrata
  Intron number 1 from transcript 483759 (locus 483759) deri ved from phytozome v7.0 (chr-ID scaffold_4; pos 22409157 t o 22409878)
tgccagatctcttacatcctcaagagtgccacaaggtgatcttctcttcttttttttttctttcttttaatttataatttctgtaccgtctgatctacgttaactcttcatcggacgaacgaaatttaggaagcaaaacatatatttaaagaaaaagaaaatccggattgtgcacttgttattacacagatcatgatataatccgtataccggatctatagcctaaggcttcgaatagaatttgtgattctaaattttgagaatttttacttataaatgtgcatggtacttttcgttaggtgtatccgatctttgtattaatgaatcaaaatatgcatccgatctaatgtttgattatgaattgataaaagtatttgatatgtatatggatttcgttggtaaattgtctgcctcgatatataccgaaatggctagatctgattttcttactaattgtatacgtttcgcattgtgccgcattaatacatatatccatatactaatttcattatccatgtgcatcgatgatatctagcatttatatgaatcctaggctaatgtatatatttacacatgtatacaaaatattaaaatactaataacgttacgcacacgtcaacgtcatgtgtaggtgtagcgtttgtttgttcatcatgtgatgattaataatgtttgtggcatgcgtaggacgatcgcgtcaggcacaataccggacccgggct

SEQ ID NO: 38617 - DNA, 613 bp, Arabidopsis lyrata
  Intron number 1 from transcript 938942 (locus 938942) deri ved from phytozome v7.0 (chr-ID scaffold_5; pos 19274154 t o 19274766 reverse strand)
tcgatcaagcaatcggctgccgtgagtttcctctcctcgtttttccaatttttgatttttttttcttgccgctttaatctcttgactgatgcctctctatcatttgataaatcgattgattttagcatcctttgggatcatttgttagatttatgttgttgaattgtataaattcgagaggttgatgggttctttttggattattcagctgggttttttttttttttcgttttgagatattttatcaatttcggattttttttggttttacttgctgacatatttttgaaatccatccatattcgtattagattgtattcgcagtgattacaacattttttgtattttttgggttcttatttgttctttctagatttgatcaatcaggcaaagatgtctaaattgttgaactattacaatattggtgaatgatcgaatccgttctttgcatatagtagtggctaaaggccttggcttgattaactttgagcaggcttgacctttggacatgtttctttggtctcaaagtctctcttcatctttacttatcatgttgcattactttcatttctttcttttacaggcggggagattacttgcaaatttgattgtg

SEQ ID NO: 38618 - DNA, 833 bp, Arabidopsis lyrata
  Intron number 1 from transcript 480540 (locus 480540) deri ved from phytozome v7.0 (chr-ID scaffold_3; pos 21145895 t o 21146727 reverse strand)
aggatttagctattgtgtctcttcgtagtcatctggtaaatgcgagattgttcttcttgttacgaaattgtttgttcattgtcttgtttgttgttttggactggattattgagtgtgatttgtgaggtatgtgaaggttttgtgcaattactgcaattgaatttggtctttagtctccgatggttttgtgcctattgattgtgttctagggttttcataagaacgaaagtctgttttgttgtgagtttctcaggctatatatgactgaaagattgaaatttctcagagattgttgagattgagacttgaattttagcatagaaggggaatttacttacttcacaatcgttttatgcaacctggatttaagatgctatagatatgtttagcttgaatctaggttgaagggtgcatgggtttctagatttgagtcacggtagatccgaatctttttggttttctcaacatctaagaacatcctggactatctgaatggaaagtctgcatttttgacactagagggaccaacttcgttaggagtccattttgttttttcttagtgagattggagatgatgagaacaatatgtgtaggcttagaatgcagtaccacaaaactattcaattacgaatcaggagagcaaccctttgggctcttgataattggctggggttagtataaaacaatgggttggactaaaattatgtacggtgaaattgatccaaattagtaatcagaagataacgtactgtttcgttttttttaaatcatggtttcttggatactgactctgttccatgttttgctttcgacatttaggagatcaggaggat

SEQ ID NO: 38619 - DNA, 362 bp, Arabidopsis lyrata
  Intron number 1 from transcript 936810 (locus 936810) deri ved from phytozome v7.0 (chr-ID scaffold_5; pos 6617204 to 6617565)
ctgttcttgataccattcgcgattttcttggaacggtttgtgtttgtatatgtatatctagttacttgtcgatcttcttcgttttgaaagtctaagttatcgtatcttttcttgattttgttgattagttatataatctttgaattgctggtttaaatatactctttaaatgattagtggatgtcttgtttttttcgagtttctagttgaatgttgttttcaaactcttttctcttgcgaataagtcattatatattcgtattccatatgaaagattttgtaagggaaataatttgttctttttttttttttggtatctttttgtagacataacaggccaaaactcacgggtaggatcttgt

SEQ ID NO: 38620 - DNA, 429 bp, Arabidopsis lyrata
  Intron number 1 from transcript 474176 (locus 474176) deri ved from phytozome v7.0 (chr-ID scaffold_1; pos 26361509 t o 26361937)
gcaagtataaagctaaggttgtaatcataatattacccttttcttttatctcctttgaaaatgaattattcatcctgtctcttctaggtggttgtcggtttgggattgtgacatgttttgagatttgattcaacaaggttccgtgagaactctgtttttggatatttttcgaattgattttgatcatgttttgtccaaaacataataagaatgttcgagagattgctaaagattgagttttagtaggctcttaccaattagctcttttttcttgttcagtttttgtcggtggacaagattgatactttagtttcccctaaaacatgagaagtttgttaaaccagtagtttctcttatgaagttctcatttagttttctgatctaatcaactgatgatttgttctttgtaggttttgttgtctgcgtttg

SEQ ID NO: 38621 - DNA, 913 bp, Arabidopsis lyrata
  Intron number 2 from transcript 334698 (locus 334698) deri ved from phytozome v7.0 (chr-ID scaffold_1; pos 5923524 to 5924436 reverse strand)
gtctgtttcattgcctcggtgctcctctttacaaggtaaacagagaccgaaaaacagaagttcccggcctatatatatatatgcatacaatttctctagttctcttcacctctctaagaggtatgaagaaaatgaaatactgtggtaagattggctgtgtcagttgtacttatgaataggatgttaagaagaggtttttggtccagtccgatccggcccatctaaaactcggccttggatgagccttaaccccgtcaaaattcgtagaataggtttaaacccttttgtagtctatttttgagtcagccagtttcttcattttcttaaaaacaaatttgataggtttaaattgtccggattctcgttagagctgctcatttatttccgctttttgtgggttgttattgtaaatagtaaatacctgtgtttctttaattatcaaaccaaatcgaccacaaccatgttacactatctcaataggctttgttttatctttcgtttcgtgcatttgctgccctttcctttgggtctttagtttccctataatttagggctttgtttccctcgtttgggcttagtttccggggaaatccagtttttccgccggcatatgtaattctacaatgtatcaattctttgctttatcaatcaaaacaaatcaaaacagatgacaaaaaaaaaaaaaagagttataaacttataatagctcctccgcttaatattatgtaaaggctaaaattgtaattatcaaatatgaagacctagtccgtgtaatcccttgcaataactaggggtaatcgttatctcttggtaattgtataataataatctgaaaattatttcaatctatcgtctttgtgacttaaaaaaattcatagtttgaattgccgatttccattagatcctatatctc

SEQ ID NO: 38622 - DNA, 523 bp, Arabidopsis lyrata
  Intron number 2 from transcript 895135 (locus 895135) deri ved from phytozome v7.0 (chr-ID scaffold_6; pos 19991062 t o 19991584)
atcaagtgttcaggtgagacttatctcaggtaaacaattgatttgattagaagtagagtttagctaatgcttaatgtcacattagcttagttagtctttgatacttagagagttaaatagacttaattttgtatggtttggtagtgcctttggatttagagagtgttaggatatctctagaacaaatcttcttactagtggtttcggttttggtgatctcgattgtttgatcatcggttcttctatgtaagtgaggagttaattacatgaagtagcaattgtctctgttctctgcaattctgcatatcagattctgaacaaggaagttgtattttgaacacaaatgatgagttttttgttgggctagcttagattctacctccagatttgacttatgttatataaacataaatttgatttcatctacttgtaggagtttcattgtttagtggtgtcaataaatctgtttttacgatatgaaaacactttcttttgctgaaatattttaccagatagtgaagaa

SEQ ID NO: 38623 - DNA, 629 bp, Arabidopsis lyrata
  Intron number 6 from transcript 900847 (locus 900847) deri ved from phytozome v7.0 (chr-ID scaffold_4; pos 14333039 t o 14333667 reverse strand)
ctcctacttcttgtcaagactccctggattttttggtaataaaattttattttgccttaaagctggcaaagcctatgtttttaggcattatatatatcatcattgtaaacaactaccaaatatcatcattgtaaacaactaccaaattttaagctgccaaagaaaaaagagttttaaaaaaactaccacaatttttaatctttacctagtgtgatcattgaatattcgtcttctacctctatttcggaattgtttacttcctctcttggagaatccgccgagttgacgattaattaaaaacatgagactattgtcttattgctgcaatgatttctataactacagttttttacagttttgttttatatggactccttaacttaagtataatacttgtaaagtgcaactggtcaaatttttaattcttcctaaaacataaactaatattatgtcctaaaattgtagaaaattgttttttttgtttgagtttgttatctacttagtttctgaataattttttatgcattagctagctcatctttatcttcatggccgtccctgaatttagcatgtccacaaatgtttctatctccctctctcatatttcttgtcgtcttatgtaggagagt

SEQ ID NO: 38624 - DNA, 735 bp, Arabidopsis lyrata
  Intron number 1 from transcript 494331 (locus 494331) deri ved from phytozome v7.0 (chr-ID scaffold_8; pos 1014268 to 1015002 reverse strand)
gacgaatcagctctcttctcttctcctctcctatcctctctctctcaggtccgtcttcttccccccaaattcgatcgctttcttcttcttctttgtcttcacctctatattttcgttatattttttaaattttgtttttgttttcttctgtgttgtttgactttcgatttctgattctgtggttgtttatgctttgaattttttggatttgttagaaaaaccttccatttcatctgggttttgataaagtttcctttttttttttccgaattgtgctggatttgtgaattttgttctgggtttcgtttatctgtggtgagtttatgtttgaattttgattctgccgaattcgtttttgtgtgctaatttgatttatcgctttctaatttcgcttaacgatgacttgattctatgttactgtatctttgatttggtcttggaactttacttttagtagagcatgtaagtttgaatagagggacctatttgtgaattataattaggtttttttgtttttttatgtgttaaagattctgggttttgctatttctgataggttgacttgtggtttgtttgtcttctcgattttgtctccatgatcccagattccatgtccatgctgtgtagattctgttctcctttttggattttgggtttgattattattaaaatgattgattgtgatgggctctgtttttttgcagcatcttctgctggtttggtctttcaagaagg

SEQ ID NO: 38625 - DNA, 1013 bp, Arabidopsis lyrata
  Intron number 4 from transcript 484294 (locus 484294) deri ved from phytozome v7.0 (chr-ID scaffold_5; pos 2044907 to 2045919)
aggttcgagcgaacaacttcaagtcacttcttcaggtaaatcaatcatttgggaaatgatatgctttctttactttcttaaaaaggagtctaaattatttataaatttcttcttctttttttccttaaaagaaatcgcggtaattagcaaactcacatgacttgagcacacttctattagtcaagcaaagtcctaacaaatatataaagaagtcaaacatgtgaatctttgaccatgtcagaagaaaatgttaatcaatgttttcttctttcttcttcagaattttgtttttatcttgctaagtataatatatatatggggcttttgcaaaaatgcccatttttcaatatcacttttcaaaaatgccccttctttaaaaccttataaaaaatgctcttaaaaatataagatttacccaaatatgtatgtaacattattaaaacatacacaaactacatttctatgtatttaaaatcttataaatactttataaatacattataaatgcattttaaatacctttaaaaacctttaaaatatcttgtaaaacctttgaaaaatcttaaaaatcctttaaaataacttgtaaaacctttaaaaacacattataaaaccttataaatacttggatcgagtcttcaagtagtagttaccatccataagtaccttataaacctaataaaactttataaaaaattcaggtttaaaaaaggacattttttaaaatgaacatctaaaagaggcatttttgaaaaggagcacactaaaaagtgtatttttaacaatttccctatatatatatatataattaaacaaaaagattatgagatgatttgtatatatatataaaaaagattataaaattgtataaaagattatgaaattgtatttttaacaatttccctatatatatataattaaacaaaaagattatgagatgatttgtattaatcctagtttatgctttttacttcacaggaagatctaaaggtgaagagaagaaactaagtgaa

SEQ ID NO: 38626 - DNA, 356 bp, Arabidopsis lyrata
  Intron number 1 from transcript 470571 (locus 470571) deri ved from phytozome v7.0 (chr-ID scaffold_1; pos 2037146 to 2037501 reverse strand)
caacaccttcgataaattggaagaaaaggtaccgtgtttatgcttttttctttctattatatctattgattccatcaatcttctagatctctttattttatatagatacctttgaatttgtgtcatggtgttagattttagcttattaatttaaaagtgcatagacgagatattatgataataaatttaaatacaaaagtttgttagatttgatttgacaaaaaaattgtgatactaattgacatgttttgctcttaagcttttttttcttattaagtgatatggttaatttatattcttcttcttttttgctgcttttagttgctgaagtgggtccaaagcgtgtggcctgtcct

SEQ ID NO: 38627 - DNA, 447 bp, Arabidopsis lyrata
  Intron number 2 from transcript 477551 (locus 477551) deri ved from phytozome v7.0 (chr-ID scaffold_3; pos 862726 to 863172)
tgaagcttaacctttgctctgttacagactctcaggtactgtaacatccttgaacttcttgcttagtttgtgtgagagattgtcttgtcttatactcggaatgtggaaggatccagttcgattcttgagattttgattatttgtgggaacatatatggtttgtgtgagagtttgaaattgagctagtgatttagtttttccctcttttggtggggttatgattttgactattatcattacctttctttatggataattgaataatttgatttgttcttcttcaagcttagatctattgatgatctgtttgtttatatcatgatgatttggagtttaagatcttatgaaaattgtgtgatttgtaacaatgactagaagatttgaccaatttttcttttttgctttctttcagggatctgccggctacaaagtccggtggattttgct

SEQ ID NO: 38628 - DNA, 433 bp, Arabidopsis lyrata
  Intron number 2 from transcript 937473 (locus 937473) deri ved from phytozome v7.0 (chr-ID scaffold_5; pos 13148732 t o 13149164)
ccactccttcttccatcaaatctttcaaccaggtgagattttgattttaatcccttgtttctaggtctttgataaatctactagttaatatctgtatctgttttttttttctgacttatagattgactcacttgcttcatgctgactaaacatgtttggtcttatatgttctttaaatttcatttgtatggcttggatttgagtgacactgtattacgtattacttgattggattttaaagaattttagtttgttgagcttccaatggctttgaagatagatatctagatattgagattactatgttctcataatgtgtttgatctgttctatttttttttctctcagttgattgagactttgattgatcgggttgatctatctgaagctgaggcttaatcatctctcgagtttttgtcgaacgaggcaaacg

SEQ ID NO: 38629 - DNA, 850 bp, Arabidopsis lyrata
  Intron number 1 from transcript 898879 (locus 898879) deri ved from phytozome v7.0 (chr-ID scaffold_5; pos 19221109 t o 19221958)
gttttgaaaacatcagcaaatcctttagcacttttattttcagttagaaataaattgaacgatttgcaatttgcattattatgacaagaatggaaacaaaaaaagcagcggacgagatggctttgagcttttccaagaaagtgtactttgctgtcgactacgcaaagtgacaaatttctggttaccactacttgaagaaaaaaaaaagttaaaaatttatttggctgtttcttttacagcgtcatttgctacgtcacttttgactttattaatttatccttcctttatttcagttttgctttttggattttcaggtccattttttggctttgattttttgttgtaattttgtatattttttcgcttattgttgtttattaatatttaggccttttgggtatttttgttgaaagatccattaggcttataggcccaaagaaacggatttagaccaattccactgtaacttctgagaagacggaagcgggttaaatcataaaccggtctaaaccgagaaatactgaaatgttcatcgtcttttctcctctttccaaagacatgcgaattctctgatcagatccaattgtcaacttctcggtgtttctcgtttccatttttcgaaagccctaatcttttatggaagctaacaaaaaagcgaaacctagttatggagatgttattagcaatttacctgatgatcttctctgccgtatcttgtcatacctttcaacaaaagaggctgctttaacatcgatactctcaaagcgctggtccaatctacttctatcgatacctattcttgttttcgacgattccgtgttactgaatccgcaaaagggtcaacgaaaaa

SEQ ID NO: 38630 - DNA, 678 bp, Arabidopsis lyrata
  Intron number 3 from transcript 497509 (locus 497509) deri ved from phytozome v7.0 (chr-ID scaffold_665; pos 2588 to 3265 reverse strand)
ttctgcttttttctctcaagtcagattttcatatcatctcttcgagaaacatagattattaatattttgcttcatgatggaaaccgatttaaagaattaagaattagaaataattacccggtggactccagaccaaggctattcttaccagttggcatccatcccgttgtcttgcgcgaagcgacccacctagaaagagctcaagtaaaaattaatgattataaatcacccaaaaagtcaactaatgctcttgcctctctgacaccacaccactaatctaatcaaattaagtatcggctaattgttgaattacgtacaccaaaaatattagaatttctatattgcaaattcacgaaagtatcaaatgacatataattacaaaacatatatatgatatggtttacttttcaactcaaaatttgaaataattttctaagatatatattttaaaaattaaacctctaaagaatttttcttaaacaataattaagttctggtttctgtctgtaatcatcatctgcttgttcagataagcaggtttgagttcttcttttcctcttctgtatttttctgaattatattttccatcttcttgatattttactggaatcttgatccctctaaaagttcacttttcttttatttttctttcttacagatcaaccaatcaaaaccaaa

SEQ ID NO: 38631 - DNA, 854 bp, Arabidopsis lyrata
  Intron number 2 from transcript 479887 (locus 479887) deri ved from phytozome v7.0 (chr-ID scaffold_3; pos 11015423 t o 11016276)
ccttgaaggtgagttgatttgtccatagaatatatctttggatactcaaaagctttgctatttgtcaccatagacgttatagctgctgaacatgactgtcatcattcatcaatgaggagactttgtgttagtttagtgcaggagctttttaattactttagtgaatcgtagctctgtttcagcgactatagatagtcagttagctagagaggtaactgattagaaggaagttgggggagaatgagaagggagtctggattggtgtagcattggtttgggtttaggagagtttagggtgctttggaattcagcctaggcttccatcattgctgctttgatttggtttgttctcagttgttttctgtacgcggattcagagagtgagtaaatatagagaatcatttctcgttattatcggacattcagactcttcctctatatcacatttctgatattatctgacatgaaattcacagaatgtgtggtaaaacctaggcgtagagtcgtagaccatggagatgtaagatttaggacttcagttgactctttggatttgtgtcatgccatcactcttctggctaggaaattccatgttgtggtgaatattgatattgacaaccttttctgcgccaacgattggttttcttagaagtacactaattgcattcagttttggtacatatttactcaaaggtggtcaggtttctttgcagcatataggtcttatggatgtaatccttcctagatgtacctttatttttctgaaaacagactgtagcatttggttagacactgcaagtaaattatatatctcttctatatgtgtatacaggaaaggaaaacagctggtattg

SEQ ID NO: 38632 - DNA, 607 bp, Arabidopsis lyrata
  Intron number 1 from transcript 939759 (locus 939759) deri ved from phytozome v7.0 (chr-ID scaffold_6; pos 1148476 to 1149082 reverse strand)
atttctccagcttcgtcagacagcttaacacttatgtaatcatctcttgctctgtttctgttttctagatagactcatcattcttcttcacttcttcttctttctttcagtttttgttttttctgtaatctttttgatgaccaataacattttgtatagattcttgaaactgttttttgataacttgtaagaaaatacctgtaattttcttttgggatttgtttaatctctttgtcatgtaacactgaattttgtatctatgaaattttggcctcgtttgaatcttataataacttctcatgtgaaataagcttgtgtaatcttgtataattatggtttcgtttgaatggagaactttggtttatgaagttttgttattttcacacaatgttaacttctgtccggtttaagacattactcacatgttcttcacgcttcaaaggtagaatgtttctgatatcttgagatatttggtctacaatctactggtttgatcttgttttgatgtaaatgtgtttacttacttgttcttgagcttttttgagttttttgtggggttggaatgtttccagggatttcgaaagattgatactgacaagtgggaatt

SEQ ID NO: 38633 - DNA, 577 bp, Arabidopsis lyrata
  Intron number 1 from transcript 487523 (locus 487523) deri ved from phytozome v7.0 (chr-ID scaffold_6; pos 2685595 to 2686171 reverse strand)
agaacgttagttgcagcgctcctcagtgtaagcaggtatataattttgtacttacacacctaccctacgtatataataaatatgtttttggaatgttttttgattaatttattttattctaacgcttacactcttcatcatagcttcttcattaatgaaccagtcgtatttaaaaaagtatttagcttatgtatggcaccatactatattgtagtcaaattttaatattagtaacctgcgatttgttttcttcatcttaaaaatgtgagcatgataatgttattgcggccccaagtgaacatttataatttattgacacagtagcagatctagaatttatttggttaataaaaaaaggacagtctctattttattacgtgaaaaaagtttttcacagagagtgggttccacgtggttataattgataattccacccacattcaaaaacaaaacgttcacgggattacagaacaactaaacactcgaccgacacatagacactgtactgcattaacaacaattcacgtgaacacttgcttcaggtaccaaaccccgcgtgtggagcacgcgcctgctc

SEQ ID NO: 38634 - DNA, 487 bp, Arabidopsis lyrata
  Intron number 1 from transcript 319616 (locus 319616) deri ved from phytozome v7.0 (chr-ID scaffold_3; pos 21142126 t o 21142612)
aatctactggaatcgcctttggacctgcgtatcaggtttgtttatctttctaaactctttactcttgcttggacttttcttttggatgcaacaacttgggagttgtcttttctctaaggtctcttattatatactctggctctgtaaatttaaaccctttgcttgtaggagattcccattagagagcatattaggtaatcaaatatttgagaaaatcccaaaatttaaccaccagaagaagaaaatagaatttgagttgcagattatctcttgtttgggggttccattgtcaagttctttctgttttgctgaagattttctttgtggatgtataggaagagagatacttgttatcataccaattttattgtgtgttgttattcacagtaaaaaagatttggaattctttgtattgctttttaaatgcttctttgttttcatttgtcttgcagccggcaacatcttcatctaaagggaaagtgtcaaa

SEQ ID NO: 38635 - DNA, 291 bp, Arabidopsis lyrata
  Intron number 2 from transcript 347008 (locus 347008) deri ved from phytozome v7.0 (chr-ID scaffold_5; pos 2860599 to 2860889 reverse strand)
tcttctctgcaattttcagatttgctcaaagtgaggtagtccctaatgtcgagctcatctagtcagattccataaagttttgtttttatatggctgcgagtagcaattgtactttgatccatgcattgttgtttctagataattctaactctataaaggagattgcttgttcagttgtgacagtttgaaaatatgattctttgtttaattaaatgaggattgatcctactgttctttaactcattcattcttctgatctaaattattattggctctctcaggcaagcatcg

SEQ ID NO: 38636 - DNA, 749 bp, Arabidopsis lyrata
  Intron number 1 from transcript 471083 (locus 471083) deri ved from phytozome v7.0 (chr-ID scaffold_1; pos 3736990 to 3737738 reverse strand)
ttggtttaacggcggctctaaacccgttttctcaggtttgctttttattagtcctctggatttctttttgcaactaatcattgttttgtttggctcttggacaattctgaatcccatatgctcctaattgtttattttccagaattctctgtttattttccttaagattggaacttttagtttccattgtaaattgtgttctgttttggaaacttatggtgaagtaaaagggcatgttttgacagtatttgtccaatgttgtgttctgtctagtagagagagatattagaactcacagtttttgtctttgaattgccactgagtactccccggcgtcatgtttgctcttgtaacgttaaatcatgggaatgaattatcggttttgcttcagtaatcgtataaagttgttctgttagggtccttagttctgtaatctttatcatggggaaaattctaaactttgtcctttcttacatccctctctaacctcaaagcgtataacacaatagcaaatttgtctttttacatcccaatgaactttcttagtccgccggattgttgtgtgcaaaataacaccattatgaggacgttagtaattatttcttttgttttatgctctaatgaagagaaagtgatgcctcgaaatagttgtttattgttgactacgataaacagattacttgattctccatactaaccttttttatttgttccctttcaatggctgcagtgtatcttgattattggta

SEQ ID NO: 38637 - DNA, 673 bp, Arabidopsis lyrata
  Intron number 2 from transcript 471639 (locus 471639) deri ved from phytozome v7.0 (chr-ID scaffold_1; pos 6180697 to 6181369 reverse strand)
aggaacttgagcggaagaagaagaaggaagagaaggtttgacttctcatttgtctttccccatttatcagaaacatttcgtgggtcgatttaacgtgattatactgttctcgatgagcttgattttaacaattttgatatctagaatctggtagacgagtgtggttgagtttgttgttcaatcatgggaatagcttagagagattggatagtgatgcaattggctttggtgggcaatgttctcttagggacaacttatggattgcccatctggaaaatggaactgatgagatcgtagatagatagaattgcttagttatttttaagataaaaaagttagagctaccgtcttcactctatcagaatgaaaacgtgttctacattaataatttgagtacttgccccaaattcttatagtcctagtttatgttttttttggtagtgttgtggaattgtacacttttaaatgcaatgacttacttttcatttttttttggtggtaagttgagtaatatattgattccggtttttatgttttttcaatgtcatcgatttcattatgttatgttggacatcagttattagttattccagtactatatcaactttaaaaataatctgtaaagaatttttatatagaataaagaaaaggagttgaagaagcaaaaagcttt

SEQ ID NO: 38638 - DNA, 444 bp, Arabidopsis lyrata
  Intron number 2 from transcript 906386 (locus 906386) deri ved from phytozome v7.0 (chr-ID scaffold_3; pos 20748706 t o 20749149 reverse strand)
gtcttcttggtgcaagtggctacactggtgctgaggtttgtgcaatgttgaacctgtctttaatttccgtggaattgtttgttttagtgatctctttggttttgaaattaatcagagcttaagtggtatgcaccttgttacaagtttgttgctttttgggtattgtcctccttatttagcttaactagtgaaagtatgcaaagtttagcttcttccaacaaaaggaagaaaaagagccttatagtcatcggttttaaggttatttagcttaactagtgaacatatgcaaagtttagcttcttccaataaaagaatagataaggcatttcaagttttgattcaaatgcatgagatggtaagttttgatttttaacaaatgatttggaatcccttctttattgaacggcagatcgtcaggcttctagcaaaccatccgcatttcca

SEQ ID NO: 38639 - DNA, 422 bp, Arabidopsis lyrata
  Intron number 1 from transcript 933809 (locus 933809) deri ved from phytozome v7.0 (chr-ID scaffold_4; pos 15339947 t o 15340368)
gggagcttctgctttgggatactcttcaccgataggttaaaaatcttgactttatactttttccagctgttttttattttattcttctttgtttcacatgttgttcttatggtttgtttcttcagagattcatgttgttcttatagagctaaaacaatttgctttctgggatttcacttttttcaatcaatgagatccgattaaagttagttctactctgtttcttgagcctacgttacgtaatttctactttggtctgtcgatttgtaatgaagatcattgctagctggtgactattggtataaccatattaatgcaataaaatgataatttaacttctggattaagctatgagcctatgagacatgattttggtgtcaacgactctttgtctcaaaacttatgaaactctctgttacagg

SEQ ID NO: 38640 - DNA, 628 bp, Arabidopsis lyrata
  Intron number 2 from transcript 489126 (locus 489126) deri ved from phytozome v7.0 (chr-ID scaffold_6; pos 9551543 to 9552170 reverse strand)
acaaggttagagacttctctacgcacatttcgttatcttcgtttttgtttttttctatctttgattctcaattgagtggttattcaatgactaagtagtatctgctgaggttctgtattgattagagatattggaaatttctcctttgaagctacctattcctctgaggtcgataagggagttagataagaatgtagttgaaacaaagatgtagtcagttgccgaatcgtttgtagttgccgagtggatagttttggagcctgtagtttcttattttatcggattgaggcaatatattttttttattcaacacaaattgaatagctagcttatatcttttggagattagccattattctaccctttgaaacatcaatactactgctttcatctcggaatgtcattactcattagtgtgtgtatttcaagtcaatatataagacactgagtatatgaggatattaggaactagaagaaaagaatggcggggcagtaaatttggttatgtagtgatggtataaggaaagaaatcaaggtcgggggaaaatttggacagctcattcagaagtagattaagctttgttgttttatatttcacaggttttgacaccatataaaaagaagaaat

SEQ ID NO: 38641 - DNA, 597 bp, Arabidopsis lyrata
  Intron number 1 from transcript 919642 (locus 919642) deri ved from phytozome v7.0 (chr-ID scaffold_1; pos 3407346 to 3407942)
gagtaaaattcttctttactcatttttgagcttcgtttattgatcattatgcttgaatttttatggtagcatcatcttcagcaaccaattgtgaactctgatattgcttagtttagattatgtgtttttgatttgcctaagaactttattggctccctgttttcctcttaatttactctaaggttatggtaagtctttattttagtctagtgaatgagcattgtcacttgcttaggtggtttcaactggattgtcgctgtgttgaccgctcaggaacaatcgttagattgtttgttagctagagatctaacatgttagaaagaagttgggaaaaatgagtctgagttattctggattttcatagggtttaggattgagaactggtcaaggctctttaattaagtctctctatgatgtgtattcctttggtgaactcgacataaaagagtttaccggtttggatcctatcaggttactgtaatttactttttctgttatacattattactgcatatgtatataagtttgattttgaatttgaagttaagaaccggttgtctgattttgcttttattgctgtgattgcagatctcgagg

SEQ ID NO: 38642 - DNA, 354 bp, Arabidopsis lyrata
  Intron number 5 from transcript 480614 (locus 480614) deri ved from phytozome v7.0 (chr-ID scaffold_3; pos 21932172 t o 21932525)
atttcatcgtcttctcgctgttctgctatattccggtactagatcctctgttttctcatgtttcttttattaccagttgattcttcatttattgttgtgtctttgattcttttgtgcgatctataatattggtaataaaaatgatcgatgaacatttaaagctacgacttttcaggagctcttgtcttttttttctttaatcttgattaaattacggaaacataatgatttttgaagcttgatctgatgtgggttctgtgatttcgttccaaagtttgatacatttttgcttctctgttctgattcttgtttttttttgtttgtgtatgtttcttcatcaagcagtttcgttgg

SEQ ID NO: 38643 - DNA, 631 bp, Arabidopsis lyrata
  Intron number 1 from transcript 336321 (locus 336321) deri ved from phytozome v7.0 (chr-ID scaffold_1; pos 14812617 t o 14813247)
cgtcaatcgtcttcttctcaggtaccttcttcaaacacgtgcttgcatagtcaccgatgaagatcgtgcgattggatgaaatacgttgaatacattctgattgagcttgtgggagctatgagttttgtaaattctcgaacctgtgatccaatttgcatccttcatgtgttatgtcaatatctttagaggttaaaaattttaatctaagttagtgaagtgaggatgagatttttggtgactttggccacaagtaggcaagtaagttttgctctaggattggttttattagtttgtttgattatagtcatcttcttctgtatattttggcaacaatgttggtttgttggtggtctttgggttgattctgatgatagaaactggggaatgttatctagtatcttacgaaaacacagacgaatgagtggatgttaactagtctgcgacagtttcgttgttgttctaaacataagatgccttgtatttcattggaaactcgttatctcctcccgttttcatgtaaaaattactacaatgaaacattgtgtaaggttaataacagatgttttatctcgatttttgaatatggctatgtgcaggcccagttggcaaagctcccgaagaatctgttggc

SEQ ID NO: 38644 - DNA, 682 bp, Arabidopsis lyrata
  Intron number 1 from transcript 938496 (locus 938496) deri ved from phytozome v7.0 (chr-ID scaffold_5; pos 17574086 t o 17574767 reverse strand)
acacgtcgcatgctttgagacgacgaatggaatgagtcaccatgtgggaccttacaagaacctgatcccagccattgcttcgtcttttattttttttctatagtggtttctttttgtgaagaacaacatatgcaattagttttggttatatcatatatgggtgattttattataacaatgttatttgtagataaaaagtataaattaacactacatagcgtagtagtgtacacacttttatgccaatccagaaaattttactttaaactaattaggtttttggttttatttcaaaatctcgtatatttgcgttttctcactataaaagatattaaattatcataaaatattaacaaaaaaaatcttaaacataattggaaacactattttttttttatcaaagtacactatttagtatgatgaaattttctcaaaattaattttgctttatctcatgatattcatgccgaagaagaagaataaatacctcatgtctcatgatatacttaaaactatagaagtttataataaattctgtattcttaatatataattaatggagatgagtgaaagatactatttaatttagaacgtaggaaattttttaagttttgtttaaattttaaactccatccgtatgtacgagactgcgagtgattgattagtggtgttatccaaagtt

SEQ ID NO: 38645 - DNA, 495 bp, Arabidopsis lyrata
  Intron number 1 from transcript 477520 (locus 477520) deri ved from phytozome v7.0 (chr-ID scaffold_3; pos 739635 to 740129 reverse strand)
agtatgtcttttctttgatttctgattctctctactttgatttcaatttttgggtgttgccaaaattgtacctttatctttaagtcgtgttctcgaacctggtttgtcttcattgtttggtctgagaaaatggaaggaaaattgacgaaattaggttatgggatttggagttttttcgattaacaatggtttaggaacttaggacggttgatttatcgactttgatgtaagaagaaatgagttttggatttagaatcaagcaaaaagtcaatgctttagtgtcttctgtgaaagatgtcattgttttggccaaaaatggataaattgttgtttgtctccatttatacttaattttacgatgatgatggttgatccttggctttgatggaagtgtttcctctaagttttaggttcttgatgcgtagtacaagaaactatacgagctctccaccttaatttattgattcttctcttcgttttcaatcttgcttgcag

SEQ ID NO: 38646 - DNA, 654 bp, Arabidopsis lyrata
  Intron number 1 from transcript 329043 (locus 329043) deri ved from phytozome v7.0 (chr-ID scaffold_7; pos 6689464 to 6690117 reverse strand)
ctcgataccaaggtcaatcttataaaaacttttcatatgtgcatgtatcatgtatgtctgtataacaatgccattgaggcgttttcttttgatttggtctctgttcacgcatgattctgatcgtttctccatcatttttatgtcttacctgattttagcgttttcatatttcttggtttatttgagttatgattggtttatttcattgttgatctgaggatactcgttttgtctctgtcagttgtggtatggtacgttgtttctagtccgagcatgatttagacagaatatgtggataatgtttttctggttatagaaaccaaatggagaactgatgtttggttgttagaccagaactttaatacaattttgatgcatcctggatacctttgtcgtcttgaagatgaagattctgtcaatagagtatatgcttcacattctcactctctcgtctgttacctggctttatggcaaggaaagttaataaaagtgtgaagtgaatatgtagcttaatgttagctgagacactctttcttatagaggccttgaaaattatatatatgttttgggggacccttttggtttctgactaatgctataaggattttgtatttgcctggcagggaccagagattcgaactgggttcttgaagg

SEQ ID NO: 38647 - DNA, 575 bp, Arabidopsis lyrata
  Intron number 1 from transcript 484417 (locus 484417) deri ved from phytozome v7.0 (chr-ID scaffold_5; pos 2922741 to 2923315 reverse strand)
cttgtttcctccttagctttgccaccggtggcgaggtaacgtcacttattgccctactaaaccggtttaatgttttggtttcgaaaaattagtcattaaactatataaatctagtacaaataggtttgtttagggtttaacttttagttagggtcaagctaaatatgttattagttttttctaatagtaaaaaccattttaatcgtatatatatcaatgatgttaatttttcatccacccaatttttttatttttttttgagcttgttgttttagaaaactagttactaaaaagtaaaacggattctattataaatatcggtttagtagagttttaatttttgaacttagtagtattttcccaaagaattaagtttcgattctctgttttcttttcttctctaatttgtagtttggttcaaaattatgttcaatccgatttttgaactgaacattttggttgaatattctaactaaaatcacccgtttgacctaacttctccggcaagtaattaaacctttttcaaattattattttcagccaattccagcgttcggtctctctgccggagtagg

SEQ ID NO: 38648 - DNA, 321 bp, Arabidopsis lyrata
  Intron number 1 from transcript 494048 (locus 494048) deri ved from phytozome v7.0 (chr-ID scaffold_7; pos 23265435 t o 23265755)
attccaccacatacccttctacaattatcagacaggtgagttctcgaaatcttttgttattgaaatgttcatctcttgagttctgttatataatcgatcttgcatattcatctcttcttgcttgttggaattgggggaaaaagttggaactttgagttgcttctttgaaatttcgagttcagttttgtcttcccattttttgttattcttgtttatttaccgattttgaggttgatcgctgtgatttcattataggagtgtctgattgaaacaacagcttctgattaaaaatagtggctttcttctcaggttcactctgac

SEQ ID NO: 38649 - DNA, 865 bp, Arabidopsis lyrata
  Intron number 1 from transcript 900355 (locus 900355) deri ved from phytozome v7.0 (chr-ID scaffold_4; pos 10718820 t o 10719684 reverse strand)
gccgtctcagtcgcgatttgactctactcagccatgttttgcgttcgagtcttcacaacctcgcctcgacgcatttcagaagaaggttgagcttcccctcttcgaaggcattaacccagacgattggattttcagagtagagaaatgttttagcactaaccatacaccggagtttgagaaggtagatcaagctgtgcattgccttactagagccgcagtgacattgatctaaggtcaaataccggatcaaatacggtaatcatcatagcattttagaaacaaatttcaattttaaaaacataccatgtatacagttttgaaaatctcaaatataatgaaaataagaacaaataaggccacttccagtacaggcttgaacgtaagaaaagttttattaaatggaagggaaaaaaagagcattgagtaaaaaaacagcattgacttaattttacgaagtcgaccacgttcatctccgtagaaaaggcagttgaccgtggacgactgctcacagtggcggacccaggattttattttatccagatcaaaacacagcttgaaaaaaaaatcatttttaataactaaaaagaatccaacaaaaggttcacgcaaaacaaagaaaaacacaccctacaaaaaatttatccaaaaaaaaaaaattgtctacaaaagcatcctacgatccttcatgtcttaaaatcttttaatcacagtctcatttgtaatagtctcgaatacatctttctcaacaaaacaaatttctagacatgataactaatgattacaattatacaaaaagactaattttttctaagttatgaacttacttgattttggaaaagtagaccggtacagaacacacccgtaa

SEQ ID NO: 38650 - DNA, 748 bp, Arabidopsis lyrata
  Intron number 1 from transcript 949805 (locus 949805) deri ved from phytozome v7.0 (chr-ID scaffold_8; pos 15136570 t o 15137317 reverse strand)
cctctttcgcctccgtcaccggtttcagcttcctcgtcagtttttccgactctctctttatctatacattacatatatctcatatccctccctatatattttcttaaccatgtatcttaatcttcttctacatgttacataggaaattaggcatataatcaattaacaaataaaaaaaattaggcaaaaagttctgaatttaaaacttgattgggtaattggtgatattaatttccttttttttttttttttttctttttaaatatcttaaaacctttagtatacctctaaagagaaatcatagtaaattctatatcattagaaagaactatatattattcacctatgatggacttatcacttagcaggccaccttgtttgaatatccaagttgcgtaagcatcttttctgccactcgtacagatttaacgacaagaaattttaatataaaaacattttggcattttacggacaaaagtgaaaacgtcaaaataacaaaatcaaaaagttttttgctaatttttttataaagggatgcttagtgattacagtattattattttttgttgtgtcaaactaaaggtatgcttaaattatttttcctactcaacagacccaatagtcgaacataatagaaacagtgaatgatgtcaccaaacccaagcgaaagtttactgttaaacgtttacttgtgaagcacgaaaactgtgctgattcacttttctttcactatgttcctcatgagcag

SEQ ID NO: 38651 - DNA, 688 bp, Arabidopsis lyrata
  Intron number 2 from transcript 891813 (locus 891813) deri ved from phytozome v7.0 (chr-ID scaffold_7; pos 23342696 t o 23343383 reverse strand)
gcggaaaattttacagttgcaaaatctactggaaagtaccggccaaccagacttccattcaagatgaacctcaataatcggattagaaggaaattaatcgaattaggtggagagtaatcgggtgactgatttttataagggattagtcattaatcgaggcagagagggtgggcctagcgattaagcggggaataatcgggctagacggagatttttagaacagggattttacctatcatacatgaaagataaataatattcagcattggactaaagaaatgggttgaatatttttgattatatatagcacttaaaaagagtccatatatggcccgagtttctgatacaaagaaaagtatcgatttgcttgggtcttgacggatacgtccaaactcctctaaggcttctctttcaaactagtattagacaagtacatatgaaatgattttttcttctagaagatgtaattcttataatgttatcatgacccatgctatacagaacggggtttaatattttttatgaattaaattgtatattttgtttgaattatgtaagaaataatatagtgtaatagtatagtataaaagggaatatatcataatattctatgtttattactatttagatataatgttgtatatttcatttgacgatggttgtatattttgtttgtagaactaaataa

SEQ ID NO: 38652 - DNA, 792 bp, Arabidopsis lyrata
  Intron number 1 from transcript 356451 (locus 356451) deri ved from phytozome v7.0 (chr-ID scaffold_8; pos 1602881 to 1603672 reverse strand)
agtctctttgggcttgggaggtgagaatttcttcgttcctctgcttaatcttatcttcaatttgagattatcctttggagaaatttttgacgattgtttgcgatctcagatctgtttgaaaatctcataaaaccagtgatcttgtttcttctgtgattcaatctcttacttctttcgatctccgttgcattgtaattgtccaggatcatggatctttttgtggcgaatcagaacttatgatctctagtattaaccttacttaatcgttcgttgaataagaaattttctatgtggtattggattcagtttcatggttgattttttttctgtgaattgattatgtgagtgtgtgttttatacataagtttttgatctgatttatgaattgggaatctggatcagtttcctgatcttatgaacttgagatcgtctcatgtatgatacaagtagtgtttttaagctgtttatggatttaaaatcattggagctgtggatttggaactttttttactaggcatattcaatgggatcgatcagatttgttttgtttctcagaattcatgattgtaggatataagatggacccaaaacaagagtttttagtgattcaaccgtgtcttatgcagtgattgttatcaaaattttgtttctaggatacatagggtttacttatggattaagactgaatttttgatgttgcacttatagccgttttgacccgatcatgttttctattttttctatgctttcgtaatagaaatcaaaagactttccgtcctaaaaagagtgcac

SEQ ID NO: 38653 - DNA, 517 bp, Arabidopsis lyrata
  Intron number 1 from transcript 477724 (locus 477724) deri ved from phytozome v7.0 (chr-ID scaffold_3; pos 1593286 to 1593802)
gcacaagaatccttcctcctatcctacaaagacttgtaagaaaccaattttgttttgcattttggttgaatcatttatcttctgtttttgggtacctgctcttcctcaaatccttgttctatatgctaagttttcaaatttattcgtttttcccattattatttcccatctggatttttaaaattctgaaaatttgactctttcttcatttgggttgtttaagcgtgttggtttcacttttgaattgttcccctgtgaccctttctacagtttccacaccatttcagattcaagaatgttctaactttgaaccaatctcttttcattacaatcaaactttcaaatgtcagatgtaaaaaaagttgcaaactttaaaaggatgttattttgttgtagggtatagagaaagctgaaggtgtagataatctgagattttacagattgaaatgggtgtttgagaatctttgtaatagagaatctgtttgttttttctttggttggtgatatgtctagtgga

SEQ ID NO: 38654 - DNA, 671 bp, Arabidopsis lyrata
  Intron number 3 from transcript 332986 (locus 332986) deri ved from phytozome v7.0 (chr-ID scaffold_9; pos 319146 to 319816 reverse strand)
tccaaaaggacaaaaacacacctcttgtgcaaaaggtttgtacaataaatcatgttttatcaacttcaaaatatgattcagcattattccttacttgtctctatcttaaaaacatataagggttagaataatgcattgtagtcatctttcttggtttttgcatcataggagccatctttaggtaagaaaactagtagaaagatcttaaccatggtctttgtataactgcttgtggtgatctgaagcagataatcaccaaaaaaccaattggtggatttgatccaggtttgctagtgtaatttctgttattgctcatcgccatatggagcgtatttatgaaaattccatatggtgatgacagaaatcatctcaatacttcaggccatgctttaaaaaaacaacaccattcattaccaattgcggcgccttatatacagaacaagctcattgttgaagagcactgtgattgtctctactgagcataatgaattacaagtacttggcattttcgatcctattgagattagatttccttacttttggcccttctttgagtatttacctccaatttctcagcattgtttttgtagaatatgttagcctctaaaatgtagatcttttaacttcgctattttgattccttaggtgtttacagcagaatatactctgat

SEQ ID NO: 38655 - DNA, 759 bp, Arabidopsis lyrata
  Intron number 2 from transcript 317046 (locus 317046) deri ved from phytozome v7.0 (chr-ID scaffold_3; pos 243648 to 244406)
aaggttgcttactcaatctcttcttgagcttatggtttttgaatgctggatttctgatttcatttgggttctagtgttttgataagtctagattagtattcttgctgactcaatctctttctttcattacatttgtcttccttttctgtggatttggtatcttttctcgagtgttgatcatttgagctagtttgacactagtctatgttagggttcattacctttcctgatcaaagttaataaaggctttgtttagaattttgattctggctttagtcttcaagatggttgctgcatttcgttttgtggttaatgaacttgttcttctttcactagtgaacatatggtttcatgtctcacaatctctacaattgtcttccttttctgtttcttaggatttgacattgatccttcagtcttaggcttaaggtttatgagtgatggatactgatattttcatatttcatagaacctcactgttcaaagaacatttgggctctcattttaacactagtctagattagggatcattacatatcgtgaacaagtaaaaggctttgtttggagttttaattctggtttttttctagagataatcataaagtttgaagatttcagcttcattgtctgattcatgaacttgttgatcttggactgttcatatatgcgaaaatgttatcgccaatccataatacacaacatgaagttcttgtgaaacttgcaggatattcaagtgacactaagggaagagatcaaaag

SEQ ID NO: 38656 - DNA, 315 bp, Arabidopsis lyrata
  Intron number 2 from transcript 928829 (locus 928829) deri ved from phytozome v7.0 (chr-ID scaffold_3; pos 4481997 to 4482311 reverse strand)
gtaacaacagtaacgttctcttcttccaaatgtatcaaattcgtgagcatatattcttgggtttcgattttgtgattcttctttcaattttagttttgggagaaggccgaagaagagttatggccagtggcgatgggtttaattatgttaattgttttttgtcatcattaacgttcggaaatcttgctttcggtggttggggtaatgttgagattttcgatattttaattttcagttttgattagagactgagaaacaaaaatcaaattcgtgattgcctcagcaattatcgagctactagaattccgtcgaacg

SEQ ID NO: 38657 - DNA, 354 bp, Arabidopsis lyrata
  Intron number 2 from transcript 915755 (locus 915755) deri ved from phytozome v7.0 (chr-ID scaffold_8; pos 3268647 to 3269000)
ttgttggtgtaccaatgtgagtcttttgattctgattctgatgtttatttacttttaatccaataaagaataaatctttttgttcgttctattttgatctctctgttcattagtttctggatcatgattctgttgtgtgtgtaccaatgtgagtcttttgatttcggttctgctgtttatcttctttgaatccaataaagaatcaatctttttgtttgttcagttgttgatctctctctctctattctctcaattcatgattttcctacgagtttattttttgtaggcttcttgatgatttgttctcacttttgttcaggtctgcacgaagcgcgagtgaagcagcaaagtctg

SEQ ID NO: 38658 - DNA, 300 bp, Arabidopsis lyrata
  Intron number 3 from transcript 491872 (locus 491872) deri ved from phytozome v7.0 (chr-ID scaffold_7; pos 5550395 to 5550694 reverse strand)
aactataccatccattggaacccatccgaaattgtgtaagtaattaattagactaggacgctttcttaagtcgagtttattaaaacgccaaacaatgctaagaaatggtttctagcaattaaataccatataaaaacataatatctagatagttggtttgttaatgtaaaacaacattaaagtacacacactcatatacataaaacataatccaatcaaaaatatgtttaacttacgttttttttttctataactaaacatgtcacacatcatactatatatcttataggtggttcgtcg

SEQ ID NO: 38659 - DNA, 888 bp, Arabidopsis lyrata
  Intron number 1 from transcript 908004 (locus 908004) deri ved from phytozome v7.0 (chr-ID scaffold_2; pos 9941079 to 9941966)
ggtgctgcgtgcgagcaatcgaggaactgagcaaggtaaatgttggcggattcatgatttcggaggatgatgctggtctcttccacgaatttgtatctactattaattacactttcgtagagtgaacttctctagagtgatccaatgatgttgatgaccacgccaaattcatcaacatttgagaagtaataagtgcgatgaattttgattgggtggcttagggggaattccaaaagctgaagtttgggcgaggggagtctcttgagtgacctattatatactatgtgtcaatgagacgtggataattgtaagtggtttttaagagtgatgtggcatcttgcaaaatctccgcttacgtggcttcctctaaaatgcttttgattgtgctgatgtagatatattgagaggcctcaatgaacaccttttattagtaagagatgttgccagaactaagagttgattcgtattattaacactgctcaagccgcatgtatgtaatttaatttagatcactttttagctttgttttgaattattttggaatatgagttctacataacgtgagtttattttgtaagtttcttttttttttcttatactgtggagtgtgataaagctgcttttggagaagtgaattagttcaatatgattcatgtttcctatgatcacgatattcttcatcactccatctacaaacttataaaaaaaaacaattgtaagtacacgattagattgtttgtgtgtgtgcttgatttagtgtttgtacatatttgttttgtaagcaatattttttttaattaaaatttaaaacaagtactaaacccaaactttatatatatatatatataagtattgatttgttaggattttccggtttaattgagagtc

SEQ ID NO: 38660 - DNA, 270 bp, Arabidopsis lyrata
  Intron number 1 from transcript 486694 (locus 486694) deri ved from phytozome v7.0 (chr-ID scaffold_5; pos 20541511 t o 20541780 reverse strand)
aagaaagaaaagcaatctcttgtcactgaggtacataatgattatattgacatctttatttttaattgaacagtgatgaaacaaattttgatttgatgttttttcttttctgaattatatccatgtataatgtttgaggggaagattaatcagggtgacaaaaacatggataaacacaaaagacgatagaagcaaagaaaagatctctgatgggttttgtgacctaaatttgatattaatcaatctctattttgcagttgcagagacaaa

SEQ ID NO: 38661 - DNA, 457 bp, Arabidopsis lyrata
  Intron number 1 from transcript 943350 (locus 943350) deri ved from phytozome v7.0 (chr-ID scaffold_6; pos 23047984 t o 23048440 reverse strand)
ctccgtttcagaaagctgctgcactcgtcgatctggttctccatctctcacgccctaattttgaattcgttttcctcttcacttttcaaaaagtttctatacatgaatcacatcgactccaagagaagagatattctatgtatttatcagttgattaagtcagtgtttttgtcaacctgagaagttgaatcgtttcttctgattgatttcttcataaatagatatcacaattcgttttggtcacaaaatggatttgttccacctgattagtcaatgttttatgtgtatatcctcacgaaattagcatatcattgtctggtggaaattgggaaatgtttgttgctacttcgagagatgttctctttatctttttgctgatttgggaaacctttcatgttttatgacaaggatttgtggtttgactctgatatgtggtattgtggtatctaggctgaag

SEQ ID NO: 38662 - DNA, 647 bp, Arabidopsis lyrata
  Intron number 2 from transcript 475506 (locus 475506) deri ved from phytozome v7.0 (chr-ID scaffold_2; pos 7950937 to 7951583 reverse strand)
gcaagcatcataccactgagtctttccctgatcctgtgagttttgtttgattctttgtgcaatgattacacaatgcttctagtgattagattgtcgttgttgtgtttctgagtgattctctatgatttgatgttttagattgataaggattcatgaaaaatccgagttatattggaactctagtactattcttgttgcataattatgtcactgtgaggaaatatcactgattccttttggaggcttgtagagctgttatgtttaatgttttggatacagtgaattggaagttattaaagctttgaactacgaaatggatacgttcatttcatgtaaggtcttcttcggacaacataactgtaaatgtgtgtgttttggcaaagtacagagtatggctgtcacttgattagattatgaaacattttatgactgctggtgaaacagttgattcttgttaattgtacgaatgtgcttggttatcctttcttttctcctgagtcgttcttacactttccgtttcaagtttcttgagttttcttgacttagcaaagttgacttgcatcttgcacctatgcaattttgtttctaactaatagatgtgtgttttctcagctggcggaggtcaagaaacaagcttcagttcttga

SEQ ID NO: 38663 - DNA, 588 bp, Arabidopsis lyrata
  Intron number 3 from transcript 330484 (locus 330484) deri ved from phytozome v7.0 (chr-ID scaffold_7; pos 22505237 t o 22505824)
cctgcttttaccttcatcctcgccgctgttttccggtaaatctatttaccaaatatctcaaatataataaatgattagttgaaatcatttagctttttgattttgtttgctttacgttacaagattgcttatgctaaaatacaaccgtaaacttgaagttttcaatggttgttgacaaaaaggaaaagaaatctctccatggaccatggttgatgaaaattagaaaagaaagagatctatctatcgttatagttaatgtcacacatattattttttataatgaattctccaatcatcgtttcattagagctcttttctcgccgcaagactcgcgctgagtccacgggatttgtacttagtttttagattaatttacaactgaaaatgtgtacaagtcccattttaatattaatgaaaacgtttgtgtgaaaagtcaacaaattaaaaaataagaaaacgtgtatgggaaagcaaaaagaattaccgaaaacgtgtggaaaggcaatgtttttgaagatttcttgaaaacttacttaccacaacagaaattaagaacaaaccaaatacctttttttttttttttgaagc

SEQ ID NO: 38664 - DNA, 691 bp, Arabidopsis lyrata
  Intron number 4 from transcript 908167 (locus 908167) deri ved from phytozome v7.0 (chr-ID scaffold_2; pos 11524574 t o 11525264 reverse strand)
actacgagaaggtaatctctaatctaactatatatatttgtattttattatgaattatttatatgattttctttttgtttttttgaaactaacattaattaatttactttctaaaatatactgggtctcttttgaagctcgagaaaaacagagttctctaaaacgagatcggtcgagattgcataggtatgtctatcgtgatgaaattgttaaatagatattgggcttttaagtaattcaatcgctttaaaaaatttttgtaatcgtgagagaaaactttagggtttgattgtttcaattttgatttagaatacggaattttcgttttcttttttttttttaaatagtaaggtaaattctaaatatattacgaatatttttatcaagaaaatttctaatttttaaaaattaaaatttaagaaataattatgacggtttgccctagatattaaggtataaatatagagcttcggccacaccattaaaactcatattcgttaacctaaacatatagttttgataatatatatattttgtattgttttggttctaatgaatcgaatttactatggaatgattatgattgttttcttcatgttgagatgacactgatttcatgatttaattttttatagattctgatttcttcaaattgaaatattaattatttttacgtttgtttgcaggttgg

SEQ ID NO: 38665 - DNA, 385 bp, Arabidopsis lyrata
  Intron number 2 from transcript 475902 (locus 475902) deri ved from phytozome v7.0 (chr-ID scaffold_2; pos 12824823 t o 12825207)
acggtaagtctgatggtttttgtagctttgttgtgacttgtgaccattttgcagtcatatggttatatgcttataccatgatatatgtgtatcaaagaaaaatgacacacagggaacagtttctacatgtacatataatagagcatacatagattcttaaactacagtacacagaatgaaatggttttgccttaggatggaattttagtcttattgttgcctgagttgtatcaatattgagttcttgagatgggtttagggagaataacagtctttgagttttgagcaaaatcttctcttctcttatcttctgaatcatttcttacttttactgaatttgttttgcacagagaaagaggagaaaatcagaagaattaaattgtgg

SEQ ID NO: 38666 - DNA, 572 bp, Arabidopsis lyrata
  Intron number 1 from transcript 929584 (locus 929584) deri ved from phytozome v7.0 (chr-ID scaffold_3; pos 7394305 to 7394876 reverse strand)
tcacttcccatatcgtcttctctccctcgcttccggcaagctttcaattttttctttttttgttgtctacccgattttactttcctcgaactgattttgacgcattgaattctgaagaagagttgtgattttgatttcctcaattagggttacgttggttgacttcacagtcgtaacgatttcacgaaatctgttaagagttatgatttggtttatgactttctgagtaaagaacccaagcccaagcgttttattcttgtttgctttgcttctagttcattctcatccgttgtgtccatgaattttgcataagatatccaaattgagctgcccttttggccgtagcataggatttttcagtgtgctggagtttgataatcgtggaggtagtttcttgaagagtattaaatgcttagcaatattttttgattcagctgatacaaaacctatacatgattgaactaaatcggctgagtcttttggttctatcaatcgctgttgaatgagggctagttcaattttttttctggttgacaggaggtgaaaattccagcctgagagttgctgctgca

SEQ ID NO: 38667 - DNA, 355 bp, Arabidopsis lyrata
  Intron number 1 from transcript 491311 (locus 491311) deri ved from phytozome v7.0 (chr-ID scaffold_7; pos 3162124 to 3162478 reverse strand)
tgctactttgatatctgattcaattcgatttcgtggtaatcaatctctccttcgatcacaattctcgagcaattgggttctccaaaaatccctttttcgattgttgtgttgttcttcttcgtcttcttcgttgatttcgagtcgaaagaacgtagctttagtggaagtttctatggttgggatttgggaggcaatgatttagatagctctatgattctcgaatgtatttagttgtcgaattaagttgatgcaagctttattagataattctatcggttccttcttttgatattgatttgatcacttgacttcgatttggagattttgacgtctttatttgtttacattggaatag

SEQ ID NO: 38668 - DNA, 362 bp, Arabidopsis lyrata
  Intron number 1 from transcript 895777 (locus 895777) deri ved from phytozome v7.0 (chr-ID scaffold_6; pos 23832665 t o 23833026 reverse strand)
ctcgtaggtttgaatctgacgtgagttttttctcttcctaattgcttttgttcttaggaatgagagtgttataattactgggattagcttgtgccctaaaagtttgattcttcagttcatatgaatgaatttaattcgtttatgtgaattcccttaattgtttcagtcatctcctgtgtcaatcctgacaatttattggatggaattggtttactgaacttattgctctgcttttgtttcctcttttaagcttgattggtttagattgttatattggctagcttattaattctcttgcctgttttattaagaaaacctattattggcatttgctatattgatcttaattttcatgtaggttt

SEQ ID NO: 38669 - DNA, 647 bp, Arabidopsis lyrata
  Intron number 1 from transcript 925083 (locus 925083) deri ved from phytozome v7.0 (chr-ID scaffold_2; pos 3609267 to 3609913)
cttctgcggaaaccagtaaacaacaaggttgattattcattctttaatagttaaaaacaatgaaatcagaatcttcctattgcttttgtctcatttgattatttgtttttcctgtatcacttagggtggttccatatttgttgcaaacttgtttatggatgcgactattaagcccctctatgaaacatttgaaggttttggagctattaggaaaaatggtatccaattcagaagttaccgatcatttattattgcaatgatcttaatggaaaatgtatgtgcatggttttgaaaccttaaaccctaattcatgtaaaaatctatgacttttcaggagaaaaaaattgtctcggggttgtggcatttgaaactagtgaagcaataaaaactgtcttctttttatgcatttgtttgcccatcaaattctcaactataacgtgatttgaagttctttttttctaattttaaaacgtatcacaaggaatctctgatcagaatcggaaaccgaagagtatctatagaaaaaaaacgaggcaagtttcttaaggcaatgacttatccaagattataactttattaaaatgtaaaaataaaagcctcatattaattgttgtttttggattctgtataagctagcaacaatcaaa

SEQ ID NO: 38670 - DNA, 802 bp, Arabidopsis lyrata
  Intron number 1 from transcript 892294 (locus 892294) deri ved from phytozome v7.0 (chr-ID scaffold_6; pos 1189384 to 1190185)
attcttacacaggtatatatatatatacgcacacatatattattatatataccaaacaaatttacaagtgtatgttttttaatccatagatattcatcaattattaaatgtaggtttatactattatattgtataattaaacacaataacatatgtagatgtgtaagtgccggtataatttcacgtttgacaaaacaatgaactttgttttcgtcacaacaaatccaagtcttataagcacacaaagatgtgtaagtactgatttaattcacattagacaaatcaatgaactttgtttctcgtcacaataaatccatgaacttacaagaaaaaaggaaacttattttcccactttcaagtgttttcttgtaatgatgcaaagaatcacaaatttaggctgaaaaaactctaatgttctcttataggatttatctgaaacattcctttgtggcatttcaaaaaccttgggaaatgttaaataatgaccaattgaccattacctttctgatgagaggttaagggacttgattatcttgactcttaagtcaaggaatctgctgttgtgatggttattaaactgatgctttttccagttcagatctgcagcaactatttattttttcagccaattgaactgatagttcagctaattcagcaattctttttcgtcttttagtatcagtgttgtacgttttgtcgtttagaactcaagtttttgattttttattgttttggttgttgttaagatattttattgttttaaatagcaggaaattcgtataagtctgccaatacgcaaact

SEQ ID NO: 38671 - DNA, 546 bp, Arabidopsis lyrata
  Intron number 1 from transcript 484095 (locus 484095) deri ved from phytozome v7.0 (chr-ID scaffold_5; pos 450536 to 451081 reverse strand)
ggactcggcgggtacttcttctttccattactaattccgttttaattaattgacacgtaaactctctataaatttttgaaattatggctaaaaacttcagtttattaatcatataaaactaatcctacatgcaaatgatgattcatttcctacttgtggtatatataattactacaaacatttattacgtatgataaattatggtattgttaaaatactaatttgttttaatttacacgtaactctttatgaaattagtcccacatcaattttgttgggtttaaattagtcctatagattaatttacccaaaaaaaaacaaaaaatagtcctagatcatgcaatgatcatatacatgcatgtatccatatatatgtaatcatttttttttgctacaatatatgtaatcaattttcatatttcgtcttaagtaataatcatattgtaagaaaaatagtgcatgatgtaactatgagtttattgcaagattaaaaattagaaaacaaatttaggtatttagcggcaaagagtgaagaggatcattacg

SEQ ID NO: 38672 - DNA, 450 bp, Arabidopsis lyrata
  Intron number 2 from transcript 471527 (locus 471527) deri ved from phytozome v7.0 (chr-ID scaffold_1; pos 5737211 to 5737660 reverse strand)
gatcttgttctccggtgagttcttcttcttcctcgttaccttctctttcgaaatctcctttaaatttcgtttctttggttttgattttttcgttttgttcttcgatttgtgtaaagtgaataaatttctgtaatcatgattactgttaagtttcttggatcaagatgtatcttgtgggaagtgtgaagaaagtagaaatttttaatgatttgtgtaaaaagccgagaaaaagaaggttgctttatatattacaactgtatacaataatcaaatcttcaagatttctgatctatgtttcatctttttatgcagattttaatcttcttctctctggtaccacctataaagcatggtttacctgatgtagtgtcaggctaaagggtcttgttttcacttctgtctggtggagcttgtgttggtttaagacggaggcgttgttgttctgaagag

SEQ ID NO: 38673 - DNA, 622 bp, Arabidopsis lyrata
  Intron number 1 from transcript 497150 (locus 497150) deri ved from phytozome v7.0 (chr-ID scaffold_9; pos 1798000 to 1798621 reverse strand)
aacggtaatctttcttggattgttctagatttattgccaagtaccagaaacggattctcttatgttgcgttctaggtctaattttgctgcgtagagtcggattcagtgctcgatctgaggtcttaggcagtacttaagatgttagtttttgcttaagaaacttaaccaagctctgcttagagcttgctttaggacattgttctggatttgcagttttagtgttaaggcaatggttcttcttgtttaagtctatgaatcaggcatcagaatgcaccgagtagctacattttagacttttagatctgttgaaaccaagaggatatcgggttaaatccaaatcacatccgaattcccacttcaacaccgactttgcaatactgatgtacttgctctaggtctagcttcacctgtagtttactgctatgtggataacgatagcaaatgtaggatgtaatttacctacgtgctctagcagtaatttctactgaccctggtaatttgtgtggaaatatatttgcgttttcagctcttatggtggtcattgcctttacattacttattgtttgtgtgttttgatttctgatcaggaataagattgagattgtgaaagctggtgccgttc

SEQ ID NO: 38674 - DNA, 326 bp, Arabidopsis lyrata
  Intron number 2 from transcript 890808 (locus 890808) deri ved from phytozome v7.0 (chr-ID scaffold_7; pos 13426029 t o 13426354 reverse strand)
ttacgagcggcataagaagttcttgaaagactacggtactacacttgtctttcgatttgtagcttcgataattaggttttaattatggacaaataataagggtaaataagtggctttctatttatccaaaacccaagttgtcccaaatcaaaatctggttgatgaacagtcttctcctctgagttaggaaggaggctacagtcagtcatacaagtcttctttttttttggtctccattagaaagattataccttttgccttggagttagctgctatttgaggaggtttggtaatctttgtttcttgcaactttacagttcgttttt

SEQ ID NO: 38675 - DNA, 756 bp, Arabidopsis lyrata
  Intron number 1 from transcript 320841 (locus 320841) deri ved from phytozome v7.0 (chr-ID scaffold_4; pos 14493056 t o 14493811)
cttgattggtgggaacgatacctattcagtatccttttctctatgatctatctgatctatttgaactcttgttgcgaatcttatcttattcggttaaaagtttgaatttttgggcctgattggaaggagctttagatgctgtagaaagccaacttttctttctaaagccaaatagcaaaccaatcattcttttacttcaaaaaaaaagctacagcacacaaaataaaaaaaaggaaatatatgggctttgtaaatcaaattttctacagcacacaaaaatgagctttgggatattttctcgttcttctctctacggttctttccttcttctgctttctcgctttttttttggttataatatatttctaatatttatttatttccaaaaatttaagtttacataataaatacataaagctacaacatacaactaaaatttaccaatcatacttttattttaaaactcacagctacaattctacagctacagcaagaaaatccacagtctaaaatctacagcaaaaaatctagagctacagccgtaaccaatcaggccctttatttgttcagcttctttagctacgttatcttttgttagaaaattttcattttgagatagaattgagctattctggatttgataatgttaatgaagtttcaaaatttagaagttttgtccagcaaaaacaaaaaccagaactcttgccattttccttaactctattttttttcccagattctttggtgataatcttg

SEQ ID NO: 38676 - DNA, 364 bp, Arabidopsis lyrata
  Intron number 1 from transcript 478229 (locus 478229) deri ved from phytozome v7.0 (chr-ID scaffold_3; pos 3630433 to 3630796)
ggaaaaggatcgttcttgaaccttcacatctccaggtatatgcaattacatttcgttagtgtaagggaggactatctttatcattgtttcttgcctgctttctgaaaaaatactctgaaaattttgggtaaattgatttgagttgtcattaggaccaaacaaagagcaagcttttaagtgtttttacagcattgaagaacatccttagctcttgttctttttgtgtttagagagtttatccatttccagtctaggcagatttaatgagttctccaataaattcactgttttagactgcttatataataaagcttcagattttatttttctaatcatgaaactgtttcaggaaaagtatagtagc

SEQ ID NO: 38677 - DNA, 384 bp, Arabidopsis lyrata
  Intron number 1 from transcript 894461 (locus 894461) deri ved from phytozome v7.0 (chr-ID scaffold_6; pos 11431729 t o 11432112 reverse strand)
tttctccaggacaaaactggaaatctaaatccgtaactcaaactttgtctctcctcttttctaatcttttgatgttattgactctttccattgattttctttgtttgccctaaagatctattgttcgtttgttgttgttcaaaaaagcttagatctttctatctttcaagaaacttttgaggagattttaatggcagaatggctccagcttcttgttctgctttgtctttattttgtgaaatttcttgttacttattgacaagctcgtgttttagcttttagtctcatgtttccttcttctaatgtcattatcgtttgttgttgtcaactgttatgatttatgggttgatgaagaggagttttccggcggagtttgtgataagc

SEQ ID NO: 38678 - DNA, 422 bp, Arabidopsis lyrata
  Intron number 2 from transcript 330849 (locus 330849) deri ved from phytozome v7.0 (chr-ID scaffold_8; pos 1559395 to 1559816 reverse strand)
attaaaactctccattagtggcaccgttacgtttggttggtataaacgtgacctttgcaactcattctagagagacgaataacaatattcaaaagtcaatcattctctcttttcttctcttgtcttttgtgtctgagagtgcaacacagaattttggttcgtttagcttttgtttttgagtgctgcgaaacagttgatggtgtggttgtaccctgggattctgattgcgtaacaccgtcacactacgggcaattaaagaattaaggaaagagtgtctcgcctccacacaaatcgttctttgttcgttagaatttggtatcgagtttgtatttttgattctgtttcttatcattatttacaacaatttttcagtttgtcatatcgtagaaatcgtggtcctatatgatttgtcgaagcgggtt

SEQ ID NO: 38679 - DNA, 602 bp, Arabidopsis lyrata
  Intron number 5 from transcript 489011 (locus 489011) deri ved from phytozome v7.0 (chr-ID scaffold_6; pos 8915341 to 8915942 reverse strand)
ttcaaaccaagaaaggcactgacatccgtagagtggtatgctttcttctttctcgtttacatagccagtattgtacttgatatctttgatttcttttatctctggctgtttgctaaataattgaaatctcatacttttctttataatgtaatgacatttgttgatctaagaaaattattaggatgcatgccagaccggtagatattgtaaatggattttgttgctatgtcttttgttgggtaagttattgagacaaatggaagatgccgggctagttttggatatgtacttgaattgtcggacatcatcctgttttttgttataatttaggtttgtatttgcaatgttccttagagaaagactcttgtggggcttagaataagcatgcatgaggtcatcgctagaagacctggggatagataaagcatgtttccctagtattaaaccatcaaatctaacaagttgatgaaaaagcagcttttttcagctgtttggaggggatacatcgttatatgttcattattgtttgacttggaggatttcataagatccattcaatcattatatgttcattatatgctagggttgtgatattgagaaag

SEQ ID NO: 38680 - DNA, 443 bp, Arabidopsis lyrata
  Intron number 2 from transcript 946932 (locus 946932) deri ved from phytozome v7.0 (chr-ID scaffold_7; pos 14025211 t o 14025653 reverse strand)
agaatctgcaggatagagtttcgtttctcaagagagtatgtttctttccatctctagaactaaagagtcaaaagatcatcacaaccataaacactatgtgattcttcattgtgaaatggattgtgccactgatcctaatagtttgagaaagaacagtcccttaagcatagttaaatcttttggattcgacaagcatcgagcgatgattaattgtgaattgtttgagaaagatttttcttgaattaacttttagattaagaacattcccttaagcattgctatgactagaccatgtttaagtcttatattaacaacttcgaaaagtctagttataaagacaatgcctttttttttgttttcactcttgtcaaatctagcttgcaataacgcttgcctgagatgtaagttggtaataatgtcttaccaggtgactggagatatac

SEQ ID NO: 38681 - DNA, 526 bp, Arabidopsis lyrata
  Intron number 1 from transcript 944104 (locus 944104) deri ved from phytozome v7.0 (chr-ID scaffold_7; pos 1273062 to 1273587)
atttctgcttctccaaggtactcatcatcatctctttttctcgattaatcatagaaatcttttttgctttttatctcattctgacataatttagacagaagggtctctctgttccttctcttgtctgatttcataaaatctatttaaatattaagatattttgttttaaatattatctctacttttctattatctcgggtgaagattcatagagattttttttgcatatttatttctcactctgacataatttcgacgaagtgcctctctgttccttctcttgcctgagtcatcctatttctcaaaatcaataaagcatttttgttatatataaaatctgttaattttaatcagaaaacctagaaatttgtttatttgattttactgaggttttgcttacactttttttttttttattgataacggtgctcacatagtattattttaattgataacggtgctcacaaatatccatttgtttatgttaattttatattgttttggtacgtttatagatacttaaacg

SEQ ID NO: 38682 - DNA, 729 bp, Arabidopsis lyrata
  Intron number 3 from transcript 904035 (locus 904035) deri ved from phytozome v7.0 (chr-ID scaffold_3; pos 4618372 to 4619100 reverse strand)
ttttcatctagtatcctcctacagatcctggtacatttctgaatatagctatctgcttataactcttgaagcttgatcataagatcctgacttagtagctttagattctgcaagagaccatttttgtttagctacttgtgcggtttcttgtcacactttatcgaaaatgattagctagttctgctgttaggttgtgagctgagtatactggtcttcttttgtacccttgttgatgtagcaaatagagttgtgagtcttggcccattttactgagagagatactttgtgaagtatttgaagttacattcaaaccttctttcatttttgaagttttcagctttactctcttgtatgttgattagcaagctctggaccacaaaaaccatctaaaccaaaattacacttataatccttatccttaccgacctgagtatatggtcagctggggtccttagccgatcctggtactaacttactagttgacttaagactttctgaacaatttctctaaacttaagcatcttctctcttcaacttatatcaggtccttatataggtttagtttgtttttgttgcaattcaactagaagaagaaaggataatcagatttacattatctgatacgtttctcatatcttgtgattcccctgggtgtaccatgtaatgagtaacacatgctatagtcatctgggagatatagcgataactatttgtttataattgtcaggc

SEQ ID NO: 38683 - DNA, 337 bp, Arabidopsis lyrata
  Intron number 1 from transcript 904035 (locus 904035) deri ved from phytozome v7.0 (chr-ID scaffold_3; pos 4619189 to 4619525 reverse strand)
accatcgaaggtaatccaatcacctctcttccaattgaataatttcccgacggaatcgaatcagattcaagtcgatttcccccttttacttttctccgtttctctatgttcatagtactatcccctaagtttttgatttgaatcttgaactactcagattgcgtgttttttgtgcttcatggattgttagtttttgtgagctagggtttctgggttttgaattgttcaaactcactcatttttttttctaattttccggtgtggatttctcctggaatgctcaaatttctatcttggtacagtgtaagttctaagactttgaagctctttagttact

SEQ ID NO: 38684 - DNA, 725 bp, Arabidopsis lyrata
  Intron number 1 from transcript 945942 (locus 945942) deri ved from phytozome v7.0 (chr-ID scaffold_7; pos 8851702 to 8852426 reverse strand)
catctcaggtgcatcaagaacctttaaacagagtaatttcattttttggaatttctttggtagaatgatttttttttttgtgtggaaaatgttggaatttgatttcacttagacgtaatgtatgaataatttaaaagtattatgtaaaactccttaaggcctaaaccaaaaaagtttcatggacttgttattaatttccgcccattttcataaatccaaccgtagttattcacacgtgtacttcacgtgtacttgtacaatggtattgcttccttctccagccgactgagcgatttgatcttatagagtataactaattaagtacataaaatctttataatatatattggtgtgcgtgtgaggtgtgaattttttttgataaaaatgcatgcattggttttttccctcaaatataattgacaatgaataaatataaaatgacattctctgagcttcttccacttacatagtgtaggtaaatatattatatttgtaatggtatatgaagtaatatatagtagatagaattcatgcacagataattttcttaattataaagcagcaagttggataacaaaaaatgttcacttactgaaggaataaatatccacatgggtatgtatacaattaggcgtattatatatacaaactggagctatatatataattatgtgtgtgaacacagataattaatatcatatctgcagtatcaaactagtttctac

SEQ ID NO: 38685 - DNA, 965 bp, Arabidopsis lyrata
  Intron number 2 from transcript 473679 (locus 473679) deri ved from phytozome v7.0 (chr-ID scaffold_1; pos 17342873 t o 17343837)
cctcgtggaaggtctaataatcacacgtctcctaaatctcgtcttttcaagtaagttggagaattctatgttaaagaaactatgaccttgaatggttgtggtttttaaactagtttttggttttagttttttcccaaaatatattttgtagcaatttaagattttgaaaaaaacaagtttttccaaaaaaaatagggaatctagcttttgagtgttttaacaatttttcaaagaaaaccaaaatccatgtttttggagtttcttcctcaaaaaccatcgatcacatttttcatttcgttttttaattttttttgtaaaaaacaaattatcctctaacataaaaaccaaaatctaaacaatttaaactaaactattcaagttttgaaaaaactaaaatctacaccaaaaacaaaaaccaagaaaatcaaaaactaaaaaccaaaaacaaaaatccaaaatccaaaaaccattttaaaaactacaattttatgataatgggactttggatttttctcgaactcagtttttgagttcttgtttggtttttgaaaaatcgaaaagaacttaaaacaaacgtcatatttccatcctatttgagcatccactacaaatttttgagatcaaatgttttcttgtagtgtttgatctattgttcattttttattttattttatttttgctaaaatttgttcattattgtttgtaatcattactacaatatctacaaattactgtaatttctacattttatcatagttataacttataagtaacaaaatcctacttttaaattttcaaaatcacctaatatttgaaaatcattagtaaaagaaatatgtttgaatttttggagcaagatcaacaacattggttttgtcctttttttaattgatgaatgtttattaaagcactctttgattggttttcttaaacatgttttgctcagaccttctaggttttgaaga

SEQ ID NO: 38686 - DNA, 834 bp, Arabidopsis lyrata
  Intron number 1 from transcript 481856 (locus 481856) deri ved from phytozome v7.0 (chr-ID scaffold_4; pos 13517319 t o 13518152 reverse strand)
gattctctcgttgaatctggttggaaggtactttctccatctccgtattgcttgcttcatctcctacctttgtttgccagatttttttttggttttgtttggtgttttcagagatttcatcgtgttttacttctccgtctctgccgacttcattgtactgcatttatgatacaagtataggtactggagccgtgttaggttggttttgtttgtggtccatcgcattggattgttgtggtcccttttgtgttgagattggtttggtttcgtgtcgatttctttgtggtttcagatctggattttgactgttttagttccagattattagttattacgaatgtgatctcagttttttttttggaatttgagtggatttaggtattgttgttggaccttaacgattagttgattagaccacacgaacggattttgattagtgattgtaagcaaagtagctaattaaatgattactgttttggatttttgctttgtggattttagtgtttgtttagcatataacaatgctgatgtagaatgtgactttttttctgagctcagaggattgttatacatgctgataagcaataggtcttccttgagtgtcttcttaactcgcttttcattgatgagtgactgttgatggggatggtgttttattccattgccttcagattgatatttcgttgaattaaacatttttcttctctttcccttaagccaatctttggcaatcttgtttggctcttagctagaaagttgtagctctgttactgacaccttattgttggtgatgatgcagtaccttgttacacatttcagcgactttcaactggc

SEQ ID NO: 38687 - DNA, 282 bp, Arabidopsis lyrata
  Intron number 1 from transcript 950597 (locus 950597) deri ved from phytozome v7.0 (chr-ID scaffold_8; pos 18755740 t o 18756021 reverse strand)
ttgctttctccaccgaaaattgggaaagaccagaggtgattatggatatgaaatatgatttcacaaaacgtttcaaaagtttttttctttttagtaaccaagaagttatggaccttacgaatataacatgttgattagtatcttcttctcaccgcgggtgttaaaatttgttaacttgaaaaccttttgtttttgtggtcatttaatcaacagttgagttaccgatccacaccgattttttttttttcattttgatttggtttttctttttctttgctcagg

SEQ ID NO: 38688 - DNA, 303 bp, Arabidopsis lyrata
  Intron number 1 from transcript 320107 (locus 320107) deri ved from phytozome v7.0 (chr-ID scaffold_4; pos 1149176 to 1149478)
gaaatcgtcgaatcttcctttctctctcccgtttggtatattgttcgttacttactctttattctttctctttgtttgccatgaaattcgaagaaaaatgatacatagtgattatttgtttttgttctgtttaagactctatctctttgcattcaattatatatatgttcaagatacatttttgttttagatattgagtttgaactttgagacatagactcttgattacactttctgcatcattattttcttgaatatacttttccaggttactagtgatcttttgcatcattaacttgttaa

SEQ ID NO: 38689 - DNA, 347 bp, Arabidopsis lyrata
  Intron number 1 from transcript 472438 (locus 472438) deri ved from phytozome v7.0 (chr-ID scaffold_1; pos 9661810 to 9662156)
attccactcctcaatttctcatcttttgcttcctcggtgagattttcatgtccgatttctctgttactcttcactgtctgaactaatttcgaaacccatttttaaagtttcttacttttaggtttaatcgattctggaattggacttagctcttgaggatttatgttttgatctatgtcggattcatagaaaataaaattagggtttatttgtatcggattagtgtttcaagcccatttcttgatcatgtgtttttgattgtaaagtttggttttttattcctaaattcgcctaattgttggggaatttatgatttggtgcagtgactcttcttgatttcatcaata

SEQ ID NO: 38690 - DNA, 594 bp, Arabidopsis lyrata
  Intron number 1 from transcript 892681 (locus 892681) deri ved from phytozome v7.0 (chr-ID scaffold_6; pos 2923664 to 2924257)
ttgtgctctcgtcctttggttcttctctaatccaggtttgtgtaccattatacacattgtgtccttagccatgatcttaggctgtcatctattggtgcgattctatatgcgtgcaaacaaaccttctatttaagaatgtttaattttctagtctttgatccagttatttactattgtgatgtatttagagggccatgaatcatgatttgttaaacatatgatctttttttatctctatggaactcacgtgacagaaatttgtggttagaatggattttatcaatatggtatgcttggttgatataagataaataggaggctcgtctctctaccccatcgcaacataagcatttgtcatggatccaatgtcattttcaaaaaatttagtgaagaaaaaatgtctaattttttttttaaaattttttttattaagaaagttagttttttttttagttttaccaaagaccattctatagattaagacggtaggatacattattacgacaaccttatatatacataattttgattctcctaagttgatttaatttgtagcgtcaaatgaaatgatgattgcacattttttacgtatag

SEQ ID NO: 38691 - DNA, 421 bp, Arabidopsis lyrata
  Intron number 2 from transcript 471250 (locus 471250) deri ved from phytozome v7.0 (chr-ID scaffold_1; pos 4449996 to 4450416)
gcgaagcgtggatataagctacgtatccttatatagttcttctttgctgctatattattggaaacttataacctgaataacaaaagatacaaactttagctacatacattttgattattttcaccctgaacttgagaaatttgatgtagttcaatcactgtagcgttagggtttatctgcattggtggcgttttatgttctttttttggtaaattgttatttgacaagtttgaatttttttcatgaaattttcttctgggttataatttccgcctctgtcatcttaaaaccaaaccgagaccagattgtagaagagacattgttatctctgtttgtcttgactttgttcttgttttgttctggatatgatttgttcttgacttgatttgggaaatagaagagtttgtggcacattccggaa

SEQ ID NO: 38692 - DNA, 506 bp, Arabidopsis lyrata
  Intron number 1 from transcript 945006 (locus 945006) deri ved from phytozome v7.0 (chr-ID scaffold_7; pos 5055632 to 5056137)
catacgcaactgaaggttggaaaggtcagaggtacaaaattttgaatttcttctctattgactcactgtttctatttggaaaaagtgttacaattttactatctcctcggatatattaccaaaagaatggtgattatgcgttacgaatgagttttatttagttttatagctgtcaatagttcggtccacggatttgttttacgcgtattcaaccttttctctgtttccaaattgaatttgtagtttcctatgttctccttagaccacgattgattcaaatgtaaaaaagacgaactttgcatttgcgtttgcgtttgcgtttacttgcttatagtatactaatcatcatttgtaaaatttaaaatggaaatgtgaaaacaaatgcaaacgcgaacgcaaaaaacaattgtggccttctttagctgtaaacaattatgtggtttgactcttgtatttccatgtgtttttcagtcgggaaaagataagaccagacaaggagcttgaga

SEQ ID NO: 38693 - DNA, 698 bp, Arabidopsis lyrata
  Intron number 1 from transcript 942757 (locus 942757) deri ved from phytozome v7.0 (chr-ID scaffold_6; pos 19717702 t o 19718399 reverse strand)
ctcgggtaaattattttattctttcacttttattttattgattttctcaaaattttatttttctgaccaatcttgtttttagattggtttcggttcggatgtttggtttttttttcaattgttcggtatatggaattttagaaccggatattattattatttattttttttgtcaacaattttattagattagcttgaatttaacatatacggaagtttatcaaaaaagaaaaaaagatagaaaccggattgaaaccaaacactagtcggttttggattaatatttagttcatgtttcggtttagaacatatttaagacggatttttaaaggaaattaaggttttaatctgtttagtttcttccggtttggttcactttcgatttgttagatgagtataagattaataaaaccgaatcagtttaaatttccttttggttcaattttgggtacgattatggtccggtaaaccttatcaatcatatatttggtttaccttttttacatgtgagtattgtaccgggaaaaatctaaaccggtttagctgtgaagctgtcccttttaaactaatgcctccactagattcatgagcaaattcttctgctgatctctttccattaagattgtaacaatattaatacttgcatctgtaactttggttcagacactatcggcaaccgatcttcgtgatccgaacgt

SEQ ID NO: 38694 - DNA, 781 bp, Arabidopsis lyrata
  Intron number 2 from transcript 924339 (locus 924339) deri ved from phytozome v7.0 (chr-ID scaffold_1; pos 32350457 t o 32351237 reverse strand)
ccgaatacttcgtcgctatcaacattactttcaaggttagagtttatataagtagtttacttaaaccaaaaattatatatatgaacagtagttgactattaataatttaatatggctagttctatcaatcattctcacaagatcaacttttacaaataaaacaatatttatctctagatgatgaaagtacgtgttcttatcaaaaaaaaatgtagctgtatttatggcataattaaaacatttagtatttattacttacaacatttattaaatttttaaatagtaattccaaccatatacaatgcatgtattaaactataattaacatagaaatttattaatctacaataatccactctctatttttataataaatgtgttaagattttttcacacatattaaaaataatgacatttcatttttacttttaagaatatactatataatttctttattgtttaatacattaaagtagtagtaatcaaactgaaaattttatccaaaaaatttcaaaaacgacacatattcttaaatgaaatttaagttttaaaaaaacacttaatacaaaacggaaaagtaacattttagcgtgagcagtcaatagaaacaaaaaaaaaatcacgttttcactatttaaatagttaggtatttgcattcgatgatgagatatataaaatattcggattgatttctacatatgtggatatgatatgaaataaaatcttgttcaataaatattgcgaaactgacagcatggttgtgcagaatacgaatacaagg

SEQ ID NO: 38695 - DNA, 499 bp, Arabidopsis lyrata
  Intron number 1 from transcript 933989 (locus 933989) deri ved from phytozome v7.0 (chr-ID scaffold_4; pos 16071007 t o 16071505 reverse strand)
ttaagcttcacgtatgtaactaactctctctttctttctttctatttttttggttttgttttctacatttatgttttcttctctgctctcaaagcagagttatgggttttgttttgtttatctgattctttgattttttttttctgtttggtgaatctgagttgggtttttcgatacaggtatggagatttgtgcctttggtttattcaattgtttgagacaaacgaatttatgttgggagaaactgaaaagtttcctcttttgctccatttgcatttcttcttgtggcattttgatgacgaacacttgaaaaccccaaaaattgtctgcatttttttttgtttggtgcttatgaatttgatttcaaagtttctccttttgcttcattttgatggcaattgattacagaacattgggaaatcctttaaaaggtttttgttatgaggattaataaacaaaatgtgggggattttgatttcgtaggcagagacgactacag

SEQ ID NO: 38696 - DNA, 635 bp, Arabidopsis lyrata
  Intron number 1 from transcript 937374 (locus 937374) deri ved from phytozome v7.0 (chr-ID scaffold_5; pos 12732299 t o 12732933 reverse strand)
gctcttctcgctaaagaaattcttcattctgataggtaatttcttcttttctacagaaaatgagcttcaaggtctgttttgttgaatagctgcacaatttgatagcagtgaatctggaaaaagtagtgtcaatgtttcgaattacaattccaaatgaaattttggtttgtggttgatccctgattgttcttgaagtacttggaatgaatccttcatgctctacaatagctgtactacgtttggtttagtattgaagttataggctcatagcttcttccagtagcttgttgttttacctaaatcaaacaacatagagacaccatttggccgttgatgtgacaattggtctaatctacaatggttccaaccaatctgtattgtggagaggccaaatttctataggaatggatgcttgaagtttgatctgattattgtggtcaatgcagaataattgttcaccctatagtgataaatgctcttgtatcttcagtctactctggaacaatggccaaagtggaactattttgtagtggactattggtttttgaaactagattcagtgcatagttgcgttttgtgtagatatttttgcagtcagaatgaactgtttttcttcttgataagcaggtatttgg

SEQ ID NO: 38697 - DNA, 463 bp, Arabidopsis lyrata
  Intron number 2 from transcript 491097 (locus 491097) deri ved from phytozome v7.0 (chr-ID scaffold_7; pos 2321115 to 2321577 reverse strand)
ccaccgtttggcttgcctacgatactctcacctctgtacgcatctctcttcttttccttttcttcgatttttttgttgctttgatcgtattgcttcattttgatttctcctctattcattggtttctttttctcatctgagaatctgtctctgacatatcgagatcgaatcacatttcaaatacactgttgaaagctaaagactcgtcctttatatgcaatacgcatctgttacccttataagttcaatagattttggtgcaagatcattgcttcatgtgatgatgattcttattttgatattgttggattataaccctagatttggcactgtacttgtctctctagtttaccagatttgttagctcaatatggtttgcgtattaaatggttatagaatctttaatcataggaaggtaactgtcatatcctaagaatgttttcatgtctctttttgtagaatt

SEQ ID NO: 38698 - DNA, 495 bp, Arabidopsis lyrata
  Intron number 1 from transcript 921650 (locus 921650) deri ved from phytozome v7.0 (chr-ID scaffold_1; pos 11471593 t o 11472087)
gccaccaccaaagtaaaacttctagcttctccttgttactctctcttcttcgttcttcatcttacgtactgttcctgtttgttctacaaatttaatataactttattgtgtttcggattttcaggttgaagcagctctttctgtgacctcaaaagatgactctgatgaggcaattaagcacctcataagtatttttgactgtttcttctgtattttcatttagttactacgtatacttatttgtgtgtttgtttatgggtaaataactaggaatttactgcacttaaacctgcggctaatgattcttcatccttggaagatgggaaggtggtaaatttattatctttggttttctattggcctagccgcctagctagtgttgtttactagcagttgtttttctttatcatgtatatgactttcaaactggtctctaattacctcttatccatgacaatagaaaactgctcctgctactagcaaggctacaagctc

SEQ ID NO: 38699 - DNA, 607 bp, Arabidopsis lyrata
  Intron number 1 from transcript 489783 (locus 489783) deri ved from phytozome v7.0 (chr-ID scaffold_6; pos 19140198 t o 19140804)
cttcttcttcgtcaacctctaggatactcgtgtaggtacgtagctttgaatctctcttgcttaacctgaaatcttgtagattcctcttgagagtgaagcattctcgagtttgatctccgagaaattgtacataaatcgcttgtttctctcgttttctttcttttgtactgatttcaaaacttgaaacgcaaagaacaagtgagaagatgaagatcaacaaccaaaatcagtctcaaaatcactacagagagctagtttttgctttggattttggtttttacaattttagatgcgtgattacgattagagagctacaaggagaactagtgattacgattttagactgaaatttgtatttgattcagcggattttttggttttccttgttgattcgttcacgatcgttgtagtggatttcagaattttgctttcgttgcattgagtttagcttttaatttgagttgaactgtaaaatagaatttgtgtctggtaagtatttgatgaaattcctctgagagtgaatcttaaatcttgtgtgtattaattaagctttgtttcttgataaagaattaatggatttagtggttccgttgttcaggttattgtg

SEQ ID NO: 38700 - DNA, 982 bp, Arabidopsis lyrata
  Intron number 1 from transcript 941221 (locus 941221) deri ved from phytozome v7.0 (chr-ID scaffold_6; pos 7046127 to 7047108 reverse strand)
gtctcttcaagtctcggtatctccttccctctttttctctttccatgtttctgcttttgataatttcctttgagagtttacgttgttatagatgatagtatagggagaaatattaattaaatatggacatagtttggttaggttattgtgttctagaggatatgttcatatttttacttattgttattggtccaaatctaaacaaaaacttgcttccattgaaacaaaagcttgcttcaaaaactttcacaaatgtgtcccctctttaatttctttgtgactaaaatatagagtggtgtatttttggagatctttaactcaactgatcatatccaacatttgcaaatgatcatatccgacatttacaagaaatacattaaaaatttttttgtttttaatcaaagatttttataaaacccaaaaggaacgatacatatttaaattattattagaccgtcatgacactgtagtcggatatggcatatggcgtaagaggataaataccaaaaagtttcaaaccaaatcttccattcaggatatgacacgtgtctacattcagattattcctctgatcacggagaggatcaagctaagtgagaaaaatacatcttggagagggtcctcatttttttttgttctgttgctttttaaatatgataaatgaagtgatagtaattaagaacctgtattgttcacctaattactaattaatttatcatttttgaatatttaacgtatttcctggcactaattaattaaagttatctaatctttttggttgaagggaccatgtttgtagttgttcttgtggggttatcttatcttctaaccatttttcttgttttattcatgcggttagtatagtcaatcaatgtctcacctaacaaatttcaaattttaacctcaacacttagattcaccaatattatcgctagaaacaaatttgttatccttttgaacaggaataatcacacatcggggt

SEQ ID NO: 38701 - DNA, 411 bp, Arabidopsis lyrata
  Intron number 1 from transcript 933951 (locus 933951) deri ved from phytozome v7.0 (chr-ID scaffold_4; pos 15957489 t o 15957899)
gcaacttccagctcacacatttcaggtttttctcttacaatactttactgagagagagtattgactgggttctgtttttgactttggtttgaacgatctgtgaaattcctgtcataatctgcaattgcgacaagtttgttcccttttctgaaaatgacattaaaatttcttgttggtatctggtagtttttctttgttgtgattatatattcacatcattttcaaaatctcttctttttcctctgctttatgtgtttatggattaacagacatttgagtatatgtatatgtgtatagttcatgtgcattcttaagatccattacattgagtttaaatgtttatctaacacggtctgttgctcttgttgctgcgcaggttgttgctataactgtatttttcttgctaactgt

SEQ ID NO: 38702 - DNA, 301 bp, Arabidopsis lyrata
  Intron number 2 from transcript 913087 (locus 913087) deri ved from phytozome v7.0 (chr-ID scaffold_1; pos 15043857 t o 15044157)
gtctctctttccacaaagatcatcacgctattcaggttcgttttttcttttgttagattcttttcactttcaaattacttgttaactttttacctttttaccaagagagagagagaaaataaacatgtggttaaatccagattttgttagtttggttggtgatctaactttttttccatttattattccgggattctcgggaaaacttttccaaagaaaatgtgagaaaaaaacaagagagtgttttgattctgagctttgtttgttggttaaattttacagataaggagatcatcgtatc

SEQ ID NO: 38703 - DNA, 836 bp, Arabidopsis lyrata
  Intron number 3 from transcript 913087 (locus 913087) deri ved from phytozome v7.0 (chr-ID scaffold_1; pos 15044320 t o 15045155)
ttgattccttcagattctgctctcttggttgcaaggtaacaaaacaaaacaaaaataaacgttttttttggtggatttgagattaaaaaaacattactattgtctttgatctttaatgcttttaggagttagttgtgtgttggtttggttgagagaattgagaaagtaaaagaatttttctatgtttgggtgagaaaatgcgggaaaatcaagtataagccggtaaaaaatgtaacataaatgtcaaatttttggtttggtaaatatatatttacttgtggagaaagttaactcaataaatatgtgtagctattttgggtctatgtaatgaaccaaatactatttgaagaagaaaaatagaataagtctaaacactaaacttagttgaataggtaaactaactactattcaataatttttccttattaatattgattttgtaattagaccgtcatttattctttaatccttgtttgatgggaattgagaaaaggactttttttaaaaaaggatttttcttgttgggtgggctaactatgggggtaatgatagcaacttcaagaaattttggagttgaaaaataataatagcatttgggttgacgagaaagtaggggagaaaattccaagtcaattaaaaaaagcttcgtccttaagcaacacctcattttaaaggtcttttcattttcattacttttctaatggattgtaacatcttcctatttgttgtttatagcagataattactaagataaccctagcaacaacttaatacttatgttgatcttacaatgtttttgattagatctctggaatatcgaagaagaaaagaaagga

SEQ ID NO: 38704 - DNA, 278 bp, Arabidopsis lyrata
  Intron number 3 from transcript 356399 (locus 356399) deri ved from phytozome v7.0 (chr-ID scaffold_8; pos 1264644 to 1264921 reverse strand)
agctgcggctgcaggttctagtggtggagctggaggtaaaggagctgctaagattaggtacaaacacttcctgatgcactgttttttttttttttttaataatcttgctatcttcattactttgagatcttttattgatgttgtctaacaatacaaagacttggtgtgtttctagcttaactgtgtattacagtctaacattaatgtagctataattttctttgttcttgtaacatttctttctttgcctgctctggtttttcaatgtttagatctcc

SEQ ID NO: 38705 - DNA, 527 bp, Arabidopsis lyrata
  Intron number 1 from transcript 471648 (locus 471648) deri ved from phytozome v7.0 (chr-ID scaffold_1; pos 6207161 to 6207687)
agagtcccccgtttttgtttaacccctcttctcatgtaagttttctctctcctaatccatttccatcttaactaacatcatctctctctccctccctctctctttctttctccaatttctataatacgatgggtcctttttgtgtgtactgtacccgcttttcttcatatcttagaattgggctttgttaaccattgattcatgtcctgtttcattagatcttgctctggatttcccagatctatggatctgcatgtgggttttgggattaaatgtctaatgttgttgggagttcatgtttatatccattccaccttaattttgtttctgagatctaatctttttaatgattttacattgtttgttgctggatattataaatgtttagaggtttagcttaagtcagatatagaaatgtttgattttattgcattgttttgttctgtctgaatttggatctgaatctctgattgttttgtcttgttgaaatttgttttgtaatgacgtattttttgtagatctttgaa

SEQ ID NO: 38706 - DNA, 809 bp, Arabidopsis lyrata
  Intron number 1 from transcript 495293 (locus 495293) deri ved from phytozome v7.0 (chr-ID scaffold_8; pos 15015608 t o 15016416)
ttacacaaagcaggtcaaatttttgaatcttaattacaaaattaggttatgggtttgattcattgtttcctctaatctcatttgagtgtataaaaacttggactttgcatagttttatctataaagctgtgagaaattgtaaagttgttcactttgagaatcaatttcactaaagtagtctaatttgagaatcaatttcagaaaagcacattgtaaaggttgatcattttgctactttatttaagagaaagattcaaaggaagatgttttatgttttatgtctgctagtgattgagatctttactcttagctcatgttggagtataatcgattgatcatctacttgtgatactatagactagtttgtgtgtgtcaagtgttgtgtttgtgatgaaaggtttgatattttggcttcctcagatcatgttttagcctataacaacttggactctagatagtttttatctacgaagctgttacattcgtaaagttgttcactttgagaatcaatttcacaaaagtagtctaatttgagaatcaatttcacaaaagatgtgctttgcaagcttttgggtggcatattgttaaaacttatcctaatgcttccttcatacaagaacaggattcaaaggaagttgttatatgttcttgttgttaatgtctgcttgtgattgatatcttttatgaaaattcttagcttatctttgagcataagtagttgattatcttcttatgatagtctagactggtttttgtgtatttaaatgttgtgtttgtaatgaaagattggatttttattggtttgtagg

SEQ ID NO: 38707 - DNA, 822 bp, Arabidopsis lyrata
  Intron number 2 from transcript 481945 (locus 481945) deri ved from phytozome v7.0 (chr-ID scaffold_4; pos 14131012 t o 14131833 reverse strand)
cttctggtacatatattttctacactaatgaatatttattttctttttttaattaaggtttcttgatttgattactcttttgatccatatatttcatagttgattaatgtggatatatagttgaatggatctaccattttttgtttgactctttccaaatctattcacaatagtatttaacgagtttgtagaatatagtcgaggtggtttatctaattggcataggtataaattcattatcattagatgcacatactaagattaatggaacttttttttggcatatagattgacctatatgcatagttgcatactatcttattatttatacgtataataatcatatttgaataacactatcggaatgtatcagtttttcttagaagatttttcttaattttattaagatagtagtttttttaattaacttaccattttgcacatttatataaaataaaatttgtctccaaaatttctctaaacctttttgtgtcgtttgctactaactaaaatagtatgttcgtattatttaattttataacaatttatcttccaaatcacttgcaatttaaacaaattagtaacattggaattgtcgaaactagttaatccaaacatattttcgttcaattccgtcaaaattttattacaccattatttacgattttgccattttggtaatttcctacatactttcaaaactttatagtattttgtatagtttatcttacttcatgtggttatacatatgtatatacattaactatggacttaaacaatgttgtaggaagtgggagagagccaaagaggagacgcagcaaa

SEQ ID NO: 38708 - DNA, 678 bp, Arabidopsis lyrata
  Intron number 2 from transcript 347167 (locus 347167) deri ved from phytozome v7.0 (chr-ID scaffold_5; pos 4185980 to 4186657 reverse strand)
ctcattattcgtctccacaagctccttggcaataggtacatacatttatgttactactatactatataccatgtctttatatttaatcgttaattagtttaaatgtttaatgtatggggcagaaaatacacaaaaatagtttttttttaaaatcaaatatttgaattgtttttttaaacaaagatttggccggttaagatgtttttaatctaattgaaggattttcttatttgcaaatgtaaaaatttatagagtttcacaagttaaaagtttgtcttctcttcgattaaactcaactttaacatcggattatttcattgttaaaaggtgttttctccacaaaaacaaaaatctttaaaagtatcttttgaacttaaatatgttcgaacttttcaagtggataatatttaatgaaaaatatacactttttcataagtgtatcgtgcaagcagtcacttttcaaaattcattatagagatggaaacgttttccacaattcaaaaaatgtaaaaccctctctctatgtgtatatatttatatgcatacattttatgaatcatatgcatatgtcaccaagaaaaaaagaatcataaacatctacttatataggttataatttatgttataaaatatgaatttattttataatatctttaaatatttcttctacaaattcag

SEQ ID NO: 38709 - DNA, 688 bp, Arabidopsis lyrata
  Intron number 1 from transcript 478178 (locus 478178) deri ved from phytozome v7.0 (chr-ID scaffold_3; pos 3459294 to 3459981 reverse strand)
tctctctctctagccgcagtttcagtttggtctccttagaattgtcttgtctctcttccaggtttgaactaacttctctcttatgtctgttttgatttttctagatcgaattcgtgtttttgttttttttaccctttttttgcgttcggataattaattttctcaggaatagattttgattaaatgacaactctgatttcaccgattagctcagttcaaatagtgaaatttgattttttgaaattgaaaatatctatctaatgataatgcgattaaaaaaaaaaaaaaaaaatcttcgatgttttcctggatttattattgtcgttgtctcttgtctttaccgaatttaatctaatggatgtcgtcattaaacaaatcgaaagcgtttataacttttacagttctttgctgtttcactgttatagaattagggtttatgtaaactgtcctttacttgcttcaaaacttctttttttttgaaccacgagatctgtcaaaacgagattttatccacttctattgaaaattgagttcaattacttcattgtttcaatgaacaatttctatggccattgatctaagacatgcaataaaacggatctgggttttctagaactcaccttttttcttgtgtatgtatagtttatttcttgttgctaagagttttgtttgtttgaatcattttcag

SEQ ID NO: 38710 - DNA, 391 bp, Arabidopsis lyrata
  Intron number 5 from transcript 319944 (locus 319944) deri ved from phytozome v7.0 (chr-ID scaffold_4; pos 90864 to 9 1254 reverse strand)
gctgcaggcaagttgtaatcagtaccgggcctgtgaactttgaggcccaatacaaaacaatttatttttgatggtttttttagaagaaattaaatcttgagaccaaatcttaaaattttaagaaattggggcctacttttgcaaaaacaaatagataaaatttaacaattgagactaaatctgaaaatttcaaaaaaatgaggcctattatttgcaataacaaatatttttgaggcctaaatttgatactaaaaagcttaaattttatggagacccaatacccatgtttcttagaaatgggtggcgggccgggcctggttgtaataagaataaattctccttaatcttactgatcttgccaagctaaccaatctcaggagtcttcttcatt

SEQ ID NO: 38711 - DNA, 477 bp, Arabidopsis lyrata
  Intron number 1 from transcript 473453 (locus 473453) deri ved from phytozome v7.0 (chr-ID scaffold_1; pos 14941183 t o 14941659)
gctactttagtttctttgttcaccgaagttcaaaggtatgaactttatggattttggttttcgtttttttggatttctcttctcatagatcaatcactcagattggtaatttatgggttttagcttcttaacccaatcatcgaattaatcatttaggttctttgagtatcgaacttcttagttttctcaacttgaaagcaaagaaaaaaaactcaatctttcattttttagattatcgattttgctaattttgattctttggaagtcttatatttctggttgattgctattaacgaatctctaatgtggtcttcctctagtgagaagtttacatttttatgtgtgttactgttttgtgcctttagctttttgaattaagtttctagggttttgtaaagtttagattctttcctttaaatgcattaccttttgtagtcttatagaatttggttttcgtttttatcagtgttttgagta

SEQ ID NO: 38712 - DNA, 479 bp, Arabidopsis lyrata
  Intron number 1 from transcript 491005 (locus 491005) deri ved from phytozome v7.0 (chr-ID scaffold_7; pos 1905198 to 1905676)
atcctcctcttctcgcttaccatccgactcagcaggttttgtttttttttatttgtcttaataaacaatttgagattcgcacaacttcagattcaaaccatatgcttttgttagaagaaacacggattgtttaacacataaatatttgtgagtttaattttcctcactacttacacaatttttgtttacctctaaacaatacaacattgtatatttgttaaagcctttttcaaaaaaaaaaaaaaaaaaacattttatatttgtttttaatcaaacttcattctgaactgcaatttccgtttgtgttgggaaatatttttaaaacattaagatgttgtgttctgttttgaacaaaacacatataatataacatgaaatacaaaaggcaattataatcttgtgtttgtgtacgttgattttttgttgtgaagtgtttaaacttaatgtgtatttgtgtacatatgattttagggttagaa

SEQ ID NO: 38713 - DNA, 447 bp, Arabidopsis lyrata
  Intron number 1 from transcript 315379 (locus 315379) deri ved from phytozome v7.0 (chr-ID scaffold_2; pos 4106633 to 4107079 reverse strand)
acacagctagttcattggtattgtttctacaaacttgtctttagtttttttccttaactcccaaaccacatttttgtgatatgctaagtttatacatatttcatataactatattcatttggtgctacggttatatcattttaatctcaatttttggaaatatattcaatagccagttgtagaagaagtttcagcgcataagcaacatcgagatcaatatcaacagtttgatgatttctctcaaaactactctacaagaagaatattcaaggtttttacatattattttcttgcttcattgtcacaaataaaaacttttttcaatgaccataaactttacttcttcttaccactttggcttctctaaatattttgtatgaggagtagttttaagtttctttttctgttgcagggaaaatttaactctggttttctacaacaagcatt

SEQ ID NO: 38714 - DNA, 637 bp, Arabidopsis lyrata
  Intron number 1 from transcript 317800 (locus 317800) deri ved from phytozome v7.0 (chr-ID scaffold_3; pos 3966344 to 3966980 reverse strand)
gtcactacacggagttcatcccgtcgtaatcgtagctggggttccgttccaccggccgccatgcgtttgaaaaaaaatcgtcctccaccacttccggaaatatgttctcgtaatcggcgttgacgcagtcctcgtaaacgggtaccactctcttcacttgaaaccgaacccccagctttattgcctccgccggcaactactccacaaattatgcttcgtaggcccacggctatgcacccagttgcaggtatttcgcccagatagattgtttccctcttaatgctaggctactgtttataccacctgtttgattttcgcttttccccaccctcctaatctgctcaaaagaactcatctcatgccagaaacaattttccccatctcccgacacaaaattactttgatttctttttgcactgcctgtttgattttcaattttgcccaccacactaattgaaagaagaacgcatctgttgccataaattcatatgtcagtttcctcacatatggtgcctttctactacgtatgtatcggttacggtttgagttatctatttcacttttgtggttgttagtcttgatttcttctacccttccatttacggtattgtctgctcgcctgtactgcaggttcacc

SEQ ID NO: 38715 - DNA, 734 bp, Arabidopsis lyrata
  Intron number 1 from transcript 920259 (locus 920259) deri ved from phytozome v7.0 (chr-ID scaffold_1; pos 5782833 to 5783566 reverse strand)
atttattggcttgtgctgttgatagttgctctgcagtaagtaactatagcttcatagaatcttgatagctcttcaaacgaatctcaaagaatataaacaaagtgttatctcggagaatgaaggaagtttctttaaagcttgagttactcgtttctcttcttgcggtgtaattagtaaataaaagaaacctgcattgtgttacgaatgcagtttttctttacttcattatctcaaccgattaaatccatggaacgaattgagagatatataagaccggattctaaatttgaacactggctacagaaaaaaataataacaaatttgacttgttctatttacctcttgaaagaaatcatagaccgtaaaatccaaaagttttttctttaaagcaaaacttaagcaaaatttaagaaaaaaataagaaaaaagttaaattgaaatttcatatttagttgatgagttgcattattataagtaaaataatctatgattttttttctaaaaacatcacacttgcaaatatatgtttacgagcttaattatgcacaaatttctatagaaaatttgctaaaacaaaaaaatttcgaagatatattgtgattatcacttaagaactatattttcaaaatattactaccaaatttgactaaccaagacaattaaccactagtccatgtaattgtcatctattttcaaactattaaaaaaattgtagagactagagacaataaagt

SEQ ID NO: 38716 - DNA, 461 bp, Arabidopsis lyrata
  Intron number 2 from transcript 894175 (locus 894175) deri ved from phytozome v7.0 (chr-ID scaffold_6; pos 9712900 to 9713360)
atcatttttagcctcttcgctgccattggaagcaggttctctaattaattccttctaaaatgatcttctttaatttctataagacccttactaaaaatgtagaagtgatatcagttttttgtccacttgcttatgaaggtcccttaaataaataggttgtagaaaatattattccactctcattaaactaatcttgtaagaaaatattttctccaaaatctattttgaatttatgagttatttggaactaatgatcaaaatatttctaaacgtgcttaatttacacataattttagtcaaaaccacgagcaacatttattcataatttagtcaaaaactacgagtaactttaattcatcaagagtgcaatatttttctccaatattaactactattctactaatatacatcaattgaaacttgtaggtggtcaataatagcagctcatctaccgggaagaa

SEQ ID NO: 38717 - DNA, 263 bp, Arabidopsis lyrata
  Intron number 1 from transcript 919704 (locus 919704) deri ved from phytozome v7.0 (chr-ID scaffold_1; pos 3615908 to 3616170)
tggctacaccgtcaaggccactgttcgagacccaagttagtttcttcttctctttattttttgtttccttctgccttcttctttagataatatctaaataacattttccgtaatagaaagacggttctctagtcatataaaattctcaaattttcgttcttcaaacctgttacggaggattaaaaaatataagcattttgagatttgaaatatgtctcttatctctagaggatacaaagaaaacaaagcatcttcttgccctt

SEQ ID NO: 38718 - DNA, 382 bp, Arabidopsis lyrata
  Intron number 3 from transcript 932794 (locus 932794) deri ved from phytozome v7.0 (chr-ID scaffold_4; pos 5418075 to 5418456 reverse strand)
ccactctttcttccatcaaatctttcaaccaggtgagattttgattttaatcccttgtttctaggtctttgataaatctactagttaatatctgtatctgtttttttttctgacttatagattgactcacttgcttcatgctgactaaacatgtttggtcttatatgttctttaaatttcatttgtatggcttggatttgagtgacactgtattacgtattacttgattggattttaaagaattttagtttgttgagcttccaatggctttgaagatagatatctagatattgagattactatgttctcataatgtgtttgatctgttctatttttttttctctcagttgattgagactttgattgatcgggttgatctatc

SEQ ID NO: 38719 - DNA, 569 bp, Arabidopsis lyrata
  Intron number 2 from transcript 480863 (locus 480863) deri ved from phytozome v7.0 (chr-ID scaffold_3; pos 23828296 t o 23828864)
gctcgcaagggtactggtgggagatcttccgttaggtatgtcatttctctcttttagggtttgtttccttattattatgcttgagaattctcttaggaaggagaaaatgaaattggtccgtgtttggatttaagttagcttagaggatagcttttgtgtatacgttgccgtttacggataaatgtatcatctctaatggctttgtggtagctttagtatagtgaatttttctgtgctttctgttctgtttgtctagggtttggtttctaaggaaatgctggagatttctcatgggaatgagaaatgttattggtgtgttgctgttaggttaaatcaagcttagtttgtatatctttttttagttttgagcttagaggatagcttttgtgaattagttgcctttatagagaaattttttcatttctaaggggttcagtgtagcggaatttgtcaatttctatcgagagcttctgttaagaggaaaagaatatacgttggtctatgaaaatcttaatttctcctttgctttgccagtggcattgtagctacagtatttggagccacaggat

SEQ ID NO: 38720 - DNA, 322 bp, Arabidopsis lyrata
  Intron number 2 from transcript 482173 (locus 482173) deri ved from phytozome v7.0 (chr-ID scaffold_4; pos 15352712 t o 15353033 reverse strand)
gcttctcaggttaaaattttctcataaatctttttttctttctttcatttattcattaattttgttttagttactaatctccttatttgtttcttcaattcaagaaactaaagagctataatttttttatatgcaattttgttttcctaattaaacacacaatttgcatgatttaatgtgttttaaactttgaatctttctttctcttagcatgattaatcttgcttctctattttttttgtttgatgcttataaacgttttgtttttgtttttgatgtatatatagttacctggaagaacagacaacgagatcaagaacta

SEQ ID NO: 38721 - DNA, 301 bp, Arabidopsis lyrata
  Intron number 2 from transcript 322272 (locus 322272) deri ved from phytozome v7.0 (chr-ID scaffold_4; pos 22422906 t o 22423206)
aattataccaagaagatcagtggactccgcctcaagtttaattaggtgcacggttattgatcatggttcttccatgcctgatgattaattgatcgggggaattattgggaggatcaacggctgtgtgatttgttgtctgattccaagtaagctttgtgaatcaaaatccatgtaataactgcaaattagtgtaaggttgtacatatagataggcatgatccaagaaaggttataatgttgtttttttctttcatggccttttgcagaaacaaggattacagacacagttatttgtgtgcaa

SEQ ID NO: 38722 - DNA, 481 bp, Arabidopsis lyrata
  Intron number 1 from transcript 906196 (locus 906196) deri ved from phytozome v7.0 (chr-ID scaffold_3; pos 19245191 t o 19245671)
gccagtcttaaccaactgccaccaccgtttttgtggtaccattcttcttcatttttctgtttttgaagtcaattagtttcattcaagcttcttcttttttcgttgttgagcattgattcacttaaaagtttcttctttttctcttttttgagcatagattcacttaaaagttttgcttcttctgttttcaggtcattttgcttcaaatttctttctattttttgttttgtgcccaacgtttcttccttgttcctcgtatagagaattagaaatttcattgtctcgtgcttatagcttctttctttcttgtttgtggtttgattgagagtaaatgaggaattaataatgggcaatttctgaattgttgtatgtgatggttttatgtgatatgatttcgttggtgtttttgtcatgggtaagcaagcatgctagatgataactatttatttatgtgaccattatatttttttatgctaggcaa

SEQ ID NO: 38723 - DNA, 306 bp, Arabidopsis lyrata
  Intron number 3 from transcript 478629 (locus 478629) deri ved from phytozome v7.0 (chr-ID scaffold_3; pos 5076481 to 5076786 reverse strand)
ttacacgtttacaaagacaggacaattctttcttcatttcttgattagaatcttgcaaaacatattattattaactggcttttgtttagagttttgagttttgcattatgggaactacctacacttatgctgtctaaacatggtccgcattcttgttttttccaaacctgtttcaagattctcactttttttcgtttctctgacgcattatccttctttctttgtatgttttgtcccttggattctggtggcagtttcttcggtttgacatggtttgattatcctcagcttgtcttttacatcagc

SEQ ID NO: 38724 - DNA, 1047 bp, Arabidopsis lyrata
  Intron number 1 from transcript 887770 (locus 887770) deri ved from phytozome v7.0 (chr-ID scaffold_86; pos 1261 to 2 307 reverse strand)
atactttaacccaaagagtaaaaatcaagctacttgtatgtttacagctagagaaagatgctcatgattcatgtttccgacaaattaataagtgcttttaccttttttcttattctcctaatctaaatgtcacatttgcgttcttttttttctttaaccaaatttgagtttcctttctcggaaatttatttggaaattttgaattatacaaacgctataatcttaatgtttagaactaaaaagttgcaaattctacactaaaagagtaagtaaagaatcaatagtcacatgatataaggatatacaacgaagaacatgacaaataggagtgatacattatatttatagaatatccctagtgaggaaaaatgatttccagctacacgaactatacaccaacacatcaccacacatgcagactattttaatgtctcgctaactacacgaactattggtattacatacgaacatccccgtactatcaccataatcatttctagataatataaatgtcttgttaactacacgaagtatttccatcaattttttaaaaaaaaaataattagaaattgaaaaaataactaaagttaattagaaaatgaaaaaataactaaagttaattagaaaaaatagcctcacacttttagttagagccatatacttagattcaatagttgagaaggctaccaacggttactagtatgtgaaacctttattttccttagaaaaatgccaaagattaattcaaaatcttagctgtgattatgtaagcagattttgtctatataatgcgagacagaaaattcccatttgagtgataaaaacaatttgttgattgagtgcattaatttaaattgctggcaaaaagttcaatgtgattacacaatatagttgaacccaataaggtgaagaagcctatgactagtagtattagcccattccttaggaggatatgaaatgattataatcagtaatcacccaaaaaaaaaaaaaaaaagttacataatatcacttgtcgattttaggttttcagaccaaaagtctcag

SEQ ID NO: 38725 - DNA, 117 bp, Arabidopsis lyrata
  Intron number 4 from transcript 496925 (locus 496925) deri ved from phytozome v7.0 (chr-ID scaffold_8; pos 22624868 t o 22624984 reverse strand)
gaggatatcaccattgtaatcttctttatttccttcttctttttggtttctcacttttggaatgggagtaatttttcttatttttgactacttgtgggtgaaatttgttttgctaga

SEQ ID NO: 38726 - DNA, 743 bp, Arabidopsis lyrata
  Intron number 2 from transcript 486497 (locus 486497) deri ved from phytozome v7.0 (chr-ID scaffold_5; pos 19772335 t o 19773077)
tctagaacgaggaagtgtttatcattcttcttctggtaatttcattttctctttgtacgatacgatgcttttttttgcttcttatggaacaaacgcgttttcttatctctcaaaccaaattatacatctctatctctatctctttcactttttccacgttttctcttttttctctctctggcgattcgctggcgattgcctttctatttgagatttggtgttgcagatctatgtttcgccatttgcttttttgttgctctttctcataaattcgtttagttttctttttattatgtgtgttgatcttctttgtaagtcctatttttagtatcccatacgaaattgtttgcgttggtttctctagtcgagattagtcttccctgcagattccatttctcttttgactcaattgctagtttgttttccatggaagcttgttgctaaaatcttttgttacttgtttcaattttttttgattgtgaataaggggaaagctaatggatttttttgctttggaatctttgaaattttgtttcatcgttctctattttgacaagtctgtgctttaacggaaattgaatgcttctcacgtattataaagtcagctaaaagatgtttgactagtcaccctcttgcatgaagaaatcatttcttttttttattgaaaaacatccgaagctcacaatttatgattttattttattgcagctgaggttgtagctggatcggcagcgtggttaggc

SEQ ID NO: 38727 - DNA, 297 bp, Arabidopsis lyrata
  Intron number 1 from transcript 323856 (locus 323856) deri ved from phytozome v7.0 (chr-ID scaffold_5; pos 16438781 t o 16439077)
tgcttgaggaacctgaagattcaaacatcaaagctgtattacttctattccctttccttttctttttgctagatttagtgaattgttgtgattgtgttgaatcttgccaatagagcttagatctgggttttactagaagaaattaggtttctttgaatcggttgatgcaaattagttctcggatgattctaattactgtctagggttattagatttccagatttgtttggatgattttgatttctcgagtttttttttgcaggttacttctggtgacacgccatatacatcagcaag

SEQ ID NO: 38728 - DNA, 557 bp, Arabidopsis lyrata
  Intron number 1 from transcript 900070 (locus 900070) deri ved from phytozome v7.0 (chr-ID scaffold_4; pos 5314826 to 5315382 reverse strand)
gtatatgaaaatataacgttcaaaatcggaaaaacggtctatttccccccgagaactatcgtatctggccagataaagcccgatctttgacctctgtctatatacccataaaacggaagttaaatgtttatttccccaccaattgaaagttcgagagcttaatgtccatgaatcttaagttcgatatttaaaaccccatagcgctgggtttaattggtttattgtataccaaaccgatgctttaaccaattaaacttaattagaaccagcctaaacccaaattacaacccgtttatgactcattacccaaaaaaacaaatcgaaaccaaaaattgaaaccaaaaatcgaaaatccccaaattgctctcgacgaaccctagaatccccaaatcacttttccccaaatttgatcgatgtcgttagtccttcacgaccctgatcttgttggtgatgtcgatcccgaagctgaagatagagatcagttttaatgataattgattcaagaataatgaaactgagggttgtcttcataaaactgttgcagcacactctgatta

SEQ ID NO: 38729 - DNA, 858 bp, Arabidopsis lyrata
  Intron number 1 from transcript 472923 (locus 472923) deri ved from phytozome v7.0 (chr-ID scaffold_1; pos 11947487 t o 11948344)
agaggaaagctgtacgagttttgcagtagttcgaggtatatatctacttttgtatattattatatggacataccctttttcatatatatatatataagtaacacaaaaatgtcttgttgtatgggtctctgtgatgtgttgttgtgtcgtacgtgttctatcatccttttaaaagaagcaaataggaaattttttgggatacccaaatctgtatcattttaaaacatgtttgcttttttttttttgtgtttctcttgatttccatttttgtttttgattttctcctcttctgttttctttctatttttttctttgttgctggattttaaatgcttatttatttgtctttccttggaattatatctacttagtttacattatctgagaacaaccatcgatctgatatgaaattagggttacttaatttcttatgtgagttatttaattagggttttctcttcggagcttaaagtttccaccttttgatttggggctcgtccaattcgatcaaatcactcaattttgttgtcagattcatataagttcataggggattattgtttccacggctacccattttggtaacccttagggctttccaattttggtttgaattgactccaatgtcaaattcatctaaaatccattggatacgtacttggagattcatccttctttctgggttctttagatcttctctggaaaactcccagattttgttgtaaaccctagtaaacagttaaaaactcatttccagaacttgattttgagattaccaaggtttattggacacttgatgtgtaattaatgaaagaaatgatgttttttttttttttttgtgtgtgtgtggtgtgaagc

SEQ ID NO: 38730 - DNA, 330 bp, Arabidopsis lyrata
  Intron number 2 from transcript 932900 (locus 932900) deri ved from phytozome v7.0 (chr-ID scaffold_4; pos 6454941 to 6455270 reverse strand)
caaaaacccactgaatataaccctttgcaggtcccatcttcctacaacttttgccattatgacttgtatattctaattttttcttctttcttattgcaataccatgtttcttatgtgtgtttcacagattattcccttctacaactactctcaggtcccagaaaatattgttcacacccctgatacactgttttcgcaagatgatcaaaataaggtgtaccatcgaacttcacatacccttacaatataagccactataattttgaaatttttttgtctatctttcctgttgtaggccttgttatctattggagatcctatttttgatac

SEQ ID NO: 38731 - DNA, 287 bp, Arabidopsis lyrata
  Intron number 1 from transcript 926748 (locus 926748) deri ved from phytozome v7.0 (chr-ID scaffold_2; pos 15977401 t o 15977687 reverse strand)
ggcgatcttgctgtgtccgtggcagacatcaggtgaggaacatttgattcaatttcattgattttgctttcgaatttcatctttcttgctgtgaatttagggtttattggaatcattggacagagttaggccttaggttctatctcaatttagttcgatgaatcaatgaataattcatttgtctaaattgggttttcctcagaagatgatgatatattattttttttgttgattgaatcaaaactttagaaagctgttaacttgaaactttgtttattgtgaatagg

SEQ ID NO: 38732 - DNA, 672 bp, Arabidopsis lyrata
  Intron number 1 from transcript 900620 (locus 900620) deri ved from phytozome v7.0 (chr-ID scaffold_4; pos 12812077 t o 12812748)
gtaggctaaagagtgttctgaaatcacaatgacactattatgaatgaagatgaaattaccttatataagtgttgaatgtgtaagtgtttttttaaaaagtataaatttccatagaaacttttaagtgcatttaaacattagattatgcaatcttaaaaaacaaaaataatgagatacaacatagatattagtcaaatttttaatatttaaagttattttcaactgttatgattctaaaaactgacctctatgacaacataatatattactaaatccacgtaacgcgtggatcattttctagtatttttgatcaggcaaaactaaaaagtcgcgggtttgagtaacacttgggaggaaaccatataaaatgttttggtttttggactgaagagatgtacggatctaggtctaaaaccttttagtcgttcaagaaaaacaaacttaaattaaaatattttttgtatttacgcacgcaatatagaacaagttttggtcagatagaatgatttatatcttaaaaattgtatatacaatcgaataaacatcgatattattgttgacaaaaaaacatatacaaacgtcgatacaagccaaaagaaataaatagttaagttgcagactgtttattaataaatagttaatattccgaggaacaaaccagaggtggtgggc

SEQ ID NO: 38733 - DNA, 459 bp, Arabidopsis lyrata
  Intron number 4 from transcript 481489 (locus 481489) deri ved from phytozome v7.0 (chr-ID scaffold_4; pos 6257505 to 6257963)
tttaccccaaccaaatttgctcttctgggttttatgaaagttttgttttttattactcagatcttatcccttgttctgttttttttctttgtgtttcgtttcgaattgttttttttttggttgaagattagggttttgtagatcaattcgtcgttgtttttcttggatctgattatagcagttgaggtgttagctaatcgaattttagagcccattttgttaatggtatgctactgaacttgcttcatttcagaggtactaatccaatatattgtaaagatttgttctttttttttttttgtacttgcattctttgaacatgtttgctatttgggtgagtgagactctatgtatagtcatcaatgttgagcaaaaggatttatattcactggatggtttcattagtaggtaaagcattgtcctgttatagtggtgaagcttgaatcttgatagttttcg

SEQ ID NO: 38734 - DNA, 351 bp, Arabidopsis lyrata
  Intron number 1 from transcript 949899 (locus 949899) deri ved from phytozome v7.0 (chr-ID scaffold_8; pos 15531977 t o 15532327)
cgcttgttaaacatatcaacgctcctgttcatattgtaagcttcttcttcttcttcttcttcttcttcttcttcatgcgctctgtttttctctgtttatgcatctatatttagtcaatcggttcttcttattgttgattcaatccagaaatttgaaatctccatctattcttgttgatgattgatcttactgaggaagacgattggtttctaattatagaagcttcgtagcatttgtattgatctggttttgatttcttgagaaaaaggtcccaaaaaaaacgctaatggatttagtttgaattactggtgaataggtgtggtcacttgtgagaagatttgatcagccaca

SEQ ID NO: 38735 - DNA, 944 bp, Arabidopsis lyrata
  Intron number 3 from transcript 493750 (locus 493750) deri ved from phytozome v7.0 (chr-ID scaffold_7; pos 20646868 t o 20647811 reverse strand)
ctcgcccatcgtctttgtccattaacaaggcaagcacaaaatctgggatcttctatgtgtatgatttggaaatctgagtttctgtggtatcatataccaaagcatttacttcatcatgctatatctaaacgatgggagaagcaggttttctcgtacatgcgaaaagccttgcttctgatgatagtttgacattctttagcattcagaacctcgtctaggaggtgatacatgcttctttctagttcatggagatgatttcatttaggcaaacctcttacccctgcagtttcagtgtactttgtggtttatgttgttaaattgtgaggactttggcagacaagttattggttgcttttgcaacagtacttcgaagctgaggagcttcagtaagatgaagaccaatatttgttcttccagtagataagttagacatgttgattgttgtgcttttcagccacagcttaaaatcctccaaagatatgtggtgttgtggcgtttgaggaatgttcagtaactgttcttgcagtaaatacgctttgtagtgacttaaccttacccctacacagtctatctgtataatacatgaagttagtgatgaacctcatgctacatctggattttcttcagcatgctatgagcgtcttggttttacttttatcatcatagccttggtacaaagagtttgttttggaatcggatcagtgaccaatatgcagtcagtcaaattcattgttcctccatttcatttggttttctcattgggtggttcttgactactcggtggagctcattactttgactgcttttcgctctttcagccaaatgggtggtctcttctttggaatttttttttcgttgacattgtttttgaagttcgacagacatgttgtactgaagtgattatgttctattgaatagcctgtccgtagggtcaggagcttgcc

SEQ ID NO: 38736 - DNA, 507 bp, Arabidopsis lyrata
  Intron number 1 from transcript 493750 (locus 493750) deri ved from phytozome v7.0 (chr-ID scaffold_7; pos 20648011 t o 20648517 reverse strand)
atctcctctcgttcggattctactgtcttcttctggtaattcttcttcttcttctatcttgttgcgaatcattcgtccccttgaaccatcttacttgattgatttcgttccactcttatctgcttgcacgcaattcccagttttcgtttcaataactatgactaggttatataagatcaatagatctagggttttgattgatgtttgtttaaattgagaacgatagatttccccttcctaagtaatctagggttttatccgatttcactgtctccatgtgctacgtttgtggttctgtttacctgatttctagctctcaatctgataggatcgagtttttctatactgggttgctctaaatttgcaattttgttttagtcttaagaataagccagttttatgattatgatatgtttttacttgttcatggtttttggtggtaactaaacaatctttctctaatctatgcaggttttcagattcagttttattattgtgtttcataag

SEQ ID NO: 38737 - DNA, 372 bp, Arabidopsis lyrata
  Intron number 1 from transcript 942996 (locus 942996) deri ved from phytozome v7.0 (chr-ID scaffold_6; pos 21144585 t o 21144956)
tttcagacaccaatcgttgcctccgaggagccttggtatgctcatcttcttgttttttggctatacatattattttcgttactataaattctaatagtgtttgtttttttaaacgattgtatgttttggatgaatgaaagcaaccacgatgcatgaagaagattcaggtgatgtttcaattgatcttttatctttaatttatcgattttctaattttacaaaaatgttctcaccgagtagaatatacttttgagttttgagttaaatctttcacagtctgttgtggattagcaacgtttcaagccatattaactattgtgttgtggcagttcgaaagattcatataaattggactattgctacaaaaaaaac

SEQ ID NO: 38738 - DNA, 551 bp, Arabidopsis lyrata
  Intron number 2 from transcript 487775 (locus 487775) deri ved from phytozome v7.0 (chr-ID scaffold_6; pos 3801876 to 3802426)
acgtcgtctctgcgcctctttccgtttacaaatctgtatgtttttcgctccttgactgcgtatttttggtggaattatagatagatcgagaatttttttggattcgtttagtttcgtctttcctcttcatgatttacccatctgagctctgcgggaatttttcatggattgaattatatatgtatccattttgttgtgtattatgtatgtaatcgtttcatttacacaaaatttgagaagaatatgagaatgttgtgtaagtagacacaaatctgtttacatgaatttttctctgattaatcttaagactgttagcaattcctgggattttttcccttttgattgattgagaaagcttgtagttgagtatagtgcaataaaaattgggatgaagaagaagaagaagaagagagtttagcttcatgtaactgttgtagtttgggtgcctaacactcattagaaattatggcctttttgtttatcgcatatgcgtagagaaagtgtttgttttgactgctcttgaaacgttcttgttttgcagcttgctggta

SEQ ID NO: 38739 - DNA, 434 bp, Arabidopsis lyrata
  Intron number 1 from transcript 344504 (locus 344504) deri ved from phytozome v7.0 (chr-ID scaffold_4; pos 11560657 t o 11561090)
gagcccgacgtacccaagaagccccctagtgcaaggttcagcttcttcttctttccaatgtaaaccgtgaattgagttgaaacctatgccatgattatttttgcgtttgtgtttgcatttgaaatttaagattattaaatattataacattgtaaaatgcaaaagaaaatgcaatgttcgttttgacattcaaaacaattcgaaatcatgtcacaataatcctaaaagggattcaaaacgttatcttattggaaagatgcgtcagaattccatttcaaattgactatataaattgtaatctaatgtagtatataagagacatgaccatgaatctttgtgaacaatgtgatggaaatattatgttcttgcttcatgatttgttgatctgtttgcgggtttgcagtgcaacagtgtttggggtttctacagagtcg

SEQ ID NO: 38740 - DNA, 683 bp, Arabidopsis lyrata
  Intron number 1 from transcript 486795 (locus 486795) deri ved from phytozome v7.0 (chr-ID scaffold_5; pos 20957214 t o 20957896 reverse strand)
gaagcatagaccctgacaacgatctctcttacattgtgagcaccttcttcgccttctctttttcttttctatctttttgacaactggattttgaattgtgcaagtgttaatgttgctctgttgtcttactttagtctctttgacattagattgcatcactgaatttaagctttagggatatgtgtatgcagtttatatggtatgtgtttaaatgttttagatattttgtttcttaatctcattatgatttaagtgcaaccaaacaccatgttaattgcgcatcgtagattggtcaggttgttatactatttgaaggcttatctaccttccatttggaactcttttgtttccgattgccgcgtgtttactttctattcgatggtttttttacagagattgtatggtcaagtttcatcttatcggtttcagttttactgaaaatgtgattttaaaaggctttttggattcacttctatagtatcgaacacacaagtttcgttacagttttactggaagagtgttcatagagattcagttctgtaatatgcttttggatttgcctctgtagtatcgaaacagaagtttcgttaaatcatccacaccaaagagtctagaatttgttatcagataagtaatctgtgtttcgtttgtcgactgtatttttctgttgtctattttgaagg

SEQ ID NO: 38741 - DNA, 429 bp, Arabidopsis lyrata
  Intron number 1 from transcript 481136 (locus 481136) deri ved from phytozome v7.0 (chr-ID scaffold_4; pos 1167492 to 1167920)
tagctctttcagccctagttcctggcctaaagaaggtacacatatgtaaaaggaaatctcttcttcttcttgtttaataacgaggctcatatcaaccaaacgatagtagtcttttcttaaatctttgtattttgctaggcaagaaaccaattttcatggacagtatagtatattctctcttttcttataccaacaatgaaaatttatttgagttttgacttcggatctcccggtcatgagactaaattctttgatcaggacggactttgtgaaactcgaaatttactaaaaatcctccatatatatataagaattatgatttttatatatacaaatcatttgcagtttcagcttgatggatattcattttgattagatattaatatatttacatgctatatattgaaatatgcatatatgtgactatag

SEQ ID NO: 38742 - DNA, 406 bp, Arabidopsis lyrata
  Intron number 2 from transcript 491693 (locus 491693) deri ved from phytozome v7.0 (chr-ID scaffold_7; pos 4686193 to 4686598)
aaccgatttgttcatcgcaatcatcgttgattcgggtaaattttcgttttgtttagattctgtactctgtagtgattgattcgtcttcagtttctgagaaaatgatggaacgtgaaaggtattctgcaatggaagcttaggattttaacttggtgatgttaagtgaagtagcaaatttttagttattttcattgtcaaatctcaacattacatcaaaaaaaaaaaaatctgcttctgttgaggttttggtgtggattttggattgttggacttggttgaacaatgaacatgaagcacttatactatatgaacatgaagcacttatactatcctcaaattgttcttattttatgaaatcattggagatgcagatttcgagggataaagtgtgttgttttggtcgtat

SEQ ID NO: 38743 - DNA, 799 bp, Arabidopsis lyrata
  Intron number 2 from transcript 338398 (locus 338398) deri ved from phytozome v7.0 (chr-ID scaffold_2; pos 3661116 to 3661914 reverse strand)
attcagctgcgaagcttaaaactatcggcggaaaggtagaggccgtcggagatcgagattatcgccggcgaaggatgaggcagtggtcgtcgtctttgcagagagagggatgatatgtcggagaaatctaaagagatgagaaaagttgcagagagagagagagagagaggcaagggagatcgaatgaaagaacataatggagaagaagattggaggagaagaggatcgaagatggtgagagtgagagagcttttttttttgttcaaagttttgttttttttttctctctctctatccaattgaaaaggaaaaatcaccgtctgttttttttaagtgttaggatcgatgaaaaaattggctctaatagttcccgcttagttaaatttcggcatagcatttataaaatgctataatatactattccaatccgacatagtctttttcatagcaaaatcgaaaatcgtgctatgcttaagtgctatcaatgtaacctttttttgtagtggagagagaacacccctgtcgtagccctcttgcactattaaaatatccagcaagctcaccattaacttgaaccgagaaagaggctgtggtaatacaaagagaaatccagtgaataaattccggcggaattcaggtttaccgtgagatgcactccacggccacagaagcagttatagcacttgtaagcatttgtatatgtattaaaaaaaatccttggttctgcatgatctttttttttctaacaatgtttgtattgccagattcataaagaacgtgaaggcgaacaaattgatag

SEQ ID NO: 38744 - DNA, 492 bp, Arabidopsis lyrata
  Intron number 1 from transcript 338398 (locus 338398) deri ved from phytozome v7.0 (chr-ID scaffold_2; pos 3661886 to 3662377 reverse strand)
cagtttacacaacaaaaactattctaaggaatcaggtagagacgcacaatagttttgtgaattcaatctttccaaaactcagattcgacaatagtataatcagagccgaaactattactcacaactatatttggatgggagagatttttgagaagcttaacttcttcttcaagctcctgaatttagcaccaacacctgagttttatctttggaagatctgagaaacaaaaaacacaaagcacaacactaatttgtatatgaaattttgttttgttgaaaagtgaaccctaatttgaatccgtcaaatatcaaaattatcgttatcccttttgaaaccagtttcaatttcgataagaccaaataaggacaactaacggtaaaggaaaacctaatcaaggtatatattggtgatttcgtaccttaagctgaagattgaaccctaatttgaacgacatagataaaaattcagctgcgaagcttaaaactatcggc

SEQ ID NO: 38745 - DNA, 754 bp, Arabidopsis lyrata
  Intron number 2 from transcript 938480 (locus 938480) deri ved from phytozome v7.0 (chr-ID scaffold_5; pos 17505761 t o 17506514)
caaaggccaaacccgcaaaagtagcgttgctaaaggtaattaactttctaattctcttctctccatatttccgaatctctatcagctttattcggctttttagtttgacttcttttttttttttttttcgttttatgtgagagactatttctccaatttcattttctatttactcgttctttagaaataaaacgcccacatgctggtgtaagttgatggttgtacataaaaataataatagttgcaactggcatccataggtttttcaatttcaattatccccatagccattacatgctagcttagactaacactatttttttcttatagttatttctagtaaaattaaaatttcgtaatggtaataatactattttatattgagacattttgtggtagcttgtaagtttcttttcttgtatggtttaaatcttgacaaaatgatgtgtgtggaatctgtggatagagctttcttctgaaagtagtcatctcatttagtgtgatattgtctggccaacctcatttttaactaatcatcaatacaccaaacttcatttatttaactaattaggactcacaataataacttcttgtttactagctataagaaataataatttcatttcctataaaaatgggcagtgaaatgtgatataaacaatcctataccttagtgatgttttactgaagaaaataaatagtgtattagtagtcagatattgactgaactttgtttgttacttaaatgaagaag

SEQ ID NO: 38746 - DNA, 544 bp, Arabidopsis lyrata
  Intron number 1 from transcript 491744 (locus 491744) deri ved from phytozome v7.0 (chr-ID scaffold_7; pos 4985049 to 4985592)
gcttaacgaactcaaatccactgtctctgctcttcgtacggttcatatcactcttacccttttcgattttggttcagttttacatgttttctcgagaaactttgcaattttcttgctttaatgtctatgtgaaggtttagtctttttgaaaatttctctacgattagctggattttgttttctgggtatttcttcagttttgtttatgaataattgtaacgaatatgagaagagatcttttgatatttgttgcattgctttggaaaattctggagaaatgagtaacgcttcattgaattttgacataaggttatgtttttttgtttggtttctgagataatgtaggtcgaataagaaatcgaaattttcttcttttaaccttttttgttagaaagagagacgtttcacatttttagcttccgttctgtttctggagattacttgtaacgtttggttgctaaactattgagaggctttttttttgttttttctttgtgtgttgtttaaagaatcaatcattacggagaaaaaccaagaattgctt

SEQ ID NO: 38747 - DNA, 407 bp, Arabidopsis lyrata
  Intron number 1 from transcript 950946 (locus 950946) deri ved from phytozome v7.0 (chr-ID scaffold_8; pos 20200281 t o 20200687)
ctccttcgaactattccttactctgaccaccataggtatgactcgaagaagaacctaatttgtcccaattgtttcggcttctttttatcctaagatcattatcatttactctgcgagattctcaatctcagagcattccatgtgttaatctctaatctcacttgcgtacatctatttcttggttcaattacagtgttttatgcatttgatgagtttttaggtttcgattttttctctatttgggagttggattaaattggcattgttggtacttatagatttgtgtttaactaaaccaagagaacttaaataaactggtaacgaagtctgtgtctttcaagccatcttcttgaattttgacttgtgattaagcatcaaagtattttttaggtggtggtcttctgaaa

SEQ ID NO: 38748 - DNA, 679 bp, Arabidopsis lyrata
  Intron number 1 from transcript 934902 (locus 934902) deri ved from phytozome v7.0 (chr-ID scaffold_4; pos 19936475 t o 19937153 reverse strand)
ggtagaatccgtcttcagagactgtaaccttcctggtacgttgtcgtttttaggtcaatctttttcgatgaaagaaaggaagaaaatctgccattaaaggagttttaagtttatccatataaaaatctttcaaaagaggtaaaagagaatctagaatacgacttgtagtaaaatgctctgattaaggaaagttctattatacaaaatcggtaagattttttttttttttttttaaatactcaaaatcgtaatttatgttctttggaaagaacgaaatttatgccagatttgtctttttatacaaaataacgcaagccacaggttgcctctactaattatcgtcagaaatgatgaaatttatgtttgtgtcgtcaaattagttttgtttaactatatgaataatgttcgacttttatttattaatctaaaatggtatcaacaaatgtttcgggttgagagggtagataaccagtccatactgtgagagttaattaagtaaaagattttaaaaaataaaataatgattagtttttatttaatactactatatatagtagcatgtaatttagagaaaaaatatttttttataaaaaatattagttcggaaatagtataatcagtgtttgattatgtatctttttcagaaaacagagcaaaaggtttacaactgcggaagtac

SEQ ID NO: 38749 - DNA, 361 bp, Arabidopsis lyrata
  Intron number 1 from transcript 352566 (locus 352566) deri ved from phytozome v7.0 (chr-ID scaffold_6; pos 23572390 t o 23572750)
gactaagaaaaggagaggccttcctggaaatcctggtaagaaaatactttatttcatttgggttcttgaaaacaaattgaatccggatactgttttcatctggtttttgattcctggtagaatcttggaaccttcacttttttcatatgggtttttgagtactagctagtagaatctgctaacttttcatatgggttattttattactagaagaatctaggaactttttcatatgggttttgcacaaaagtcttccttttttttgtataattagggtttgtaagaatatcatctttataccaagattatgtgtttgagactttttttcatgtgaaaatggtttattaaatggcagatccag

SEQ ID NO: 38750 - DNA, 893 bp, Arabidopsis lyrata
  Intron number 2 from transcript 352566 (locus 352566) deri ved from phytozome v7.0 (chr-ID scaffold_6; pos 23573121 t o 23574013)
tgactgtggcactcttttctcgaggtaagtctttttaatttttttttttttttttggtttcttcttatgtgaagatctttctttgttccttgttatcgttttcttcatatttttactgatgtttccgtgacaaatctaaattattgtctatctaggagtccataatttttcttggagtagtttgatatatatagatgaatttaatgctttcgtgtgactgatttcaattgtcttcttttggttatgttctttgacaaatctgctagtgtctgtccatggaatatagttcgattgcaattaaatgcagtggcaaaattcatggattaagacattatatttacatgttggccattaatgcgtgtatatataatagtaaaaaaaattatgtataagtccataagtagattcatcacataaatcaatttacacttttttagagctaatgtgtatgtatttttgtaatatgaatcaatttttgtccaacaaaaaatgtttttttttttttttatgctttcttactgtatgtaaattttgtattgcgttaatgaggagatacaaagaagcctgcaggtgaatcttctccttcatcatcataatgttgaaaaagaatcttgatttgatttatatttatttttgtaaaaaaattgcattggtccatcatgacataataggcttcaaaagcttttctttgaattttgaaacttctatctctctgaatggtccacttcaaactatttcacttcttgcagttgcatcgttattgatcatacattcataaattgttataacatctcatccataaattgtttatcgactatctaatattcgtttatttttgtgatatacttttataaacaggaaagacagtttcataacgcatagagcgttttgtg

SEQ ID NO: 38751 - DNA, 483 bp, Arabidopsis lyrata
  Intron number 1 from transcript 944969 (locus 944969) deri ved from phytozome v7.0 (chr-ID scaffold_7; pos 4844249 to 4844731)
gcggtaagttccgatctctttcatctcccgttgctaatttcgagcttcgactcattatatctttcttcgctgagctcagatttagacttctctctacttgttgttataaaagtagagtattagggctagcataatctgcagaattcggtgttcatagctttttccagccccagctccattttcgtcctctttcttgtcgatttatctgattagaagtaagtatcggagtatctgtgaatcaggaattgttgggtttgattttagctgatacgattgcgaaatatattgtttagctttttcatgtaggtagcaattgtaattgagtgtaaaattcctttgaattatcctcattcttgttgatgtggaataaagaagaatgtgtttctcttccaagaaaattccataatgttttgagttcattcgagtaatttttgtatgtgttttgcagaccattccggttaacccgaaaccattcttgaacaa

SEQ ID NO: 38752 - DNA, 820 bp, Arabidopsis lyrata
  Intron number 1 from transcript 495021 (locus 495021) deri ved from phytozome v7.0 (chr-ID scaffold_8; pos 13265166 t o 13265985 reverse strand)
gaactctctcgctcgttgcgcaggtatgattcactaacatctacttacacatatacacacttagattaatataggtgtcgatgatgtgtatgaatgtgctccttgattgaaaacaaataaaaataagtaacaagccatatcatacacaagttgcataagttaattaaacttatacttaccttttgtttaattcttgtctttattcgatctccatatatgtctttgttattttattcagttctacagttctggtaatcataattcttttattttcaagaaatggatttgccttgtatgcacaaatgaaaaaaaaaaaacttcatgggcatataaaaaaaagtgtaaagcttttgtgtttctttctctcattatttttcttcgttctgaattgttaaaattatctattcatgattgatgaatctaatgaaatcgtgtttcgctattcggactctattataataacttttcgaatgtggattcaattatttaaccctctaggttttgaataaagtaactatattcttgttgaatcaaatgaaaataattaatgatcaacatctatatgggaagagcactaacgcaatggacgaaagttttctggagacaaagacccttttagggagtttgcctcatagcattaacggtccctataatttctagagtaaatttggtaactttaccatatatatatgatcattatcatgagtttcttgcgtatgaaaccatcatacaatatacgtgtacacgatgatgtctaaataataataacttccaatatgaaacaggactcaaaaggaccggaaaaagctgcagacttcgg

SEQ ID NO: 38753 - DNA, 1013 bp, Arabidopsis lyrata
  Intron number 1 from transcript 485223 (locus 485223) deri ved from phytozome v7.0 (chr-ID scaffold_5; pos 13908506 t o 13909518)
ctgcgtggtcgtcgccaacaggttcttgttctttgtcaatttttggaatttgagtctctgtatggttccattgtagcttgttacgtgtgtttcaattagaggttgagttctggatatccaatttctgtagttactacctgctagcgaattgtaatcattgatattggaatttagggttttcattttcatcgtccaatttgattatataaagtgtagagtatcacctttaaggagatttttcacttttatttgaagtagtgaagtgtaagtaagcataggttttgcacaaatagtgtgtttcgagtgaagatgttcttagatcaagaatcctgaatgatagtcgtttattaaagttactcttcagagcattttgcgtttaactagacaaggatgcatagaattgcgtagttctctaggtgattagtgatacaggaaacaagaaactcgttgaaggcatgtgcttgatcttgagagttaggttgttcaggagttgagtacggtggataacactacaaatgaccatcttgtgtagtaggaagtttctcagatgctctgtattagttctggaacaatgtcacattaaggttttataatttgacaaaagaaatatctccacgaaattgactttctactttgtgatagaaccggggttctaagttgcatcaagccttgtgagtgtagcttcttgtagtcttgccaaggtttaattccatgtcaatgttaagtacaaaaacctccttgtttgattaggttctagtttaacattgacatacttcgagttatctttgaagtgtacaactagtacttagttacttgaatcaccatcttttctagtcaatagctctgtaatgtcaaacaggcttcctgcattttctatcttaacatcttgaagggtagagcatctctttgtgctgttttttgatatgatagataaaacatctgatcttagaagttacttttctactttggaatttttaggactaccagcacagacattgatcgataggtacgtg

SEQ ID NO: 38754 - DNA, 661 bp, Arabidopsis lyrata
  Intron number 4 from transcript 345605 (locus 345605) deri ved from phytozome v7.0 (chr-ID scaffold_4; pos 18587136 t o 18587796 reverse strand)
gtgatcaactcaacagcatacaatttggtttggcggtaagttgttaccaaacttatatagcaaaatgtgtacttcatagttcatcgacattcttgcaattttacacaaagaactaaaaaagacactatatatatatatatatatatatatatctatatatatatatatactttcatataataaataatgttaaaatctcatattgaaagtttaaagagaccaacattactatataagatacatgggtcaatctactcactgcgaattaattttgtgtagaatgccaaaaaaaattaacttacaaacatatataattattaaaaatacaatatactcaatcaaatttactttaaaactatataataattattcattaatacgaaaggataactaatttatggtggtttagtggttagaaaactcatcttgaaatatcgagggactaaaatttgaatattctcgtacaaatgctgatgcatttgacaagaaaaaatattatcattccacatgctcagatccctctgttatcaaaaaaaaaaaaatacgcacataaagattaatgtttttttcaaacaaacatgttattaatttaatacttatattcaaatatatctcaagtgtttttatgaattttatttaatacaggtacatccaagattat

SEQ ID NO: 38755 - DNA, 584 bp, Arabidopsis lyrata
  Intron number 1 from transcript 493112 (locus 493112) deri ved from phytozome v7.0 (chr-ID scaffold_7; pos 11363932 t o 11364515 reverse strand)
ttatcaaagatctacgaagagagacgtgttttagggtaattacttgaaaactttgatcccattttggatctatcctctgtttcagatttattaattatattcggcggtatatatatgttttgtgcttgcaatagcttttctcgcatcttccaaaattcatatgaaatggcgcaactttgagaaatggttcaatgatctattatgctgtttagtttagtggtccttaatttcttgttttgtagatcaaacagtgaaagaatggttcaattatgcaggaataggattttcctttgtgtttttcttgtttccaacccattgcgtaatatatatatatatatatatatatatatatatatatatataggttggtttagacagaagttgtgctccctgtgaaaatttcagggaatccttgatccttgtttgattgctacattgagaagttcactgtcggcaatacattgtttttttctgataacaatgatttgaagctcatatcctctcaagcaatgaggattgagttactcatgtgtgtttcttttattacaggtattctccggagcaattgtttaacgtagttgcag

SEQ ID NO: 38756 - DNA, 423 bp, Arabidopsis lyrata
  Intron number 2 from transcript 470561 (locus 470561) deri ved from phytozome v7.0 (chr-ID scaffold_1; pos 2000644 to 2001066)
acaaattactacttttaagggtaatcctctgttacgatttctctcttcgtttttagttttcgtttttctgcaattccaattagttctcagctctctgtgcttgcaatggagatttgataaacaaacaatcagattggctgaaaaaccccatttatcatccagggtttgcttcagaatgcttttgagtcattaaagttcaacactttatgcacttgggttcttaatgctgctttgtgtttactctgatctagtggtggagcttttacccatttacttgtctttgtttttgatgctgttgttgttgtgatctgttatgcatacttcaaatttcttttctttctttgcagattttggataccaatgattgttgcaacgctttgtgtttaaaagtccattagtagtagattgattcaagaacaaatc

SEQ ID NO: 38757 - DNA, 661 bp, Arabidopsis lyrata
  Intron number 1 from transcript 482608 (locus 482608) deri ved from phytozome v7.0 (chr-ID scaffold_4; pos 17226071 t o 17226731)
ttagtgggtacgtctttgtaactgactcttgcttctgcatttttcgatctttgttgcttttgatgagatttggggactgtcttcagggggatttgaaatatttgacatcctccatgtttttttaaaagttgaatcttcacttaagctactgttcttagcttcatgagatctgggatctcgaggctgctaatttttttttgctttgatttcacattttaatgggtttgaatttgctcatctctctagttaggtttggttaatgttttgcttacattttcattagctgaagtgacttgaagaaactggcttgtggttttgatggatttctttctattaaaagttttggtttccctacaaagatgtctttttttgttaattaaagtctaaaagtaactaatctctatctgtacttgtgtagggttcatcatttgagtctataactatactgacttttcactgctcatttcctttttaaatctattgtttccctttccttactttgttcatcatttcgtcttcccttttactcaatagatacagctctgtgattgttgcagggtgtatttctcttcctttggtatattgctctgtgatttatttaaaataagccataaggtctcttcttgtgattgttgcagggtgttgtactggaatctttaag

SEQ ID NO: 38758 - DNA, 460 bp, Arabidopsis lyrata
  Intron number 1 from transcript 480676 (locus 480676) deri ved from phytozome v7.0 (chr-ID scaffold_3; pos 22265144 t o 22265603)
ttcggaaagaaagtctgatcgaatcgatcaaggttggtttgttgagcaatctaaaaagtccatggctttggttctgtttttatgttctgggttcatgtgatttttttttaatgctcagcttcctcgttctttgattgtgagaatcttatgtcaaagttgaaaacttgatcaccatggtacaaagattaagtgtaatttgcaatgtatatgtgatttcaaatcttacttaaaacaacaactcaactaatgtatatgtcaaaagcatgaaattaaacatctatagccaatgtcaaaacgggtacttttggtgtttttgtcacctaagtcgctgctagttatgcattctttgccccttgggagttttactgggataagcaaattatggacatttaattgttgttccttccattggtttggaaatccaggggacaaaggaggaagttaagaaagatagaaaaca

SEQ ID NO: 38759 - DNA, 375 bp, Arabidopsis lyrata
  Intron number 2 from transcript 477941 (locus 477941) deri ved from phytozome v7.0 (chr-ID scaffold_3; pos 2558777 to 2559151)
cctctaaattgactttccctagctccctcaagcaggttctctgtaaaatttgatctttgagtattaagtgctagaattgaatcataaagttagctcctttatttaatcccataacatatgaaattcagcagcaatggcgtttgcgtttactcccaatggcagagtgactactatactgtgattcttattttgtactgtgtaggaattgatccacatgatctcatttgacgttttaagtgttctttggcttaacaaaagcttttagtctctttgatcattgatagataaacaaacagtttcttggctttgtaagctgaaggattggtggttttgaatgtattctatgcagcctggtccaagagattctctagttca

SEQ ID NO: 38760 - DNA, 479 bp, Arabidopsis lyrata
  Intron number 2 from transcript 488464 (locus 488464) deri ved from phytozome v7.0 (chr-ID scaffold_6; pos 6590485 to 6590963 reverse strand)
cagctagaaattttcgaatctctctagaagaagaggtaagctattttctttctcacttatccttcttctactgagaagttataccataatctaaaccacaaagacaaaatcttgtaatccttgtagctcattactaatctctgattctccataaaatttgctgagtcctctgttcgattacacttaagcttctttttttgatctgcgttgtatctctcttaatgggtttcattaagttttgattctcagtgattatatgatttcgaatttcattatctcgtggaaagcttgttatcgtaatgtgttcgatggtatatgaagaaaaatgtattcaatcttaaattttctattcatttcactttcaatagttccttgaaaaatggttaattttagatatatgttgataattttggtagcataaatcataaatgactaataatgatagatgattgattccacttctttgaatcaacagttca

SEQ ID NO: 38761 - DNA, 877 bp, Arabidopsis lyrata
  Intron number 3 from transcript 490222 (locus 490222) deri ved from phytozome v7.0 (chr-ID scaffold_6; pos 23179435 t o 23180311 reverse strand)
aacggttattttgttgtttagcctctttgttcttcgaatccaaatgtcttctttgttttgtggaacaatggttaaatgatttcgattttaatggtgagattctgtctctgtttcgtcttcttcatcttcatatctgcaaatccgaaattaatcaattcgtgggatgagactgcgattagattcgaaccgccgtcaccttctccggcgccggacccttcaccggatgatgatgaatcgtcggtttcatgtgtggatgacctaggaggtgttggctctttagattccacgtgtaagctcgtcgctgatttgaatctcacacgtgacctaaacatcaccggtaaaggtaatctccacgttttgcctggtgttagattggtttgccagttctcgggatgttcgattagtgtcaatatctccgggaatttctcgttggctgagaattcgggtaaaaatcgggtgaagaggtaaatgctgctagaggtaaaggtattgatatagaggaaatacgtggtgaaatccaagaaagctgtaggaggatcaatggtgaaatccaagaaagctacaggaggataaatcaggtcaaaatcaggtgaagaagaagaagattcgggtcaaaatcgggtttaaatttggttaaagttgaattaaatcaaaccggattatgtggtactggtttattggccggttcaattggaggcgtagttttaaggatgaatccgaaagtacatgttgcaattgtgagaattatctaaagtttatggtggaattttcaagggcaaaaaagttaggggaaaagctgagagcaaaatagtttatggttataaaatcagccgaccatcttaaaagtctaaaaacttcacctttggcggtgagagag

SEQ ID NO: 38762 - DNA, 456 bp, Arabidopsis lyrata
  Intron number 2 from transcript 490222 (locus 490222) deri ved from phytozome v7.0 (chr-ID scaffold_6; pos 23180269 t o 23180724 reverse strand)
cctactgtttgtttggtcaccaaagtctgcttctttttttcgtcttaaaaggggttggctgattttatagccataaactagttgcattctcagcttttccccccaacttttttgtccctgaaaatttcaccataaacttagataattctcacaattgcaacatgtactttcggattcatccttaaaactacgcctccaattgaaccggccaataaaccggtaccacataacccggtttaatttaattcaactttaaccaaatttaaacttgacttttactcgactcttcacccgattttgattctggttcagattcagatttttctctaataatctctgttctgtttcttcgtataataatctctgtttcttcaatctgtttttctctaattttgaaactctcgtagagacgtaacggttattttgttgtttagcctctttgttcttcgaatccaa

SEQ ID NO: 38763 - DNA, 327 bp, Arabidopsis lyrata
  Intron number 1 from transcript 494005 (locus 494005) deri ved from phytozome v7.0 (chr-ID scaffold_7; pos 22914690 t o 22915016 reverse strand)
gtaaacgtcagattctaccgcaactgtgagagctctcttctctccatcttctattttcgaaaatagtttctttcctcatgcatgctgaatttagattcatactctgttttttttctctcgaattttacttaccaaaatctgattttgatcatctgtgtattattattatgttttcatgttataactatgttttatttctatggttttgtaattgatctgatgtgaaatttaactctgctctgtttttatgtgtgaaagaaaattagggttttaatttggtactctgttttgtttttaaagatttgatttttatttgttttttgtaag

SEQ ID NO: 38764 - DNA, 255 bp, Arabidopsis lyrata
  Intron number 4 from transcript 476723 (locus 476723) deri ved from phytozome v7.0 (chr-ID scaffold_2; pos 16872039 t o 16872293 reverse strand)
tggacgacaaagacaattttgctatctactacgtcgtaagttgttttctttattgtgtttttgaagaatgtgaatcatatatttgaagaaggtttaagtagcaacctttatttcaattagtttctttatttttatcattttgtaagatttcctttcctaatactatcaatttgagtttcattgtgatagagttttattagtccattttgataataatgtttgtgagcttttttgaatatggttgcaggttattcc

SEQ ID NO: 38765 - DNA, 941 bp, Arabidopsis lyrata
  Intron number 1 from transcript 942641 (locus 942641) deri ved from phytozome v7.0 (chr-ID scaffold_6; pos 18631327 t o 18632267)
gcagggactaatgtaagtacatttcttacctcgttgaataatgtttaatgtgagaatagtatattgtttttctgtatgtgtttgccttgctagtttctcctgcgatcgtgttcaccgaatgaaattaatagtcttgtgatattttatggtttgctactcttatgcaattcgttgcgttgtgatgtaatgaaacttttgatagttttcttgagttgagaagctgtcatgtggtgatagactcgtttgtttgtgtataaaaatagtcatgttaagattgctttttctttttgcttttgttgagtgggtaagaatgttttcggacagtgtgaccaatcttagattcataccctcatgcctcattgtcaaagattgttcgcatctttcattctggaagcataattggggtttgttacagtcttaaaacctaagttctagtagattgctgtaaacgttctttcgctgctgagaaaattccagttgcttatggatctgcttttgtgcaatttcttcatttgtttgttgatacaaaataatttggattctatctgttggagcaggcatttgtctgctgtgtcatgtttttgtatgtccgttgaatttactaaagcttgtatcatcttttgtcccaagttttcttaccaccataggtttgattggtccagttggtcaagccatagatgatgagtaactgaaatagcttttttatttggttggccgctacaaatactaaaggcacttaggctttggaccccgtgtaactgtccatacgattggtggtagttggactggagatctttctctgcattgctgttgtagaagttcaaccttacatgatctttttatggattctcgcatctgcttctctcttaattcttacatgctgactgtctgatttacaatgaacaggattcttgtcctttggtaaagaacattcttcttct

SEQ ID NO: 38766 - DNA, 515 bp, Arabidopsis lyrata
  Intron number 1 from transcript 891181 (locus 891181) deri ved from phytozome v7.0 (chr-ID scaffold_7; pos 18676429 t o 18676943 reverse strand)
agagagagcttttttaggtttagaaaggggagaaagtaaggatgaaggactttttgtaaacttttttgtgtgtttttatccctctctatctctttcttttaagcaaaatagttattaccacacaaaaaccaacaaagagaaaacacaagccaacagattaaagaagttaagatagactcaaaaatgttaactcctagctacaaacatgaacatgttgtttagtattcattttatagtacatctcactagaatataaaattccaaatatattaaatacttgtcaaaaaaaaaaaaatttgtttttcgtacattttatttttacaataatagttttcaatctaatttctaacaacaaaaattttatatgtcatttaagtgacatagagtgattagatgctctttcttttgtcccaataaatttaagaatttggtttcctaagctctctgaacctgaagaaataattatgttcattttaacagaaatcgaaagaggccggggaagagttgaccgtggt

SEQ ID NO: 38767 - DNA, 437 bp, Arabidopsis lyrata
  Intron number 1 from transcript 931085 (locus 931085) deri ved from phytozome v7.0 (chr-ID scaffold_3; pos 18139011 t o 18139447 reverse strand)
tgccgtcgtcggtggtcacgtctgggcttttgacagcccaactgcatcatactagctatttcccctgcaaatcaggatcttgctacatctgatgccattaagatctctcgtgaagttgatccaaaaggtgccaaattcttccttccttatatgtttgatatagttgcttttctgaatttactttgttctttcttttgtgagatataattcactgtgatgacatagtaattatggttttatttctatggagcattgtatctatgattgagttgtggaagttgtggaagtttctattcttgtaattagctgtggaagttgtttaaactaaaatgatgttatccaatgactaggaataagactcagtttatgtttgattttggttgcaggttctgtttggctgcgaatgtgattataggttactcttgctggatttagga

SEQ ID NO: 38768 - DNA, 647 bp, Arabidopsis lyrata
  Intron number 1 from transcript 479603 (locus 479603) deri ved from phytozome v7.0 (chr-ID scaffold_3; pos 9154676 to 9155322 reverse strand)
ttcttcttctgctcttcatttctccaggtactacgctttctcctacttgatttgattttagggttattattgatactgaagatgataggtttaattcttggggttttagtagatcgatggttttactttggattactagtgtttacacgatctaatttgatgagtatatactacttttagtttctacgatttgtttttttttttttggttgaatttttgtttgttgttatatatgattgatctatttgaaaatattttctctttcttattcatatatgatcctttctatatttgggcttcctcgattttttccaatcttccttggattttttattttcctctgttgaagatctcatcttttttttggaaattgaatctgtagttaagtttttttttttatccaattgatgatttagttttggactgataaaatacgatctgatgatgtttttattacttaaacgttgattgaattcgaaaacccctttttaaaaaaatttctaggtttagggtttgatgatttttagtaagttgtttgattcagaagaaatatactctaatgatgatttcttttgttttgtgtattgatttgttacaggttaatttgggtcacgatgatgtttaacgagatgggaatgtgtggaaac

SEQ ID NO: 38769 - DNA, 507 bp, Arabidopsis lyrata
  Intron number 1 from transcript 906209 (locus 906209) deri ved from phytozome v7.0 (chr-ID scaffold_3; pos 19365144 t o 19365650)
tttcctcattaaacttctgctgatcggagacagcggtaggttttcttcattcagatcgtaatcctacttttgttccctgcattttattcaatctatatcttttttctttttgttgattctctcgatttttgtttgttgatacgctttaagttttgtttggtcggagacatcagtgatttgagtaacacaactttactatgatttggatcttatttttacagttgtgagcatatgatgttcaatagtcttactagtttggtattaggatggagaatcacaaatcacaaatatgaatgttgtagctatttcatgatattctctagaggttaatgtcgcaaatggtttagccaaattgatttgaatattccttttgttgaatgttgtaactgtttcactatgttccaatggattattataaagcctctgttttatctgacttttgttttctctatcactttctttcatgtaccaggtgttggtaagaattgcctcctcttacgtttctca

SEQ ID NO: 38770 - DNA, 801 bp, Arabidopsis lyrata
  Intron number 1 from transcript 916356 (locus 916356) deri ved from phytozome v7.0 (chr-ID scaffold_8; pos 11793192 t o 11793992 reverse strand)
gtaatcctatcgtcactttgagagaaaagatcagagagtaatgttttttttaacacagagcacacacacaacatgtattcaagtaactagtactaataaataaagagctaggtaggccttggcattcggttaaccattcgatttcggttcggttgtgttcagtttcggttagtttggatatggtaatataataaccattcggatattttaggaatttcggttcggttcgtttcggttatctttcggttcggttcggtttggatatttaaatagataaccgtaactaaccaaacttttgtcatgttcggtttggttctggtttttacccaaaataaccaaaatttaccgaatataaccaaaactaacccaaaataaccaaaatattaaaaaaaaaatattagaaagaaaattaaaatttgattcaattttgtaaaagagtatttaacttggacaaatataacaaacaatattgggatattttgattatttaaagtatttgattgtttttattccaaaaataattatagttttggatattatctttgggtatcttataggtttttagatatttcggttaaccttttgttatcggttcggttcgattcggtttcggttagtttggataggaaattttactaaaatcttcgtttcggatatggtttggtttttttcggttcggttcggtcggttatttggttagctgtttttttgtccagggctagagctaggcttgatatgattgcagatggtgagcatgcatgacaggtggcaagtgtttagaggagggagcacggagcagcg

SEQ ID NO: 38771 - DNA, 597 bp, Arabidopsis lyrata
  Intron number 2 from transcript 480141 (locus 480141) deri ved from phytozome v7.0 (chr-ID scaffold_3; pos 13841068 t o 13841664 reverse strand)
aagaagttcataaccaaagaggaagaaccagaacagttagttaatcttaattttcaatttcccatcactagattgtagaaaataaacagaaatctatggaatagaaatgtaatttttcaaaaatcacagaaaaacaaatcctaggaaattgatgaatacatggaaaattaagaaacgcaaaagtttagtctccattgcagaatttagatagtttaccaattaaatgcaaaagtttagtctccattgcagaatttagatagtttttttgtatgtgacaatgacatgtagactagtggtttgtgttagctagtattgtatcaatattccggctaaaacccgcataatgcatgttgttagcaaaaaaattaatactaataatcgtagtttgtaagtgatagagagtccatacccgaaccattaattgtgaccatgtttgatcgaaaatatttggtttttgtaatttattagaaagaacttaaactcttgcatgcacatttttcataaacatgcaattgtgattgaagaaatgggtatggatgagatttgcattgcaattttgtaggtattggcaaagcgttggagaaagagaaggagaga

SEQ ID NO: 38772 - DNA, 531 bp, Arabidopsis lyrata
  Intron number 1 from transcript 487652 (locus 487652) deri ved from phytozome v7.0 (chr-ID scaffold_6; pos 3216863 to 3217393 reverse strand)
ctcaaacttggatcggttggcctgtaattctctatctctcttcctctttcttttttccatgtttgttcgttggaagtgatactcgacggcgattctggagaactgaatctcgctgttcagacttcgatttcgatttttttcctgctcgcaatttatcattgttcgaatttctgtcttgcgtttgtttgatgatttctctgtttctgggttcgttttttagagtttccgatgaattttgattattctggaggttttgcttctatatttcgagttagcgcatagctatgattggagatgagatctcttacattgaaatatttatttgttacagattctgcaaccaaagcagaacttaaaaaacattaggttctttgtttagaccatatgattatgtttcgatttgtttaatcactgtttgtatgaatcaaacagtgttaattctaacctcaaaccgcttttgtgattttggatctattctgacataaaatggctgcaggaacggcaagataactggcggcacaacgctttacc

SEQ ID NO: 38773 - DNA, 619 bp, Arabidopsis lyrata
  Intron number 1 from transcript 312759 (locus 312759) deri ved from phytozome v7.0 (chr-ID scaffold_1; pos 7549133 to 7549751)
tggataacaacacacaggtaaatttgatctaacttgccagtgaattttgatgaatgatagtaattaggagtgttattgattttgactttgagcaaatggtatagtttaggaagaactatttggagtggttgtagttagctctatactattgctctgggccatgttggtttggtttattaaatttgtgtttctgttttggactctcttttagacaaatcacaagggtctactttagttgtagagattattctctattattagtttttgtttcatgtgaggattatatagagttattactttgtttgacgtgtgggtggtccttctgggtttgatgatcaataaacaaaatcagaattgtggtttggttagagaatggaatcttagcatgctttttgtctcgtttgcttagaggatggaatcttagcgttgtttaagcttatggttggattcaattggttaggggagttcttggatttattttgatcaaagaaactcattgcttcagaggacttgaaaattaaggaactatatatcatcttgtgtaagtttgagaaatgataacacaataatgctacaaatgttcttcagggttcttctgtcgatcaagaatctcattctc

SEQ ID NO: 38774 - DNA, 252 bp, Arabidopsis lyrata
  Intron number 2 from transcript 475162 (locus 475162) deri ved from phytozome v7.0 (chr-ID scaffold_2; pos 2358193 to 2358444)
accctaatctcaaggttcgtctctcttctcctattcaggatctctcttgatttctaatccgattaattttgactgcccttttagccggagatccttaaattgattcccatgtttaaaaatcgaacctttgtttataaagttgtgaacttttttctccaaagtcttcgtttgattaagatctttcattgggtggttttggttttgtgtttttttgcagatttttgatatctagagtgattagtagaactctgt

SEQ ID NO: 38775 - DNA, 360 bp, Arabidopsis lyrata
  Intron number 1 from transcript 927966 (locus 927966) deri ved from phytozome v7.0 (chr-ID scaffold_3; pos 1422728 to 1423087 reverse strand)
aaggttctgatttgtcacgagcttaattttttctttgtgtaatcgcatcttcacagctgatccttgtggtagttagtttccatctgttttactaagaacattaggttgtgcgatctaattttcctttttctaggtataattggtatgtttaaattcaaagatcttagatttggtgaaatcaaacttgctactaactgcaacttgtgacttttgggaattctacttttgggcgaacaaagtttctagctttggttatttggtttgtttgtttaaggataaaagaagctaatttcttttgggagaatgtgactggtaatgatttgttgtgttgatgattattgtaaacgtttggtgcagggg

SEQ ID NO: 38776 - DNA, 471 bp, Arabidopsis lyrata
  Intron number 3 from transcript 950372 (locus 950372) deri ved from phytozome v7.0 (chr-ID scaffold_8; pos 17840979 t o 17841449)
aaccaaaagttgcagggtatacgtattattattctctacttttttttgttgaatatgagttattctctattattaatccaagagtgttttttttcttattcttatcacctcctcctatggattgttatgagaaaacatagtgaaaaacaaatgtcatgaacattaatgcaattagatgcgtccctgttattaatccacatattttattttatttctccatatgcatgcctggtaagtggtatgaaatatagtatgaacaatgatggcatgatgcgataaaattgcactttctttgtctagcttgcttgtgtaagaagtaacatgttcacaaacaaatacatttgtgatgtcatatatatttattataacatacatatagagcgtttttgttacaaaatcatgatttgcactaagtttcaattcaaaatactaattaacattttttttttttaatctttccactaaagcaat

SEQ ID NO: 38777 - DNA, 560 bp, Arabidopsis lyrata
  Intron number 1 from transcript 494623 (locus 494623) deri ved from phytozome v7.0 (chr-ID scaffold_8; pos 3942099 to 3942658)
atcctcgtgttcctaggtttatttcaagtcttcttctctttgattctgttcttgatctagtcaatctttgatgtttctttgatttcgaagtgaaagattttgaatctccattgtttcggttttgatttcgttagtatcgatttgatatgcgataatgttggatttattcgctatttcgctgcagatttacttggattgacttttttttggcttgcgatctaggatttatggtttttggtttgcttgtgttaatgatgatgaacagtaactggagattttgcacgctacattagttgatgatgatgataacagtagctagtgatttttggtagaatctgggactagagattctacaagttccattagatgatgattttattgttcttgagctattattgttcttgagctattggaagaatccggaactaaagagtctttaaacgctctttgttgtcgatttaagatgattgaaaagatctacactggatttgagtaatttgtggttcttgattttgtaatttggtttcttttgaattttgacagattatttgcggtggtgg

SEQ ID NO: 38778 - DNA, 516 bp, Arabidopsis lyrata
  Intron number 1 from transcript 907078 (locus 907078) deri ved from phytozome v7.0 (chr-ID scaffold_2; pos 943507 to 944022)
tttttttgtaagtaataggatgaatccaaacatcatagttttataatttggtatggcattacacaaaattttgtaaatactatatgccaaatttatacttggtataatataatcattaacaaagtctataaacttccttaatgtttaggcctataaaacacaattgcataaagaattataaaagaagaagaaaaaaaattgttgaatggttattctccaagcataatctttctccgttgtcaaatctttattgatcttgaagatttggtcttgaagaatacacgtttatcattttcagttttatgtgatcatttcgtaaaatatatttatctatatgttaaaacataattttgtaaactaaaaattgtttgaatttttaattcttttgattattccactcggccgattagtatataggtattgattgatatttctttatcatattaaaaataaaaaaacttaagacagttaatatgttgtatgatcttatcgaattgaatatttttcagggaaacc

SEQ ID NO: 38779 - DNA, 915 bp, Arabidopsis lyrata
  Intron number 1 from transcript 471559 (locus 471559) deri ved from phytozome v7.0 (chr-ID scaffold_1; pos 5870251 to 5871165)
gcccgacgacagatctctgaatcgcttgagaaacagtaagtaaatctacagatctcgtttcttcgaacttcttcttcgtgtactatttgtttgtatcgttccttcgttgtgcattgatgttcttaatgattactagaatctaactcagaagttacctctctttgttattcagtttttgaactagatttcattctagcgtcgaacgaattcctcgttttctttgattcgcattgctggtgttttttcctgaatttcgagatttagcgagacctgtttagagttttcttgtgttgcgggatttttgctcatctgaagaactaattatagttttggaaatttgtatgggttcatcacactgtcacctatctgctgagttgtagttaagcttattccatcggaattagtgactcttaactctataagttactgatattatagatgggttaagtgttatcagtttttttttgttttggtaacaaagtgttatcagtaacaaagtgttatcaggtttattgatataacaaagagtttacaaactttgctatttagagatttgtaggaatttgtttttttttttctttctggctcaaattataggaattagttgcttagctattcataaactaaatgtgatttgggaaatctgcaacgtatgttactactatggaagaggttagtctgaaaaaaagttactaaattgtcagcatggttttagaccactatataattctttgcttgtggtttatatgtttgagtcaaagtggctttattcagagacgcgttgtagtttttgattacctctggaatgtatgatgtgagaagaaacgcgactgtctatcttaatagctctttaaatgcatctattatctgttttaaaataagacttttaatttaacttgtttttttttgccagta

SEQ ID NO: 38780 - DNA, 468 bp, Arabidopsis lyrata
  Intron number 2 from transcript 471559 (locus 471559) deri ved from phytozome v7.0 (chr-ID scaffold_1; pos 5871991 to 5872458)
cacttgtcaacagagctggaagcatcaaacaagaggtatgacattggggtccttgttgtttcctttctggttgattacaagtcaaattgggctagaagtttcttgtaggatgctccaagattaaacaataacatgatattacagtagctaggtttcttcacttgcagtagagaatcgaaaagggatggattttccgattcgttaaatataggtctggaacttactttggaacttaaaaattgtttagattcttatcttctttcagatagaaatttataatttttctagtgcgagtcaaagagcacgagtagaaatagaagaccagcatttctgtagttgataattaatttgatacggacttccctagcagatactggattttaagcctttttctcttgtttcatatatcacttattgattggtgatggtgttttgcatggtcgcagaaagctggagtcgacagtgatt

SEQ ID NO: 38781 - DNA, 636 bp, Arabidopsis lyrata
  Intron number 1 from transcript 914740 (locus 914740) deri ved from phytozome v7.0 (chr-ID scaffold_1; pos 29657255 t o 29657890 reverse strand)
catctctcgttacgtcttcttcgattactttggcggtacatcataagcggcgacgagatctgaaaaaaaaaaaaaaaaattagatctggaaaaatgagtttgctggagaagacgagaaaagagggagaagaggaagaggtgaagaagatgaagaaacgaagagactaagaagcaaagaggagaagtggattgagcgagaatagagtaacggagatgaagagaagtcaaagaagatagacggtttcattagcctgatgaataaagtgaaagaaaaataaaaaattaagggtttgtggataagagtttctagagcccaattttagtttaggcggtcactgacttcttttctcccgctaatttttccataacgttttagttgtgtatatatgctatcatataccatgttaaaaaaaaattgagcgaaaaaattgagccagcgcataactttttatctgcataacatattatagcgtgtatcaatttagaaacgctacaaaagagttaagggtaaatcaactatagcataaatacataaatcgttatcttttaatgctattaaaactcaatattcttgtagtgtccatcagatgaatctcacggcgaaattacatctttggagagacagtttttgcgtaa

SEQ ID NO: 38782 - DNA, 899 bp, Arabidopsis lyrata
  Intron number 4 from transcript 482883 (locus 482883) deri ved from phytozome v7.0 (chr-ID scaffold_4; pos 18782311 t o 18783209 reverse strand)
ccttgactaggtacttactcgtcctcacatagtttcattttctgcttatgtcatatgttttccttggccatattcatgatgtgctttcgtctgttttgcctttaaaagagctttgcttttttcatggttgaaattgttctgcctcaactttgcttgtcgtatttctgtgttcttaagtctttgctattatctattaacaactttgttgaatttgtctttttctgtctgctttgcttctcttcttgctcattttctcttgttgtaatgtacttctgttgcttggtactaagagcggtttaagatagactatagatggataaccatacaatgataaacaacaaagtaatggataggtacacatgtacttttacatatgtaaataggcagttctttgtctagttaatcaaacagacataaatggcattccctgtattgagctagaagatttcatatcaagtatcaggtttttcagctgttttttgtactgagtttggtgtgtaatttatcctttttgttgcaacacaaatctgctgcagctgattaaactgttttgttatatcatttttcgaaacattgtgtatatggtgagcatgagtagatatagtaatacagtgagagctaattaggctccaacttgctgtaaaggaactgagtattcagttttggcaagcataggcttgaaaccacaaatgaagcacttatgtgcaggtgtattttgtgcagagtgagcctctattcattagcatttcccatagctgatctgccttttatttcatgtggttggtcgtaaatgcttgtggtatccctctttctcttttttgtccgttttataaacgacactagttttcttatttgaaattgcagtgccttaagggatcgtaggttcccacctatacagg

SEQ ID NO: 38783 - DNA, 491 bp, Arabidopsis lyrata
  Intron number 3 from transcript 482883 (locus 482883) deri ved from phytozome v7.0 (chr-ID scaffold_4; pos 18783288 t o 18783778 reverse strand)
gagactccaccacctgcctttcaagaggccaatcagtaagttcttttcttgggtatgttatgacatgcaaggtctgatctctctcaaagtattcgtcttttttttttaattctctttgtttggaaattggatagagtactaatgaacgcacgatctgttcttaaatactaaatcaatttttatggtcccaagttgttcttgaaattgttatgagtagtcacttagagtctgtgaaactgttgtgaggatattgtttccacgattgtttcacaatctgcctttattcagagactgtgatgtgcaaatccttgcaaaccttgcatgttttatcttagtgatgctagaaactaatttttttttgttttctgggtctatgtgttgaatatatgaatgtgtgatatataatctgaaacgcatggtccattatttactaatggtccagtctttttttttttgtagtccattgtttgttacctggaagaaaatagtga

SEQ ID NO: 38784 - DNA, 661 bp, Arabidopsis lyrata
  Intron number 1 from transcript 470469 (locus 470469) deri ved from phytozome v7.0 (chr-ID scaffold_1; pos 1653576 to 1654236 reverse strand)
gtactacttgcagcaagccttgtcgctctaaaaccgtacggatctttgattctcatcgctctctatcttttttttgttcttgatgaattttagttggcttttggttggtggtggttagaaagttacaagcagatctcatgatttctagtttaatacatgtaatttcgatgtttcttcgttctttaaacggttttgactctgtgatctcgattttatgctactattgcaaccttttactggctctgtggtttcgagttgataggttttgacttgagttttgaatgaaattcagtctgtttcatgtgtttcccgctgattggtgttaattagagcgtgaagttaaaagttttactccgcatagccctattcttggttttcagatctcaatccttttgggctttctggatgcttcattcgtttttttgtttgtctggttgaattgagttccttggtttgattgcttgtgtactttggtttctgcaatttggtaagagtttcttgactactgtattgatttgccttagagtcaaggaactgtttctactatgtccattgactggaacggaactatgctctagtattttgattatttctgattgcttgtctcgttcttatacaatgtgaaggaaagcgatttgcacacgaaaagaacagggcatac

SEQ ID NO: 38785 - DNA, 975 bp, Arabidopsis lyrata
  Intron number 1 from transcript 909435 (locus 909435) deri ved from phytozome v7.0 (chr-ID scaffold_2; pos 18010128 t o 18011102)
tcgaggtgaaacaaaaaggaccctagtctctctcaaacgagcccaccgccgtatctccaccgactgcgtgttttccggcattgttggtcctccggtgttcatctgggcaacgattgaagactgaatcaataggtacgttgctctactcttttttgtgattgaaattatgtctttttctcatctcaagtcacaatttttgttactcgtttagaaatttgcgttcatataaacaaaaattagatttgagacttgtagatcgatgtgaatctttttgttctctcgatttagttgcaagtcacaatttcaatttgcatgtagagttgttaatatctttgaattcgtgaaactcgattaaaggtttcaatttggtgagttttaaaattccaaatttaaattgaatgtagattgaataagtctttcgctctttgattccaaattacaatcgaagtgatctttttgttctctttttgatctgtttagtccactatttgtgtgtgtgtgtgtgtgtcgtgagtagctcaagtacgtgtcttcttttttttattagttataggttttgtctcttgtaaatcttctacatctaagtcaattgtaaatctttttagctaaagccatccacatatcgtcattggaaatatttcaattgcatgtagattgattaagtcttctatctctttgattcatgttaatgtatatgtgtttgtgttggaattcattgatccttcttgagctgtttagatatttgattttaaactctcagctcttaagtttatgaaattagaattcttttgtgatccttcttgagctgtttagatatttgattttaaactctcagctcttaaattttgacattgtgaagctcttaggtttattttaatatcaagtgttttgtctcttaataactttcaatatttgataaagctagtttgttctctattttcaggttttggatctacattacatcaaaggttatca

SEQ ID NO: 38786 - DNA, 821 bp, Arabidopsis lyrata
  Intron number 1 from transcript 470156 (locus 470156) deri ved from phytozome v7.0 (chr-ID scaffold_1; pos 438435 to 439255)
aaagctcagatctgggacaccgccggtcaagaaaggttatatctactatatctaaacacattgataattctttacatattttattaagctgtatctcatttttggattcaaattaattgtttagagtaaaatttatttttcttggatcatggtaatttagatagggtgttttgatttgattttgtaactatatatttttttaatagaatttttttggttaaagaatagtatatggatttgaataaccattggtgctcttgatttggttaatacaatgtcagatttcttttctgtatttttgtttttgtctttttgcaaccacttagatcaaaaggtcaaatgcattaactcaccgaataatttgatgattaagtaaaactttatatttttcttacccatgcaattgtttcattttttttttttatctttgattaaataaatgtttaaggggctattacatagatgaaaatgaaataaaacgtgagtttttccatttattttcttaacatatttttgtttccatagttgcattatataaagaacaaagaaattgcggttgttaacattgataattctttatagcatgaatctcagatttggatacaaattaaatgttaaaataacctaagtagagttgaatttcattttgttatctaggatcacgatattttagttaatggatttaaataattattggttttcttgatttggtctgcaatgtcagattctgttataatttattcaattaaagatatatgtttctttactctgttttccggcgatcagatacagagccgtgacgagcgcctattacagaggtg

SEQ ID NO: 38787 - DNA, 648 bp, Arabidopsis lyrata
  Intron number 1 from transcript 479503 (locus 479503) deri ved from phytozome v7.0 (chr-ID scaffold_3; pos 8610373 to 8611020 reverse strand)
ttcatcgttctatttagggtttcgatcacaatctggtgcttctttaatcaaaaggaatttattttgattttgagggttttaattggtttgaactaagctctagtctagtttgtgaaagtgttgttagttcgtcggggaaatcaatctctgatgaccattgaagattccttccttgtgttcttcttcaacaacgttttagtatcattttcgtaaatgtttcaatttcttaatagatagatgttattattgccagattatgtttacaaaagaatgtggaatttctggctatttcgtaaatgtttgagatgtgcatctgtaaaatctgtagatttcatgatacttagtttacaacaagtagatatgctggaggaattcaaaatcatttaaactccaagggctgagttaggactcttatggtcaaagagatgctaagtatgtaactgcgtctggtatgcgagctgagatcataggatacctgactgtcgactcaaagataatttagttaagtaaaccaaggctttgttgtgagccaacagtgtgtggtcgatgtgctttcgatatgctgttatggtggaattggattctaaaataatgtctaagactgggactgcaatgtgaccttcttagtttattgcagaaggggaagtc

SEQ ID NO: 38788 - DNA, 979 bp, Arabidopsis lyrata
  Intron number 2 from transcript 485380 (locus 485380) deri ved from phytozome v7.0 (chr-ID scaffold_5; pos 15024823 t o 15025801)
atttaattttaaagttagtataaaaatattttgtaaattgtatctccttataacatatttatttatattatagtttacaattgttattaagtaacggtataccacgagtccacgagacaattattaataaattgaggatttaacttgtgttaaagtggtatataaatattgattcaaattcgtccgccatataaatcctttccgaaatataacccgttccgtaatttcttaaccgtcccgtgatttgtctttattttaaaatttaatgattatttattatatataaaagtttacaaatcatatcatcctctaagaccacgagacattataccacgggattatttttggttttatacaatcttttctaaatgagactgatctaatatgtctaatatttatggtattaaaaaaaagatttaatccgtattgaagcggcggattaatgatattttaatctttttattattgttgattcaaaaacccgtcccgccaagcccgtctggccaaaactcattattttattaatattcttatttatgatatgattctgaatcatgtctaaatatttttatcgatgtagaacgttgaacacacattttcgtcaattggataatatatgtccgtttttaaaatttcgaatcacaatatatgcagttaaatttcgaatcacacatgtattatatgatgattcaaaacagttaaaaacaaatcaaacaaagatgataggagaatcatgattataaatcttaatcaaatcttctaaatatctaaattattaaatatggaatatccggtgtatgagttgggttaaatataacccgacccaacaattgtatttgtgaaggattttttgaaacgggtcggatatccaaataacccgaaagcatttgtactcacccgtcaccaaagtgactgcaaaaatactagtatagatatttacaattacattacaacggtggctgttgctatcgtacgcggt

SEQ ID NO: 38789 - DNA, 337 bp, Arabidopsis lyrata
  Intron number 3 from transcript 894281 (locus 894281) deri ved from phytozome v7.0 (chr-ID scaffold_6; pos 10291828 t o 10292164 reverse strand)
cacatccaccttcataacgacgacaacgcaaaaatgtaagcttctatttgttttctacttccaactctttatacttgaaattatttgtcaaaatatcacatggagataactcaacactaggttattaagaaaatgtgaacatcttcgcttatcgccaattgaaattcaaaattcttcacatggttaagccaaatggaacataatggatggaataaaccaaaaacaattgcgcatttttacacttttttttggtacattccatccatagtacctaactacggggtatttaaatccatagaagaatttaattaaacattgattgattgatatgttgcag

SEQ ID NO: 38790 - DNA, 877 bp, Arabidopsis lyrata
  Intron number 2 from transcript 329886 (locus 329886) deri ved from phytozome v7.0 (chr-ID scaffold_7; pos 12233786 t o 12234662)
ggtgacgttaagtggtatatcgatcccatcatcgggtaattctatgcatcaattccttttacttctttttctatgatcatcaagtcatttgaacataatccaactaaaccaaaatttctttataccaaaattttatatccggcacgttgacttgttacggagtaaggagaaactaaaaaccatatattcattttctactagaaaaatagttttttttgttttttttgcaaaccttatgcagaatgttcaccttgaactctagaacgagatttattgatataacttttttaaaactttttttcccaggattagaaaaccaaacaattttttcttctctaatttaatgtgtggttgataaaaaaaaaaaaaaacattctcagtaccatagcttttagggtgaattagctatttatttaaccataaaattgtaacttgtagcttgtaagaaattagataaatatctatgattttttcatttggaaaaaacattcaattggaatttctttttaacattcctctatatataatatgtttattagaaacaattttcttgaatagtttttcacctaaatttataaaagttcgtgattgtttggtaatagtgtaacaataatatggatactcttgtttttatgccgaaaaaatcaaactattccagcaaacaaagcaaacaaccaaaattcatattattaatttgttttactaaaaacatatttaattattttctatatatacatatatattttttccaagaatagaaccaaacctaaaataaatatggttacttgtgtaaaaagattctcaaaaccgaatgatgtgttcctctgtggctaataaatcaggtttcttacgagtacgaactcagcgttactagcca

SEQ ID NO: 38791 - DNA, 948 bp, Arabidopsis lyrata
  Intron number 3 from transcript 473805 (locus 473805) deri ved from phytozome v7.0 (chr-ID scaffold_1; pos 22559628 t o 22560575 reverse strand)
gtgtgactcgtggttattaatgaagagtgactcagcttaagaaacttttgattatttgtgataattatgagcttgagatcgtcgcggctcttcgcgatgatcttgggaagcctgagcttgaatcttctgtttatgaggttaggattctttttctctttatctctcgctttcctcagattgtgttttttcgagtttttagagaattgatcgtgattggtcaatttttagtttgaatctttgaattttgattgaagattcaatttattgttatggtttaatctgtaaggtggcattgtggtattagatgaaaaatagtcctaaataagttcgattttagggtgtgaaattttgcgtgagggttagttatttggttattcgtagtaagtttgtgggaaaccctttagatatgttaaccatgggataagacttgttgttaggtagatgtagttcgtagttaactacgaaaaaacataagatattttgacgactggattagttggaaattcgttggaataagagttttataagaaatttctgaccaacaaaagtaatcaagaaaagttggtcggaaatttctgaacgttaagcggttcaggtgttttgttaatggtgattcgttggactttggaaaacttttactaaattattgctttcacagagacttctatagttagttagataacccccaaaaaatatttagctagaatgttctatatgtgatgggtgtgcggaacattatttactaaaaacatgatcacttctgtgattagtaggagttttagcgaaatccggatatttgatgttaaatctatgattaaaaccccaattattggtatggttatgagtcagaatcagatttcgcaagtaatatttgcggctgacgtaatttgcttagtgatatttctttaattagtgactcttaaacgcattagccaaacctctataatt

SEQ ID NO: 38792 - DNA, 507 bp, Arabidopsis lyrata; identical to SEQ ID NO: 38252
  Intron number 2 from transcript 951114 (locus 951114) deri ved from phytozome v7.0 (chr-ID scaffold_8; pos 20854969 t o 20855475)

SEQ ID NO: 38793 - DNA, 786 bp, Arabidopsis lyrata
  Intron number 1 from transcript 489738 (locus 489738) deri ved from phytozome v7.0 (chr-ID scaffold_6; pos 18215000 t o 18215785)
tctctggaccgttggatctaacccgactctttcaggtcactcttctgatccaaaaatttgccttaagtttcattgattcaatggtttttgatcggttctgtgccatgaatctctatccttggtcattcattatagtgaattgtgcaattattcaaaatcttcgttttgttataaaattttatatcaatgcattgatacgttgtttgttcaaattttatgcatcattgtgtttaatttggagttttctatcctactaagcggttatttggaacgctatgagtctgaatcaaggtggatttgatagctgtgtgtatcggctttcattagaggaatgatgaaatattcttgtgaatgttgagtgatgctttcttgatagtttaccaattattcgaaatctctactgagttatgcattatatatcactacattgtttcattgttagtccacattttacgcattattctgtttgattttgaattttcctacactttgttcggtttgacttggaaaatctctttcaagtatctagaacagctgaatatgaaaactttgtttattggatctcaataaacgaatgtctaaacattcgtaaagagctatactgtaaatattcgatagtccccatctaagtgatgcattcttggaccgactttttttgttgttgttcttatgagcattgtttctgtgaattgcatactatgtggatgtaatttcttacttagtatttgtaagactcttttatgcggcagtcatattaaaaaattgttgatttgtttcaggaaaact

SEQ ID NO: 38794 - DNA, 819 bp, Arabidopsis lyrata
  Intron number 3 from transcript 494532 (locus 494532) deri ved from phytozome v7.0 (chr-ID scaffold_8; pos 3250359 to 3251177 reverse strand)
gctgtggctacacgaggtatgtataggttttcaatttcttgcaaaatttgacttcttgatttaagaagattgtgttttgttggactagtgtttgaatctgttggtgtttcgatatgtatcactcaattgctacttactaaggattgggttgattacactcaatttctggctaaagaatgatttttctttccaattttgcttgagattttgttttatatcacttaatttctgctagtaaaagaattgaatggatgcatcatagatcttactgcttgaaggaacctatcttactactaatttcattgagatgttgtttttgtctctgatcagtctagctttttgggagtttctttatacattttgattttacgattctcgttattgaaagtgttgaatttgactaagatacaactagtgattaatatcttactgtttgatgaaaccttttttactactatttcattgagatgttgtttttgtctctggttagtctagttttgtgtgtattcttatgctcttgtttgtttcactgcatcattctgtccatttaaaaccagaccagaattatcaaacagaaatttttgattttgcgattctcgttattaaaatttaactcgttattaattttatgaactcgatgcttagggactgtgttgttaattttatgaactcgttattaacctctgttctgtattctaactacaccaaaagaacataagaagcatagagctaagctttgattatgttgtgagttgtgacttacttgagtctaatgtcattgcaggtatcgaacgggagattacatctcttcaactagag

SEQ ID NO: 38795 - DNA, 669 bp, Arabidopsis lyrata
  Intron number 2 from transcript 474862 (locus 474862) deri ved from phytozome v7.0 (chr-ID scaffold_1; pos 33110914 t o 33111582)
actcttcgcttcgatttctctccacttcgtcttaggttcgtcttcttcagatctgtgatttcaatttcacaaacctctcttttagggtaaaatcattagattttgtaagatttggtagtgattccgcgagatttaggtcgaattttagcttgacttgactctttctcgatttccgaagaaaaatttgtttgatttttctgttcctacggtttcaaaagaatcaaaatgttgaaaacatgaagatttgttgtattgataactaagacaagtaatttaaagttaaacatgtcggattagttaaaattcagcaaacaatttgtgttttctgggctttggttataaaagtttgtctttttgatctcttgattactctggtttaaatgataaatgatacttctaataatttggtacattgatttgtgaaaaatttaactagcattatgatacacttgtataaatcactagcaatgttacatgtggatagccttttgaggatagattatgttagcttcttcaggactaatgataatcgttgtaacggattttacaattaagctgattagcctcctcttctaggtttcttgaaatccttaggagctttgtgttgattttattgattatgttattttttcaggtatatctggtgattccaatagttcaagtactgga

SEQ ID NO: 38796 - DNA, 1023 bp, Arabidopsis lyrata
  Intron number 2 from transcript 475946 (locus 475946) deri ved from phytozome v7.0 (chr-ID scaffold_2; pos 12967682 t o 12968704 reverse strand)
ctgtttacgcaaactactgtcaacacggttagtttgcaatgttgctgcttctgattgttgaaattgtttatacatttctgaatgtacttgagagtgtcaagatcttgctactatgtttagagtcttgctagtttttgacgttgctgcttccgattgtgtacttttctattgtcgagaagggtttcgaatcgtttagttgactgaatctggactctgcatgatcaaagttactttttcaatgtagtggagtagactttagggcttttggattaaatgtgacaagatctttctaataagtttagattcttgctagttaagtttgcgatgttgctgtttcagaattcagatcgtgttcttgacagaatctggactgcatgatcaatatttactccttttctgagtcttattgtgaatgtggttgagttgaaatttagagtagaggagtaaatgtgtcaagatcttgctactatgtttagaatcttgcgagtaaatcgtttttttgcaagattgtgtacatttttgttgttaaagaggagtttcagatcgtatgcttgacagaatctggaccgcaggatcaaacttactcctttcctgagtcaactggatcatttttgaatgtggttgagttgaactagagagtatcgtcagactaagtgtgacaagatgttggtactagttatttgctagtaattcggttgcactcttgctgcttgagattgtgtctatttctactgtcaaagagtagtatcagattgtattcttgacagaagctggactgcatgatcaatagttactccttttctgactctaattggaaaccttttcatacattttctgaatgtgattggaagaatgatatatatattaagatcttgctcgttaagtttagagtcttgctttttgcatttatcttcggcatatattgggaagtggatggctttgtggtttagagtcgaggtatgtgtttcttatctcattctaaccagctcttacttgttgatatctttctaactaaaggtcgac

SEQ ID NO: 38797 - DNA, 273 bp, Arabidopsis lyrata
  Intron number 2 from transcript 490595 (locus 490595) deri ved from phytozome v7.0 (chr-ID scaffold_7; pos 80403 to 8 0675 reverse strand)
ctcaatttgacactttgaggtctcaagttcaacaggtttgacttttctctgctatgttatctcaaagagaacaaagacagacgtttattttgtgatttttcaagagcgaaccttttgttttctcttcatactttcttgataactctatgatttctgcaactagacaactttttcttatctagttttctttgctattatcagagcaggccatttactaattcgttgttaatgcaatctcttttaggctgtcccttttcttgtcggttgtcctgc

SEQ ID NO: 38798 - DNA, 578 bp, Arabidopsis lyrata
  Intron number 1 from transcript 358424 (locus 358424) deri ved from phytozome v7.0 (chr-ID scaffold_8; pos 20401393 t o 20401970)
gaagtccaggtaattaaaagttgaaatctttgtgtttgaactgtttgcattggtttcagtgagacaagatctgatctgggttttgggttttcttgttgagtgattttatgttgtgtggattttgagatgttgggaagtgggaccaacataactggattttgctgggtacacttttgtctgaagaagctattacaatcagaccagttagagacagagaaagggaatctgatgatgctgaccaaacaaaaacagaaataaaaagaagattttttcttttaaaaaaaaaacaaagacaggataatctttgtctcttcctttttatcttagaagataagtgtgtttagttgtgctaaaagttggttagcagatcttacgatttctcattatctggttaaatctgttataattactgtgtaaataaaaagagattcagatgttcttgcaagttagttggtctttgttttgaatcattgagtaagttgcttgaggattaggattaattaattagctgattagtctaatgcaaattctgttttactatctcttgcagctcctactcctcctcctcctgggctctc

SEQ ID NO: 38799 - DNA, 742 bp, Arabidopsis lyrata
  Intron number 2 from transcript 343486 (locus 343486) deri ved from phytozome v7.0 (chr-ID scaffold_3; pos 22880948 t o 22881689 reverse strand)
ccaccgtcgttgagaagtgtcgtcttgattctgaggtatgttctgagagtctcttctctttctaaaagagatataagtaaaacatttggttaatcattcataaatatgataaagttatagatttgaattttaatagtggttaagttgatcaaagataaacgattacttacccggttttctcttttaattcaagattttttcttattgtgaacacaaatattaaaatgttttaccagagaaattttttctctatatacagtatatatgataaagttataaaaatatattttctaaattatattgtttttacaagataatggacaccaagtgataccaacacacattataagcaaatgagaaagaaaatcaaaatgctgattgaattctaagtttgtttaccttcaatagctaaattagtaagatatataaattactaattgtaatgtaattatctttgttctatgaaagaaaaatcatacagcaaagtgaaaagctaaaaacaaaagtgtcattatatgtaattatctttccgtacaaacaccctttgtattctagtggttacttgcttgtctaagtcattgactcattgggactctcttatcaccagccccacaaaatataaaactcatcaaatcaaactctaataaaagacctgattagctgttaattaatggaaaagtgaatatcaatcaaattttaattttcaggttcttcaccttaaggaacaactttacgaggctga

SEQ ID NO: 38800 - DNA, 494 bp, Arabidopsis lyrata
  Intron number 2 from transcript 476072 (locus 476072) deri ved from phytozome v7.0 (chr-ID scaffold_2; pos 13751095 t o 13751588 reverse strand)
gacccgtttccacaaatctctccctgtttctcaaggtgactaaactatcttttttttttttgttcttggtttattctttgcatgttttgttttttcttggcctaaaggtttaggatcctcacctatgtcaagatttgtttatttttcttggacgaggttttcaaggctatctctttctcgctcttgttttggtgtgctttcccacacaaactctagtattgtgtaaattgtctaaatggtcctccttctctgtagtctgtacaatattcactttactttaaatgttctctttctttaatgtgttaatgtctgaaaacaaactctctgtctcctttaatactgtctctattggtactgatttacttgcatctttttgtgtttcaatccaaaataattaaagtctaatttgactttgactcacccattttttgcttcttccaccattatctgtcacaacagttgtggagagaaagcagcaacaacagcagaagaag

SEQ ID NO: 38801 - DNA, 445 bp, Arabidopsis lyrata
  Intron number 3 from transcript 485766 (locus 485766) deri ved from phytozome v7.0 (chr-ID scaffold_5; pos 16723455 t o 16723899 reverse strand)
gtgaattagctcctcgtcctcgttctcgcaaaggagtatgtttctcttttgcctttcgttaacattgttttgtatcatcaattttactagtttctagactatgttagattcctatagtttgttcagatagtttgatctatctctttgacagtgtaggcgtgccaaatgcttcacctttgtgaatgtgtagttcattagaccatttgctttcttgcaatattgattcatttattgtccatgtgtttagtaacgttcttcttataatccatattttgagctttcatttctctttctgatcacatgattcgatagcgttatcttgatatttcgttatgatttttgtggcatttttcttgctttgttgcttaatggatctgattctggtagtgataatttcttgatttgctcagaaaacgagcaagagaacaatctttatcagaaactt

SEQ ID NO: 38802 - DNA, 907 bp, Arabidopsis lyrata
  Intron number 3 from transcript 338058 (locus 338058) deri ved from phytozome v7.0 (chr-ID scaffold_2; pos 1124128 to 1125034 reverse strand)
agttttgctgccgatcatagaccaaggacgtgtaggtaagtctttttttccgataacttaaggaagagttaagaattacataaattctttatcaaaattgaaaacagtcaaataaaccctaacccaaacttcaaattctaaaccccagcttaataaaccttaaacattttgaaaataaatttctcacgtttcacaattttatcattatcattatttcaaaataatatacttattttcagattaatacgtgttgttggcacaaaattctaatttctgtaacattttcgttttttttttcttctagttttcctttattcaccaatattaacaataatttttaaagatagttacaaaaaatgataaaaattatatgtataaataaagttctcttctctttattattacaatagaaaaactattattttcattgaagatatataagttagtattaatttttagtgatgaaatacatatatacaattgtattaaattagcgtttcaaaaagagtgttttttttcggaaaaaacaatttttaattttaaaatcaataagaaattttgtactcttacaaatgtgtattgtgtacccttaaacagagcacatggagtgtatctatttaaaagaatcctatctaaaaataaaagcatacacaaatccaaacttaaaataaaagaaaaacatacgctcaactaaaaaagaaagataaaaaaacgtataaagccaacttataaacaaaacggaaatacgatggtcaggtgatttattgcaatcttcccaaaaaaatacaagattactgcgttgatcacaaagatttcacactctgttttggttactttattcatttatttatagagatcaatatggtaaatggtattactaggatattgttggaccatagtgttcagt

SEQ ID NO: 38803 - DNA, 891 bp, Arabidopsis lyrata
  Intron number 2 from transcript 471984 (locus 471984) deri ved from phytozome v7.0 (chr-ID scaffold_1; pos 7441718 to 7442608 reverse strand)
cggcgagcgaaccgccggagaagaagttcaggaaggtaattattgcctattcgggggtgatgagtttggctctctttttcttttagatccggagggtatttgaggactaagggtttgatttgttgtttggatctgatttggatgctagggatttgtaagttatgcctctactacttagtgtgtcattgatgaatctctgtgacttttattgcactgttagtagagtttctgagttctatgacaagtttggattgttgggtattatgtgatatgagagcatctctctatagctgatttttgtgaggttggaactctctgttttgtacaagttttcagctgttctgtattgtagatttttgaatcatttgatacgctgatgatagttttaagttgagactaagagggtaatctagcgtgaagcttttgtctgttcaatgccataagccatgggtactttttcgactggtagaatggtgtctcgactctgtttaacagcaaagaaaggcatatgaggccatgagggattggattgtccagcgacaagtgtcaagggttatcaatggtcatgcattttgggttcatgaattgaatttgtaatattgagttgttctatagctgctctcttctggctgatgagacttccaggggtattgatgtaactaggttgtcttcagaggcactttccgtatgagataaacttaatctgctctcatgttattgtatgtagtcttctttaccggtgtacattctctatgttttggagaataagcatctcaaggttattatgtgtttagcttctacaatttagtggtgatttcagatgtaatgattctgtttgcacaattttcttccgcagttgacatcatttcagccatcgaatttgataaaagt

SEQ ID NO: 38804 - DNA, 828 bp, Arabidopsis lyrata
  Intron number 1 from transcript 493502 (locus 493502) deri ved from phytozome v7.0 (chr-ID scaffold_7; pos 14379905 t o 14380732 reverse strand)
acgagtcaaaatcgtgccgctccgctcagctcgaggttggtagtttctgttcatgactctgttatagatctcagaatacggtttggctgtagaatagggaacacattcgaatttgggagacggatttggtcaatctgcagagagctctcttaagattgtgaagttattatagtgtctgcctgtctggttaggatacgcattgagaggtttgagtttgttttgtttttttttttcatttggagttggaaattgaaatcctttagaagagagttctatgtatagataaagtcaggtgacttcacaaatattcatttgatgaaaatggagctctctgcagattaaagtttcaagttttctcttgtttcttactactacactctcacttggtcattcgtgttaaaaattttcagtattttgtagcatattttcttgttaactgtatcaggcagcgtgtaaattttgattgttgccaatactctttgtgttgtgtatcataaaccctcatctcatgaagttagtaaatggctctggtgactgataatactctgcaaaatccttaaccaggatcaagagattaggatttggtagtagtagtagtagtgtgcaggaccgggtctcttggtttacaagaagagtttggtaaattagaaacctgtaggatcaggagatgaggacatctttgctaaggcttggttgtttggttttgataatagtcagattcacctagaatggtcttgtatgaacctgtaatgcttttgtaacaacttgctgaatatgcatggaattttatgtcacataaggttggaattctgcgaccaaactggctag

SEQ ID NO: 38805 - DNA, 636 bp, Arabidopsis lyrata
  Intron number 2 from transcript 941254 (locus 941254) deri ved from phytozome v7.0 (chr-ID scaffold_6; pos 7218697 to 7219332 reverse strand)
ttgggtatttgctgggtttcgtcagaatttacaaggtttcatttttctccaacatgttttgatctttaagcttctatgctatctatctccgagtctgttcgtatgttggagtcttttttagctttgtggttcggattagtccaagtagtagaccaggtgtttgtgaaaatgccgcagagaatttttgtgtgtacgaatctttgaaagtttagtttttttttggaatgggttatacagtggtaggaagtttcagaagttaatagtactagatatgactaaacatgagaaaatggtatataagctatctgaggaattggatatttgtttgagctccataagttcatgaaatgatcaattcataaacacaatcatccctaaagaacagttgcagcttatttgtctaatctcattgttgtttatttgggaactacaaaagttcctttgagattaattgaagatccacattagttgggcttagttgtatgttcattcttgatgttaatattaatggattgttttaaaaagtagagtgtctatattcgattgtgttcggtaaattagtgatgttcatgactctatatatgtggtttttgtttacacttgagttgatttaatgtcttgcagcaactcgatcat

SEQ ID NO: 38806 - DNA, 541 bp, Arabidopsis lyrata
  Intron number 5 from transcript 479742 (locus 479742) deri ved from phytozome v7.0 (chr-ID scaffold_3; pos 9944421 to 9944961)
tgagttattatcttaacacacttacagtgcaccaggtatgtatttagttcgagcgaactctggtgcttttctgtttattgctctgaatatagccttccaactgctaggaatagtcctataaattcaagtggatgatcttttgtttcatgtgtcttatgaaactccgtagatggatcatgtgaattagtactcttccatctgttatcgttgaaattcattgatgccactctgtggttaatttgttgagattacttgaaagtctgtcattgccttcattaacctagttattgtcccgaagtatgcatttcttctctaggtaacttaacttgagtgagataatgcaaattaatttgaatgttcaactcgaagttttgtgattcatatcattagggaaatatggaatagaagtctctctgttgatttaacttcattgataccctagttgttctctgtccatatgactgactcgtagggggtttttcattttgtctattataaacattgtaatcaaattggagtttgtatcatgttttgtttctag

SEQ ID NO: 38807 - DNA, 684 bp, Arabidopsis lyrata
  Intron number 2 from transcript 488541 (locus 488541) deri ved from phytozome v7.0 (chr-ID scaffold_6; pos 6910840 to 6911523)
atttctccagcttcgtcagacagttaaatacttatgtaagcatctctgtttgtgttagtgttttttcgaaagtgatcgtttttcgtggtacaatttgggggaaatcgtgaaatgttgaagtttgaagggttttagtcttggttcagtctcttcttcttaaaccatatagctgagcatggttgtgtagtgactagatccatggttgtgttggattctttttaaagccatgtcaatctttctactcaccaaaaggttccacagaactttgcaggctcactgtcacatatgtctgaagatttggtttcctcaattgctttctgccttgtagctctaaatcacaaaacagaatgtctatcagttctctgaacattagctttgctttcgtttgtatatgtccgtccaggtacattttttttttgataaagtaagaattattactttccttaagtgattttgtgctgcacccaggcatagtgtggataatttgttttcttctcaaacttatgctataactagaacatataactaatatggactgttttctagtctacctgttttgtacaataactctatgttggcttttctacttccacaatattaagcaacttcaatttgaatttggacctttataatagtctctctgtattcttatgttcagggtttcagaaaagttgatccagatcg

SEQ ID NO: 38808 - DNA, 653 bp, Arabidopsis lyrata
  Intron number 1 from transcript 479576 (locus 479576) deri ved from phytozome v7.0 (chr-ID scaffold_3; pos 8980026 to 8980678)
gttcttcagacaggtttttttgcaaatttctttcctttttagcgatctgggtttatatgtcttttcgtatgattccgttagatgtccatagggaagactttcaattacaagatgtgaatagcttttagtgacttatcacttgaggaaggaattgtttgattttgttttcaattttttatggttcaatgttttggatcatgaacttagcttcagagttgatgataggttatgttatataaggttaaggatcttattggaccactaatgatctggatctaaataagtgatttgtgtgatgatgctaaacttgctaatcaaagataaaaaaaattaacatttttgttgtgtttggatcttcaattgtagcagtttttgaattggtttgctaatttttccactaatgtaatagtgtctctcttggacaagatgctgttttactgtaaatgaacattcaatttgaattgttagatgttgtagttaagtagaagattcctgtttttaattagtgttcttgccattgattgacaatagaaccaacctcaaagataaaacaagcttgcaaaatcgattttcattatctctggtgactgaaactcatctgaatgtttctttttttttttgatacagtcatcgcagctgctctcacattagtc

SEQ ID NO: 38809 - DNA, 525 bp, Arabidopsis lyrata
  Intron number 1 from transcript 941859 (locus 941859) deri ved from phytozome v7.0 (chr-ID scaffold_6; pos 9992768 to 9993292)
gtgtctcagagttcttaatcttcacaactgtaaaggtatctactttttgtggttaaacaacaaaaagggtttcttttttcctatctttctctggatttcatatctgatttgattaaacttgaatttgaaggattgtttatgtatggttaataatcttaagaagcagttgctattgttttctaagacagttcaggtgttagattttgatctctggtgtttaggtttcttgcttacttcaatgttgtttggttttgtccctttgtgtatgatttttattgtaatccatcagctttaaggggttttagtttgagagcgtcttaagagacctgggataatatgattttctatgattgagttcttctttggctcattgtattggtatgaatgttcttgagcactagggtctttgttttctcacatatatgttgttgtgatggtggaacaatcctaaggtcagaattttgcttacctcttcgtcttctgggaacaggtattacagatactggtttggcctcaattggaagg

SEQ ID NO: 38810 - DNA, 669 bp, Arabidopsis lyrata
  Intron number 3 from transcript 480306 (locus 480306) deri ved from phytozome v7.0 (chr-ID scaffold_3; pos 18112239 t o 18112907 reverse strand)
ctgttgaattcggtttcgaaggattagattatccggtgagattcttataagcgtgcttgatttttcaaatcaagtttgtttttgaagaacaaactttgcgtgaattttctccagagtttatcatctcttatgtgactgtgttcaatagcttcttctctataactcctttgtgctccttccttctctggaaaatttctctattcggatacctaattctagggttcgtttatcgtttttcaattgacaattcgagatttagagggctttaggattcgatttcgtgtttcacgttgtggatctgctttcaattcgtttattcgttgcgttccactgaaatgagtttgttgattgcttagacatttatcctcgttttgttgtttgcccgattgaagattagagtagcttccgttagatctgctttgttgtgacattgatagagatgagaaattcatttatgttacgtgctcctaggattctgcaataatcataatttcagttgaaaacaatgctttgcttctctctgctgctcttattttcctcttaatcaataaccaagtgtgaagtgtggtttttctcgaaaattttggtatcatctttgcttaattactcatttccctcttttttttttccttagttctattgagacgttagaagattgtggctgtcgtt

SEQ ID NO: 38811 - DNA, 804 bp, Arabidopsis lyrata
  Intron number 1 from transcript 950078 (locus 950078) deri ved from phytozome v7.0 (chr-ID scaffold_8; pos 16486821 t o 16487624)
ccgagagccgcgtttcgttctttagcctttttttggtaaataatttgaataaaaaatatgaaaccaaaaaaatgaagaaaataatatgtctaacgactcttttctttgactctcatcatctttcctttttaggtccaaccatttcttcttgtattatctatcaaatatcatgagatccaaaatcaacttgtaacttccttactgaactagacacacatatagataaccaacgaagaacttgggttccttaaaaccgttgattcaatcataattgtaaaaccgaaaatgcaatcgataaaaataatttctttaggtctaacagtttgattacttaacatttgttattgtaagttataatgtctattttcaatttcgaatgtgaggttaatagcatattcgttcaaaattatgaactttttcctcttttgatttgggatggaatctcattttggattagtgtatacatgtttgatgtttctaagaagcagttaatagatggaatgacccatataacttatatgaaagttaagtatctttattcatatttaatgtggaaatcttttttttgaatgatttaatgtggaatttaaaaattctttggtagaaacatcgagatctttctgtgatggaattgagaatttgagattttcattgttcatattgaggttgtggttttgtgagattcttgaaacttatgtagtagtgaattagtgtgtggtggttatatgttgtttgatcgatgtttggtttgctttttgtttggcctcagtgggtggaggaaccaaacttgcttgttactcgttt

SEQ ID NO: 38812 - DNA, 552 bp, Arabidopsis lyrata
  Intron number 1 from transcript 480490 (locus 480490) deri ved from phytozome v7.0 (chr-ID scaffold_3; pos 20873148 t o 20873699 reverse strand)
cctcgctcgcaacgaccagcaggttcctctcttttatcttcaaattccattagatcgcttctgattctgctccgatctcgtctcctttaggtcaattgatgtctgttttgatgtccttagttttgaattatcctttgatcactgcgaactttggattgttagatgatctggatatggatcgatccgtcattaggttttgagtctctgtttgttatttgattagagaattcgaagtatttctgttgttaatctagattgacacagagccgatttgggaattttcgtagcggtgatgcataaatctaaatcaccgaccattggccaattggaatcaaactaatttagtatcattgatgctagttacattgaggtctctgtttatgtaaaggttggtgcaagctaatcgattagattgtaaagatgttggagtttgcgttgttctagatcaacgtttcttcgttggttctgtttagcttacggcatcaggctaaattttactgcattttgttcttaatgaacagtgttcgtttgttgaacatcgcaactacaaga

SEQ ID NO: 38813 - DNA, 569 bp, Arabidopsis lyrata
  Intron number 1 from transcript 923431 (locus 923431) deri ved from phytozome v7.0 (chr-ID scaffold_1; pos 25992232 t o 25992800 reverse strand)
taaacaatttcgaggagacaatctcaaagacggaggttttcattttctctcatctttgttatcttctccttctgatagatttgttcataggtctccaactttgaattgagtcacaaagttctgtattttcctttgattagcttagacgaagtacctgataggccttagtgacccatttgtctgcaatcataagttaggacgatgaattaggaaaatcgatgtagcaaagattatttctttgcggggtttaattccgattacaatacgtcgatgttgttcattatctaagtttgtatagcaaatctctgtgggcttttagtttctctaatgtcttaacctggacttagtttaagacacactaatttcagcaaagtgaaactcttttgttcgtgataagttgttgtctatgtaatggacgaatatataagtttgattgctacaatcacgaaatttatgcttaggagaacaaatttcgccaaacaagctgataaaattgaaaaactgtgttttctttaatgctttgtatatttgatctgacatactatttttcttcgcctttttctttagtg

SEQ ID NO: 38814 - DNA, 735 bp, Arabidopsis lyrata
  Intron number 1 from transcript 320504 (locus 320504) deri ved from phytozome v7.0 (chr-ID scaffold_4; pos 11104143 t o 11104877 reverse strand)
catcattctaactttcttcatcattcttgagctaggtttgtatttacatttaaaatttaccttaatatattaaatatatatttttcaaccgaaaataataatgaatattgtgatatatatatattgacagtattgtgaaatttctttaaaagttccttctgtcaactatacaattttttaaaatatcaattcaacaatgttatgtaaaatctatgtaatctgtaatactgaatttagttctgtcaaagtcaaattaaatccaaatcaatcttagaaaataaagttttaagtattttgatctctaaacctattgatatacaattagaaatgttttcacctattttggttagttcatctcatttaaaaaaaaaagtatttggtcttattatattatgaagaattgttataatatgaattaattaaagaaactttttttatcaatagttattttactttattttgcatgaaaacatatttcataaatattgatgttgttaagattgccttccttatatctatatgatatttttgaattacttatatatatatatatatataattcttactttttatttatttcatatgttatggtacggtttatcaagaataatatcaacacaaatttttttttttatatatgaatcttttctgattttttttatagtaaataaatcttttcttccttcatatatagttactaagatttaagttgtaaatatgacacaaacaggagta

SEQ ID NO: 38815 - DNA, 921 bp, Arabidopsis lyrata
  Intron number 2 from transcript 496566 (locus 496566) deri ved from phytozome v7.0 (chr-ID scaffold_8; pos 21129153 t o 21130073)
aggctctagctttctcaaatcgagattctgctgaggtttgcttactctaaaccctatagattcatttccctttgttcttgtatttcttaaaattcgtttgcttttttcccaaatccattaacccataatgttcaaatctgctcagattcgcacatgcttgatctctcattatctgcagatcgtttaaatcttgatctcgtcatttttgtctctgttttagtcggtgacccatgagttcatgagagaacgaaattgttgatcttgtcgttttgatgagctcttgtggtgggaatttggtgggagagctttaaaaaattgaattaatagttgcttaattttgctcgtgttaaaaaattaagagtaatggctgctttaatctgcttctgtagagtgatggctgcttaaatctgcttctggtttaaaaaaattggtgtaatggctgctttcatctgcttatatatgtatattttatacacttgttagtggtttcttgtgtttggatttggtgaaaatctttcctggctcagttacaacctgaatcagaatcatcttattgctttcagacatcattttgtcatgtcttttgttcactttcctttgttttcattgatctcagcatgtttttgactcttctgacatctgaaaggttgagtgggatctatgatcatattgattatatatgatacattcttttcacattcatactactataagcttttataactggatcatagaatccagatttagctgcttcatcgtcattagtttgtgtattctcccttttacatgtaagcttttaggttccgctaatatatatattgtttgttacttaaaagtgatatgttaccgtaagctttcatgttgagaatcttgtgtttatgacatctttaaatgttttcgctgcaggagctcgttgaaaga

SEQ ID NO: 38816 - DNA, 361 bp, Arabidopsis lyrata
  Intron number 1 from transcript 928878 (locus 928878) deri ved from phytozome v7.0 (chr-ID scaffold_3; pos 4664933 to 4665293)
cttctcgccggagctttgctgtcaaagcccaggccgtaagtttatctcaatgtcgatacttttcttattctgtctcattggaatctgaattcattagcctgttatagaattcactctcttcctacttgttagccctataaataattatcgatttataggtttctgcagattactctaaaaattcggaaatttgagtgacattttcttttggggttgttaattgagtgacatttgagctatactcgttgactgattttagtctgtaagaggagtcctatgtagttttggtctgattgttgatttgactgatcctgctccttgtatttgatgtgtaaacgagctttacttttgtgtttatagg

SEQ ID NO: 38817 - DNA, 331 bp, Arabidopsis lyrata
  Intron number 2 from transcript 334057 (locus 334057) deri ved from phytozome v7.0 (chr-ID scaffold_1; pos 2837666 to 2837996)
gaacaaatcagcttcaaagagccctccaagcaaaagtaaaacaaaaggtttcctaaactaaaggaaaattgcttaatttaattttattatgtttcgaccagatattctttttagtacattagttttgatacagtatacaaacttaattaaattgcaggttcgaagaagaaagaaaagagtaagaaaataggagcactggatcgatgctgatagcttcatgttattctgtttcgatcatatatattcttttaagtacattaattttgatataataaacaaacttgataaaattgcaggtttgacaaagaaacataagagctttaaaatagga

SEQ ID NO: 38818 - DNA, 490 bp, Arabidopsis lyrata
  Intron number 1 from transcript 483893 (locus 483893) deri ved from phytozome v7.0 (chr-ID scaffold_4; pos 22932910 t o 22933399)
agagagcttagatctcgtgcggcgtagtttctccggtacgttgattccttctctatctctctcgaatcactgattcttctggtcgaattcctttctcgcgatctctggatccgtgctttgttcattggctcgtcgttttcagatctgttgcgtttcttctgttttctattatgagtggatttgctttcttgtgattcactagtttgtaatgctggatctgtatctgcgtggtgggaattcaaagtgatattggttgatttttttccagatcaggttgttctagtgtaatcaggtctaatacttgatgattctgcggaattatagatctaagatcttgatttgatttagatttgaggatatgaatgagattcgatacgattttgtaatcgtaggtccataatggtcttgttacctctgctgctaggtcgatgattattcagttgcgtgtaattgtgagttttaatgtgtttttgtgaacaggcttgaaaaa

SEQ ID NO: 38819 - DNA, 591 bp, Arabidopsis lyrata
  Intron number 2 from transcript 327041 (locus 327041) deri ved from phytozome v7.0 (chr-ID scaffold_6; pos 17548426 t o 17549016)
gtttgattttcttaggaaggtaaaaatttcatctttatggtctctctactttgcctttcttttgtttgattgcatataagtgatcctattgcgcttggaaaaaacgacgttatgattgacttgtgattcagagaagaagattggattttagtatgaggtagattaatttgcaattgggtcaaatctactatagaaagtttgagacttgattaaagcagagggcttgttatgaattgaattcgctcaattcgatacttttaactcaagaaaacttctattacgaacatggcagtgttttcttttgagtggtttgatattcttaggaaggtaaaaatttcatctttatggtctattttgccgttgttttggttgcttgattgcatacaagtgactcgatttcgcttcaaaaacgaagactttctgatagtttatgatccagagaataagtattgattttgggatgagatttaaattaaagcagagagatttgtatgaataggttctatcaagtctacttttagcttacttttggtttttattttcgagattggtgcagtttaggtgtgtttaagtggtttatagatccagccc

SEQ ID NO: 38820 - DNA, 420 bp, Arabidopsis lyrata
  Intron number 4 from transcript 479631 (locus 479631) deri ved from phytozome v7.0 (chr-ID scaffold_3; pos 9331908 to 9332327 reverse strand)
ggacgtaagtcactgaatctttctttctttgttgtttgctcctaattctacagtgtcttcttttgttgcacgctcagtttctcttcagaatatcagtttaatgatttactagtggtcaattagttcctaagtctctaactttcactgtaattttttttaacttgatttggatttggtggggaagaatagtagaaagtgaactcaaaattgtttgtttcccccttttccataaatctcattaaatatgtacatgtaggagtgtttttggtctggatagtattgaaggcaatactgaaatgataatagcacagttaatgccttgagtcttctggctgagatataatagatgctcctttcttgaatggcttcgactttttcttatcagatccaatatttttattttcaccgttggccatccac

SEQ ID NO: 38821 - DNA, 577 bp, Arabidopsis lyrata
  Intron number 2 from transcript 900162 (locus 900162) deri ved from phytozome v7.0 (chr-ID scaffold_4; pos 6082696 to 6083272)
ataattacgacagcttcacttacaatctctgccaggtttcatttctaacactatctcaaatcttcactacatctgttaagattttttatgtgtttttgaatttgtttggtgtaaaagcagctgaatttcattttgtaagaaatttattcaagtatgcatcgtgattgattattagaatctcattatttcaaaatccaatctagtgtctacatgctaatagataagactatgtaatgttgattctctcttgttaatgtgatcagagaatcgaatacatcacttctttgttgcctgtagtagaatctttaatcatgttcaattttgtgagttgcaatttttgacattagattggttattcgtagtttgaatatctcgctttctcatgaaattttggctgctctgaatatctcacataacgtacatatatcccaaatatacaatttcatcatgtcttacttctagttctcaacgcagaatcgtgttaggtgcatactatatatcgtgattgttctcttgatatggtttattctgctttaatataaacaaaattttgaattgttatatttttctacagtat

SEQ ID NO: 38822 - DNA, 507 bp, Arabidopsis lyrata
  Intron number 4 from transcript 492396 (locus 492396) deri ved from phytozome v7.0 (chr-ID scaffold_7; pos 7572549 to 7573055)
gcataatcgtaggtatgtatattctttagtaaatattatctgtatactttgctgatttacatgttcagaaatacttttttgcttttttttttaagaaacggaagcatttgtggactagattgataggcacgtgacccgaaccaaagtaattaatagtactaaatgggaggtcattcatggagggatgcaatttgctcatgaactataagaagttttcttctatggaacttattcatttttgggttgtatggcttctttactatttggttgatatcagcactacatatttaaaaaatattaacaaaagctaaggtttagttaagctataccttctagattcagtcaacatcgttacatcgcaaaggagtttaaccgcacatcagcatatttaaatgtctgaatcgttgaaaaaaaaatgtctgaatcagtggctccattaactaacaatatgtctttgtttattgttcaaattctgcagtgtacttctatcaagtttgcttgcacaaa

SEQ ID NO: 38823 - DNA, 343 bp, Arabidopsis lyrata
  Intron number 2 from transcript 474419 (locus 474419) deri ved from phytozome v7.0 (chr-ID scaffold_1; pos 28219319 t o 28219661)
tctcttttaattgataacaagaaggtaaaggttttaactttgttgaattcagacatatcaaaggtgttgaaagtttcgatttttgattggttttggtgattcttttacttttagttaattaataatttttttgtatctatatatcaactcaaatcttcttcttatagttttaattttacctaaaaaacagagtaagaaacaaagaaaaggcgacgactctttgctgttatagttgacgacagagaatataaaacgtgactctcttttttttattggttttggtgattcttttacttggttttggtgattctttgttaagcaatcgagagttcatttacttgac

SEQ ID NO: 38824 - DNA, 474 bp, Arabidopsis lyrata
  Intron number 2 from transcript 484159 (locus 484159) deri ved from phytozome v7.0 (chr-ID scaffold_5; pos 833378 to 833851)
aagaagcctcatcaatcttcttcttttaaggtccacacatgattacacatttatgtaaaggtttcgtctttgagaaccagaagtctctctttaatcgaaaatagttgataattcgaagtgggttttgtgatcaactaatccaacattaaattcattgatttgtgaattctgaaagtgccaatctttttttcttggtttatgatcaatttaattctttttagagttctagtatcggatttatcgatatgatggatgtccattgagcattttgcaacaattgatttgatctttgtatgaccattaagttcttggatttgtatggattctgatattcttctctgtttggttctttttagatctctagtaacggagttatggctatgatgaatgttcattgactattttggaaccattgatttgattttggtttttgatagcaggattcagagccagaaccaccgagaatcaaatcca

SEQ ID NO: 38825 - DNA, 546 bp, Arabidopsis lyrata
  Intron number 1 from transcript 494779 (locus 494779) deri ved from phytozome v7.0 (chr-ID scaffold_8; pos 6300665 to 6301210 reverse strand)
cccaccgccgccgtacacagttgttcttctctcccaactacaatttcctccgccggtaacttcaccatcccgatctctcgaatcggtgttctttgtactgttttcgtttcttatactgagaatttgagaagacgtattcgttgctaatcatcatctagctcgatcgtttaccctaggttttcgcttatcgataatcgttcgtgtgttgtggtcgagttttttagttgttcaatttcgttttcactagttgattctctgtaacattttctcatcttctttgttgatttcttctcgatctgagagaattatgaaatagtggaattggtcatcaggcgcgttcaatgctcaatctcgttacttcaattttgatttttacattgctaagctcatatcaatggatgattgttgaaggtttaactagagaaggactatcaattttgcactatttgatctttattcgaaaacatttcgagtattgaaaaataaagctggttaaattctcatgttaattgatgctgtttttgctttgctttcagtttcttcaag

SEQ ID NO: 38826 - DNA, 734 bp, Arabidopsis lyrata
  Intron number 1 from transcript 478157 (locus 478157) deri ved from phytozome v7.0 (chr-ID scaffold_3; pos 3395544 to 3396277 reverse strand)
ctctccagatattttgctcatccatcgattcttaggtatgactcgtttctctcagatctgtcattctttataatctcctttgttcttcaacaaatcattgttattcttgttccatcgatctgtgtttttcttagatctataaggtaaatgagatgtttcggttcatagatctgattgttgtattgctagatgatattatctgcttgcttgaactccgatcggaatgttttgagctcattttcgaagcttttgtgtatcggttttgtagatctgcttcgttttgtgcatttctctgatctgatgatcttctagtgatcgaaatcgtttggatctgttgactttagtataaaatgttttggatctgatgttgcgactccattaatggaaattgtgattgttgttgaaccagatttaagtttttgttcttaaaatttacgcgatctttgcgttatcatatgtcatggtagttcttggttcattgtatcaacttgctgcttcgatctttttttcttttgtatgttgttcaaagaattataattagcaatcgtgttttcagtcattcagacttttgaattgtcagctgtgatttccaataatcttggattgtttggttggaaagctttctgatttgttttgtgttggaaaagcattttctgattagccttagctggtttgtatgatgatattcacgtcttgtttctcatcaatggttatgtgattttgcagagttcaaa

SEQ ID NO: 38827 - DNA, 449 bp, Arabidopsis lyrata
  Intron number 1 from transcript 473408 (locus 473408) deri ved from phytozome v7.0 (chr-ID scaffold_1; pos 14672718 t o 14673166 reverse strand)
cgcgaagtgaacaaggttagttagtcttcttcttcttcctgaggatatttgaattgactctttagtttcacttgtcgtagcaattcggagatggaatttagagttatggagattgttcgattcttgttgttcataatcttatcgcgaaatcgatattcgactttgtttcttgtttgactggataaggttaatcgaattgacttcttggtttttgctttgatcttgctccatttttgttataatcgataagaacgtctctggaatcgttacgttgtgttgctttcgctttctttaagaaagatcagatcatttcttttttcaagtctgtagttccgtagtgcaattatgagtttctggattgatgtgtaacaatgcctgtattaacattgtgtttatcttcatttctgtattcagatcttttatctggtatcaagaaggaagctgaagct

SEQ ID NO: 38828 - DNA, 522 bp, Arabidopsis lyrata
  Intron number 4 from transcript 496979 (locus 496979) deri ved from phytozome v7.0 (chr-ID scaffold_8; pos 22815560 t o 22816081)
ctttgtcaggtatagccatacaaccgtcgtcttcgtcgacccatcttcttccttattacttctctcgcttatgttaattgatcggactgacttacccagtcatccaagttagaatcggacagtcaacaaaacgaattgatttttgattgcttttcattatttattctttattttatttttaaattcatacaaaggtaaaaccttttccacaagtcatcgtcaaagcaataaactttaaatgaagaagacgattttttttttctggtaatggggaatctaattaattgatttgtgaaatatactcttctctttttttgcctgaatgttgatgtcatgatacttgaatctactttacatagtagagaggcataaacagcaaaaaaaaacaagaattaatgtaccaatgtggtcactaattttagaaagatttggactttttctttcatgagttatatgagtgtacacacacatttggttactaactaagtaaaggatttggacaggttaagttgtttctcactg

SEQ ID NO: 38829 - DNA, 404 bp, Arabidopsis lyrata
  Intron number 2 from transcript 897091 (locus 897091) deri ved from phytozome v7.0 (chr-ID scaffold_5; pos 10120948 t o 10121351 reverse strand)
aaagccttaaaaggtaaataaaagtaatacaaccagtaatttagaaatgttatcaaatatgaatattattggatttgatattttcagtttgttttttattgtaatttgattttaaagtattttaagaaatttcgtaggattttattacaatatatgtaatattgaataatagaaaaatattttcattttcttatattagctattgaaatattttattaatgtttttggaagagtgataaactcatccgaagaaaaaataacatgttccgtattttatgatatcttcaacaaaatttaaatttaaaataatattttttagatagactttttttgtaaggactaaacactaaaatatttgaaagcttccagccgtgaagattcgaagctttgctgggagatcagag

SEQ ID NO: 38830 - DNA, 361 bp, Arabidopsis lyrata
  Intron number 1 from transcript 897091 (locus 897091) deri ved from phytozome v7.0 (chr-ID scaffold_5; pos 10121355 t o 10121715 reverse strand)
gatatatttatgtatctcttgccactttgcatatatctgtgggtgtagatacattacataaaaaagttttgttcaagagtcatttgagttcatgcattttctaactaattttatcgccatagatatggatatgaatgaggatgaggattagaatgacgataagaaaatggatgggaaaaagtttaggaagccaaagaaaaatagaaaccaaaagagaaactggaagaggagatagtacacaaaaaggtctactagttttaggtattttgttgctggtacaaatatcctaaaagaacatcattctttcatatcacactacaaaaatgtatagtgtaatatttttttttgtagccacttgcac

SEQ ID NO: 38831 - DNA, 563 bp, Arabidopsis lyrata
  Intron number 1 from transcript 481399 (locus 481399) deri ved from phytozome v7.0 (chr-ID scaffold_4; pos 4363575 to 4364137)
gacatttgatttcatcaaatcctgcgttaggtgagaatgacgcttcgccattgtcggagttcctttctttgtctgctgtagaaaactagaggcaaaaatgtcccaagttttcatgaatctgagtaaacttctatatgtctgcttctgtttacatgtttctttggtccgtagatcgaagtagaactgtcacttatagtacaagactagtgagtttattactaaacaactggattaacgatgagttatttacatgggagctagagttgattttggttccttctattggcctaagtgcaatgtgtggctcctatgttagtgttttaactaatgctgattgatatctaactttgtaatccttgaaaatgtcatctgtcgattgatgtacggatatacgactacgcttgtgtatgttttgaagagaatgcattcttttggtagttggcaatgctaatctcttaactactgaggaattttgattactgtttctgcctctttttcttcttcagttgtgattgttgtcacttatatttttctttgttcattactgtgtttatagtttaccg

SEQ ID NO: 38832 - DNA, 433 bp, Arabidopsis lyrata
  Intron number 1 from transcript 478363 (locus 478363) deri ved from phytozome v7.0 (chr-ID scaffold_3; pos 4116337 to 4116769)
gctgataggtacctttttcgattctaggttttgttttctttaagctcaatttctactattcactgttttcctgaagctcaattttaacaatccaatgttttcttggatccgatattttgtttgtggtcagaaattttgagaatttaatgtctagaagctcaatttagtgaatcttatgatgggtataagcaaatgtatgtcactaaaaatagtaactatctatttttagatatctgggaattgaagaaaacttgattcttgctcattattacttggtataatacgattataatacttggttctaagttatggaatgttattgtgaggtgttttcactctaagttaggttgtttgacaaatgccatttactgattcgatgaaccttgttgtttctccaggttgggacttgtcgccaccatcaaggtactctctt

SEQ ID NO: 38833 - DNA, 660 bp, Arabidopsis lyrata
  Intron number 3 from transcript 492951 (locus 492951) deri ved from phytozome v7.0 (chr-ID scaffold_7; pos 10426954 t o 10427613)
gacatgtgagtcttggttttactttttctattaccatgttgatacttgaacttgaagtgcttatagatgtctatgtgatgtgttccattgagtttatcactctttttgacgagatgtgtctaagatagatttcttatagacacgtacgcttatctcgttcccttgctttttggaggacgcttatattctcttccctggcaaatatttgaacttttaatagcgggtgagagaggtgatgagtaggacaagaagactctctaggaagtaagagtgccggctaggtattcttagttgtgaggattatttttctgggctgagtaactcggtagaattgtagattcaactatatttggttagtatgtctgctcctagtctcttgaggaccaaaaccaagcataatataaacactgatgttacatatatgttatttatatatatgatgttatgtacaattattaaattagagggatcaaactgaaagtttgtttaagggcagctttgcacatctgttccaatctctttctgcaagagagagataatttttgttgtgaatcagttgatagtttcccatgacacgttatttgctcttttcatatctttgactgttatatcacttatgcctatacaatctcttttgggctcgttggctccactttgcag

SEQ ID NO: 38834 - DNA, 1017 bp, Arabidopsis lyrata
  Intron number 1 from transcript 925001 (locus 925001) deri ved from phytozome v7.0 (chr-ID scaffold_2; pos 3067543 to 3068559 reverse strand)
gatctaacactagaaagggcgttctcgattctaaggtcagttacacgactcccagatttagggttccgtcgaggcaattccgatcattctgattccaagaaggatatgtttacttgattcgattatcgttactatgtctctcgttctttgttattgttacctaatttatcccaattggtatgttaatcttcctgctttcgtgaacccagagatcgatcgattttgtaatttcatggataccatctctatgatagttttgtgattttggttttgacagatcacgagaattagaagatcaaggggattctgattcgggatctctaaggacaataaatcttccatggaatgctatcgaagagatgatcgggaaggagtttgatggccgtaacttcaccgtgaacagttttgtgctgctttgtttttggtttagatttgttctgcatcactgtctccggtttgattcttgttcttgttcttatgccgatgttacagaccgtttcaagctttgtgattagttattggccagtcaccaaaaccgtcttgatttgctacgttggcagccactgaatatggagcactttgataatgtctcgcaagattgccagtgaacgcagatgctcgtgttttgactacaattgtggtatgattccctttttatggaatttacatgagttaattgtttctctgtttctcgcttttacttcatgttttcgtgcctttgtcttcctgttgaaatgagctcttcaattgctcaactgtaacttacaggagttgtaatgtaatgtaagcttggttctggatttatttgagaagatgatattcgaaagataaactttggtcgctagtgctaatgtaagcttttctcttgattgatttagggagaggatactggaaagtaaaatatttaaagaacttgtatctgtagggataatgtaaccaagaaagtgcatttagttgtttttttgcacatgggaaagccaaaaaggtttgctaattatttttttcggtttcaggaga

SEQ ID NO: 38835 - DNA, 662 bp, Arabidopsis lyrata
  Intron number 4 from transcript 948824 (locus 948824) deri ved from phytozome v7.0 (chr-ID scaffold_8; pos 4361021 to 4361682)
gatacagatccaaagccagaggtatagatgttacttcttttttcaatttgcttcagttggatttgtgatccgtgtaactgtctataggtaagctttttacttacctctctatttgacgttttcagcaactaatttgcatatccaagaatcttttttttcttcataatttagggatatattgtgttagtgtgtaaacatttatctaaatttgcatatacacgaagtaattcatatatatttgcatatactagatttgacaatcaatctttgttttttcacaatctctgatttttgaagtgacttggatactgagaatttttgtcactatgctcttccttttcaggtcaggatccttcactcgctaaatcatccaaacatactcaagttctatgattggtaagacttactagctaatatccacgacatgttttcttgaaggccaattactctcactcttctttgaaaaaacgcagcttcttgtgttctctgtgaagtatgttcttcatggtaattcatggtctctaattaagttgtgttcgcttttttttgtctctgatttagctgtagtaggcagtggtaagaaactttgctgctccaaataccttttctagcttatccattccctgcttttttagattttgtttattcattctatgaagaga

SEQ ID NO: 38836 - DNA, 507 bp, Arabidopsis lyrata
  Intron number 1 from transcript 944477 (locus 944477) deri ved from phytozome v7.0 (chr-ID scaffold_7; pos 2848126 to 2848632 reverse strand)
gctacgctcactgaaatagcaacccttgaggagaagtgagttttttcttttcacctttttttttttttttttttttgtgtatcttatctactcttttgaaattaagacagaaaaagttgagatgtggtcgtaggattgggttttgtctgaaagactgaaactttgtgacaccttttcttgaaattgatgatgagtttagaggaacgatatcagtaaatctaggttgtgtttcgattctgtgttttttttgttggtgttcttcgtgagaatttgtctgaatttctgcatcttcctttgattaaggattggtttttgtttctgtcctatagcttttgcactaaaaaatcaaggaaggcatgtttttgtcaagtgaatgttttttttttcctgtttcagggtggattatgttgttaaattctgggttatatttagttataatgtgctaagtgatttctctactagtattcaggttaatgggattatctttggttttaggtatattgaatt

SEQ ID NO: 38837 - DNA, 926 bp, Arabidopsis lyrata
  Intron number 1 from transcript 915732 (locus 915732) deri ved from phytozome v7.0 (chr-ID scaffold_8; pos 3142356 to 3143281 reverse strand)
tcttccttctcaacaagaatcactcctagtgatcggttagtgtttctttcacatactcatatacataaacaaatcaattatctaatctagaattagaaagggaaaaaaaactagtattgaagtaaatctttttggttaattatccatatttctacaagaaaaatccaaaataatttcaggactacgtgcaattaccaattgaactcgaagtgctgaaattaatatggctactaataaagttactgcatgggttttcactatttactactccttctgtttcaaaatataagtcgttttaggtaaaaacacgcagattaagaagatttactttttaaaagttcagccaatcataaaagagactgcataatataaataatcataaaatattaaaataatatataatttgcattgaaactcgaaaacgacttatattgtgaaacaaagtactttatccaaaacgccttacattatgaaacggagggagtatttaaaaataccatgtgggataacttctgagttatgccaattttaaagcttttttaaaaattaattatattataaatataaataagtatgaaaatccagaaactgaaatttgatgttaaaatattcttaaatatttaaagccagaccaaagtaagtgtacatttatttttaaaaaaatttcagccatatatataggatttttttttatttcctttgtttaaatattaactctttttttttgagtcttatgaagcttagaacatgaaaagtatttagatttttgtgagtttaaccattttaaaatataatgttttatcaagtgacagtcattattgtattttatcaaaatattttatttttggactgcacaccttttttaatcgattacacacataaatatatacacgttattatttatttttgcaggatcaaggaagttg

SEQ ID NO: 38838 - DNA, 524 bp, Arabidopsis lyrata
  Intron number 1 from transcript 486202 (locus 486202) deri ved from phytozome v7.0 (chr-ID scaffold_5; pos 18459440 t o 18459963 reverse strand)
aagaaaatcgaggtgactcatttttctcttttacgaatatcttacttagttagatccgatcgattaagagaacaaggtgacttaggctctgattcttttttccctttttaggttaacatgcttttcttgaatcggtttgctttttacatgtgtaacaaaagtaatttagaaaatatatgtaacgctttcaaactacgaacgataaacgtgaacaagcattcttcttttgtttgtaattgaagttttgcaattagctaatgaaaatttgattcaaaatgcatatcaaaaaaaaatgtaaagatagtgggtttatttgaaaacaaaaggcagaaacacaaatgattcatggagcccttaatggtgatattttcaaaatgtgtgatacattaaatatttgagatgtaataaaacgatccaaatgactgactagctagacggtcgatttcgtctttggaataatagattatgccattgattcatttatgtggatgcagaggaaactggaagataggagagcaaaggcg

SEQ ID NO: 38839 - DNA, 848 bp, Arabidopsis lyrata
  Intron number 1 from transcript 495414 (locus 495414) deri ved from phytozome v7.0 (chr-ID scaffold_8; pos 15721768 t o 15722615)
aagtctgattttgctttcaattctgttttttttttctattcactgcatttgattacagatctttcttcttcttctttactttagataggtttttttttttacttactttaaaactcactttctagtttttggttaaagattctgatagtttttttgtttcttttttccttgtgaagtaatttgtctactagtgaagtaaattttcctaaaagttttgtggtgctaagtgttaagtggcttatttgtttttctggtgtaaattttgtagccacttgatgagatattttggtttcgctgaccttaccaaaatgtgtttttggctgctgagaaagttgagtaagaaaaaattaggtttgtttaaaaggaataaaaatggaatctttttttactgctgcaaaaaagccagatttttcttttccattgaaaaaagggagttttctagggaaactaaagaaagtctctttttttgtttgtgggttttgatttttgataatgggaattactctttatttcacatgagattccatgaattctgtaacatgaggttccgtgctcttcaagacttgttttgttctgatttaaattacttcttaaaactagagaattggttttgtgttgttttaattggctctttcttctcaaaatcaatcctccactgaagaaagaaaaaagattcttttttctcttacccttttttgaacgaatccactcaacaaaaaagatttgtgtttcactgtctgaatgtctcgaactatgttctgtcttgtgtggtcttattgattcgatgttacttttgattgtccttttttgcagaacaacacttttgttgagtcatcaaacatatctga

SEQ ID NO: 38840 - DNA, 114 bp, Arabidopsis lyrata
  Intron number 1 from transcript 890798 (locus 890798) deri ved from phytozome v7.0 (chr-ID scaffold_7; pos 13360590 t o 13360703 reverse strand)
gtgcttctgccaaggtcttctctattttctccaaccttcttctctaaataattcgagttttttttttaaaaccaatttgggtttttgattttttggttttccagattagtttac

SEQ ID NO: 38841 - DNA, 445 bp, Arabidopsis lyrata
  Intron number 1 from transcript 917125 (locus 917125) deri ved from phytozome v7.0 (chr-ID scaffold_8; pos 16501912 t o 16502356)
tactctctctactcttcgtactgctcacatcgaaggttcgtcagttttttttgttttcgttgactttttgactcgttttcttacatttcaaagtcgtttctcgttgaccaacatattattttgtagatttgcgacaatattgcgtgattaacggtttctaaatttaagaaatagctatatatatattatatagctattatcaacagatttatctagtgaaaatttggattaacaaattaaaaactgtatatgttaagcttttttaatctgccgacttagtgtttatacatgtcattatagggagaaccgaattttgtaggatttttgtaaatctgttttgtttttttcttgtcatatattattcattgattttttttagttgagatgtgtttaattagtaaattgatcaacctaatttgtatataggagtacaagagtacgtgac

SEQ ID NO: 38842 - DNA, 636 bp, Arabidopsis lyrata
  Intron number 2 from transcript 493617 (locus 493617) deri ved from phytozome v7.0 (chr-ID scaffold_7; pos 18395340 t o 18395975 reverse strand)
ttttcaattgcttgctttaagtttttgcgtaggtgagagatcttcttcatcttcttactgtttttgtcttatcttattgtctgattagtctctgttctgttttttttttcaattccaaagttacttttgaattttgtttttttttagttccttaagcttatcagaggtatcatcaaattcctgagaataatgaagttttgttgggtgatttgttattttgttttggtaattttgctatctaaatttagggattttaaagtctaagaattgaacagatggatctaactttttagtctcactgacgtcgcttttctgaatttattttgtcctttatgtttgtactaatccttaatcaaaatccttaaaaggctgatttttggttatgatttattgcaagagagtttctcattacctacctatcactgtctttaaatacttggggaattatattttcctcaatttgagttatctatcttcacttatggaccactttggtaaactaatatagataaagcatgatcctttaccagtttttaatcaacagtctctctctcttgtaatctttatatgattttgtatcctcaagtgtggttgttactgatactttgtgttatttctcttgtagtgaagtaagtt

SEQ ID NO: 38843 - DNA, 409 bp, Arabidopsis lyrata
  Intron number 1 from transcript 952455 (locus 952455) deri ved from phytozome v7.0 (chr-ID scaffold_74; pos 3776 to 4 184)
attcactcaaggaggacgaaatcgaaacgcttctggcggatccaaaaacctgaaaatcgtgaagaattttgaaaccctttgtgattcttttgtttatatttccgggggagattgttactctttatatcagattatttcttctttaatatctctcgttgatcactggtacaatcgtttgttttctgtcaatgtttttgattcagttcataggtttaagcttctatcatgggctgagattctgcgttttttttttacttcagatggatcatagaattactgcttgctcgccaatggagcgatatttgataaggttctctatgttttacttaatgtactttctgaatttggctcatctttgtttttcgagtaacggtaacatgtgtcttaggagcaacacgaagaagtgttc

SEQ ID NO: 38844 - DNA, 431 bp, Arabidopsis lyrata
  Intron number 3 from transcript 478524 (locus 478524) deri ved from phytozome v7.0 (chr-ID scaffold_3; pos 4722279 to 4722709 reverse strand)
aacactcgcaagttctgcccggatatactcctcctgtaagtttattgactttcttggattcgatctatgctttttttttgttgattaatttgaagcatttttgatataatgacatgatgatgcattaggatcatttgagtttcatgttattattctattgtagtcagaacaaatggcctagtgtaaccgaattcgtttagtgggataactgaaatagactgagaaaaggtttagcttggttttgatagctgataatgagttccaggtggaagtataaagtggctaaagtgaagaagttgaaccttattgttgtcaagatttacttgttatgatcaatatatagttatacgtttgtcattttcgtttttggtttctgcatataaggaccagtctaatccttttctttctcatagggttcgtactcactaaaa

SEQ ID NO: 38845 - DNA, 636 bp, Arabidopsis lyrata
  Intron number 1 from transcript 908287 (locus 908287) deri ved from phytozome v7.0 (chr-ID scaffold_2; pos 12433717 t o 12434352)
ttgcgaaatcgataaccgaggttcctctctatttttctgtattgttccctttaagagtttccaaccaaattaaatgttctttttatctatctcgtttccctttaaacttagactgatggttgagttaattatgattgcattacatcttgattcgtataagaaatgttagacacagaccaatttgaaatcaaatacacttgcttgtatatacgacagttgaaacatgtttatctttgtggttagctgtttatatggttttatcttaaattcccgcaataacaaaggttaatcataacggtttcttgagcgaatttttttaatttttgacttttttaatcaatatatttgaaggcgaacatagattgtgaatgcattgttataataattaatgaaaatctaaaaagaatatattgccctatcatcatagtttaacctgatattattggtatatatcttccactactgaatttaacaattgataaattaaactcatgtagcttctacaaatctttattatagaggcttatgcgcatataaaagaattggcttttattgacaacttacattgtatatgtgtatcgttcttttattaaaatcattatttttctttctttcttaaggttataaaaaatcaca

SEQ ID NO: 38846 - DNA, 572 bp, Arabidopsis lyrata
  Intron number 2 from transcript 472492 (locus 472492) deri ved from phytozome v7.0 (chr-ID scaffold_1; pos 9919569 to 9920140 reverse strand)
cagcttccaagagtacagagacttctgtatctcaggtttgttggaatcttcttttctgagaatccaaatactagttttgttgtatcgttttgtttgtaacatttgaagttagaaatgatgctaaaataagaggttttcgtagtagcttaaagagatatatgatttggaagaatggttacagatttgtgagaacaaatgcatcttttagtttttatctctaaataattccacattatgagcatcacttgtaagagttctgtggctgttgatattacgagcttaaacaaatgcctgattgtttttgtgttgcgactagactacgtattggaaagtaatgattagtaattgggtatcttacttcacccctatcatagttactaggcatggttaatcttattccaatgtgcatgcatttggttgaaagtatgccatttaagtaaaaagcaaacaattggtgactaatccggtcatgtttatagtcttcgaaatcctgacaaagtagaatcaattagctgagtttttttttttttaaatcttgttgattgattacaggcagcagaagagtaaagaca

SEQ ID NO: 38847 - DNA, 501 bp, Arabidopsis lyrata
  Intron number 1 from transcript 924211 (locus 924211) deri ved from phytozome v7.0 (chr-ID scaffold_1; pos 30768002 t o 30768502 reverse strand)
ctcccacgttactcttcttacctggtaaaacaaaatcacttaatataagaatcaatggtttttttagctttgattgttgaaattgcttgacctatgtgggttttgtttgtgcttcttgagcttaaaattaaaccttttttctattctttcaaagtttgaaacttttttttttttttcatcttcaaagtttgaaactttgtattcattttcttacttctttgtgtgtttcatggaggaaagtttgaatctttaggctgttttgttgaattcttagtaattcgttttactgttctttatttcaaggatctgattctcagatcattgtttcaaagttccaagctttttcaaaaatgcttgattgtttaggctgtgttgttgaattctaataatgggtttttactgttctttatctcacatatttgattctcatatcatcgtttcaaagttccaaacttttccgataatttcgtaatgcctgatggattaatattttatacaggg

SEQ ID NO: 38848 - DNA, 716 bp, Arabidopsis lyrata
  Intron number 1 from transcript 905572 (locus 905572) deri ved from phytozome v7.0 (chr-ID scaffold_3; pos 11866083 t o 11866798)
ttttgtgagaagcccaaagacttgtccgggtttctttacctacttaacacttctaagagcatctccaatggatgtattttagagttctctcctaagtttctcttgaaaaaaatgctgaaaaataaatcaaaactctgatttattaagagaaacacctctcttgagagaaactttgagtaggaagagagacgatgacgtggtttaatctcaaccgtcgattgttttgatcccaaaaaaaaaacgcgtgaaaaaaaatttaaagaagccagagacttttgtcatttcccgacttctgtttctctctctttcttctttgcgaaaccaaacacttttctcaagccgccgacgacgattgaggtcacgattgaggccgccgacaacgattgagggaagaatagagaggccgccggcgacgattaggccggattcgtcatttaccccaccgcatgtcacgatcgggagtgagagagatatgcaaatcggatatccaaattcaacggatggagagtaatcgattcagcttgaattgtaattggtaagagcatatacttcttttatggaatttgatgcagtttataatgatttaatttggggaatttgatgttctttttttagggttctttgaattttacaaactagggttcatagtttcgtaaattatcgtaaattaagaatttgcttaagactgatcgatcttcttgtgttattttcagtgt

SEQ ID NO: 38849 - DNA, 686 bp, Arabidopsis lyrata
  Intron number 2 from transcript 476288 (locus 476288) deri ved from phytozome v7.0 (chr-ID scaffold_2; pos 14967343 t o 14968028 reverse strand)
ccgccgggattcttcctgacaccggaggaaactttgtaagttgctttttattcaaaatataaaatataaaatttcgtcagttgcatgttattatatccttaataagaaaaggttgcatgttacatatacactcttcttttgactcttaatttgttgtaagaaatgtaagttatccgaatagcatagtcatatacttgtatctactaatcaaccaaccaatattttatttgtatgtaaataattctaattggattttatttagaaatactattatatattttacataattctgaagtgtatacctattttctataatgaacttgtgaataaacaagagtaaacatcaaaaattaatttatgttattttaaatcattaatgaactagtttttctaatttgatttcaactttaaaatttattttttaaaaatgaagaaaaatcaatgatcattaacaaaaattatcaaatcaatcaaaatgcttccattgttttttttttaataaagaaaatatattttcagtggtggtcacgtcacatgagctatgttcatgatcaacattgtggtcaattacatattataccaagaaaaatggttgtgcatggcccgggtaaatgcgagaaattaacgtttagtttatgatctggtggtcaggtgggacgcatacctttcgaccaacagattcataa

SEQ ID NO: 38850 - DNA, 475 bp, Arabidopsis lyrata
  Intron number 1 from transcript 472799 (locus 472799) deri ved from phytozome v7.0 (chr-ID scaffold_1; pos 11436807 t o 11437281)
tcccgattcgcagtaataccgatagatttttctgtgtgagtgccatacaaactccgagaaatcggctcaagtttcgatttttgtttctgggttttacctttttcaccaacctgtttgtgattttttgttctgggtgttgttgttatataacagtttgatcgtttcttcttgatggtttttttttggattcgtttctagctttcgcttgtatgactgcattttgatgataatttcatatccgctactttcgttaacgttctattgcgattagagtgttgcgtttatcttaagtctgcttcactcattcgtccatgggtttaagagtaaatatcactgttcctttaaaatgttccgtacaattcagtcttgctatttgtgttttggctctctttgctttggtctctccatgttcccagcttaaaattctgtcttcttaatgaaaatgtacctttttttttgcagattattgttcata

SEQ ID NO: 38851 - DNA, 303 bp, Arabidopsis lyrata
  Intron number 1 from transcript 932941 (locus 932941) deri ved from phytozome v7.0 (chr-ID scaffold_4; pos 9579909 to 9580211)
tccttcattctcacttttcatcgatcttcatccgtgtaagtcgaatttgacatttacggtaacattgtgtttgggttttgggtatttgtctcatgtaaagttttaatttacatcgatgaattttttcttttgcaggaagagcttggtgaaacttctgttgaaggtttatgagtttcattttgatatatcaattttaatgttttggtaaataattgatatctaattgatctctatgtgactgttcttgacttcttgcaactgagttacgctcatgagaataactgagttacatgttttggcaag

SEQ ID NO: 38852 - DNA, 489 bp, Arabidopsis lyrata
  Intron number 3 from transcript 932941 (locus 932941) deri ved from phytozome v7.0 (chr-ID scaffold_4; pos 9580398 to 9580886)
aggaggtatatcaaagttattttatgaccagatttttcatgataatttagtttcttatttgggtaggagaaaaagatactcgcttgtttcatatatgcaaggtggttaaatattgatactttgttttgatctcataggaagctttatatcgtagatgcactttaagtgtgttcttaggttcttctctttggcaaagtctgcattttttgttttggactgttttttttattagtgcgattaacatagactttcatgtttttacgggaagcagcaaaggaacaatgattgtagaggaatgggattagtatttagccaagttttggcaagttgtactgccgagtgaaaaagacacacatgaggctaactccgaccacatcctgtagattttgtagaatggaagaaaagttcaatcctttttgtagagttttaggtcttcattattatttttgttcagtcttgataaagctgtggagctaaattatcagtgga

SEQ ID NO: 38853 - DNA, 1009 bp, Arabidopsis lyrata
  Intron number 2 from transcript 933094 (locus 933094) deri ved from phytozome v7.0 (chr-ID scaffold_4; pos 11088032 t o 11089040)
aggtacctattcttacattcttctttacaaagtgggaaaaattatgaatgaatgtgattttccttaatcctaggactattgttgtcaaacccaaacggaccatgttcaaccatgaaccggatggaaagccggtttggacaaactaaataactaaaaccgatgaaccaatagaaccggttgacatgagttttttttttcaagacttggctttattcttaaacatcactatcttttttttttttcattttctaagaagtgattaagtggttttttttttatgtttaacatttctaagaagtaaatttttccaagacttgtttttctatgaagtgtttggtttttttaagaaaggttggctttgctaaactatcccaactagatcacaaactttttttccccaaactttttgaatcatcactacacaagacaaagtttttattactatacaacagaaatttttaaaaaatcttcataattcgatagaaagcgggattagattttggctttcatttaattgactcaaagtcgcatatctaaaaccgtgttaagaggatcttaacatgaacttcaaaagtaatactttctacttggttttttattttgataactattcatgatgatgatctttatttcttattaattctgcttgttttccattttatcatgtgttggatatctaagtggtcgatataaaaacatttttatgtgttatacacctactgaaaacctgcctaggacatgtttgtttcattaacactactttgtgattaagtaccatctatccactttaagattggtcaatccaaataaaccaaatcggaccaaaatgttttaatgttctatgaactgaaaccaaacctacctatactagtttgttttcgctttagtaactatttgctatatataaaaaaaaaaaaaaattcataatccttgcatttaacatttccgcttcgttttattttgaacttgtgaaggaactcaagtactcagtttctttgcgccaaaagta

SEQ ID NO: 38854 - DNA, 682 bp, Arabidopsis lyrata
  Intron number 1 from transcript 894366 (locus 894366) deri ved from phytozome v7.0 (chr-ID scaffold_6; pos 10792201 t o 10792882)
ggagaaaaatatatattttaatcttaattttgacagtaaagtaaaatataatttgaatacacttaactcattcaaagttagttagagaaagaaaaaaacaataaaaaataatatccactatatatatagtattttttaaaaatgaaatctccaaaattataaatttattagtttgacttttatggatttaacatttgtcttatttatttatttttttgtcatcgtaaatcaatacaataataacactaagtttctctcctaggttgacacatcagctttttcagttgttttgagagtgacacctaattaaaatcaacctccaatagaaacatttggattaatacatgtcagatttctgggccaataataattcttctatgttccacgtcatttttctaaagcttatctcactatatttgggcttattgtttgagaagaaggcttattattatttagaagtgggcttactattgattgactcaaacaaattgtcctctttccagcatcttttttttttgtcgatctctaaattttcttgaatttggtacagttcgtctaagtccataagtttccgaaaattcttcaagagttttagttttggtaagtttgtttttgatgtcaattagtcgagagttttagtttggtgaattaaagctttaatttttctccacttttgcagttt

SEQ ID NO: 38855 - DNA, 471 bp, Arabidopsis lyrata
  Intron number 1 from transcript 490530 (locus 490530) deri ved from phytozome v7.0 (chr-ID scaffold_6; pos 24892827 t o 24893297 reverse strand)
tcgcaacagatctctcatctccttgacttgactgtgtaagtatatccgattctttcgccttccttgtattttctccgtcaacgattgatcctttattcagatcgctctgtttcatctagtctgggtttcaatttcgtggtttaagtgtattggaatatctgttgctttgatttgattgggcggtttgctttttgcaaattcatcatcacctcctgatgatccatggttagatcaacaaatatagtgtctgagtttcagaaacgaatatgttgataaaataattttgatcttctatggcatattcattcagcacaccatttttgcttagcttctttcactaagtgtgtttgcttattattatatctgatgggaatgaacatatatatatatataggtttttgttattggatcagctaatattattattcttgtttattggtttgttgttgtgatataattaacaggcgttcc

SEQ ID NO: 38856 - DNA, 680 bp, Arabidopsis lyrata
  Intron number 2 from transcript 495113 (locus 495113) deri ved from phytozome v7.0 (chr-ID scaffold_8; pos 14008891 t o 14009570 reverse strand)
ttccgatcaacaacatcatcgtcggtgccacttaggtaaattcctcgatttgaattctagctccttatgtgaatgatgttgatgtagatgatggtgattttgtgcattgatggaattcttcatactggttcgtgtaaatgtcattggatgagaaatcgtagcatcagttcttgtgtttgattgttgtaagtacccattttatgattagaccatggagaataagagtctatgaaaactagccttagactaagaaagtcgaattttttacttccaagtgtaggcctttgcatagcacagtcactaattattctctgtaatttctttagttgccactttttgtggttcttgtatatttctttctatcatggtgttcatatgtcagtcttgaaaaaaaatcgtgtggaagcttttacgttagtcaatgagaaatttgtaaatagatagaaactgtagttgtttggttgcagacgtttgtatatatgagtctagaattttgataattttagagatttgtgctttagcaattggctttcaagggaagatggttgaggaagatatttgctttcttttactaactagattatgtgaaaactattgtttccttttactttgggagatactcttctaagctatttttgttggtgtgtttgcagaaagcaacggatacacaagtcagttct

SEQ ID NO: 38857 - DNA, 352 bp, Arabidopsis lyrata
  Intron number 1 from transcript 918891 (locus 918891) deri ved from phytozome v7.0 (chr-ID scaffold_1; pos 602989 to 603340)
aacagctctattcttcgcctttctagtcttccaaggtacctttttcagtctcttagtgaacattagcttttttcttattcccttttcaactctgaattaatccaaaaattgctactttggccttgatatgaatttgactctgaagaaagattctctatggttgagattcattggtttaagatactctggcttaacttgaaaactatctaattagtcttttatcatcagatttcttggataaacagagtttgttctgttgttgtttcacggggaagaccaaaaacgtcttaaaaacaactcttgttttggtgttgcaggattctctgcaagcagttcgagtttgagttcggat

SEQ ID NO: 38858 - DNA, 738 bp, Arabidopsis lyrata
  Intron number 4 from transcript 915194 (locus 915194) deri ved from phytozome v7.0 (chr-ID scaffold_9; pos 1555238 to 1555975 reverse strand)
gttttctaaattcttgtcattgatacatttccgtgtttccattctgcagtacatgaagtatatattctttggttgattggttttaatattcatcgtgaatcgtcgatgcatttgagagacgggataagtttaggatgagatagtttagttagtctggtatggatgtgaatgtgaatttaaagcctgatggatttttcgtaatctcggttttttctttctcccttttagaatctgttctccagagacgtgtgtacgttcgtcgtttcgtttttttggtatgttcgtcgtttcaatagtgtttaaatccatttctttcttaacaatctcccaaaatcatcctatattattctttaaaatctcatcaaatctcattaaatcacaaaggttttcttttttaaaaatctaacaatcttcacaaacccacttaaatctctcaaaattccaccaaaattatgtcttaatcactaacggttatttacttagtatgtatttccagcaacctattgtaccatttcgtgtttgcattttgacaaattcgcagcagtaagaatgaatgtttgttaatcaaaatctatctgttggtaactctattttattggtgatttttcaactagttttgttcttcatcaacagttttgtaaatacattaaaagataaaactctgaatcatcattctctcgagatactcatctattttgatttgaatttgtttttgtaagtgtagttgtagcatactca

SEQ ID NO: 38859 - DNA, 674 bp, Arabidopsis lyrata
  Intron number 1 from transcript 909652 (locus 909652) deri ved from phytozome v7.0 (chr-ID scaffold_2; pos 18960582 t o 18961255)
tctattacacgatccctcaggtattgattctgttggtggttggcgaaacttttgttgattttatcctctgtgtgattgagctatggcctatggaaagtatctaggaaatgtgggattagtcctctacttgtaatagggatattattcgaggacaagtacttgcactttcatacttcatcaattgtttctatgcctttgctatagaaattactgtgagaaacttcttttattggtttgttcttctgatttccttctgttttcgggcattgaagcaataaacgtgctcattcacacatgcatatcgatgtgttggtgactatctgtctgtttcactggttaatattggtttaatacttacacttggattttgacaaataataatttacacctgaatctcactctttagatggtttcactcgctttgattcttattttcggccattgacagtgttttaggatgacattataggacaagttagtagccacacagattaaattttagtcctaggaaattatgtggacatcaatttaaaatcttagtgtttgaacttaatgcccatttcctcggaaaataggtaccttcatgctcatatatacttcatacacattgttaaaatttgaaatgtttgaacttctctgcagatagagctcgcaaaacgcttggtggcaagttc

SEQ ID NO: 38860 - DNA, 485 bp, Arabidopsis lyrata
  Intron number 1 from transcript 493247 (locus 493247) deri ved from phytozome v7.0 (chr-ID scaffold_7; pos 12147412 t o 12147896 reverse strand)
gccgagaaggggaaggaaaaggttctcttctcttttcttctcttctcttctttcttattcagtcaatggacaaagttttgattttatatatgtgggtcttaaggatatttaacatctttgtggtcatctcttgtttatttattattaacctgaggaggtttttgtatatgtgggttatgtttgtttgttttgtatggattaaacaaaaaaagagtggctactactttgtggaaactatgagaagaaatcagattctctttaaaccaaaaaaatataagaaaggaaaagaagagatcagattcttctccttttctattttgtgtcagagatcgaatctgttcttctgctccctttttgttgtttctttcagtaattagatcttataaacgtcaaatccataagtatatatgattatattaaaaaaaattactatgtcagaagaaactgaggatttagtgatgttgatatctgaaaaacaggtaact

SEQ ID NO: 38861 - DNA, 613 bp, Arabidopsis lyrata
  Intron number 1 from transcript 477606 (locus 477606) deri ved from phytozome v7.0 (chr-ID scaffold_3; pos 1129461 to 1130073)
gaagctctcatcttttcactcagatcacgttccctgtaagagaatcgatcaaacccaattcgagatttttcttataatgtatctgagattccaaagttttggatttggtgatgtttttcttgtgaagttttctgattagggattacaaaaagtcgaatctgagatttgggggattttaagcgatcctgtttgtgttgagtctctttgcttgtctcccaattagggtttgtggtggagctctgtttgatgttctgaattttttataaacgacgattcaatggttggtgacttagcgcagatgcatcggtttgtaatttgctaggttgaaaaattctatcttattttgattcccgttgaagcttgtagggttctttttctcttatcgatctgtgtttgcatggatctgttctgtgatcttctgtggaattagggtctagtatgcaaaaattagaagactgaacaaatgaaaggctttaaattctaatattatggctgcattatgattactggcaagacacagtctcaaagtttcagttttttttgtttgtttgtttaatcttatttctggtataatgcaggggcttattcgcttgtatctgttgatatacaagat

SEQ ID NO: 38862 - DNA, 571 bp, Arabidopsis lyrata
  Intron number 4 from transcript 477606 (locus 477606) deri ved from phytozome v7.0 (chr-ID scaffold_3; pos 1130587 to 1131157)
ttgcaggtaattaaaaggatctaccttatcttttgaacattagataccaaaggatacgtttaagaggagtataattttatcagcctataccatatctctttgaaggtcacattttcgcattaggttcttggtcttagcattgttgaggtacctttaggagtttgagtaagactactggtttaactgtatttgcactgtctcgtttgtagaagtttgcaagactgcaaaatactttttattggcttgtgtttggaagaataataataactctggaagaaaaatagtcaatagatgtaaaaaattagaaaagttatcagagtgtgtttctgcttggtgcctctaagtctcttacttttgtatgtggtttattaggaagcatacttagtaaagtgatgactttctcttatggtctcaattgcttgtttttgttgttcttaaaattttactattttgttttgtttccaattatccatggtcaatttgaccactggcaccgtcaatttgatctctgttctgtatttcttacctcttattaggaagaaaggctgagaaacattaagcgaagaataga

SEQ ID NO: 38863 - DNA, 519 bp, Arabidopsis lyrata
  Intron number 3 from transcript 486969 (locus 486969) deri ved from phytozome v7.0 (chr-ID scaffold_6; pos 425539 to 426057)
attcctttcaagtcctcgtaccaaagactaaatcggtatgctcattttcccaagatcagagtcaacaaaagtttttattttttttcttaaaaaaaaccgaaccatgtttagattctgttcatgtcgacaaaaattcggagctgaatcttatgaaaaaataataaatgtgaatatattttttaatttgtggtttttcttattagtggattagttttcgtaaaaggaatttcgttagaaaatattaaattcattttttttttttggataatgcaaagtcatcgtgggtcttcggtcttccatgcgtcaagcggttgacttcgtttatttatctatttaataactaatccaatatttatccttagctaatcacatcataacagcttataaactttttattttgtttgttggcccattgggctttttattcattagcaaatcgtttgattgtgaactaattttgcctttgtggcatgttttccaacagatcccagagatttggaatcaaccaaagactgggaa

SEQ ID NO: 38864 - DNA, 956 bp, Arabidopsis lyrata
  Intron number 2 from transcript 479802 (locus 479802) deri ved from phytozome v7.0 (chr-ID scaffold_3; pos 10298642 t o 10299597 reverse strand)
gttacatctctgccagtgaggtaagcaaaatggttgcttatgtctctcttttttgccttttaattttcctagtcttctaaaacaaatttcaattatatacgaaatttaattaatgattggaagcatataaagatatatgtatttacttatgagttgcctaattgtattaattgtgtctagtttcgttaacatgacccaatttctcaaaaaaaacgttttaaaatttttgctctacttgaagtgttacacaagctcggaatttagattctgtattttcttattgttttatcagcaattgtgcatttaatttgaaaagggaaaaaaaaatagatagctaaatcaaggttagaatcttttgcattaataaaaatatcagatcacaaggctagtcgatatttcgagttttacaagagatctttaaggtgtctttatcttaatttaaagaagaaaatgacaacaaggtatgctgattatgttttcttagtatattaaaaaagtgtgtgtgttgcgtcgtagaaagttaatttgtttgaggcttcgagctagctggcaatatgactttttggagataacgaggtcaaaagaaatatttaaaaatattgataacatttagtaaaatgtgtgtatgattctattggtttattgggcagagcatatgtctcaccctagtgtaaataatatgtttatatattcttatcactcccataactttttttcttaaccattaatataaaaattcacaacaaagaatagaagtagtatttatctatttacatttatttatacaatataatgatagttgatcatattcactatctttttgtttatgaatttcatatctttgtttttcttgtgcattggccatgatcaatgcttaaagataaacatcattaattagtagatagtgcttattatatataatctttgtaattttgatacataattacagttgaggc

SEQ ID NO: 38865 - DNA, 455 bp, Arabidopsis lyrata
  Intron number 1 from transcript 940170 (locus 940170) deri ved from phytozome v7.0 (chr-ID scaffold_6; pos 2745249 to 2745703 reverse strand)
aacaacaacgaaggttttagctctttcaaaatgtctctctttttttttttttctttccagaaattagggtttgacggtgctttctgagaacttgaaaatgagtctgtttggtcctaaagagatcatttttataaatttgtaacctttcttctgattccgaatagttcatttctgttaaaatctgtatctccaaacacttggctgttcccgagaaagccaaaattcaaaaacttttttctacccaataatcatttgatgaatcaatttgtgacctagctcactttatagtgaagtttatactagttatatcatatctgtctagtggggttttagtttttggcatgtggcttcatatttaacaatttgactatcatcagtgtcaaatgattaaataatctttttggatttgtttattgactctaaaatgcttttgattttgcacaggaaaagcgttg

SEQ ID NO: 38866 - DNA, 723 bp, Arabidopsis lyrata
  Intron number 2 from transcript 919238 (locus 919238) deri ved from phytozome v7.0 (chr-ID scaffold_1; pos 1900018 to 1900740 reverse strand)
cacggctggtaattaagcatcctagccaatttttgtcattgtccaactatttttgactcaaacaagctcttagctctcaccccaactagttgtttccctttctcactacttgtagttttgtttgcctaaatttgaccctatgttatccttttccactggatatgcatttggttttcaagcaggttcatctccggattactcccaagtctgtatgcgagcaggcggttgaagtcagagttgaggctccccttgattcttatcccgagaatgctactaccattgtgagtgaagaagcaaccagaggcctgtaactttgagatttctaatcatagggttttcttgtaactcatttataggctccactagaatataccgatacggttatcctttgtaatagtaaatgattcactgtctcaatctccacaagaattttcttactttctaatgattttgcgaacagataacagatctaaactcaaataaacaatgttctatgtatggtctgtctatagaacaagcatttttaacaatgttttagtttgttttgctaagagtcgtgattcgagttggctgcaaaaaagtttagtggaataagcatacgaggagaaggaacctcttatatatctctcatagttgttcctacatcacgatcttgattcttgaggaagctagttgagacagaagagtgtcctcatgtgagtgcttggtcagtgtttttggcgc

SEQ ID NO: 38867 - DNA, 338 bp, Arabidopsis lyrata
  Intron number 11 from transcript 477479 (locus 477479) der ived from phytozome v7.0 (chr-ID scaffold_3; pos 613104 to 613441)
gaaggattgtatcacgtaagtcttttaatcattggaagattgcaagaaaatgttgtatagttgagaaacaaaacattattttctgcatgagttagagcttgtgaccatgttttaaaaatttctttgtcgatttatgtttataacgattctggtgtgagttttttttatcattgatcatgaatgaactatccaatataaaaggctattgtatcgttcgttccttgcttgaaaaagttaatgtctttgattcaaaaatatacatttcatctattcttaagagtcagtggtttgtgtgtaatgtaggcagggcttccccttgtacagcaatacctgtttca

SEQ ID NO: 38868 - DNA, 326 bp, Arabidopsis lyrata
  Intron number 2 from transcript 487674 (locus 487674) deri ved from phytozome v7.0 (chr-ID scaffold_6; pos 3299686 to 3300011)
aacaccaagcgcgcctacaagctccgtatccttttctctgatttcatcttttagggtttgtttgtgaacatcattgattgactccagtgtcatgcttgatctgctccttttagctctcgttcacgagatctgtatgcacttcttagctttgtgttttgagctttgtgaagtaatttatgacttttcggtatctgtgtgcctctaaattttaagactttttagtcaatttcttctttgactagagtctcatctcagagtattgtttagccttgacttgtgtgattcaaaaagaggaatttgtggcacattctgctgctgttaactgt

SEQ ID NO: 38869 - DNA, 714 bp, Arabidopsis lyrata
  Intron number 2 from transcript 476349 (locus 476349) deri ved from phytozome v7.0 (chr-ID scaffold_2; pos 15252937 t o 15253650)
ccaaggatactacagagacttctcctgtatctcaggttagttggaatctcttttggcaaatgcatctctttgagggaatcaatacattagtttggtacaaaatcgatactagggagcgaatgctagagagattgccgagattataatggttcgagtttagaaccaacatctttgcctatggttaaaagtaaattgagaagatgattaagcatggcttttgttaaactttataatttggtatcacatatatcttttttttcattcttactttcatccttactatagtacactatttccacattctgagcattgtcttagagttgtggttttttcgaaaaacaaatacatgcgtgtttgtgtcgtacttgtagtaatggctattgaactacgaattggtaaagaacaacacacagagtactagatatctatcctcctttcatagagtagttccctcttgtaacttccactgtttgtaatgtgcaattaagtagagtagcgcaaaaaagcagaagaaaaaaagttaaattgcaaatgcgggtggtggctagtgcagagtgctaatggttcctgaatgatcattgtatatgagtgtataaatacatcattcgcttgacgaacggatcatcttaaatccatgagaatgtaaacgaacataaggttgaatcttttctcttttcctttttcttattgttgcaggctgcagaggagtagaca

SEQ ID NO: 38870 - DNA, 631 bp, Arabidopsis lyrata
  Intron number 4 from transcript 345606 (locus 345606) deri ved from phytozome v7.0 (chr-ID scaffold_4; pos 18591853 t o 18592483 reverse strand)
gtgatcaactcaacagcatacaatttggtttggcggtaagttgttaccaaacttaaatagcaaaatttgtacttcatagttcatccacattctttcaattttacacaaagaacttaataagacaatatatatatatatactttcataaaataaataatgttaaaatctcatattgaaagtttaaagggaccaacattactatataagatacatgggtcaatctactcactgcgaattaattttgtgtagaatgccaaaaaaaattaacttacaaacatatataattattaaaaatacaatatactcaataaaatttactttaaaactatataataactattcattaatacgaaaggataactaatttatggtggtttagtggttagaaaactcatcttgaaatatcgagggactaaaatttgaatattctcgtacaagtgctgatgcatttgacaagaaaaaatattatcattccacatgctgagattcctctgttatcaaaaaaaaaaaaatacgcacataaagattaatgcttttttcaaacaaacatgttattaatttaatacttatattcaaataaatctcaagtgtttttatgaattttatttaatacaggtacatccaagattat

SEQ ID NO: 38871 - DNA, 895 bp, Arabidopsis lyrata
  Intron number 2 from transcript 950366 (locus 950366) deri ved from phytozome v7.0 (chr-ID scaffold_8; pos 17796441 t o 17797335)
ggtctcaagttcgatcgaattaagtatgttttttctcatctaattctccactttcttatgcttttccgataaaatcaagtagcttttgggttgaatttactcagaaagaggtctctgaatggtgaatgcttcactagatgatttaggctacttttgggttttctgcatttgaagtgttttggttaattgctaaagttagctctagatatcactcagcgttttagctgcctctagtaatcttaatgcactgttatgtagtcaacattgtgttatagttaactgtcttttgatctgatacaaaggagatgagttcagtcttgaatggtttttattatctaaaggtgaatgaatgtacatgtttcccatggttggttttgatcactttctttctcttcgtgctattcaaccattagttgaagcaattttctacctcattgaatcccatttaagaaaggaaaaaatgaaatatttgtggaaattcatctacaagttttagtatataacaaatgaaactactcaaccactcttgagtctttgtatggaacttctgctctgagttctggaattgcttcctattactgtaagatgaagaacctgttgattttctattcgtatacacacttacttatattcctaattgttcaccctatacaacctcttttgcgtaattctatggtcatgtagtattagaatcgtctaaaattatgtttatgacgtctggatagtagcagaacacatgccaagattacttagaacctggtcatacaatcgaagtttttgttctgaatgactagtttcaatagaggatgcatatagatttgattaatggacattttgtttgcctttcttggtctgtacaggtactggttatctgttggtgctcagccatcagacc

SEQ ID NO: 38872 - DNA, 651 bp, Arabidopsis lyrata
  Intron number 1 from transcript 473372 (locus 473372) deri ved from phytozome v7.0 (chr-ID scaffold_1; pos 14461969 t o 14462619)
aactcttgttctcttctccaaagaaaactctgcaagtaagttctgttcatattcctctgctttttgtgtgtgtgtttttgtcagatccattcttagagcttgagagctgtgaccattgtttatatgagacttgtttttttgttaatgggcaagtcaaaatcatttaaagatctgatctttcgattaattttcttcagaaatctcttttttttccccaaattttctcaaactctaaatttttgctgcaaagtttcgatctttggaataatgatgaagtcccattgttgttgaaatcagtaactgttgatgttgattatttatatttttagcgtcaaaacaattgagtagttgcgtctgatgtcttccaaattcaactttttgacctagtgggatgctttagttttggggacccataaatcaagtcatgtatgaaaaaatgtgataatgcaacagaacttgcactgtgttgtaaaagtgtttattttcagatctcatccatctatttgttctaaatcttaaatcttgtgcattgtgttgatcaaaaatccaaactttagttgatctgctgagtgtttttgaactttgttttgatctgattctatacttggtttcactgaatctacaggtgaggtttggttacatatattggtg

SEQ ID NO: 38873 - DNA, 450 bp, Arabidopsis lyrata
  Intron number 1 from transcript 946890 (locus 946890) deri ved from phytozome v7.0 (chr-ID scaffold_7; pos 13738940 t o 13739389)
ggtgaagtggttaaggtaatcgatattctcttggttctgattctgatttcgtcaatcttcatcggaaattttcttgtttccgtcatgaaaacatgaatcgctgccgattaggttcggttttgttatctactgaattatgttctgtctgattcgttttatcgctacttcttttgcttatacagttatttagtttgctttctttatctttgatgttacttaacatatcgaaattacttgctcaagaacatttttctcaattagtgttgaagtttgatcactatcatcaaattgatgttttctagtttcacatgttgtgatgtgcttaggagcaaacagaagaaatgattcaggcttggtatataaatgattaagtgccttttcttattttctctttcgagcttagcatcagaaatttatgttttcttgttgtctgtgtgttttttgattagg

SEQ ID NO: 38874 - DNA, 422 bp, Arabidopsis lyrata
  Intron number 1 from transcript 490501 (locus 490501) deri ved from phytozome v7.0 (chr-ID scaffold_6; pos 24716029 t o 24716450)
acaggattagagttcgatttctccaaagaaaacatggtaagttcctacatttaatcttctggtgtagatgatggtgatgcattgattctgtttatgttctgattttacatccaccgaaaaagagattgtaaagatgtgaaatttataggtggatggtgttgttgaatgtatatggtgatatgttgatagattccatatcagaaactaagttttgtgttatttggtttggaggtgtaaaacatgaataggtttcatgtataaattgacttcgtaaagaatagtgttgtgaacattggtttatatgctatgatgattccaaatcaaaatctaagttttatggtatttggttaggaagatgtatacaatggaaaaggttcatgtataaataaatgagtgttgtgcaggctaattcagcgtctggg

SEQ ID NO: 38875 - DNA, 1016 bp, Arabidopsis lyrata
  Intron number 2 from transcript 482818 (locus 482818) deri ved from phytozome v7.0 (chr-ID scaffold_4; pos 18436356 t o 18437371 reverse strand)
tccatctgcaaggttatttccgtcatcatctcatttacattatttttcactatctaccgacattaaataatatagaggacgttatgagtatatataactatgtgtctctggaacttgtccgttggtgcagcttctttggtataataattattgtgtgtcctatggagtttactgctcttcctaataattttgggccaatcatatttatacctttttgatgtgtagcagtaaatgacgataaaattaggtatataactattaaaggtattatatatttttgaggaaaacaaaaaggtgggtgatattttcctaagaatattcttttgttattaaaaagcataatgttttattctagataacatggtattttattagaagtataacaccccaattaaaaaaatttgacgacattattttcttccaaataaaaaattgttagccatttacttaattaacttccatatcaacctaaatgatcatatcttaatttacttcggtttttatgctactatattttagtagattcgctggaacctttcaagtgaatttagaaacttaacaatactataatagcattttctttggttaaagaacagccttttttttttctggaaactctaagtgaatttggaaattaaacctgaaacaaaacaataacttaggttcctcatacacggatcaccggattttattttcctcatgtaaaagccatgttcatcttttttttttttgttctttttcactctcctttcatttcgtaaacttctaattagttatcataataaactagtagtatatatacatatgtagtctagatatatgtttttctaaccatcaataaattgaatagtacacatgtatgtctcgtgactttggtgtccattcttctatacaattagaaaaaatgaaaaatgcatgctactaaacaagtatgtacaaatcacaaccacttttgtactttaacacatagtaatttacgtacattttttttctattactgactgcaggaaggttac

SEQ ID NO: 38876 - DNA, 940 bp, Arabidopsis lyrata
  Intron number 1 from transcript 934005 (locus 934005) deri ved from phytozome v7.0 (chr-ID scaffold_4; pos 16159081 t o 16160020)
tttggttcgattttctccggcgattgaggcagacggcgaagattgagggaagaattgagtggttaggccgggaatgagaatgatgatgcatgattgaagtgaggaggagtcgttgcatgtttgatttttagggttcatagtttcggattgaatcaaattgagtcaggattgtttcattaggggtttcattgatatttatttgttaggattgaatcaaattgagtcatagaatgctagatttatggtaaatagttttgttccggtaagcttattggctctgcgattcatggatccatactttgcaaggtttgttcttctagctgatcgttggtcttgattcatgaactatttttgttttttcttaaattcgattgtctctgggttttcatttgtccaattgttttcctttcatgttgtatgtctgggttttggacttttattctcgattgattctggtagctattgaactagaatttgcagatagttgtggaattggaggttctttgtgattttaatgtggtgatttggataagaatttagggacattttaggctgattaattggatagagaggaaactttgatgtagaatcttagtatgttgtagagaatcatttatgtaggagccaaataacggcgattgaacttggtcattatgaatacagttgcctctgtgtatatacgagcctgttttggtctaaattctgtgaaactgaaggatttgatataattttatcttaggctgaatgatttctacttcttaatgatgaaactttccttcccatagtcgattacttggggttgtatatatccttgtgcttgcattttgctactctacaaagttggtttattactttatttcaccatgagttcgggtcacatgtgacatgctgttttggagacacacattaattatataattgttatatgctcttataggtg

SEQ ID NO: 38877 - DNA, 615 bp, Arabidopsis lyrata
  Intron number 3 from transcript 480876 (locus 480876) deri ved from phytozome v7.0 (chr-ID scaffold_3; pos 23877647 t o 23878261)
tcaacgagaagggtgacaaggtttacaccactaaggtacctttacttttgctcatctcttcttcttttcttcagtattcttaattcgttagtttataactttgttcatgtgtttctacgattcggaaataaatctctgtttttgttcatgagcaaaaagttacagactttattataggtagtttcatatacatgtctatagttgttaaaggttaaaaatttcgttgatacacatgaagctttgttttgtttgcttaatcttaaaatttgttgtttgatttatcttaagctaggaagatagaagttctttcgggcacattgagtttggttttgcttgtttaatcttcattttagcagatatataagttctttcatacacattgagcttggttttgtttgacttgttattactaaatttccatgttttaatctcttgtaaaggttcacaaaagcatacttgttgatactttttctatgagtttggttttggttatggactctctgaaaactctgctcactgtttccatttacaaattgtgttgttactttgtgcttacacatgtatcaaactcattgtgcagaaggaatcaccactaggtctagccactgaatctgc

SEQ ID NO: 38878 - DNA, 632 bp, Arabidopsis lyrata
  Intron number 1 from transcript 933035 (locus 933035) deri ved from phytozome v7.0 (chr-ID scaffold_4; pos 10584705 t o 10585336)
cttcttgtcgacgagcaggtccgtgtgtctttgtcttttttttctttttttagttaattgatgttttagtggatctactagattatttgatagttttgcttattttagtataaatccttaaggaatatttgtcttttgtttgtaatttgttgtttagtcattttaagaaatatttgtcttttgttgttttgcatgtacctaagagacaaaaattgagggtacaatcggtcgtggtcctttcaatgttaatatgagggagttaagagaagatgcgtggtacagtatctctgactttgttgcttctgttccgatccagaagactccgaacacacttcatggtaattaatttccatgtgtactaaggaaataataatcagcaattggtttattcatatttcacgaaaaatggaaattgttaaatctcacaatctcttaattactcatcatcatggtaattaattctcaacatttttaatagctaaagattaatgttttttctttctaaaacatgtgtttgattatttttcaaaaagttgtggtttcatgagcttatgatccagcagagacgcaaggcttgtgaacaagattttgaataaggagaagaagaagaaaagcatagagaatttgaaggt

SEQ ID NO: 38879 - DNA, 546 bp, Arabidopsis lyrata
  Intron number 3 from transcript 476091 (locus 476091) deri ved from phytozome v7.0 (chr-ID scaffold_2; pos 13841612 t o 13842157 reverse strand)
tcatgagaatcttcatcatttttttttttttttgtgttatgtgttaattaattaatcaatcacgaacttattgagagattccatggcgggtccattttatgattctgagacaaacccatttcttggctgatggattctactaatgggtcgatctcgatctgaaatttagtttcattattctttttgagttagcgtaaaatttgagactttctggttgaaatttttctgattttctttcattttagtattctgataatctcactttttatttccatgaattcttactggaaaaatattgcataattaaggaaacaagatttaaacttataattgcataaacaaacaaacaaaaagtttattttataattgaattaggaaaacatgccagattcaacagctttcaccaagctaattttactttgttattgttactaaaaaggctaaaaagtgaatgtttatatccgtaagtcatgtcttttgctaattctaatcaaaattcttcaaaattttcaggttccggcaaataaaagtgatcaagaaagtaac

SEQ ID NO: 38880 - DNA, 463 bp, Arabidopsis lyrata
  Intron number 1 from transcript 314546 (locus 314546) deri ved from phytozome v7.0 (chr-ID scaffold_1; pos 27588634 t o 27589096)
ccgtgaaaatacaaaaagtcttcaggggctctttggtaatttcgacatctttaaatgttttttttttttttttattattcttttcaaaaacaattttgtttttaaaacaaagatcaaattttggcaaatgggtgttgtctagttcgatttttttattagaacaactgtcgaaattttggaagtttttcttcaaatatcaaaatttggctaataatcaaaaaaagattagaaacatttgtcaatttggagtcttttcttcaaagatcaaatgttggcaaatggttttgttatgttcgaatttttggttaagagacaattgtctgtttgaaattttttcttcatagatttaaatttaagcaaatgtgaatccttaaatcgatcgtttataaacaattgtcaatttgaatatatatatattttatggttaggcaaggaaagcattaagagctttgaaaggtatagt

SEQ ID NO: 38881 - DNA, 970 bp, Arabidopsis lyrata
  Intron number 1 from transcript 482320 (locus 482320) deri ved from phytozome v7.0 (chr-ID scaffold_4; pos 15977516 t o 15978485 reverse strand)
ccgcttactcttcaaggtaatctcatcagatccttttttccaatagttttattactatactttataactcgtgtgattgtcttttccattggtgattctctttacacaaacatatgaatgatttaatcttggatttttgacattgttaatcccttagtggcttcaccatatgcccttgatcaaatagaaatataatctcatgcatggccacaatgtattagttcaatttactatatgatttttttatgaatgttcatggttagattttcttcatggttagattttcttgaaaaaaaaccgtcggttttattggttggacaaaattgatcatatttgattttcatcttggattttgccattggtataatccattagtgggctgcaccatggccttgatcatcaaatggagataaaatcttatgtatggccacaatgtattagttcaatttattatatgattttttatgaatgttcatggttaaattttcttgaaggacaaaattgatcatatatatatttggttttccgacaaataagcttagctagacttggtcgcaatggtcatattttggttgagatacctagccagacagagttttaggattgtaacatatataggaaacacgtatttaaaatgatcacacttattttgtatcctaaatcataggagatacttagctatagtttaattaacaataaagagggagaacatgtatgtaggtttatatttcataagtagatgtagaagaggggaaaataagttaatgtagatattgttcatatcatatgattcagacgccctttaaataatttttacgaaatgcctctacaccgatagttgatgttatattcatagacacgcatgcacgctcacctttaattcaccatttcccccacaagagtgaacttacaattttcgtcatttttttctacagaacaaagtaactcgaggcaacgaaactacagaggc

SEQ ID NO: 38882 - DNA, 819 bp, Arabidopsis lyrata
  Intron number 2 from transcript 887505 (locus 887505) deri ved from phytozome v7.0 (chr-ID scaffold_66; pos 15706 to 16524 reverse strand)
gctgtggctacacgaggtatgtataggttttcaatctctttcaaaatttgacttcttgatttaagaagattgtgttttgttggactagtgtttgaatctgttggtgtttcgatatgtatcactcaattgctacttactaaggattgggttgattacactcaatttctggctaaagaatgatttttctttccaattttgcttgagattttgttttatatcacttaatttctgctagtaaaagaattgaatggatgcatcatagatcttactgcttgaaggaacctatcttactactaatttcattgagatgttgtttttgtctctgatcagtctagctttttgggagtttctttatacattttgattttacgattctcgttattgaaagtgttgaatttgactaagatacaactagtgattaataacttactgtttgatgaaaccttttttactactatttcattgagatgttgtttttgtctctggttagtctagttttgtgtgtattcttatgctcttgtttgtttcactgcatcattctgtccatttaaaaccagaccagaattatcaaacagaaatttttgattttgcgattctcgttattaaaatttaactcgttattaattttatgaactcgatgcttagggactgtgttgttaattttatgaactcgttattaacctctgttctgtattctaactacaccaaaagaacataagaagcatagagctaagctttgattatgttgtgagttgtgacttacttgagtctaatgtcattgcaggtatcgaacgggagattacatctcttcaactagag

SEQ ID NO: 38883 - DNA, 511 bp, Arabidopsis lyrata
  Intron number 1 from transcript 485654 (locus 485654) deri ved from phytozome v7.0 (chr-ID scaffold_5; pos 16302344 t o 16302854 reverse strand)
accgctccaaattcgatccgcaacaggttctttgatttaactaactctctttttcaacaacttcatataattttcaagtcaaaattgttccttgtgtttttagttccaactatttttcatcttccgttggttatggaatgtgagatttataaggacaacgtatttgtatccaggtagattgaatgatggattccttttctctccttgttttatgtccttaaaatctatcacatattcgtgtgtgtatgttattcatgacgaaaaaagaaaaaacctatcacatattcatgttatttattttgctacttataatgatgaataaaaccccatattttttgttgattctattatggcttctttatacgttataaatcactactttttgtgatatttttatctgtgtgcggtgtgccagaaaagaccgtacttatctttaagttatgtgtttattcactcgaaattattaatgattatttcttattaatctacacatttaataaaataaaggtgc

SEQ ID NO: 38884 - DNA, 577 bp, Arabidopsis lyrata
  Intron number 1 from transcript 482518 (locus 482518) deri ved from phytozome v7.0 (chr-ID scaffold_4; pos 16870422 t o 16870998)
aaatctgggaatacatcaaacttaacaatcttcaggttagggtttggtttttcttctcgaaatttctgggtcatttctttgcgctttctactggattttgtcttttgagttagctctcgttacttggaataagctgtttactctactttggtgatttgattgatctgggtttaggaggattcgtagaaactttgagccttcgtgtttttcaaaatggtagatttaagtgttgtgattagcatttaattaagtaattaagtttagcgttgtgactgcggctagaactaatctgcttatgatcttgatgttatgggaatctgatttgttcatgagtcaacatttcaaagcctagcttttgtagcttgatgttcttttattttcttgcttatgttgagtgaagaaatcactgcttttggggaaacgcattacgagctaacagaagttactttgatcgtgttagcctttagctggtctttgaatttctctgtttttctcacatctattttagagagattctggtttccaacacatattattggtttttgatgtagaatccggagaacaaaagggagatact

SEQ ID NO: 38885 - DNA, 413 bp, Arabidopsis lyrata
  Intron number 5 from transcript 484546 (locus 484546) deri ved from phytozome v7.0 (chr-ID scaffold_5; pos 3912708 to 3913120 reverse strand)
agggaaagtaagctttgacttcaatctttattatcatccatatacaaagaaacaaaagttaaagattgtctcttttaatctttaatcattgctttctacagagaaattttagaactttgtttgagtttagaagaattgttgtctagtcttgaaaaagtttaactctttgcgtatatgaaacacaagagaatcttttattgtctaattcagttacttattaagcttattggtttaatctttgtagtatttatgtttaggttagtgtttgtttgtgttaatcttgaatcactatcccgaaattatcggttttgtgtggattctctgtctctgcagatggttgatgatgtgatggattgaaaatgtgttttctttgtttaggtatagaaaccaaacagttgcgattaagattatta

SEQ ID NO: 38886 - DNA, 375 bp, Arabidopsis lyrata
  Intron number 1 from transcript 317751 (locus 317751) deri ved from phytozome v7.0 (chr-ID scaffold_3; pos 3764385 to 3764759 reverse strand)
gtgctgctcagaaccttgaaactactgttaataaggttctccatctttcgtttcttccattttcgtcaatttttgtctcatggaagatcagaaaggaaaggagtagaagaagatacaagttttcaatttctgatggatgttatactatcatttgtttttttaggggttaaaatattatgctgtcattttgtattgatggatcttgagaggactatgaatttaggagcaggacacgttagactgtgttgtctataattaatttgagacacgaaattttcttagttggattacattttgtgtgtgtgtgtgtgtgtggtgatattgagttgttttgattgtttcaggatttgggaacaatatctctagggatattat

SEQ ID NO: 38887 - DNA, 937 bp, Arabidopsis lyrata
  Intron number 2 from transcript 945034 (locus 945034) deri ved from phytozome v7.0 (chr-ID scaffold_7; pos 5167643 to 5168579)
gcgattggcctcgtcattaccgctatcttcttcatgtaagcttaaactcgatctgatctccagatcttcaaatactcagattagtgaaacagttcctgattgattcgatacacctatgattcattttgatttttcattaagcttgattcgaatttcgaatatacattgtgtagtagtcatgactaggttatgaattatgaatcgtgtgaggctctcctcttgtttgttcactgtattttgaagcctgagcgacatttttactgcttatatatggtttggtcacaatgctttctcaattgcgagtctctagataggtcttctgaagctacaagtttatcacgttcatgatctctttgttagattcatgtatccccattttgttgagataatgtgtgccttaaagtttctgagtaaaaaagtaagaaagtcatgggatgggactcatttagttagcttttggaaatgtgtgagctctatatgctatcattatataaagtgatagtctgtggaatggaatcagtgctctataatttcactgagcgtgacaaattgaccgatcatcgatttagttaagacagaagaaagtttgatttgtatgattctcatttaagcatggagatttaacctttcaaaggatgcaagttgtaggagatatgattcggtttgttaaagtaatgtgttgtcagggctacgagcatgtgggttagcctagagtcaaaactttaaacaatatcagaaagcaaatctaaaccttaaagaattgactttaactccatcattgaataacaccctctaagatagacttgaaccattcatgttggcttcttcgtagtacggtcttggtggactcttctggtattcacagtgctggtttagattcagtcagccgaacaaagattaatcaaactttccctgtcataacatttgtgttgcagct

SEQ ID NO: 38888 - DNA, 479 bp, Arabidopsis lyrata
  Intron number 1 from transcript 896989 (locus 896989) deri ved from phytozome v7.0 (chr-ID scaffold_5; pos 6912377 to 6912855)
aaacgacagcccgataataccgtcatggatttcatagggggtactccaatctcatttgcaatttgtctccttctttttttggttaaaggataacagaaataacgctcttttcttgaaaaataagatttaccgtgaaaacttttctgttaaaaatctaaatgaaaatgcaaaataaagtggacttataaagcttaggattaggggaatcttacattcaaaattattaaagtgttccttgcaatgggagttttgtttttctatctattaacgaaaactaactgaacttttacatttaattacttatatgatctattcctgtagcaatggacgacttcaacggatgaattaagaatcacgcaaagaattggttaggctatatttatatttcatgttcttgagtgtgctcatatatgtttttgtgggtttcacatataagtcttttttttgttttttgtagggactgagagatatatcgactg

SEQ ID NO: 38889 - DNA, 498 bp, Arabidopsis lyrata
  Intron number 5 from transcript 487268 (locus 487268) deri ved from phytozome v7.0 (chr-ID scaffold_6; pos 1662632 to 1663129)
acctgtttttctatccccggaggtaaataagaaattccccttgatgattcacaagttattattacttggggtctgtttgattttcagggttctctttctgtttaatgtttctgctgaaatttccaggtttatttttctgattcattgccgttttctaaatcttgtagtgggttttgggtaactgtttcattgattcgatgttgtttcttcttctcgttacgatttttgtttttctttcactcttttgtcttgtggggttagtacaagaatggctgtcggatttcactatttttttttactaaataaattcgttttttttttctgggattgaggtttctgtttgatagctgataaaaatcgaagcttacaaagctgtaaaattggattcactgaaagtgttttcattgcttagagctatagctttactattctctaataaaggttatgaattgttgattttctaggaaattctgtggagcaactctcatagtttgaatc

SEQ ID NO: 38890 - DNA, 520 bp, Arabidopsis lyrata
  Intron number 3 from transcript 492629 (locus 492629) deri ved from phytozome v7.0 (chr-ID scaffold_7; pos 8672845 to 8673364)
ttttaaacccaaggtatgttggatcttgtgactactacttcttgatgtgttgtgtgcaatcagttttttcttgacagttcaaactattattacccgcattgatatgtgaatttgtggccttactattgtctctatcagtttcgtcttactagttctctgtatcatctgccatccatttatattggatcttgtgactgctacttcttactgctttgtgtgcaatcattctccatgttcaaagtatttctacccgcattgatttgtgaacctatgagcctttgcacgtacttaacaaaataaaattctttgtctatcatctcaagctatctcaatcagcttcttcttgctagttttctgtatcatctaccatctatttttttcattgcatgatagcttgaacatattactcttctttcatgctttgtcaatttttctttgatttttcagttcctttttatgaaggcttcggtgctatccatttacaggtttagtagagcacaagtagaggagcttgacaaga

SEQ ID NO: 38891 - DNA, 696 bp, Arabidopsis lyrata
  Intron number 2 from transcript 477051 (locus 477051) deri ved from phytozome v7.0 (chr-ID scaffold_2; pos 18381951 t o 18382646 reverse strand)
ggtgagaatcgacgccgtcttctttttcttttctcagattcggtttttgttcgtctgtgatcattgttagttcatttttgggcgtttaggtattgttttagtttcgcgttttggtgctgcttcagtctctctttcttagtttttgtgatttggggattttgttagacatggcgatctgagttcgatttctgctcaatcgcatttgagattgaaattacttctaaatccagagatcttactgggtttcaagggatcagacttatagaaattttgattagggtttgttttttttcctgggttctgtgatattattttgttcttccgtggcattatttgggaagtagttgcaagaaactttgtagatctcaagtgatattattagtatattacatgtttacgaatagtcttaagtctcagtggtgctggatctgtcagagaaatggtaaaggtttgtggaaagggaaagtctcttaatctcaagtgataagcagtcccatcaaaacacctctgctaatgtttggtttctgagtcccattttcttagcatttaggaatctatcttgcagcatacaagtcctggtcattcttggtactattttcttttgtggccataggatgttgaagctctttgatccattttgatttgtggtgttggccagtgtttcgcttgtcacagttctctatctgtccatttctc

SEQ ID NO: 38892 - DNA, 343 bp, Arabidopsis lyrata
  Intron number 3 from transcript 491427 (locus 491427) deri ved from phytozome v7.0 (chr-ID scaffold_7; pos 3637236 to 3637578 reverse strand)
ttcaaaaggtttatagtgcttttatgcatttcgtttgctttctcatgtatctaggcatagcgttggttctgctcttccagctgaaactgttatcactaattatggaatccttctagatgagatagaccatgatcacaagaaatgcacttttacttattcaaaatttacttcaatagtcaatagatagaccatgatctctgtttagcattttcagttgttaaaatttttgtactcttctgttgtgatgatttctgtacgcgcttttgctttggccaaattgttatgagttttgtctaactgagtttcatatctcttattctatatttttaaaattgcaggagct

SEQ ID NO: 38893 - DNA, 614 bp, Arabidopsis lyrata
  Intron number 1 from transcript 917075 (locus 917075) deri ved from phytozome v7.0 (chr-ID scaffold_8; pos 16234873 t o 16235486)
gcacacacgacacctcagttccctgtcatctctgggttctctcttcttggttcaggcccggcccgcccataaagcagccaaagcttttgctttaggccacataatataaataagattttagagctgtatgtccaatttgtttgctgtggtcaagttggatgtgtattatttcaatgactcacttttcgtcagttcgagtctttcaatatatacgtttctcttgttttttttttttctcttttctatttccttttgactttttacatgtctttctttttcctcttttacgtgtctttcctttttgttttgtagagtaggagaaaattgttttttatttatttattaatttatgtttagttgtttttttagcaaccaaatctccaaatattctatttaacttggctagtagcctagtaggtgttatgatattcttaactttcgctaacaaatctgaattttaaaaatttaatgactttttctaatgcattttttcaaacatattttgataattttttaacattaatttttatatcaaaaattatattttaaatatgctttaggccaccaaaatcctaagaccggccctgtcttggttctccggtcgatctcacaaa

SEQ ID NO: 38894 - DNA, 303 bp, Arabidopsis lyrata
  Intron number 1 from transcript 889354 (locus 889354) deri ved from phytozome v7.0 (chr-ID scaffold_7; pos 5990403 to 5990705 reverse strand)
tatcctcctatccatcaggtgaatctcccatgctctttttgtttgtttgattcattatgtttttggatcggattgtgattttgctgcacaattgattcatgtttgagtgttttggtctcatactttgcacctgttgatacgttttagctttatgtgtttgtcttcttctctgcgtatatgttgtgtagcgtttaatgggatatagatgatataatgtggttgtatcctataactgagccagtgcaagttattgatctgaaaagtgtgtctcttttatcttcttcttgttgttgcagtgtcata

SEQ ID NO: 38895 - DNA, 649 bp, Arabidopsis lyrata
  Intron number 2 from transcript 927665 (locus 927665) deri ved from phytozome v7.0 (chr-ID scaffold_3; pos 385045 to 385693)
tcatctacggcaacatcaagctcaaggctttgaaggtacatctctatcttccttgtcttgttttcatcagatttctcgaatcaatttttttagtgaattctgggtcacatgatctgttggggatgtttaaataggttttaggttcgtgaatctgacacttcccatcgtagcaaattcgaagattatggcttttgaattagtgagaatttgattcagtctccatcgaatcatgtgttatactcattgttgcttgactgatactttgaagcttcaatttcttatgctactttgctccttttaatttggtcattcatatacaagtaacccaatgattatgcctgatcacatattccatttaatgatcatagttttacacttttacttgatgtttagtagaagtctagaagattttgtcaatgatttgaagcttgattactgcaatgtagtttgtgatgttgtgtctggtaccctaagaaaatagttatgaaggtcgagcattggccacttacttaagagcatcccattgtttatttatccagattaggtgtggaatctaattatctactgttacttgatttgctaagtgataccaacaaatgcttcttcatatgcagataaagaagaattcacagattaaggcggaagccaa

SEQ ID NO: 38896 - DNA, 420 bp, Arabidopsis lyrata
  Intron number 1 from transcript 491608 (locus 491608) deri ved from phytozome v7.0 (chr-ID scaffold_7; pos 4397151 to 4397570 reverse strand)
actggatcagcttactgccaagatccgtgccctaggttagttagcgacttgcattgttcagactcttccctctgatcgattgattgcaaagttttgatttttattttactttaattcgtattgagatcggaatctgcatagttcgcatgtttttagttggacgctgatagaattactgtttcagctacttgatgtgtttcttttcttatagcattgacttaaattagtatcttttggatcgatttcagatgtgaatcgtgtttacttgtccccaatctcgaattgcttgctatggttttgtggcatttgcataatccgtcctgtttcgagcttgttatagcctttttatttggtgaatgcaaattttggtttttgagctttatgttttctttttgtttcgttttgaagaatcccaaatcg

SEQ ID NO: 38897 - DNA, 569 bp, Arabidopsis lyrata
  Intron number 1 from transcript 491569 (locus 491569) deri ved from phytozome v7.0 (chr-ID scaffold_7; pos 4226173 to 4226741)
attctctccctttttcacgttactgcttcgtttaggttcgcatgttcgcttacttgagtttttctctatatctctggtttcaatttcagctcaattttgtctttaatcggttgaaatttcttttgggtggtatcgaattttgctcatgaatgttgtttcttgatgaattgaaaaacgaagccctcttattgctatgcttcacgtcgttcaattcaaaacttggtgtgatcttttgcaacacaatgatcaggaatagttcgtcacttagaaactctaatttcagaaaagaagacaaatctggtatagagaattagtaaattgagctggaaagtttctctagtcaaaatttcagtaaaactgataataagttcttggtattattgaagtttctaatgtcatgaagtttctaatttggggtagatactagttctagactagcaatgttgatttctctgatctgaatctgatctttcagcattttcagaggttctctattaatgtttccgaaatttgaaaagcttttttacgtacaggtgttgcttcgtttcagtactctggtggtgggagag

SEQ ID NO: 38898 - DNA, 394 bp, Arabidopsis lyrata
  Intron number 1 from transcript 946123 (locus 946123) deri ved from phytozome v7.0 (chr-ID scaffold_7; pos 9634968 to 9635361)
ccagcttcttcagtccgaaacagataaaaacgacggtttgtcaactgtacttaattattatgtagatatataaaccctagctttttggttgttcatgaggtttaactattcaaaaacattgaaactttaaattcccagtcactacattgaagaacattcaagccacttatagattacaaaaaacgaactggcaaggagatccatgtgtacctatacaatatatgtggactggtctaaactgcagcaacatgtttccgtctactccaccaagaattacttccttgtaagatcattacactcaagttttcttgttcaaaatgattagtttgttttttccaatgtatcttaaatgtgtcctggtctatacccagagacttttctaattttggattaa

SEQ ID NO: 38899 - DNA, 582 bp, Arabidopsis lyrata
  Intron number 2 from transcript 471952 (locus 471952) deri ved from phytozome v7.0 (chr-ID scaffold_1; pos 7327422 to 7328003)
ggagctttttttctttctacttcacaaggtaaggaaactggatcggaactcttttgaattctgggctgtatatttaatgttgtgtttgcttagggtttatggattatgcattcacttggtttctgggtcttttacattgttaaggatttcgaatcttatctgaatctgtgtcttcttttgtgatgttttaaagctatttgtggaacagctattacttcttcctttatagatctctttccctcttggttcataagaccaaaatcccttttttttttctatactttatacgattcatgactttttcagctgaatcgtgttgggatattgtctgaatttgaggcttttaacttttaagattggattgtaactggaaatgtctgtactattggaatcttatgtgagattaatggattagagctctgaaatcaagataggatcaggtcaacgtatggagaataaattgtgttactgcaactattcttagtcaacgttttctgttaaattgaactcctttcttggttttgttttgacatgattgtattgaaacaggaataaaagatcagtcaagagtttgatcttggt

SEQ ID NO: 38900 - DNA, 435 bp, Arabidopsis lyrata
  Intron number 2 from transcript 943335 (locus 943335) deri ved from phytozome v7.0 (chr-ID scaffold_6; pos 22985924 t o 22986358 reverse strand)
ggcaacgattctctctactcctacattgctgaaaggttatttctactattcttagaattttgattacgtttctagggttagctcagatttggtaaggattggtgaagaaatggtctcagtagtctgagtgattgcaaattgggcgaattcctacattgtgatttgtgaggattagggcgaaatttaacaaagcttgtgatttttattaactggatttgtttttgtgtcaattgttgcatttgtcttgtctggttaatgccttgggattgtgtggatgccttgcaagttagaggtcatgttgttgaagctgtggttttggtaaagcaatgttctctgagatttagatgaatttggttatgtggtatatatgcttttgagttgattaatatttgataactttatcacaattttcttttgcagatcgagtaatctgag

SEQ ID NO: 38901 - DNA, 580 bp, Arabidopsis lyrata
  Intron number 2 from transcript 916865 (locus 916865) deri ved from phytozome v7.0 (chr-ID scaffold_8; pos 15076209 t o 15076788)
aggttatattggatcaatttgatatctctagaaaggtttggtcttctctttacactctacacgattctcctttggtttccttgtctttcaagttatcattctgttcccctgaggtttcctcaagttacgggttcttaagatgataaatgtaaacatatgttctctagttgaagttacaactgaaacaattgtagtgaatgtatcatgtgagcaaattagcaaatgtctgctttctgacgctgtgaaccttaggagttaggacacagtccagttagatatcaagtactctgctcttaggatcagacctagtttacggtttacgctctatgtatgtatctatcgataatttgatgttcgttattgaagcaatcattctacttctcaaggtttccagaagggtttttggattgaagatgtttaatatgtgactatgaatattttgcaggagagtttttgtctccagtgaagtctataatcatttttttttcttgcgtgtgtgtggcagaattaacgattaggctgaataatgagtgatcaatttttgtttgtcaggctgaagctaaaatattgagaggaccac

SEQ ID NO: 38902 - DNA, 880 bp, Arabidopsis lyrata
  Intron number 2 from transcript 947464 (locus 947464) deri ved from phytozome v7.0 (chr-ID scaffold_7; pos 20892833 t o 20893712)
agtacgagaaggtaatctctaatctaactatatatatttgtattttattatgaattatttatatgattttctttttgtttttttgaaactaacattaattaatttactttctaaaatatactgggtctcttttgaagctcgaaaaaaacagagttctctaaaacgagattggtcgagattgcataggtatgtctatcgtgatgaaattgttaaatagatattgggcttttaagcaattcaatcgctttaaaaaaattttgtaatcgtgagagaaaactttagggtttgattgtttcaattttgatttagaatacggaattttcgttttctttttctttttttaaatagtaaggtaaattctaaatatattacggatatttttatcaagaaaatttctaatttttaaaaattaaaatttaagaaataattatgacggtttgccctagatattaaggtataaatatagagcttcggccacaccattaaaactcatattcgttaacctaaacatatagttttgataatatatatattttgtattgttttggttctaatgaatcgaatttactatggaatgattatgattgttttcttcatgttgagatgacactgatttcatgatttaaatttttatagattctgatttcttcaaattgaaatattaattatttttacgtttgtttgcaggttggatgtgtggaaagaacacatcgatgttgaaaacgttggaatgcaagctaacacagccaagatattggtcatgcaaagatctcttatgattctgtgactaagaatttaagtgtgacttgggcttatgagctaacaacctctgatcctaaggagagttcaagcctttcttacatcatcgacctcgcaaacc

SEQ ID NO: 38903 - DNA, 604 bp, Arabidopsis lyrata
  Intron number 2 from transcript 474949 (locus 474949) deri ved from phytozome v7.0 (chr-ID scaffold_2; pos 483586 to 484189 reverse strand)
agttttgattctcgtctccagatcttcttcgacatgtacgtaacagaaaagttacttacacttaataattagtttaattttaattactgatctcctaatcatcttttgtttctaataataatgattagtactccctccgtttcataatataagtcgttttaggttaaagcacgcggattaagaagttctactttttaaaaattcaaccaatcataaaagagactgcataatataaataatcataaaatattaaaataatatataatttgcattaaaactcgaaaacgacttatattatgaaacaaatttttttatctaaaacgccttatattataaaacggagggagtatcttataaaggttccttataatcattttactataagaaagaacgatcccatattttcagtgttcttaaataattaaacagtgtggtaatttaatttgcatgtgtggagaaattattgttccttactatgcgtatgttttaatttttatactgtattttttttaatataaaccttttgactttaattgaagataattaatacataattaagagctaatctccttttatttgttgggaatttacagagtggacaaga

SEQ ID NO: 38904 - DNA, 662 bp, Arabidopsis lyrata
  Intron number 2 from transcript 479993 (locus 479993) deri ved from phytozome v7.0 (chr-ID scaffold_3; pos 12202632 t o 12203293)
atccaatccttggagacgaacacatactccaatttttatccaatttgtaaatttctcgtcttttttttttacccaattttgtatcgaaatctatttctctgatggatctattgtgttaacccttttgaaatttgatagatatggttttgaggattgatatatttgccgctgattgtcgttgaaaaattgtgaaatttgatttgggtttagggttaaaattaatttatatgatgtggaatataagaatctgaattttttgattagattctccagattttgttacttgattttgggttgttgttgttttttgaagttttggggatttaaagttgaaaagttttctaaattaagccaaaacagtcttcttcatctatggttttgtattgaactgatgatgtagataaatcttggcttgtgtttattgtagtggaagattggatttttatttctggttattggttttaagattctagtttattatgatgatgccactagttacatgattactaacttgacagtggtttatatgaacataagtgtggatttacgatgtgttaacgaatagcggtatgcgattattttcttaaattttgattgctacttctcttttttggggttgttgtgcaggttttaggacatttgggttgccctctggcttaacg

SEQ ID NO: 38905 - DNA, 339 bp, Arabidopsis lyrata
  Intron number 1 from transcript 905965 (locus 905965) deri ved from phytozome v7.0 (chr-ID scaffold_3; pos 14864237 t o 14864575)
ggaagactattgctgagctaaaggcctctctcgaggtatctctatcacagatttaatatttgttgtcttttattattttcatcttagttaacttatttagctgaatccttaatcttttctaaggttgaaaagatcaagctcatctgtaccattttgtcaattgacttggactggtcgtggtattattttgcccacatcaaatgtaacagaaaagttctcaaaagcaaaaaacttcttagctctggtgccaagaagataatttggatgtgtgacaaatgtaatacaaacgtatcctctgttgaagcaaggtaattgttgctatcctattttgtatctgcc

SEQ ID NO: 38906 - DNA, 260 bp, Arabidopsis lyrata
  Intron number 1 from transcript 471548 (locus 471548) deri ved from phytozome v7.0 (chr-ID scaffold_1; pos 5827278 to 5827537)
cccttccttcttccagatcgatcttcagatctattgtaattttctttttcctcttgatttcttctttcaattgatatatgttttgttattatcccttcgttttggtcaaatctagggtttgagtcagatctggatctttaaacaacagatctgatcaattgtttgtttttgatgttgatttccttcaataatttgaacggatccgttcttaatttcagtttcccccaatttttttatccgatctgggctcgtagattggg

SEQ ID NO: 38907 - DNA, 747 bp, Arabidopsis lyrata
  Intron number 1 from transcript 895229 (locus 895229) deri ved from phytozome v7.0 (chr-ID scaffold_6; pos 20594523 t o 20595269)
gggattatgtaagtctctttatctcttgcgcttctacacattatttttattttcttaaatctggagattttcgatttcgatggcttagttgaaaattgtgttactgattcggcgttttaatctaagcaaaatttcgggttaattttgttgttgattagggtttataagtttctggtttggatttgtaagtgaatctttagtttcattttttcttgtttttcttttgagactttgtacattgctcttggttcttctccgaattatgaggctcttacagaagccgtcgaccaccctcttttgtttttataattgataacagaaagcataagttcatgagctccatcttttgttattaagccgtaatatgtttcagtttgacttgattttaatatacaacaatgtgtggtgataagaacataaaagaatgtgacttggtgttctctaataattgctgtaacttggtgttctctaataattgctataaagtttctcttatgttaagtagagtgatgtttatgattaccaatatatgtgtgccaggaagcattggaggaaagaataaagctatataggaagaaagtctttgtttttggatgtacataacgtaagctatttctctaatctttttttttgttttgattattggcagtcactttcttcgtatcgttggacttaatacaactgtaaagctatatttttaacattaattaagtggagacttagccaagagctttgccggtcagaact

SEQ ID NO: 38908 - DNA, 458 bp, Arabidopsis lyrata
  Intron number 1 from transcript 931417 (locus 931417) deri ved from phytozome v7.0 (chr-ID scaffold_3; pos 20894410 t o 20894867 reverse strand)
tacactatcaatcttcacaggcgcctccatagctggtataccctaatcttcaatcctttttttgctcaaattttcaatctctcgtttccgttttttggttttgttgataaatgatttgactgaaattgcaacttctattgattcgaattaggtttcttgatgagtgaaaagttagaatttttgaatctttgttgaaaattttggcatccattgattgtagaagaagaagattagtctttagatgaataatgatcataaacatctccttgttgctattgatattcatggctcgttccatattcctagaaattagtaagaagatggagaaattggattccttttattgtatagaatggtttacctgttgcttaggttcttgtagttttagagatgctgagtttcttaatgtggtttttattgttgataaatgaacagtacgttcaagaagaaggcaccca

SEQ ID NO: 38909 - DNA, 454 bp, Arabidopsis lyrata
  Intron number 2 from transcript 926401 (locus 926401) deri ved from phytozome v7.0 (chr-ID scaffold_2; pos 14567443 t o 14567896 reverse strand)
cttattccagacttcttcttgatcgtgctactagggtacgttactctgtttcacactttaaccatattacatagcattgattgtggtaattaattttaatcataactaaaattgttaagactgtggccgttaaagcaattttttaatattattctctttgtttttttgtttaatagtcaaaaagtttttaattttaatcaattattctttgcttgtgagataagagattcgtctccattaataattgtttttttttgtttatagttggtccatttctatgattcgtttttaataatttgactttgttttgagtatttttcttacgtatatgtactattgaataaatattttatctgacgtatagaagatatatcaaaaactcacggatctgagataaaaatgttgtaacgtggtcgcaggtattcgcgtttgctaacagatatcgcggcgcgta

SEQ ID NO: 38910 - DNA, 378 bp, Arabidopsis lyrata
  Intron number 2 from transcript 940479 (locus 940479) deri ved from phytozome v7.0 (chr-ID scaffold_6; pos 4004623 to 4005000 reverse strand)
gattccatattttgcaaggtttgttcttctaatcttatcgttcgtcttgattcatagaactgtttttgtttgttcttacattcgattgtctctcggttgacatttgagtaattccgaggcattgcttagaacaagtgttgctagtgcatattatgagaaaggcataccattttgtttattacgattgatgatggagtatagtttgatagttttcattctgtttcaaggtttgttttaagagcactttagttaatttgtgttacattacaagcttgttttgttgttgttccatctgtttcttcttcactcgaattgaaaagtgataattaacatgacaatccagctagaactctttcttggggctgccttttaagtggt

SEQ ID NO: 38911 - DNA, 588 bp, Arabidopsis lyrata
  Intron number 3 from transcript 339541 (locus 339541) deri ved from phytozome v7.0 (chr-ID scaffold_2; pos 15801426 t o 15802013 reverse strand)
agctggtaagtcgtagttagaactagtatttctctcattttaaattcatttcattatctactgactaagaccatgtacactggtgaattttgcccagtatcattagcccaaaaactatattataatggaccaaaccgtttaattgggcctgatacgtatcagtgaactgatacctttgatactcagtttatgtgacgtgtcggtttgcaattggtcgtgtattttttggttaaaacagaaaaaaaaaaaaaatctttgcatctttctcaactctctctcgaaaacttctcttctgtcggctctttctcagttctccatgggcaaatctaaatcagccaacaaagtaatcttcttctccaccaaagtaatcaaaatcatccaattagggtttttgtttttttttgtttttggcggtctcagtgaagaagatggtgctgtcgaacaagaagctgaagcagaggattcgacaagatttggttaaatcactatctgtctctgtagccgaaaccaatccacaatctcagtctctgaaattcctccttgattcatctagccacaaacccagattgtccaagagagagaagaaga

SEQ ID NO: 38912 - DNA, 679 bp, Arabidopsis lyrata
  Intron number 2 from transcript 482227 (locus 482227) deri ved from phytozome v7.0 (chr-ID scaffold_4; pos 15548411 t o 15549089 reverse strand)
gattggctcttctcagcatctggatttttgcaaaggtacaatttttattctgtctttggattcgatttgatcgatctgccgattctctgtttctcccgagctttgtgggttgagatctcgattatccgcgaatcttcagagttttgttttcatcggagcggttaatcgttggactcgttagtgttcttctcttgaaaaagaaaaactttgtggagaatctgattataggtatagtgtgaagtgagtttgagctggattctgtagatttggttgatgataaagtcttctactttgataccatatctgaccatagtctccagattctttataggatctagttcgatataagattatatatgtgcttgcttcaatagtctcttcttaggttcttatgttgtattgtgtattgatctggtttctctgattaaggattcagcttttagcttcctctattgggtcatagaagacaagatctatttgattggtttcttaattgtttagcagattgagtgcttgatcattatctttgtttgatctgtgtatttgaatatctcattaggataaatctaattcgtggcatctcttattgatcctgatagcttgctatccgaagtttcttttggttttgtaacagattttatgtttatgcagcattcttattacttccactgattcaaac

SEQ ID NO: 38913 - DNA, 714 bp, Arabidopsis lyrata
  Intron number 1 from transcript 336488 (locus 336488) deri ved from phytozome v7.0 (chr-ID scaffold_1; pos 16029905 t o 16030618 reverse strand)
tcctggaaactggagatctgtcccaactaacacaggtttgtctttgtttcttgatcaaattaactagtagtattaattacagaaacgaaagtaacaataaattaatgatactaaattagaattttgtctggttatagaaaagtgatagtttcacttcttttcgcgtcgtttatagaggtgattccaaaacactaatacacttgcgtcgttatatataaaagcgacactagctaatatgaaaacataagtgatgctaaaatttatggttttttaatttaactgcaaataggcacacgcatgctacaaaatttgattgtgttgactgttgactataaaaacgaagttaacaataaatcaattatactaaattgaatttcgtcagtcatagaaattagaaagtgatgctaagttcacttcctttagcatcgttatatagaagtgattccagaagactaaaactctcgcttcgtttaaaaagcgacactaacataaaacataattgatggtaaaattatgattttctcaactatacatataaagtatgcatgcacacgcaaatcaaaaactaaccaaccatgtcgacttcctcagaaattagcgttgggtaatgagaaaacggtggaggattatgctttgtactcctccaccattcacacggtcatctttactgcattcgcagtgcttattgggttgctccagattatcccaacaaat

SEQ ID NO: 38914 - DNA, 442 bp, Arabidopsis lyrata
  Intron number 3 from transcript 479615 (locus 479615) deri ved from phytozome v7.0 (chr-ID scaffold_3; pos 9216123 to 9216564 reverse strand)
actatcccttgttgggggattaagtacttctttaggttggtcaatgttagctttttttttttttttgtgaaaattcccaggaattgtgtattttgcaggatttttagataagtgtatgaacttagaatcatgattcattgtttttcgattgttttaaaatgatgattgatggttcttttgatcatcaacaacacactgcctttgttttactatttttggtgaactgttttctttcaagaaattgccaaaagctacgaacacaatgcttgagtgttcaacacattgctagttccgagatatgaagctttggtgtcttaactgtgaacataaggaattgtggatccttatatgtgaatatcaagtttattatttcttcaatttgattaagtttcatgtttctttcgtaggtgcgcttttcgtagttcttagtgagactcccaat

SEQ ID NO: 38915 - DNA, 635 bp, Arabidopsis lyrata
  Intron number 1 from transcript 943862 (locus 943862) deri ved from phytozome v7.0 (chr-ID scaffold_7; pos 307875 to 308509)
aaaaagtaatttctctcggaaaaaagcttccttttttttttttgctctcctcctctgtattcattgagatatgggttcatgaaagatcaagtctttgttctctgtgtctagtattgtccttaattctcagttgatttgggcctgagttgatctgaaagtgaacaactttgagctaaagaaataagatttcgagatttggtttctagattcttaggctcttgacttgagactatcttttgaagtggaatgaatccggcaaaagaattcaaatagccaaaaacctcttctctcatttggtggattaagatgttcaattgatgaatattcatgtttgattatatgagtgtttgttgctgcggtttcaatgatttatactctgtcatgtacattgcagggaacgttttgtctccagagtttgcatttagtataacttctctggagaagaaaataatcgattttctgctctttgcgcttaatccttacttcagttagatgactcttaagggtaacactttatagtccttctcgagtcattggtttatccttctctatcgcaatagcttttagtagttttcggattttgatcgaaaatgggttacttcaaaactttgtattattttttctttcaggttcat

SEQ ID NO: 38916 - DNA, 427 bp, Arabidopsis lyrata
  Intron number 1 from transcript 317350 (locus 317350) deri ved from phytozome v7.0 (chr-ID scaffold_3; pos 1690236 to 1690662 reverse strand)
accgcatctccgccgtttccttgcgcaactttgaggttctaattatgatgataatctgctcctactttagatttatcctttttttttggagtgagactcagttaatttgcatctacatgttttctaaattcgctcgtcttcaacggatctatttctctttgggtccataattcataccgattttaactgtttaaattaggttttggggcttgtgatcctcttccttaccttaattttcagcaatttgactcgattagagttttgtttttttgctgctactcgattagtatctttccaattatgcgtgaaattgtggtcactaattatgtatctgttcatgtttctttgttgttgaattgagagttttaatgagtgttagatgattctcactttaatctgcagtattctccagtttttcaatatatta

SEQ ID NO: 38917 - DNA, 806 bp, Arabidopsis lyrata
  Intron number 2 from transcript 331018 (locus 331018) deri ved from phytozome v7.0 (chr-ID scaffold_8; pos 3915647 to 3916452)
actttaaggtcagttaaattcttgaaccggttttagaaaatactaaaccggaatccaaaatccagttggaaaaaggattttttttttttgagtaaaaaatttatgtttcttaattagtatttcatcagtccctttctttatcagtggattattctgacttctgaacctatggtttgttaaatattggactagagtgtcaagggttaaaattaggtgggttaaatctatgagatggatttaaaagctgggtctatattgtaaatagataaaaacacgttgacaaaacaaaaaggctgggctaagtaagtgtagaagcagtagagtaagaaaaacagaggaacacaaaactcaggctttctcttcttcccaagaatttttctctgtcaatcactataagtttagcagtatttgtctcttatccacttatttgtaatttttgtttttgtattcatgttattaatttcattaaagatacgcattcgattcgatttagtatttatttaggaaaaagaatatagttgtgttagcatttatggttttggacccaaatattggctggcttatattcacaatggtctatttccacagcctttaattataaaattataaatttttatataaaatattcaatttttcctaataattgtacattttattttagttttactctaaaaataaataagcaaaaaaaatttagattttcaacaagaaaattctgcccaattagaaaaataaatttatttttatttaacctataataattataatatttgtccagcaattctaccgtgtgagcccatccttta

SEQ ID NO: 38918 - DNA, 982 bp, Arabidopsis lyrata
  Intron number 1 from transcript 907818 (locus 907818) deri ved from phytozome v7.0 (chr-ID scaffold_2; pos 8310439 to 8311420)
tattggctggtaacacttgaattgctcaatctctttaatggacaacacttgtgttctagttctcttctttgatgtactcatttacattttgacacaatatacttaatggccggtgagtggaaacacttgtgttgttcagatcctcaagtggaagatttgtttatcatatgttaggtttagacaatcatcccacctagaccaaaacatatcgatcgatgtgtaagacctatttttaatctagaggcgtttgagacttttgaaaagactaatgagaaaccaaatttctttgctagaggagatgtacttactgttctgttcaacagtcttattctcatcaaggatgctcggtgaagttctctgttgtaccatgaagaccatgtgggaaacgaaaatataatatgttcaacgtatgataaataaacttcacaattctatcaagtgtctcaacatatatatatatatatatatatatatatatattttgttctttctttgaaactatgattagtcaaagacacttgatagccaaagacgtttttgactgtcgaatagataaagaagtcttcacagttctctgttttgcctttttttttttccgaaacaagtgaataattacagaaaacaaaagagtttgacaaaaaaaaacaagtctttgatactattaccatgtagaaacgacagcgttttaacggaaaggaaataaggaatgtcaattgttgtttttcaaattattattaccgttacattacaaggttaaaattacaacgtagttttggtagttttggcgcatgagctaaatgttttttatggtcaatgccacttgcctaagtttttaatttagccaaactgccagctgtcatagtgccgttacaatacgacgtagtttggacgcgtatattttgttattttatataaatcaaatgcttattaatttttctctaattaaggttttcaattcttcatatctccgctccgctccgct

SEQ ID NO: 38919 - DNA, 635 bp, Arabidopsis lyrata
  Intron number 3 from transcript 474940 (locus 474940) deri ved from phytozome v7.0 (chr-ID scaffold_2; pos 446168 to 446802)
ccgtgaaaatctcgtaatcggattcaaaagtgaggtaaattcattctttctcgaggcaaattgttgttattcttcggttgaatttgcatgttttgttttcatgagaaattcagaaaaaaattgactttattaaaaatatgtctctgagatcgatgtctgggaaattgaataattctgtttattctccttgttttgtttccttgttctgtttcatttgtttttaatttattgtgtcggtttaatctagaaagactcaagcttttgaggtactctggtttgggtttcttctcttttgatttagctctcttaatctaatcttttcatggaactaaatcgatgaataatccatcattagtggtgtttctctttgacaaaaaattcttaatttttcaatatgctttttagatcccttgttttgtttcatgagcgttgaggttgactaacgaattaaacagttctcttttgaatccaagtttatgtttttgtcctaaactatgtgttttttaaggtggtaatgatttcaggttctgtgttctgtatatttggtaacacaactgaatttttcactgctctattgtagtttacttgcaatgaaattgccactcacttgtttataatctgttatatgaagcagg

SEQ ID NO: 38920 - DNA, 507 bp, Arabidopsis lyrata
  Intron number 2 from transcript 493610 (locus 493610) deri ved from phytozome v7.0 (chr-ID scaffold_7; pos 18307600 t o 18308106)
ttcagcttgatcaaaagaaacataacgatcccaaggttcagttttttcttcttcttcttctttggattcaatagtttcgcttgaagtttggatttgcctttaagtaattctaccagttttgattcttacatgtttagatcgatacttagaataatcaagtttaagtttgacttgatatacattttactaagtttagatctgacttgtccaaagttattgattttgtttctctttgagtagttttactctattgcgaagttgagatagggtttttgtatgcatcagatttgtagaggaaagtcttcatttttcagtgattggacctttgattgcctagatttagaactactttacaaagaatgttgagctactttcaccttcctaggtttgaatgtttataacattacaattatgcggcactatatcatttgactttgttaattatttttccagaaacccatggtttatgaattgtttttgttattgatcaagcaggttctacacaat

SEQ ID NO: 38921 - DNA, 410 bp, Arabidopsis lyrata
  Intron number 2 from transcript 476148 (locus 476148) deri ved from phytozome v7.0 (chr-ID scaffold_2; pos 14279786 t o 14280195)
tccaccttcacctgaaattatatttccacctccaggtatattatcaaccaaactcttcacctacgtactctttaagtgtattagtttgtcaattttgaatcgaatttcaagtggttctcgttcactccattgtgtattattgaattattcagtttattggtgggagtttatttatcaaatacaaacgttatactctgcatgaagtataaataatacaaaagaaagattcagcttaggctacccaatgcacatcttcctttcctttttttctgtttcttttttttttccgtcaactcttacaacttctatctttctcgttgaaattatgaatccaagatttgcaatttgatattcagtattagtattgttttgtttaattatcagcttcgtcacctccatcgccagctgag

SEQ ID NO: 38922 - DNA, 965 bp, Arabidopsis lyrata
  Intron number 1 from transcript 945513 (locus 945513) deri ved from phytozome v7.0 (chr-ID scaffold_7; pos 7023717 to 7024681 reverse strand)
gagaagcaagctttggttcgaatcattttcagcttgcaaccttttacagctcgaaatcatccctgttttatctagagagtaagctttcaatattcgagtagcaagttttgtttttctgaattcgttttgctttacttcctagttcctgcctgccttattgattgttccgtagctgaatgttagcactctcgtttggtgtgacctaagaatattcttgtaattgtttagctcagatgaatgagcactgattctcctctattttgtcatttgacataatatggaagcgttgtgcatattagtcattgagctttgaaaattgcaccatttagatttgagacatatcaatgagaccaataactctttttatcaggttggaaaatagcttgctactttcttttgagatctatttttgctttgcaggacaaggatggtaaactggaaggtggatctcttttgttagatgctccgcagtactgactggtaagccttttattttatgccacctctcttttttcatgttcttcctttttccttttcgacattaagtgtcatttcatgcttccctgtaaaatggtttgtatattataaatgctactaacctactagttctgtgcatacggtggaccatctattgctaaatcaatttgtctttcagaattagtatgaggcctgataattgacattgtattatatttttggcttaaagttatttgctgattttctcatcattcacgagtttctatttggattgatttgaatgaatatgtataagcaatttttccattgccttatggcattaatccttccttcaatccttctttcgtttttttattaaacatcatagcatcacatgttacagcaatttattttttggctcttcttaatttttatatatacttaaaaccatcatttcaggtgtaagaagggaacgtgctgctgtttgttattcttgacagcgtttcttt

SEQ ID NO: 38923 - DNA, 876 bp, Arabidopsis lyrata
  Intron number 1 from transcript 899629 (locus 899629) deri ved from phytozome v7.0 (chr-ID scaffold_4; pos 1702862 to 1703737)
agtacgtattcaaaagtattttttaccgctttcccaaaaaaaaaaaagagtttttaccgttgacggctcggttttgggcttcttgcgaaatgcttctaaatctagttgtaatttgtaacaaggtgttttacaatctgcattcgttcttctccttttgcaactctttcgggaaggacaacataaacgtcattgattcatcttgttctcacggcttctttgcttgtttgagtagatgaaacaaaaatttggtttaattaccgttttatgctttcatttatttatcttttttgccatggaaccatgtgtataggtttcaaatctttggagtgtaacctaaattgctattcttaccattttcagtaaaatctaatttaagttttaaatgtatctttttaaatcagttttttatttttattttattaaaatatcactaggtttactatgttgaatctcgatttgctttgtatttttattgtgtttgtatataattttttgtttttctcattctttggtataaagagtttacaaatgaaacatccgcaaaaatctagatcttgaaacactgactaattaaacaatatgttctactatcatcttcttatatagatagatccaacctagatatgagttattatcataaattttcaatcccttaaaatcctagtaaaacacaaacaaagtaattaacaatgttgatttatatattacacatgtttatttataattaattgcatgagacgttatgaaacatatctttattgacaggtgggatattattcccatgataacaccaaaatttgaacatctttttttcatcatcatactccacgaaagcactcactttcgttataaattaagctataacttttaactcca

SEQ ID NO: 38924 - DNA, 379 bp, Arabidopsis lyrata
  Intron number 2 from transcript 896372 (locus 896372) deri ved from phytozome v7.0 (chr-ID scaffold_5; pos 2125847 to 2126225 reverse strand)
acttcgtttcaactgccaaggtatattaaaaatcggtatcttgaaaaacaacataattttagtttcattttaaaaaaaattcatgtttttctaatcaatcctctatattaaattttcctactttcatgaaaaaaacaaaataattatttttttacattttgacgttatattttttttcttcaatgattacatctttcatttcataaatttttaaacttttactatttctttgagtatcaaaagaagcttttatgttgttttttcctataagcaaacaagtatacaccttttttttttttttttttttttttttttgtaaacagcaaacaagtatacactaaaaccgttggataactgttaaagcaggcgacgactgaat

SEQ ID NO: 38925 - DNA, 299 bp, Arabidopsis lyrata
  Intron number 1 from transcript 896372 (locus 896372) deri ved from phytozome v7.0 (chr-ID scaffold_5; pos 2126250 to 2126548 reverse strand)
tttctcctttcgatattcacttcgtttgtgtctctctctacgcacactatctttttaatttgttgcatctaaaagagcaaaatcataaaagcctatacatagtctttaaatttcgatactcaaaccaatttaaagcataaaaaggaaaacctatttctttaaactatattttacttctggtttgcatgcataattttacacatgcatgcatgaaaattctagtcttactagaatcagtgctcaagtgttagcaaataataacctaattgtttgttctttgttttcttcattattagaag

SEQ ID NO: 38926 - DNA, 505 bp, Arabidopsis lyrata
  Intron number 1 from transcript 889756 (locus 889756) deri ved from phytozome v7.0 (chr-ID scaffold_7; pos 7765803 to 7766307 reverse strand)
gccacaggtactatacacaaacatttacatatttatatatcctgaatatatgtatgtgttgatgtagattagatcatttgattcatcttgggctcaatacttggtcttaacttggagtttaatgtttttggatcctcttcgttttgatgttactcaattctcttcaacagtttttggatctaattctcctttaattaaatgtatgttttttttcactttaccctttgctttttcttttatgtttttagttaaagcttttctcaaatatccaaaacttttttgtcttgatgaaaacccattactttttgatcgacagtacatatgttttttttttttgttaaaatgttctcataaatcaaatcagtacatatatgttaattatgtctttacctatatatatatacttgtctatgagcaaaggtttttgtgctaatggttggaagaggtgtatttttgattttgatgatcaggagattgtagtgaaacccttggaagaaatagtaac

SEQ ID NO: 38927 - DNA, 383 bp, Arabidopsis lyrata
  Intron number 3 from transcript 932909 (locus 932909) deri ved from phytozome v7.0 (chr-ID scaffold_4; pos 6574029 to 6574411)
ccactccttcttccatcaaatctttcaaccaggtgagattttgattttaatcccttgtttctaggtctttgataaatctactagttaatatctgtatatgttttttttttctgacttatagattgactcacttgcttcatgctgactaaacatgtttggtcttatatgttctttaaatttcatttgtatggcttggatttgagtgacattgtattacgtattacttgattggattttaaagaattttagtttgttgagcttccaatggctttgaagatagatatctagatattgagattactatgttctcataatgtgtttgatctgttctatttttttttctctcagttgattgagactttgattgatcgggttgatctatc

SEQ ID NO: 38928 - DNA, 665 bp, Arabidopsis lyrata
  Intron number 3 from transcript 341139 (locus 341139) deri ved from phytozome v7.0 (chr-ID scaffold_3; pos 3992076 to 3992740 reverse strand)
caccaacattaaagagaaaaaagatcaggccaaaggttgttcgagaaggcaaaacaaacagagtctcatctaaagcagggattaaaaaatctactgttgctgctgctactgctagtaaaacttctgaagagagcacttatgttcggccaaaaagatcaactagaagatctatacgattagactttgactttcaagaagaagacgaagaattttgtggactcgatttcacatcatcaggtcacgtagagggttcttcaggtggagaaaatctaagcgatacaacactaggactatttggtaacattccaaagggaagaagaggacaaagaagatccaatggctttatggaaaaggtaagattcattccgtcttcggaaactgacaatgattgcttcagttctatgttgtctgttatcaatacaagaccagaaagttttatggaatcagaagaagatcgtccgagtgattcacaaatttctcaaagcctgggaagacaacgatccatcatagcaactagaccgcgcaactttcgatccttaaagaaacttttacaaaggattataccaagcaaacgtgatagaaaaggacgtgatagcaaaggacgtgataaaaaaggatacaagcttcctcgtggatttccacagcttaaagccatcgtttccaag

SEQ ID NO: 38929 - DNA, 632 bp, Arabidopsis lyrata
  Intron number 5 from transcript 474123 (locus 474123) deri ved from phytozome v7.0 (chr-ID scaffold_1; pos 25983202 t o 25983833 reverse strand)
gctgtaataaaacaacaattggtgcctacattgaggtattctgttttcattattgcatcttttttcttttttcattgacaatatgtattgttaaattgttacttgcagctaaatcacatcgtgttacctttcaatttgaatgatcctcagtgggttgatatgttttcaagtagaattttgtgaagttattgcggaggaaaaccaaaatatagcctttggttgtgtcaatagaatatattcctcaatataagcaacgcatgtggcagttttattgaaaggcaaggggtgacatctttatcttctcctctcctgaatagacgaatgtgcattaaatattctgactgaaatggctactgagtatttctgtaattactagatttattgtggtggaatctgcttaagtcgatatatttgtgggaatatcataagagtagattctttagttaattcagaaacacgccaatgacataacttcttttatctagttatttgattcaatcatgggaaattttgagttcaattttgtacgattactgcttttaagatactttgttttagttccttgtaaaatactgatttagaggactgactgttcccgtgatcctattattcgtttgtgtaggatcaatatc

SEQ ID NO: 38930 - DNA, 401 bp, Arabidopsis lyrata
  Intron number 1 from transcript 474123 (locus 474123) deri ved from phytozome v7.0 (chr-ID scaffold_1; pos 25984776 t o 25985176 reverse strand)
aagcgtctcgaaatctgaatccagatcaaacgaaattggtattgcgaagatcgattcttcctcaaaactctgattttcctggtgaattcatctgtttcttcttcgccgattgtgtatattctcagcatgagattaggtttcattttcaaaggaggaatttttctagggtttgagtttcgacatctttcagtgatgtgaagttggtgtttgctattgcgtctgaattacttttgtgttttagttttgataatctagggtttccacggaacagggaattagggttttactgcgattaaagattctgtgatatttggtgaattgtgacttacaattgaagaaaaaagttgacatttttatatgatttagttctgattgggtttcgtgacatatgatttgttttg

SEQ ID NO: 38931 - DNA, 435 bp, Arabidopsis lyrata
  Intron number 3 from transcript 357761 (locus 357761) deri ved from phytozome v7.0 (chr-ID scaffold_8; pos 16901780 t o 16902214 reverse strand)
catactagtaagtggtcttgacaaatatctaatatatcaattcccttgtttgtaaatttggtcgatcttgatttggtcttggtcagtttcgtccatctcccattacaaatcttttttctcatgttttcacattagccactgattgttaagtacctagataatagaaatatatatatgacttgtaaaatgttttctgaaaatggttgatttgaatctaataggttattatgtatagcttttgaagtttaaaatctttcgtaacggaacgagaaagaaagatagaaatagtgtgtgttgccttcatagaagcgtgtagagtttcttaaatacacaattaaatccaaacctcaatcataacctaaccggaaatataacttaagccgaagatacagcttgataaatagctaacctttattcatttttcttgtagcatcc

SEQ ID NO: 38932 - DNA, 588 bp, Arabidopsis lyrata
  Intron number 2 from transcript 470953 (locus 470953) deri ved from phytozome v7.0 (chr-ID scaffold_1; pos 3336137 to 3336724 reverse strand)
atcaaaaggttagatttttctataacagagcattttttgttggttgatcatataaaattttgatcctatgatttgatctatttagtatattatctttagctaagttggtgacctttcattataattttgatctctgctcgttgagctgtcaattgttcttttagatctcttttccttattgtggcaaacttttgatttagagtggtttaaactctttgttggaatttatttttgcttcaatttctgactttgagataaatatttgatcttcctgtactggagataattaattactactattatgtaagcttggttttgttttggtcaactttctcttcttgtctctgtttctcccaaatctgcaaatatcatttgtaaatcggattggattctggatattagttgttatttttgcactaatcaagtttgtttcattgtctcttgctgtattcaagaatctgtcttaatctgaaatctctagcaactttggtctcatttatcttctctgagtatattttgtactcttgctaattgtttgatgtgtatctccattgatgcagatttgaagcctgattgagtcttgatctt

SEQ ID NO: 38933 - DNA, 797 bp, Arabidopsis lyrata
  Intron number 1 from transcript 323054 (locus 323054) deri ved from phytozome v7.0 (chr-ID scaffold_5; pos 7060744 to 7061540 reverse strand)
atagtgaaggtagcatcaaacttgtttaattagtttggtttctgaaacatcattttgtggatattattagtggtaagtgtggatgtaggattcacactcgattgtctttaagtatatttgtggagaaaaactctaaaatcaaccaagaaactaaataaagcgaaagaacttggaaagaataaaatagtaaaaagccttgcaaaattgtaaaataaaaagtatgttgtattgcttgatcgtaagaggaaaaaaagttgttctccctcaaacacatgcgtttgaggttgtttttatagagaaaacatgatcaatgcggtcatttactgctcataattgcattgatccgcattaatcatgtaggttacaatttgaccgaaacggcttgaatttgaactatcttgggcttcgcgtggatcttccgaactcttttttgttgactccgaactcttgcgtcttgatgctgccgcgaacctcgaacaatattctcttcgcttcggccttcttttatgcgaacagtatattgaataagagcgaactccgtactggtaaagatcgagctctttaataaactgaatcaaacttccgacaggtcgagctcgattctggcaatgaaacatctaggaatccaagaggattattatgtaataatgacgtggacagatccaagtggatcctaccgaagatgtgtgggatccgatcccaacagtaagctagattagctgcattgatttcacttatgtggttcgtcacttttgttttaagaattctcagaagttcctgatctaagtaagtggttt

SEQ ID NO: 38934 - DNA, 324 bp, Arabidopsis lyrata
  Intron number 4 from transcript 486891 (locus 486891) deri ved from phytozome v7.0 (chr-ID scaffold_6; pos 106180 to 106503 reverse strand)
tttacgccggcgaatctgacgccattgttgcccaagtaaactctctttccttcattattagtactttttacttaagtcctttaggacccatctcatttatcaatttctacgcatcatctcacatgtctctccacagttcacacattaaagtagcaatgtttaaatccggtattgatctttggtttactgttttagaagccggttttgatttcggtttggatcaaaagctaataaataatatattagcttatgaattgcgaagaattaagaaaaaaaaacatttattaatagaaaggatttaatggtatggtttttgatgggcag

SEQ ID NO: 38935 - DNA, 838 bp, Arabidopsis lyrata
  Intron number 1 from transcript 476847 (locus 476847) deri ved from phytozome v7.0 (chr-ID scaffold_2; pos 17387978 t o 17388815)
acggagaagacgaggaaaaccaaagacagaactctgtaagttctgacccaatttttagtttctttatgtttcgtctggaaagtttcaagatttgattttacggttctctttacatttctgggttttgggggaagcattttgaggtgtggagtgtctctcttttttgttcttcgaattcattaacagatctctctgtttttatgttcgagtatcaatcttctgtgtgtgtgtttcatgtagaattggtcaaattttaaagctgtgattatgaaactctagatctatatctctttatagagcaatttaatcaactaaagatttagataagaaaagccctaatttgtgatctactatatgatagagaatctagagtctttgtttctacttgatttatgtaaatcttgaaagtttccttttttttttttgttttctcttcttgaagtagtaaagacttatcttttctcaattgaatccaaagaatacttagagggtttatacttggaatcagatctcaattattttgggaccaataaacagactttgttcttgggggcagagactgtttgtttcctttttctttagaagattcttcatttgaattctgtctttcaattttgaagttgttgtcttctctttttactaaatgtgaatcaaaagaatgtttcttcaatttaataaaagcctgtggtgtttcctgcttttggtccattgatgagaatcttcttttcttctcttctctgtcattgctttgttattaagtatcattgagaatttgaatcaaactctgcttttgtgtcttccagaaccttgagagagagagagagagagagagaaagaa

SEQ ID NO: 38936 - DNA, 293 bp, Arabidopsis lyrata
  Intron number 1 from transcript 901997 (locus 901997) deri ved from phytozome v7.0 (chr-ID scaffold_4; pos 19734617 t o 19734909 reverse strand)
cagctaattcctacaagctcgccaagtcatgtacttatacttcgttttctacatttgaatgttctgttttctgagagatctgtgtgtttgatcattagggtataatgtgtttgattgattgctatagagaatccaggatcacataatttatcagcttaatacttgagacttaagaaaataatgaggtttaggtttatatgaagagaaatctgtgaaaattgaggtttatgtttccttgaggtttgttacattctcttgtgtgatttgtttaggggatcaagcaggaaaagcta

SEQ ID NO: 38937 - DNA, 293 bp, Arabidopsis lyrata
  Intron number 1 from transcript 946882 (locus 946882) deri ved from phytozome v7.0 (chr-ID scaffold_7; pos 13696430 t o 13696722 reverse strand)
ctctcggtcgtggttgcctattccagcgaacttaggtaagactttcgatttttgcatgcaggaattagaattctccgattaatttgtttatttatcaattttgaatttgtctgtctcttcagggggattttgattattatccatggattgaatgaacacaggtgaaaaaagcaatcattttttttatttttcttgactctgtttttcgatgaatccctaaatgaatttgtgaattgttattaaattgcagtggaagagattctcaattcgttaagcagttaaactcgagtaat

SEQ ID NO: 38938 - DNA, 494 bp, Arabidopsis lyrata
  Intron number 1 from transcript 479402 (locus 479402) deri ved from phytozome v7.0 (chr-ID scaffold_3; pos 8108311 to 8108804)
atgtaagatctctttgctaaatctacttcttcttttactgttttgatctctcgttttcgtgatcgattctattctagattctgaaattaagtcttgaatttagtagtgttttagcaaaattcaccctcgtgattccaatttccttcttccgctttgcatccagggtttttaaattctatgagctgatttgatagttactagttagtgtgaggctttgttttgattagttttcttattaggttaatttctcaacgaatttgtactcaatctgagaattgtatctaatagggttggatgtttaaccttgcgtgccaatggcattaatataggtcaaatttatacattttttcggcaggagtgtgattgttctttgtttctaaatccattcaactgtatctttatgctattgagattgaatgataactgtgattgtgacactggaaactcatggtttaccaacatctttcaggttcgtgggatttgtgtctgtagtg

SEQ ID NO: 38939 - DNA, 415 bp, Arabidopsis lyrata
  Intron number 3 from transcript 896308 (locus 896308) deri ved from phytozome v7.0 (chr-ID scaffold_5; pos 1815108 to 1815522 reverse strand)
ttcaccacgttcgcagagatctttctcttgctcaggtaatactagttgcttttcaagattgagtgttgtgatcaggggttcaacttattttttttggtttagtttcctactgtattctgataatttattattttgtaagtttcaaaactaagttatgctgtttttgttttgatactgggaaacatgtgtttttgttattgatttgatcacttgatcttcaggggcagtttgctagatgcatttgccttcttgttatctctttgcatttcctgatggtcaatagctctaaaaactattcttttttgatatgtcattttgtatgtttacttaatacttttcttaactccactaaatcattgcatgtgtttacctctgcatagcttttggagaagggtgaggtgggaaaggatcaggt

SEQ ID NO: 38940 - DNA, 864 bp, Arabidopsis lyrata
  Intron number 2 from transcript 932560 (locus 932560) deri ved from phytozome v7.0 (chr-ID scaffold_4; pos 3268142 to 3269005)
ctctcctcgaagagctcccgcaaagtcctgattgtgtaacaactcttttcctccctgagtttactacttaatttattggcataagtaagagtttgagttcggaaatttgatttgaatctttgttttcatgtttgttggcagatgtagtttggtgtttgtctggttaaaaacatcttcctttgtatacctgagacatctgctggctttaaaaaaaaaaagaaaagttccttatgatttcaggtaaagatcttgtgatttctgatgttatagagatattctaggtctaatttctaaaccttgttgtccttatggaaatggttgtctcatgaattctcacagttgtgtgtggttttctaaataagtcggcttgttgtataatgatctccttcaaaccaggaaccacaacttctgattagttttttttccttaacttttgctactttgtgggtttttttttcaacttgaacgatgtacattacaattcattggtggagaggtgacttgtggactgtgttgatagcttcacacgcaaatctctgcagaaacaagacgagacttgtctcagtgaaattccacttctctccatgcgatgaaaaaagtagttattttttttacctcaaagtgggatttcatagtgcacaagtcttactctgaaaccaagtccattaataaatacagaaaccaagaagacaacaataaatatataaactatttctgatttgacaataaccaaaaaaataaccaaagctctcgagctccaaggagagtttaccaatataaacagtctcttcatcaaattactctgaacttgatgaaatgttgtgttccctacattagaaactgaaagatttaggcattttgaga

SEQ ID NO: 38941 - DNA, 130 bp, Arabidopsis lyrata
  Intron number 6 from transcript 495218 (locus 495218) deri ved from phytozome v7.0 (chr-ID scaffold_8; pos 14546714 t o 14546843)
gacggtttgttccttactgtccttattttttctgaacatttgtgtggtttttttgatcttgataatcttctttttgtcttgtaatcatgttttagcagctcaagtatccatcagctcttagttcttttga

SEQ ID NO: 38942 - DNA, 537 bp, Arabidopsis lyrata
  Intron number 2 from transcript 897604 (locus 897604) deri ved from phytozome v7.0 (chr-ID scaffold_5; pos 13332013 t o 13332549)
gtgacataatccgatccaagagctcgaggtatgtaagtcaatttacatttggatttgttcacattgtgtttaatgatatcttcaagatgttgatatcattaagatatcaaatcatagtttattcctttgatttaaatatcaaaaacatcaattcaagaaattaaattgtagttttgtaccggtgttaattatcgaagctaattcggtgatgatagactcatttttcatctacgaaaaaaaaaaaaaaaaaaaactcatttttcataattctgttacttaaggctacattaaaaaaaaaaagaaggctaaatatcaatttcctagggtatacagtttgttatgtattctaaaatttactttaaaaataatagctacagatattagctttgttttttttttgtatgagattactgggtaacttaaacccatcaggataaaactagtctagccaataaaaacattatgacaatttgaaagttgaatcaaatcttccaaaataaaggtttttttttttttaataataatattcattaacta

SEQ ID NO: 38943 - DNA, 745 bp, Arabidopsis lyrata
  Intron number 2 from transcript 327171 (locus 327171) deri ved from phytozome v7.0 (chr-ID scaffold_6; pos 19865176 t o 19865920 reverse strand)
tagaagaagttgtgttcatacggattcgagttgcgtgtagaagaagttactgattacttggcttacaaatagtcttttaaagtttgtagcaatccagtttttactttacttctttgtctctatctataatgtgctctgtgattgtcgtctcagttctattgctgatgagaagtggacaatgtatttgactggtggatttaatggtgatggtggttatcactataatggccgtggcatgatgagaaatgtttgtagcgttctatcgatctttcatatggaaaagctttcttgagtttcttgattctctcggtctgactataagatgtgtttggttttcttttgtatgtctccaaacttcaaagtaaagctaacacttgatgttaaacttggtggacgacctaacactaacagccaattttatttgatctcgttggaagaattatggttgtccatgtgatggagatgttttgactgatgtaactagatacatcgagatgataattaacctggcgacaacaagctggtgtagtctagataatttatatagtgtcatgtcctccatatcatagaagtgcctcgggtgagatcatacataggaatgagacatcccggttcccatattctgcttaccatctatattgcagccctggcaacgctgaacatctagaggaaccattcgatatatgtgatccatatagcaatcctcaagcacaagatcgttggtcaaaattctgcctcattgaga

SEQ ID NO: 38944 - DNA, 496 bp, Arabidopsis lyrata
  Intron number 2 from transcript 496724 (locus 496724) deri ved from phytozome v7.0 (chr-ID scaffold_8; pos 21747045 t o 21747540)
acgctgagcaactccacaaggcattttcaggtctctctctctctctctctctcttttttcttttttcttttcatcagtacttgatctagatttagtttcttctactacgatctaatctgtaatctgtttcgttaatcaaaagattggtccttttgatttcttaagtacactccataatttatcgttaagtttcttcgattttttttgttatgtatttgttgatttagtcacaactacattggtgattagggatttaatcttgtttgacctgatctctgttctccctcaccacaagatcaggatcatatcttcttatattatataaagtccgatgatgtcctaattggttgattatattgaaagtatgttgctttttgttctttagcggtccacaatcatacttgtttgtgttcaaatgcttttgttctccttgggagatttgtgacatgagacatgtcttaaaatgttttgtttgttgggtttggtctgaaacagg

SEQ ID NO: 38945 - DNA, 447 bp, Arabidopsis lyrata
  Intron number 1 from transcript 945243 (locus 945243) deri ved from phytozome v7.0 (chr-ID scaffold_7; pos 5946267 to 5946713)
tagcgcaggtacccctttttttaagtcggtttaattcaataattgtgttgctgattgctgattgttgatagatcgttggttttgatcttcttttgagctggtttttttgtgtgtacgacggtttagtattgatctctcgttagtttagatctaattatccctgattttaggtaattcagctgcaattcataatttctgattcatagtaacacctgtttgtgattttcctgggaatgaatcatagtcaaggttcaagcttgttttgattcgttgatagatctggtttcattttgtgaatatctgggatgagatcttaaaatgaaaaaaaactctgttgttctcttctaattttgcccctttaaccaacttctcatctgcttgttgttgcttttcttggtttgatattgaagttttggttaaattttgacaggacccgttgcggaagac

SEQ ID NO: 38946 - DNA, 461 bp, Arabidopsis lyrata
  Intron number 4 from transcript 941238 (locus 941238) deri ved from phytozome v7.0 (chr-ID scaffold_6; pos 7134880 to 7135340 reverse strand)
caccggtcctaagtaagcgctctaatcttgtgtcactatcagtatccagttcaattttcgtttatccttgcttgaagttgagttgctatagtctctttgagatggcaaagttggtgttccaattatgagtacctttcctagcctgaagatctagccgtcataatccatatctcttgttctataggatttattgccatcggtagcatacttaatgtcctagtctagctagtaaacaaagatctgccagctttgagaatagcagggatgtggtactagttccaaacttcaggggtaaacaagttcatccgagaacttacattccatgtttatagctcggattagtatgttcaccatctttgattgcatgtcaaccttctagatggtttctgtatcaaatcctcaagcaataggtttcattttcttttcctgttttttttgcagatcggttatcgaagttcgtg

SEQ ID NO: 38947 - DNA, 460 bp, Arabidopsis lyrata
  Intron number 1 from transcript 928292 (locus 928292) deri ved from phytozome v7.0 (chr-ID scaffold_3; pos 2668935 to 2669394 reverse strand)
gtctctctgagaaacctgccgttttgaaggtactttttctgggaattctcggtgtttgatttcgaattttatcgtttctggtaatcgaaattgtgattcgacttgaataggttgcggaattttgaattgaatggtggtggttggttcttcttgttagattgttttatgaaattggatattgtagatttaatgaaaaagttatatgtgagattattttttaagtttcttttaaatcaaaggcttttaaagctggtggtgctacagtgaaattgaatgcttagaagattgtttgtgtgtgcaaaatctttggaatgaaaccagatttggcaattttgtcaccggaactcttaaatagtttttttgtgtggatcatatcttatgttgaaacgttctctcattttcatgttaacttcgttgtattgtaggtgcgagattggtatttggaatctttcagggacat

SEQ ID NO: 38948 - DNA, 711 bp, Arabidopsis lyrata
  Intron number 1 from transcript 317994 (locus 317994) deri ved from phytozome v7.0 (chr-ID scaffold_3; pos 4899873 to 4900583 reverse strand)
gcggcggatacaagaagtctaagcaaggttagttctttcactgtttcttgcttcctttactctttatctactagaattatgttactacgatctgtttagttcttatgcttcactggctctgataaaggtttaaatttgagatcttcagttctgggtaaaattaggattttttttgttgctagttatgagatttactaggaggcaaaattttcttctttcgttctcagtgctttcttttggtgatttcgtgtcctgcttgcttacttatctggttaattagctagataactgcaaaaagtactggcctttttatctgattaaatctaaattgagtgatgatggatcggcttttgctaagttgttactatagttaattgcagggattgttggtctcaggcttaaatctttcactgtctcttgagtttttagtattgctttccgttaatccctcttttcaagtataagctaataacagttcataaccattccaaaagattcggttttcttgattgaataagcctttttcctctgtcaagtgtttttgtgtccagttggttagtgatcctgaaaacattcaaaaaattatgcatcttttgatttgaaagtttcatatagatgaatgtatgaatgatatattggattctaaaagcaatatattgaacttcagataagtttttaactaaagtaaaacacttaatgtttggaacagag

SEQ ID NO: 38949 - DNA, 525 bp, Arabidopsis lyrata
  Intron number 2 from transcript 496685 (locus 496685) deri ved from phytozome v7.0 (chr-ID scaffold_8; pos 21623197 t o 21623721)
aggtgaattttttttttgtctttctaaataatcacttatttcattttacgtagttatattaaaacatgttcatagtatacaaatgtgaaaattaatttatgttttaaatcataacgaaattacgtttaaaaaactagtttaccattcatccctagattaaaatgtttgtatgtaagttattttataatcagtaaatgatactagctttaagacaaaattatttatatgatttcttgggaaccagaaggcgtttgtaagggtaaatcaaaagaaaaaaaatgcttctcttgccttctaagttttgagaccccttttaaaaaagtaaaactttttaataattaatgcatatgttttacattttatatgtggaagtggaacctaaagaaacaataatttatcctgaaaaaaaaaggaacaataatttatcctgaaattctggttttcttcacttttttttttaatcaatttgtggatgactttttttttacaggacaagacagtagtcgaaaaagaagtaactgatct

SEQ ID NO: 38950 - DNA, 786 bp, Arabidopsis lyrata
  Intron number 2 from transcript 935178 (locus 935178) deri ved from phytozome v7.0 (chr-ID scaffold_4; pos 20973240 t o 20974025)
aggtacataaactgctaagcttatatttattactgtatataatacgtacggtttaaatattgtgtcaattaacaaaatattaatattttagtcgacagatttcttcatatgttcattaaaatatttttatagttaacttactttccgcgatcttatttcattcaaaagcaaaattcaaaatgggaacatatcaaatgaaacgtttttaaacaattgtctctgggcctaaggcctaggtacttctttcaatttaattgggctgggcctgaaattatttatattgatttttagaatttatttggagataaatctatttattattattattatccacttacgatttggtaaacatgtaaagtaagtgattgatttgttgacaaacaaaaagaagaagagaagttagacgttgattttacctctttttgtttttttttgtctgaattttgataaatttatttttctgtttaaaatattgtactgtttgcaacataataatttttttttttatattttataaataggagatagttgcaatttttaagttatgccgaatttattaattcattctatacaaaaagtgaaataaattttttccttttgctttttaaaatttaaaaggatcgatattcctatttcttagtcagattgattaaaaaattgtttaatgcccaaacatcattgtaaacataaaagtgtttcatgttaccaaaaaaaaaaaacaaacataaaagtgttttagaagctaaaccttattaactacagtaaatttggattttaaatgatagc

SEQ ID NO: 38951 - DNA, 780 bp, Arabidopsis lyrata
  Intron number 2 from transcript 314703 (locus 314703) deri ved from phytozome v7.0 (chr-ID scaffold_1; pos 28881119 t o 28881898)
gtgctggtgctcttgtggaaacgttccaaggttcggtacgttatttatcttttactttattttgttttaatttctttgggggtttttttagtaattgttttgcattatagtgtatcttaaaatagatattgtcatttgattgagtttcgtttgcttaattgatctctgagtttgattgaatgaagttaacttttatatacttaaaatggtgatgattaaatgattgcatatggaagtgggtttcgagttttgacccgattattgtggctaaattaattgacaaatcttctttaaaatgtagtattttggtcccacctacgatttgttttgtatccttttacatactttatttagatatatcatatatataaagatagtagaatccctttttaatattattaaattgtaaaatatgcaatacgccagtacccacttacttatttaggacaattagggatctgattggtaaccaaagttgtacaaacttttttaactgtaacttttaccggaatagtacaaaactgtatgaaggagctatacgagaaaactgtacaaaaaaagctgaaagtaaaactttttgtaacgtttttgataaagtttttgtgattgataaaaataaaagctgtacaacttgtaatactcttttttttttcaccaatcaaaccctagattttaaatttaaggttaggtcagatgtattattctatgttgttaaacgtggttaccaattcctaataattgtaaggttataaatttgagaacacaattggaacactacaa

SEQ ID NO: 38952 - DNA, 623 bp, Arabidopsis lyrata
  Intron number 4 from transcript 484892 (locus 484892) deri ved from phytozome v7.0 (chr-ID scaffold_5; pos 11598738 t o 11599360 reverse strand)
gaaaggtagagactttttcttccatcattttggcttcctctgttttttttctgaacttttgtgatgggttcactatttttcttagatctatgcataatgtgtgtccaaaatcataaatttcttatttcttcttcttcgtttgtgtgattatactctaagtttgcatcaatttctgatttttatgacaaatttgcataaaacactcatactctgttactgtgttactaaaatcctttaattttggctgtttggatacatttgccattttcttagcttaattttgcttaatgggtgttcttaatctcaaaattttagtctaaatttcgcatttttaagttaattagctggtaaagacaagactttggggacatttctgctcaaatttagggtttctctgttcctttgtttgaatctgcattttgtatgtaaattaatctggaaaagacaagacttttgggggaaatttgttgtgttttgtgaccaaaaccctaattttgatatgaatctgcaaataaatgctcaaatttaggggtttctctgttcttgtgtctgattgttttttttttttttttctgtggaattgttcagacaacggaagagctaagacagactcttgtgtacac

SEQ ID NO: 38953 - DNA, 1046 bp, Arabidopsis lyrata
  Intron number 1 from transcript 923119 (locus 923119) deri ved from phytozome v7.0 (chr-ID scaffold_1; pos 24299457 t o 24300502 reverse strand)
ttgcagtttgcttggcaagaggttggccacttgaggtaaaatgtttcttttaattcatatatagtacgtatagtttagatagaattttaattatacctcgcttggagtaatggattagtgtcatctaagaaaaatatacgaaatttactttcattattatatagttagactaggaaacttgcttttctttaatttatttttgttggcttggagaagtaatttgtctctaagacgatatgttttaatatattatttacaaccaaaaaacgtgaaggatatttgtcacatttgtacatcgcaaaatttaaactgtttaaaatccatccaaaattaaaattaaatgattggtttggtatttggtgtattattatatttaaccagaaaatatattctagtcttgttcaatgatcgtttctcataaattgctttttatgtcgttgctttgagatactttaatttgattttcttaggtatatcgcattaacatattttttataaaataaagatagggcaattcctatatagtacgtatagtttagatcgtgctgtgcttatattacctctctaggaattatttatggattagtgtttaagaaaaatatacgaaatttgttttccttattatatagttagactaggaaacttgttttaatcttttttttgttggcttggagaagtaatttgtctctaagacgaaatgtcttattatattatttatgaccgaaaaacgtgaaggattttgtcacaagtgtacatcgcaaaattaaaactgtcaaaaatccatccaattaaaattaaatgattggtttgttctttggtgtattattaactttaaccagaaaatatcttctggcctttttcatgaacaaatgatcgttccttattataaaccgctatttatgggtattaacgtaccacttaccgagtaaaatgtcgtagctttgagattctttaatttgattttcttatgtatatcgcattaaacataattttcaaaaaaaataatgatagggcaatcaagaaaacggtgaaaggatttgcaaggc

SEQ ID NO: 38954 - DNA, 382 bp, Arabidopsis lyrata
  Intron number 2 from transcript 936024 (locus 936024) deri ved from phytozome v7.0 (chr-ID scaffold_5; pos 1063430 to 1063811 reverse strand)
tgcttgggattctcgagttgctcaaaactttcaaggtaactgtttgatttagtttcaatatacaatcgcggaatttgcaatttcatgaacttcatgcgttgattcttgaattaggcttagaatctgcttctatgaatgacttgtctctgggaatttgcaattttcctcaacttaatgttcagatttgaatcttgatgcctcttgcgcttagaatcttgatgtttctgggaataggttaggaattttatgatatcagctattgaagaacattttgtttttcacttgagttattgaattaggcctagttagcatggtgagactgaatgctttgtttaactttgattttgacagagagttctctacgtagatattggctttcgtc

SEQ ID NO: 38955 - DNA, 571 bp, Arabidopsis lyrata
  Intron number 3 from transcript 475455 (locus 475455) deri ved from phytozome v7.0 (chr-ID scaffold_2; pos 4865460 to 4866030)
tttaattttccgttcaaggtaaatagataagatcatcttcactatacttcttcgaattgcttttgattgcgcaattttggtctaattctggaggaatttagggttcttgttgtaacaactgctttactaaattttctggattttttttttttttttttttggtgactctagaaactgagtaaaagacaagccttgtcgggtttttagttgaatttagatctgatctgttataattcttctgggtttttaattctagtcttgtgtagtagtatcagtgttatcacctactctctttcaatgtttcaatggtgcttaagtctgaaattgttgacttttcgtttttctttgtgatcataattaacttcagaagaaattattgtaagcatggaaaattattaggtgtttgttttgttgatttgattcctttgtttttctttcacttatttgtcttgttaatttcattgctctcacatgtagaaatggttcatatcttctgctaattagtgtcttctttttgttggctgaaatgtttgtagtgattgatccaaggaacataagcaacaagagatca

SEQ ID NO: 38956 - DNA, 363 bp, Arabidopsis lyrata
  Intron number 3 from transcript 485327 (locus 485327) deri ved from phytozome v7.0 (chr-ID scaffold_5; pos 14667851 t o 14668213 reverse strand)
tggaaactaaacttgttattgtaccactcttgaaggtgcttctgtttgttctcacttttaaccatctatttcttgttttgaagtttaaaagtttggtctggaataacgatatgtaggtttggtaagggtctagggttttgattagattacatggattataatgtgtggatttgtcttgtaatattgaaaaaaactgggtatcttgagctaactatattagtcttcaagctatcttttattattggttagtttcctttgtgtagctcttttgctaataggtgaagaattctcagtttattgtataagtatgtggctgaatgctgatagaaataagtctatgtgatttctaggagaaggcgggtg

SEQ ID NO: 38957 - DNA, 895 bp, Arabidopsis lyrata
  Intron number 2 from transcript 486939 (locus 486939) deri ved from phytozome v7.0 (chr-ID scaffold_6; pos 273444 to 274338)
agagcaagtggaagaacctcgtcaccagatacaaggttaccttcaactatttattgtctatatagtctctatatattcacctatatatgtttttgtatgatcatgataattacaagtaaatccatcattattagtatagcattttatattgtttaactataattatgtgtatgtattccatcactagtttgcgttgttagactgaaagtatgcatactgaactggaaacctagtttatggtgtatgtataggtgaaactatattatatacacatcaattaatgagcttaacctaatctcctaggttttttagatattgtcctgccattaatggtaacgagctagagaataaaaatttacgcgtttattggtgagatttcatcatgatattgcctatgttcacattttgatccgttataccataatatctctttttgttcgttaatgacatggtaagtaagtaacatatataccataatatctctttttgttcgttaatcacatggtaagtaagcagcatatatatcgtgttcacaatacgccacaaaatatgaattaccgttatataaccggtgcagaagatttaataagaaccgttactgataaacacatgaagatagttgaaaacgtctatacatacatttattttaagctaaaagaaacgtgatatagatgaacatatttttgttttcttattatatatatgatagatgaacgtgtttatacgatattatgatttcgagttaattaagatacttggttagctaagaatatttagcgtaggctaatactattacatgtttacatgatgaatatacatacaaatacttgtgtaggagctatatatataacatattgaatattcatgagacaggcgtgtgagacctctgagccag

SEQ ID NO: 38958 - DNA, 589 bp, Arabidopsis lyrata
  Intron number 1 from transcript 928473 (locus 928473) deri ved from phytozome v7.0 (chr-ID scaffold_3; pos 3298071 to 3298659 reverse strand)
gcaaggtcacaccggcaacgaggcagattgatcatgtgagtattattatatccaaagtctcgatatttgccttcttgatccgtcgatttaaggtttgattgggtttgttcttcttcacataacttagtatttttcaggaaattttaggattggtgtagatctgttgttgattcttgtgctctgttggcaactaagagcctacttttgaaaaccctttctcttcttctactgttgtttgatggtcataggaggctacttcataatgttatgtgctatgaatagttgatctcatcccctggatcttgaaattgtgtctctgagaagtattttgtgtgatttaaggatagatgttagcttcaggaaaccaacaattgtggtttcatttccaattatttccattgatcttttgttctaggatcgttcttcttcattcttgtgttcaggcaacttatagcagagcctttcttctgcagaagaattgttgattccattatcttatactgcaacttcctctggatcttctcacatttgcctttgacattgtgtgtctactcttgcaggatctgccacgcactttcccaggccatcc

SEQ ID NO: 38959 - DNA, 981 bp, Arabidopsis lyrata
  Intron number 1 from transcript 910935 (locus 910935) deri ved from phytozome v7.0 (chr-ID scaffold_1; pos 4731744 to 4732724 reverse strand)
gcagctcctggttctgttcattcctcctctaccgggtttgattcgagattctctgaagactccactcaatagcgtgcctgcctacacacatgttttctaagttcgaaatacgctgcaaccgcagctccataactcttgagtccttctgatagggaagagtggcctaatcagtgttatgttcatgtgattgaaccaagcaagaagcaacacttggtgtttcatttgtaggacgtttgactcttactaaatattgtgcatttagttctgaatctcaagtaaagatgctgtttttttttttgtgatgcttcagatgttatgtttctgttgtttcaaaatacaaaaaatactagttttgaccttgtacatgttgtttttttcttggttaatctgatttaggtttttgtgttaaccatgattatcacgagctcaaaattctcaacgaactagtatgattttgatagctccaattcacagcaaaatcatgataaacataaccaggaaaaaaatgtcatgcacaacaaaaccgtgacaagataagttagaaacacacttatgacttaacttgtagggtttgaacccgagacgtctcatactcctatcagacaacagagttagtttcgcaaactagagtgtgattatttgcttaaggtttaagcaaaaaataaatcaccaaaatcagaggctaaagagagagctccaaaagtgtcttacttttttctcatctcgcctccaaaattcttcctttttcttttccttttccaatttcgatcaaacgtagttttgggtttaaggaaagttcgaattgtgttatccgaagttttggtttggaaacatctccctaacacacgcagcaaacaccttcgttgtttacggagacagtcactttttgtgtgcgtctctcttctctttgttctgtctctctctttttttgttcaaatttcttctgattcttttgtttgttttctgtaatttttcagatat

SEQ ID NO: 38960 - DNA, 346 bp, Arabidopsis lyrata
  Intron number 2 from transcript 494358 (locus 494358) deri ved from phytozome v7.0 (chr-ID scaffold_8; pos 1156403 to 1156748)
gcggctgcttttgcttcaagattaacccgaggtaagagacgaactaattcctcttccttccgatctcatcttttttctttaaaccaaagattctgtgttttgatttgaagattaaatcttatagactgtgatgggtttgtttaaaaatcagatctttgtgaagttaaagattaccattttcaacatattatcatcttcaaaaatgttgaatttggtaattgaatttgcataggcaaagccaaatgttcaaaatctgttgtctttgttgttttttggttttagtatctgatttgattcatacacaaatcgtgagcaggaggacgttcattgcttggaggtcttaaca

SEQ ID NO: 38961 - DNA, 331 bp, Arabidopsis lyrata
  Intron number 1 from transcript 926763 (locus 926763) deri ved from phytozome v7.0 (chr-ID scaffold_2; pos 16030842 t o 16031172)
acaaaagctacagtattatgatttctcctcctagctcatctcttcacatgtttatttttctttcttcacatgcaaatcaaaagttgttttctttctttctacaagtaaccaaagttaacacggtttccttgatttttgaataaacaatgaaataaaaatctgaaacgacaagtcttatatccaaatttaattattatgtactagtatattcacttatcatgatacttttgatgaatattatacacatgacaaacaaaacaatgtgaaaccggttgagctaaaccgtacttggatttgtttgctgtttggatagcaggagagcttgtgtcta

SEQ ID NO: 38962 - DNA, 674 bp, Arabidopsis lyrata
  Intron number 2 from transcript 907480 (locus 907480) deri ved from phytozome v7.0 (chr-ID scaffold_2; pos 3524965 to 3525638)
ggccttgttgtaccggcgattcaacagagtttggagtaagattttaagttccgttttatttagaaatgatatcacattagatttatggattacatgaaagatatatatatatatatatatatatatatatatacatttttgattctagatgattaaactcgaatatgtacctaggggtgtgcatggaatggatattctaaaatttcataatattcgaatttggatccgttgataacctttggtatccaaactgacggaaatttattataggaactaaaacattattgtaaaataaagaacaaattaaaacattaaatatataaaacaaataaaataacaaatatcatctaaattttaaattttatattcatgaagattccaggatattcaaaaataaaccaaatgttagctgcatatacatgggcatttacatatgaattatacagtgtatattattttgtaaaaaaataatgttatgatgaaattgatgtaagagaaatttgaaatggatacgagataaataaataattataagtaagaaagaaagaaagatgtcgtcacatcgtatatatgaatgcttgggccgtattttagaacaatgcttaattttaatcatcattttcatatcatgtattgtagaactcttaaactggactatctcgatctctacctaa

SEQ ID NO: 38963 - DNA, 575 bp, Arabidopsis lyrata
  Intron number 1 from transcript 914942 (locus 914942) deri ved from phytozome v7.0 (chr-ID scaffold_1; pos 32357240 t o 32357814)
ccatcaacaatgtaaggagaactcaagagctcgctacaaaacaattcgcacttagttgtactcttttttttttttttttttcatctgttgtactctaaacctccaattgcctctctcgctctctcgtcaggttagtctctacttttcacgattaaccatattttttgatatggtttcctagagaaaatgattagcataatgatttgtgaatttgattgatgacaacatggaaaaaataatagcaaaacatagaaaatctcttcttattgctagtgcttgtagttgtatgttcactactttttttattaccagcttcactaagtttatctccacgacaatgtttttgttggacttgtatttgaactattcacatgatacccttaaatatttgttccatttcaccattgcagtctgttgacagaaacctattgccagccatagtgcaaaaaatcatagaaattcaaaaagaagtttttagcctaaaacatccatcctgttcctagaaaccccaaacagaaaattgctcgactattgatataggatcatagacgactttcctaaaccacaaatccaag

SEQ ID NO: 38964 - DNA, 376 bp, Arabidopsis lyrata
  Intron number 1 from transcript 936669 (locus 936669) deri ved from phytozome v7.0 (chr-ID scaffold_5; pos 4950066 to 4950441)
aacaagcgaggtaaatagacatccaagaataaaaaataataattaatgaaaacaataatacatatatcactagtaaaaaaaacatgtatagccacaacaattttagtggctgtggtacaaaattcgtggctatatgctaaaacagtcactaagaccatatgcatcgggccaacacatgccatgttcttaggattataaaaattgagaaaaattgaatagtgggcttagatcaaagaagatcgttcttgcccaagaacgatttttagccttgttcttcgttacacgtggcacctttgtattggctctgaattttggaagacaaaatgttttcattttgggagaaatcagatttttctcctagggttgtcgtcgtttc

SEQ ID NO: 38965 - DNA, 653 bp, Arabidopsis lyrata
  Intron number 1 from transcript 353523 (locus 353523) deri ved from phytozome v7.0 (chr-ID scaffold_7; pos 3490391 to 3491043)
tggacagtggtgtaaggcacgttgttgtttctcaggtaaaagacgtttttctcttctttaagtatcactgactttgactttgttttttagtaagctctgacttttgagttctttaatgctaatacgatcttattataaaaaacttactagttgacttcatgccaaactgtatgtgacttgcatgattacatgataatcacaggtggacaacataaagctgatttagatcagttgtaatagtgatcgatcgaaaagttttccaatgccaagtttaattagttgctaatcactatatagtagattttattattgaagaaaaacaaataacttattcccattcaaacgtgagtgcaatggttattaattcagatgtatttacaataaattagtcataagtgttcattctaccaaataaacatttacaaaaggaaaaaaagtatataacaaaacaatttcaaaataccacattattttagttttcttccaaagatacaaaaatgactcacactcttatatatattttgacgtattcactcttatatgtgtcatgtgacatagtcaaaccattccgtttgtagaatttccttctatattctcgttgcacaacaaattcattgatgctactctgatatttttgtattcagatacttgaa

SEQ ID NO: 38966 - DNA, 825 bp, Arabidopsis lyrata
  Intron number 1 from transcript 916858 (locus 916858) deri ved from phytozome v7.0 (chr-ID scaffold_8; pos 15032229 t o 15033053 reverse strand)
ccgctgcaaaccgtagacctaaaaatctgcgcctcgtcagcgacggcgtccacagcaaacgcctcaacaccgacagcctctttctccgcagcaggatcctcctctgtctccacagcaggatcctcctccgtctccacatcagaactctgaggctcagagtcacgcgtttggctgttcctctcaaggtaacaacttccaaaacgaattgccggatctccaggaggatacgcttgaggctctgactgctctgcttatggtgccggaccgtcatctgtttacaaccgttctctctccaacaccgttgccagacacgacgtggtatgactcttggtcccttctatagtggttttttctgattgctttgtgtgttttaggatagaagaagtctgattgttttcaaaatgttttgtgtgtttgattgtttgcttgttcttattgatttgtgtggcttaggatagaagtctgattgtgtgtcttaggatagattgtttttaaaaagtttgattgttttcaaaaagtttgattgatttcaaaaagtctggttgttttcaataagtcaagactggtttgaaaaagaagtctgattctttgtttgattgttttaaaaagaagtctgattggttgaatgttaaaaaggagtctgattgtgtgatgtcgtatcagtcttcatgttgtgtttgagatgttatcacatatgttgcaggtttgattgggacgagaaatcaatactggtaaggaggattaccaaagtttttacaaacaattatgtgtataattgcttaaatgtagttttgtttaatcacttaggacttgttcaagaggcac

SEQ ID NO: 38967 - DNA, 456 bp, Arabidopsis lyrata
  Intron number 2 from transcript 496689 (locus 496689) deri ved from phytozome v7.0 (chr-ID scaffold_8; pos 21647378 t o 21647833)
ccagagtaagtttctgtttttttatctgggtttctctatctctgtgctaaagtgtctgacttttttacttttcttcttctggatctgggtctgacttgttgaaatcaattaggatttagggtttttagtgctagtattaagattacgtacctttgtagcttgttttatcaagaattgattttgtcggtgggaaggatttttgtccttcatttctaaattctcctaattttgagagatttcttcaattgcaatcatgaatctgtcaatgtgaagagtaaaatttatgttgttgggtttgattttattttggctaagtagtaaatctggcgtgagatccagtctatgttgttgattcttagtaagagtttttctttatagtgccactactatgatctgatatcataaagtttactgttttgtgcagataagatcagtgcaagagctgagtggacagac

SEQ ID NO: 38968 - DNA, 382 bp, Arabidopsis lyrata
  Intron number 3 from transcript 939718 (locus 939718) deri ved from phytozome v7.0 (chr-ID scaffold_6; pos 971390 to 971771 reverse strand)
agaagaaagcttcacctccaccaccacctaaagaggtaattaatttattaattgtctctatctgttatttatctcttctaattaaatattttataaataaaactagaaaaaatacaatttttaaattcagatagcgaaactatataataaaaatatatttatgtttgtggtctataacgtgtgtgtgtccacttcgaaactttacggtatttacactcgttcaattccaaatatatttggaggactttttcttttttcaaataaaaatgattccactaattatagttaatattttaactaaattaatagtcgttgtttctaatgtaaatttctttgatgtgatacagagtactgtggttttgaagacgaagttacattgtga

SEQ ID NO: 38969 - DNA, 1036 bp, Arabidopsis lyrata
  Intron number 1 from transcript 489736 (locus 489736) deri ved from phytozome v7.0 (chr-ID scaffold_6; pos 18152819 t o 18153854 reverse strand)
gcatacgtcgaaggaggtatgagagtctcttagatctctctgtttcttttcgttttcgttttttattttttttgtgtgtcatcgatttagttaaattcgatctgattattcgtttttcaatccttaaattgatttgtctcaagttttcatcaatcctgctatttgtttcaaatttataactattgagcgttgattgttacagaatttgtgattttgatgtaatatggaaattaggttttatatagctgaatttggattgatcatatgaatgtttaaaggggtttcgatttttgatttgggattatatgtttcttttttgttttttttttttgggcaaacgggattatatgtttctattattagaaagtttataggtttatggaatatggaaattggattaggtctataatcattcagttattatacgattctcagagaactaattcgaatagaaagctcgatgaagattccgttgcaggagacatttctagacttttaatatctaagatgtgctattcaggtctaaacttcaaacaagtgtaaacttttgagcaatgtatattgggagaagttagtgaatgggcatattctggctgagtgattgttaaaactaacattagcctaagcgagttcatgttcaatagtttgtgaatcataggggttatgtctcctaaagctagagagaatttgatatgagagttatgaatgtaggcaagcaatgacgttttggtaaatgcgatttgtgccatagtagatataatgctatgttcatgattacattcttctgccattgtagagattagttgtcggagtttgggacgggtttttgggttctcataggtaatttaggagcttccattaacacactttttggggagagaagagaagagaaaaattccctaaatctgtatatctgtttttggggttttgatagttagcgtttgtgaaaacataaatatatagcaaatattaagtgtatttgacattgactaactttggaacatgtaccaggtgtggttaaagcgaagcggccaat

SEQ ID NO: 38970 - DNA, 524 bp, Arabidopsis lyrata
  Intron number 2 from transcript 480536 (locus 480536) deri ved from phytozome v7.0 (chr-ID scaffold_3; pos 21125029 t o 21125552 reverse strand)
ggcgtataaccgagttggtggtgatcgaggtcacggtacgaattacgattccttatttaatcaaaattgttactaattttgcgcttgtatcttcgtgattagcttgtttcaagacaatttttgttagcttagattgaggaaactagtgaaaatctgtgtgatttcttattgtttttgattaatgtttagacttgttaaggaacctagtttgggagatttagggatatatcttgaggatttgaggaaactgcttagtgttggacttggtttaggtctttgtttctaagttctctggggatcaattaggagatgttaagtgaaacattgaggaactctctctcaaacaaatctctagaggcatgagagatttggtggctcttttcttcatttcagaatgcaaacccgaaaaagtcggatttgagtcgaaatttgaactaatgattactgaaaactcgctcatttctttttgtttttccttgtttgattgttggtggtgaaacagggattttcttcattgtactcgg

SEQ ID NO: 38971 - DNA, 411 bp, Arabidopsis lyrata
  Intron number 1 from transcript 471484 (locus 471484) deri ved from phytozome v7.0 (chr-ID scaffold_1; pos 5542240 to 5542650 reverse strand)
caggtttgaaatgatttacaggaagttttcttgatttaaatttccctttactttcacgttaattattatgatatcatctacataaatactataatatatgttgcaagctgatttagaatcgttatagaaaagtgtttttgaattaaagtatcaaacaaacaaaaacccgtggaattaacttccaatctataaccttttgcgtttaatgggtatcaatcgaaaaagttctcttattatctgcattagtactatgataaatatatattatcaaaaaaaaaaaaaaaaatcttcaagagaatagatataatcttgcagtcacgttcaaaattaagtaaaatgttgatgatatgagtaaaatttaacgtgaaaaatgagatgagcaagtgttttattcaatcacatcttttgcag

SEQ ID NO: 38972 - DNA, 937 bp, Arabidopsis lyrata
  Intron number 1 from transcript 929337 (locus 929337) deri ved from phytozome v7.0 (chr-ID scaffold_3; pos 6436688 to 6437624)
ttgtgaggctcaggacaccactgctgccgtcgaaggtatatagcttaatttcattcttcttctcgttttgttctctcatggattgtgtggaagtgtagtcttaaccaatttctgtgtaaaattaagccttttttgtgattgctaattatgtggaatgattatctgtgactcaagttaataagttttccaatttaggagttgtgattaagaagcaccaaatcgtgtacaagtttattagtttttgtaatcataattcactactttgaaacttggattcttaggaactatatcattggattctttgggattagaactcgtagtattttggtaaaatctcatttgagaattgtttttctactgtttgattctggtctgttactgttccattctctgaaagcaggattcatacggtttggattctgattgtggaactcgtagatctgaacattaaacatagatttagtcttttgtattcactgatttagttctctgaaactaggattcacagggagtggattctaatactagaactcggagatatgaaccataacacatattgtggtcaacgtcgtttgaggactcagcttctttatctatcaagttacttggattttactctgttctatgcatccccatcatacccgaacccgtgtttccgttacactttcatgatcaaaccaggattgactgattatactaatcgaaaataaagttcctgaatatactctgtgataagaatcttgattgcttcctgttaacatatggtttgatataactcaagaaagaaccagagtcttggcattgagcattgatgtgctctgtatactatttcacagaacagttctctctaatagtctgatttgcataacttcaatcaccattgagaaatctaactagtttgttttgatgttgcagtaccaaacctgtctgattcaga

SEQ ID NO: 38973 - DNA, 817 bp, Arabidopsis lyrata
  Intron number 1 from transcript 925530 (locus 925530) deri ved from phytozome v7.0 (chr-ID scaffold_2; pos 9132604 to 9133420 reverse strand)
aaagggccgtcttggtttaattcccgactgagtgggtaggtaaataaaatctatctatatatatattaaatatatatacaatagacgcatagtggttagtagctcatttcggaactagaaatgagaatttgaatttacttcaaaattacttaacggggtattttttgcttttttaatattggatttgataaatatccatgcaatgcatttttttttgaaattgcctaccgcatcgaaatcgaacgaaattcatttgatttatacatgtactcagcaagttgacatacacccaagatattttatcttgacatgtgatgaagagatacagattatcctctgaacaatcattttctaaaaaaaaagcaaattttcgataacttaacttataaatccacctttcttctctaattagaagatggattctggctgactttcttggattagttttagacagggatactactatttcttaacaatgagacgaggcaatctatgaaggaaagtaaaaaaaaaaacgaaacttaaccctcgtttttcttttttttttgttagaccaatcacttcttgaaaagattccgtactagaactagacgatttttagattttttttatttaattatttaatataaaatttccacttcaaatataaaaagaaaatatatcgatttgttatagaattatgattagaatatgaatacaaatgtaaaataaaaaaatgatatagaattctatagaaaaacgaaaaaaccttataagctagtcataccatttcattatattgacaattttaaaaaactgatcatactatgatcatagt

SEQ ID NO: 38974 - DNA, 512 bp, Arabidopsis lyrata
  Intron number 1 from transcript 471096 (locus 471096) deri ved from phytozome v7.0 (chr-ID scaffold_1; pos 3757054 to 3757565)
tcaaagatcaaggaagctgcggtacttgatttagctttctttttcatcaaaatttcagatttgattagagtttttagttcagcgacttaggaggtgattcaagatcagaaccttaagattgaatttagatcggagaaattctcagactttagaatctttgaggatgcagatttatcttcatgaagaccaatcataacgtagtttgtctcagtaatctaattttccatctctttcacgctttttgcacctttaaaggagtataataagtttgcatttctttttccatgtctaattatggctgagagtaatatagtgattgaacaatttaggaaagtctggaagcaaatatcattgtttctttcttctatgcgagtcattctttgatagaatgggcaaatgtaggaatttggtcagaaatagtaaatttgttctcagatgttggttatttgagtggatgatgatgttttgatacgtttataggggcgtgttggtcgttctcggcgactggagct

SEQ ID NO: 38975 - DNA, 621 bp, Arabidopsis lyrata
  Intron number 3 from transcript 492265 (locus 492265) deri ved from phytozome v7.0 (chr-ID scaffold_7; pos 7070293 to 7070913)
ccgccgagtccagaacacaaccgtcgtcggttcatgtacttctttttttttttttcctgagtgtggatttatgaaagatcagtgttgttacttgatttgccgacgtttctgacgctggatcgtgattgtagtttttgattgctcagagaaatggtttttgtaaaagtgagaatttcgggattttgatgtttgatctgttttgcaagtgtttacgtaacgaaattagtttaaagtttaaagagatttttgcgttacttattaattatgctttgatctacctgttactgttttattaactaggattaaagagaattgaagagtgtttgacgaaagagaaatataaaaagattcgagatttgatccgattttcgttttcttcctcgtgtttttcttattttaaaatatgtctattattgataaatgataagcagcactagattcgatgagctaaaaaacttggtaaatattttagctttaatctttttgctttctccaccatagtaggtgtggtttcagcaagattaaacccgaaagttgtgttcttgataaagctataagcctttgaatctttagctgatcaagattcttggttttttatgtctttgaaattcagaagaaaaa

SEQ ID NO: 38976 - DNA, 384 bp, Arabidopsis lyrata
  Intron number 2 from transcript 477542 (locus 477542) deri ved from phytozome v7.0 (chr-ID scaffold_3; pos 825138 to 825521 reverse strand)
atcacaagtttctcattgcttgaggggctacggtaatattcaattaaaataaacattatttgattattttttccctctttaatggaatcatatatgatctcgatcaaaagaatcaatgtcaaatatttaatcatttatcattgaatgaaattataatttaacttaagcattatctaggctggtttcagttttattcttctttcctgtaatctagagaagttgtctattaactcccacaatgacatagcgaagctagttcttaaagcatcaattaaaaaaaaggattttaccgtttttttcttcttactcataagtagcgattacaagtgctgatcttattgtctattaggggttgagcaaattaagacagagatcggagacaat

SEQ ID NO: 38977 - DNA, 809 bp, Arabidopsis lyrata
  Intron number 1 from transcript 489018 (locus 489018) deri ved from phytozome v7.0 (chr-ID scaffold_6; pos 8940562 to 8941370)
gacgctttcgagaaccctcttcgtcagtatggtttcaatttttaagttctgcattttctgaaattgatggcgcgtttgatgtttatccattgttctgcatttcgatgagtcaataatcgaaggcatagtgtgtgtgcattgtttgattgaactagaactagataattgggaaattatgaatgatttaagaacttattgttgttgtgataaaaaattatcgtcaacgttggtgttgcatttggtgtcttatggcatatagataatgtgagtctcacattgaagttagagtagcctaagaagacttgggattagtcttagtcttttaaaaagaatcactgatcttagataaattctcaatgtatgacagagataatactgtcacacaagtatatatagaacgttacatgatataaactggagataaatttcaactctttgggttttataaagaaagaaagttgatgtctgatcacgcacgcctaagccacatagtttattgtctgagcgagaatgtcacttgtttaggggaacatgttgatgtttatagcttcccttgttgctttaaaagggctcgaaagaactgatttaaatttttaaaccatagattaagtctgggtgaccggttttgttttgatcatattcttctttggtgaaaaagtgtcttaagccaactgatttgtattgatgcgctacctaagctcaaatacatgattcagtgtttctgatgttgtttggttaagtattgttgcacattcttttctgatttttctagtgtcactaattttcagctgcatttggagcagtcctgc

SEQ ID NO: 38978 - DNA, 481 bp, Arabidopsis lyrata
  Intron number 1 from transcript 933325 (locus 933325) deri ved from phytozome v7.0 (chr-ID scaffold_4; pos 12888033 t o 12888513)
gcgttaggttctcttctttgccttttcccctaaacgtttgacttttagcttttgttctcggcatatccctagatttgaagctatgtgactgattagcttcttccattttgctttttctttcaaatgaggattagatccttacttatctctttaagaattattcgttttacattgagaatcttcctaagtgttttgaagaagaataaacttaatcagcccttgcatttaactaaatcatgtcttgtttattatgtatcattctctggattcacttcttcctattagggaactggaaataacttctcattagattctgactcttttgggcatatgttcaatctaactgttgtttgtagtgatatgtttctaatttgacaattcttgtttgaatgttgtatttttaagcttcttatttagtaaatgcgagattgagagttatctttcagctgaggctattctgcttggagcaacctatcactca

SEQ ID NO: 38979 - DNA, 298 bp, Arabidopsis lyrata
  Intron number 1 from transcript 344663 (locus 344663) deri ved from phytozome v7.0 (chr-ID scaffold_4; pos 13073990 t o 13074287)
cataggtaagtttattgtagaatagaaaacaagggtggattttgttaaaacccgcgtattactaaagaaatggattctaccggcgaatataaaatatatgcacgctattatgtttagtgtcaattggttttgagttgaaaagtcatgatttcgaatctatttcatttattggttgctaaatggttttgagctgaagagtaattatttttattatatttaagtagtttttgaatcaaatgaacttctaaaatataacaattcagggataaactcaaaggaattcgccttggaattgttt

SEQ ID NO: 38980 - DNA, 111 bp, Arabidopsis lyrata
  Intron number 5 from transcript 483545 (locus 483545) deri ved from phytozome v7.0 (chr-ID scaffold_4; pos 21565014 t o 21565124)
gtcatcaggtaatatttttcttcacatttgaattgttttttttttttacccatttttgttgtgtccattaacctcgttatctatcttatggtgttgatttagcacgcgata

SEQ ID NO: 38981 - DNA, 401 bp, Arabidopsis lyrata
  Intron number 1 from transcript 484476 (locus 484476) deri ved from phytozome v7.0 (chr-ID scaffold_5; pos 3225691 to 3226091 reverse strand)
caacacaaattgacgaactcgatcgagccgggaaggtaacaaaattaacgctaacttcattaatttcgaaatatttatcgcaatttaatgttcttacgaacttgggtttttgcggaatcgtcgagattttagtagggtttatgcttttggatcgagtttctgattacttaattggccggaaaatgctaaatttgaaaccatttttaggagtgaagaacaaatttagaaacttttttgaattggtagcaaatattatcacttagattgagatttagggctattctattgaagaagcactattttagttattgaatttgacttttatgtatggaaagtttccatttttgttagaatgttatgatagtaaaccttagacactgttctcttgtgattttcaggat

SEQ ID NO: 38982 - DNA, 571 bp, Arabidopsis lyrata
  Intron number 2 from transcript 486377 (locus 486377) deri ved from phytozome v7.0 (chr-ID scaffold_5; pos 19186910 t o 19187480)
ccgctcttgctttcatcgcattccttcaggttctgaggattctgattatagtttttcttcttcttaaggtttcgtttttcctggaaacaaaaacgatttgatttctgaatgctagattttgtgagaccgctttggcctgtgaagcattgtgctgaatttggtcttttagaattcgatttgatgtgagattattgattcttgttgttgaatttaatgaatgggttgatttcagtcttttagacttgtgtgtctgttgttcatgtggttgaccattaagtttcaggtcaactctatgaattaactcacggaatctcaattgtgtttgtgtagaatgagagatttgattcagggaatctgaatctgatatgaattagcattagaaagtagaatcttttcttttttaaagtgcagtgagtgtagattaagatgtctatgtagctttagactttgaagtacttcaaaaaaggtcttattctcttctttttttttgtggggtttggcttataagatttatcttggctgcctacttctttcagttatctcgatttcacaggcggaataaacaagttgg

SEQ ID NO: 38983 - DNA, 807 bp, Arabidopsis lyrata
  Intron number 1 from transcript 489873 (locus 489873) deri ved from phytozome v7.0 (chr-ID scaffold_6; pos 20155850 t o 20156656)
ctgagtccaaactcacccaactcggtgttcgtaattggcccaggtactttactttacttgcccttcttcttcttctgctttagcttttgtttcccggagaagaaagtctttagcttttgttttttgaagccataaggcatctccaactgatctagtttctcttattatgtgtaaattagactatctttacctcaattgatccatctgctattgaaagtttgaacctttttggttgcccggataagaaagtctttacctttttcttcttgttgttcttgttgtggaattcaatctccatgatcatatgcagcttctcattatcgatttccatggcataagtaatttgcaattgctgcatttttgcttactttgtgtgttaaatgtaactttcaatgtgaggttgtcctccaagcatgtaactttcaattgctcaagttcatatttttgtggttaaattcgacaaagatttacgtcaattaatccatttgcagttgaaagtttttaccttttgtcttactcgtagaacaaagctttaagctttgtttgtttgttgttgttgctgctgtataagtcatctgcaattgctctagtttctgtttttgcaagtatattggacaatctttacatcaattgatccatctgatattgaaagttttaaactttcttttgtcatatgtagaagctagatagctcaaatttctcaatgatgagtttttatggcatttgctataagcaattgaagaagattttcttactttgtgggtgaaattgatggcacaggtggggttgtcctccaagcaagtttcc

SEQ ID NO: 38984 - DNA, 798 bp, Arabidopsis lyrata
  Intron number 1 from transcript 356646 (locus 356646) deri ved from phytozome v7.0 (chr-ID scaffold_8; pos 3478697 to 3479494)
gctcgagctagcttaaacaataccacatgtaaatcgaaatatttgagatttgagtatgatatctaaaatagtatatattcataactattagagacttaaagtcccaagtcgagaaaactagtagtaagaaacataaaatcatgatggtttctgaaattatgaagtgccatctttactttgaaaataagtcgatctttgtttactctcacttttacatatcaacaacaaaaccaaaagagtcttttaaaactttcgatttgctaacacttcatttactttatccttagtttcactttcttccgcctaacctttcgtattctctttcacatatcacaggctttatcagatgctctgctcgctccttcattcaccttatccttggtatcttccgcatagtctctttcatatcataagcttaaaaaagtccctgatcaagcaaaaccgaggaaacagagtttaacagaaccgatagcacttgaaggctctttacttgggtgtgaagaaaacagttattaacagtcaaacattctttttttaaaaaaaaaatcttcaatcatggttccttaaattactaagtaagatttagactttgacgatcacatgattttctctttttagatcaatctcaaacctagcagagttgtaacaaggatataagaagaaggtagaatgagggtttgtttgtttaatatgatagactgatttggttctttgtttttaatcctaaattgaaactttaagacatgtgaaaacacattattagtgtacactcgagaagttgagaaagaacttgagttg

SEQ ID NO: 38985 - DNA, 500 bp, Arabidopsis lyrata
  Intron number 2 from transcript 496743 (locus 496743) deri ved from phytozome v7.0 (chr-ID scaffold_8; pos 21818469 t o 21818968)
gaaaaggcgttgtttcacgactggtaatgattgcagcagaattggccttttttgttttttcttttcgttgcgtgcttgattaggattctagatatagtaaaccgtttgtgattaagtatcaagtatgtaaagtgattggaggaaaaaacatgtttttggcaattgggttagagtagaattttgttacttttttgttggtgtttatgcttttgattttttgaatgaaatggatcttatgcttattggctggcttaggcatcaatctgatgtttcattttggtaatattgttttcgtgttggatgtttatgacgtgtgagtctcttatatgttcaatagcggttttgtaatactcctggatgtgtgagtctcttatttgttaaaagtgtagagtttttgagagtctttagttgattaagaataattgtttccacgtggaactaaatcaacaaagggtttttcgttcatcgattttctattttcatgattactaggttaatat

SEQ ID NO: 38986 - DNA, 512 bp, Arabidopsis lyrata
  Intron number 1 from transcript 936149 (locus 936149) deri ved from phytozome v7.0 (chr-ID scaffold_5; pos 1910766 to 1911277)
tcgaccatttcgtggtgtcttcgatcttgccacaggtaaaattacaacgcctaaattttgtggttatcagagatatagtcgttggtttttttccaggatttgcttagtcttttgtttgagtaggtttcttctcttgctattatattttatttttaatttgatttgaagtgaaatgttttaagggtaaacataactccgagtacaatattatgtcagccgttgacgatctgaactagcaaaagctaacgtgaacgcaaaacaaatttaattgatctgttttatacacaattaaaaagacgttatttatttcaattataaattctaaataataggtctaaacccaaatacaaatcagttgttacacaatctatacattgatatttgtttctaacaaatcttaagatagataatgcaaagttacaagttacaaccttctatcacgatatatacacgatactcatacaaaaatgttccaagtcatcccaatcacaccttttattacccgtgaggcc

SEQ ID NO: 38987 - DNA, 251 bp, Arabidopsis lyrata
  Intron number 1 from transcript 475124 (locus 475124) deri ved from phytozome v7.0 (chr-ID scaffold_2; pos 1897977 to 1898227)
taatccttgacgttgaagaatctcttcttatacaggttttttttacttaatttattaatttgcgttttgtgaatttctctgaattagctatattttcttcagtttcaatgtttaaaatcagttcaagattgtttgttatatgtgggtcagttttttttctgctgaataaatgtttgattttcagccacaacacaacttctgatccaatcatttttttgttgttgtctgaatatctcaggaggaagtgaaaa

SEQ ID NO: 38988 - DNA, 805 bp, Arabidopsis lyrata
  Intron number 2 from transcript 482971 (locus 482971) deri ved from phytozome v7.0 (chr-ID scaffold_4; pos 19162046 t o 19162850 reverse strand)
atcagttcaatcgtctcgtcgaggtatgtcagcttgcatatgcttatgtggctttacaaaatttctaatttcctaggtgtatgtagctgagtgagcttgggggaaatggaatttggaggttaatgtgcgttctagtttaggttttggagctattgatagtttagtatatagtttttgctatatgtactgaaacgaaattttggagctttgttcctccttccgagtgggatttgtaattttagtgggttgccacattagggttaagtaaccttcctgtcaggttcttgaacatcttatgttaagtctgttatctcgacaaagtttgtggcaccccttggtcataaatattttaggtcaagaagcatgagagtgtagcatttctgagggtgtgaaattctttgattgttttgctctatatctttgtggatatgcatgttggattgttagtggattttctgtttcatgatttccatgtgctattgtttggaggactagtaagtatactggttttcatgtgattactgcttctaaattgtatatcaacctggaaaccagctgttcttgacttagctgggaagcctactttgaatagtcaaactttttcgtttactcaaaatgcatgcttaaaagaagacaacccttcttctggatgtccattattttttattcgaggtttatctttttacaaaccagttcatctggattcatgaaacactggcaacaatcctgaaataatgtgcctgtctaagttattgatgtcctttgtgcagctttcgctgaccattgtatacattgctggaggtgt

SEQ ID NO: 38989 - DNA, 527 bp, Arabidopsis lyrata
  Intron number 1 from transcript 358463 (locus 358463) deri ved from phytozome v7.0 (chr-ID scaffold_8; pos 20568442 t o 20568968)
gtagctagtatattatgatttattgattgattttattataaataaatttaaatttttgtataagttaaaaatgaaaaaaaactttacttaatgtgaaacataaggagtatgagtttcccattatgtttaattgaactactgatttatttttaccaaaagaaaaaaaaaaaattaattgttttcattagtaagtaaaagttattttacgtaaaccatgttcggccaacctcttctaatatacgttggaaggctaaggcccaaactttaatttttgcgctgcagcaaagctgaatgcctttttaatcgtggcccaaataataagtaatgggctttggccttttctgttttacccatccgactccatttataccggcaattgtttctaattttcaattgattttgaaattgaaaatcaaaaatgaggaagaagcttgctttggcgctgaggctgaagctcatgaagaaatctgggaagaagaacctcactgctgctgctgaaacaatcctgaatggtatgctgcagatct

SEQ ID NO: 38990 - DNA, 265 bp, Arabidopsis lyrata
  Intron number 2 from transcript 472227 (locus 472227) deri ved from phytozome v7.0 (chr-ID scaffold_1; pos 8535167 to 8535431 reverse strand)
agcgtcgatctgcgatacccgataggtaaatcaatcatctttggcggttttccttctcttcgaattttctacattatttgtgttcttcagagtaagagaatcgaaaataagcgataggcaactcctgattttctgggttttcttaaagcaaatccctttgaggtttttttgggtgaggtttgattccatcttgcagccatttgtaattgggtttgtgtttgtgtgtctcttatctttgggtattcagaagtcaagtgcttaaggg

SEQ ID NO: 38991 - DNA, 582 bp, Arabidopsis lyrata
  Intron number 2 from transcript 895318 (locus 895318) deri ved from phytozome v7.0 (chr-ID scaffold_6; pos 21175548 t o 21176129 reverse strand)
aataaacaggtaatcttatagtttatatgtacaaatttgatttttttttttttttgtatttatggtttcactattttcaccactaatcaatttttataatcaaaaagtttggtttcaacttttgagaaggtaatcatcgatggtttggtatgtttttttttgttgtaaaaagatgaggtatctcccgattttgttgaggtacatgttcttattattttcaaatatgtctttttcagaagaaacactcaacttttgataacacagttgccacaaagtcagaaagatgacttatttcagggatgaatcttcagaggaggctaatttttgtcgttaatacaatttaagtattcctctctttagattagggataacaaacttggctgttaaattcaggaattactcttcgttgccaatctctctccccaaactaaaatattacatatatggaagtagtaacttaaagtttttggtatcgaggtcattctaaggcactgagattcggactttggtatgtataggattcgttttccatgcactaagatttaattattgtttaatttattggtttttaggtttctttcc

SEQ ID NO: 38992 - DNA, 513 bp, Arabidopsis lyrata
  Intron number 1 from transcript 471479 (locus 471479) deri ved from phytozome v7.0 (chr-ID scaffold_1; pos 5504548 to 5505060)
tctatcctgatccttgtggttggactccaattcaggtttttcttactaatctctctttccttaaatccttgttttatagtttctctagagtcatgttttgtacggtcaagtccttaatttgtcatagactcttcaatatagtgaagagatgtagaaactttttatctttagatggtgttgaatcaatcaaacttaacttcgaaaagcttttgaaatgatgtgtaaagatttttttgttttctagctgtctcaaataattcttcaaaatgctttgtcccctttgaaaattttccataatcggatagtgaagtttaaagcttcaaagcaacaaagtgaatcctattttcatataacatctcttttttggggtttctttaaatgtttcaatggttgttacaattatatgctcattggcccaccaatcattccttttcttgcagctaagtactcttaagaaaatccaaacattgaaaaaaaaaacaaaacgtttttgttttggtttcagggtgtttc

SEQ ID NO: 38993 - DNA, 821 bp, Arabidopsis lyrata
  Intron number 1 from transcript 925291 (locus 925291) deri ved from phytozome v7.0 (chr-ID scaffold_2; pos 7273857 to 7274677)
cgagaatcgtatccttacaatcggcttcactcactgctcgaccgatgttcaccttgttaccgaaatcaggaggattgagaatccgtctttctcactctctgacttcgtcgacctcgattaatcctagggtttctcgattatgatgtcatctgtgaagctcaggaaactacttggttctcgctctctgccatataactcttcttgttcgattttgtttgatttacttggttctcggtttcttatgggcttgattcgtacttgggttgattttgattttgataagttttgtatgaactgatatcgtgttgttgattgattggtgttgattctgtttctctaagtcttaagaactgtttgacgtatctcgccaagttctttgcttattaaatttcagctcatattgatatagtctctgatactttggtcttaatattgtgtttgaatgattacttaaggcaacgaatcacattttcaattattaatatatttcgttcgtatcaatccttagttggattatatgtgtgtttgcttcgaattgaatgttacttgcgaataaatattgcttctgttcttgctggattgatctgaagattttggttgttgaaaatccgaatggttttggtagatgctagggtgaattttgatcaagttatgtttatgagactttagggttcttgggacttggtttttattagggatgtgaggttttgctttgtattaagagctctgttggatcactggtattcatgagatttatttttgtttctggaacaggaacttgaaacttagaactcacccaaaccagaagtgccttcatcatc

SEQ ID NO: 38994 - DNA, 461 bp, Arabidopsis lyrata
  Intron number 2 from transcript 493916 (locus 493916) deri ved from phytozome v7.0 (chr-ID scaffold_7; pos 22067096 t o 22067556)
ggagtatcaggtttgacttcaattcaaattcgatttgttttacttcgaaagtttaatgctttaagccatttagctactgttctgaagctgatcagtgatgggtttgattgaatttagcttattcatttagaatacttgtatttgggtctgttcgttgcttattcaacttaaagctgagaatatgatgttgttagtatcatgaacagctaatatactgttgtttagagtttataatcattaatgtttgattggtttctggcttcgcaatctgagttctatgatttgatcaataggttggaaattggattagtggaattgagatgtaaagcacttgacttggtcttctttactcattttcttatgtgatctttttgctcctacttatgtttgtacggtgtgactgacttggtattaatgtgctgatcctgtggtagctaacagaagggattagaccgttcaca

SEQ ID NO: 38995 - DNA, 494 bp, Arabidopsis lyrata
  Intron number 1 from transcript 939079 (locus 939079) deri ved from phytozome v7.0 (chr-ID scaffold_5; pos 19850421 t o 19850914)
tttcaaaagcttcagtagcttagcgttatagacttcgatctccttcatactgtcactggaaaatacttcatcactcaggtactgattctatttcctatccagtgtcaatttagactccagaagaattaatcctgggtatcgcaaaaaaatgctatcatgatgtgagtaatgtgttcatggagtgtaaatttgataactctgctttttgcatgaccaatttcatcggaaaaaaaatgaaatggtttggtcgagtatttcctgaacattgggaaggctttggtgaattttttaaaaattaaatagaagaatgaaattactcgtgagattagtaatttgagttatgaagattttagctcaggattgcattcagtttcttctgtcattataatgatggagacacatccataggttaatctccgtagttgctacacattagtcttagttttcagatctggaagtaaacactctgtttctgctgcaggtcctggtgaatt

SEQ ID NO: 38996 - DNA, 885 bp, Arabidopsis lyrata
  Intron number 1 from transcript 949102 (locus 949102) deri ved from phytozome v7.0 (chr-ID scaffold_8; pos 7422075 to 7422959)
aagttgatcagggcactctcttcgatcttatcctggtttgtcaaatttattttactctgtggttgatttggttttcaatttttctgctgtttcatttctagggtttgagatctgggtttgtgattgagatctaaatttagtgtttgtgggagagagataacgtttaggttttgtgtagatcgatttatagtctctgattttgtatggttttgaaatcttaatttcgatttgaggtctgattttaggttcgtgggagaaacaagttttgggttttgtttaaatggatttctaatttctgggttttaggttttgtttagatcgattaccaatttcacagtttatacaatgttcttatctggttgaaatcaagagttttcttttgagtgtgttggatttgtttatagctgaagaccacttttgagtccttctttgcttatcttatcaaattagccttgaaacttagtgtccaacaattacatatattaattcaaactcatgtttttttgttctgtcttaaacattggataatgttgattttctttgggatctgcttgaaccataaagttccatctttgttctgaaaatttcatgcagctgatgagaaaccttgaatctatattggttctgtgacacattttatgctgctaacatggcatgttttgttctgtcttcaacgacggttaatgttgattttccctgagatttgttgtcattgttcgctttgtatgcgccgcccacttcaatatgtttgatttgcttaaaccataaagatccattttcattctgaaagcttgaagcagctaaagagaaagcttgaatctaaagttggtttcgttcttactcattttaggctgctaactacctgaatatcaagggactgttgga

SEQ ID NO: 38997 - DNA, 899 bp, Arabidopsis lyrata
  Intron number 1 from transcript 496610 (locus 496610) deri ved from phytozome v7.0 (chr-ID scaffold_8; pos 21316792 t o 21317690 reverse strand)
tcttcttcttcttcttcttcttcttcttcctcctggtgcgtctaatctcgatctcgttttctaaaccttaacttctccgtttcgtttcttcgtcttctcatctcgatgatgatgatggagattgagattctctgattctctatatcgttatgtcattttttcaatctctcaacataagaacctgattgtttatccttagggctttgtttgagtttcctctgatttgaattttgagttttgatcgtggtttgattgtgtatctgatccgccgtcggtttcgttgtgatctgatcatttcgcgttgtttaagtgaaattctaggtttatacagtctttgtctatatgcattgttgagatctgattcacatggttgattttgatttcaatctggaaattgatttgaattcaaagtcgaatctgaactttaaagctttagctattctgatccctgtgaattctggaagcggttttgtttacatagatagagatgtgagataagcttttggaggctttgcctattttatggagtatacactcatcatttgttcctttagtttgggtttttgttttggctgcctcaagttttatatgttgttcatagttaggctcattcgtgttcttgagctgtacaatactacacttttcaggacagatagtttggtgacttggtcacaggattgtggaactagtatcaaataggaagcatattatttgatcataaagatcctttagtttctttttaagttcatttattaattagcttcctttgattgcttcattgatgaaccctcgagtctgcttttgttacttgttcatgagttgtgtgtatattcgttaagtaatgttgtatattatatactcgtgcagcatttttggtttggtggcgttgagacatcatc

SEQ ID NO: 38998 - DNA, 489 bp, Arabidopsis lyrata
  Intron number 1 from transcript 933308 (locus 933308) deri ved from phytozome v7.0 (chr-ID scaffold_4; pos 12756904 t o 12757392)
accagaacgaaggttcctctctcactagatcttcattgttctgcatttcttcaatttcttacgttccctgtggagctagggtttttgtcttcagagatcagtttttctttagggatttcaattttgtgataattgatccttctctagggatttatcattgattagctaagtggtctagactctagacgctttgtgctcacatttagtctatctaggtttatagatttctcaaggttaatggcttttaccaattaatgaattgtgaactctttcaatatgctttttttgtgaaatgcttttgcagttcctgatccaggaagcttcaatgatagtgttgctgattaacaggtttgttgttgcaagatttgatctttgtttgattgctcttacgcagcacactactcaatgttgtcttttctttccattaagctatttgttatgcttattaggctgttctagagactgttgctcgagttaagcctaagaaaa

SEQ ID NO: 38999 - DNA, 381 bp, Arabidopsis lyrata
  Intron number 1 from transcript 491522 (locus 491522) deri ved from phytozome v7.0 (chr-ID scaffold_7; pos 3999734 to 4000114)
ttctcctgtctagcttggctctacgtcgctggccggtacgtccccttttccgactgattataattcctgtgagtattcaaatctcattgattctagatttgtttgaattatttagagttttgaagatcgtgatggttatggaacatttttttcatagttgttgatagatctcgcagacgctagattcttccgtttttccacagttttgttgccagtctagatttctataatgtcagatataactgtattgcaatgtgtattttgggtctgagttccattacagtaatctaccaatcacaaactcaaactcgatcactggatcggtatcaattgattctgatctctaatatggtgttgttcttacgtttaggttgtggcaag

SEQ ID NO: 39000 - DNA, 784 bp, Arabidopsis lyrata
  Intron number 1 from transcript 475327 (locus 475327) deri ved from phytozome v7.0 (chr-ID scaffold_2; pos 3590781 to 3591564)
taggtatgtctctctcttctctatcagttttttttttttttagggattttgatttctgggtaagttaaatttcctgatttgttgttgtttagcgtgtattgggtttttagagatccaccgattgtttcatggatttgcttttgatttgatttagccaaattttgacgcttttctatgaaaggttgcaattttgttatacctaaagtgagcttttttgtgggtttcatttgttgggatgaacaaacttttctaaattgctgatgtttgacttgttcagatggtattgcaaaagatgttatgagagcctttattgattgattagtggaaaagtttgatgatttatgagagtccttactagttttagaaattttcatgggcagtgaattgtccagaaaagctaagttactgtctttagtttcactatttgatgttgttatctgttggttttatgttttacttttgctaatttttcaattgaatctttttttaagcttatggagggattaagttagtcttgtgatgattagcttttgttattattttgctaaatggccatcattatgctttaaacataatgatgttcattttcatgaaggcccttccttaaccttcaaacattttgtgggttatgtaacttatgtctgatttttagtgcatgtatgcttgattcaaagtatgctggttcagtttgaagttggagctgatagttgtttctttggtttattgttgtcttggttatatctgtgcagatcgtggctactattctgtagaaacagtctcttta

SEQ ID NO: 39001 - DNA, 923 bp, Arabidopsis lyrata
  Intron number 3 from transcript 901667 (locus 901667) deri ved from phytozome v7.0 (chr-ID scaffold_4; pos 18188980 t o 18189902 reverse strand)
gttactccattgatattacatccagtagtctgtttgatgttagattcttgtatcaatcctctgctccctttttttcctttttctcttgttacatgctaattaccgacgattccaaatggcgaatataggctgcgctctattaattttggggtggagaagcttctctctaaatgcaaaatctggctttcagttttggcattatctaaggacactgcattgccgaaactaggactgactgaccttattcagatgtggagttttggtctcgagcatggttagaatcttgcgagaaatctctttttagttgttaattttagcttacttttctaaaatcatgattcatttggtgacacttacagctggagaatttgtgccagatctctctgtggcctatctttcaaagaaattcgtatgtaccacttactcttccaatttatccttcctagtagcattaaacatcctcacctgactgtagacaggtaagtttgtacccattgtctatcttatcagtgcaaacatacccaatattctcacctttggctaaaactctgacagtgagatgcatcttgctgatgcacttcttatttggcttgatgccggcagaagaatgtcggacttttcagagagtagtagtagtcaggataacacaatcaacttgatggaacagctaacgtttagaaggtctgtcacctatgcagagattactttttctgagacctttaggacaaaactagtatatacattttttgctttatggaactctggtcctcgctttaaaaagcagatgattttgagtttgaggttagatttttgtatcaatcctcggttctctttttaatattttcgcttgttacatactaattattgaattctgaatggtgagtataggctgcgctttattttggggtggcgaggcttctctc

SEQ ID NO: 39002 - DNA, 394 bp, Arabidopsis lyrata
  Intron number 4 from transcript 937351 (locus 937351) deri ved from phytozome v7.0 (chr-ID scaffold_5; pos 12665399 t o 12665792)
gagaaataccatcaagaagcattgtaagtcttttttcgtcttctctggctgtttcgtatatatgggtactatactaaacctatttaccacaatgagtatatacgcgtctcatgtgtgctttgcttacgcaaatatcaaataacttttcaagccagattaagtttgactccaacacagccataataaatttatgaatattttttaaaaatcaattggtaataaatggattaaccgatttttatttttattttttactatataaggtcttacatttttttatgtaaagagactcctaatagataaagtttttataaccgtatacttatgagttatgatgatgagcctttctgcattggcaggagggtttgtaaggctattgctagagtactggcat

SEQ ID NO: 39003 - DNA, 419 bp, Arabidopsis lyrata
  Intron number 1 from transcript 497233 (locus 497233) deri ved from phytozome v7.0 (chr-ID scaffold_71; pos 7101 to 7 519 reverse strand)
accgcattcatcggggggaagtggtgacgacgaaggtgaatttgggaataatacttatggaaatgactacacacaagaaacttctcgttttctgatttcttgttccacaagaaactctgtttttagacaagtacaagcaaatctgttttaagtgtttacttcttttggaattacaagtagttttgatctggtttttactttcacatgacatttctgcgtgtgaaagagtagtagagttcttaatgttttgaaacaagtttctcgatcttgtgaaattgatttggggttcttgttcttcgttatctttctttctttagatcttgagaagttgatttagggttcttgttcttggttatgtttctttcttccttaacttatagtaattcatttacagctccgagtacgggagttaaatttcg

SEQ ID NO: 39004 - DNA, 969 bp, Arabidopsis lyrata
  Intron number 3 from transcript 493628 (locus 493628) deri ved from phytozome v7.0 (chr-ID scaffold_7; pos 18518384 t o 18519352 reverse strand)
cgagcttgagtttgcaggaatcacacataattgaggttagtctttgtttttgattcagacaaatgttcttgtctgattagttggagaggtttgataaatcagaatttgcaattagtcttgtagttatagcttaattagtgcattgatatgtagcgaggtaggcaaaaattcaatcttgttcattgttatgggtaggattttgcttaaggttaatggtaagaacataaaagtgtcttcctttattgatcatgaattggtggttacaatcaacaagacaagaacactatatatttgttgtcctgaaacctaaagctaagagataagttgattttgccattagtgttgtagttatagcttaagggtgtattggaattcttgatatgtagtagagtagccaaaaattcaaacttgttcattttcttaggtagattttgcttaaggtttatgataagcacaggaaacattcttcctttatgataatgaattggtggttacaatcaagaagaacaaacactagagatttgttcagagatatcataatctcgtaaaacctaaagctaagagataagtcggttttgccattagtcttgtagttatagcttaatggtatatagcagagtaggagaaaattcactcttgttcatttccttaggtcgattttgcttgagactaatgataagaacagaaatgattgttccttaattgatcatgaattagtggttacaatcaacaagtcaagaacacaagaacaaaacctaaagcttccactaaccaattgatgaaaatcccttacttctctcactaatagtctatcagttaaaccattgattgtgttgcaatatcgatacagctcctggcaaggtttatgagtttcgtctcattacccagttttccaaaacttgtcaaatgtgttttaaatatacttcttcttggtactttctttttgttttttaggataaaactatcaga

SEQ ID NO: 39005 - DNA, 717 bp, Arabidopsis lyrata
  Intron number 1 from transcript 491737 (locus 491737) deri ved from phytozome v7.0 (chr-ID scaffold_7; pos 4938988 to 4939704 reverse strand)
tctgggcttggagctgaatagcggatttgtataaggtaattactgaaacgtatcgaatttattcgtttttttggtttctctgagatttttcagtttctgggtttagttgcgttgatctgattggatttctgaaatttgcatgtagataagtttgtttttaaagccaaagttttagtttttattaattggtgagatagattttgtgtagaaagcatcaatctttgagctttatctattcttgggttttgtgatgttgtttattgaaatgttttggttcggtgagtatgatgatgttcaatggaaatgttcctccttttttttctcgaatatctgagttttgctttggtttcatctaatgttagtctgggaaattgtgaaatttacataaaccctacttccaatgtaacatatatttcatagcattttgatagagattgacttgagatgaatgatgttgaccgtggtggattatgagttgattttttgattagtgtatggcaatgatgataatcgatattagtttcttcggttttcattggaactatgcatataacaagaactttttttcactgcttgtgatgccttatctgcaattagaatgtgtcctttgattggctttgatagaatgattttgcatttgttgattcttgagattttactcttagttgctggtgtcttgtaggttattattagtcttctctatcgttgtggtgttca

SEQ ID NO: 39006 - DNA, 551 bp, Arabidopsis lyrata
  Intron number 3 from transcript 939957 (locus 939957) deri ved from phytozome v7.0 (chr-ID scaffold_6; pos 1935305 to 1935855 reverse strand)
gttgctctctccggttcgtttcacttctcttcttgcttaacccaattcccatttattatttacgcaactatatatgtatcacagattaaggttgattgcaatttttcaaacatcgattactaatagattgctaaaaattggtgacaaaaattatttcttaatctgtgaatatttcttaaattttattcgttcaccaatttgtttaacaaaaagaaacataaaaagaaatatttcaaaggaccaacacaacagtcaacagagtcgacacaaaataatataatttgattgtgttgtttgtttttgtcgactttttttcaacacatttttgtaacgcaccaccgacttttctgttttttttttttcccaaacaaaattacgtaatcatattttttcccaaaattacgtaatcatataaattactgttacgcaacaccgacaaagtaattcagatgatccttaaaataattaagtcaactattaaactaatcattcaaacttttttgtttttgttttcaggcgcacacacgatcggacaatcccgttgcacgaac

SEQ ID NO: 39007 - DNA, 526 bp, Arabidopsis lyrata
  Intron number 1 from transcript 928539 (locus 928539) deri ved from phytozome v7.0 (chr-ID scaffold_3; pos 3507926 to 3508451)
acaagcagctcgattccgtcggtgacgatatcaacgtaggcatctctctactccttcactactacttgaagaatcatcaattttggttttgagtttctctgatctcgatccgatgcttttgagaattttgtttcatcctttgtaccgtgtcttagtcgatctagggttctattgatcttagagtctggtaaatggtggtgtagctcgttgattcttcacttagtagcgcaattgcgtttgatttctgcatttttctagcaaatctgtcatatgttcattgaactgtataagagtttactgcaattcttcagttttgaggccgcttgtgataatattaggggaattgtggcgtagaaggaacaagatcttaagagtaaataatttgttgagactgatttgtgctagtagtgttcttttgtgtttcttcaaaacatgatttagctcaatgaggcagtgttgtgatcttctataatctgtaacattctttgttccagtctttgtctacaagcatcgaaggaggaacaaa

SEQ ID NO: 39008 - DNA, 550 bp, Arabidopsis lyrata
  Intron number 1 from transcript 902529 (locus 902529) deri ved from phytozome v7.0 (chr-ID scaffold_4; pos 21931500 t o 21932049 reverse strand)
tgtttcgttttgatcccacattcctaaagctccaggtaccttttcttcgtttcccgaattctgattagttgattcttcttcctgattcgtttcttcgcaaactcgttgccgatttttggatccggtcatcaactttgttgttttatttgtcattgatggaaaagtttaggggtcgatacatagagcttctgtgctttcacacttgcatgttctcaattcctaattttgcttgccattttattaaccggattcgagtctcttcccgctggatttcttttttttacgtcttcttttctaatttttttttcttctggatttggtatttttacatgttaagtaaccttcgttaatcagtttaaatcggtgctttccgaatttatagaagaaacatggaagcttaaattttgaaatcagaggcttagtctttgtaattcttctttacttgttgttgtttcattggcatgaatataggaaacattttaattattttttcacttctgttgcttttatttgattctgtgtttgtttgtgtttttagaaattgatcaga

SEQ ID NO: 39009 - DNA, 809 bp, Arabidopsis lyrata
  Intron number 1 from transcript 917002 (locus 917002) deri ved from phytozome v7.0 (chr-ID scaffold_8; pos 15856528 t o 15857336)
gtatctgaacaaaattggttatatcgtacattccggtgcgttctgcttggattaaaccattggttcagatcggacaaaaccgagttggcctatttcacacatctttaattcccttatacgtaacgtggcactgtcttctctcttccctattttaaaaccctaagccgacaaaaaaaaaaaaccctaagcacatctatttgtctaagacgaagacgtttgatctaccgtacattccggtgcgttctgcttcttctccttcttcttatttaactgctccttgatttgctgtcatcttcagattccttgaaagccctaaacctaattgttcaatcccttgcatgtgtgcttctcgatatctgttttatgtagagctgtcccaatttatgtgtgtccgaattttctactcatcaagattagttgaatgctagctagtgttttgtgttgattgcaagctatggctacctatttacgtctcatccaaacagtttctctgaaactagcttattcagtttttatattgtttttcatacagatttcgttgtctgaaaaagaaaacaaatggatggttccaaagggttgagtactgagcgattgaaggaagataggataagccagttacctgatcctttgatatgtcacattctttcccatcttcccacaaaagaagctgttaccacaagcgttttgtccaccaggtggaggagtctctggctttgggttcctaatttggaattggattcccgagatttctctgatttcaatgcctttgcgagttttggtgacaggtttttcgattctgatagggtgtc

SEQ ID NO: 39010 - DNA, 460 bp, Arabidopsis lyrata
  Intron number 1 from transcript 936001 (locus 936001) deri ved from phytozome v7.0 (chr-ID scaffold_5; pos 951565 to 952024 reverse strand)
cgaatctctctacctacaaagaacagctcgaacaggttcgttcgaatcgatttctttcttctctttgtttcaggattttgtatttgaattagaatttcgaattcttgaggattggtgaagagaaattgaatatgggtttctgaatttgagtcaagataagggttttgtgtgattggtcctgagttagggttcgtaagattggttttttagggattcgttgattggaggcttattcactatactaggtttttgaattctatttcaaagttttgagttttttcgtacctgctgcttgtgatgattttatgtttttcttactgattggagaatattgcttgtgaaattgaatgattaatggtataatgtgatcatgcacttgcttctcctctgggttttccgattgaattttgactctttggtatcaggttaggcagcttttgtcagaggaccctagaaactt

SEQ ID NO: 39011 - DNA, 823 bp, Arabidopsis lyrata
  Intron number 3 from transcript 355852 (locus 355852) deri ved from phytozome v7.0 (chr-ID scaffold_7; pos 21698300 t o 21699122 reverse strand)
caaaatctgatcagcctaatttaatctcagtgaaggtttaatttttgaatattgtactagttttattaggcatgggcattcggatttcaaatcggattcggatcggatatattcggattcggataattcgggtatgagagtttattatccgttcggattttatgaattttcggttcggtttcggttcggatatattcggattcggataatttgggtaggagaatttattatccgttcggattttatgagtcatcggttcggtttcggttcggataggtgtcggattcggatcggtttttgggaaaaaaaaacttaaaaatagttcaatgttaataaaaattggtttaatctcactaaaatttaattaaattttgcaaaaatatgtataattttaacaaatataactaaaattttttcgaaatctaggatatttagtatatttttgttatttgctataaaattacaactaaatagaactaatatttttggatatataatttttatttccggttttcggatatcctttcggttttcggttcggatcggattcggttcgggtaattcggataggagaattcattatccgttcggattttgtgactattcggttcgggttcggttccggatttttcggatcggtttcggatcggttttcggatttcgggttttatgcccaggcctaagttttatgttcaattaaactacttttttgttgttgttgttgttttgcaatttaagtcctcttctcattagagtcttgctaacacacttggctgttaaaaatttaggaagctgccgtaagaaaaaagacgctctttattga

SEQ ID NO: 39012 - DNA, 298 bp, Arabidopsis lyrata
  Intron number 2 from transcript 312863 (locus 312863) deri ved from phytozome v7.0 (chr-ID scaffold_1; pos 8142478 to 8142775 reverse strand)
cgatttggctttagagtctgctttagctaatcaaggtatatacatatctatgtatatttatataaaattagctgatcaagtcaagaaaatatagtaatagcaacaattgtcttacttactagtatatattatttcttttccgttggacttggaccattatggttctagttggcaacaatcaaacagttacttgcaagttaacaaaccgacagattaaatatatatcctaagtaagatgacccaatccaataacaaaatataatatttaaattttgcaggaggaggaaaagcttgcaca

SEQ ID NO: 39013 - DNA, 696 bp, Arabidopsis lyrata
  Intron number 1 from transcript 349225 (locus 349225) deri ved from phytozome v7.0 (chr-ID scaffold_5; pos 20427007 t o 20427702 reverse strand)
tctaccagatcggtaactttttcgtcaagtctaaagtaagttcagatggatttactcttttcatatgggtaatttctgccattttcgagtactaccgttttgctttagctctgactctcactcttttttatatctatgtaacgtggtagtttgttgttgagttcttctttcaaaaaaaaaaaaaatgtagtagtttgttttatttatcttgttctttgttattccgttttatgtaatatgagtgcaaacaaaatgttatgtactttcggtaatttttagctttattatcttgttctttgttattccgttttatgtaatatgagtgcaaacaaaatgttatgtactttcggtaatttctagctttattttttcacattatatattcacaccaacatcgacaaaactaatttattcttcactgataaaaagattatattgatcggatatataggatcccatatatatagagtccactagacagaaattaaaagatacaaagagaaaaaacaagccgatcaagatggatatatgatacactctcgtcttcaaaaaccagatctgaagcgaacaaggataattatcatgtagccacatacgattgaacccaaaatcacataaacacgaaaacctaatttattctactccttattttattctgtagacagaaatccaaaatatatcaaacggaaccaaaaa

SEQ ID NO: 39014 - DNA, 485 bp, Arabidopsis lyrata
  Intron number 1 from transcript 480564 (locus 480564) deri ved from phytozome v7.0 (chr-ID scaffold_3; pos 21535942 t o 21536426 reverse strand)
cctccgaattgtttctccacaggttggtttcttgattcgatttcagtcacagtgtttttttcttctctgtattctagggttttaattgtttcatcgattaggttatgattcttacaatttccccctcctggtttagggtttgaacagattagctttaatgttgaagtgaatttgcatcaaattaggaaattttcgttgaatccagttaagttcttgtttgcatcaacttatagtgtgaattttgttgtcataaggtggctgtgttatatagtttagcttcaaatttgcatcgaattaggtgtttatcattgaacccagttaagatttttattttcatcatcttaatgtttgattttattgttattatagttttgggatgtaatatcaacttatgcgtcttttgttattattcttcagtgctgtattggataactttatttgtgtttctgttggtttattttgcagttatcgtatcgcttggaagt

SEQ ID NO: 39015 - DNA, 751 bp, Arabidopsis lyrata
  Intron number 3 from transcript 940554 (locus 940554) deri ved from phytozome v7.0 (chr-ID scaffold_6; pos 4314169 to 4314919 reverse strand)
gtcttgctgacttgagcgctttggtgtaagtattgcccctttctcttctcttaaatgctttagttccttccagggcactgtcaaattcacatcaccttttcacattcttacataaactaaaaggaggaaccacattacaccatctataaagagcatgagttgtgtttcttcctaccttttattctgttcccactcataccattcttttgaattcctggatgttttggtagtcgttcaaaacatttaggaatgtttaaactcaagatgcaacaggcacatgcacagttgttccttttcaaagaaactttcttgagaaattctctcatgatattcgataaactgcatatttcttgttcttgattagtttttgacttgcaagttcacaatagatattatagaaatctcttgcaagtaatgtgttgctgaataatttaaactgcatatatatatatatatattgttctaaattagttcttcacttgcaatgttctcaatagtaatctcctgcaagtaatgtgtatagagatcagtaggattcccatgatgtataacaaaactgttaatacttgaccctttagttgctactaagcttgttaccttggtgctaaacaagtaaagaatcattcttagtttcatggtttgcgtaaaaactggtgagtgcgtgtgaatcataagggttttgtcaatgttcttgagatattctaacaaaatcctctggtcatttttgtgtgacccttttcattttgcagct

SEQ ID NO: 39016 - DNA, 476 bp, Arabidopsis lyrata
  Intron number 2 from transcript 940554 (locus 940554) deri ved from phytozome v7.0 (chr-ID scaffold_6; pos 4314981 to 4315456 reverse strand)
ggtaattattaattttgaatcactactctgtaacttgtgtatagctatagttactcattgttgactttgtttgtgattatgttgaggtttatctttgtggtaacgagatggatggttttaaattacgacttgctaggagggtcagattttagaaccagtgttataagctgatggatataatatgagtgatgagtctgctcggtaatataatggtgttagcatattgtattattagttccccggcccctgttttggttactaacttgtttactcaataactttgaggaagtagcaatgtgaaagataggtttcttaagttcattacctctcttctgagtgtaaattgaattaaggaagcttttttggttttagaagcaaaagtttttagcttgcaaccctgatcttttttcctcttctgctgaactgtctgcttctaaacaggtatttgcggcttatacgaaaggaagttgaaggaa

SEQ ID NO: 39017 - DNA, 520 bp, Arabidopsis lyrata
  Intron number 1 from transcript 330549 (locus 330549) deri ved from phytozome v7.0 (chr-ID scaffold_7; pos 23190238 t o 23190757 reverse strand)
ggtattgagatcaaaggtatgtgttactttttttattactctttttcattttgactaagtttaagaaggtacaatatctctcgctatatatatatatttatttttcttaatgagatctaataggtttatgagatttcggctatccaccatgatcaatatatggttttgataatataaatagtttgtttgtatggattttactttaatctttttcatattttatattgagaaatcatcaaaatagatttatttttaaattttgtttcttctaaaaaatacttttatccaatctaggtctcgaagcggaaatactatttattaatatcgttcattgtcacgaactatttttgtgtcgtgggactagtttatgtgacaaacaatattacactttctgtcttgtggacgaaattttggagagaggtaaaatgatactataatcgttactttatattaataatcttaataaatgtttgttttgtctcttgtagtacaaagggagatcaaaattctaaggttgttg

SEQ ID NO: 39018 - DNA, 699 bp, Arabidopsis lyrata
  Intron number 2 from transcript 484144 (locus 484144) deri ved from phytozome v7.0 (chr-ID scaffold_5; pos 779218 to 779916 reverse strand)
ataattacgacagcttcacttacaatctctgccaggtttcatttctaacactatctctaatcctcactacgcctgttaagattttttatgtgtgtttttgaatctgtttggtgtaaaagcagctgaattttcattttgtatgcattgtgattgattattagaatctcattatttcaaaatccaatctagtttctacatgctaatagataagactatgtaatgttgattctctcttgttaatgtgatcagagactttatgtcgcgccattgaatcttattgtcgaaaaactatagttctctggagaatagtgtttttcttttgttattatttggaaagctcctcgttctctggagtaatggttgatccaataaaatcgaatacatcacttctttgttgcttgtagtagaatctttaatcatgttcaaagtttgaattggtgattttatgagttgcaatttttgacattagattggttattcgtagtttgaatatctcgttttctcatgaaattttggctgctctaaatatctcacataacgcacatatatcccaaatatacgatttcatcatgtcttacttctagttctccatgcagaatcgtgtgaggtgcatactatatatcgtgattgttctcttgatatggtttcttctgctttagtataaacaaaattttgaattgttatatttttctacagtat

SEQ ID NO: 39019 - DNA, 849 bp, Arabidopsis lyrata
  Intron number 6 from transcript 473496 (locus 473496) deri ved from phytozome v7.0 (chr-ID scaffold_1; pos 15381314 t o 15382162)
ggagtgatatccgttcgtactcttatcctattacccactcagttgattgtagttgtattgatcccttaagttgtgcttgtggttggctattgttgatgcagttgttatgctattgctgaaagtcacatgatataaagtttggtaaagtggatcattaggttgtgttaggctacactgattttaggtttccaaattcattaggttaagccttcctttgaaagcatggatcattttcttttggatcatctctctttccgttagttagatcctgtgtgctgccgactcttcttctttgtctatttgctcttttatgactgcccatgaaaaattactatttactttaggttgtttagtttgactgcaagaaactcatcaaatcatttgtcactacctcactggtcaatgttttgctaccccgttgtgttttgatctgtttttggtacctctccaagcctatactgatcgcactgctgaatgaggggcgttagagttgagtagattataggaatttctataggcaatgtaatgcagaaggttccacacagtgactttcctataaaatgtctcttgttttgtatcgaatagaaatatgggagtgctgttagagaggtagcttatttttgttgacagttagaaattggatctttatatcatttactgaataatgagaaactttttagccggccttagtgggttgatgattttgatctgaagtgaatcatgttattttagactgattttattgtgtgactccagttatcttcatatatatcctcccgtggtttggagatgacttaaacctctggattgatatgcttttgtaggtggatttatcatcattattttgcc

SEQ ID NO: 39020 - DNA, 640 bp, Arabidopsis lyrata
  Intron number 1 from transcript 473182 (locus 473182) deri ved from phytozome v7.0 (chr-ID scaffold_1; pos 13130157 t o 13130796 reverse strand)
aattaacaggtttgatcttaaataggttgttgtagttcttgtggagttttggtggagatagagaaaaagctgttttctttccagaattttgacttgtattgatccgttttgtaatctctgtttggtgttgttgtaattgtttttgagtgtcacaagttttgaattgtactggatcttgttgctcttatctattggaaggtgcttcattttgtgtttctttcttgttatgttttaatttttgagctcatcacttttgcgatcacactgtatgattcttgacttgtaaaattgctagagaaatggaaataagtgttgttgttatctagaattttcaattgtggaaggagctgcatatatctagtactttacttctctcatttttgcatgagtagaagcctagagtaatgttggtgttttcattaagatgtgaacacagtgttttgaattctaaacggcaacagaaccgcaaagaaaccacaaataggatttgtgtataatatgcagatttctagtatcaagtggttcactaattggtaccttggtatgcgttcgtgttagaaaggttatggcttgtttgttttagtggcatttataatgcgtattggaattcttctacgcgtcactgccagttgtggaagtt

SEQ ID NO: 39021 - DNA, 306 bp, Arabidopsis lyrata
  Intron number 1 from transcript 916078 (locus 916078) deri ved from phytozome v7.0 (chr-ID scaffold_8; pos 6252900 to 6253205)
aatcccttatcaggttatcaaggatttcaaaatgtcaaaattcatgggttgatataagctaagcaaatttctccatcaattctttgattgtctaacattgtgtaaaagacaaaaaggatctgaataccatgtctcatactactagctttctttgagttgtcccgttgtatatgtttttctatcttttggggttaatgtagacataacataacagaaaagagcaaaatagaagacataacataaccttgactatcactttgtctcatattttatcactctagcttgtccagttctgacatcctctcg

SEQ ID NO: 39022 - DNA, 504 bp, Arabidopsis lyrata
  Intron number 3 from transcript 916078 (locus 916078) deri ved from phytozome v7.0 (chr-ID scaffold_8; pos 6253342 to 6253845)
gcacttaaatatatcagggagaatttgctaaacataggtaaagaagaaacaattacacaaacatttatggtaagaacgaaacaattcttcctctattaatcctgaattgctggttacaatcaagaacacaacaccaagccttagatacttgttcatgaattctcttactctcccactaaccaattggtccaaaaccgcctaatctattttccctctttcttattaaaactattctagtgccaatcacattctgtctgataatcaaatgactgagacacattttggtaagaaagcaagaagttttagtaccttgtggaagttaaacattaaatcaagctcacagacataaatcagagatatcagtaccttaccaccataaacgatattaaaagggggaaaaaaatatgagcattttaaagacttgtgataaaaaaaatataatttaatgtttttttatttcctcaacagaattcatactaaaattgattcaagatcggtcatatt

SEQ ID NO: 39023 - DNA, 600 bp, Arabidopsis lyrata
  Intron number 2 from transcript 494129 (locus 494129) deri ved from phytozome v7.0 (chr-ID scaffold_7; pos 23935669 t o 23936268 reverse strand)
cgaacttcgagatcgaagttaaacctgcggatacggtaatactgatttcttgaattcgaatcgtcttctctgtttcgttaactgtttattaggtttgatttggttccgtaattcgattttgcctttggggaaaaattcaggtgaattagcgaatctcgtagtatctgatttgaaattctaggtttcgtttgttttgtgttgataattgtttgtgacgattcgtgtttccgtttatgtgattggattcgaattcgaattagggtttttcgtgagttatgtaagtatagttatggcttcgtgttgttttcatcaagattcgttgctggaatctgattttacttctttaagattatgttagtgctaatcaatattagattcatagtagaagagtcattatatttgctaaaccttgaggcacttatggattatctgacgtaatgatataatattgtgaagttttcgttgttgtgacttatttttttcattgctagtctcatatcttcttgatagcctttagattaaggatgtctatatgatttagtatttgagttatgtgtgattgagaggcttattgacatttttggtgatctcaggtttctg

SEQ ID NO: 39024 - DNA, 858 bp, Arabidopsis lyrata
  Intron number 2 from transcript 891944 (locus 891944) deri ved from phytozome v7.0 (chr-ID scaffold_7; pos 24199059 t o 24199916)
tcataaccttttgcccgtaagtctccgtatatacctctcctctagtcactttcagctttaattttgagcatttaattatcctagttatattttctagaatgttaatagtggaaatattcaataattacaatgcgtgtggtgattatagttgtgtcaaaatacgtaacacaacccgatgcaactcatcacgctaatgagttcatgccatatgcctcatacccatgtttagaatatgatccaatgttatagaaatccataataccaaatatttttgtaaaaattggttgtctatatgtttaattttccatctagctttaagtcgtcaaaataatggtgtttaaacatttttcagcttgggtcaaatatgttaataatcgtttaggaaaagaaaaaaataattagtctggagtttaagcagtttaggaaatcaatatatttgtaaggaagccaattcaatatattaatagggaatttaaagatactaaacataaaacatactccctccgtttcataaaaagtatcgttttaaggttttatttttgtttcacaaagagtgtcgttttaggttttcaatgcaaaatttaatgatttttttatgttttatgaccattaatattctacagattgttttactattgggcagattatgtttaggtatatagttaatgatgtttttgtttagaaaaaacaaaaaatttaatgttttcttaatttgtgtgcaaaactctagaatgacactctttgtgaaacagaggaagtaatacagactaaaacattggtatttcttacaaactaatatgtaataatgtcacttgttggatagcaacgacataagctcagcgtctcaaccatccaagg

SEQ ID NO: 39025 - DNA, 570 bp, Arabidopsis lyrata
  Intron number 1 from transcript 948975 (locus 948975) deri ved from phytozome v7.0 (chr-ID scaffold_8; pos 5965527 to 5966096)
ccgacgccaccgtcctcggctctcctctcaaaacggtcagcttttagttttctctattagatctcgcctttaagtaaagtttctgtatggaccatttgaatttgcgttagtgatatctggagatttcttttgtttaagtaagattagtttacatatgaacacagatgactgttgtccaaaaaaaaaaaaatgaacacagatgactctgtctcaacaagtgatcaaattcttccaaaacaagaacaaatggactgataaagctttgtcagaagctatctacttgacccatattggctctgatgattattgggttttatagttttggttgattggtttctagagcttgtgcttttgcttcccttgttgctgcatcttctgttacaatttctctttcgtttttcatattgaatcttcttgttgctgcatcttctgttagtgtgtaagctgatgttcttctctttatttggtttatagttagttttcgttttggtttcttttattgactctaagactgaatttggttcctttaaacaacctgacatagtcaaaatgaatggttgctgatagcag

SEQ ID NO: 39026 - DNA, 465 bp, Arabidopsis lyrata
  Intron number 3 from transcript 478800 (locus 478800) deri ved from phytozome v7.0 (chr-ID scaffold_3; pos 5738258 to 5738722)
gcttctcgtatcatcaatcattccaaaaaggtttctctttctcaaattttcatttttttgtatggctttactaccatttttgatctttttagttctttgatctttgtaaaactgagtttatgcattcgtttttatgtgatttgctctgccaatcaaattttttttctgaaatgagtttcgtgttccggttttgacttgatctaattatgcattaagtcacgcaaatttggtattttaatttatttaatcatgggcaattctgcagttgccattgagagctttagtgacctccttgtgattaatgttagtagcttcgctttatgattggcaattctggtatcagctatatgttcattttattagtacaagaagactctactttttacagcagagtaattgtatgttgtttaaatatatttgtaacactattttgacggttcttgtgtgtttctgaccagttgaaac

SEQ ID NO: 39027 - DNA, 360 bp, Arabidopsis lyrata
  Intron number 4 from transcript 478800 (locus 478800) deri ved from phytozome v7.0 (chr-ID scaffold_3; pos 5738775 to 5739134)
caacagtacccagccctctctcattggaaaagaaggtaattcagatagcttttactgtcctcgtcattgctatccttacagttcattttatataggaatgtatccagctgtgtagttgtttcttttatttgatatggtaacaagcaccccacagtactcggggctgaatagttcaagtttgactttcacatcgttttccctcgatctctgtatcatgaagaacataataataacgttcctgctttaaataattgaaagttgataggttttgagtatatgttatgcttctcgcttaagcattttctttattttttttggtcttcagatatcttcaaggcccgcctgaattattcctctgta

SEQ ID NO: 39028 - DNA, 816 bp, Arabidopsis lyrata
  Intron number 2 from transcript 478462 (locus 478462) deri ved from phytozome v7.0 (chr-ID scaffold_3; pos 4502427 to 4503242)
ttgtctctaaggtttgaatctgacatgtttttactttagctgctaaatcttttaatctgggttattgcgatttatctcttttgatgatctgatcatcatcatcatcatatggggtctcttttcactaggattgtgtgtttgatgattgcatagattagatgatctaatttgattgagaaaatcatatgctttttgatgatatctggaatctagatgatcatatctctcaatattggatacatatatcatgatttgctaaaaaaggagctagaattggggatagttttatttggagactgtcctgcattctcattagatcaatccatgcttcaaacattgctagactctttctcagtgatcttgagttctcagtgatattgcattgtgattagatgctaaatgcagtcgattattctaagttcttatggttcagacattgttactctctgtctcctcttataatggtgaaaagatttggaatatctcttagtatctgtggcatatagaagatactaaagacattccttcattctctttgcgtatattgatttaattggtggttaagctgtggctaatttggatttagttttggttagatgctatatgcagttgattagtgcttatggttcaagacattgtaacactctctcctcttttgatttgtagtctgtggtgttggttggtttttttacatggcttcacaatgtcattttgttattactctcattggcttcacagtgtcttagaattgtggcatgtggaagatactgacaacatcttgtttgcctatttttttacagtcttttcaatcccgac

SEQ ID NO: 39029 - DNA, 599 bp, Arabidopsis lyrata
  Intron number 2 from transcript 899144 (locus 899144) deri ved from phytozome v7.0 (chr-ID scaffold_5; pos 20428056 t o 20428654 reverse strand)
aagagagagagagagagagagagagagagagagaagttgggatgaccgattttaagatttcagtgggtattctcgttatcattttacatattttagaaacaagccacgctaaaaggtttaaaaaaacattaagccaaaattgtaatatataatatatttgggtttcagggtttgacttgcacaaaactttacttacaagttgggctttttaaagcctttttctccgcttgggctttttaataataatattgcgaataaagaagaacaaacagttccaccgtgctaatcaggaaattaaccgatctcctagaactctctttttttgtctcatatgttctgtacggaaaagccttggaggttactcaaagggtagaattggaaattaaccgagctcctagaactctcttttttttgtctcatatattctgtacggaaaatccttggaggttactcaaagggtagaattggaaattcagggagtgtttttcaatgaccaaattaccctcatttgaaacgcttttataaataagcaaacaaacccagatcgtctcagaaaactgtgagagagagaaaaagagtgggtgggagaggaaaaagag

SEQ ID NO: 39030 - DNA, 636 bp, Arabidopsis lyrata
  Intron number 1 from transcript 899144 (locus 899144) deri ved from phytozome v7.0 (chr-ID scaffold_5; pos 20428651 t o 20429286 reverse strand)
aaaagagtgggtgggagaggaaaaagagagagagaaaaaaaaaatggatggagatggagtagatcgggaaagagaagttgggatgaccgattttaagatttcagtgggtattctcgttatcattttacatattttagaaacaagccacgctaaaaggtttaaaaaaacattaagccaaaattgtcatatataatatatttggatttcagggtttgacttgcacaaaactttacttacaagttgggctttttaaagcctttttctccgcttaggctttttaataataatattacgaataaagaagaacaaacagttccaccgtgctaatcaagaaattaaccgagctcctagaactctctttttttgtctcatttgttctgtacggaaaagccttggaggttactcaaagggtagaattggaaattaaccgagctcctagaactctctttttttgtctcatatattctgtacggaaaagccttggaggttactcaaagggtagaattggaaattcagggagtgtttttcaatgatcaaattaccctaatttgaaacgcttttataaataagcaaacaaacctagatcgtctcagaaagctgtgagagagagaaaaagagtgggtgggagaggaaaga

SEQ ID NO: 39031 - DNA, 524 bp, Arabidopsis lyrata
  Intron number 1 from transcript 913238 (locus 913238) deri ved from phytozome v7.0 (chr-ID scaffold_1; pos 15957129 t o 15957652)
cccgggtatgtatgttcctctacattccggtttggtttcttgtgcaataattcaccaaattcatttgattagatacattatgttgtgtctgaatagagtgttgggtctgaatttgaccatgagaagatagtacaaacgacctttgatttgtgtttttttgggagattctttttttgattgatgttgaaccgggaattagcaatagtgttattaccggtttagttgtgtatcaactgagtaacaaggaacatttaaatgctcttgttggacttcatcaccatgacttgggtctgtctatcatcaataaggatctttgattgtggtttgcttagaagtttttggttttggggtccgggaaataccaatagaggtatgcccggtttagctatgaaccgattaagatgctcttgatggacattgttttaactttattcatcaatcatcatcatgattctggtttatttatttttcaattgcattttatgactattgatcagactttatcggcggcggatctacgtgac

SEQ ID NO: 39032 - DNA, 414 bp, Arabidopsis lyrata
  Intron number 2 from transcript 492046 (locus 492046) deri ved from phytozome v7.0 (chr-ID scaffold_7; pos 6197585 to 6197998)
aaaattaagaatcaggttttttttgttatgctcatgctaatgctaatcatatttttacgttatttgatttcttacgaatagaaacatgtaagtaggtttcattatccttagacagctctagatttgtcttttcgatcttttttattattgtaagatcggctcatactttgtgatcacgacgattcatcaaatcctctgtttttcttcctcttcaattattcgacttgtatcaatttttattttacttttgcatgctcggaatcaaagatcaaatttaggttggttttcatacacgtgagaaaaataactttgtttggtcgttgaattcaatgatcatcaatacatgtatagatctctgatagtgtgtcaactgtggcgtaggttaggcgcaacctcaatttgtgaagatcttgc

SEQ ID NO: 39033 - DNA, 827 bp, Arabidopsis lyrata
  Intron number 1 from transcript 317879 (locus 317879) deri ved from phytozome v7.0 (chr-ID scaffold_3; pos 4342859 to 4343685 reverse strand)
cggaaaaatccattgtggcatctttggccgttcaggtcctctggtttggcctcaaaccacaatggattacctttatattgagatgcttttgaatcaatcccataatgtagtatacaaatgtcattttattttatctaaaattgttggtttttcaatattttggcatgtacaaagggggttttgtagcttactaggatttgtagtcttatgtactaatgtataaaatattgtttatcagcctttgatcatttcttgtttataatgttattttcttctatccaatttatccattcggtcacggttgtttgaactcttgtgtcggtggtcttacccaaaacaaccaaccatatttttattttatttaaaatttccaaggtgtataaaaattgtaattatcataattaatactaaatataaggaaaatgatagtgaagttaagaaagtatatatgtggaaattaaattcagttgagaaaaaatagaaaaccctttcagaaacccaatccttttttttattgtctcatttatgaagagaaaaaaaaatacatatttataatcggaaatcggaaaaattcacttcactctcttcgatttgcgttttgttgtgtgtttttaaaatcaagctttgttttgggtaaggaattaagaacaaaaacctcgatttcgatttccaaagctccaaaattcgaaggtgaaatttcttcatcttctgtgaaatttgttagctctttcgttctcaatctggtgaaattagggcttttgttgagctgaggaagctaatgatgggtgtacccaccgctgaggaaggtggggtttctctttgttgct

SEQ ID NO: 39034 - DNA, 577 bp, Arabidopsis lyrata
  Intron number 1 from transcript 482417 (locus 482417) deri ved from phytozome v7.0 (chr-ID scaffold_4; pos 16365275 t o 16365851)
acagccgttttccggcacacccctgcaattttcaggtatgacaatatgaacccaaaaaactaaacgtttctttcgtctttcacaagttgttttaaacaaaaacagagcaatatgatcttgatcattctctttttgttttctttttccgatatatttaatgtttactaattagaagatgaaaacataataaaaaaaaactcgaaaactatagttttctacgtcaatcatttccggaaaaccccatgaattcagagttaccatgtttaacggcgagaaacatgggattgtctgtttttttctccgatgaataaggcttaaatcaatccagaatttgatcaatgatttttaaaaagatttcatacttggaaaattttcagtttattctacaagaaataactcaaaaatctaaaaacaatctaaatttagtttcagtgttgacatgtccttaaacctttaacccaaaagaaaaatgtcctttaaccgaaaatacaaaataaaataaaataaaaacagagatccctgttctgttctttaacaaacatatttgaattgtaacagagaggcagtggaagagtac

SEQ ID NO: 39035 - DNA, 378 bp, Arabidopsis lyrata
  Intron number 4 from transcript 482876 (locus 482876) deri ved from phytozome v7.0 (chr-ID scaffold_4; pos 18755564 t o 18755941)
ggattcttgtgcaacttcctttaccccaagtatgtttctcatttttcgttgtgtaatatgaaaaacgacattgtgatgggggatgttagttttgttgatgtcaaagattagttctctgttaggaggtcaagtagttatttacttttgccttcatacttttttgtagaattgtttgattcatatatttttcatcgatcaaggactctatggtaggtaaagcatctaatttacagattatgcgctagagcatctgaatcatcttacttgtggagatcttttttcaggagaaccttcttgtattttgttggtttactttcttttttatttctttctcatgagtactatcatttaatggaagatatcttgtacagcatcttg

SEQ ID NO: 39036 - DNA, 455 bp, Arabidopsis lyrata
  Intron number 3 from transcript 329709 (locus 329709) deri ved from phytozome v7.0 (chr-ID scaffold_7; pos 10956055 t o 10956509)
aactactgcacagaagctaggaaagtttcctagaggtcgcaaaaagcacaggcacgttttatttcaaccatgacactacttttttgttgaatccactagaatgtgtaagtgaaaggaggctatgagtgagtcatttgattttaggatctggtgtttgttccctggagattgtttctagttgtcagctaaagaatattatagaagattgttctcttgtgaacttccatttgttttcacattgcggttttttgtcatatacagaatcagatatgggattaatttggggcttcttgcttttttgtcactgctgcttctactgatggactcttttgcttggaagattgttagactgcctttgcctctatatttcttaagcctgcccttcttcacatcggcgattctagttaccttagccggttatatttttgtaccgcttctagacagactgaaagtgc

SEQ ID NO: 39037 - DNA, 524 bp, Arabidopsis lyrata
  Intron number 2 from transcript 897523 (locus 897523) deri ved from phytozome v7.0 (chr-ID scaffold_5; pos 12884686 t o 12885209)
aagagctctcctcctctggcctcctctcctctcaggtaaaaattctcaattaattagcgattaatttttgtagctgtgtggttctgttgatttgttctttgtttattgttgaaaccactctctatagagatgctcagtgaagaagacatagagatcaattgattctatgattttgagattttgagattttgatttgtgtgttcagtgatcttgaattgagtctgctgagaaaattggtctcattttgatgtaaatgttgaattttggttgttaagtctcatatgaggtcacaaatgtcatcaacatgacaacatgatgtgctaagatcagatttttcctttgaaatgagaattcttttggtataaagaggatccaatgatggataacgaatttggggttgtatatatcttttgtgtagaactagaacaagggttgaaacattgagttttactatatgttaaagactgttcgttgttaagtgattagcatatctgtattggtgtagctgaaggagcttgttaacc

SEQ ID NO: 39038 - DNA, 791 bp, Arabidopsis lyrata
  Intron number 2 from transcript 896857 (locus 896857) deri ved from phytozome v7.0 (chr-ID scaffold_5; pos 5405770 to 5406560)
atttgcacaggaagaggaaaaagagtttgtgactggtaagagattttttaatgttagacagttttagattataaaaaccttactgaactcttttttatcttaatatcatgtccttagatgctattggtgttgtcaaggctgtgactaccatcaaacggtttccttatgtctgtcagaatggagggacagattatgagtcaagatatgtggctttcaagttagtggactatgagtaagtttgacttcaattaagtttgtaaaatccattgttgttattttcatatcatttgaaattctttttttacataaaagttttgttcaaacatactataggggtttggagatcaagtgctgtgctgttggtaggtgctgtgagttgtttgtaaacaaatatgctcaacagattagtaagattacttacaactaccaacctatagtcgctgttctccgaggttggagaatcacagaggtttttggtaagtttttctatacaactttcatgaggataatttgttttgtctatagttcaagggttatgatattaagcagaagaacaagaatatgaagtagttgacatccaacaatgttttgtctttttggagttgtgtttttaataagtggtttaaggcaacagtttcaacatttgcttctgtttttttaaatccgggaaatttgttttgttctattggttttgttttggttttccttacagttcatatctattgtttgtgtttgtgtttgtgtttttatataaaggtatcaagttagcggttttattcagtctaaaagag

SEQ ID NO: 39039 - DNA, 422 bp, Arabidopsis lyrata
  Intron number 1 from transcript 928915 (locus 928915) deri ved from phytozome v7.0 (chr-ID scaffold_3; pos 4813822 to 4814243 reverse strand)
ttgtttcaaccaattatagaaaaatctcgatccaggtatggtttcattctaggtttctctttcgttgacaagcatattagccgttgcttttatgtgaactaagagattcctaaatatcaaattcttggtttactttatctggaactgggcagctcagaaagttcaaatcttttggccatctatctgctccaattagaaaaatgtcttctttaagggatcattgatattgaggtccaatagtattactaggattggaaatggtgaatgtttctggtagaatctggaaattttattctcttgaacaacatcttatgttgcttctctaagagttgctcagtaatcatgtaattctatcattcagttttgatttacagtgtttgcgcgttttgcaatgtcactcacaaaagtatactctatcaggc

SEQ ID NO: 39040 - DNA, 336 bp, Arabidopsis lyrata
  Intron number 4 from transcript 471988 (locus 471988) deri ved from phytozome v7.0 (chr-ID scaffold_1; pos 7468961 to 7469296 reverse strand)
cttaactatatcggtatcgtttctcttccgcagtttggttctattttctttgtttttgactttaatcttgtctcatacatagagggaatttttcgcttatgagaaatggatagagttatgattttgatcaattttatgcttaatgttgttgctaattgtaaatatttgtgcaagttactatccatcagcaatagcaagcacatgcttatgttttgcatctatttagagctctagtttctctttatcatgccaacacataacataacttgggttttactgatggttgtttatttcgatgtatgaatctccagggacagacatagcatctgggcctat

SEQ ID NO: 39041 - DNA, 561 bp, Arabidopsis lyrata
  Intron number 1 from transcript 891303 (locus 891303) deri ved from phytozome v7.0 (chr-ID scaffold_7; pos 19938111 t o 19938671 reverse strand)
actaaagattcaagtatgtgactgccttatctccatcagtgcttcatcttctaagttcaggtaatctccctttaataaggtttaggttacgtttgcaatctttttttgaatcccaaattatttggttgaaatttgatcaagctgatgccaatggttttacatttccgttttaccttaaaaatcagggcttttgatggaatcaattacatcaaaattgaaaatttaacaaaatgcaggacagttcaatgctagaccttttggctttgattcattatcaaaggagtgaaagtgggatttattgtttgttagaacttatattttgttttggttttggttttatgtgtgttcgtcaagtaacttaattcaaggtttttcttactccaatttatctaaattcagggcctttgatggaataaactacatcaaaatcgaagatttgttaaaatgcaagacggttcattgttcaatgcaagacctttttgctttcattcgtaaagaaggagtgaaagtgtttggctttatttaattttgattttggtttatgtgtgttcttcctcaggt

SEQ ID NO: 39042 - DNA, 820 bp, Arabidopsis lyrata
  Intron number 1 from transcript 359290 (locus 359290) deri ved from phytozome v7.0 (chr-ID scaffold_92; pos 35001 to 35820 reverse strand)
ggggaagtcaaataggcaaatggcagctggattgccgcttaccaacctatagaagaagcctttttattttattttattctgtgttacacccgcttgcttgcttatatgatatcaatcaaataccttaataaagaacgcgttatttcttatttttttttccatttgtattcatatcattatttcaccatttaatctatagccttagcctttaaggtacggtttcaaatagaaactcaaatgaattttcctcttcttgaacttctatagaagcttcgtgtgatttatgtaaaattatgtttagttttaattaaaaaattgacagtcaatgctattacacaatatttaatgttgctgaaataggtggtactcgaaacgtaagaaaaattgatgaggtgaggaaaagcgttggaaggaaaatttgggggtgagaatttttggcgtagaagagacgtacattatggaagtagagagactaagtgtcagctatttgagaaatcacctatagctatctcaaaactaaccccacacctaaacttgcatcatctcaacattttcctcctacctactctctaactcttgatttgtgtcttacatggtccactctttccactattgaacttccaagagactaagagcatgattatcggtgggatgttaagtgaatcttaggtttttaaatgatttaaattaaattgataatgctgcttttaactaaggaacgttttcagtgttaaaaggtgtcaggtgtcgcgttttctctctctcttcgcgatttccccacacagagaaaaacaggagaagaaattgtcgacgttgtcgg

SEQ ID NO: 39043 - DNA, 661 bp, Arabidopsis lyrata
  Intron number 1 from transcript 493573 (locus 493573) deri ved from phytozome v7.0 (chr-ID scaffold_7; pos 17817548 t o 17818208 reverse strand)
ttttcaatatctacttcaacatctacaataaacaggtacaagcctttccttcttttgcttattgtatctgtccccaatgttttcgttttctctacatgcttagtctagtccactgttttctctgttttgaatcaatggagaactcagaaatttgattatagcttatagttataggatactgttgagagattcgtctcgctgattcccaaaattttagttttcattgtgttttggcaaattgttataagttcatcattttgatatattgaagtaaccttaatgatttagattcatctttgtgttcaattgtgttttgattagctttgattagaatgaagaattcagaaatttgtgatatcttacagtcataggatactgtagaaagattcatcccgttgattctgaaaattttcgtgttttcgctaattgtgataagttcataattctgatatatggaactaactttctcagaatgtaaaggtttagattcatctttgtgttcaatcatgttttgattatgatgaagaattcagaaatttgattatatcttatacaggagagagatgtgtttcgctgattttattgcttgattttgagagaaccaatagttgtttcttgtttcttcttattcttgcaggttttgaaagctctacacgctcca

SEQ ID NO: 39044 - DNA, 918 bp, Arabidopsis lyrata
  Intron number 1 from transcript 476486 (locus 476486) deri ved from phytozome v7.0 (chr-ID scaffold_2; pos 15863895 t o 15864812 reverse strand)
tcagtggtaagtttgttcccttccttgtttcagttttgttatatgtttatgtttccaattcttcatcttgcatatcccaattcgtgaatgatgcttatgtagtggatatttttggttatgcgatgtgattcttcactgtttcttcgagtaatataccattagaggtagtttttttacagtggatacattgatagttactataagcttaggatatctccaaaatattcggagcagtcacattttgtgttcaccaattatgtagttaacaatgttagatgttaaaacttccgttatatagattttattgttagagagaatggaatgatatatttgtttgtggggttatagagccttgtggaatagcctcactagttgttttggagagattctctcggtgaggaatgtctctgtttggttactttcaggaatagcatggactggatattattgggtattgttacatcgttgtaatggtaacgaagacattgtcggatttgttgtaaaggcagggaatgattttggttggtgtatggtgggtgtgacttctgatgaactgaggagatagatatctttctgctggtgtatactgtctataagcttgttttctatgtaaagggattggtgcaagttgaattgtggtgaattagacgctccttagacatggccaaaagagaaagcagtgttaatgctcttctatggtttttttgttttgttttacttttcagctttctgcaacctttttgatacctcttcgtctctgctttgaccatatgagacttgattctaataaaatggctaagggtttgattggtattgacttggttttgatggtgtggattaagggtttgattgatatcgacttgattttggtggtttttcacagggctttcttttcgcacaacggaagataccttacgg

SEQ ID NO: 39045 - DNA, 578 bp, Arabidopsis lyrata
  Intron number 1 from transcript 472269 (locus 472269) deri ved from phytozome v7.0 (chr-ID scaffold_1; pos 8733863 to 8734440 reverse strand)
ttttccaagtatttactcttataccaaattctccttctttgtttttctctcctctataaaatataattcaaaaaattaccgactaattttattactgttggaaactatatattacaaattttcattttacactatatactatttcttaaaattggaaaagttggtggtgtgcacgtacgtgcttttgttttccttcatttcaaaatttattaccgtatttggtggatcgatctaatatacccccgagttttagtatattttatctcaagattttataaatactcttagcaaaataagattatataaatacatagtggtatattacgaatatataaagcgtgaaatgttgtttttttgtttgcattttactttataacttatatgtgtattaaactgacttaagatgtttagattatagacctattgggagaaaaaaatatatacaaaatataagacaacgcatataaactagtattgcttttaacttttaactttgccataagaaaatgttaataattgccaaaaaaagaagaagttaatatattaacggcgtctgacaacaacaggtcaaagacgtc

SEQ ID NO: 39046 - DNA, 713 bp, Arabidopsis lyrata
  Intron number 4 from transcript 489930 (locus 489930) deri ved from phytozome v7.0 (chr-ID scaffold_6; pos 20618745 t o 20619457 reverse strand)
gcaaagaacttcctacttctaaaggtacttacttgaaagctaagagagcttagttctaaaacaatttgtttcggaaggaagacattgtagaaccaaattcttcaatttgtgtgtccaaatgcttcttccatttgtgtgtttatgtgaaaatgtttctttcaagttccacttttgagttgcatcaaagtccttcgtgttcataatctcgaaatttgaagtctatgtggattaagagttgctagtgtggtagtgttgtgggtgtgttaagttccattctagtactaaaaagctttgctgattagaaaccattttggttgaaatgttttcattagtattttcttttcttggaaaattgagagttatatgacttggaacaattcttcagttgatttttatcgtaatttagtctaacctcacgcttcctaaacttgctttggatacatctttagtctcttcttttttttttcaaaccatttttatatttttcaagtatttgaatttgtggtaagtcctgatatagattttgttttatctatatgaattgtaatgtggttttgaatatagttcatcttttcttctctgtagcaagtttatctaccattaaaaatgtcaaatcattgttttcaaaatcaacaattgtgagagaaatttttttttcttcatttccagtctctgagatgttataatgttctcttcaggaataagcttaacag

SEQ ID NO: 39047 - DNA, 607 bp, Arabidopsis lyrata
  Intron number 1 from transcript 473369 (locus 473369) deri ved from phytozome v7.0 (chr-ID scaffold_1; pos 14425279 t o 14425885 reverse strand)
ggtttgaaggtacgttaagatccatatgcaccaaaccgatctcggtttcggtttctttctcggatctagttttgttttgtctttcgtaatcgaccgtgttgagtttgttgtgatcacgaatcctgatttcttcgattgatttctagattttctgtgttagtagacttgtttgatccagattgggaaaattgattttgtaccatatttctaggactatatgttccttattgatatcctgttaacgattagaaagagtttaggtaaagtaaaaaaacaaaaattcaattacgaaattgaagcttgtatagtcaagagtgatcactttatggaattgaattatactgatcaagctttttctctgtatgatcttgtccatttactgttcttgtttgcagatgggtaatatacatttgaatctgagttaggtttggttttgtgtttttagttgagtttgatttgaagtctcgttgcagttattgtatcttattgagaaatttgagtaataatatgtttgatggtgttttagtcaattaagaatctttctcctgatttgttgatttatatatctgcaggaggaattcgaggagcacgctgagaaagtgaatac

SEQ ID NO: 39048 - DNA, 714 bp, Arabidopsis lyrata
  Intron number 1 from transcript 350449 (locus 350449) deri ved from phytozome v7.0 (chr-ID scaffold_6; pos 5151132 to 5151845)
actccggcgaaaccaagtatttctccattgattttgacctcgactgatataatttggggattcttaagttaattttcccgccattcacttctgggttttaagtcccccataaactactccaaataaagccggtctaccaaattattatggaccgaatttataagcccaaataataaaggcccattggaaaactatgactacttgagtttatttctcttgtagaggatattcgtttccttgacttccaagctttagatctcgaattctttacgacctcacgcggcagttctccgtgtaccttcccggctgaggtacggttgttcttatcaacttctttttcagtagattcggtagttttgttttgttgggggagattgcataagccaataattttaggtcaataaaaaacaaaaatgaaattcggagaatctgattttgacgttcttaatgatttgatattcatggttttttcaaaatttatctacaatctgactttcatgtttattatatatatatatatatatatatatattttcccctatctatcttgtagaaaaaaatgtccagtccgatgcagaatgatttgcatttggagaaagacaattcaaatcaagctccggctgatgtagcaatcgttgcaccacctccagagatgagaattcatatcgataaaatagcacgtgtgggaaagggttgaggatagagagaaggatc

SEQ ID NO: 39049 - DNA, 499 bp, Arabidopsis lyrata
  Intron number 1 from transcript 476651 (locus 476651) deri ved from phytozome v7.0 (chr-ID scaffold_2; pos 16556580 t o 16557078 reverse strand)
atttcttcaagtccggatcattgaaggtaaacttagatcttatactataatcatatacattttttttttttttttttgaaattttgtggtctagagcttcagagttttgttctgaattagaagatgtgctgtggaagctaacaattacagcatttgagctgatttatatggggaatgctggaatccctttcatggtgtggggtttgctggatattataattcaaaaatattgatgaatgaagtttgaatactatagctgaatttagaactatgtttggcgggagatgggtttgaaaatttgatgatttaagtctcttactgagtccgtttttttttgagaattcataaccttcatctatttttgagtaagaagaagtatatattgcatgtgtcatcatcatcatcatcttggatcttactcaagactgacatcaaaaccaaagtttaaatggtgaatttcatcctttctctgtttatcttttcaggttgcatcggcttc

SEQ ID NO: 39050 - DNA, 286 bp, Arabidopsis lyrata
  Intron number 1 from transcript 493259 (locus 493259) deri ved from phytozome v7.0 (chr-ID scaffold_7; pos 12230135 t o 12230420)
aaattttgtcgtgagtaaatacgaatctcttcgttttttgtttggggtcaaaacgaatctgttctttgctcttttatacttatcttctgaaattgaaatacgagattgtacccagttcttctaagtctctaattgtcggaattttagttttggttggtttgcttatgttatctattcgattaaagctccaatttttctctacttttgatttttttttttttttttttttgtttgtttcctgtaatgttcagtaataacattctatatcctaaggaagacaaggagc

SEQ ID NO: 39051 - DNA, 742 bp, Arabidopsis lyrata
  Intron number 2 from transcript 493259 (locus 493259) deri ved from phytozome v7.0 (chr-ID scaffold_7; pos 12230439 t o 12231180)
cgtgtcgtaattgtgatcaccaggtaaactttgtttaatactatgctttctttcataaaattagggttccttagtgttaatgacatgatgttgtgttgaattaaagttagggctgaaaccaatagactttagttgttctcacttgtagagattctgttgatatttgttttaagctttgataaaaatgatgtaatctcttatagggttaagagtggaatgtctaaacttgaaattaaaccgaggaatgagaatttaacgagtttagatccaccatccagctcattgtccttatctctcagaccatgaatctgaatagttaagatagtgcttatcagtgaagagttctttgagaacttctgaacatatacaagaccttttagaaactctcaaaagtttttgcgactaagttgcaaaaaccatttgagtttcaacaatatatattgggtgcacaagcttttcttgttatgcaacttgttaccgtttctgtgtttttttgtttgtagtgtttgtgttatgtttgtatttacaatcatcaagcctttgctagctactggaaaccactctatatgaatctgcatctttagcttaatgtcggacatgctaaccgaattagttatcaacttaatgttagctggatttactgtcctgttactatgaatttggataatatgacaattcatattcttttcgagcatttggctttgcaggaagcagcggataacaactgtgtttacagaaacga

SEQ ID NO: 39052 - DNA, 712 bp, Arabidopsis lyrata
  Intron number 2 from transcript 470311 (locus 470311) deri ved from phytozome v7.0 (chr-ID scaffold_1; pos 981158 to 981869 reverse strand)
ctagggttgttgaccaggacaaataccctcacgtaaattttctttcttttaagcgatttctcccaagaattgggaatttagggtttattggagcagcccatgattttcttgttcacttaggcaatcttttctttgttttgtgtgcttgaattgttctttagtggtttatatttctgtttgacattatcttgagatagataaccactggacttgatctcactcgctagtttcttgttgtttcgtattgtaaaatatcacttatgaactgatgaattcgaaagcttaatgcttggctcttgcagatgtctttaagccatcactctttctttttttccccacttacatttgctccaagcttgaaaagctttaaggtgatattgattagatttacaatcgcaaagggatgatttgaagtgataagtggttctgattgacatatttgattgagattgctgcttgtgtactgcaatttgtcaagtttactcagaattacaatagatttgcaatatgtttgcagaaccaatttcaatgcttttagctttcattttggtatttctttggcactgtacttatttatcttgtcacactttaagaatcttgtcaaattgtaccgatttcgctagaatcttcccgatgatgtttttagcttacatatttgtgtgtgttgtcttgtgtagctttcagtgagaaactgtttcatcagaggatcagt

SEQ ID NO: 39053 - DNA, 311 bp, Arabidopsis lyrata
  Intron number 1 from transcript 470311 (locus 470311) deri ved from phytozome v7.0 (chr-ID scaffold_1; pos 981962 to 982272 reverse strand)
ttgcgagaggaagaaatcagcagagaaaaaaagtaaatttgaatactttcttcgtctttcctgaacttgagtgttggcaattgttttgtttgacctagaaaagttttcttctttcttcgtaattattcgtgggtgtgtttctcttttagccaatggttctagggttcttggagatttcgggtttttggtttccgatgatgatttaggtttttggtttccgatgatgatttagggtttctcgtaatgggttttgattgtgtttgttctctggtgcagttgttcttttcttacttcaaggatttggttggaca

SEQ ID NO: 39054 - DNA, 710 bp, Arabidopsis lyrata
  Intron number 3 from transcript 483796 (locus 483796) deri ved from phytozome v7.0 (chr-ID scaffold_4; pos 22524849 t o 22525558)
tttggattaaatctcgaatttaaggtgaaaccaccttggatcttctccatgatctttgtcgtggacatttttttttttaaagcttagtagattctctaatatttaattagagagcatctatctgttcgtgtagatatatatttattcagctttattgttagataatgattaattattgcacacaatattattgaattttcctgttgcttttcccggctagaatttcagctatactcttcttgctagatctgttagatttcttttattcctgaattccagaaatggtgaaagtttctggagttggattcatttattttacattgaatgtgtttttttttttttttttgatttagatgcagacaggaccatgttgtgttttggattacttgagatttactatctgaatagttcatcgtactgatttttttgtgaacttctttgatagagttaataagaggattgatgatgaactattcttgttttgtgtgtatggtaactttatgaattaattatttattacttagattctgcagttgtgtcttcttgattcctaaataaataaataatgttaaagacttcacttttcatgcttcctatcattagcaatgtcaaagatgcttccttttttttaaaatcatttttcttcttacctgctgaattaacaatttatgtatatccaggttttgtatttggtcaacaacatcagaaac

SEQ ID NO: 39055 - DNA, 519 bp, Arabidopsis lyrata
  Intron number 2 from transcript 478335 (locus 478335) deri ved from phytozome v7.0 (chr-ID scaffold_3; pos 4019335 to 4019853 reverse strand)
cttcctccccaagtacccaatctcctgttgcccaagtatgtatatttgatccttctggcctctgtaccttgaaaattaggaactccagctttgtgactcattgttaacaataaaatttgccttgtatgatttgggaatcattgttcacctcattagctcaaaacttgtgaagtactaagatacaaagtttctgtatgacttaatagcaaattttcactactttctttgatttgctaattactcaaatgttcggatggctggatagagctttaggtgaatgttacatgctcatacaaatacatcagagcttcctttatatagtaactttgagccacctaaccttgcatatctgtgttttgtaagctgaattggttacttgaccaacatcaatttgcttttcttgtaactctttcctcattgtaattttgagtttgtttgacaaaactcttcatgaactttgtttgcacactttaattctttatatttttattttggcagaactttcaaggacatagcctt

SEQ ID NO: 39056 - DNA, 637 bp, Arabidopsis lyrata
  Intron number 1 from transcript 475389 (locus 475389) deri ved from phytozome v7.0 (chr-ID scaffold_2; pos 4124591 to 4125227)
ttgctggttctgctcttgcttatactcttggcaaggtcagttttatttgatttgattgcttatggatacgaattaggtggtgataggttttgtgatttgattctggatttgaaattttagagaatgagtgatgaatcattgttaagcgattttttcggttctccgattgtgtattgaatccagttttggtttcgtggaattgatgattctgaaaacaagttgtttcacacaatgcacgagttcttgtgatttactagtatggtcaacgaacactgtttgagatttactcttctggagagatgacacaatgcatgagtccttgttttctgaaaacaacttgtttcacacaatgcacgagttcttgagatttagtatggtcaacgaacactatttgatttggggaaatgttaaaatttattgttcttctttgacttttaagggctaacgtaagttatctaattgcggaatttcgcagccaactactttgcaaaattggtttaaatgctgttatggttgttcgtttggaaaattaatttattgtttttatatgcagtctatggttttgtgtctagggattaatatattgtgttattatgttgtaggataaacgccgagttcacgtgattgaaagagattt

SEQ ID NO: 39057 - DNA, 705 bp, Arabidopsis lyrata
  Intron number 1 from transcript 496030 (locus 496030) deri ved from phytozome v7.0 (chr-ID scaffold_8; pos 18916744 t o 18917448 reverse strand)
tgtgtcggttctgcattttctcttcgctgtttgaggtaattttctcattttttcccaggaattctctcgggaaagtttcttcgcttggatttggttgaaccgttgccgtttcgttaagcttcgttagctgagaaaccactccattgatatgcttaggttaagaagcacatgaagaatcttattaaacctagataattttttgtttcaaatcgaaccttgatcgtcttttgtttgttgattttaagaacaatttcttagcgattcgtgtatttaccgtcttctcgctcttctccgaggcccgagcttacgattttggttaatttcgaatttttcgatttcttctcccatttttgttttcttggatccgtcaaaaattttgaatcgaatctgaaattcgtttttgtcgttattcagtggtttgtgttcataaatgcacggacgcatcattcagctgcttcttcgggtccatgatatgtatttttagcattatcgaaagatgttttgatatcaatcattattatcttcttcttcctccatttctttctgcgtccatgaggaccacttttttttttcttctttctctctgatgccgtgatcattgtggaaaagacctatcagaaaatgctttcagtgtactttttgatgtcattgatttttggtatttcttcaatttttataatccaggaagtcatttaagttggattg

SEQ ID NO: 39058 - DNA, 487 bp, Arabidopsis lyrata
  Intron number 1 from transcript 490721 (locus 490721) deri ved from phytozome v7.0 (chr-ID scaffold_7; pos 561301 to 561787)
aatagaaacgataatcagatttctgctgtatctaggtgaggatcttctgagtaattagtggcataaggatagtttgtttttcaggtctcaacttcaatgaggtggattaataatgaatcaaaagtagtgttctccctgcttggtagatatttccttacacattagcatgttttttagatctataactatgctgtatacatacatctttatgaatttaagtgaaattaaatttattcatacgtgttacactttgacttagattgaaggcatgttcagattcatgtccccacagctttaggatttagtatattgattcattgacatgcaagatttcttagaatccagttttagcaacatcattatcttgtacggtttagtaatgccattagctttattgaccgggctattttctcgctgacatattcatacttattgctacatgttgaatataggctccttggattggctacaaggtttgcgactgaga

SEQ ID NO: 39059 - DNA, 562 bp, Arabidopsis lyrata
  Intron number 2 from transcript 482020 (locus 482020) deri ved from phytozome v7.0 (chr-ID scaffold_4; pos 14553858 t o 14554419)
gaagctgagcaaaggcttgctgggagcactttcatgtaagcccaaatcagataactttgatgcttctcttcttcttcttgtacagttggtgaagttcttgaattgtaactgacgaaaagaatatgtgtgatttgctgataaaaactgtaaactattggaggtcttattagcctattaatccctttttcatgcagtagatgcctaccttgttacttcctcgtttttttctttcttcgtgaaatcaaagtgctacttttttcatatatactgggatggtgggtcttctatgttgattatggttatgtttgcgttttagaatgcagagtattagaaaccgattttaatgtggatttgtgcaaatcatatgcatgtagagaagatttttgctagctagctgatgctatcttatccatgttttggcgtattaaatatatgtggtgcttaatttgcatgcctcatattaagaaatatcaacatcagcaattatctcattgtcccatatttcaccagactgatctttgctgtctctattgtattaatcaattacagggagtaccttcct

SEQ ID NO: 39060 - DNA, 477 bp, Arabidopsis lyrata
  Intron number 1 from transcript 481680 (locus 481680) deri ved from phytozome v7.0 (chr-ID scaffold_4; pos 11885925 t o 11886401 reverse strand)
gcttcgtctcctagagcccgatctctaatttggtaaagctccctctctgttccttcttcttcatcttcactgatggatcgttatttagctatttagggttttgtgggttgcattaactagagtaagtcgcgaattcttctccttttccttacgattctacgaattttcaatctctatcagccaattttacaaatttgtatgtatcccgtggattaataacatgaatttttgacctttgagtttttttttttttttttttgttaggttctcgctttagttttgcttttatgttcataaattttgctcctttgtgttatttactttctcttaggctatttttttttatctgttggtatagactctagagtttagggttttttctttttggggcaccatttctttgattggaaatagtctcgtttaattctgaattgtgtaatcaatatttgcatgcttgtggtgatgcagggagttctt

SEQ ID NO: 39061 - DNA, 680 bp, Arabidopsis lyrata
  Intron number 3 from transcript 930576 (locus 930576) deri ved from phytozome v7.0 (chr-ID scaffold_3; pos 12065215 t o 12065894 reverse strand)
gtcgatatgtaagatctctctttctttataaaatacaatttttaagcaaaaatgaaacatattttaattagcaattagtatacattatgtacatctcactttcataatagtaacgtttcagatagtcaaaggttgtgtgattccttaaatagtattaatttacataggaaacaccaaaaatataattaaattgcacccataattttcccacaaatgtataattctctatttgttaattaagaaacctctttttagatcagaagttttgcacaacttggttttatatgacacagacacgccgtgatcgccaattaaagcgcctctgtcgtcgctatattcccccaccgacgcaaaatatgtaattaatgcctgtataaaatatatcagattctatatattcaaaatttattttaaaacatcacaaaaatagaaagttaaaataaaataaaaagaatgatataaaaagtttccgtatggtccgtatcatatgattccgtatatatggttacatttattacaccacatggttccttcttctcctccacgtgattttcttgggttttaatgtgtaaaatcaaaaacttcacgggtcaatttgtaaactttttaaaactttattctctttttgttattttaatttaataggacgattaagaacagtacggagcggaggaggttag

SEQ ID NO: 39062 - DNA, 451 bp, Arabidopsis lyrata
  Intron number 3 from transcript 473426 (locus 473426) deri ved from phytozome v7.0 (chr-ID scaffold_1; pos 14817205 t o 14817655)
agtctcgctctcgaatctgcgtttctggttacgcggtgagcattttttttccttgttaatgtatgaatccaatattcacatttcgtttcataatttgttctggatttcttatatagaaaactcaaatagtttttggatgaatctatgctttgatctgttagatcttctgtttatagctaatttttgagaatttgtgtgttgaacgatttaagaacagtgccacatcttgttgttgttgctcttggcttgattctgtccatgtatgtgaatgtagaatttggaatttgtgtgatgaatgctgcatgagttatgctgtgttgaaaacgatatgaatgtttggttaagcttatgtttgtagagagatgaaagagagatcgtgaggtggttaaactttgtgtctaaccattgtgaatttggtttcataattcctttgctattgtttttgttagaa

SEQ ID NO: 39063 - DNA, 303 bp, Arabidopsis lyrata
  Intron number 4 from transcript 492645 (locus 492645) deri ved from phytozome v7.0 (chr-ID scaffold_7; pos 8737698 to 8738000)
cttcttgtccgtgaacctaaacagattgcagtgaggtcagtatatttgttgttcatgatctcagtttcacctttttgaattgatctgatatctttttctaagtggaagaagacaaggtttaggtgaatcttgagcccacaccatgtgattcttttattttcttaatcagttagataaatttctgtttatggaaagcacagaaagattccacttataatatttggtgaaaagaaagctttttaataaaatgtgttagttttctctaaatgctattttaatatctcattaaaggtacctttcaac

SEQ ID NO: 39064 - DNA, 556 bp, Arabidopsis lyrata
  Intron number 2 from transcript 474560 (locus 474560) deri ved from phytozome v7.0 (chr-ID scaffold_1; pos 29075963 t o 29076518 reverse strand)
caatcaaataatcgaaaccctaacctcttgatcaggtgataatttctctctcttttatgcttgttgtttcttccctaatccttgcataattatttgtttcctgttgctgtgcttgttctaagaattttttatttagagatttatagatgtgattttattctctgatctgaataaagctctttttttgtttgtttaaatatatattttggattttttttccagaagaaaagtaactccaaaagtgttattttattccgtagaaattgaaatcgattttagatccagagagattatattgttgtttttgattttaattttggaatcctataaatatgtttacttaattgagagttttgcagaaaatggtttctttagtatttgtttatgaatgaatcagatgctatgaagctcgtttgatttatcttgatcagatattactaggatcaccagtgtcactttttacgttatgtaacttgaaatcatttttggactcataattcttaatttctgtttttgttctcaggccttggtcgatttgctttcccttgtaataact

SEQ ID NO: 39065 - DNA, 332 bp, Arabidopsis lyrata
  Intron number 1 from transcript 929096 (locus 929096) deri ved from phytozome v7.0 (chr-ID scaffold_3; pos 5488334 to 5488665)
ataggctcaacaaacctcctgttaagaccattcaggttctaaatctctctcttctttactactttgtgttttctctgttttgagtttcattggaaaatgatagatagaatctgatgatttctgctctctctctctctctctctctctcattctgtggctacaccagtgatttgtaactgttcatcagttaatgctggataaatcagttgtcctgaagtttttaccattcaatttaatcgaaatttactgtgaagtagtgtgtttttgtattatcagaaagtgggggaagaattcttatagttacttcttctttgtggttaaacagagtccag

SEQ ID NO: 39066 - DNA, 755 bp, Arabidopsis lyrata
  Intron number 1 from transcript 496124 (locus 496124) deri ved from phytozome v7.0 (chr-ID scaffold_8; pos 19316122 t o 19316876)
taattttctctgagactagctttgattcagccgtgagctcaattctctcttgtttatctctctttctctcttctctcttggttgatttgaactgcgcttctcgattcgagttccatttcgtcttagattttcagttcctccgattttagctctcgcctgaagttagatctgattagatctggagctggactcgtttgttggtttagatctctgagattttggatttgtttggttagatggactgatcgatctaggatatgattcggaacgataataaactcttcaatttcagtgtgcttgttttggttaagcaaattgattttgaaatcagaaggaatctggctgtttttttctttgaatttcatttttggatttagggttacgtcttgagtgtttttcatttgttaaaagttgtttactcgcttctctgaattactattactgctatataagtgtagattgtttatttcagatgtgtttttgattctgttgatggaaggtatcgctcgattcccgtcaaattgagactgtgatagctcttacatcatctttcatatatgttgtggaagttacttacgtcttccttttgatataaacactaccaagatctatgttcatgattcatttacatgttagtagagatgtttggtttcattactaatgtataacccgaaacaccgttttgagaaatgggtgtagtgtcttttgaagagagttgtatcttaatgttctttgttttgttgttaaacaggcta

SEQ ID NO: 39067 - DNA, 580 bp, Arabidopsis lyrata
  Intron number 3 from transcript 492116 (locus 492116) deri ved from phytozome v7.0 (chr-ID scaffold_7; pos 6492731 to 6493310 reverse strand)
gaggagctcacatcaacctgaaagtcaagggacaggtatctctctctctgttcccatccttgtgacgatttgggtttctgatttcaaggtctcttgtagagattagggtttttctttccaatttggctgctttctggtttcgtaaatctaggtcttttttgtttggttttaggtgtaagttgcttataaaacttgtggttctgttattatttgagggtttcctagttttggtagggaaaagttgaaattgttgttgaatgttctaaggattgtgaacgatgcagtcaaataattatgtttcaagctaaacccttttttagtatatagcaacttgttgaatgtatatatcttctgatgaagttttcaaatgctttggctgatgtgtatgcttggacttctcaaagacaaagccttacattgaatgaactggtgatatgtacttaagactgtttcatgttactatcaaaagagagccatgagatttagttattgtttcatatgatgtctctaacctttattgacaatgtcttttccaccaagatcagaatcatattgttccttgtatatgtttgtgtatagg

SEQ ID NO: 39068 - DNA, 356 bp, Arabidopsis lyrata
  Intron number 4 from transcript 471660 (locus 471660) deri ved from phytozome v7.0 (chr-ID scaffold_1; pos 6238982 to 6239337)
tactgtggatttctcttcctcgtgggccaaggtaatttctttacgatctaattaagaaaataaacaacaaaatacggatgatttgagtatagaaccagttaagttttgctgaaatttgccaccgaaccatgcatatagcccgttcaatctcgttaggtttcgcccatatacagaatgatgatttccttttggcttagtgttattcataggtttatttggtgatcggtatattgaatttttccctctaattaataaaccgtacacacgtgacgttctgcagaagaaaagttacattccagattttgaatgttttaaatttctttttgacaatgattggttgatcatgtgatgcagca

SEQ ID NO: 39069 - DNA, 619 bp, Arabidopsis lyrata
  Intron number 2 from transcript 937677 (locus 937677) deri ved from phytozome v7.0 (chr-ID scaffold_5; pos 14143471 t o 14144089)
gaaagttagttctcaaggttactgataacaaagaggtaatttgactgtgtctagttctctatgatcactgcttctttgagttttatcttatataatagtatggaattcaatatttgctattgaagttgatatctgattcgtcgaaggatgcttgttttggagaatgtaatttagggttccatgatgattgattactagagatatcgttttctggttgagttttcatcctatgttgtcgtagttatgtggttactttgggtttggtttggtcaatgcgattgctaataggctacgttttcgatatttcttagttttcgtacgtgtcttgcgtggtgatgggttagataagcagatatagttcactctttagagcaatggtacttgttggaggttgaagcatgttggtgtttgttagtcaaagtgtgatactttagaactcgttaagctgggctgagtttgacgtaaatgattgtatcaacttctgtgattaactagctcttcttgttgtagccttcttgttttcatcttctccattctttttgtctagtatatgaccattctattctactttttatttaacttagtgtctcaagttcaagacagaccaagcacaagaagc

SEQ ID NO: 39070 - DNA, 764 bp, Arabidopsis lyrata
  Intron number 1 from transcript 897454 (locus 897454) deri ved from phytozome v7.0 (chr-ID scaffold_5; pos 12615265 t o 12616028)
aaggtatatgtctctacattttcttgttataataggtagcgtttttttttccctagaagattaaacttgtctcttttggcattcctatgatcatcttaataagaaaaaatacggaatttaacaccgatggatttagcataattgaaaacgtttctaggatcatataggctatggtcgggttttacgctctggaagtaaatgtatcttgacccatgaaaaagctctttacaagttatataaatagcacttagaaaataccaagaactaggtgttgtccctcaggcatagtatcttgaaaaattagagaaatttgatattgtggtttatatactagttgcataagtcattttgtcgacaattttccaaaacttgtttagatatagatttactatcacatgttgaaacttttgtatccgtcctacctgcatcgtacgtatgcatatactacattatatgcataataaaaattgttgttcgtggtatttgatcaactataataagtaaatgattaggaaattttgagattgcacgttatatatctttgtggtatggttacagatatagttttaccacatctaaaactattgttcaaaactggatcacattaaactttgatatatagctacccactcagatatttgtttttagcttctttactatatcagggattattgtgtaaaactgtccatagttctttcttttgatgaatgtggttttatcttaaaacagggtttatcagtttggattgcgggttatctccgaac

SEQ ID NO: 39071 - DNA, 210 bp, Arabidopsis lyrata
  Intron number 1 from transcript 474712 (locus 474712) deri ved from phytozome v7.0 (chr-ID scaffold_1; pos 30097486 t o 30097695 reverse strand)
tgcttcagaggcttggttcttgatatttcatacaggtcaaaatctatatttattgttgctaagaagcattagttttctctttgtttattgttggtataagcattagtgttctctttgttttaagttcatgcaaatttgaattcgctaattcgaaaaattggtaggattgtgtcactggcctaaattagttgtgacactgtaggccggtca

SEQ ID NO: 39072 - DNA, 589 bp, Arabidopsis lyrata
  Intron number 4 from transcript 496477 (locus 496477) deri ved from phytozome v7.0 (chr-ID scaffold_8; pos 20760699 t o 20761287 reverse strand)
tcctccgagaacattttgcctcgtattgataggtataattcatcatacaatatcttaatggttttattagtcaaactatagtaaatttggtgaatttctttgcttggaattcttgctagatctaaaaaaggattagatcacaaagttaagatcctcctcatatggttgaaagttgatttctttaaaccatttttggtggttattgcataattaatcaaaagttaagatttggtgatctttggtaggtcccaagatgattttgtgtataaagatgtttctaaccagcaatgagatttgattctatttctggtgatgtgatattacaataaaataataatacatgatcttgcttgcctaatctttggtagggtattgtgaaagccacctcacatgcttttttcactttgcatacaattagaggaatatgttttgtgcccacacaatggccaactcactttatgacctggccattttatgattatttgctacatacacaacgaaaaacttattgatccaaagctatcagcaactttattgaaattggagtttactcaaattcatttttcttgtgattttttttgtcattcag

SEQ ID NO: 39073 - DNA, 786 bp, Arabidopsis lyrata
  Intron number 2 from transcript 485240 (locus 485240) deri ved from phytozome v7.0 (chr-ID scaffold_5; pos 14052603 t o 14053388 reverse strand)
gctttctcgaacttctctatccaaaggcgtcgacggtaaaaacccttttctttgctacactcactctctttctcagtctgttttttaaatttgttgttgtgtttcattgaagaagcttttaggtttctgtttctctgttgtatgagctttttaaaggttgagtttttttctctctatttctcatggcgtttggtttcgtttcttttggtggtttcattttgagtttgcagaatctgggtacttctcatttggttgtattgatatgcaaaaatgattacttttgagattagggttgtgtattcgcgtatcgatttgttcaaagatgattacttgtttgctttgtagtgaaatagactttatcattttgcgttgctttggagtttggagataagaaagctttgtgactcttttctgctcttagttggtgaattcaaatagtgtatttttgtgtctgagctctttctgtaaacgtgtttaagagaattagcttaaagtctttctgtcttttagagttgtggtaacacttcccaaagttggtgtcttttcttgttctctgttttggttagatagtatctaagtatcagtgtttggcatttgttacacttactgaacatagctttctgattgcgtgtaactttgtctttgtatgatgtttgtgttttctaatcatctttgcactgaataaaaggccaaactttatctctgtgttttattgtattttggtttaagccagtattgtgctagaactgatgttttaccattatccaatgcagcctccaacacatc

SEQ ID NO: 39074 - DNA, 294 bp, Arabidopsis lyrata
  Intron number 1 from transcript 316165 (locus 316165) deri ved from phytozome v7.0 (chr-ID scaffold_2; pos 15152479 t o 15152772 reverse strand)
tatcatctccgtaccctttcctctgctctcggcaggtttgttttctcaattttcgccggaaattagatgaattttgttttcgatgagatgatttttgggtttgatcgcttttgattttagggtttttttttttcttttatgaaatgggtatgattatgaatttatgattgtttttctatgtttattgttttgattactttaagattgactctatgtgattctaagagatggtgatggatttttgtggttgttcttcttatgtttgatgattatacagtgaggaagctgcaaaag

SEQ ID NO: 39075 - DNA, 777 bp, Arabidopsis lyrata
  Intron number 1 from transcript 471757 (locus 471757) deri ved from phytozome v7.0 (chr-ID scaffold_1; pos 6576019 to 6576795)
cttctttccctgaagaatttactggagcttctcaggtcaaatctcaaatcttttttaacttaattttgttaaattttatcagaaagttttgatttttatgctcatgcttgtgcatccgcgtacctgcatttcgttttgtgtttgagccgccgcagttttcaacttttttttgtggatttcttacaaagttgaaagctttcctcaagtagaatgtgaagaaaaaggaagagaatgtgggttgattttaggcatagggttttgtgggttctttgagatttatgggtttgcaaaggtttctcacgatctgttcgtttccccaaggaaatgtagctgatgcgtctcttccgatttttttttttgattgattgtatttataaaacccatcaaagaaagaaagagtagttagattgtcgaatattggttttcctaatatttttttcttcaaatttcagagtgatattttctctagattttataaaattggagtctttttctgcattactgtttgcattgttcaataaggaaatcaaataacttttgattctaccactgaatcttacggagtttttttaaaaaagtttgatgctttgaactttaatgtatcttcttccattgatactcttggctccgtaagaatcagttggttctagcattaagtcaaattggccatcttttttgtatgcatggttgcagattgctttctgctctgaattgtgatctctctattgccttaactgatgatctttgcgttctcttgacttcaatttgacagatcag

SEQ ID NO: 39076 - DNA, 427 bp, Arabidopsis lyrata
  Intron number 1 from transcript 492484 (locus 492484) deri ved from phytozome v7.0 (chr-ID scaffold_7; pos 7876875 to 7877301)
ttttccggtgagattctcgtttaatcgatcggagttttgttttgcatgagtctcgttttccgatctgtatatattgacgttgactgatcatggaatttgttctgacttgcgttttttttttttgctctttgtggattcttcaagtagtaagaatcgtatagtttactttcatctactgtttatctggatttgattttatgtgtgtctaagttttgcggatcacaagatctacttaagtgctctaatcatagatatataatttgttggttaatgattttgtctataataacgttcttttgagtggcatgtgattaattaacagttgcatgtattttggttgacaattttttgttttttttttgtgtgatttggtgatattatttggttgataacttccatttttctactgttcttgtgtgtttgcagt

SEQ ID NO: 39077 - DNA, 771 bp, Arabidopsis lyrata
  Intron number 1 from transcript 895453 (locus 895453) deri ved from phytozome v7.0 (chr-ID scaffold_6; pos 21969945 t o 21970715)
ctccgtacgtctccagccaccgttacatatagagggtttgttactcacaagcacttttttttaattcacaatattcagttgtatcggatttgagaagatcgatagtggggaaaattagtttgaatctgaaatttctatgaaattaatatatagatcctgtatcatcggaaacatttcgtggttcttaaaacgtttcccaagtacagagtgtttttttttggttaattattgtgttagttagatcagttcttgaaataatattgtgccctaattcgaagttgattgttttgtagatatcaatagccgtgtaaaaaggcaatggacccgagttttgctgacctaccctcaagcctcatagagacaataatgtcacatcttgtcttaaaagataacataagagcttccgcggcttgtaagtcatggtatgaagctgctagaactgttcgggtagtcgataagcatccttggctaatgtgttttcctaaacgtggcaacttgtttgaactccgcgatccgttacagtggaagttgtacactttggatctgccagagttagctgaatcaactgtgtgttactcgaaggacgggtggttacttatgcgtaaagatacatcaaaagaagttttctttttcaatccgttttctcgggatctcataagtttgccaaagtgtgagcttgctttttcgcagattgcgttctcttgtcctcctacatcagataattgtgtgttgctagcgataaagttgattccggcagataaacttgtcact

SEQ ID NO: 39078 - DNA, 385 bp, Arabidopsis lyrata
  Intron number 2 from transcript 495955 (locus 495955) deri ved from phytozome v7.0 (chr-ID scaffold_8; pos 18557378 t o 18557762 reverse strand)
ctcggattcattcccagaatcctctatcgtcaccggtgattgtcttttttttttttctcttgatcatatatgttttgttttctccgtgcgaattgtcgattacatgttgaaattttgggttttctgattgtcgatctatgcttttgttcttgatatagaggaaatgcggtcatggggcagaattacataaccggaatgattagttctggtttagggctttagtgttgaaagtttgtgttttgactcgtgatcgatattatcagctttgattttcgttatgatcgagatttagtaaaagtatcccatttgtgtgagcaacgtttgttacactggttgtagtagaagagagatctcattgttttgtttttttttttttttacttgac

SEQ ID NO: 39079 - DNA, 729 bp, Arabidopsis lyrata
  Intron number 2 from transcript 471806 (locus 471806) deri ved from phytozome v7.0 (chr-ID scaffold_1; pos 6778328 to 6779056)
ttggaacgagactcagagcaagaaaggaagacaaggtcagtctatacatacacacatatacatatttatgagttagtattaaagatattgtcgttttgatcttcttactccgatatctccggggaatgagttcgtcgttactgttctttgatttgaaattaattatatctttttgaacttaattttgtatatatttttttgttgttaatatgtttttttttggttttgctgacgatgctgaccggaataatggctgactcatcacgtgcagtatatttaggtgagtttgttttggtcatttttcatatggcgttttctttttgcactctcaaattggtagacactttatagagtgagtgatgctaattatcactctaattaaaaaaaaaaataaacgttatttctcagatctttataaagccaacttggtggttctaaaaaagcgtacatgttaacatctatggtgtgacaaaacaagcaaatgatctgataaagaacatttcgatttgtctttttataatgtgcgtacattgaaaatcaaacatttttctctttttttcctacttcatctttacgtttacaattgacatatgtaatttgaagaaaataaaatatttacgtaagtataacaacattttgacacgtaaatgaaaatagagatttattttataccaatgttccctttatcaatgtttaattaatatattaatgtggtttgcacaggggcat

SEQ ID NO: 39080 - DNA, 255 bp, Arabidopsis lyrata
  Intron number 1 from transcript 345344 (locus 345344) deri ved from phytozome v7.0 (chr-ID scaffold_4; pos 17148586 t o 17148840)
ggtcctttcaccgtcgaggtttctctctcactcttgctattattccccttttcattgtcgaatcaaccaaaaaaattccagccattacattcatatagggcttgcacgaacgaacttgagatctagatttcattctctaattcaacattccgtttgtatttttcttgaatcgagcttctccgtgtgaagattttagggtttacaatggtttgatttgtgtgtcaatttttgctcagatgtattataaacactcag

SEQ ID NO: 39081 - DNA, 846 bp, Arabidopsis lyrata
  Intron number 2 from transcript 891701 (locus 891701) deri ved from phytozome v7.0 (chr-ID scaffold_7; pos 22650452 t o 22651297)
attgagaatatcttttcgacaaaaaaagaagacgggttaatgctcgcccctcatatgaataagtctcctcccccataggcgagagtttctggaaaaacttctcattagaaaataaggcaacaaaacaaagacaataatataaattttaattaacaacaaatatatatatagtctagtttttatttctgcttgtataatctcgttcaataaactctcataattgaggtttgtaactaattatatctttatatataaaatatatagccaaggtatttaatagaatcttttcatcttcttgattgcaagtaagactatcaaactttaattttgaaagatatctattagcagaaacaactaagacatgaatcatcaacattattcgtaaccatatcatgagtttagaactttagatatataaacaacctctcaatattttcatgaaatgtaattcttccctagatctcttctagtttctgggcaaaatctccattacaacttttagcaaaaacataaataatttctaacaacaacttaatgaatctcatgttttgaacattaaattatcattactctctgacatcaatttcttctgatatcaatttcttcaaatcaaatagaagcaaaatgtttgttcatacttctcaaactgttcaatattttttaatctcaagtggttaaagagttttaatatacgttttagtgaaactcgaagagcatatcgcatatgaaagcttgtatatgttattatatatgatcaaaacgaaaggagtgatgattttctagcggcatttaggttataatgaaagctagtgatgaattatgttttctttttttgaacaaggaatt

SEQ ID NO: 39082 - DNA, 780 bp, Arabidopsis lyrata
  Intron number 1 from transcript 949038 (locus 949038) deri ved from phytozome v7.0 (chr-ID scaffold_8; pos 6531015 to 6531794)
tctcttagttggagagacctcatcagctccagttggtaagtgctctgtttttttcctaaagagattagtttgttctttgattttgcaaattttaaagtgagtttggatctctcatcaacttaaatatggagaacgaccattgcagcaaaaccctgtttttcttctttggatctaaaaggatcgccaaaattgattttttggtgaagtttgagctgttgttttagtcatttctcttaattacagagaccttttccttaatagtaatctccgacatttcatgttgtttttaggagaaagttatgtttttttttttttaagaatccatatgtagctaagttgggtcatgttatattattgcttctaacgacatgatctacttagccttattatgtcttctcattgtttagctctaatgattgctactcaattcttccttgattaagaccaatgaacaatcaaaactttgcaaagcattatgcttaattaaccttatatggtgtctggagctaatcgtgtgatgtgtagtatcacggagaggttactatgataactttctatttcacagaatcatcaaggtctgcaatcctattttccagtttacttttcgtttgtactgagatcagcacctgtgatgaagttctaaggaaattgttgcatttctattgatttgtttcaggatttcattgtgcaaggtggagatcctacaggaacttgaaaaggtggtgaatccatggatgtgtatatttgggaactggttgtggaaagactcacagctcagtg

SEQ ID NO: 39083 - DNA, 642 bp, Arabidopsis lyrata
  Intron number 3 from transcript 492776 (locus 492776) deri ved from phytozome v7.0 (chr-ID scaffold_7; pos 9470973 to 9471614 reverse strand)
gaaaaaggtgcgttttgattgaataaacttttgtttgtgcaccacttttagacttttagtttgcttgctgcgtaaggccaaattgatgcgatttagagtttctatagttgctttgcataggacattgaattgagggtatgtaaagtattgttgaattagtttatagggactagtactgcacaatgagccttgtagctgtttctctgaaatctatgtccttagtatatatgcacttgcttggaatgatctcactaacaaatatgttgtagaatctgtattgttgttttgtttggcgaagaaacaaaatttctggtaattatactttggacaaagagcttaagatatgtccctatatttgtttggattagtaagagtgattgcctctacgattcaccaaattttggatagttctaacaataccctgacatctcaatgattgtctctcatgaaccgtttattaataaactcttccctgtcagttcagttgtatcatctcattctaggttctactattcagacatttatctagatttcacttttgttttctttcataataacaaagatttttgtcatttatacatgtctcattactttgatactaactctatgcaaactctctggtttgtgatttgcagtcgggat

SEQ ID NO: 39084 - DNA, 338 bp, Arabidopsis lyrata
  Intron number 3 from transcript 483706 (locus 483706) deri ved from phytozome v7.0 (chr-ID scaffold_4; pos 22245154 t o 22245491 reverse strand)
tacattccttaggatcctttgccaacgtaagattcattattactcttctccttaatttcttttcccatttttgattatgttctgattctctgtcgtttttgtttcatcgtaagtgtcaattccaagttttcatcgtctggttgtttgaatttttgcttgaagagttgtgtttattatatacaccgaaatttgagatcgaagcttttgtctattaggtttaagattgaaaccctttgcaaaagtttaagacttgaaccagttccttcttttaattcctagttgtggaattcatcagctgataattcgtcaattatgtttgttttgttgcagggattgac

SEQ ID NO: 39085 - DNA, 366 bp, Arabidopsis lyrata
  Intron number 1 from transcript 337408 (locus 337408) deri ved from phytozome v7.0 (chr-ID scaffold_1; pos 28003688 t o 28004053 reverse strand)
gctacttcgttcccaccctaagtatgtttgtcattttagttcattactgcaatacctatttagcagaaaatttcaataatatcacaatttattttatgcctgtttttgaaattattgtcaaaattttttaaatcatataaaaaataattcaaaatttaaatgtaggaatatattccataaaaaattaagaagatcctttgtgatgttttgaaattataaaatcataaaaatacttcagattttaaatttatattttcgttgcattaaatcacatgaatataattaaaattttagacccctatttttgcttgaattgaattttttttcctttgaaaaaaacagagttctttcctccgactctaggaa

SEQ ID NO: 39086 - DNA, 569 bp, Arabidopsis lyrata
  Intron number 1 from transcript 330172 (locus 330172) deri ved from phytozome v7.0 (chr-ID scaffold_7; pos 18100146 t o 18100714)
tgtataaaagagatcctcgtgagaacccagacattgtatgtgctttgatccttcttctcctttaatctttttttgtgatttctggattgtttggaattgttttttttcaaattctcaaaattgattgaatctttaggaaattagaagaactaattgtgtttttctcttcgttggctgttgaatttttttgcttggtttccttgcaagtttcagaggaaactccttttctctgcttagtttatgtgaatggaaggtacatggtatcagaaatttgtatgtgtctataagtgttgtttcttggctattttgagccctttttattgaaatgaacttaagcaagtttttcatgcttttgaatttcgatatattattttatcgaatacattgaattcaatgttgcttttctcaaggatatagtgctctacttgatgtttgttggtctctatattttcctttctttagtttgaaatggatatgccgtttagatgtgtgttgatattctattatatccattttgtctatttgtttgtctagaaacctataaggcgtggtgtcattggccctacaat

SEQ ID NO: 39087 - DNA, 278 bp, Arabidopsis lyrata
  Intron number 3 from transcript 343780 (locus 343780) deri ved from phytozome v7.0 (chr-ID scaffold_4; pos 815788 to 816065 reverse strand)
gtataaacctattgaaggattactggaactcagaggtgtagataacattcactcgttattcttcaatttcttgaacatgaaaagctttttttgcaattattagttaaaaattgactgcaaaattgttttagaatttgtttgattgatatctgttcttgtatatatttgttgtaacaacactgtaacactgatgatggcaaatttcttattagggttctttaattttagggcaattagagtctctgtttttgttgacagattcacctagaatctcttat

SEQ ID NO: 39088 - DNA, 370 bp, Arabidopsis lyrata
  Intron number 1 from transcript 358227 (locus 358227) deri ved from phytozome v7.0 (chr-ID scaffold_8; pos 19399833 t o 19400202)
acttccacggaggccgaggttagggctttgatgcgtggtctagaagaagccactcatggattagatacgaaaatggaattatatactccttccgtttcataatataagtcgttttagctttaaacacgcagattaagaagatttacttttaaaaagttcagccaatcataaaagaaactgcataatataaataattataaaatattaaagtaatatataaagtgcatagaaacttgaaaacgacttatattatgaaacaaaaatttttctccaaaacgacttatattataaaacggaggaagtatgtaacacgttgagttgatttttgaacgtagctttcggaaatatcggattacaaggagaaaaagat

SEQ ID NO: 39089 - DNA, 577 bp, Arabidopsis lyrata
  Intron number 1 from transcript 474047 (locus 474047) deri ved from phytozome v7.0 (chr-ID scaffold_1; pos 25085965 t o 25086541 reverse strand)
ctccttaccctgcccctcctcctcagcttcctactgtaagttttccacataatcttttcaattctcgtccagatttctgattttgattgggtttaggttcgtgctggtgattgctttgttgttaaacggcgatcaaatgtggaatcagcgttgcttagttactaggtttcttctgtattgctaaacgaagcattttgaagttagtaactggagatagaatgtactgaattggatccatgttttctagttacctccaattaggtcgctatattagttgagagttggaatattgaatttggaggtttactttgatttatgaatcattcatatgacaagattaaagaatcattttcttactatacaattgtttttgatggttaaacgttttatattggttcatgttgaaatgaatcatctgtttaagagtttaatgtgcttgatttaggttaagcctttaagtgtttgttttcttttgttggatgagactagatatattaaactcaagaggattttcatgattcagtttcttttcttttggttagtgtgttcttcctgctggggtggagttccattcttc

SEQ ID NO: 39090 - DNA, 555 bp, Arabidopsis lyrata
  Intron number 1 from transcript 326244 (locus 326244) deri ved from phytozome v7.0 (chr-ID scaffold_6; pos 7601940 to 7602494 reverse strand)
ctctcttctccttggccattagatctcctgctcaggtgtgtagctataatctagctagcttttgaaaccgaaacgagactttttttttttttgttatgaacttatgatgatcttttaagaaaaacatttgcagtgtgaaactcaacctaaagtactcaacgagcaataaataaataaaatcaaaatgatacaatttcacatagattttagttgatacttgtaacatctttttcatacgagtattcgcttttgtgtcttgtctcttcaaattataatctattattatccttacacatcgtttgtgacttttcttctttttttcttataattttttttttgttagatcaatgtatcttctttcgtttgttggctggctctatgtgaagtttctggtgtgtggtccatgtgtgatgtgtttttgaataacgtaaaaacttttttaattggagattttggcccaactggtacttactggcatgtttgtttccatatgtgatgtatcctattttatatatctcaggcagttggtgcggcaggcggtgcgataacgatcat

SEQ ID NO: 39091 - DNA, 430 bp, Arabidopsis lyrata
  Intron number 1 from transcript 328596 (locus 328596) deri ved from phytozome v7.0 (chr-ID scaffold_7; pos 4426984 to 4427413)
aacatcactttcttcttaggtgataatcatcatctctatttattttttctctgactaattaattatgatgatcatattttacatttataatttgatatacgtacttaatttacaacacaacaattgtggttttaatcttacaaatatatatataatcgagcttaactttgtctaattgtcactatcaaaggaaaatttgaacatattggttttggagtctttggtaagttgtgagcacgttttaggcattaagttttgcatgtaaaagttacaaatatgagtttatttcttcttttgacgtgattttaaattgacaaaaaaaaactcgagaaaatactctctttgaccgaattattagtgggcctctatagaaatgggccatgtaagattcaataattcgtttgggccttaaaacaggtaacaaggggct

SEQ ID NO: 39092 - DNA, 839 bp, Arabidopsis lyrata
  Intron number 2 from transcript 485970 (locus 485970) deri ved from phytozome v7.0 (chr-ID scaffold_5; pos 17490829 t o 17491667 reverse strand)
ttaaggtcagctttctctctttttctttccctttttcagatttttctattttaaggaattagtataatagtttggttttcggtaaataaataaaattaaaaccaagttggatttcattattttacaaattccagattaagtttgaaatctctactttgaatcttcgatattgctggtgacgaagtttatttttttgtttacgtaacgttatctttattttcctttttacttagaggaagtttgtaattattactagtgaattgaatgattggcgtgaaaaatgcacagcttttttgttttttcctttttaacagaaacaatgcattgattgcgttggaacaagaacgttgaaaaaaatatgcaaaacaaaaaagctgattattttgaaaatttagatttaatttctgttttttcatcttttatctaaatttatctttttattttgattttgaaaataaaaaagctgttttttcatcttttatctaaatccaaaatttcacgcaaacgtcccaaacgaatttcaaaggaaagtgttagcgatgttgatactatgtattaagatctgaccatttagactatcccacgtgcttatctcaccgtccaatgttgtccttagattcgttgatgtgtctgccatgacttatgtttcttttattacagcatcatatttgtgatcctaggaaaatgaaataatgtaccaatttcataggaaatttagaccaacatgattatcatatgtaatttgttttagattggtaggtaacaattgattctaatagtactatttgttgcaactgatctcaggtcacaaccgcccactcacttaacatcatagccta

SEQ ID NO: 39093 - DNA, 698 bp, Arabidopsis lyrata
  Intron number 1 from transcript 898862 (locus 898862) deri ved from phytozome v7.0 (chr-ID scaffold_5; pos 19125191 t o 19125888)
ttgagtatctggacttgtctgctgatactctcgaggtcagttttctttcctttttcacttttaattttttttgtcatctggtctcgaggatataacagaaagtaattaggacttggtctcaattcctgaagcacagtggtcatattagtttggtcccatttggaatgaacctgactacttcctaggcatcttttgatttgtaactcaattcgctttgatcggttcttagttgatgttttaactgttcatatgtaattgcaacatgtttagttgtgttctatcctgtttcaggtgctttctctatgctgtgaatcgatgcccgtgttcaaaaacctcaaatcgttagctattaaaagtaacgaaagccgaggatggcaagcaatgccagttcttctaaggaactgtccacatttagaatctctagtcattgaggtataaaaacaaaccatttgccaaacatgtacagagatagagttcatactttgaatctcttattgttttcgttatgctttcagggactcttgcatcatgtcacagataaatgcggggatgcttgtgactgcgtttctcgggaggacaaaggtcgttccctgacatcttgtccagtaaagatgttagagattcatgggtttggagggacaaaaaaagagatgcaaatgataaagcatttcttggactattttcctagtttgaaggag

SEQ ID NO: 39094 - DNA, 518 bp, Arabidopsis lyrata
  Intron number 4 from transcript 328593 (locus 328593) deri ved from phytozome v7.0 (chr-ID scaffold_7; pos 4415568 to 4416085 reverse strand)
ctcgcatataataacaaggtacaggtttgctattaagcttgctctttggtttggttgttttaccagcaacttaaactaatagtggggaatgtggatgttgttccattatccaccagggtcctttcttgtatatgagaacatgctctactcaatcactgataactgttgttttggagttttgacaatttgcttgtgttttttattgctttattatgactaaagctgaaaattttgggggcatagagattgatgttacatgtcaaacctagcatgctagtatttatgattctctttttattcgtggtgttgttgtaatggttgttctctagtctgaagaacggccattattagtggaaaatgtagaaagtgtctgttctatagctactgtatgcagtgctcaagaagtatctcagttttctatactccgaatcatatccagtgtgttattgtatggtcattccttattttgattacatggattgttgactgaagcattgtctgtctttgttgagcagaac

SEQ ID NO: 39095 - DNA, 370 bp, Arabidopsis lyrata
  Intron number 1 from transcript 928382 (locus 928382) deri ved from phytozome v7.0 (chr-ID scaffold_3; pos 2999402 to 2999771)
tttcagacaccaatcgttgcctccgaggagccttggtatgctcatcttcttgttttttggctatacatattattttcgttactataaattctaatagtgtttgtttttttaaacgattgtatgttttggatgaatgaaagcaaccacgatgcatgaagaagattcaggtgatgtttcaattgatcttttatctttaatttatcgattttctaattttacaaaaatgttctcaccgagtagaatatacttttgagttttgagttaaatctttcacagtgttgtggattagcaacgtttcaagccatattaactattgtgttgtggcagttcgaaagattcatataaattggactattgctacaaaaaaaac

SEQ ID NO: 39096 - DNA, 560 bp, Arabidopsis lyrata
  Intron number 2 from transcript 489639 (locus 489639) deri ved from phytozome v7.0 (chr-ID scaffold_6; pos 13577814 t o 13578373 reverse strand)
gaagaagctaaaggtaaaatcaattacgaatcctcatcacattttgtgttgtttctcgaccacgatcggagtactaattttccttcgattttgtaaatttctactcgagattcgttgtttttggattatacaacgaaatcgatcttcgcgatttttgatttgatctcgaatcagactctttatctcaagctgattcaattgttgaacttccagatcgggaatccagaaatttccttcgattttggactatttcttcagattttcttgaattcttttcacatgcagatggtaaaattctagattagaaacaatcggttctagttttgtgtaatcagattcatgtttacttgtatctgtttcttgtgtctactaagttgtgatgtgagtaactatgagctcttgttgatcaatggctcttatttgttgcctagaacatgaattgtgccgatttggttttcttttactattgttctttgatggtttgtgtttggaagatctgatttactttgttattgaactgtgtagtggaagcaaaagacggtaccatctccgtggcttct

SEQ ID NO: 39097 - DNA, 982 bp, Arabidopsis lyrata
  Intron number 1 from transcript 930393 (locus 930393) deri ved from phytozome v7.0 (chr-ID scaffold_3; pos 10900952 t o 10901933 reverse strand)
aatctcccgctgaatcgctaattacacagtctccggtaaacttctcttctctctctgtctctctctctctgcatagggcagttcgctttgtgcatcgtttaaccttcacaatcccttaaataaaccctagaatgaaatttagttcgaatcgcataacgcattgtcgaaatctgattgatgggtcttgattttatgatatgtaattgatttttctcgatgaaatttcaaagcttggcttgtggaaattagagcatggtcaagtactatgacatttacttgagagattcttcttatcttctcatttttcaaatcaaaaatcttttggaaattagatacgtccccttaacaactcgtaatcatcttctccttctatgaatttttaatatttttttgtatcatcgttttgtatgtatgtcaatatatgttcgctttgttctgctgggattggatgacttctgtttcttgtttcatggtattgcttatgtctcatatctaatgaatttgtgaatgtttcctttacccttcaaactcttgcttgttaaggctgattgggatattgctctattgttttgttcttgtgttatcaattacaatgtaatggtgttatcaatgaactctggacttgatttgtgttgggtcagctgagtagctgtgtgcttactcttgggacagttaaattgttcaactctttgcttatgtccttgatatgttatctcttcttcaggtactgtaaagaatggccaatccacatggcgacgtcattgctcatgtgaaacgtaacaatgtacttgtggacgtgcaccatgggtccaacgggtatttcctgatgataaaaaacggccgagtccttacacgagcacggtggccaaaggtatgctcctattttcttttaacaactcttttaaacatagaactttacttatatggtttatgttttctatttgcagaacactgatccaaaccatctttggttggacatcga

SEQ ID NO: 39098 - DNA, 650 bp, Arabidopsis lyrata
  Intron number 4 from transcript 493242 (locus 493242) deri ved from phytozome v7.0 (chr-ID scaffold_7; pos 12136016 t o 12136665)
gggaacttccaaaatttcgaagaccctacacagaggtttgttcctatttcacaactgatttttcccgatatgggtttttgttgatttctcttttgtaattgccaatttctgctggaattgattttaatttcaagtttctttgagtctgcgttgcgcaattatcattgatttctagttgggacaatgagcatggcttcaaatttgtgccttttgataactttcagtagctatagtctcctctctatcttcatctatgtaattgccaattcctgctgaattgattgtattttaagtttctttgattctgctttaggcaattatcattgatttttcagttgggacaatgagcatcgcttaaagtttgtggcttttgaaaactttcagtagctatatagtgcactctatcttcatctatgtaattgccagttttggctcaaattgattgaattcatatttctttgaatctgcgttgcacagtgatcattgaattccagttgggacaatgagcatcgcttcaaatttgttgcttttgaaacctttcagtagctatatagttctctctgtcttcatctctgtaattgttctttcactgttgatgctgacgtgaaagaattgtgtttgcgtttgttgcagaacgaggaaaaagaaaa

SEQ ID NO: 39099 - DNA, 576 bp, Arabidopsis lyrata
  Intron number 3 from transcript 891337 (locus 891337) deri ved from phytozome v7.0 (chr-ID scaffold_7; pos 20229951 t o 20230526)
gcttgcactcacaagtattcaaaaacttcaatcgtttagtttcccttcaacattattgaagaatacacgtttatcattttcagttttatgtgataatttcgtaaaatatatttatctatatgttttttttttttttttttccttctaaattcattgatatcaaatcgaggttacaaggtcagtatacataacattcggaaagcaaattattacataatttgctatatatgcgccatataatgagaaagatacacaaaaagaagtgaacttgacgatgctttttgtaaataagccttactcgctaacagattattaaatctattattttcattcttcatatttgatcttgctcttgctctgatgcgaattgtgtgcgtgggttgcatctcttggctgaacctccaagttcttcataggaatttcgtttatgtgttaacccttgttttaccttttatgagttttctttatgccaaaacacactacttttgataggtttgttttccgtacgttagtttaatacaattttttttcctttatgcagaggtattttgttggtattggaacaataattacaca

SEQ ID NO: 39100 - DNA, 959 bp, Arabidopsis lyrata
  Intron number 1 from transcript 925359 (locus 925359) deri ved from phytozome v7.0 (chr-ID scaffold_2; pos 7933096 to 7934054)
accagaaaaggttacgtctcctaaaaaccctaattctgttcactaatgaagaaattcacatcccaaacagtttgattccctaatttttgatggcaaagcacatattttggtaatgggttttgaaagcaatccactttattgtatcaaggttctggatctatagccaatttagttagatacagtagattctggtaattatctgtacccgatagtggtgaagtgatagctgatcatcaaacttcaatggctatttgttccatcatcagggtcaaaggtcatgttttgttgatttgaaactacctcttagccttctttgcagatttaacaagctactgtttatatttgccttgtccatttcaaactctttacatcaagtttgtttaccaaatcctggtttgttgtaatattaattcgaagttaaaatgagatagttgagctttaggcataatcatgaagctgtataatgattgtcatcactcttaaacttcgagactaaggataagaaatgatctcgacaagttttcaagctgtctattggcctacactttagccgacggttaattgcataaataaagagtggagaagaatacagcttagagatttatcatctgattctatgttccttgttttattatattaagaaactttggactaggaaggattgtatgagtctgttccattatggctccttctttatttacttacttcctctgtttgtggttctctctgttccacacattgtagtaccaacatagcaagcactaagtatcctttgatgagctcttattgttacgtgcaacgaatgagtatatttctggtgttcatggttcttggttcttgagatttgttatttcatgtctgttttatgtgttccaaactgaatatatattcattccaaatcatggcttctacttgtactatcaactaaaacttgtttttcatcaatgaatgaaggtact

SEQ ID NO: 39101 - DNA, 501 bp, Arabidopsis lyrata
  Intron number 1 from transcript 494434 (locus 494434) deri ved from phytozome v7.0 (chr-ID scaffold_8; pos 1690791 to 1691291)
tgcttcttctcctccggcgaaacaggttagaatcgcttcttctcctccggagaaatgttccatttttccttttgttgattactacttattaatctctacataaagatcgaacctttcgtatagattgtctttaggttgattactcttttggagacgctttgatctgtagcattctctttataaaaaaaaacacaacatcactgtttgacctagctctgcgaatatacaaaggtgtttctttgcttgaatcattgattttgttttcatcggtttgacttgtgtgtctaatagacagtagcatcttgaatttgcatttattaggggaattaatttcagttgtgtctttgtgttatgaattgtccattttcttcggaattttttgtgttttgattacatcatatggtaataaacattttggttgtttcttggggcaatttgttccaattgctttcaagattttgcagattgtgtggttagaagaaagggttttgaggtgtcaaa

SEQ ID NO: 39102 - DNA, 938 bp, Arabidopsis lyrata
  Intron number 2 from transcript 903655 (locus 903655) deri ved from phytozome v7.0 (chr-ID scaffold_3; pos 3191408 to 3192345 reverse strand)
cttcgtgaccaccacgaccatcaattatattacaggtaagcaaaacacatctctttctttttaaaatccagctttctttatttgacttattatttaaagtcaatcttgaattaatccattatttgactggttaatcaccgtataattaatatatcaccactagtttgttattagccttctcacaacataatatatttaaatttcattcaaaacaaattaaacacatggcgaatgcgatgataacgatttaggaactggttcaagattgtacattattctttgttggagtcattttcacattataccgaccctgacttattattataccaggtcttgcccaactactactactagtctactattatctctcatatagtttccaaaacactaatttccaatatataattgtttttattcggccaataaacgacgatattatttattcttactatagttatgctctcattttgaaaacgaaagaatttacacacattatgatttatgagattattcattatcggactctctacaagtctagtgatgtagcttggagtagtaattaagttttagtctatttttgtaccaaattgcaattcaacaatatttcaggtaataaagacaaaatgaaatgatgtacaagtttttgtttttattatctcatcattttctattttggttatttgatgattgtgacttgtgagatgcagtgaaaaacacatataactttttcaatgagtaaacttcaacagtagaagtttagtgtttaaaatttttcgagataaacaaggagggtataaaactagataaagaactattgtggagccacaaaatgagtttgtgttaagagtctaaaaatctgaatgttcttcttgactaatttatgttttatttttccattaaaaggttcgcaaagtgtggttaaaggttcaccacactct

SEQ ID NO: 39103 - DNA, 242 bp, Arabidopsis lyrata
  Intron number 1 from transcript 951842 (locus 951842) deri ved from phytozome v7.0 (chr-ID scaffold_20; pos 14767 to 15008 reverse strand)
gtgcttctgccaaggtcttcactattttctccaaccttcttctctgaataattcgagcttttttttaaaaccaatttgggtttttgattttttggttttccagattagtttacatggaggacaagtgatttcatggaggtatgcagacactacaaatacattgtgaagaagctgaaaatccaaaatctgatttttaaatttggttgtaaatttgctaggctatattcaaacctcctaaatca

SEQ ID NO: 39104 - DNA, 373 bp, Arabidopsis lyrata
  Intron number 1 from transcript 943026 (locus 943026) deri ved from phytozome v7.0 (chr-ID scaffold_6; pos 21339403 t o 21339775 reverse strand)
tttcagacaccaatcgttgcctccgaggagccttggtatgctcatcttcttgttttttggctatacatattattttcgttactataaattctaatagtgtttgttttttttaaacgattgtatgttttggatgaatgaaagcaaccacgatgcattaagaagattcaagtgatgtttcaattgatcttttatctttaatttatcgattttctaattttacaaaaatgttctcaccgagtagaatatacttttgagttttgagttaaatctttcacagtctgttgtggattagcaacgtttcaagccatattaactattgtgttgtggcagttcgaaagattcatataaattggactattgctacaaaaaaaac

SEQ ID NO: 39105 - DNA, 667 bp, Arabidopsis lyrata
  Intron number 1 from transcript 888791 (locus 888791) deri ved from phytozome v7.0 (chr-ID scaffold_7; pos 3453276 to 3453942 reverse strand)
agattctttctcttctcgacgtgagctccgtcactgttttcttttttattcctttccttcttcgcttataactattcttactcatcttttccaggcgtttgattgcttatttttgtcattctaatgcgaatctgtgcaatgctttcttcttgcaattcagtcttttgaatgatcttgaattccggttttagagagttgcttgaactaatctattctcgtaaagatgtgatttagttcttgatatgttgattttcccttctggatttggtttcatttagaaattgaatgtttatcataaggtataggtctaggattgaatcttagtttggtctgtgatcttttgataggcggacatcaaagtagtcatggcctagcattttgtcttcagcttcagttctgacttttgcgtaataattgtcaaaatacaaacaaatttctagactttagaactgccctgagaatgagattgatctcataattcctctaattgatgaaagtctgttttttttttttttttttccaatatgttcttattgttctgaaaactatattttcttttatgtggatgtatatctcttgaatttattttcaagtgtgtgctgatattttggagttcttgactttaatgatcatttaattgtctttgcttcagaaagttgaacacctt

SEQ ID NO: 39106 - DNA, 1010 bp, Arabidopsis lyrata
  Intron number 1 from transcript 916411 (locus 916411) deri ved from phytozome v7.0 (chr-ID scaffold_8; pos 12225380 t o 12226389 reverse strand)
ggagagaacagtttcgattttgaatcaagacacaggttcgttggtttttttttgtgacctaattttttcttcggcatgtgtgtttgttctgtcttatccaataatcttagttttgagtcttacatagttttgaatctctgaaacttttgttgttttgcttcaactcaaaggtctagtttttttttggggatgaaaatagtttagtacaaaaaaaaaataggtttttttatgtttcccttattggtttggttttggacttttggttagtgaattctcttatgatgtactgaattttgttataactgcttcaccgtataagtctcttttggtgttagatttacatgatttcagatttattgatgtatgtcccatgtgtacttttttgcagaggttatcaatgaatgtatcaaagctattttctttatacatatttcattatttgttacaaatttggaggaattttgtgaattccaaagttatgttggtttaagaaccttttgaatctccttgttgatgggctaatggcattggaagcattaggatttgattattgggtttacttaaacacatggttttcgtttttataaaagtgggttgttgtataaaggtcagaagcttttaatgtgtaagattatatgagaattgagactttcctcataagtgtaatgcaagtactgtggtgtcatgttcatgggacctagtggtttttgcatacttggggaatacttttgtaggatactctgtttttttggggtaaccgtcctgatactagttgacaatgtggtttttgccttctctttgttattatcttatgggaccatattactcagaaagtctctagcttttgttgtttacttaaatcaagcctcttttttcttctggatgtttagttttggtttgattcttgctttggttaagtgtctttgtggtgataaatttattgaagttacttttatctggttttattgtctgcagcacaagagagagcacgccttgtaactttgttgagg

SEQ ID NO: 39107 - DNA, 319 bp, Arabidopsis lyrata
  Intron number 1 from transcript 952638 (locus 952638) deri ved from phytozome v7.0 (chr-ID scaffold_989; pos 135 to 4 53 reverse strand)
ggagcgcgtcttcactgatctcaaatctgatcgaggttttttttttctatttcctctctctattcccgtagcttccgcttcaatttgacttgttttttttttctctccgaattttctcatttactaaaatttgactgatgaataaacaaacgcttatctctcggcctctgatttttatctctctttcttcgtttggattaattcgaattctattttgggatcttctctcttttcaaattcaaatctatttcggtgatgtttatttgatttttcttttaattggaatttgttgaagaggaggagaagcaatcgacgaggg

SEQ ID NO: 39108 - DNA, 412 bp, Arabidopsis lyrata
  Intron number 1 from transcript 945352 (locus 945352) deri ved from phytozome v7.0 (chr-ID scaffold_7; pos 6402379 to 6402790)
cttctcttttgccagttgtttcaagtctctctcaggtttgcgcataatcattttaatctccttttcaggttatagacagtgcgcactatgtttgttgtgttggatggaagaatatgttgcgttttgatattagtgtgagtaagtagaacacaaagttttagtctataacacctgacctcactacttgaggtttagtcttaatccgacactttttcttttagttgttgctgaagtttagtgttttgatttgagcttacaagtttcagtgatgggtttagcatcgctccctctttacttttggtagttcaatgctagtaggttcattggtttaagttgtctatgaaaaagagaagtaaagagtaataaatttgattcaggtgggagccattgcacctcagagcctggagtcatt

SEQ ID NO: 39109 - DNA, 932 bp, Arabidopsis lyrata
  Intron number 3 from transcript 487229 (locus 487229) deri ved from phytozome v7.0 (chr-ID scaffold_6; pos 1500946 to 1501877 reverse strand)
tcaggatcggcgttcgtccgccaaggctagctctcgtgagttctttcattgccttttttcagtatatgcatgaaagagaccttttttttaagggctaggattgttagatccgcttgagtttgtaaactactcctggtggtttgagcgctagtgttcactgttagacagaacatgttgacgcctttcttctcgtacagctagtgatatatatattagatgtttctatctttagcacttgagttcggaggatctgattgaggaaacgcaacattattttcattaggtttagaagaggagcttctgagtagtcctgggtcattgccaatagactttataaaaggtttttcttttggaagacatcttggacaagattccatgagaaagagatctcctttttaaaagatttgatgtggaccctggtttatgttcttttcttatcatagcttaaagtggatgaccactagcaaggttgaacaagtcagtaggattttatgggatcaaagatctaaaattttgtgttgagtttgagccaatggagaataaaaatagtagtaagttaaaaactaaaaccccctgactacacatagacaggctcatgggcaaatgccatgtgtttcagttaaatgttgcaccttggggtatgccggtatggagttcaagctaaattaactttgtagaggtgtcgaggagtctgctggaacatgtttgaacttgccagtggggtgttcaaacttcaaagttacttgcattgtcaaacagtcgtttcagtctagtaggagtcatgtccacattagctttggagaactaccgttgttatgcacatcaacgctgttttattttctctgatcgatctcatataatcttttttttctccatgcacttcctcttaacacatctgttttatattttatgaatgacaggtactagggaat

SEQ ID NO: 39110 - DNA, 554 bp, Arabidopsis lyrata
  Intron number 1 from transcript 338867 (locus 338867) deri ved from phytozome v7.0 (chr-ID scaffold_2; pos 11283989 t o 11284542)
ggaactactagttagtgaaaaacgacaagaatcaagtgcactttgtcatttgcttaacaaatagtaataaacaattccttcattagttactgtactacgaagccaagctgcaagtattatctcatatgtaccctttaatgtcccacaaaagtcaatagaattgatgtaactgcatgggtaaaaaggtaaatttattaactaatttctctaaaataacgcttacccgttaccaccaatcgtggtcctcttctgctcctacacactttttttttttgtataaatctctttctttcacataaagagaaagcgaaaacaaaagtgtatacaagtcttcaagagttcataatatcaatcaaatatgtaagtaatatctatttttgtagatttatatattcttcatgattgtggtctgacaaaaaaaaaaaaaaaaaagaagaagaatcggaatttctctctctgttttgcgagaatcttaatttctctctctgttttgcgatctgtatattctattcattacagatctgctcttggatttcggattctcctgcaaacgt

SEQ ID NO: 39111 - DNA, 141 bp, Arabidopsis lyrata
  Intron number 5 from transcript 487948 (locus 487948) deri ved from phytozome v7.0 (chr-ID scaffold_6; pos 4465939 to 4466079)
agcctattgggtttctttctttttcttgttttttttttttcaattattgaagagattttttttgttttgaattattattatgtgagacactttgacgttttcacagaaagccaaggagctgaagttgttgagtgtgcttgt

SEQ ID NO: 39112 - DNA, 500 bp, Arabidopsis lyrata
  Intron number 1 from transcript 496871 (locus 496871) deri ved from phytozome v7.0 (chr-ID scaffold_8; pos 22385296 t o 22385795)
agctttggaccctgaagtataccctcgtcccacaggtaaatctctctgtcgcttctttagtgtgattttctatctgtttgagcctcaaatttgaacattttctctcagcatcaaaggatttactgcaaaaaagtctgttctttcgtgtgatcttctatctgaactagcaaaattttaagcctttaaccattttttggtgttatcttctatttgggttaatgagaattttattaaatgctgcttctaatctgtaatctccaaggattactataaaagtctggttatttggatggtgaagtttgcttttgttgtctctctgatctgttaggctttggctggagaagcatagagtgagatgattgttgactctgtgaatttgaagttgaatgaaaccattttactctagcttaattaatctggttttctgatacaagtaatggaaaatgagaagtggttgctttggtttgctgtttttttatttggacaggtgaagtgtacat

SEQ ID NO: 39113 - DNA, 530 bp, Arabidopsis lyrata
  Intron number 1 from transcript 891903 (locus 891903) deri ved from phytozome v7.0 (chr-ID scaffold_7; pos 23958157 t o 23958686)
ggtgagtggtctgtctcggtgaagattttgaattgttggtctgtttcgcgtggcacgggtagagagctcaatatgattttgggtgacgagcatgttagttttttgataacttaccttctatacatgttttcgatattaaattgaattggttttgtctttaacgttttatttgcagttcacccaaatccaagccgttgttcgtgatgaattaattgataattatctttcaagattgataatcgatgagtgggtgagcattaaaaatttttgatgtatcacgggttaacagcatattgagaccagtaccgcatagattcaagattgtgtttcgttcggacactttagtgcaaagtattaatatgtgctccagtagaacctatttcaatctaactgagtttgtgagtaattttgagtggtattgttaatccgaatatttgcgttggtaagcctaatttgtaaatttatttgtgcttttagagtttatttgcggttcatgttctgactgtattattaatgtgtgtgtttcatag

SEQ ID NO: 39114 - DNA, 464 bp, Arabidopsis lyrata
  Intron number 1 from transcript 940949 (locus 940949) deri ved from phytozome v7.0 (chr-ID scaffold_6; pos 5924245 to 5924708 reverse strand)
tctcttgctccacgttcaagttcaagacgaagacggttatttctctgttctcgtctctttcgattgttaatttcgaatgtttttgatacttggatttgagtctgtatctgtggttaatgttgttgatcattagttccaatgattatactcaacggatatgtttagggtataagttgatcaatacaggctaaattctgtgtttcttaagacttgatctctagtgttttagctgtttgcgaggggtcgtagagttttcaatgcaagtctgagaacttagaagaactgtttttttggtcagttagaagaatctatatagttaattgtgtttctgatttctaagaaatattatggaagcggctttcttcatgtttatgtgatatctatatagtttttgtttgtttgtcagatagcattaataaaggtgatcttacttgttttgattatgaattgggaagcaggttttg

SEQ ID NO: 39115 - DNA, 226 bp, Arabidopsis lyrata
  Intron number 1 from transcript 331617 (locus 331617) deri ved from phytozome v7.0 (chr-ID scaffold_8; pos 15155821 t o 15156046 reverse strand)
gggagtgattctctccttacctacatcgccgagaggttcttctcttattctagttttgattgcttttcatgcaagtctccgagtgttttttagagtattgacgttggtttaagtgataagatatgtgtttggtcagattgttaaaaaaggatccttttcttctttaacctaagattattatgtttttacttgtaggtcaagtaatcttaaaagccttggactcgca

SEQ ID NO: 39116 - DNA, 392 bp, Arabidopsis lyrata
  Intron number 1 from transcript 472732 (locus 472732) deri ved from phytozome v7.0 (chr-ID scaffold_1; pos 11185050 t o 11185441)
gctgtgcctaagaagaaggtcgaagaactctcagtctcttaattagttttctcccttcgttgtccgaaatggaaaaatttcttagggtttttgaattatttgcatctagggattagcttttttgacggattcagggtttttctagggttttagggaggtgcattattggacttattagttgattgtttttgtgtgttttgagtgtccattgtttttccatttgattgtgtatctttgggtttaagctcgcatctaaattgatttggttcctttaggttcacatgtgaatgaaaatatgtaatttttaatggctcctttggagaatgatagtgttaatcgaagctgtttttgatgaaacatgcagatttctaaacacaagagaggaataagaa

SEQ ID NO: 39117 - DNA, 1009 bp, Arabidopsis lyrata
  Intron number 1 from transcript 938107 (locus 938107) deri ved from phytozome v7.0 (chr-ID scaffold_5; pos 16024640 t o 16025648 reverse strand)
acgaggggatcttgatctcgatccaaggtttaaaggtataaattgcgtttctctcgatttatgattccgtcgaggctcacgcaaatctagcttcatgtgatttgtggttcagatctagggtttgtgcttcgttgtgtttttttcctggatttcacatgggaaaaaaatgtagacagaaactaattgaatgagctgtcacaaagcttggaattattattctataacaggacaagctcgattcttgaacctttgattaatttttaatggattttcttcaattttttgaaggagatgatgtaggacatgtatattttccattgacttaaacttagaaatggctattttaagcgttttctttataaggttatgtatgaattatgtttaaatatttgatctaaaacctgtagagttcaggattcaaataaggatgtgtttctttgttgagtccatgaactccatatttagtattcttaacacctttattgtatcaagactgactaaaaggtaaaatttctaaaaatgtttcagaatgttgtattaagcttggcttgcattagcatgaaattgtatttctgtgcactgattaatttccatttatgcaccaaatctttttgaaagattgctaatttattactatacactctacttttctcaaagctggaatcaattatgaactttgacctagttggtgcatagtttagtgtgtgatatagctgtacaaacacatttcctctagtgattctgatttggttaagacatctattgtagttactgccacttgctttggcaggcaagggtgttttggtttgaattatggaacttgttttctgaaattctgttgtttagtttttctttcatgttacaacttccatatgcctataagcacccttatctttttttttctgtttattcccctgccatgatcttctgtcatgatctatctctatgtttcatgatggagcaacaatgttgatttttggtttttgtttcttttgcagatcacagaata

SEQ ID NO: 39118 - DNA, 836 bp, Arabidopsis lyrata
  Intron number 1 from transcript 928101 (locus 928101) deri ved from phytozome v7.0 (chr-ID scaffold_3; pos 1907479 to 1908314 reverse strand)
gacgtcttatcgtcgattttctaagtaatcattcatcatttctaaatcctttattctttaaaatctatcattttatttttatttttttttttaatattattattttattttgtaccacggcaaaattgacaaattgtcatggtttcctgtttttactggaagcgttgttgcacttgcatgacctacaaacaaactagtcgacttaaaaacatgactttaaaaaagttgcaacttgcaagatgttttgattgatcttgatataacgcggttatcacgctcatgtagtttacattgtaggtattaaggattcttatgaaccataagagcatgtttactcatgattcttttgtgggtatcatcccatgaataataataaaaaatatatattttaggttgatatttgaatgaaaagtatcattggagtgagtctattgatactcattttgggtttcaactcatgaaacaataataaaaaactgttaatgatactcattttggttcatgagtaaacatgctctaagactcttagagcaaccacaatggttagaaataagttttgagtttcttatattttaaatattaatattttaatataaaaataaatagaccactaaaaagaagacaaatgtacaaaaggtttctaaaatgtttagaaacattccttatataaggtatgtttcttgttctctctcttctttttcaatttttttaaatattttaatgttaaggtatcttgtaagaaacctccattgaggttgctcttaacatgagaagtttttgaatgggctttatgttttgtagtggaagcaattgatcggccctatttgaggccttat

SEQ ID NO: 39119 - DNA, 892 bp, Arabidopsis lyrata
  Intron number 1 from transcript 950651 (locus 950651) deri ved from phytozome v7.0 (chr-ID scaffold_8; pos 18972404 t o 18973295 reverse strand)
ctattggtgttgaattcgccaccagaactcttcaggtcattttctttttcttttttttcctttaaattttacaagtggtagtatcagtatcagagaaatttgaactagtatcttgttcatgatcatgccatgtgtcaatttcaagctctttcttcatttttcacgtgatctctatttggtttgatatgttaggttctgagggttgttccttctggtttgctagctgcttcatggtctcatctttaggtcaatggtagtagttcatttgatgcacttgtgttcttatttttactctctttccttttcttacttgtaaagtttcatcctttacctatcctttttggtcagtctaaggaacatgcttatgttaggtaacatataagtgaaaaagattctgtgttttcttgagcattgaataattttaacttttgatactattccttgcattgttgttctctcatctttttgaatttggttttttattgcttagagattttattatcaagagagaatcttagaatgtgctggccatgagtcattaggaaatgtttttgtatggatggtggagaaagccaatggacaaaaagcttcccacaacttgtccctaataatgaattgtttccctcatcattaaagtcaactctcaatccctcgagaagtcaacgcatgaaaacattaacataatcagctgatgtatgaaaattgttgatggcttaactaatgtttttaattgttgagacatttaaaaccttgaaacaagacgaataactatctctgaagcacggagatgctacttgagatcttaccagttgttgattattttgctttttttttgtgattgttttatggttatacaggttgaaggaaagactgttaaagcccagatctggga

SEQ ID NO: 39120 - DNA, 179 bp, Arabidopsis lyrata
  Intron number 1 from transcript 314363 (locus 314363) deri ved from phytozome v7.0 (chr-ID scaffold_1; pos 25500854 t o 25501032 reverse strand)
gtcgttctcgttctaggtttgattcacatttttttaacataatatatgattaatattcaaaagtataaatctatattatgtattttcacgtttcttctcttttactctatagttttcttttcatcgttgcttttattataacaaaaaatttaagttatgtttgaatgtttatattaggg

SEQ ID NO: 39121 - DNA, 767 bp, Arabidopsis lyrata
  Intron number 1 from transcript 934964 (locus 934964) deri ved from phytozome v7.0 (chr-ID scaffold_4; pos 20167384 t o 20168150 reverse strand)
acttcggcgtcgagcagctcgcattgctcactcaggttctctttccctctgtctctgccttcacactacttacttctccatgcatatcacaatgaaacaaaattgaaagtttccactttgttggtgttgttctgcttcttttaaattgttttctttcatgagcttggtttaaatttaataaatcatgaaacccttttggttcgattttttgttttcttttgttcatagatttagcttaagtttattaaatcacgaaactcatttggtttaattatttttctttcatggattaaatttgttaattttcaaaaactgtatttgattaaatatacgtgtatatatatattttaagttatatttgttcttgtcttgatttcatgtgtaaatgtgtttaagtttcttgctttgaaacaactttccatcggccgctaatgtttccgaaagtagaagccggtggttttgttgcacggaagagaattttccttaaagtagaaaatttgaagagctatattatgtagttggatctattcgtttcttggtcttaatgtcttatccaattaattttcctcatttggggtttagatactaatcaatctataaaaaaaaaaaaaatccatatgagatgacaagaaagttaattaatagaaacaaatccataccctaaaaatggaaattaaaccccacttgctgaaaaagtcggttctttggatttatagcatactaatcaaataaactgtttgtatgattggcagaaacaattggcaagc

SEQ ID NO: 39122 - DNA, 669 bp, Arabidopsis lyrata
  Intron number 1 from transcript 494446 (locus 494446) deri ved from phytozome v7.0 (chr-ID scaffold_8; pos 2037608 to 2038276)
caattttgtttcgacatatttcgcgattcgtgtctggtgaaaaaaaagctctcatcttttttctcttttagatcgttagatcagagattcctttgtttggttcgtgtatttcgaacttgtcttctctcttgattcgatcgtattgattaaaaaatcgtattttgctgaaaacctagaatttttttgattttttgtttgttttgatccatgtgtatgggaatatagtacgagtttaacaaaaaatattatgaattgaggttttttattcagcgaactgggttttattgttcatcttcgtttaattcgtttggctctctcgaggtctgagtaataaagtttagaactttcctatgcttaggttcttaaagtcgagatctttgattagcctttgtcctgttattgatttactggtttatgtatcatctaattatgtctgcttgatccactaaatctttaagttaatgattggtttatgcaatttgattgggattaataacattgatctgtgacctcctactaatcagtgattaattacattgcttggttaggtcattacttgaatttggtgtgtctgtatgaccccctgagcttgaatttcattcttggtttgccctaaattgatgttttttgggatgtctttttgtaggttttgttgctgattgagaaaac

SEQ ID NO: 39123 - DNA, 764 bp, Arabidopsis lyrata
  Intron number 1 from transcript 915201 (locus 915201) deri ved from phytozome v7.0 (chr-ID scaffold_9; pos 1614233 to 1614996)
accttgctcaagcttctcttgaggtgattcttctcttattctttcaattttgggagaaccaattacatcaagaaatggctttcttttactggattttggcaaatgaagagtttctctgtgtttcaatggtaccatgtgggaaattggctataaaactctacatttgaatccttgtgcacagtagttgggaagtaaagacttccatctttttggtattgttctacatttttccatctttagtagatgaagaaagagctttactttcttgggttatttataatggttgtcattattttgtcaaatggctcctttgtaaagagtgttgtgtttatttcagtcttacaatgtgggaaatggggaattaactctccaattggcttatttgaatccttatgtgcaataaatgggaagtaaaggcttcatctttttggtattgctctacatttttctatcattagtagatgaagaaaaaagagctttcttttcttgggttatgtatttgtcattgtattggcaaatgggctcttttttgaagagtgtgtggctgtgctttcagtcttactatgtgggaaattaggataaaatctgcatttgaatacttatgtgcattaactggcaagtaagggattagtctttttcgatttctgctattcatttttgtctatcattagtagggaagagagaaatctattagtctatattttccagatgtgaggtctgtatattagttaatgtcacacgattgaatttgttttcttcaggaa

SEQ ID NO: 39124 - DNA, 358 bp, Arabidopsis lyrata
  Intron number 3 from transcript 472688 (locus 472688) deri ved from phytozome v7.0 (chr-ID scaffold_1; pos 10870904 t o 10871261 reverse strand)
attgcatcgacgcaattaactcttattttcaacaggttggtcttcaattatccctcttttgtcactgacacatcatgaaattgatttggttacaacagagtacttacagggcttaagattgtcgatgcaaaaattgatgctttttctatggaatctagatggggtttcaggaatagggtttgattattttatgagtcttggtacgtttttgattcactatgtagctgaattacgatcttgtggctgtgggtagtttttgctctgtttctggattattattcttcaagtttccatctttgtagtttcgtatcggtgattcctgttgatgttgttttgcgatttatgaaggttcttagtt

SEQ ID NO: 39125 - DNA, 715 bp, Arabidopsis lyrata
  Intron number 1 from transcript 487627 (locus 487627) deri ved from phytozome v7.0 (chr-ID scaffold_6; pos 3092445 to 3093159)
cccatttgttgtacggctaaacgtgacacaagtgtgtaagttcacatctctctttccctttgtggaaaccctaattcttgtaaatatatcttaaaaataaaaatggttttttttacccaaattcgttgtagcgtcttgataggaagtgttttatatgaggttgaattcattcttggttattgtaatgttcatgttaaccagagcttcgatttggggtgagagattgtgtttgcggcaattttgatctcgaggatgttcgcgagatttccaatatattctgtaaattttcgaatttagcttaattttcagctgccacagagtgtttgtagcggtgaattggaagatttcagatggtttatgattaatgaagttgatgacatatactgaaatgagctctccaagtttactcattaggtggatgttgagtgtgttagagtttcagatgttgattgaacttaggcgtgtcagtgtacggttttcaatctaaggaaacaatgctgattctgtttccttgtaccctgagggctttgcatcaagtctcgagtttaaagtctagctttgctgctctgtggttttcatttgatgtgggttttgtttcttctttgcagaaacaacgcttgtctttgctttctgatgtctactgtttttgtttcacttttttttgttcaattttaaattttgcagtatctgttttgtttgtttagcaggagaatct

SEQ ID NO: 39126 - DNA, 544 bp, Arabidopsis lyrata
  Intron number 1 from transcript 919679 (locus 919679) deri ved from phytozome v7.0 (chr-ID scaffold_1; pos 3539587 to 3540130 reverse strand)
ccacttttgcccttatttaccggtatttgttttattcttatttcattattttgtttttcatttatgtcattcatgtgattgttctttatctttttgccatggtataaagctccaaaattttgccctttaatagtcaaaatgctgaacgatgcaaatatcttttctaagtttattatacacattgtaagagttacaacttacaactccaaaagtcaaagaatatagaagatagagatatatttgctagaaaaaaaaacaaataaacaacttaacatcgataaaagattatataagttgagaaataaaaggtgatggtgaatcttatgttttattatgtggtcacggtagaattcatttggttttgttttattggtcaaccatacttttcgatactactacctattattcataattcatatttgtgtttcagtttaactaattttaattaagacaataaaaaatactaaccacacaaataactatatatactgcacaattgatgttatcagattcaaactggagttcatattactcgaaaaatata

SEQ ID NO: 39127 - DNA, 630 bp, Arabidopsis lyrata
  Intron number 3 from transcript 915521 (locus 915521) deri ved from phytozome v7.0 (chr-ID scaffold_8; pos 1500572 to 1501201 reverse strand)
cttacaggtaagctcaatttatttaaattgaacatagcatatgttattgcatacatgaaactttaattgcatgtatctttgatagtgattagcaataggcttagaccgtaatacttgagaaattccgaaaaaatcttttgaatatgcaaaagatatggaaaaaaaaactcttcgaagatatttagtaaagtcttagagaaattatgtgtattggaaacacacttattttggtttgattctactttttttttttttttcggcaaatcaaatatattatatcataaaaagttttacatgatacatgaaccattcatttacaaccattgacacatataatgtgaacatgtattaaaatttaaagtctccaaaactacaaatatttaaaagtttttatcctaacctttataatttttttaccaaaatatttagattagtctacataatgtttgaaagagtgtagggagaggatcctcaaattatgattaaccaaatcattgacccaaaaccaaaatgcaagtataatgtcaatagaaacattgttatgttttcatcattttcttgctctaatttgtttaatttggtttctttctttcaggtgggaaacgaacattgaagattcctccagaactc

SEQ ID NO: 39128 - DNA, 487 bp, Arabidopsis lyrata
  Intron number 1 from transcript 474136 (locus 474136) deri ved from phytozome v7.0 (chr-ID scaffold_1; pos 26012090 t o 26012576)
gcattcaggttcgtctcttcctctctctatctagatctatgcttttctcctatatttttcgttgtttatagatcagatctgagatattttagcgctgcattgaccttgttcttcggatttctgatgaattcgtagatctattgtacctaatcgtttagatctatgtttaattttgatgtcttggataatttttatatggttgatgttagatccgtttctcatttcgaaaatctgtttagatctgtggttgatttcggtttattgttaaattcctttggttgattcgagatccgttcgtttcaatatattcgttgaacaataatccgtgtagatttgtttagaagatgaaaatcgatctatttcccatattgttaagcttctcttttttttaatcgctgcttctatatgcttagatctttggatccaattcgttttgtatgtctctttgtattgatgtgttgttttggatctggaatgctacagcctg

SEQ ID NO: 39129 - DNA, 1022 bp, Arabidopsis lyrata
  Intron number 1 from transcript 895846 (locus 895846) deri ved from phytozome v7.0 (chr-ID scaffold_6; pos 24195262 t o 24196283)
gccacgtggaaattggcattcggttattgcttaaggtaaacttttttttttaaggtaattttcttgcattaaggataaaagttacgagttaaaaaactaattacaattgtgaaacatttctgttctgtaatataatacactactatggtactatcatctgtcttttgctgccaaaaaaaaaagagaaaaagataacacaaattaaaccaaaggaaagtggtataacaaatttcaaacattaaatttctaactcaaatcaaggaagtgaaaatagctttcacataaacaaatatttgtttatattattttctcaagccaagtaaaatacatataatatatgccacattatcacatatgaaaaaggtcaaaaaataccatacttttaaaaattgccaaataaatattaatacaatgtcattaagaaatattttggtcaaattgtaatttcatttagtataaacttcaccaaaagaagaagagcccaaatacatcacatccgcaatggctaatttaaatagtcataccagatacaaattaactaacttaaacgatgcaatcaaggatctaacattggtttctaaagtataacattttcagcacttaatcatatttcatattttgatcgtttttttaatgtaacacacaaatgttttttaaggatccattataatcgctttaaaaaaacgagataaccttatcaaatttattctatgtatgggagatcttcttaaaattccaaaacattccttggagtatcattaaggaaaatttgcaccaataacataccaaaaatctataattaagtaaataaccaacaaaaaaaagccaatgatattgtgtgtaatttttgtattttggacccttttgcccttgtgtctctcttcttttgtttttacgtaatatctatcccattttctttgtaaatgtaaaatattagctttgattactgtttctttggggagaatcaaattttgaatctctttccagaatttcaactttacgagaaaagttccaacgacagt

SEQ ID NO: 39130 - DNA, 464 bp, Arabidopsis lyrata
  Intron number 2 from transcript 916049 (locus 916049) deri ved from phytozome v7.0 (chr-ID scaffold_8; pos 5954723 to 5955186)
cgcagcaccggtgcttaacgacgccaacccagacggtaatgtctatatagagggctatgttttgagttggttatgtaattctgtttttggtggttcacatactaacatagatggttacacatcgcagcagttggtgatagaacatgattgttcctactggacgtggattacgaaggggatgagatatttgtagggtgagtgttcaaaaaccgagacgactgtagagtgaagatagcagttcatgcgatcaacaggaagttcagcttctgtaatgatctgacggccgtcttttcccctctttacggcggctgtggggagagagaactctctaggctgggcgaattgtttagttgttctagaaaaattataatcattttttgcttggaatatatatattggtttatgttcaatttatgattttgaatgcagtgattttggatccatcgaagatccatccaaaaggt

SEQ ID NO: 39131 - DNA, 533 bp, Arabidopsis lyrata
  Intron number 1 from transcript 489024 (locus 489024) deri ved from phytozome v7.0 (chr-ID scaffold_6; pos 8995196 to 8995728 reverse strand)
cacaatcttcaccggcgtcaccggcagaaacccaggtctcgcccctcctcttcttttctcgattcggatgaatatcaaaataactgtttgtgggtttgcgccggattggatttttattgaatcaaaatctgtaatttacggcaattttacccaatttgatcagccgctatataattgctgtatgtttgttgtctcgacgacgtaatcgtgtgcgttattgttttcttagtctctgtgggatttgcttaaatattgaattcctgtgattgtttagctagttttgctgctgaattgataggtatatattgtagcggttgtttactggatgtgatggttactggtcttaggtttaagcataatgttgaaagtgagttaatactaagtttgaggtaatgaaagtgatttggagttgaattactggttatcttaatgttgaatgttaaaggagccatggggcaaaaattatgttgataatattcttccttctttttcttgcagtaactgttaaaaagacatttgacaagtaccttctt

SEQ ID NO: 39132 - DNA, 367 bp, Arabidopsis lyrata
  Intron number 2 from transcript 479445 (locus 479445) deri ved from phytozome v7.0 (chr-ID scaffold_3; pos 8331840 to 8332206 reverse strand)
tggattccagtacttgcctttactctccgaagcaggttttgtctctcacaacatccttcaccaatcttcttccatgggtttaattcgtaactagataaagaataaacgaactgttgttaatcttgatttttcaaaagttttagactttatgggttttgcgaatttcaatgttcattcgtcgtttaaagtgttttggttttcttttgtttctaatttgtggtgaattcgctgcttaaagtcgtcacctttgatgagattatcattaacagaaagaaactcttgcaaaattgaagcaaagttatgtgctttatgtgtctttattgtgtttacaggttgtccattggactttacttcatctaacttcact

SEQ ID NO: 39133 - DNA, 547 bp, Arabidopsis lyrata
  Intron number 1 from transcript 496541 (locus 496541) deri ved from phytozome v7.0 (chr-ID scaffold_8; pos 20993723 t o 20994269)
tagaaaagtccgccgttgtctcaaaggcttcgaaggtacgtataaaaaacaaatatgtgagaaaaaaagaattattgatttatatggtttttgcatttgcatatacaatcttttagtttacattattttgaaatattaaaattcagttttccataatagtttcggaaattttgagtttaaattaacaaaaatttaaaaagggtgattaatattgtgggtttatttctaaaatatacaataaacgcaattatcttgtatttttttcttttcagcatcctatgtcaattgctgtaactggatatattggttctgtcaactatagtttttttggttaatttcgtatctaagtatatagttaatattcgctatatattttatgtgtagggccacataaagttttgggttatgctttagtattatagatttaaaaacaaaaactcaaactagaaattctgtttttgggtaaaaatggtaagctaatggtttatataaaaaaaaaagaataaagtatggacttttggttgaatttatcaattaggagtggaag

SEQ ID NO: 39134 - DNA, 476 bp, Arabidopsis lyrata
  Intron number 2 from transcript 496541 (locus 496541) deri ved from phytozome v7.0 (chr-ID scaffold_8; pos 20994429 t o 20994904)
aggagaaacccattgtggaagagaagaaagtgaaggtaactttttttttagtggtctcaaagctttcaccctctttattgtaaaaaaaacatattttaaatttgttgtgtttaatgaatttgacattacaaccaaaaaagaaaagaaaaaggagggggtttttcgttgctttttaggatattggtatgaaatattcattcttttttggtaagggtatgaatattcattttattctttattattctatttagggtacgagtaaccaattaaattatttattatttaataaaaatgagaatattctctttgcagtgatttcacatggggtgtattggtaggatttggttaaaaattttgatggtttatgaacgtagaacttcttatatttttatgtatgtggaattttgtgttaagttatcattttattaattttgcgaacagcctccggtggtcgtgacggtggttcttaaggttca

SEQ ID NO: 39135 - DNA, 415 bp, Arabidopsis lyrata
  Intron number 1 from transcript 905070 (locus 905070) deri ved from phytozome v7.0 (chr-ID scaffold_3; pos 9028015 to 9028429)
gttgaagctgtattcaaggttcaaatatttcacgggtaaaacatattcttatatgaaatagtcccaaatttgaataaaacaaaaaaaaatttgtaacatgtttcgttttacacaaacggatcttggatcccatataataattttaatcataataattttacttgaatcactttatcccgcacatcgtgcgggttgttatctagtcactttattacaaagaaaaccaatgctagtctaagaatttggtgaagattgtaatcacttgaaaaaaaaacaagaaacacacatgcaactctcagattgagtttgtgaatcgaattttcttcccattatgatgcaaaacaggaattacataatttcgtttcttagtgattatttctgatactaagttttgttcatttctgttacagttgta

SEQ ID NO: 39136 - DNA, 892 bp, Arabidopsis lyrata
  Intron number 1 from transcript 319696 (locus 319696) deri ved from phytozome v7.0 (chr-ID scaffold_3; pos 22054314 t o 22055205 reverse strand)
cctcactgtggtcgtggttttcgagtattacgtaggtactttattcgttcttgattcttacgactgattcaattagggggagcatgttctcttctttgattggaattttcttgttattattatttttatgaataactaagaggtcatgagacctaggccgtacactcgctcaagccaggaaccatagcatttcatatggtcttctttcaagtatcactcgaacttgcgacttctaggctttctttgaaagtctttaccagttttgctattgatacttggtggaattttcttgtttcttgttcatagaccgataccgattatctcttaggcgttggagttaaaccaaatttttgttaattaaacagtattaagcgggtcctaattaccagcactaggcagttccatatttcacaattaataattatcttaattttaacatttatttttttcatgtccctctagtttttttttatatattttaaattacataaaattaaatttataagttttgacttcataaatacatgattatccaagtatgtatttgttgttaaatgtaaattgaattaatttgatgattagtttatgctgagttataataagattaataaatggataaacctatagtttattgttttggataaatatattttttgaattctttttctgcttaaatttattacatgaatgttttctggtttagttcttatttatgacattttcataattatgcttatcacattttaatgctttatttgctggtttgttctctcaaatttctcttagcctgtgatctttgatataatttttctttaggcgactcttattcatttccctaactcaatgtttaatttcaggagcaactttggtcaaaggattcaacagagcgata

SEQ ID NO: 39137 - DNA, 443 bp, Arabidopsis lyrata
  Intron number 1 from transcript 474357 (locus 474357) deri ved from phytozome v7.0 (chr-ID scaffold_1; pos 27900217 t o 27900659)
cacacaagccttcctccgcttaatctgtaactgtgagttccggaatctttcctctacttttttttttttttcagatctcgagtgaatctgtgtacgatttcgatctcaatttcgtacatttcttctgtgatttgagtgagaccttggaatctcagatcgcatgtttctcttcgatttttgaaatctgtttcgaattgttgctgccgatggcgtgaaatcgagtgtagtctcttgacatttgttttgtagaattgaataatgatcattttgagaagatctggagtttttggggggttttatgctcttagctgttgccgtgtatattttgtttttattgaatttcacttgttgatcctagtggtatgagttaagtactgactactggtttctttctttttgttgaaacagccgctcagactcgagatcaaggtattgtttccatt

SEQ ID NO: 39138 - DNA, 491 bp, Arabidopsis lyrata
  Intron number 4 from transcript 492444 (locus 492444) deri ved from phytozome v7.0 (chr-ID scaffold_7; pos 7715086 to 7715576 reverse strand)
gagaggaggtaagtgtaaacaagaatctcaatataagtataacatttgatattaggggattagagaagaaaactgtattgttcaattccatctttaggataactcaagaaagtgaatgggaaagatacagtgaggggaagattttgtcgtgcattgcggagaattttatatgcatagtggctgatagagtaggggaagcgacattcggattaagaagcttcctttagaaacctccttaaggacagagaggagatttatttttcattgtttgtaacaaaacaaactcacacgtcaaacagaaccatgtaaccgtttccatcccgcttctgagcacattcatgaatagtctttcaagcagctactgatttgttgtctaaatggatgaagagaactacttttgttgtttatatagaatatctttcagttgtttgttgtccaaactcaactaaattttgaaagaatatcttcaggggtcagacgaatatatagct

SEQ ID NO: 39139 - DNA, 639 bp, Arabidopsis lyrata
  Intron number 1 from transcript 489492 (locus 489492) deri ved from phytozome v7.0 (chr-ID scaffold_6; pos 12105142 t o 12105780 reverse strand)
tttgtgttgctgatttgtctagtattgacctcaataacaccttttgtttgaatcaattttacgtacccgtgacatgctttgatttctttgtttattcttcgttggaaaaaaacgactaaagcttttcttataaacattttcattatttccctatcttcatagttgaaaattatatcattaagaaatttgacaccaattgtgatattatgaagcgaagttttctcatttgtattatactttatttctctcatttcgaatttagtattgtattatactttatttctctcatttcgaatttagtattatattattcaagagtttcctggaaatttatgaggatttataaaatgatatactagtattaatcaaaatgctaaattaaaaagtaggtggaaacataggattgaaagaaatcttcaaacattcttttttttcaatagtatcataccaaatatacataaatttttggagttaaataaacttttttttttttgtcttttttgttcttgtcaaaatttatcttttgtttttttttttttgggcaaagtcaaaatttatctaaatatgttttttttggttctcttttgatttctgaaaaatgaagcggtcaaggtcaacggatacacttgcaaggactca

SEQ ID NO: 39140 - DNA, 702 bp, Arabidopsis lyrata
  Intron number 1 from transcript 324952 (locus 324952) deri ved from phytozome v7.0 (chr-ID scaffold_6; pos 808422 to 809123 reverse strand)
gcttttagaagggatcggttcgcttcttttaacaggtttttttttttttttttttttttatttttaaattcctttcttaattatacgataattttgaaaacaattgcatggtggtgacttatccataagataatgattacgaagtgtgtgatgctcagaagttttgagtgtttttgttagaaataagctctgtttttccaaataaactgataaaaagacttagagaacacgatcttttatcatctaagtgatcactactaagtaaccagagaatctcccgagcttctctcccaagaatcctctcaagaaaagccaaaccctctctttctttctttctgtattctcttttcttcttttaatccgaaccctctagttccgtcagagtcttcttcttccttatcttccggtgaagctgcttcatgttttgcttactgtaattgtaatgtagccaagctcaatggtttcgattagaaaatgtgacgattttttaaatttggagttctaatggaagttctgaatctgggtttagggtctagtttcaaatggaatttgatgttttcaagataatttatatcgtaaaatgattcaaatctgcaaattgtcattcaatgaaagctcattgggttgtgatgcttacaagttgtgtatctgaatcttgtttttgcaggagcttgagtttacacactctgcctttaggtggga

SEQ ID NO: 39141 - DNA, 624 bp, Arabidopsis lyrata
  Intron number 2 from transcript 916106 (locus 916106) deri ved from phytozome v7.0 (chr-ID scaffold_8; pos 6473246 to 6473869)
ggattctttggaacccttaccaaattgtgtacgttattcacaatccttcttcttatttattaccttctctattcttttatcatatatagtgatcatagtttgtttgtttaatgcaataataattcaatatttcgaaaaatgaaattccaaaacatttgagaatataatttggatgacgtatgttttagtcattttgcaaccttttagatatatgtatatatattttaaaaatatatctaacttgaaacggagaaaatatttattttaattatatcataattaaggaaggtaaattttctcaggtgattttaacaaatagcgggataatgtgtaaattgcatatcatgtgaagaaattaataacgtgttaaaaataatgtatcatcgaaaaaagcacataaaatttggaaaaaaataaaaaaccatttcacatttttaccaatttgaagttatttttgcaaataaaaattgccccataggccatagtcagttttgttaactgagtctcaaattttgtcattcggtgcatatatatatatatatatattatctataatcaaaagagatgaaatgatgatgattattgataggttttacgtggacaacatcccaataagagtgtaca

SEQ ID NO: 39142 - DNA, 792 bp, Arabidopsis lyrata
  Intron number 1 from transcript 493691 (locus 493691) deri ved from phytozome v7.0 (chr-ID scaffold_7; pos 19841840 t o 19842631 reverse strand)
aaggcgatctaggcaagatcttgtgcttcactcaggtcttaaaccatactcttttgatttttcaatctcttttttttgggtggaaaatcatatgatcaaatctaatatttcaagaagctttcttcatttataaaaggtcataaaattttgttaaacaaaaaacgatgtcttaaattgaaaatatactattgatcttatattttcagggcattgcagatcattttaaacatttttcaaataatgatttaagttttttttattattatattaaatactaaggtttttggatttctattcaaaatttgttgatagtagatagcatagtgtctaattgattaatattttcttttataaataattatccaggctttgcgtagatataattttatttaactgttgtaataacatcaaattatgttttaaacatcaaaatatagtattggtaaaaagcgacatctcatgaatatcactttttcttgatcaataaaaagaaaaacaataactcatgatgaaaaataaatatactaaaacgtacaagattagaaatgattgaaaaccatgccataagattgtataatagacaattgtatgccaaaagtcaaacttattttgtttaaccattatttggagggaaagctatgttatagttttttgctcttcattgttgtactcattatatatagagatatgcatgagatttctaatattggtttgatcaaaaaaagtatggtgacctaaatttagcattacaaatgtgaatgaatctgcaggaagcagtggtaattcctccaa

SEQ ID NO: 39143 - DNA, 886 bp, Arabidopsis lyrata
  Intron number 2 from transcript 940281 (locus 940281) deri ved from phytozome v7.0 (chr-ID scaffold_6; pos 3218598 to 3219483 reverse strand)
gaagtggttaagagcataagacgtggccagaaagggttagtcttttcttatttattctcatggttgagtgtgctttgtgattgtattgtgttgcaaattgcttgtttgatgttgaatccgtgtacaaataagccgatgctctggattaaagtaatgaatgtagcatggtactgtacacggaaactgaactatggatcgacatgtctgccatctctgattttccctgattagacggcctggtttagatccacattctctgtcttgtctttgtgataatgtttgataaaaggatttcatcttcttatatgatttttatggtgttctgtctttggtattttactagggaattagctatttgtttagtagattttgaaatactacgtgtacaattaagccgatgctctggattaaatcaaatgaaggaagcatggtactgtgcacggaaactgagctaccgcagatcgacatgtctgccatctctgattttttttttgtgatgagacggcctggtttagatctacattctctgtttttattgatgtttatgtttctttagtagggtttatgtctactaatgtcaagctgtttgattaactgttgtgaaatccgtgtacaattaagccgatgctctggattaaacagaatgaatgtagcatggtactgtgcacggaaactgaatcatggatttgaaatgtctgtgccctctctgagttccttattggttctttgatttgcgggcctgatttcaacccacatttgttgcttctttcttctttgcaaactaaaaaattcttttatgttttgagtgttgcatcgaatttgatgagatttgttctttgtgactattgcagattgtgtgttatagctggaaacatatcgcccattg

SEQ ID NO: 39144 - DNA, 451 bp, Arabidopsis lyrata
  Intron number 1 from transcript 492382 (locus 492382) deri ved from phytozome v7.0 (chr-ID scaffold_7; pos 7507316 to 7507766)
gcggcgtacctcaggtggaacaaactcacttccctaagacggacgggcgagcaactgtcgagaaggtttgaaccttaaccttttgtgttaatatctctgatattagaaacagtttagtgcgatggatgattttaggcgttcgtagagctaggatgaccaataaaatgactgatatggaaagatatgcaatcgcgttttgttctcatctgttttgattgtggtttgaagattttgattttgtgatcatctaatcataacaatgtcgagatatgggattgtgctttagctgatgccctagttctctatgtaaatccagaaaagagctgcttttcttctttcagttttacatgtgtttgtattcccttgtaacatggtggaacagcgaggatgtctacaggatttgtttctttattgatcttctaaaagctctagttcatattgcaggagtttg

SEQ ID NO: 39145 - DNA, 632 bp, Arabidopsis lyrata
  Intron number 4 from transcript 489170 (locus 489170) deri ved from phytozome v7.0 (chr-ID scaffold_6; pos 9858806 to 9859437)
ggtacttttaacctcttgatcatctcttcttagattacaaggctgtagtctgtgactttgatttttatcttcagtgatgggttcattcatatgttacttgagttgtgctattgtgcatctcccaagttcattcaaagaaacatagaccaggttatagaaagaagtttccataagattaggaaaatgcttagtgagagttgtttatgctggacaatgcttaagggagacatgatagaaaaccaagtgggtacaactggtccttgtaaaagagcagttttgacgtttcaaattctgttttcctgcacaaccaaaactactattggaaactcgaaagtttctatctgcgccaaagtttgtgcataatgggctatgaactttaggtttcttgattagtgcatacaacctacgtcgtagaaaattttcacctcaatataaggttgaggagcagaacgcaggtaagggaatgagtaatgatgccgagaattgagacagttaagcttgaatgatcatgatggtagtctagtgatttgcattaacaggcatacacatatcgaagtaatcctatccccatgactgatctatgaaatcttcttgcagagaggattgttccgagcaagcttcatcatcggaaa

SEQ ID NO: 39146 - DNA, 960 bp, Arabidopsis lyrata
  Intron number 1 from transcript 344210 (locus 344210) deri ved from phytozome v7.0 (chr-ID scaffold_4; pos 5160277 to 5161236)
attgaggaatttggtgagtcgctggagaagaagtggtgactactcaaccgaagaaaccgtaaaatagaagaaccatcggagaatcggaaaagtccaccgcaaccacaacaattggcggcggcttctgtggctattcacttcgaatcagcggtggtagtcaattggcggcggattagtgtcttcgtcggagttggcgatttcaattggcagcggattcgtgtatttgtcggagtcggcgaacacatgcaggtttctgagagtggttttgtctgctgaaacagagaaaaaaaaagatgaagtcgacgattaataaaaaaattagggttaaagtgtttttctgttttttttttttgttttttgtttgaatttttttttaagactaatagaattaaaatgggtttttggtaattctacacaaaatttgtgttattctagtaaactccaaaactagagtgttaatctagttattaatctccagatttgtgtcaatctgggtaattttcagttatatatatgcattagattatatattatacattaaatatacaactgaatatacttttaagattttctaaatctttaacttgagataaatatttcaaatctattgtgataattgcttttccaagttcaatgctaatgtcagtcaataataattatctataagtaataatcacttatagataataattaaattttcacgtcttttaagactcaaatgtttcaatggggagatataacttcaacaacgattccttcgtccctgttcactatcttcgtccctgttcactatcttccctacatatatttcaaaatttctctttgcttctccacggaaaccctaaatcatcaaacattttatgtaaaatctaaaagtttctttaaccatggaacctcatcactacctatctgatttgaatgttcactcaaccgctggtgaatggtagggttgagaccaga

SEQ ID NO: 39147 - DNA, 931 bp, Arabidopsis lyrata
  Intron number 2 from transcript 474322 (locus 474322) deri ved from phytozome v7.0 (chr-ID scaffold_1; pos 27638789 t o 27639719 reverse strand)
agttactctcattcatcaattctcatcgtattctctttactcaggttactatttctcacttcttttttggttttactctctctttcgagttttcttgagtattgatcggcgaaaacggcgtaatttgattattttgtggttcctctctaagtagtgactactgctagatttcaagaacttataaacaacaaattattattttaattttgtattcgtttcttaacaatagctttaagctagacttttttctttctctaacgtcaaactgattagttttttaggaaattgccgaagaaagaaatcatagtgtaatacctcatatattgcttttggaacattaagatgatatagacttcatcttattttctctcttgtgctttgtttattgggtttcaagtttcgacttgtttaactttattgactaagatatttgtcacagactaaagaatattattattaattataaaatatgtcctataattttcagatttaaaatatgccctataattttcagatttcagactaaagaatttaatgtgcatgtctttatgttattgtacatgtttctcctatacttttgtcaaaatccagatttttttctgattaattcctctcgttaagtatgtaactataattctatcaaagactaaaaaggagaccaattgatattgtcttgaaaaagtaattccgaagtaatggaacctgcgaaataattaagattcgatagaaaaggtaattatctaggttaataacgttttttcacacttgtgataagtaataaaacatagtttgtgtaattgtgttgcatcctctttctctgtttttcatatgaagaaaccattgggttcgttgtttcttggttcttagtgtgtttctgaaaataatgtttccatctttcaggttttctctaaaattaagagatagaaaaaat

SEQ ID NO: 39148 - DNA, 522 bp, Arabidopsis lyrata
  Intron number 1 from transcript 927010 (locus 927010) deri ved from phytozome v7.0 (chr-ID scaffold_2; pos 17036810 t o 17037331)
ttcttttcttcaacctccaatttctcttcctccaggttagagaagatctccggcttatgctttcctttttctctgctgtcattcgcttagagttgtattagatattcaatttaattggaatctaggtaacatatctatgtgaattctacacaacgagctatagttttgatatgacaagtgtgactttgtcctcgttgaaccatcttttttcatatctgaattcgtttgaataaattttcaaattgactagtagcacaaatagtcaatcccaccagaacacagttttttagatacaaaacatgattatgtttgatatcatatggcatggcactagacagttttgctcttgtagggggtttgtggctcgttgatacgtcaagtacccctgcctttcttggtattaatacaaagttgacatacacttatcatccttatctcatagtccgttgcaatcttgattctattgttgtattttatagtggtacttatgcaatttgtttcgtttgcttttattcagggtcg

SEQ ID NO: 39149 - DNA, 317 bp, Arabidopsis lyrata
  Intron number 1 from transcript 493326 (locus 493326) deri ved from phytozome v7.0 (chr-ID scaffold_7; pos 12835364 t o 12835680 reverse strand)
tctcagacccaacaacaattcccatgtaagttcacttctctcttctctgcttcatcgatggtacttgattcaagaactgtgagattttgtagcttgcccatttgttgaaatcttgaattaaataatgggtttactttgtttttgacaaagtcaaacaaatttgaatcctttttatatgttagtttattgaaatttgttgaaaatatagtgaaattagtccaatcatattgatttatgggaactgattagagaaaatgacagcttttgttgtgatttgggtttgtgttgtgtacagacaaacagaagagcaaaagtga

SEQ ID NO: 39150 - DNA, 429 bp, Arabidopsis lyrata
  Intron number 1 from transcript 919901 (locus 919901) deri ved from phytozome v7.0 (chr-ID scaffold_1; pos 4341102 to 4341530)
caacgctcctctgattttctctcttctctgcacaggttttactatttatcttcaatttgcttcaaattaatgtcttcgtctgttgtcatttactcctttcaaacacttcaaaaaatttgcttgtgtcaaaattctgtcttttatactatacagagtcaaacaaaaatctctagaatgctcagttctgctgcttatggaatggtctataggattttaaattgatcatttttttttcaaattgcggaaagtgacttgaccacagccttactagcgatgcataagagttgcttgtttctaagattcacttaacaagcatgcgtaatctttctgttccatagtcgcgtgttcatgatctgggaaatgtttttcctctcatgatatactcttctctctgcagattagaaagagttttgaaggtacaagacttga

SEQ ID NO: 39151 - DNA, 516 bp, Arabidopsis lyrata
  Intron number 1 from transcript 923925 (locus 923925) deri ved from phytozome v7.0 (chr-ID scaffold_1; pos 28692851 t o 28693366 reverse strand)
atcagagtcaaaatcttaaaagagttctctgctttgcctaaggagatcgatccattctttcaaaccctagatcctgaaggttaaattttttcaaattttgtctcttatcaattttgccaattttcaagccttaatacgatttgattactctgttttctgattttgttctggattagggttagttcataattgatcgtcttctattgctctattgaataagaaaggttgcagatttatagttttaatccaaggctatatcagttactagtaaagatcatattttgcaatccagttactagtaaagatcgtgttggtttttacgatctctgtttttattctatatagatcttttgatagatttcattcatgtgtcttgtcaatactctcggtgattagcacttcctagagaactagtttaattggttgtgttacgatacttttgcttccacaacatccaaaatgtgagggaattttccatttacttgtgtttggttttgtgctgtgtaggtggagaac

SEQ ID NO: 39152 - DNA, 432 bp, Arabidopsis lyrata
  Intron number 1 from transcript 945578 (locus 945578) deri ved from phytozome v7.0 (chr-ID scaffold_7; pos 7265322 to 7265753 reverse strand)
ctgtttctgctctccagcagtaatcaaatctcttttcttttctcatttcacttgaaaatgtgtgattgttttgatgtgactatttgagctttgagttttgtcgaaattattgacaagtaatctcataaatggatcagctttgagtggtaggtattagttccacgagaattgtcatggactgctatagtgtttaaaagttttaaactttttttctgatatggatggaattgtcttgatctgatgatcttgaagaagtttgaaactctttcagctgtgtccccgtgtcaatttgaccccacacagttgtttgtactataaactacctaaaaccttaaatactttcaaaagttgtttgctggtttattcataataattgggttttttttgacgtgttggagtaatggttgagtcttgtttctcgaagggttttcg

SEQ ID NO: 39153 - DNA, 459 bp, Arabidopsis lyrata
  Intron number 1 from transcript 946014 (locus 946014) deri ved from phytozome v7.0 (chr-ID scaffold_7; pos 9154392 to 9154850)
ctaagtcaaacaggtgatccatttccctgtattagagtgcaatttacattattcatgcaccaagtatttagaatgtttgtaatcagctttggttttcagctcttaccttgtttttctgcttcgggatatagctttcggccaaataattcataagtgttaggactggaaggatgttgttattggaaccaaaacaaatgtagtacctttctgagttttacgatgaaaattcctttaaacagttttggtttctgggacaagaaatgtaaacaattgaatattatggcccttgaaactatttcttctcgccatgtgcttctcaaatgcgtttgtgattttgctcttgaaccatcttttacctaacaaatgtcatctgcagtcaaaagtgttttcttctacaatgtcacctaactccatgttatctctgtcatttcttttctatgggactgtagattgaagaat

SEQ ID NO: 39154 - DNA, 808 bp, Arabidopsis lyrata
  Intron number 1 from transcript 315838 (locus 315838) deri ved from phytozome v7.0 (chr-ID scaffold_2; pos 12939292 t o 12940099)
cttaaacaattttcaaaaagaggtaaagaaatggccaatcttcgtaaaacaattttttttttattttcatcgtttatattgatgttgatcattttttcatttacatacaaatttttctgaattgttgcattgttatgttaaaatttatcatttgttcaacaatttattatgattataattatcaatcgctagatcttgttgtttttgcataaggatctatgaaataatttgaagaaatctcaaatcacatataaatgtataaatcataatctttttcataaaaaaatatatttgagactatttggtcttagatctcaatgatttaatcaaatatatttttaaaaaaaaatcaaaaatcgtattcagaaaggtgtatgacaaagaataaagtgatttacatgtccattgatttacctatatttttgtcggatattaagatttcgagatatttgctgcaaaacataccttcaaattataatataattagttattatgtaatattgatcgtttatcaaatttatctaacggggatgtgcttttagtcaagtggttaattccaattgactccgccttctccaccggagtgcgactccagtaaatcgcgttaccccgcgtagtagagattggctatggatcgggccttgtcgatccaaagatgtcaaaaaatcaaatttatctaacaataagcgtgttcattaatatatttttgttttcagttttttttttttataaatgaaaaatatttatatgttttaaccatatttttgaaatttcatatacatcttatatacaaattaatgtactagtg

SEQ ID NO: 39155 - DNA, 676 bp, Arabidopsis lyrata
  Intron number 1 from transcript 889111 (locus 889111) deri ved from phytozome v7.0 (chr-ID scaffold_7; pos 4972195 to 4972870)
ccacgacactctcatcctctcccagttccaaatcggtaaaagcttctctgtggctaatttaataaagctttttgcgtcgctgctgcaaaacgcaaacgtcgttttcagacatttaattctacaatttacatttacatacatttatttgtctttatgtaggtattttaattagttacatctctacttcaattagtaattttttacttcaaccattttttttttttgctttgattcaataatagggattagggaagattatcgtaaataaatattttgctatatcaataaaagagttagtctagtcttaggttgtgagtctaaaattttaggcagttttttacttaacactttaaatagtattaaatatcttcgaaatatttgtttttgttctgtttggtgtccataaaggcttgttaaaaaaaaaatctaaatgtaataacaatgtcagtttttatgtaacgcatcatcattcacataattaacgtttataaattttccttcgttttttgtagtttcttttgttttttttttccattgacgcatcaagtttagttatagttttataaaataatgctataattattgttgcaagaaatatgaatatgaatatgtttaatactaataaataatcgtggttacagtgaaagcactgaaccaagcacggttagaagcaaat

SEQ ID NO: 39156 - DNA, 770 bp, Arabidopsis lyrata
  Intron number 1 from transcript 351685 (locus 351685) deri ved from phytozome v7.0 (chr-ID scaffold_6; pos 12366007 t o 12366776 reverse strand)
ataggtaagacgtatgtagtatataaagttccggtatttgtttctatatatcgattatgagtctttctattacattggtgagttcatgattgtttcctattcggttcagtcttcccttctaatttcactaagttgtgtgaaacttatgtggataatatggtgggtttatcttttgctgacaatataattcccataaaaattccacttctatgtgatctattaactaaccgatatggtttcaggtttgagttggacatgtcactagagtatgtgaatgcagccattaagcgtgtggaaaatcttatggaaaagatcaacaacaacataatctctatagagaagccaatttgaattaagaacacttatcaggcaagtagttatatgacttagagagtgcaaaggatgatgttcttttgtactgcaatatctttcattatataactcactttactacttgttactactttcacttgcctcaattagttgatcttctttgaggatacatcgacgctacataataaagttggattgcgtaacgaagaagaaaacagtccagatatgttatcgtctagcaaatgatgtaatttttttccaagctgccttcagcaacaggctttccatatttttattcaggatagttttattattatctttgccatatttatttgcttgctgcttgcctggttagtatttcccaatacttactctttctgcattctcaggtttaattcgtttcttcagttttcccaaaagaccgtcgtggccatctg

SEQ ID NO: 39157 - DNA, 928 bp, Arabidopsis lyrata
  Intron number 2 from transcript 343397 (locus 343397) deri ved from phytozome v7.0 (chr-ID scaffold_3; pos 22258733 t o 22259660)
caagactcaagatacaacaagaccaggtaaaactagcactttgttcttgttttaatgccttagttgaagtcttgttcactacttgcagtgactttatcttacattctgatttttttttctctgtcttaaggacattgtgagtgtaagattctgctacttgccaatttgtttatctttctgtttttggaaaatacagttgaaaatggcggaagcaactcaaaaccaagtaaagaaaacactgcaacggtcttcgacagctccattttgagaaaaatctacaagtcctttctttttgggggagttttaagtgtttcttatgaagatgagaaaaacagaaaaagtttgtacattttagctaagaagttagagcatctccaatggcatatcttagagtatatcttaactaaatatcttaggattaaacacaaaaaaataattcaaaacagattaataagctaagatataaatcttagcttagattttttcttaaggttaagatgttgttacgtgtcagcatctgagtggaggaaagaaaaaacaaaaccaaaaaaaaaattattgagttgtgtttttttttttttttgcgtttttcatctctgtcgagagagagacttttgtcgacaaaaatgagggtgtgcgatctctttgattccggtggttccgtcgaactaggattacggtaatgcaaaatccgtctatgatccgttgttatcatcagggttcttaaagttgggattacggtaatgcaaaattagggttcttagaattgggattagggtaatgtaaaattagaattctatgatccgtttgatgtgtagaacagtaagaattgatgtggtcagattgagaattggtaattgatctgtttgagaaactggtaattgatctctcagacttcttcttcttcatctcaagtaagcttctttct

SEQ ID NO: 39158 - DNA, 877 bp, Arabidopsis lyrata
  Intron number 2 from transcript 905064 (locus 905064) deri ved from phytozome v7.0 (chr-ID scaffold_3; pos 9002967 to 9003843 reverse strand)
catctagctctggagcaacggtaataatttttgcatactgtcttctttagttttgatgaactatattacaaaataattggttatgatcaaaaacttttagtcccataggtggtattattagtagtcatgatttagtttttgatctttctgttatgtagaaatttagtttatcttctttgttaccgagttattggattataatgataaattttgcttttgcaattgtcaaaactcactggtgacactttccacgttatgtaccacgcggtctcacctgatggacgtgttactcttaaatttattcttatcgcatatctttgtaattatatagtctctttttcctttattattttcttgtattggcaattaattatttaaattcgtatcaacacacttttttgttgtcactattgcaggcgttaataacaaaagcataagcagtagatgaaacccaagattggagtgtcttcccttccatgaaatctcaggtaaagaacattaacttatatttttgattatatgactgcgtctgccatgtgttatataatcttcgttcacggtttacaaatttgttggtagtttcattattagtcgacgtcgcatcttctgtttacaaagaagagccctctgacgacggtgacgtaaaagtgagtagaaaaatcactaattttatgttattttcttcattttcttcattttctctgatttttgtggaaccacaacatatatgctcactgatacgtatatttgtttgaatgaaatttaacaagtccaggtactgaatgtggtgctgttaatgcttctaatggctacatcagtgcacatgtctatggtatactcagatttttgtttcttctttttcgttgaaaaagttatt

SEQ ID NO: 39159 - DNA, 723 bp, Arabidopsis lyrata
  Intron number 1 from transcript 495653 (locus 495653) deri ved from phytozome v7.0 (chr-ID scaffold_8; pos 17129056 t o 17129778)
aaagctcagtgctttgaagcctttggatagcgaaggtgagattccaaagtcttctcctttcgagtctctttgaaccactctgagcttgttttgtttgtttagcggttgaatctttcgagcttcgtctatatccgcatgttggtttttggctttcaatgttgttttgcttcttgaagtcgcttttagggtttgtgttttgtgttctcttttgatttgtgaatttttgttagtttagttgagaaaaagcgtatgaatttgaggttcgagagagactaatcttgatttctctatgagcttttggattcctttaaagttatagcgtggttgtggtttggatctaaatctatgtttttttccaaaaagtattcaatttgatgaaaattttggttacccttctttttagatttggactgaattattaagaacttgttggatgtctatttcatttaaaaattggatcttttatttctcaatttctcgtgttagagcccattgaagttgtatgtagaaagatgggatgctatgaagtatacatgttgctataagtttgttccttctctgaattctctttacttattcttgcacatccagttttgggttattgaacccttcttttgcgtgccttttgtttcatgaacttctgcccctattgtggaagtttttaacgctaaacttacattttccacagcgttctggtgtttttggctttaagatctactgaac

SEQ ID NO: 39160 - DNA, 565 bp, Arabidopsis lyrata
  Intron number 8 from transcript 480315 (locus 480315) deri ved from phytozome v7.0 (chr-ID scaffold_3; pos 18370312 t o 18370876 reverse strand)
acaacagagtgtgggctgctctcttcttagtatgtttgtctgctttaaaagtaagaactggttctgtaaattgacctgcgagaactattcccaaggaccctatttcaagatgcatattagaacgcatctaaattagagattttgaaagacatccttgtcaaacaacgatttggatttggtttcaacgaaacattctgttgctcttgttttctcaaagcactttctgatcatcaaccttaaccaagaaagtcaaaagcaaacttcttattagttagtgacccaccacccttttgtgtgcttacacatgtcctagcggctttcagtgatgtggcatagtttaacctttcaaaactgttggagctatatgtttttactgtttccacaattagtctgccagggaaatgtaatcatgttttttgtcacggccagtcattgttattatgtatttctatttctaatagtatagatcttgaataagtagaagattaagttttgattagtctgcgcttctttcgggccctcatttgcagataatttccgcagtttctggagggataacagacct

SEQ ID NO: 39161 - DNA, 546 bp, Arabidopsis lyrata
  Intron number 2 from transcript 894837 (locus 894837) deri ved from phytozome v7.0 (chr-ID scaffold_6; pos 14422274 t o 14422819 reverse strand)
tcatctctcgctttgaggctgttcattgtaaacaggtattttaattctttatagctaatgtaactttgattattgtgaatcagtttgagttggatattttttgtttggtaccttttaaaagatgtttttactgtgtttaatctaactatatgatttcgacattactagatatggtgatagttttgaatctactagatatactcatattccttaccttctttaatgtttatattagtgtgatcaatatatattgttttgtttgtagttctgtttctgatagttattttagtttgtttttatgttgtatatgtattttaatcgtattctgaatatcatggtttctcctgttttcttaatttcgtttagatatcagctggtgtttcctcctctcgaagatgtataaaggatacattttatttaataaggtattttgtcgaattttgtctatctattccgcaaatgtatgattgtcttatgttttgctttaaccttagcgtctctggtgttgtagtatactcagaattggtgtagaagatttttcacctc

SEQ ID NO: 39162 - DNA, 429 bp, Arabidopsis lyrata
  Intron number 1 from transcript 494049 (locus 494049) deri ved from phytozome v7.0 (chr-ID scaffold_7; pos 23269847 t o 23270275)
tccggctaaatccaaggagaattctctggtcagtaaacgatttttctgattttggttgattgagattctttgatttttgaggtttggttggttaagtaattgaatgattggtcttcacctttatggtacataggaactcaatcattacacattaacaacagtaaagttctgagcttgagttatgtttgctatgcagaacatctctcatgagacagagtctctgactcttccaaaaaataaagttttgagccttttagctttggctgagaggcaaagagtgttgttataagctgagatactcaaaactagataattcatagagaagtcaaaagcttacatatttaagagttttcttcagtttttaaggctaatttgaggcctcatgagaatattgatggatgtgtaggtattggtcaagataaaacagtg

SEQ ID NO: 39163 - DNA, 430 bp, Arabidopsis lyrata
  Intron number 2 from transcript 476433 (locus 476433) deri ved from phytozome v7.0 (chr-ID scaffold_2; pos 15679004 t o 15679433)
tatcgtcaagtcccttgagtcttcgcttgccacaggtatttcatcggctttgaattatccgaaattatcttcctatgctgctcataggtttagtatattgtatgtctttttgctctcggtggttgtgttactgatcattaagtaaggcttaattctgtgaaattgaggttggatatgtatgaccaccatggtttatggcgtattagttaagagttaagataatttaaggtaatgtaaacttgaaggatgcttctgaatatagatcaggaaggttttgtgtatatgaaatacatgaaaggttttatctttttgttctttctgtgatacaatcctttagtctcagttgagcactagtttttgattcattgtgttgtaacaattttggttcttatctgttttctgtttcttgtcaccagggaatctacagaag

SEQ ID NO: 39164 - DNA, 270 bp, Arabidopsis lyrata
  Intron number 1 from transcript 325939 (locus 325939) deri ved from phytozome v7.0 (chr-ID scaffold_6; pos 5946600 to 5946869)
ctgtgcgccatagaaatatctcctttgaaagcaaggtgatttgaaaatctatcgaataatttttcatgggattttgctcgattcttaatagaagatgttcgttttattggtgtttatttgatcaaataaagtctactttgctttgattttgatatctgtagaaaattctactgtatgaaacaattttagtgttgtgaaagatcatccagatcgagtaatttctagtgtttgtttgaaagggaaacaagacagagattgtgatttgcagct

SEQ ID NO: 39165 - DNA, 752 bp, Arabidopsis lyrata
  Intron number 1 from transcript 471352 (locus 471352) deri ved from phytozome v7.0 (chr-ID scaffold_1; pos 4858983 to 4859734 reverse strand)
caggtaataacaattatctctattactctttgtttgtatgaaattacaattttatgtagttgattttcagggattggttaagtttgttcggtacaatcttaaaatgtttagctcaaatccgttgatatatagttttgtagggctgactcttctaaacctagctaagctcttggagtttttggtcatttgattttattattttatttttgttaaaggttgaactagtgaaaacaaaattaagctttgcataggaatggttttagaggcgtgattacaaaacatgattcagaaataaaattgatattgagattgtgtactgcctttgtcaatatagatcgactagtacatttgagttttgaggttgattatttagtcatttgattcttataaagaaatcctggctagtgcaagtattttctcccccatacacatcaaagcatatatacaatgacatgtagaacaaatcacattaggatttagatatgaatttgttgtatctgaaatcaagtgagatgctgatgaaatatgtttatgcatatatatcaaacatatcattataagattgttttaagaacaataatcgcatgtcaatttttatctcatttgatgttgtaatattcacattttttatggatgtgtatagtaccataatggatacatgttttggatttaaatgtgcaaatatactgaaatgaaaagattgatctacgtgtataggtctctgcaagtcccggtgggagaaatttggtaag

SEQ ID NO: 39166 - DNA, 647 bp, Arabidopsis lyrata
  Intron number 1 from transcript 478970 (locus 478970) deri ved from phytozome v7.0 (chr-ID scaffold_3; pos 6421697 to 6422343)
tttgaatctttgtctttaaatccattcaaaggttagtgatttgtttatccttcttctgagttactttgtatcgctctcttgttaagatgctgcaaaaatgaactagagaatcgttttacacttgtgttggtgtggttgccttcgctattccatcttaggaacgagatttcgtgaattagggtttagggttttggaattcagggatttaaccttttagggcttatcagaattgttaatttctgtaatcgtttcttcgaaattggatgaaatcaataattggatgaatcaattatctcatccaaattgaaaaatataatcactctttagaatagaagttgaaacgatagtaagaggtttaggatgatgttggtacatactacatacaacaataacatggagtggcttgtgggtcgtctttgaaattgagcttaagcaaacaaagtatccatagcttctcctttttttctggcttcgttatgctttaatttgtgcataaagaagtaggttaacatggagatttacaggattaggaagatttgactgtgccactaatcaaatcttttcctttttcctctttacacaagaatgctttatttaataagcatggttctgtgcctatttgtttgttggaatctgttaggttagag

SEQ ID NO: 39167 - DNA, 388 bp, Arabidopsis lyrata
  Intron number 3 from transcript 919222 (locus 919222) deri ved from phytozome v7.0 (chr-ID scaffold_1; pos 1839823 to 1840210 reverse strand)
gccgattgtctgttctcaaacctcagactttgaaggtttttttgattctgcttcttctttcctatttggtttgcttctttgtatattatggccatctatcattgtgtgagattctggaaaagaatgtgtatcattgctacctcttttggtagaagatgattaatttaattggtgtctctgtcgatatttataatgattagtcttgccaaattttcacaaagcagaggctgtctgtttcttaaatgaaatttctaagatgcatgtacgtcacttgctctatatgctatgctttggtgatgatatatcacagatccaagtacttatacacggttctagcccttttgcttatgctgaaatggtactatatttgcttttctagattccaacc

SEQ ID NO: 39168 - DNA, 780 bp, Arabidopsis lyrata
  Intron number 2 from transcript 356522 (locus 356522) deri ved from phytozome v7.0 (chr-ID scaffold_8; pos 2379254 to 2380033 reverse strand)
tcgaattgaaattcgaggtatcatccattaagaccatctttcctccggtcacactatttgttaagagtttacacgaattcttagacaatcagcgaaaacccgttttacaaacacctgagccccatatcttagacttcctgaaactcagaagcttccaaagtagccaaggaaggataacaaatccagacttggtagaatcaccgcctacatttaaaagaaagatatgtcaaaaagcactcgagatgagccaaagtcttcagcgggggttgactaatctaaatttagaatatgatgtgttcaagatccgtcctttggagaatttgatgttcacaaagctcaaggaggagacgtcctaattcctgtcacctgcaatcagtaaacatctcaagtcttttgactgtttcttgtcaaacactcatatgaaatccaaaagtggtaagaacttgacttgtttacgcaatcagtaaatatttcgtttttcatttcagcagaccaaattcagtgtatatctgaagtcttctttaatgtctcttgtcttgcatgactataaatttgttctgttttcgagtcactgttccataaaaatgtaaattttcagtttttccaatgatgttatgttgtaagattcaaaatcatatgtttgatttggcacataatttgggtgtctgtttttctaatcatgtgttagttcttgcttgtgcgtcatatttattattagttcttgcttgtgcgtcatatttattagactaaaaaatttaggcctggtctagtcggaaaacc

SEQ ID NO: 39169 - DNA, 385 bp, Arabidopsis lyrata
  Intron number 2 from transcript 472085 (locus 472085) deri ved from phytozome v7.0 (chr-ID scaffold_1; pos 7824689 to 7825073 reverse strand)
ttggtaattgttctcgtctgatcttcttcctcacggtacagatctcaatcgtatatcgtaaagctctctttctgttcgggttttgatgtttcggtttctacttagccatttgatagatcacgtggattccctctacatccattgcatccaaacgttacattggatctcgttcacttctcagttttttctgatgaaatctttatgagtttgattatctgttagctaattcgaccaaattgtgcgtctttgtaaatttagttttttttttctttttcatttctaagattcataaaatgtcttcctttttttttttttttccccagatgttgtgagtaattattcgacactcttgttttcttgtggtttgtttgcagctcctgtttca

SEQ ID NO: 39170 - DNA, 248 bp, Arabidopsis lyrata
  Intron number 2 from transcript 482180 (locus 482180) deri ved from phytozome v7.0 (chr-ID scaffold_4; pos 15394811 t o 15395058)
acgaaggtatagggtttgtttgtcttttacaaattctttgcaaaattttgaaaactgttgtgattgatagaaatataaactatttgttcaaccaataaacacaatcacatttttggttttaaaacacctgagacaaaaatcaagatttttcattgcttttcgtaatagttatttggaattttcttgaaattttgtttttgtattaatatacagagggagtacgagaagctaagccagaaattagaaga

SEQ ID NO: 39171 - DNA, 395 bp, Arabidopsis lyrata
  Intron number 3 from transcript 473020 (locus 473020) deri ved from phytozome v7.0 (chr-ID scaffold_1; pos 12374465 t o 12374859)
aacaagtaataaatgagttaatacttgtttgttaatctacgtagttaattaacccttttcttctgtacattaatatctcttaaattcattcatcaaaaaaaaaaaaaattgttagtagacgacaaaaacaaaatttaagaaaaaaatcaaaacacaatataataattttgtcaaaaaaatataataatttttatctggtaaccagctctcttattgggcttaaaaattatagcaaataaatcggctttttctttgctacaaaacaccttgcagttacactcatgtgagggcaatcaaaagaatcatttaaatttgttttctttagtcaaaagaataaaacagtgaagaggaaattttttgctaatggattgtgttacatatatgaaattgcagat

SEQ ID NO: 39172 - DNA, 357 bp, Arabidopsis lyrata
  Intron number 1 from transcript 326545 (locus 326545) deri ved from phytozome v7.0 (chr-ID scaffold_6; pos 9328409 to 9328765)
ggcaggtttcatcttctttcttttttttctcaaatttttctctttttggatcaaagaaagaagcttgcttacttttgtatctgtaattctgtttgtattgattttttcgctgtccctagctttgtaaagttgcaaactttagttaataaatagtctcttaaattccagaaatttgaattgcctgacttgtgagatgagtcatggttacttgattgtttaatgttgttgccttgtcttttttttgctcgagagatttgcagattcgtgagaacttctctgtaagtatattctcttaacgttgagttacttttctttttatttgcaggaaggttgctattgttaatctggatcctgcaa

SEQ ID NO: 39173 - DNA, 984 bp, Arabidopsis lyrata
  Intron number 4 from transcript 476182 (locus 476182) deri ved from phytozome v7.0 (chr-ID scaffold_2; pos 14498587 t o 14499570)
ctgtcagcgtcgtcgccgccgctcctttttattccgtaagtccccaccactaaaaactcctcctcgtatcttttcctttttttttttttttttaatttttttctaaaacataatcgccgttgacatatttttaattttacattatttaatttttgagcatccgggattgttttttgcaactaccaacaaaaaatcaggtaaatattgtatgtttaaaatttcaattttaatagtagggcttgattcttgactagttaaccgattttttagctagacaagtccggatctatcattctctggtgctcttattttcttaaattaaattttcaaatttactcagtgttcttaatttcttccataagagaagtgattcttgaaattcatggataaataaaattagatctaagaaaaaaaaaacagaattttaacggtatttctggtgttgctttggatccatctttttaaaactgcctaaccaatgtaaacccgacaaagaagcaattattgtatttttcacttatatgggatgtcatacgttacttcaattaaataatttatgaaaaaatatttacgaaagaagtaccttcctctctggttttcataaagctttgaaagaagcttcattaggatgttattataatttatctaaaatcgtaagtcgtttttaaaagggtaataaagttgatttgatgtgaatcaaagattcagtgggcgttgtttctcaaaagcaagattggagatctaaaagacacagtgacagacatgtttctcgaacacaacacaacacatcgatccaccattttttttctttttgatttaacatttgttttaaaaaacactttcccttcttacatactacatgtgttgtagaatcatgtgcatagacatcagtaacatgctcatgtccccacttttattcttcccattcttaataatttcattcttgagattataaatttttattcttattttgaacatagacat

SEQ ID NO: 39174 - DNA, 678 bp, Arabidopsis lyrata
  Intron number 4 from transcript 481524 (locus 481524) deri ved from phytozome v7.0 (chr-ID scaffold_4; pos 9724059 to 9724736)
ctgctcttcagtcactttcacgccctaatttccatgtaacttctctctcctcaattgcctaaattttaagagttcattgtcattaaataaaataatcttgaaccatccctctgaaatttagggctctttgtttgtttttaaagacgaatatagacagagatctgagcctcttgttgcatgtttctgtaaccagccgccgtctactacataggcccaaattttttaatattacttaaatcttcttctttttacatgtttatttaagtttccttttccagctgtgattgatatctgcagcttttttcgtaattgcttttttttttcttttcatagagccctagcttatgtttgatctattactgatgtgggctacttattctatgatttgattgacataaatattagggtttcataggtttgtttgtttttttctatttcgaaacatattttcagattccttttttgaaggttttttcttttactacctttaaatattaataatatgtctataagttggtccactttatttttctcttttcaatttcctaaattaattaatacatacatgattgctactcaatccttctgattcaccatttttggtctggaaaatcaaagaaaagtcatgtaattaaaaactaaatttagcgtttatatatttttattaggcaacgaact

SEQ ID NO: 39175 - DNA, 547 bp, Arabidopsis lyrata
  Intron number 2 from transcript 335156 (locus 335156) deri ved from phytozome v7.0 (chr-ID scaffold_1; pos 8038836 to 8039382)
attccaaggtaattttacaattctagatttatgtttctgtggattcttaaacttgaagatacttttcatcatctaatttgtttctcatgagctgatgttgttttgacattgatttgaggatcaagttttgacatttctgagcttatatagatttcataatccttaaagctttaacagttcaaatgttgttttggaaatagatttcatttgtttaattcattgcttaccgtctatgaattctaatggtcattatagtgcagatacatagtgcagaaagacttgtgtcaaattattttcgcaatatattctgaatctaccataaaattgaggagtttctttttgttgagaggatcctaagtagcatgggctagtaactgttctttggtttacactaatgattagagctgtgtgacttgagatttgtggcacattttcttaaggatagacttcactgtcacttgtgctttattattcctttctgttgcatattcttcatcaactctattccataaaaaagaatctgtggttataggtaaaggaggcagaa

SEQ ID NO: 39176 - DNA, 465 bp, Arabidopsis lyrata
  Intron number 1 from transcript 929227 (locus 929227) deri ved from phytozome v7.0 (chr-ID scaffold_3; pos 6038403 to 6038867 reverse strand)
tcgccctttctagtggtcaaatcttcttcaataaggtttaacttaaatctcacaatctagatttccctggatctatgttctcgcatcgtatttgttttgtgctctttccgatcgctagtttccgtaaggaattgagctggttctgtgcaatgtactgtgctagtttctaggaagttgactagcagattttagaatccaacacccattgttcatttagccataagattgtgctggtttttttgtttgatcctgtttcgtttgctcttgacctctctgtttattgcttatgcatcagagttcaccgtttttcaaattgtagcaattgacgtttcacgcattgtggtttttttctcttttcctcagggtatggttgttaatggaaagtttgcttcatgactaacgttcttgtctttgatttgttctgctgcagtgggttttgtcatctaaggaaattaatttccctta

SEQ ID NO: 39177 - DNA, 444 bp, Arabidopsis lyrata
  Intron number 2 from transcript 480691 (locus 480691) deri ved from phytozome v7.0 (chr-ID scaffold_3; pos 22336573 t o 22337016 reverse strand)
ctcagttcatagagttgaagggtgcacaggttaaggtgagacaacgtttcttcgtaaggaaggaaatcaaagctttctacgttgttggaaatattattatatcaaggcctacaccgactcattgtttcatctgaattatattgttcgtaactgggagatgccatgatatattgacttttgtttttggtttatttgcagacggtttcttttttgacttatttgttaaaaagttgcgccgaatatatccgaccgcatgaagaaagcatatgcaaaagcattgtaaatttgcttgtgacctgttcagattctgcatctatcagaaaggtggaaaaccttttgttttttcttttgggtatgttttctctggtgacacaattaagggatttcttctaaagatttatttctcattatatgaaatgcaggaactcttagtctcattaaagc

SEQ ID NO: 39178 - DNA, 580 bp, Arabidopsis lyrata
  Intron number 1 from transcript 325637 (locus 325637) deri ved from phytozome v7.0 (chr-ID scaffold_6; pos 4395629 to 4396208 reverse strand)
tcagccttctgctttcactcccgacttatctcctggtaaatttcttcaattttagggctttattcattcacttcaacatggtatgaaaattcaagaaatttagaagaggaagaagaaacagattctggttactcttgcttgtgacctgtgcattgaatgattatgatgtttttttattcgctataacttgcatcttttttggtagaaagtagaaaattttcaaaacgttattttgaaaaggttttagctttgtggggagttttgtcctctgggtcacatgaaattttctctgtagtcacccttttcatgtcctccattgtaaacgcttatcacttgccgtaaagttccaacttttcatttgatttttcgatttgtttttaagaaagtgagaccattttccttcgttaaattcagtttgattgtttcttgaatctgaatttgttttggaggtctgcatagaggtctgaaggatttatgcggtttttgatttggatgtataatcctgaaacgttaggaaaagctaatgcctttggttggttgatcaggtttgcaacaaggcgagaaggaattgcataaacaa

SEQ ID NO: 39179 - DNA, 465 bp, Arabidopsis lyrata
  Intron number 2 from transcript 933391 (locus 933391) deri ved from phytozome v7.0 (chr-ID scaffold_4; pos 13420051 t o 13420515 reverse strand)
tctcctctctgtttgagggaaatcttaacatcctcgtatgtcttctcttctctgtttcaccaacaaaaattatgaacatatatactaattttatgaacatatatatagataaacaatgtagggacatgtgtgacaaagacaaccatagaatcaacagcagaggatttctcaaatcaaatctcaacaaatttggagtctgcataccatttgtgtcagcttgctcattcaaatatggaattttttgttaagagagtccagaaactgtcatgattataatgtggaattttggaatgaagggtttcaaagttcaaaacaatcacgtaaaattctcttggtccatcctcacaactactcttggtttatatatgtgaccttcattttttttcaccaaatatgtgaccttcattgaagaaactgatatcaagaaatggctaagacagaagaaaatttgagagacaattctag

SEQ ID NO: 39180 - DNA, 556 bp, Arabidopsis lyrata
  Intron number 1 from transcript 478612 (locus 478612) deri ved from phytozome v7.0 (chr-ID scaffold_3; pos 5022670 to 5023225 reverse strand)
agtggttcgcgatcaagaaaactggtggctgataggtgagttttttttttttttttttttaatcgcaattgacttaccgatctgtaaaattcagggtttttgggtgattttagatccttgactctgatccggttttcgaaagaatttgttcgacatctgatcggttactgtttcttttcatcttgactggttttgttaattggagttgtaagcagtttctggcatttgagtctttaactctgtcttgttcaattttactaacgcttttacatttccatttcttggttttatgcttttcttagatcaaaggctcggctttgtttgtattgatctgatctatatttggttaccgttgatgattcttgttgctactttctgattatgcatttgtccaattcaatgttttgatctataatcctgaaatgcctaacatcatcatttggcttctctataaattgtattctcatcatgattagtctagctaatgatgatctgaatgtaaatgtttgtgctctcattctttgcagtgtttcttttgttttgtgttgctagtgat

SEQ ID NO: 39181 - DNA, 621 bp, Arabidopsis lyrata
  Intron number 2 from transcript 937525 (locus 937525) deri ved from phytozome v7.0 (chr-ID scaffold_5; pos 13470690 t o 13471310 reverse strand)
ggcaattcaagctgggactgtgtcacggccaccaggttcagtttctcttctcttgcacatttcattgtgagctttacgagttagacactagcattttgcttcatatgaataatccctcgtattatacatcatctgttcctcggaatttccagactagaaaactgaattttgtttgccttttagattttgctcgcttattgctatttgcatgacaatgtaatcaggctctgattgacaaaattcatcacatcaaatacttattctgtctagtcattacgttgtcatatggtaaacagtgataaattgcttttgtctagatgcctctaatcaacacataactttttctatttatgataaagaacgtgtttggagaatagtaaacgggaaagtcagtttaagtaccattgattttccatgtcaatgttttagactaaaatatgaaagagatgcgtcctttaggtttgtttttctatttctccacgtcttgtcatcatgaaaattggttttatggttcttccatgttccttaggaagcaatggtcaagtcaaactaaactttaagaacttatttgcagtggtatgaaaaagagcttctctatttgttgtatgtacaggtgatccc

SEQ ID NO: 39182 - DNA, 668 bp, Arabidopsis lyrata
  Intron number 1 from transcript 937525 (locus 937525) deri ved from phytozome v7.0 (chr-ID scaffold_5; pos 13471407 t o 13472074 reverse strand)
aacacatcatctgcactggaaatctctgcatcaaagtagggttctctcaaatatttactctttacatctctattatgctttatttgtttcgttaatgtccttgtctgatgtaattttttttgggatacttacttatgaggaatataagtagattcagaacgagaatagactctaatttcaagcttatatgctgattcttatctgatacaacctactctaagtatatcctgtatcgggttgttcagaagtaatttcttacttggttgtgtgagaattactgaaaaatggaataggagacgcaatagtgattgttcatctcatgtgatctactcggagcttgttctgtatcttctggattgtgcagattttaattcgcaccttgtagtgtgagagtcgtagaatataggaagatgaatttcattacagtgttagttttagatttgcttatgacggatggaattgcaaagtgatcaagtcagcatcgatgagtcatttatgagaattcaaagatattcttttagttggaagatgtgttgagaaatttatgaggcgtttagttgataaccattttagaggagttgcagacctgatttattcttatgctgtgaagtctttcctggttcatgtttgtggtaagcttaacatcttttgactgttttaggaaatcc

SEQ ID NO: 39183 - DNA, 1012 bp, Arabidopsis lyrata
  Intron number 1 from transcript 487510 (locus 487510) deri ved from phytozome v7.0 (chr-ID scaffold_6; pos 2642113 to 2643124)
tttacttctgctcctcaaagatttcgtttttccaggtcagtttcttcatcaagccaacatttttttctagggttttctcctttttttgtttgtttgtctgttgcttcacagtcctaagaagctacttgttaacttcgtgtgttgcctttgaagttaaacctagttgactttctgaagcttaaagagttcagctttttatttatttattggtcattttgttcttaattttgagcaaccaaaatcatctaattctgatattttggatttaaatgtttatctcttaaattctgtttcttggtttgaattcatagttgcagcttcatgccaagtttttgctggtgctagatttagagtttagcttttttattttactcggatatgaatactgagtagtgagtaggaattgagtcaactcggatgtcaatactgaatagatttttgttctgactagaattgcaaaccaagctacttcagtgtcattaaaactgaattgaaatggtttgtgactgtgcctaacttccaaactcaggcattttcaactgtgccaccttcttaactctcactggttttgactttgatccgcggtctaagcttaaggtctcaagtcgtcgagggtttctagattgttcaagcttcttgtctgattgggtttcatgaattgctttaaaggttgtttttttttctatgactatgttggtgtatcagtattttcagtttgctacacaaagggtcttcattgatttttttgttgcaactagatgttctattgttctttcaagtgacatccacatttaattagcttgcttttgttcataacttttgcattttggtacacatttggtgggatattcttatatatttgagtttgtgacttttgggttttggtagttagtagatttctccttaggacacttctgtgttgaataagtaaaggactctttagcgttctttttgtaggacataattgaaaactatgttagcaaatgttttttgtgctcattcagcacagcca

SEQ ID NO: 39184 - DNA, 449 bp, Arabidopsis lyrata
  Intron number 2 from transcript 925091 (locus 925091) deri ved from phytozome v7.0 (chr-ID scaffold_2; pos 3649752 to 3650200 reverse strand)
caaacggtgagtagcaaacaaatttgtttgggcttgattattggatatagtgcgaagaagacatcttcttattttcttattaacttaacttgttaccagccccggcccaaagaaaatgaagaccttagggcaaaaaatatttttttgggccttttagcattataatttttttttttactattttaaaatatatttttggtatttataattataaaaacaaattattttcaaaattttggactttttcatagttttttttataaaaaatctgggccttttatatctaattttgggttatattaattttttgaaataaatatggacctttttttgaagtatttttgagtgaaaaaaaaaagccttaggccatcgcacccctgtgagccgggcctgcttgttactatttgttttatgtttactttaggtgctaccatctttaagggagaagc

SEQ ID NO: 39185 - DNA, 806 bp, Arabidopsis lyrata
  Intron number 1 from transcript 488494 (locus 488494) deri ved from phytozome v7.0 (chr-ID scaffold_6; pos 6695142 to 6695947 reverse strand)
tacactcagtggtaacgtttcgatcacttcttcttattgttggtgcgaaattttgaattccttgattgcaatctcgtgtttggaactactttgattccgtcagatgttcgcggaattgaaaatttcaatgtgccgtttgtttgaatttttcatttgagcatcgaatagttatcttcttgataggttttggatcagtcgtaggaaattagggtttcaaggttgtttactgatttgggatttctcagttaaaataattttgctaagttgtttgtttacatgagaactttgctttggctgatcctcatgtctttaattctcaattcctaattcttgctacaacataatcacgtcctggtctaacaatctcccttgattctcttggcctattttaagctcgtctcgtctatgaacctcacattgtgtggcttccatagtttagggctagtatttgatcaccttgttactttcaattgtattcaaaagtgacagcattgtaagtaactaagtatcacccataatcttcacattatgttacagctcagctctgtagacattcattttttgtttgttaaaaatgttggatacaaaaggatatgaaactatgaatagtaacaccttctggaggattagaccatgtacatttaataaataagccaagctgttccagtcatggatgtttgagatgagtttactaacatatgttttgttttgttgttgagtggaatcaaagtttgcctttttttttttaaatcctcattgggttttctgcaggtgtggtccttgcaaagtgattgctcccaaataca

SEQ ID NO: 39186 - DNA, 388 bp, Arabidopsis lyrata
  Intron number 1 from transcript 913209 (locus 913209) deri ved from phytozome v7.0 (chr-ID scaffold_1; pos 15789668 t o 15790055 reverse strand)
ctcccttttagggttttgctccaagaagagagaaagttaatctctgtgaaaattatgtttgtcgtttgggttttgattttgtagttttttattatttttttattttttaattaaattataatggcaatttcgttaatataaaataaaaacagattagaaagtctttttacaaaagatgtgagtcattttagttatccctttcaaaacagagtcattctaattatttcatacaatatatagattattctgagtaatttctacaaataaagattgaccgaagaagttaggtgtgattgttgcacatcttccaaactgacatcaagttttatttttgtgtgtttaatgttactttttcttgaatgaaatttccttgtaatgttgtagataa

SEQ ID NO: 39187 - DNA, 366 bp, Arabidopsis lyrata
  Intron number 2 from transcript 312599 (locus 312599) deri ved from phytozome v7.0 (chr-ID scaffold_1; pos 6805900 to 6806265)
cttagcaaggtacctattttaacttcttatctagttttctttttgtgtatgatccggtttctgatttcttttatgatcctagatattgcagtgtgaggcactctaagcaaactggatttatatatcttgtttatagtggctgtgttttctatgaccaatgatcacaatagcagaaactcaaattgataaaactttgattttgttataagcaatacttgagatgattctagtggaagcttagatgattggtgaataaacaaattaagaaacgctacaagagaacctatgtgcttgtgctgacaacatctttgcctttttttgcaatggatagagtaaaactccaagttcagctggtccctcttccat

SEQ ID NO: 39188 - DNA, 948 bp, Arabidopsis lyrata
  Intron number 2 from transcript 945657 (locus 945657) deri ved from phytozome v7.0 (chr-ID scaffold_7; pos 7596216 to 7597163 reverse strand)
tggagagccaagtgaagaccaaggtgtctatcaaggtgattttcttggctctgttgcacttttaatcatttttgattaacttttcgtgaaattgtgaataatagtcaactgaattgggtagaagaaaatatcctgtttatgttcctgaattgggtggaagacgattaatagtttctaagctatcttgctctagttcggttatcttcggagtcatatgagtaataggttgtagctgagcctcaaacaatttcttagtgttaaaaatttcaacttgatattaagctgctgtgtagattcagttatctgcctgataagttgcttacatatttgctagctcaggaaatactaacactgtcatgaattcaattcaagtttatagtttcattggatgtcatatatgaataataggttgaagcttcccatatgtgatttgctagagttaagtgttaactttagattaagctgtatggattcagttatctggctcataattaggagcttatatctgttttacctcaagaaatacttgcaatttcatgaatactctcgactgttgtagtttaatagtctggatattctatgttcttctggaagctgactgatctattgtttttggtgttcttcactaatctggatagccttgcctacatttttgctagcgtttctgatgattgacattatttatcttctgattcagtgcgattaatttggcttgtttaaaaacactgttttcatatccatatagttaagtctgttttcagcagactcaaaagaaaatgtggtgcaaaaccaagaattattctttgttccgaagataatttttctcatatctggatctcaaaataagagaaaactttggcagatgaacaatcagatacttaatctcgtttcttatttatcatttctcgtacaggggcacctgcacacttacaggttctgtgacaacgt

SEQ ID NO: 39189 - DNA, 705 bp, Arabidopsis lyrata
  Intron number 1 from transcript 474616 (locus 474616) deri ved from phytozome v7.0 (chr-ID scaffold_1; pos 29370359 t o 29371063)
tgactctgtttctaccgatttacagagcattagaggtacaacaacacttcctttggattcctctttttatcttaaagatttttcatttctttggatttttgttcataaatttttctttttttcttctgtataaaaattcttgtcttcttgtgtaaaattaaaatcctttggtggagattacctactacatgcaaatcataccgaccgttggattatctgttctttaaccgtatgagtgacgtgtcagtcatccaacggctgttttggttattcgtttttacaaaaaaaaatttcatttttacaatatgtgtgggatcaattttctgtagtctgctctttgaattttttttttgctactgtatgttgtcttttatgcaaaagtctgtttctgtaaaaaaaaaaacactttattcagataattttaacttaaagttttggttttacacttaatttagttgcaatacagaaaacatttaatccaaaaaggtatatgtagtcaagatttcagtcggattcatatagaaattaaatatgataatctatgtttattcagataatgttgactaaaaagtttcacaaattttctattgatattttattaattatgctctgttgtattaattatgctctgttgcttattggtcttgctctgattctcctgttattggtttgcagataaactctctgcactaacagttcaagtca

SEQ ID NO: 39190 - DNA, 564 bp, Arabidopsis lyrata
  Intron number 1 from transcript 491219 (locus 491219) deri ved from phytozome v7.0 (chr-ID scaffold_7; pos 2788901 to 2789464 reverse strand)
tggtgcctaatcattgcggttcgttcttctacttctatctgtttttggttgacactaaatgcaaattattgatttcattttacatttttcactgttttgctttgcaaattttgaaacttttagagactttccaaagtaggaaaaggaaagaacttgaggtagtctaggttttatgtatcacttcatctggaaacaaggagagattttggagttgggtttggttctagaaatcatctcactgtgaataatgcatcggcacaaagttatattgtctgaccttatgatacaaaaacaattttcggtctctatggcggatcaaagaagaatgtgcatgctcctttttatctagtagaatctcattcgaataaccctaggctatgaactgatgctcctagtccttgtcttgtggtaattttgacctataaagtaatatgatatcttagttagattttgagttgttggtattgttgattcttcacaacttttcatcctcacatatatgataaaaaggagtagtttgtgatttgggttcctgtgcttcaaattctttgaaggttggttttc

SEQ ID NO: 39191 - DNA, 350 bp, Arabidopsis lyrata
  Intron number 1 from transcript 947222 (locus 947222) deri ved from phytozome v7.0 (chr-ID scaffold_7; pos 18747447 t o 18747796)
caccttgattcaggcagctgactctaaaggagctggtacacacacacactttctctctctctctccttctcttttgttgttcttctatgggatttgagatttgactctgttagttggaatttgaaattaatggcgtatgattttgggttagtaagaatgtcaaagtgtgataattttattgttactgattggttgtagtgttgtctaaaggtcaaagtgtgataattttctgtttttgcattgttcacaaagtgtttgagtatcctgtctcttgtatggatttgtagaactgagtacctttaagatggtttttgaaagtgttataatggtttttgcaggttcagtcttcg

SEQ ID NO: 39192 - DNA, 732 bp, Arabidopsis lyrata
  Intron number 1 from transcript 952612 (locus 952612) deri ved from phytozome v7.0 (chr-ID scaffold_954; pos 2441 to 3172)
tcgctccgccgttcgttcccaccaggtagtgtttcgcttcaacaaatttattatccccaactttgatttgagcaatctcgtggtaattcttgtttcaattcatacacaaagatcatagaaacatttattggaaaaaaagaaaggttgaagaagaagatgggtctcaccataaacatgagaatcaaaagaagagaaaaaaaaaaaatctgtccaattagttgtaattggtttaaatttggtttaatccggtttcgtatttttgttagttggttaagtaaacagcagaatcggtttgagtggttttttctcggatttggtttgtaaaccgattaaacccagatttatggggacatacatgaaaactatcaatttgaggagatataggttgagaagtattttttcggggacatatggatcgtggtcatagattgggttctatctgttatgatgtcatacttctcgtggagaaatagaccgttttccccatcatggtagatctaaattttctagttcaaaaacgggtcgaattttttgggtcggttctggttcgggtacttggttcccgttttttgaccagccctctcaaacatgtggaagctatttttgtaaatcgtacaactactaggactattttgtaaatactaaaactattgggggtgaaagtaaaagatagaacttgtgacacaaagactttgagttgaaacgtgtgactgactagtgaagaagactaca

SEQ ID NO: 39193 - DNA, 262 bp, Arabidopsis lyrata
  Intron number 2 from transcript 479029 (locus 479029) deri ved from phytozome v7.0 (chr-ID scaffold_3; pos 6625332 to 6625593)
gtggtggagtcaggcaaggcttccttggcaaggtatattatatatatatagctttgttgttggttttttgcatcatttttgctatcatgtcttcctgtgattttgttttttggtttgcaccaatcctgatgttttattttgtagttcaaattaggttgtggactaatatgttatgaaaatgtgctgcataattttcttgaagttgtaattcaagattcacatttgatctttgttttctgatgaaacttgcagattctggcaa

SEQ ID NO: 39194 - DNA, 317 bp, Arabidopsis lyrata
  Intron number 4 from transcript 489184 (locus 489184) deri ved from phytozome v7.0 (chr-ID scaffold_6; pos 9919108 to 9919424)
aagctgtaaggttcttttgtgttgccttcatgtttgtctctgtctttctcaatttttaatcttcatggcctttagctttcccctaaatcaagatggcataatgagaaatcaaagaattcatattattagttttcttacctaagaaccgctgctccttcgattgttagattaagctttcaccggtgtcagtttcttgaatttttggatgattttggattactggaagacctgcttattaagtacttcttctaatggttgctgtttggttgatctttcatgcaggtttttcaaactactgcagtaggtttggggcaatc

SEQ ID NO: 39195 - DNA, 354 bp, Arabidopsis lyrata
  Intron number 2 from transcript 482091 (locus 482091) deri ved from phytozome v7.0 (chr-ID scaffold_4; pos 14941140 t o 14941493)
agcgtaaagcttctgagcagcaactcaatcaggtttctcagttttcacttcaatttctctttcgatgtatttacacggttgctgagtcgcgagttttgactggtctcaaatgtaggagattcttctgttagtattatcttgaagtttgagctgagttcatgtataaatattccttataagctcactttttggttttactgaagatagttcaaagattcccattctttttgaacaaatcgttaatcccctatagtcagatttgttggggtttactatttctaatgaatcaattaaagttctgcagtttctgatgccttcgtttctcgttattcttttgtcttgcagttgcagcac

SEQ ID NO: 39196 - DNA, 418 bp, Arabidopsis lyrata
  Intron number 4 from transcript 482091 (locus 482091) deri ved from phytozome v7.0 (chr-ID scaffold_4; pos 14941771 t o 14942188)
tcacccaagttccaaccttactcaggtaaatttgccagatagcttttggaattataattcaagtcatttggctgcctgagctctgatattaatcgattttatgaaaatatttgtaacatgtatggctaatcatgcctacaaattgctcatcatcttgtctgatagattgtcttcaagctgctaatcctcttcttttatatatgcatctttgaatgtgtctctgcattatccttagttgctagatattaaaaaaccgcagatagcggttgtttttttttatctgaagttagcattttctctcattaccttggtcccaaatagcatcttctataagcttcaacaacaacattaattttgtttctttccctaattttcttatccagatcacaacttggagagtgtctcaagaccattattt

SEQ ID NO: 39197 - DNA, 486 bp, Arabidopsis lyrata
  Intron number 5 from transcript 477252 (locus 477252) deri ved from phytozome v7.0 (chr-ID scaffold_2; pos 19193990 t o 19194475)
gtgctcgtgaagaagctggaaaaaaattccaagaggtaaaccattgtacccgcgctaagtccttccttctttttaatgtcttccattcaaaatatatattcttacatatgcaccttcgtttgtgcatacatactgggtatcagaccatgaatagtgatgatcagattgttctttgtgttcagggttgctctaggacataggttgaaccattagttacttcttatgtaggttcatatgtcgtcattgattacaagtctgttggctctaaacacaattatgtcattgaggaatcaactgtgaaaggacaatcatcctccatttgatttgtcaaaactatgatatctatgaaattaagagtgttttttttttcaatgggaggaaataaagttatcataaagtagataattcttggcatctcttgtatcaaaataacgcctcttctgattcacaggagaaagtggcagtgcagcaacaggtggaggcctt

SEQ ID NO: 39198 - DNA, 774 bp, Arabidopsis lyrata
  Intron number 1 from transcript 947098 (locus 947098) deri ved from phytozome v7.0 (chr-ID scaffold_7; pos 15155635 t o 15156408)
accgcctcctattcaatataaataccttgctcgtattcaatttcagatcataactaacccttgtttttttgttcttttttttcaaacttttttttgcttctacctaattttaatttttctttttattgtagggtggatgtatggaggggacgatgtgaactggtctatggaaaatttggacctaattcaatgaataaacaggtgatcttatagtttatatgtacaaatttgattatttttttttttgtatttatggtttcactattttcaccactaatcaatttttataatcaaaaagtttggtttcaacttttgagaaggtaatcatcgatggtttggtatgtttctttttgttgtaaaaagatgaggtacctcccgattttgttgaggtacatgttcttattattttcaaatatgtcttttttcagaagaaacactcaacttttgataacacagttgccacaaagtcagaaagatgacttatttcagggatgaatcttcagaggaggctaatttttgtcgttaatacaatttaagtattcctctctttagattagggataacaaacttggctgttaaattcaggaattactcttcgttgccaatctctctccccaaactaaaatattacatatatggaagtagtaacttaaagtttttggtatcgaggtcattctaaggcactgagattcggactttggtatgtataggattcgttttccatgcactaagatttaattattgtttaatttattggtttttaggtttctttcc

SEQ ID NO: 39199 - DNA, 383 bp, Arabidopsis lyrata
  Intron number 1 from transcript 489374 (locus 489374) deri ved from phytozome v7.0 (chr-ID scaffold_6; pos 11224956 t o 11225338)
tcgtcggtgacgacaaagagcttgaccagttcgtaatacatagatttcggcttttatattttcttttctttttcttataatttataattaacgatttcataatttattatttagcacaaattttaataacacacaccgagttaaatttacgaaatatatgtttcttgattttgaaatcttaaaatcaagatttgtgtttttttttttgggggataaacaagattaaaatcccccaaaaaatagcttatgatatattaatggtgttttttttttggaaaaagatataataatggtgttgatggtgaagaagatacaaattttgttctttgtcaatgtttattattgtgtgtttgattaatgttttttgtggttacagacacatt

SEQ ID NO: 39200 - DNA, 616 bp, Arabidopsis lyrata
  Intron number 1 from transcript 923194 (locus 923194) deri ved from phytozome v7.0 (chr-ID scaffold_1; pos 24699492 t o 24700107)
ggaaaacaggtaaccgaccttagccataatatgttgttaaaatggccctagttcttgagttggtatgtcgggtttttaattaatcctctcaatatcgaagagactttttgatgttagatactttttcaactatatgatggggaagttttattttgttacttttagtgaatgaaggtatagctaggtaatagtggccttttaaacatcttggtcataagagcgttcggattcttatatgatctttattaaatttaccaatatgtaggtcgcccgtttgaaagtcgatcacgagtgttgagagttttggtagttaagaatttaggttcctatttgtttttgttgttcgagtgtttaggaagactttaaggtatatattactcagtctttgccgataggtaattgaatattatttacttgctattgatccgaagcttcgaggtccctagctgatgcgtccgctgggggtgagggtggagaccaaatatctatctttgtgcatcctagaattaatttatatgagacaaaattctcattttatggttcaagaatcattatttaacgcaaagaaagtagtttatgattattgaaacgaatgagaaaattgaatgggcagaaa

SEQ ID NO: 39201 - DNA, 598 bp, Arabidopsis lyrata
  Intron number 1 from transcript 478791 (locus 478791) deri ved from phytozome v7.0 (chr-ID scaffold_3; pos 5711323 to 5711920 reverse strand)
ggtaatttatatacacatctcttctcagctcataaatgttcctgatctcgtggatccgttttttttgttctctctttgatctgatcagttttcgttttgaccaagcgttattcgttttcgatttcagtttctttgtaagttatgtgatttggattgtgatctaatctgatgtgaatttttgatagtctcttttgctcattagatggtaggtgattgattctttttggtagcaggtgagtgttgaaagatgatttcgaggttccatttgcttaattgttgttgaaatttggggttttgatgaaaactctgaaattattgctaggtttctagtggattaacagttagttgagtgattcgataatgcgaggaatcaatcgagaatccaaaattgttcatcagaactaaggattttgggtttaaaggagacactcatgggagtagtgggcaagatttaaagcctagattttgaagtagttattgaatagcaaggctgaatttcagatccagttttgacattcgagaagaacttgctgaatatttcagtattacttgtacatagtgctaattttatttccttcttattgcttgaacgttgcag

SEQ ID NO: 39202 - DNA, 534 bp, Arabidopsis lyrata
  Intron number 2 from transcript 493176 (locus 493176) deri ved from phytozome v7.0 (chr-ID scaffold_7; pos 11712436 t o 11712969 reverse strand)
attacaggttgcaactcgaaaagcgtatccagcaggttttttttttctctctttttcaacatgcctcaatctattttcttagcataaaatggtagaataagatgattaaaccctgcttttggactatagttgatcgcataaatttgaataacccttgactatttgattgtgaggatgaggaatttaagaaacttttatgtctgtctataaacattaccaatgttttttattcattgttaatgaaaagtttatgtatgcaggatactcacttcaatgtgtacttctagtttatgataattgaataatatctataaactataaaaggctatgacttattgtacattttgaagactgtgaagttagatcttccttccatcatagtttcctaatcgtatagacttctgtgtttcatctgtttaacaatacttgtgacttctagcttctagcttgggttggtcatggttacctttttatctgattcaaacctctggtcttgcaggctaaccaaaggaaagcagagataaacagactccc

SEQ ID NO: 39203 - DNA, 373 bp, Arabidopsis lyrata
  Intron number 1 from transcript 493176 (locus 493176) deri ved from phytozome v7.0 (chr-ID scaffold_7; pos 11713052 t o 11713424 reverse strand)
gtctctgtcgatcggtaattaattacctagttgaggttcgttgcataatttccactttgaattttcttttagattccctctgaactgattttctaggcgtggacctctacgatttcgttcatttcctagtcgtcgatgcgaatgttccagcgtttgatctttagatctgtagttcgattttagacgaaggaaacatctttagttcgaattacttcttcgatttctctcagcttttaagtttgaggatattaatgtttgtttaacaacatcacacatttcatcttttgactgtgataatgtcaaatcagcagaatccattaaactaattgattttgttcttcattgaatgtttgtttggtgtcttgcaggaaag

SEQ ID NO: 39204 - DNA, 979 bp, Arabidopsis lyrata
  Intron number 1 from transcript 480622 (locus 480622) deri ved from phytozome v7.0 (chr-ID scaffold_3; pos 22000238 t o 22001216)
ggaatcgagcttcgctgttcaatcggctaaaagtaacaatcggcactctctttgcttttggattctattttatggatctgccttcgatcttatgccattgtatcgagtattgacgatgctgctcgtaaacaacaactattgaatctgaatttcgcatctctgatactatctttatgattatgatttgatttggtagtgaaatcgattctaatcctccagtatccgtagatctcgcgtacaaattgatcgatggttatgaagtgaaagtattggtttgtttcgtggatcttgaaattgcccgttcgaatttcttgtgagttagaaaattcaattcctgtttttgaaccactgttgcttgtgtggaagtaattgaccttcttggtttcacatatagtaggatccatccaagctctatctatatatatgtcaatatgtgtgtgcctctgtttctgaattggaaacacaggctctttgatctctccatcttgatatgccttgttttttctatgtgttgttgaaaacctttagatggttttaaaacttttcttgagatgcttgtgttgtggcttgcgttagcggacagtttaggtgtatgattgttgaatgttgatgattttcgagttccggtacttgaattcccccttttgctttccttacccattgtgtgcatcatttcaaatatttatgagtttccagaaatcgtgatatatactactggttttgactggtcctgttttaattttcttcatctcgatactgtctttgtgatctagaattttctcatgcttgataattttccatgggtgaggagacgtgaaaaactaattaggtgctgtatatttccattcacaatgattttcttagttggtgaataccatctagagtaatgctttcttgagaaaaagaaaaacttctaaggtgttgggttatgtttgtatttccagatacatttcgtgctactagttagtcggcaagggaa

SEQ ID NO: 39205 - DNA, 317 bp, Arabidopsis lyrata
  Intron number 3 from transcript 895109 (locus 895109) deri ved from phytozome v7.0 (chr-ID scaffold_6; pos 19837528 t o 19837844 reverse strand)
aactacaggtaatatcatggttttcttctttgacttttaagtctttaatctctttttatggctttgtcgaggcacagagatgctacttcttattcatgagtatttgttacaatgttattttatgatgtttgctgaagatattcatgctaggaagtaagcacttgtgtaagtctaagtcgactaacttggaaaaattagatattattctgcaaaatcttgatttctattattcatcaaattgaaaacattaaacaaaataaaaaactcctctttaatacttggctcaggtggagactacgctgatcagagaaaccgaa

SEQ ID NO: 39206 - DNA, 866 bp, Arabidopsis lyrata
  Intron number 2 from transcript 491238 (locus 491238) deri ved from phytozome v7.0 (chr-ID scaffold_7; pos 2843567 to 2844432 reverse strand)
gcatttgggcttacatcaaggaacacgaccttcaagtgctctctctcacttttactctctctgaaatgctttaagtggttttgattttgggaaaattttcagtcccttgtggtgatttctctttagggtaaggattttgggttttcggtgtttcagaggttttggtagacaaaactaaagtggcttgtttgaattgcttgtgtgtttagatggagtgtttctaagaaatggataaggttttcttgtggtgtcttgttatgtacagttgaaatcttgtggaatttctttactgtttagtttgggcatctgcaacaggttcttgtgattagtctctgtattactgtatttgttttcttcatgtttgttatgataaacttttgaaggtttgtgagattgaatttgggggtttcaacttcttttgatatgactggttaattgcttcaaattatttgatcattgctgtgattataaactttggttgacatgttttggtaaggacttttgatgttctttgatcattctacttgaccaatgtgttacttttgcatttgggattatacctagaccctgtgtaatgactctttgtgctctgtctaaaggaaacaaaactagacttgtcgatgctggggtttgctttacttcaccttaagacgttagcttgtactttttctcatgttgtaatctactcactcttgttctgtatagattctcaagtgttcattgtgctaaaatttctacaaaataaacatcttttaagtcaatagtactgtatatcttctatctatttttgtgtgaactccgtggctaaatgaataatgtttattctcccaggacccacaaaacaagagggatataatctgcgacga

SEQ ID NO: 39207 - DNA, 509 bp, Arabidopsis lyrata
  Intron number 4 from transcript 951958 (locus 951958) deri ved from phytozome v7.0 (chr-ID scaffold_26; pos 162093 to 162601 reverse strand)
gcactagagataccgtcaaccaatcttattcagaagtcaaccaatcttattcaacttaattatctacaaaatatttcacacttacaaaatacttttaaactttgatatcttactgtatctttcatgatactaacttaagcaactttgtttgtttttgcgcagtatgagactgacatgataagcaagtatttacgcgataacaacatcaattcaaaggttgtttccattttgaaatctccaatatacctgtatctatggctaattacactctaatcaagcttagctcgatcgaattatccaaggttatcacagtggtcttcctgcaaaagaccgtgttcgtatacaggagtcattttgttccaacaagattagagtggtgagaaaataagttcactgttttccatacgctctgtgtccaatttacacatgcaaactaccactgaaagttaagcagatgacagtaatcaaatattttcgtatgttattgaaggttgttgcaagcattcggc

SEQ ID NO: 39208 - DNA, 681 bp, Arabidopsis lyrata
  Intron number 1 from transcript 929216 (locus 929216) deri ved from phytozome v7.0 (chr-ID scaffold_3; pos 5981758 to 5982438 reverse strand)
ccgtagccgccgctgttaaggttcgccgatgattccatactctgtttcaattaatttttttttggttatgcttcaactagtatcacagcccaagaaatctccttcttgcgatggtattttcttggaacgatcaatctcttatgtcttatgaaaattgaaatgggtcttgtttttatttgattgtttgataaacaaaaaagttggcttttttctctattaaatctgatatctgatttgggttttctctgttattctcctgatcttttttttctctaatttgatgttttgtttccatgaaaagtttcaatctttttgtaacaaaaacaaatatatatatatatatatatattgtgacttgctctgttttggttgtataatttggactttgattgtaacttggaagtggaagactcatagatctgaagacataaacaatgacaaaaacatgtgattgtcccttttcttatgtaaagtgttcaactttgattcggccatatgtaccttctatgccctacaatctagtcaacatagtcagaattaaatgtcaaaactatatgttgcttgtgtgttttgttgtattagaaaagatttagtaagtgaattgagaaaaatgaagagagcttaaggagtatggaaaatgttgcaggtgggtgaagtgggagagctatcagagatattcca

SEQ ID NO: 39209 - DNA, 476 bp, Arabidopsis lyrata
  Intron number 2 from transcript 941313 (locus 941313) deri ved from phytozome v7.0 (chr-ID scaffold_6; pos 7460615 to 7461090)
ccagccctccttccatcaaatctttcaaccaggtgacagattttttcaggataagtttgtgatttgatctcttgtctctaagtctcttgattgctgaactgttcagggttttgattaatctagtagttaatgtatgtatctgcgttctgagttggattgagttgataatttaaagcatttttatctgtgttctgagttggattaatctcgagcttcatgttgactaaacatgtttggtcctgtgtgttctttaaatttcatttgtatggctggaagaagttgatggttttctggatttgagtaaaagtgtattactcaataggtttaaagcatttttattttggttgagcttccaatggctttgaagactgagatttagatcatgagattactatgttctcattatgtgcttgctctgttctattgttttttctttctcagttgattgaaactttgattgatcgggttgatctatc

SEQ ID NO: 39210 - DNA, 668 bp, Arabidopsis lyrata
  Intron number 1 from transcript 931035 (locus 931035) deri ved from phytozome v7.0 (chr-ID scaffold_3; pos 17518651 t o 17519318)
actatcgggtaaaatatgaatattttaaattatttatatctttgtcttgaatccaacgcatatgattggagccaattacaggcttcctaaaccatataacctatataaaaaaatgaaaaaaaaaaaaaagattacataagctacaaaacgcagccatagttgtaacttctagattctgtttaaactttaaaagaagaaaaacattttgaagtgttcatttagaaattttcaaagctggtaatatatacggatatatcctcgaaaaatatatatttatattgacatattttccaatagattatgttaaaatatatcatagaggagtttctgattctaatgattctcagccgtcaatattaaagctgtcgcagtggtcgtcttgaatttgaaaaagaaaagaaagaaaagaaagaaaaagaaacaaacaaatatctacttggaagttttgtagcctagtgtgaatcttggagtttgccagggtgtcggagatacgagctgatgtcaacattttatgtcttaaaacctgtcccacgttcctttttttctttgtcaataatgattaaaaatttgcattatttatttatttctctagttgtggctctttgatgttacaaatgtttctctaggtactaatgttctttattgttatatatagataatcataaaag

SEQ ID NO: 39211 - DNA, 647 bp, Arabidopsis lyrata
  Intron number 2 from transcript 495325 (locus 495325) deri ved from phytozome v7.0 (chr-ID scaffold_8; pos 15206498 t o 15207144 reverse strand)
ccattttgccgaggttaggatccaattccttttcacaattgcttcgattcaatcttcaatttccatagatcaattcaattttgaactattttggaatacttcatgattgattaccttaggttgtcatctctgaaccgatttattcatttcgtgtttggtctgatttttgtgtatgcattagtttctgtaacagatctgataattatagtttgattgatccgatcctggtttctcccagatttaatgtgcagcagtatgaatttgctcatgtcgatgaaatttcgttaaatttggcttatgatttcgtggattattatttattaagggtttctgcagtttggtgttagctttcagaattagggtttcaatgttgatcgagactatgtgcattcaatttttcttggtttgttgaccagtgttaattattttgaaccactgtttcttctaggtcaagtgtggtaacctcagtgagttatttaagtaaacttctacgattcagctggttgtgaaaaagctttcttgttgaatgtttgaggtcttgcagctttcattaggttaagaaagcagatgggttggtttggtttggtatattgctttgagattcctgttagcgcaagtctaatctagtaatgtttcctttgtagaaa

SEQ ID NO: 39212 - DNA, 345 bp, Arabidopsis lyrata
  Intron number 2 from transcript 952462 (locus 952462) deri ved from phytozome v7.0 (chr-ID scaffold_762; pos 991 to 1 335)
ttgcttccaagtaaaaatcctttttcactgtcaatttatttatttttatttttgttagaagccattgcctagttatatatgcaagatagtatttgtaatctaccagattcaaaatatatataaacgtaaggatcttgtgaaattagtagttgatcaatccggttcagtttggtttgattagtacctgtcctttgttcttaactgcgatattgctttgttaaaatataaacaaagattcgagtcatattggtcttcgtttgttcaaatttcaagattttgcttaaagtcaatcaaatagatgaaataaaaactgaaatttcttattaacttgcagtggtctgactg

SEQ ID NO: 39213 - DNA, 482 bp, Arabidopsis lyrata
  Intron number 1 from transcript 942782 (locus 942782) deri ved from phytozome v7.0 (chr-ID scaffold_6; pos 19853564 t o 19854045)
caaggttcagttcataccagtcataatgtttcatttatttaaaatttgaggtttaattattattcgaaaacaaaaagagcttcattaaaacattttggtccttaagataaaaaaaaaaaaaatgaaatcatatgtttcatgaaaattaaatttagttagaataaaaaattagaacaaaattattagaatgaaacctaccactcatacttaagtagagtgaatataaaaaaaatactatatttaaacaaaaataattttatcaaatactataaagatgaaaccattctgttttggaggttactcgtgattcacgtttagaacagaaacctgcaagaaccctacttttggtagggcgttcaggtaacaggaaaagctcgacagggaatagcattcttggaagaccggcattcaagtcaaaaggccgtgcagccgtgcttaaggggtgactacagtctgtgagctacagagttcgacgctaccta

SEQ ID NO: 39214 - DNA, 775 bp, Arabidopsis lyrata
  Intron number 2 from transcript 945906 (locus 945906) deri ved from phytozome v7.0 (chr-ID scaffold_7; pos 8728007 to 8728781 reverse strand)
aagaagtagcttgggctactcacctctccttacatgtgcttgttaatctatggatttaactcacctggttgtctctttgttttctttgctgcaaactgatatgttcttgcagttttagattgctatggtttgaggagaaattctcttgttaatgtctgttatattaatatcttgcaggcatgtcttctccccactctagtttatctaactttgctggtaaatccacaattggaggacagattctttatcttagcggtcaggtggatgacaaccttatgacatctcttgcctccgtcatatagctcgacttgtttttgagctttgaaatggtacgtatactgcctttaatttcaacctcacttctattttttttattcattgatctttttgttattatgatgatcacaattccaaagtctacttatttgtttatgcattttcttcaaaattctcctaaaataaaagttgttagaaatcgttgtttcacggccatggttttgtggccctctctggtaactatcatctacaaatccgatctactaaccaaaaaaactcaaatggtttgctcaaaattttgtacatcgtgtgaaaatgcaggatcttgggtgatatcttcatgggactatatcacactgtgttcgattacgggaaagcaagagttggattcgccaaaactgcttaaacatgatcacttctttaatacccttttttatatgatgtttgtgaatgtgtatttagacaaaatcttaaaatggtttgtaataacttaaacaga

SEQ ID NO: 39215 - DNA, 503 bp, Arabidopsis lyrata
  Intron number 1 from transcript 945906 (locus 945906) deri ved from phytozome v7.0 (chr-ID scaffold_7; pos 8728822 to 8729324 reverse strand)
ggtaggtatccgagctctctctttctctcttcatcgctctatgtttcttctttctctctcgatttctagattttgcgcttactgcttttgttagtcgatcggatcttttcttctattttggttgaatctcttcggcttactttgtaccttcgattatgaagctgatggattctttgctatggtagttaatcttaaatcggaaggaggatatcagcttttggattagaaatcggattagggtttagctgatttgttggttttaattggcttgtgtagaagtgacctagacatttctcttgggaattcgtgtgaatttaactctcgggtagtgagggattgtgtatttagtagaattctttgctaaatttctcatgttgttggtatgtttcgatttgcttctcccacgtgtgcttttctgctgcttatgaatgatgattttgattttagtggtaaattttcgttctctaggcaaaattagttcgtggactgacttggattctgaa

SEQ ID NO: 39216 - DNA, 459 bp, Arabidopsis lyrata
  Intron number 1 from transcript 937966 (locus 937966) deri ved from phytozome v7.0 (chr-ID scaffold_5; pos 15487643 t o 15488101)
atctcttgtctgcactcgcataccttctcattcaggtatatgtcactgtaatgtgaaatatttatttatgtatatatgtttattattatatggtcgtgaaataatgaattgggttcaggttcaagagcttaaaaaaaccctattttgattatcacttaatttcctaaaataagtttttattttattttgtgatttaattgtgaaaatactgtgttggagtaaacactgactattggattgacaggaacaagctgttctcatcaatcttgaaatctgtgttctttctctaattccctgctccttcattttcgtaaccttaattttggaagaaaaatgagtactaatgtttattctatatgtataatcaaaaacatgcgtttacgtaccacttaaattactttttttttttctctataaattctagggctagaagttgggaatttcccggcggaggtgagt

SEQ ID NO: 39217 - DNA, 475 bp, Arabidopsis lyrata
  Intron number 5 from transcript 487610 (locus 487610) deri ved from phytozome v7.0 (chr-ID scaffold_6; pos 3034752 to 3035226)
cttcggattttaaaaaactgttccttttttctaaaggtagatcctttctctcgttttgatttttaatcactttgctgatgctcgtaaggtttctggggttcttcttcggcagattttttgttctgctttctttcttttttcttatagaatctaaaatctgtattttctttcatgttcttctaggaatctagctcaaagtttcatcttttgcttcattctaggtctttaatgttttgttttaataccttccttgctgctttagaacccacttgtgaaaaaagtgttgttagtagtctttgagatcttatcttaaacctcatcttccacatttgcaaattttgttagagaaaaaataaaagcagatttgatgatgccttgtgggttttgctttttttttttttaatgaattgttttggttcatgcaagtttataagattgattcaggtttctttcttggtgcagagtgtgaaagtga

SEQ ID NO: 39218 - DNA, 379 bp, Arabidopsis lyrata
  Intron number 2 from transcript 934396 (locus 934396) deri ved from phytozome v7.0 (chr-ID scaffold_4; pos 17920396 t o 17920774)
ggtaagtctttttatcctgtaccttaataaaaaaataattaagaatatattttgttttcagacattttcttgatgaatgattttatgaaaacgttacgtattatgtagtacatgatcacaataaaaagtgacgccatttttagacacctcctaaattagagaaacttgacaaaaagtatatttccttaatttcaaacaattcaaccttaaagtttatacgtttgttgttgtttgtccctggaaaatgttgtcattagatttcttctaaagttttttcttaatcaatcacaattacgtttgttttgtttacttttttaatgagaaataataatgtgatttaatctgaataggttactgttggaccatcgcttacaacaga

SEQ ID NO: 39219 - DNA, 1023 bp, Arabidopsis lyrata
  Intron number 1 from transcript 943869 (locus 943869) deri ved from phytozome v7.0 (chr-ID scaffold_7; pos 333216 to 334238 reverse strand)
ccgtttctcagctaccaaaccggatcttcgtccaggttagtatggttttaatgggccaattcaatttcgtaactgtttttttttttttttgccggtagtgaataagcaacaatgtggaagggtaaattggggaattaaaataacacagagatttaggaaactgaatcgtttgagttgccaagagatgaaactaacccgtgaagtgggtgttctcaagagtctctctgcatttaccttttttgtcgttgcgtcacactttttttggcccttattacttctctctgtttctttattttatttttccattttttataggaagatttcataaatagatatcaatttaataagttattgttaatccagtagtacgtaccatacgcatataatcatcgcatgaataattagaggaaatgacaatttactaggaactttaatttataagtttgcaacgtaaatatcaatttaattttggttttattttgtgtgtgtccgtactttgtagtaaattcaaagatgaccaactattagtttttttagttgcaggttttgcgattatttttctgcctttttttttgtggaaccttcaacaataaattaaattttgttgactatataattcagcaataaatggataatgaatattcaataatacacctataaaataaattagtgaatgggttatggaattctcaacgttgattcaatggtcgtttgcatcataattttaataaactatgatcatttaataattagagttgagatacgatgatagagacctctttctttcagaatcgttcaattctctttgttccaatattagagaaatcaaacatcatatatgatgttgattttgttaggtgtatttcttattttattcattaataattagtatcttgatttacatatatattttatttagagggcttgatgaatattattatttgaaaacttactaaggtagggaaaaaattaaacgaacttgtgataggtaggtgatccaatagcagatcataactgctggga

SEQ ID NO: 39220 - DNA, 473 bp, Arabidopsis lyrata
  Intron number 2 from transcript 489832 (locus 489832) deri ved from phytozome v7.0 (chr-ID scaffold_6; pos 19739536 t o 19740008)
aacaaaaggtttgtttgagcttttgtttactcttctacgtttgcctttcgttagcgtgtggaactgataatcgataggaaaatatagaggagttatggtttgctatatattcttgagtgtttattagcttgctcaaagttccttactcttgttccatgtattgcctagatcatagattttagtaatttgagatttctgtttattcatattgatatgaatgcggtttgagttcccttgtatcccgctgtgaaatgtttattcaaaataggattttggcttattttgtgtactttgccacacatgtgtgctagtttgagcatctataattagtatataaacgttgtttggaggtccaatctagttttcttagtccttttcagttgtgctgtgtcactttgttggggatgggttgtcttacgtgatgttcttgttttacagggctggtgagttatctgctgctgagattgacaacc

SEQ ID NO: 39221 - DNA, 954 bp, Arabidopsis lyrata
  Intron number 1 from transcript 913551 (locus 913551) deri ved from phytozome v7.0 (chr-ID scaffold_1; pos 21912421 t o 21913374 reverse strand)
tttttggattgatccacattcagaagataaaagtggtaagtgttctaaagctcgcaacacaagcgtgggcggtcacggcacgagtagacacacctcagggcagaagacttatgcacgtcgtgcattagaaagcgttagtattttctgcttttcacgtttaatttcatattccagtttcttgataatgattattattttaactttcatgtaggctgagaagaatggaggtgtactccctccaattgtcgagataatggagcagactcacaagagaaagaatggagttttcgttgacggtttagctgagcaaatctgcaaagaagtttcagccaagattgcagagcgggagtctcagctctctccaggacactctgaccagcctggtggcctatccatagctgagaagaacaatattttgttggaggtattatttttttaactctattagtatatagatatggacctacttgcttattcacatatacctatttatttttcaatcttgtttgagttctttgagtcttcttcaatcttcatcatcgttttaacatcatatctatctatatcattgaacattttggctattaagatcagaggtgcaatagtttaatgatggtttaagtgaattttaagtaatgttctgtctaaagatatgtggttttgctgacatatctttttcttatattgaatacatatctgtttctttttttgtgtgtgtgacatacgcctgtttttggtgttgtttagacttttgtgatatgcatcttcttctaagttgtgatatgcatcttcttctaagtcactattttatcttctggttttgttatctattcaaattttcttcaccatgttttttccagggtgctccaaagaataaaaagggacggatttatggtgttggttctattcaagttatcccatctgcttcatcatttgatcctccacatacttcag

SEQ ID NO: 39222 - DNA, 636 bp, Arabidopsis lyrata
  Intron number 1 from transcript 497237 (locus 497237) deri ved from phytozome v7.0 (chr-ID scaffold_77; pos 2661 to 3 296)
caaggtttctattttttgtttctttctcctcctgggtttttgtgggtttactcagttttgctccagattctatgtaatttcacgttgcgttgattattgtctctggattgattgcataacagtttagattcttgagttgatcctcgtagtgtttgattttggatcgtacgctcatattacggctttaagctttgatatttgtcttttggatggttattgtaaatttggagaatgattagtacttgatgattcctataatatagtttaggttttttttacactacttgtttttggacttgcattgtgttaattaaagaatggaattgtgtcataactaagatgagctaggtcccttcaatccttgtgggtctcttaaaaaaatataatccatagacgatgtgattgatttttatttactgatcatgtgaaaagccgttgtttgaaatcagatttgtgtggagagtttgactgtttgtgtattgaaactacctctttttgtttatcattgttttagctaaaggatttggttgctagatcttggcgtgtttcttgtctatttcactatcgtgctaacttctggtgtttgtctttggaactgcagattgaagaacttgctaagttgattcaaaaggtttt

SEQ ID NO: 39223 - DNA, 942 bp, Arabidopsis lyrata
  Intron number 1 from transcript 908056 (locus 908056) deri ved from phytozome v7.0 (chr-ID scaffold_2; pos 10343662 t o 10344603 reverse strand)
tgaaccttgggatttacccggtatgtttctttctttccttttttcttctttattgttctcataagatactatcatccatcattttgttgtcgttcgcaagtatgtactaccgtgaacgaaggtataataaacctgctgtatctcatgttagagaaattttaaatgagactatatcatagcaaccgagaacagactctatatggttctttcctaatatgtcataatcatttgattgatatgcttattgtaagatcaatttttttggactttattaattaggataacgaattatagattcattttctaaaaactacataatgtgaaacttccttttgaaagggtaaccctagagagaatagacaattgatgtcctttctttttcaaagattttggttctttttttttttctaacactatataatttcttttttagtttagcatttttttacgtaccaagttatgtatctctagtacacgcatcgaacttggcatcgaacgtgaatgctttatcaactaaataataataatatagaacaacgatcccaactttatcttagaataaaatttaaatggacccaccctcatctttattctttaaaaggattgtaataaaaccgagagatgcggtggtgactagtgagtgagacaaattctgaagatcgagtcaaaaaaggtaagaagatagaaaaaaaaagcaactcataatttcacatgtgctttagggttttcgaagcttctcattcaccttcaactttttgttttatatataaaacaatgttctctttcttttaatcatttggattctcatgtcatgtaatggcatctttaagtagtgtgtacacattaagattgcgataaatctaatttcattgttctcttaattatattatcctggtttgctataattgcagggaagtccttgctgccaagtaaagacctaga

SEQ ID NO: 39224 - DNA, 938 bp, Arabidopsis lyrata
  Intron number 3 from transcript 478716 (locus 478716) deri ved from phytozome v7.0 (chr-ID scaffold_3; pos 5388188 to 5389125 reverse strand)
cacatttcagcaggtgagtcttctttcaatatctggcagccacaagttatggttttttttcttagatactcatgggggaaataaattgtctagctctgttggatgtctttgttttatttcatgtataatgttttcgaacttctttcttctataggagcccgggtcctgaaggttggaggttgagacaacgacactttgaggctcttacttctctcattcgttcctgtaggagattttttccacaaggggccgcatcggagatatggtctgaattcatgtaagttgttaacaccagatctttactctcatcatggtagtgctattacttctgtaaatgctttagtgtatctagtattgtcaagagaattgtgaagtcgctatcatgatcctgcctattctagcttgcattcttatatgtgaaagcacactgtttatttctgctatggacaaagaattggaaaagggaggaaagtactataggaaggaagcattgtgttcatcatgcatgaatctttgatgacgttgcaaagtttttcactatggccgtcgtatttttcaccagttctctcctgtatgccatgtccctatgatggtacatcgctctgggtaaattaatgagtaaataccatatcaaacttgtactattaggatacatgtatagatgtctgcgcttaataaagctcgcagtcccgagcaagtcaagagttgtgtcttcactaataggggcaatgggactatattccagctttttaatagaaccattaaagaaaataatagaattgagttggaccttctttgtctctttaagactgtatgtgtagctagattggtggctgtaattagagagtctattaaatgctatatctctgctcatcttttggatcttcttctatccacgttcaggtctcttttggagaatccttggcataattcctcgt

SEQ ID NO: 39225 - DNA, 546 bp, Arabidopsis lyrata
  Intron number 1 from transcript 478716 (locus 478716) deri ved from phytozome v7.0 (chr-ID scaffold_3; pos 5389410 to 5389955 reverse strand)
gatctccgttatcgaactgtgagtcctcgattttgtggtttgattgcataaaaccccgttgattttttttttttgttttctcgttcgaattggttgcttcttattgggatttgaagacgaggatgatggatttaagtgacgattagctcagtttacaatcgagttagtatatcgaaatatactgcagggtttttgggtgttcgcgatacatgactagtatggggtttaataaacagtgtataatgttggaatttgcgtgaatattgtagttaggttaagaattatacttaaatcatgcaatctagtagtctgaaaatcattttacagactggttccactggttttctggttactctagtagcctctatgtacctgtgattgattgagtagtaatttccatcttgtagtttttcactctgtaagttgggcatacttgtttcttagtatgctgcatttggctattccatgtagcggtccaggggtctgatgacgtttgtttttccttttgcagctttgttagagcgaaaagtgaattgtccgtggaag

SEQ ID NO: 39226 - DNA, 475 bp, Arabidopsis lyrata
  Intron number 2 from transcript 487662 (locus 487662) deri ved from phytozome v7.0 (chr-ID scaffold_6; pos 3254761 to 3255235)
acactgaacaagccattgagtacggcaccaaagtaaatcctgattcttttttatgttctccaaattgggtatttcttcattgttccgattgcattggtttatggttgttctagtgattttggtgtccgctctattttgttattcttgaagtttggattgtgtatttctccattgtgctacatttacagaattacattgattaggggtattctctgttttagctagataggcttcaagtgttattcaactgtctaggttaggagttgcgaattctctgacttcttataccatgaaaacactagtctttgctatgtcatcacctaaattccatttgatcttggagatgaaatgggtttctaattttctgtgtttgttgatgattgctttaaaaccaagtgattttgctgatatagctcgtctgtgtttgtattctgtaataggtagcaggtgtgacaccgaagaagggtggaacaga

SEQ ID NO: 39227 - DNA, 751 bp, Arabidopsis lyrata
  Intron number 3 from transcript 473912 (locus 473912) deri ved from phytozome v7.0 (chr-ID scaffold_1; pos 23984624 t o 23985374)
atcgtctctcgcttgcgttgccggtaatgtgttcttcttccatctctttatattagtttctcttactggtatgattgatgggaatgatctattcattgtttgaaaaatctgaggaattagagaattgtggtgtttcttcggtcttgctctcgagcagttcaaacaaaatgtagaaccattgaattttacaacaggccgtgcgtagagagttctaaataactttgaaggaggacttggttttttgtgtgtcagtagttgccaagcaaaatgctatcgacttctttgagtatgagaactcctaaaaatctctgttttgatcttaagtttttttaagttttgaagctcttttttttacggcagtagcttatcgcaagagttgctatgattgattgttatgatctatacatttctcagattatcggaggaattagacatataggtcttgtttagtgaattctggtgtctttcattcctggtcttgagcagatgaatgttccaatgagagtatgtagcactcttcctgttccactggattttacattaaactatgttattttggttcttcttcaagttcataaagtacagaaagttctttatagcttttaagaaggacttggtttttgtgtattcaaacctaaaacccagatagagtcattccatgtgttgaatctctttttttttttttttgtgttttttaagacgggcttggcttgttgtcactgatggcttcgagcttatgatttgttttcag

SEQ ID NO: 39228 - DNA, 346 bp, Arabidopsis lyrata
  Intron number 2 from transcript 476788 (locus 476788) deri ved from phytozome v7.0 (chr-ID scaffold_2; pos 17109298 t o 17109643)
ttcaagaatcttccgagaatctgacgtcttttttttttgtgagttttctttttatttcccatttctcaacttcaaaggtctcatcttttttggttaaatcaagcaagaatcaaattagtgctaaacttttttaaaagattccttctttaattgaggttaaatcagtatctcttaacccacaagggattagggtattttaaccaacttgtaagaatcaacagaaaaaaaaaaaaaaaaaaattggaccttttcactaatatcttgattctcaggttcttttctattacaagttttttgctttgattttgtttggggtttgatgaaatggatgctttgtttttttcag

SEQ ID NO: 39229 - DNA, 337 bp, Arabidopsis lyrata
  Intron number 1 from transcript 312456 (locus 312456) deri ved from phytozome v7.0 (chr-ID scaffold_1; pos 6155875 to 6156211)
aagaagcgtaggaaccaacccggaaacccaagcaagtacctcttacatatgttttttttatgaatacgtatgtgttccaaattccaaaaaaaaaaaatcgataagtctatctgagtgaagaattttccttattagccggaaaaaatataagaaccctaatcatttccgatatggaagaattttgattagattacattccatatattcgattaattcaattaagaagattagtgtatttgatgtgcttgtgattaatttttttaaaaaattgaacagatccagatgctgaagtgatagcgttatctccaaagacgataatggcgacgaacagattcct

SEQ ID NO: 39230 - DNA, 484 bp, Arabidopsis lyrata
  Intron number 1 from transcript 482190 (locus 482190) deri ved from phytozome v7.0 (chr-ID scaffold_4; pos 15434478 t o 15434961)
ttagggtttttgaagcgacaagtcactcactcacactgtaagcaaattagatttttatgcgtattaattgcctaattttcgtttttggttttgaaattgacaacctttttctgattttgtattctttttaatcatcccatatctcttcagttttgggatgatttttctcttggactccttctaaggttttgagacaaaaatattgacctttaattggtgagaccttggattttgtgtgattatgtgagttatatgatgtatattttcacttttccaatcgaattagcaaatgggcatagacaaatttcttgaattgtgagtgtatgtaactttgtgtccttgattcatataagctattgcaagaggttagaatgataaaagccttatgctttacaagaattcacttttacagctagactttagaatttcaccttctttctctgtttcaggagttagaggacttttaacatcacaatgttccgat

SEQ ID NO: 39231 - DNA, 224 bp, Arabidopsis lyrata
  Intron number 1 from transcript 488368 (locus 488368) deri ved from phytozome v7.0 (chr-ID scaffold_6; pos 6211934 to 6212157)
cttcaaaccattgtaacatctctatttatttttcttctttcaatgtttgaaaatattgaatatatttgatttttttttacttcttaacgaaagatatgagataaatgtaggttctctaacttctattactgtaattttgtttgaatatgtatttgatttatctttttaatgaaattaattgtacttgtttctcctcttttttttttgtttggtttttttaggtt

SEQ ID NO: 39232 - DNA, 472 bp, Arabidopsis lyrata
  Intron number 3 from transcript 488368 (locus 488368) deri ved from phytozome v7.0 (chr-ID scaffold_6; pos 6212294 to 6212765)
gaacaggaagcctgaaacgttaccgtaagtgttttcttcacaactattctaaaacaaaactattttaaatttacattcgatgaaaaaaaaaaaaaaacaaatcgatggattaactgaagaaagtttacgtaactaattgagtaaataaatcttttattattttttattttctgttgccaaccttttattttgttataaacaaaaaaaaattaagcatttcagttgcataaattaagttgaaagtgaagtgttaagtggactgtttggtcagatccatagactcaaaatattttagatattgacgaaattgccccttaatatggtcatagagtcaaagcaacccactgtcttgagacccacaaaaacagtaaaaaatgtcatgactttccactagatttagttgtttttataagtgaaaaaacaaaaacttttgactagtattttgaacttgtttgtatatgaaatgaccaga

SEQ ID NO: 39233 - DNA, 702 bp, Arabidopsis lyrata
  Intron number 2 from transcript 472693 (locus 472693) deri ved from phytozome v7.0 (chr-ID scaffold_1; pos 10899064 t o 10899765)
tggaggcttcagggcactaccagcaaaaggtattcactttagattgggttttgagttggagagggaactctcaatggatatcatgaaatttgttgattttcctgaattctcttactttcatcaaaaattgtagtgaatttcatggcctagttgtactgtacatatttgcatagttcaaggctttgtggtgtgcaaagctcttaattgatctgaaggaggaaattaacattcacattaccttagttgtggtgagattgagcttaatttttcaaggattcagagtttatcattgtgtctgctatgaagcagaacatgtttgaagttgaattatgcagcattagagtgagatgtggtatgagatcattagtagtaagttaagttgtttggataggatgtagaagacattcttaattttctatataccctgttacttatttgattgttcaactgttctcttgagttttgagaactccatcctggttagaataagctttgtagtgggtctacgatatgagttgtcaatatattcttgtttattcatgtgattgatattaacaaacagtgacaatatttgtcttcactgtagtgaatgctgacaagtttctgagtgtctcattttttgaattagagaacataaatccctcccatgtggtgtcttgaacaatttatgtgggtctgatgttccctgtttacaggaagaag

SEQ ID NO: 39234 - DNA, 490 bp, Arabidopsis lyrata
  Intron number 2 from transcript 484863 (locus 484863) deri ved from phytozome v7.0 (chr-ID scaffold_5; pos 11011820 t o 11012309 reverse strand)
tctcacaagtatacactaatcctctatttcctcgatcttcttgattcctatatcttttttatgagtcatgttttcaaaatttgtatagatcccaattatgtgcttcaaattttgcaattaaagtataaatgaagaactctcagtgtcttttcttttctttcttctaagtgttgctctgataaaggtgcttaatccaaatttgactttaaatcttctgaaaatgacttggcaaaaaacaacactttttcctattttcttttttgggtattttggattcaagaaactgacttatcatatatgattttgtaattgtaatctttaatttggaatgtctgaaaaaatagatgtctgaaaagctaaactattttcaattttccaaagagtacaccaataaaaggaatattaaaagtaattagaaaaggagatgttgttaaagatttggttgaagactaataaggcttgttttagttataatctcaggagtttgtga

SEQ ID NO: 39235 - DNA, 1053 bp, Arabidopsis lyrata
  Intron number 2 from transcript 906753 (locus 906753) deri ved from phytozome v7.0 (chr-ID scaffold_3; pos 23188424 t o 23189476)
tgctcttagcggaacaacgcatcaggtactttgcaaccgattgtcgtatggttttgcttctatctaattgtatctattggtagatgtttgtgttgtcaaggtgacaaaaatgtcttgattgagtttcaacctacccgatttgcaggtacgaactttgaattttatagtcaaacttttttcacttatcgtataagatgaatgtacgaactttgtatgtattaaaaaaaaacaaacttctcaattccacacaaactaaacccacaaaaccattttttttaatcttctcaaaagaaatgaaactaaacaacctagagtgatatttttcttcttagcccaaatataatttggcattgattttcagagcatcaacaacaaatttactaatacgattatcgaacagcttcaagaaaaacaaaagcaaaagaatcgtattggagcaaaaagatcgaacaatattacgaatatgtgttttcgttagcgaataaggcgtttcgaccagaacacatagtgaatcttattttttgtactttttagaagatgtcgcacacagctccttttgtaataatttacgttttgtagtcttgtatgagtttaacattctaattggatgttagaatgttagatcttaaccttattttaacataaaaaatttactatttgtaagttaagaaaagttatacatatcttaacaaatttttattccattggttaagaagtaaggaattcttaaggacatacaaatttttactctatttggttttgttttttctttccaccactcaaatcgtgacacgtgtgcgcttctaaacttaagaaaaacatcttaactaagatacatatcttaacaaatatttgttggtttgattaaatatatttgcttttaatgctaagatatgtgttaatatgttgctaagatacaccaataattatgctctaatggaatgaaatttttagtcggaaaaaaaaaattatttggaaggctttttggccatttttttattaatgaaagtcttaaaccatacaaggtttggttacgagaaaacccacaaaaac

SEQ ID NO: 39236 - DNA, 715 bp, Arabidopsis lyrata
  Intron number 1 from transcript 939272 (locus 939272) deri ved from phytozome v7.0 (chr-ID scaffold_5; pos 20601626 t o 20602340)
gccaaaagtcgggccttcgtagaaagcccattactgtatgttaaattaagaatgcaaagggatacttatatttataggggtcataagttagtatctttctgtttttttttcgatgtgggactcaaattttcattgggctttaagtgttatggcggtggcccaaacgtaagcccaatgtatttcataaattcttaaaaagatcgaacggttcaaaattaaaagcgtttattttttatttatttttcgagaattgtctccctccaagaaaaaagagagagtccttgttattttctaaacaacacaatcatgatgcatgatcgtttttaggacttaagttttgatttttatttttctctggtgtatgtctccgacggctgtttttttctggtggttacccttcagacgaagaatggcatggttacattaataacaaagacagagtacttctcaaggtaattctgttttctctctaatggcaaaaagttggtaattttagggcacaatttaaggtttagatttggatttggtcaggttataaactactcatcaccaacttctgctggagcagtgtgtattgatccagactgtacttggattgagcaatggtaataatagtactagttgagtttgggacactactactattatctaagttaagttcctaaggatttgatcaacagggtccatcgtgctggaccacgggaaaaaatatata

SEQ ID NO: 39237 - DNA, 673 bp, Arabidopsis lyrata
  Intron number 2 from transcript 496485 (locus 496485) deri ved from phytozome v7.0 (chr-ID scaffold_8; pos 20808463 t o 20809135)
attgaggtcggttcttctgctcctttcccactcaatttctacgcaactgtattcttatttgcaatctcttctagggatttgggtactttttctcgtgcggtatatatcttctaattgttaagggaacaaaacccaagattttcccggtttctaatggttgcgctttagatgttatagtttagtgtaattttatctgatttggagaattgggtgttggagaagttttttttttttttttttttttgtagctgagaggattgaaaaattgaaaatttatgaatttgagctcatctcttagtttggaatttgctcagcttcgttcctgtgtagtaattttgttgtgatttgtctatggaattgcattttagtgttctatggtcgctacttgtgatttgatcatttttggaggttacaatcatcttatttcattcctttcttcggcctctaattcaactatctttcgagatggatttttggacttgatattgtggcaaggttgtttgcctatgattttcatattgttgctacatatgcgatagtcagttggataattgaggcttagatagccatttgtaatctggcaatacctatttgtactttatagtcccgctgttattgagtagctaaagttgattttgtttaaatgatttgacagattttggcctttaagtaa

SEQ ID NO: 39238 - DNA, 835 bp, Arabidopsis lyrata
  Intron number 1 from transcript 937102 (locus 937102) deri ved from phytozome v7.0 (chr-ID scaffold_5; pos 11357577 t o 11358411 reverse strand)
cacttggtcaacagtataacactccccactctgtgagtctctcccaagtcccaacccttgcattcatcttacatccattgttagtattttagtcggaaatataatgctgattgctctttttctttgttcaggtgattactgagaggggaagtggtattataatttataatcgtaggacagggaatcataaaggcgaaaaacccagcagagacggttcatgactcatgagtatagagtacaaggatggaatgcatacttgaagaaatgctctcagtagatttgatcctgagagatggctgaggtttttgtttttgtgttctagtgatataagattgttctagtttttgtgtgatttatgtgaggatggatttaaagactcatgtctcgttgattgttcacttgattctcatttctcgataataataaagtgatgcgtggagggtagttgatcccttatgattttgtacgtttgatcaaaaaaatatttcggtggtcacacaatttatggatcctttggatttggttgaggcattttatcaaatgtttaaaattacctaatttttatttttatcagaactcaattcacgcaatgattctaaaagtttgatttccaaactctctacacgtattattctcgttatagcccattccaacaaacccaattacttcttactaattgaaataatgaatttttttttcttttctcaaagaagcatgtttgaacgccttcaaaaggctggacattatatatgtagtaatactttccacccaatataagatgcatccccatatctcttgtttcacgtctaacatttctacaacaagaagttgctta

SEQ ID NO: 39239 - DNA, 492 bp, Arabidopsis lyrata
  Intron number 2 from transcript 474915 (locus 474915) deri ved from phytozome v7.0 (chr-ID scaffold_2; pos 285308 to 285799 reverse strand)
cagttcctgctgggatttgtacttttcttgattttaaaacattaatcttctccttgatttaaggaggggttattggttcattgatttataaggaattagaaatccaaacaaaaatcatttgttattcaatcattgattttaaaatcctaattaaaatcatgtgttattagttccatgatttataaatactagttaaaatcctatgttattcgttttgtcatttgtttttggatttgagaatccaaattatgttttaaatggatttgtatggaattgaaagagaaaaatagaaggattcaaatccatgggtaaacacatgttatttcaaaatctatatatcttgatttcataattaatagaaatttccaaatcctatatggatttacaaattaataaaccaataacacccccttaaattttttaatggttcttgaaaattgattatatgggttttgataaatgataatgaatgaatttcagctaaggtgcatt

SEQ ID NO: 39240 - DNA, 719 bp, Arabidopsis lyrata
  Intron number 4 from transcript 923758 (locus 923758) deri ved from phytozome v7.0 (chr-ID scaffold_1; pos 27895513 t o 27896231)
gatacagattcaaagccagaggtataaatgttacttcttttttcaatttgcttcagttggatttgtgatccgtgtaactgtctataggtaagctttttacttacctctctatttgacgttttcagcaactaatttgcatatccacgaagctttttttttcttcataatttagggatatattgtgttagtgtgtaaacatttatctaaatttgcatatacacgaagtaattcatatatatttgcatatactagatttgacaatcaatctttgttttttcacaatctctgatttttgaagtgacttggatactgagaatttttgtaactatgctcttccttttcaggtcaggatccttcactcgctaaatcatccaaacatactcaagttctatgattggttagacttactagctaatatccacgacatgttttcttgtaggccaattactctcactcttctttgaaaaaacgcagcttcttgtgttctctgtgaagtatgttcttcatggtaattcatggtctctagttaagttgtgttcgctttttttttgtctcagatttagctgtagtaggcagtggtaagaaactttgctgctccaaataccttttctagcttatccattctctgcttttttagattttgtttattcattctatgaagagaatgcttgacgtgatgcggagcaacaagcatctcaaattcggattgcaaacttgga

SEQ ID NO: 39241 - DNA, 981 bp, Arabidopsis lyrata
  Intron number 1 from transcript 331546 (locus 331546) deri ved from phytozome v7.0 (chr-ID scaffold_8; pos 14661173 t o 14662153 reverse strand)
cttccgtacgtcttctctccccgctctttaatcgattcttctctttctttgatcaagtcttcgctagtttctgctaaacccttagagattaggttatcgatattttctttgggagctagcttttgaatttgattttatgatgtgaggttacggatttcgattttgatcttgagaagatgatgattacgcaagtgtttaattaggtttttgattagctgattacatgtagatttcttatagttgtaagtaaataagccttgaacacagctttgattctctaatttgtcaaattttaaactaagttgtttgcttgcaacctctgaattcagtgagcttattagaacacttgatggaataaagtaaaagtataattgtgtaaaattgaataacgcaagtattagatcttttgccaccgtttatggctatgtgagggagagtgtacatgcaccaacttttgaattgtttgcttgcaactttcttctcaagtctatcatataggtgtaagctttgaacacagctttagttctctaattgtattgttttcttgaaacctttgaatttagtgaactgagtgatctcgttagactgtccctggataaatagaacaattctgttatcagaacaatctatggaacaaaacaacaatagaatgcaagaagtatacatcttttgcttgctgcatataggaagaacactttatctcaatattcttctttaacatttggccttctatactattgtttcttttatattcatctattgctttgagctttttattgtaattaatgttcttttactatatctttttccggtgtggctggcgttggtcttttcactgactaccggtttttgttcaagcagggagtaagtcaaatttactcttcaaatactttttatgtttttgttttttgtttcacattcatttgctcagagaattaaagctataaatgttcaaacttgcagccattttttcacgacgga

SEQ ID NO: 39242 - DNA, 467 bp, Arabidopsis lyrata
  Intron number 1 from transcript 911939 (locus 911939) deri ved from phytozome v7.0 (chr-ID scaffold_1; pos 9007224 to 9007690 reverse strand)
gggccaaggtaattgactacaaccgactaaattattattttcatcatgtttttttcagttttttttgaattttatgttttattttgcttaagtatattctactttttttttcttgtaatattaccttttgtaatcttatgttttaatatattaatttttgattttgtaaatttttttttttaatgatacttaaaccggtatcaccaatgcaaacatatttactaggagtatcataaagaatctcaaataataaacaaacattataaataatactaaaaaattcctaatgatactatatgggtatcacccatgtacatgctctaagagcttccattttagacatgtgttttcaattatatatatttataaagaacacatcatatgtttcaagagtagaagaaattattgaaaaacaatttacctcatttttttgaaacagaagacctaaagacctccgaatattgtac

SEQ ID NO: 39243 - DNA, 965 bp, Arabidopsis lyrata
  Intron number 1 from transcript 495040 (locus 495040) deri ved from phytozome v7.0 (chr-ID scaffold_8; pos 13503064 t o 13504028)
ccatatccaggacatttatctcgatcaatacgaaggtagtttcatcgatccgattctttgttccttttacacgatccttgagaattgttctgtgattagttgttatgagttgtcaaatggatttgattgagctgataatactgatttggtgattttctgtgtgtaatctctccgatcgtacattactttgtttagttgacttcatgatcgatttcttcttcgttgaaagtatctgatttctggtttttttttttttttttaattgattccccgggaaattgggatgattccggtgtcgatcgccgagtactcgacaaacacgtctgcttgattgtcaaatgaatgggcttaaggatatagaaatttagcttttcgagatcttttgtcgttttctttggatttcagtgacacagtcaactacacatttcactctctctttttttgcatctttttactacttttgttatctgtcattctcatatgagtctccaaagtgagtcacatgtgtcatcttatgactttcaaattaagaagtttgctgtggaaacattgatcatggcttttatgtttgaattccgggcttttgggaaaccatatgagctttaggcttatgcacagggacaacaaacaaatttaatatcaaactgacactgatgttttttcttatatgatttgtgaatgtatttttagaacagtaaaatttatccataacagaaacttttacaaaacgtctgaaatgttccctgattatgttgctatgagcagtattgacagacatgatcatccggagtttaagtttaatcagtagttggaagttgttttggatggtcttttttctttttaggaacttcttgctatatatcttcaaaatcccattgcagcagaaaaggaaaccatgcttgtatcagacaccaatatatcttcctattttttctgcaggctttcagtccaggaaaaagttaacc

SEQ ID NO: 39244 - DNA, 819 bp, Arabidopsis lyrata
  Intron number 2 from transcript 490973 (locus 490973) deri ved from phytozome v7.0 (chr-ID scaffold_7; pos 1743478 to 1744296)
gaaagaacgaaagaaagaaagatccgtattattaggtaagaatgagattctcttttttacgtttcgattttgattccttttgttttaaataaagaaagatcatatcgttttgcttcgatttagcttccttctgtttacaagtctctctttatgaagatcataattccgtgagcttcataaatttctcgtttttttgtttgttaattatctatgtgatgattgtatttttactgatattttagaaatgtttaggtttcattatcatattttgaaaaagtttcatggtgaccaaaaaaaaaagaaagaaaaatttgatggatgagatgttggagaattgttttgtattccattcatggaatttaattcttatgctaaattcgtttttttgtgtgctttaaaaaaagtcaaaatgtaataaattctttgttacaagaatcatttatagccatatttatgttttttgacaagtcgatttcatgctttctagaagattagacacctagttatatttatcttgtagggaattatttatcagatgtgaagaagattcaaagttggatgataacgaaaattttcatacctcatttgagatcttcatgtagtaaataaatacaaatagaattcttgatcccgttttagatgtaagattttcttgtgtttatcagtttttctattgatagccgattattaaaacctttttgcttaatcttggatctgatttagtatataaaagatagttttgctttttaaattggacttaaaactctgatttgatcgtttctaggctttgaagctgtctcctcaaagtttaaagattgt

SEQ ID NO: 39245 - DNA, 724 bp, Arabidopsis lyrata
  Intron number 1 from transcript 494537 (locus 494537) deri ved from phytozome v7.0 (chr-ID scaffold_8; pos 3275443 to 3276166 reverse strand)
tccgccaaatcatcataatcagcaacattgattaggttcacgctttcactgagttttttgaaggatacttgtttgattgatgttgaaaattctacctgattagcctttatagtttatctggaatttctagtctacttggccatgtgtggtttgattgaaagtgaactcgtcttgattagcttgtccatgtttagtgactgaattccataactaagcttgctaagtttctaggttgttgatgagtgccttgttgtcagttgcttttcttcttgtgtttccttgagagtatggtcactttaaaagctttgttactatctttaattaaagatttgtagaatcatcacattgtgaatcctgtaacttacacacataaacgctcttgcatgttgtttccttattgcattcctagaggcatgaaaaactcacacttggttacgaaattgatgaaatgctcagttcacttttaataatgtttagaatctttccaactagtagaacatctatgatccatgtttaaggttcgttcttgaattttggttttggaaagctgtagggttcattagctatatcggtaaaacttgtggatacattttgcccttgctctctgttggcatatgagcttggatataatattatttatctctgtttgaaagatctgctaagtacaattttctcgatctggattgtaggagtcacttcatctactacggaagccacatccaca

SEQ ID NO: 39246 - DNA, 597 bp, Arabidopsis lyrata
  Intron number 1 from transcript 323324 (locus 323324) deri ved from phytozome v7.0 (chr-ID scaffold_5; pos 12995548 t o 12996144 reverse strand)
acgacgccgtgaactcacttcccgatttcgtatccgtaagttttctgattaagcggcacgaacacttgatcacgtcttcaaaattgggttcgcttaggcattgaattgtgatgcaatttgattttgtattgctagtagctgtgcgtttctgtattgtagttactaggtcttagtgtgattttgctcagtgtttccctcaacaatcctaatggaactagaaatttattggattatcagtttgcttgattagggaagagttacttagagttgtatcatgtattatgtggtgaagaaaggaaacaacagtagctatttttctgaaaatctcatgtggtgagaggtgtaaatcattagaaattcttgtttaatggtagttatcagtgacatgagaaactccagattatgtatccaatggtggatgctcttacatgttcagatttgcacgctgatgtcgtgtttcttcttttcttcctatccaagtatttaccaattcttggtcattagtaaagctttatggcttcggacatgcttatttacgtttgcgtatatgcttgtttctcagcctcctgcatttgccaaggaaacaaaagaatcaat

SEQ ID NO: 39247 - DNA, 734 bp, Arabidopsis lyrata
  Intron number 2 from transcript 905412 (locus 905412) deri ved from phytozome v7.0 (chr-ID scaffold_3; pos 10885160 t o 10885893 reverse strand)
cccccgagaataagaaatgtaaaggttggaagacaacatgtatcaacttgaactacttatgtaatgttcaagaccacatgcaatggagcgttttgagaatatatataatgagagggggaaaatagctaaaagcagaagatctcgatgtgaaaatcaatagatgcattctacaattatatggcgaaagatttagagaggcgttgaaccattttctagtaagaccttaggattgtttagcgtttggtcgtattgttgcatttgcaatgtgctagccaacctcggggaaagggcttggtagaatgagctaatgttttcgttttcttttggtttgtgtggtttcgctctgagaaagctcagttctatgatctggtctttgtcgtttgacaaaatgtatcttctccctggcttcatgtaggagaatctttaaaattgcttatcacttcattgactccgaaagcgtcactgcattttcgatgtcaatagattgaatgttctttgcttccatgtttttgtatccatttttttttgccatgcgaccaatttgtaggttttactttattgtacttcctaaattttttcattatttgtgaaatatttacatttttagcaaaataattatatatatgcaaacgcatttgaatcgtgttaatgacttaacgggtattctatttagagtctctatggaacaactgacttcatcaatacagaatcaattcgacgaaattgattcaacg

SEQ ID NO: 39248 - DNA, 779 bp, Arabidopsis lyrata
  Intron number 1 from transcript 905412 (locus 905412) deri ved from phytozome v7.0 (chr-ID scaffold_3; pos 10886060 t o 10886838 reverse strand)
gaggtctattaatgaactgaagattgacttcttcaataagctcatcgtcgttccttgacagaagaagaaatgtccaacacaaaattgtttttggcaaaataaaactcttatgtaaaatgatatcgttttaggtttgatccgttcaatctatggacgggcctaaattagaataagtattatattgatcctaactcctaagtcctaaccatataaccatattataacggtcctaactttcatacatagatttcatgttcttacatgaatccccaaggcccaagttatgcacttagactaataccttctaaaactagatctcgtatttgcagtgtacttagacataaacttccatcaaccataaaacttatactataccttctaatacaacattttatatattaaaaaaaaatatttaagtttcatcaatgcctgcttcggagtctagtgttctatgttcaaatcttgttaatctacataatcgaactagtgttctatgttcaaatctcgttaatctacaaaattgaaatggagttttgttcaatttgcttgtttacagacttttgggctaactattttatattctgtgaattgactgaaactaatgtagagttctatgtttagattttgttattccacttcatcaaaatatgttttatttcaatgattgatgatgatgatgatgcttgatgttgaatgtagaatcaatgataatgattaatgattatgatgtgttgtttttcacagatcaaaactggtatttgtggaagtgtgataaatac

SEQ ID NO: 39249 - DNA, 719 bp, Arabidopsis lyrata
  Intron number 2 from transcript 492389 (locus 492389) deri ved from phytozome v7.0 (chr-ID scaffold_7; pos 7550094 to 7550812)
gccactggaaagctcttcgaattctctagctcaaggtattctctagaatatggtttgagaaatatattaagatatatgtatttaaatgagatttctttttttcttgtttactttcaatagttaattatcattaggctcggagatctcatgtacgaaatcgactcagtttttctgcataatgtgagacctaaattattatacttgctctcattcctttgtgtacctaattaaatactagggtttatgtttctatttatcacttttatgttctaacaaataatgtaattaattgcgtttaacttttctgaaacataattatgggttattaactttgaatttttcaatgattttcatttagactcatggttattaattttggaagcatatgtatatatggatacatagtacttaccacaattagaatgaatttcttttccctttttttccatttgacttttatgtattacaaatgtctttgacactgtcactggtatgattggggattaagtcttaaccagtcgtttagtttatcttgggaagctttaccataattgggaacagagttatctaataaatattgtctgcatcatgatgggtacttctgattattttttcttttattataactgaaaaaggcttttactagtatatttgcaaatgtaaatatggacgaaggaaaggttcatatgaaagatggattgtttgttgaaacgtgtaga

SEQ ID NO: 39250 - DNA, 434 bp, Arabidopsis lyrata
  Intron number 3 from transcript 492389 (locus 492389) deri ved from phytozome v7.0 (chr-ID scaffold_7; pos 7550870 to 7551303)
gatccaccttctactcatctccaggtattctcaaaatcactcactcactcttctttttttttttttttttttttttgaatagaatgtaaaatttattcaaaaaatacttatgtacaatgaatgcagcttgtttaaagaatttctttgactatttttaaaagatagagaggtttaaaaagaatagacgattatctcgtggctaacaatctcactcttctctattgaccaaacccttctctttttatcaaacccgtttctctataatattttccaatatttacttgttgttacacttttgtgttgtatttgtttaggtgtacgtctaaatatagaaacataatgtggcatagaatcattaatctttaagcattttgaaaatgttgactttgcatctagcagcttgagaattgtaacctctccagactaagtaagga

SEQ ID NO: 39251 - DNA, 747 bp, Arabidopsis lyrata
  Intron number 2 from transcript 483031 (locus 483031) deri ved from phytozome v7.0 (chr-ID scaffold_4; pos 19422397 t o 19423143 reverse strand)
gacttttgagcatcgttacacactgcaggtacactttcttattctcagtatcttgtagctatcaagaattgagtttgctcctttgaatcgatgcttttgaggtttagcacatacttttgctactctcttatcatttcctactttgactacaactgtagaacaagaattcacttggctttttttttctttaacttataagtcttcgttgtaccaaagaaccatatcttgaagtttgtgtttgtaaagatgtgatcttctttagctcaattgagcaagtagtaactttggtgcatacttcttctctttaatggaattgttgaaccttactttatttgatttcttactctacttaacaccaagagttatataagcagaaacattcatttcagttatctaggagtttctgtttattctatatccttaattgctctgcaactgttatgattgctattaaagcagtaattgcaattatcttcagttatctttcaacatattctttccctctttggtgaaccttatctttatttggtttcgtactacagtttgcacttctgttatgcatatatagcaaaaagattgatatctgacatcttttgtcttgtgtattatgtggtttttgaatccttgattctgctgcggctgttctgcatattcaattttagctgagtatccaaatatgttgagttggttctcactttattcatgtttctgtctgttgtcttctccaggaaaataaaaacgttgtta

SEQ ID NO: 39252 - DNA, 772 bp, Arabidopsis lyrata
  Intron number 1 from transcript 323168 (locus 323168) deri ved from phytozome v7.0 (chr-ID scaffold_5; pos 11546901 t o 11547672)
ctttggggtgctagcttcaccgagattcttagaaggtaacaaattggaccgttatgtatctccggttcgagaaatttgagacccggttaggtattggtttggttcgtccggttagggtgtaacataatctcggttaagtttattcttcttgaattggctttacgtagtgtcatggactcatggtcaatgaactcatggtctttggattctcatttggttatgtttgagatggttcgttgggttttcttattgttccgcaactagttttgtcagattttgaatattcaattctgagtttgatgaatgatttaaggaaattaataattattcgtaatttttaggatatccttttgaatgtcattggaaatggaaaccgtaagatttgatttctttatagtaagtcgaaaatcgtcctacaatactatagaatatattatgtcccaaacatgcaattacgatagctagatttcattgcattttagaacttactatatttagaatgtctgtttttaacatatttttttagtattttaaaatttcagatagttatagttatggttatagatggattgtaaaagaaaaaagaaagaaagaatcaaagaaagaagaagatggattgttacggtttattttgatttaaatgagttttctggttaccatttagattttctcaactctgaataaatccagtttgaagtgtatacttgctcgattaattgttgcaatttgatttataggccattgtgctggttggagcacttatctctggaca

SEQ ID NO: 39253 - DNA, 634 bp, Arabidopsis lyrata
  Intron number 1 from transcript 939192 (locus 939192) deri ved from phytozome v7.0 (chr-ID scaffold_5; pos 20275907 t o 20276540)
tgccatcaagatctctcgtgaagttgatccaaaaggtgccagattcttccttccttgtacgtttgatacaactgctattctaaattcactatgtgctttcttttgtgacatataatccactaggacatagtaaatgtggttttatttctacggagcattgtatctatgattgagttgcacggtaactgcctagtggttctctatgatgatgataatcttatcatctgtaataaacaaagaagatgatcctctgcaagcagatatcttgatagtagtttgaattgattgattcatgttgtttattgtttgcttcgtcgctacttgctgctatcaggagactggacttttggagtttaacaaaaattgatctcatggaccaaggcactaatgttgttgatgtgagtttttacattaagacgatagtaatacatatcatgggttaagactatcgttcgtctaatttgcaaacaacttatctctaattgcatcatgataagatacgacgaagataaatatgagaatctcactacattgtggtgagtgaatatttgaacagtccctaagtcttctaaatgtttggggatttcagatacttgaaggaaggggatacaaattaaggtatccttgggttgat

SEQ ID NO: 39254 - DNA, 346 bp, Arabidopsis lyrata
  Intron number 1 from transcript 494352 (locus 494352) deri ved from phytozome v7.0 (chr-ID scaffold_8; pos 1117791 to 1118136 reverse strand)
tcgatcttcttgttcttcccctgttttcttttcaggtaattaacaatctcttcatttttaatttttcatttttcactaaagtttgatttttagataaaataaaacatttttgattagtggccatggattcacagtgtgacttcaatattgttggccactataatttgctttaaatagcgaaaaaaaaaaatcaaattagtctgagtttggattttcttacatttcctctattttctatgattaaacaatttcacattatctgtttttattctattttttttgttttttgttttttgttttatgtgaatcagattattggacagtgttgaaggagatacagagtatc

SEQ ID NO: 39255 - DNA, 684 bp, Arabidopsis lyrata
  Intron number 3 from transcript 895283 (locus 895283) deri ved from phytozome v7.0 (chr-ID scaffold_6; pos 20907701 t o 20908384 reverse strand)
gcaattgcacatcgggaggaggatacagagataaggtgagagaagcacagttgggtctgaaactttcgaatgtggttcagcttggtcgctaaagtccgataatcttcacttaaccactgagtctcaagttcagcttggtctctccttagcacaagcgtacctttccaaattctgttagacaatcaagtaagtttgcgttaagcttcatgagtcttcttgtatatttgtaatggacatgttatatggatatcacaaaactgctttcattacggaatgataattattattgttcaaagtgaatggtttggtttggatagaatgacatgagtttcatccggatcatctctgctttggtttggtcattgtatgagtgtgtgtatggatgcttagcaataggtcattgtatgaatgcttgtatgagtttggttgtataaatgcttgtattggaagatattgttttgccaaaatttgaattttttttcttaagaacccattggttcttaaccattgtaggacatttttgttaaggtactctctaacttttcttagttttcaaaaagcaatattttaattttaaataatgctaagagccaaagttaagaaccagccaataatgttgctctaaatagaaattttttaatgaatgtagaaatctaaaacattcgcttctacttcgtcttcttc

SEQ ID NO: 39256 - DNA, 334 bp, Arabidopsis lyrata
  Intron number 1 from transcript 895283 (locus 895283) deri ved from phytozome v7.0 (chr-ID scaffold_6; pos 20908703 t o 20909036 reverse strand)
tcctcgtttttgtgctgatttcgtcttccctccgcgtaattttcaattcgatcctccggttcataagctcccggtaaaaccagagagcagtgttgctaaggaagatgacgggagtgcgaagaagacgtttaggcctttttgagctgtttgttggtgcatttgctttttatttacccgccacatgctcgatgaaattccccaaagagaatctcggtgataatgaacgttttttgttaaagacatgggatcattaagttattaagctaaataagacgtttttaatgtttgtatcattgactaattggttttgttttttaggatcctaagaacaaga

SEQ ID NO: 39257 - DNA, 619 bp, Arabidopsis lyrata
  Intron number 1 from transcript 918987 (locus 918987) deri ved from phytozome v7.0 (chr-ID scaffold_1; pos 940678 to 941296 reverse strand)
aaccaagacattgtgcagaaagtaaggcaaaagaggtaatgttttcttttgatgttttgatcactcttcaagcatgatggaatccgttactctgtctttattgtggatacaaatatataggcgtgtggaaaaattttattcgtttaatcgtttacaagagactgatttttcatagccaagacgcaaccttccattacagtgattgttttgcctctgatcagaaccctctgcttatctttgtccagatgaaccttcaacggttcagcctctgcttgaagcttaaacagcaaacaaacacattccaataatacccaaattcctcatgaacactcatcattttaaattggtctgttaacttgtataactcgtaagtcaaaacccctaaagtattaggttaaaagattgtaaataacgttgtaaagataattgtaaaagtattatgcattatcgacattagtttagtttctactaatcccacatcgataagattttaaagaataagctcgaaacgtttcttatatatgaagactatgttgaaagtgatttatttttccgcaggattctaagagacaatttgcatgtacaattttactgacatactataatatagcaagaagcc

SEQ ID NO: 39258 - DNA, 962 bp, Arabidopsis lyrata
  Intron number 2 from transcript 490879 (locus 490879) deri ved from phytozome v7.0 (chr-ID scaffold_7; pos 1318435 to 1319396 reverse strand)
ctggtaacgaatccaacacatttttttataacaacgtaccttcaatataatgacacaactagtggctgactcaggaaatatttttacacggatcaaaatatatatttaaaataaatatataaatattttagagacataaaaaaataatatatattgagtataaacgatgaagtacaaaataaaaaagtagaaaaatagatgaaagaaaagtaaaatttatagaagttctattcttctttttcatttattttaatactttttgcagcaaaagttagctaaaaattctttttacttcatgttaatcagcattgttttctctaagttaaacaataattgcatcctatatggacttttgcgaaagctaatgcctaatgtattttcaatagacaacaatatcctaaactatcaaaaaggtaaaaccaaatatatttgtgatgatttttttggtgaaaatattcataaatgattcttcatatttaaaatagtagtagttgttaattggttatttgttatactatataattgagattttttgtcattagtcttaacaaaagttatgtcataattagtcttggatataaatgaaattttctcatatgagcctttctctctcatagcattaagtaattgccattaaaaaaaaaaactaaaggttagactaattttagtgggtgcaaacaaaaacttttagggggtgcattcaataattttgttaaagattattaaagaattccaaaattttacccggtgcagctgatcccctaattaccatatggatccgccccttgacacaacaacatcattaatacaaaacgttaggctacaatatataggaagcttttctttttttacggcaaataacagtcttatgttttgaattttgtatgtgtatgtgagattagcatgaatcacgtttttgaatttcttgtttttttctctaatgatacatgaaacagggcata

SEQ ID NO: 39259 - DNA, 441 bp, Arabidopsis lyrata
  Intron number 1 from transcript 359353 (locus 359353) deri ved from phytozome v7.0 (chr-ID scaffold_139; pos 3535 to 3975 reverse strand)
aaacggcgtcgtctccggtgactttaaacctgcccgtaagccttctttaacaatattcaaacgaattacaagataatagtttggtttactacgagattagtactattattttctgttgttttctatgttatataaccagttaacatggaattattcaatctgttttaaaagggagaaagatgtcgaaaattttggaagtctattttaacaatataaacaagcgtatgtgtgtatatttttattaattctttttagtaagaactaatatttagaagaaagaaaaaaacatctaatatgttaaatatgaacattcagtcaggtaacatcatattttgagtagattttgtaaagtttatttgggtttaatatatagctggcaaaaatatgttgttagtaatcaaataaatgtaaacatgtgtttgtaactgcaggaggaagaaa

SEQ ID NO: 39260 - DNA, 894 bp, Arabidopsis lyrata
  Intron number 2 from transcript 490663 (locus 490663) deri ved from phytozome v7.0 (chr-ID scaffold_7; pos 304604 to 305497 reverse strand)
tgaaaggaagaaagacaactaactctcaaggcaaggtaaaagagctctttgcatgtttcttttattttgattgaaaaatcttaggattctgattcaagattcagatgcattttgtaatgatgatgtttaaatgtcctggtgctgcaattgaaaagtttctatgctttttttttactagtaaaattccaagcttctttttcttttaccttatagaacacgcatttgtgactgaccttgtctccctctccattgatgaattcaaaactaaaaagctactgtattatctttatgtttgattttgcgtgtactatatatattataatcctagtcagttttcaaagtttagagtatgataatttctttttatagggagagaagcatggtctgtgggaccatgcattacctctcttattcgattaaacaatgtttagatttggtaaaaacgtgacttagtcttcaagcatagtgggtgaccattacagattacagataaagtcggtaatctttgttttgtttcttcttcttcagttgtggttgatcaccttctaagtaaactgtcctgtattaacctcaatattataatggcaacaagtcttctctttttttgtgtctttggttcatatataatgttcgagtgttctctttcagcacaaccgagaagcttttctctttctaggcatgtttcatgttttaatctcttagttttggtttggtgcgatcagatttctgagttttgccatttgtttatggttgtgattagttggaaaatacgggtcatttctgcttttgaagttccttcagcactccacaataaatatgctaagactccaatctaagaggtcttaagtttgaactgtttcaggaaaacaaaggttcctctggttactctgaatt

SEQ ID NO: 39261 - DNA, 708 bp, Arabidopsis lyrata
  Intron number 1 from transcript 491863 (locus 491863) deri ved from phytozome v7.0 (chr-ID scaffold_7; pos 5512109 to 5512816 reverse strand)
cccatcttcttcgttgcccttcatcgatttcgcaggttaatattttttgttgtcattcattttgaaattctatatgatggatgttattaaaatcgaacttgttcatcggatgaaatcacacaatcatatttttcttgtatatgaggtctgtgggagttttgtggcgtatacatagattatttacagggccggcccaagttcttttgctgcctaaagcaaaaatgtgtttgacccatttagaaatatctgttggaagaaaaaaatataaattttaacaaaaactagactcaaacccagcacgtagaacatgacaaatagtggcattgaccactataccaccaacaattttgaaatatgatgccccaaattttgttaataaattctgatgcctaaagccctagctttaccagctttagcttcgggccgggcctgattatttacatggtccaagagattacaaaacaaacattttttaaagctatttataatcatggttgttttttagcttaggtttgtgaatttcttttctcgatacttcatgataacaagatatctcaagcttaatttttctctttctcttagagagattttcatctggaacctatataaattgattttttttttttttgataaaatgatttgatttggtttattccctctttaaatcatgcaggtcgaaaattccgatttggaaaattatcaaaacaa

SEQ ID NO: 39262 - DNA, 360 bp, Arabidopsis lyrata
  Intron number 4 from transcript 470233 (locus 470233) deri ved from phytozome v7.0 (chr-ID scaffold_1; pos 739318 to 739677 reverse strand)
aaacctagaagccctagtcagtcagcttcttctttgtttgtttttacatattcttgtcttgatgaacttctttcttgctgctttcttgggtattcaaagtctgtatcatcagggactctcttttggtcttgcttgctttattctttgtcgactaagtagaagctgtagagattaaagtatacatacatatcttttattgttgatgtgttaataatgctgtaatgaggccaggtttactcgttccgttactgcatttatgagtatatgacagacatgaatattgtgtcagctgatattttgtccaatgttttcttaatttttgcagttgctagaggaagaaagcggaagcaagattctgtt

SEQ ID NO: 39263 - DNA, 713 bp, Arabidopsis lyrata
  Intron number 3 from transcript 495010 (locus 495010) deri ved from phytozome v7.0 (chr-ID scaffold_8; pos 13129353 t o 13130065)
ttgctactttggaagcaaggaagggtactggtgaggttcgttgttgttcattttcatttgtttagttttaaagaagtctctagtagttcagagttatactttattagtctttcttcatttgtttttgtgtaaatgctgttctgttttttttttatgtttagttttgatgttgtgatcagtctcttgctgctatttttgagggggatgatgactaaatataaatgttgtttgaaattttgaatccggaatcctgaattttaattttataaggttgaactttgttgtgttttgatttcttaccaatgttagcgtgccaacttggtgtccatgtgaagattttttccttttctctttgcgcgagtcaggcttacttaaaacatttccttagaatttgaagatcgatgttgattggtttggaaagacaatgtctaaatcactaatcagctttcttatttgttcctatgggcccttaaattagtgtcttaaagtcgtgtttgatggtaacagcagaacagtgttgagatttagcttcactggaagaatcactgacacatagatagtagtgggcgatgtttcatcttttttgttatataaaagttgttttgatgtttagacttactgttgattcttgtgttcttcatcattattttctcacatggaattctttttacaatgcaggcgcttttagccgattttgaggtgtctgaaggaat

SEQ ID NO: 39264 - DNA, 302 bp, Arabidopsis lyrata
  Intron number 3 from transcript 481311 (locus 481311) deri ved from phytozome v7.0 (chr-ID scaffold_4; pos 2969634 to 2969935 reverse strand)
tttagttcttctcttgaagactctctcccgattaagtaagtttggtttcatatgactcaccaaagtttctataattgtcttttcactatgttcttcatctgtagaagaaattgatctttaatcttttcttggcaagattcatctgttgttatagttgatttaagactttgaatcttagtgatttggttaaatcttgaaaccctcaagttagttcttggttatgtttggtctgaatgctgatgatgctgatatgtttgtttgttttgtttggttatttttcaggagaggattatcgaaccatt

SEQ ID NO: 39265 - DNA, 868 bp, Arabidopsis lyrata
  Intron number 1 from transcript 318028 (locus 318028) deri ved from phytozome v7.0 (chr-ID scaffold_3; pos 5042091 to 5042958 reverse strand)
gggacatcttattgggcccattcttttgtttttcggtttatgggcccactttttatattgattcgcgagcttatcaaagattcatacattttctttagtttgtttaggtatttcaagtgaaacatccaacaaccaatcttttcgagtttcggagatgaacttcataatctccaaagatattgtactaacgtcagctaccactgtagaggctaacatgccatccgagtcaatcaaccgtttacgtgttaatctaacactgttacagtcaaaactatagattctagctaaaattcaccgtagagttcctttggacctcttctgaaaacattttgatgtctacacaaaagcaggagttgcccttgaatgtatgaattgaccaattataatggtacttttatgaatttgcacgatactataattcatgtccgaatggtaactgtaaaacataatatatgtatgaattgaccgatttctctcaaatccaattgtaaaatatcacaatgccaaagtcatcatcattactacttccccacatgttaaaaaaatgcagatctcatcgggattttgaacctatatatgaataaaagaatatatgatgctgaatctaggaaatggtagaacaagggggaccagattgcaaaaaccatgtctccgtgatttagattccaccatgggattcaaaacgaagaagctttgacagctcatctgtgtgatgtgaaggacacgacgttagccagcagcaacataacccaaatcgaaaaaagtcttttacttctcccagcaagagtggcgcagctccggcgagatttgtgattcatgtcttcctcttttagccccggtcaaagccccggaagctcccggttgctgc

SEQ ID NO: 39266 - DNA, 429 bp, Arabidopsis lyrata
  Intron number 2 from transcript 479617 (locus 479617) deri ved from phytozome v7.0 (chr-ID scaffold_3; pos 9229994 to 9230422 reverse strand)
cagtagcaacctaacacatagcacttggaaaaaaagtgaagcagtaaaagtataaaataataaaagggtgggttatcaattatagtttaaatcatagttgatttttgatataccctaccacaaaactcaaaccgacttaattcaaatcatcccaaaaaaacaagcgccaaaataatgaaaagaaaacaaaccaaaataataataaaaacatcacacgaaacataataatttactcttcgttattgtattaacaaatcaaagagatgaattttgatcacctgctaatactactctttgtatcgattctagctatatctaaaaaagaagctaataataaactaaaagtacgttcatcgatcgtgtgcgttgacgaagaagagctctatctccggaggagcaaagaaaacgatctgtctccgtcgtaacaca

SEQ ID NO: 39267 - DNA, 645 bp, Arabidopsis lyrata
  Intron number 1 from transcript 489790 (locus 489790) deri ved from phytozome v7.0 (chr-ID scaffold_6; pos 19237595 t o 19238239)
cactcttctcttctcctgagtttacttctcaagtaaaagatatatgttctattaatcatttgagtcaaccaaaagtagttcttaaaattagggttttttagtttaccaaaaataggaaggacttaactgaattagtacttgttttagttttgtcaagttgtttgaaattgtagttaaattgctgactaatgttctcgatattgaaaagaccagtcttgtcttaaaattgacaacttgtgtttttctgaaccaaactcagcaagttgcagtttctattttaacccaaaaaaaaatgtggcagtttttatttctctttttgttgttgcctctgttgctttgatgtgtgaatgtgaacattaaagaaagctcataagggtaacttgttgagaagaacataaggccacatgatgatatatacttctttgttcatgttgattttggtggctgatgtgtaaatatgtattgatcttcctcatcgttaggattgtgttactatacttgatacacaacttggattatatatgtaacctatgttatgtattgagtgatgttgattaaggtttcaggcttagtgctgattgcctcttttcgggtttttttctggaagtagaaaggagagcaaagcagtggtcaagttcctgccgg

SEQ ID NO: 39268 - DNA, 410 bp, Arabidopsis lyrata
  Intron number 5 from transcript 483848 (locus 483848) deri ved from phytozome v7.0 (chr-ID scaffold_4; pos 22783639 t o 22784048)
gtgttcttgaacttgtaggcatcggttacacaggagtgagtttcttcttctaccatcttgtctttgtaacatttgaaccaagctttagtgaacctgttttgagggtataaatgattcttcaatcacttttggatttaggattagtcctctgatttgagaatccgaacctctgcacttgagtgtattcatatggagatatgataatgatatcataaatggattactgcttctcacgagtcttttgaatcttaagactagtttcaattgtaaaggacttgtttagttgcttgtgtgatggaccttaacttgtggtttatttgtatgatggaccttaacttgtggtttatttatgtttttttttttttcctatggcagtggttcacttacaagaacctggtcttcaaaccaga

SEQ ID NO: 39269 - DNA, 618 bp, Arabidopsis lyrata
  Intron number 3 from transcript 926343 (locus 926343) deri ved from phytozome v7.0 (chr-ID scaffold_2; pos 14318703 t o 14319320 reverse strand)
tctaaggagcatcacaagtgtgagtttttttttttcactattcttgattagttttgtaggctgtcttaatctaaagcctaggcctatttcattgtgattgtggtggatactttggtttagttcttggatgatttggtcacacattgagtctagtttattcaaaagcttgttcctagaatcatcctgaagtcgtcggtttcttttcttaactgtggagcccgttgtgtttatttgattgcttgatagagttttgcacgtaacacgaattaaatatcgtggcgccatcaagatttcgggattatctatatcgctttcggttccttaatttgatggcccacgctattgaataggagtttggattcttctctggacatcaagtggataaactaattagttgatcttcttccctcatctacccaaaattttggatctttgtgtaacattctactttattattgagtttcacatcggcaactgtcgtgttcaacgagtctcacagttgtaaaagttgacctttgctcaaaataaggttattgtcattgtgtctgaaactttttctttggtttttgttttgtttatgcagacatagaactccctgctgcttgtataattctgata

SEQ ID NO: 39270 - DNA, 582 bp, Arabidopsis lyrata
  Intron number 2 from transcript 485062 (locus 485062) deri ved from phytozome v7.0 (chr-ID scaffold_5; pos 12875291 t o 12875872 reverse strand)
ttgcttcaggactctgaaactcacaactcctagctgtaagtctttctttgattcatggttccattgatactgttctcagagttttagatcagttgagatgcttctgttgtatggttcatatgcattagtgtatagatggtgaacatgatttggtcattgttttgttactatttttagtggtttatttttgcctgtagtcctcatgtgttttgtgttattggttctgtttactattccctggttatctgcattggtgtcatcaccacaataagtcccaaatactgctattctttactcttattggcaaatatctagttaagtgttatgtaaatatctggtacttcttgtaacggaagcgatatgcagaactcagtggttgtatagtagagcatgattatcaacgacttttgtgattgtgaaagggtaactctgctttgtaatatagttttttttttttttttctgctaagctcttgttttgatatggttgtgtgataagtgtgtatatggatagaaggacggatacttacttcttcattctctgtttgcagttggagatttgaaccacttgatttctgccacg

SEQ ID NO: 39271 - DNA, 955 bp, Arabidopsis lyrata
  Intron number 2 from transcript 483572 (locus 483572) deri ved from phytozome v7.0 (chr-ID scaffold_4; pos 21687160 t o 21688114)
atttcgttttcggaaccgctatatcggcctttcaggtaatttaagatactaattataacatgcattaacggaaaaactggtaacatgaagtcggtatagtcctttatcaaaaacaaaaccatgaagttgtagtcgggttgcttcgaacgttttttgaggtttgttagaatgacgatacaattggtcattgactttattatagttacgttgaaaaagaatacgagattatttgtagccgtatataattattagttttttctggtttaaaatataattattagaccatcagcaatggtaaatttgggtgggtgtgtgttagtgggatgtaaatatttttttattattttaatttaaagagagagataaagaaagatagagagaaagagaaggagaggcttacattcgagtgttagttaagattcgaatgtgaagagagagacagtgcagtgtattatttctcatttttaaaatactcacaccccatgctcggttactccgctgtccatgctcttagttccttcgatgcatgttaaatattcgaagaaaaaaaaacaaattggtcttggactggtagcgttttagactagtagtggtccttcttaaagagattgaattttggatgacttatgtatagcttcataagcttagatatgatggatcataggttggctccaacaaggagatactattggcttcggtccgaaatttcaattcaaaagaaagaacaaaatatattcaaaaatagtaattaaaatgcgatataagtcatttgtttgatattgcaatttctctagttgatttgcttctccaccttttgtttatgtaggcatataaaatagtttgttaatattaggttctatataaaatattttctaagttgtttataaattaatttagctaccaattgatccattatgtagagcgaaggtgcaacaagcgaaggtggaaaatcgcc

SEQ ID NO: 39272 - DNA, 397 bp, Arabidopsis lyrata
  Intron number 2 from transcript 477407 (locus 477407) deri ved from phytozome v7.0 (chr-ID scaffold_3; pos 355112 to 355508 reverse strand)
ttctattataccttaatcgggtgttgctaaaacatacacacactatcagtgtttttcgtgccctgtcttctccaagtttccgattgtctggttggttgatacatattttactactttggtttatgattatctttgttaccgttactttcatctcttaactcaattcaattatataagttagggttcttactctcttctctctccgcaaacaatttggcctgcttatatatataaaaaggggtactttttttttttttttttaatttgaatcatgatcttaatcgtagtttcgtgggtttcttgctgtagaaatctctgtgaattcgtcaaggaatctgattcaagaatcttgtttatgtttcttctttgatttaggtttgtgtgagaaaacagaaca

SEQ ID NO: 39273 - DNA, 811 bp, Arabidopsis lyrata
  Intron number 1 from transcript 933064 (locus 933064) deri ved from phytozome v7.0 (chr-ID scaffold_4; pos 10801296 t o 10802106)
ctctctgctcaaagtgtaacggttagtacattcgttcactcgacgtcattcttttaatacgtttttcggtgtagctttgaattagctgaagcttgaactttattttgatggcctaaactggtggttctatgagcaacatgccacactttgaaccttatacatgattcttcagtttttaaatttgacaattaagtcgtagatttggattttgctctataatggtattggttggtttgttctgttttcatctatctaatgatacttacattgtggactgctggattcagccaaagctacttacttgatttgaatctagaatgaaattaggattagcttctgattgtaaactatgtttgttagtggtattgcagtgttctctctcttttgatctaatctttagctcgttcttgaattctataatggttttaggattgaaaaagttgtgtgtatggagataattgcctctaaaatgtcttattctctaaattgccgcttattatttttacagaagtttagaaattgccgctgtttttttagaaaatttgtttagcgaatatatcccattaatttcggttggttttaccacaactattaatacccataacctcttatgttaaccctaatttttatttagcgatccccactccacaggttctttactactcttcacgtctcaccaccgtaactcttcttttctacaggtaattttattacttttttgatcataaaactggctttgttgatgaattttcttgttaatttcgaactttgtaactgagtttctttatctatttcatgaactcatgtagac

SEQ ID NO: 39274 - DNA, 778 bp, Arabidopsis lyrata
  Intron number 3 from transcript 938310 (locus 938310) deri ved from phytozome v7.0 (chr-ID scaffold_5; pos 16806513 t o 16807290 reverse strand)
ggaagcagaggactcagtgctcttcaaaggtaatctcttgctccctttttttttatgtaataaattctattccatattgggaatcgtcttgccaaaatgccattattgcaaagtgtttagtattggtttatatgaaattataaattgtgagataatagggccattgattttttttttttttttcatcaagggccattgatattagttggtgttggtccaaatccatgattaaagaaacgctcgttacctaactaaaagacaatgtctaataccagtggctttcaattcgtggtttaataatccaaaaccatctcactttactttcaacaattttggtcttctaaattaaacatctttcgaggaacatggtagtatacaactttcatgacaattacttctcaaagaaaatggacaatggattaggttttaggttttagctttagctatggattaggttttagtttttagctttagcttagctatggattaggttttaggttttagctttagctttgaattttgtctttatctcataattaagaaaaaacaaacatttaagattctttttcttataagaaaacctaataagtatgtggttacacacttgtctttgatttaatctttgatatttttaacggtgatatttatcattggtaatctttgagtactgaaatcttctaaactttaatcgtggaccatttttgtctggaagtgtaaagaagatattttccaagtgtaaatgactaataataattaaaaacaatgaaacaggataata

SEQ ID NO: 39275 - DNA, 877 bp, Arabidopsis lyrata
  Intron number 1 from transcript 898172 (locus 898172) deri ved from phytozome v7.0 (chr-ID scaffold_5; pos 16156802 t o 16157678 reverse strand)
ctttacgagctatttctcttggagactggggtatgttcgaatccgtttctcgatttcgatgttgcttgcgtacaactcgttgattcttccttcaatcttgtttgtttttgattctgttcgattcgaagatcaagcctattttattgtgtatactcgcctggatttcgaataacgtttgcttagaacgatcgaatgtgaaacctcgaagcttaacacgaacttgcgtttgattctgttcgaatttgtgtatttccgcttttaagacttaaactcttgagacttgtggatttggagtactaagaatgatgaatttgtgtgcgatttattctgtaatctgttcgaatttgttgtgtttgatcctcttgccttgtggatttggagtacgtagaccgattgaatgagaaatgccaactttcgtgcgattgattctgtaatctgttcgagtttttgtgtgtttagcatcttgccttgtggatttgagtacttagaccgattgaatgagaaatacgaacttgtgtgcgattgattctgtaatctgttcgagtttgtgtgtttgagctttcttgccttgtgggttttgatgaatctttgtatgtttgagcctattttcttgttgtttaggatgtatctttgtatgttggagcctctttccttgtggttttggatgaatctttgtgtgtttgagccacttgccttgtggatttgcaggaatttatcttgtttattcacattcatcagatttttatttactcagaattagcaaggagatatgaatatgaaacattaagatatagactaagctaagtaagcatggctcaaatacgttatcgttctgtttgcagatgattcttttaacttctcctctctgatttttcag

SEQ ID NO: 39276 - DNA, 607 bp, Arabidopsis lyrata
  Intron number 2 from transcript 480000 (locus 480000) deri ved from phytozome v7.0 (chr-ID scaffold_3; pos 12296098 t o 12296704 reverse strand)
agaaacacgcggttcttgtcttatcgaaatctaaggttttttcttaaattttgattctttttttggtgaatggaattggtagctgtagagatttcaaatgatcaaccaatggtgccatttaagttggattcaaaccagagtgtgtggattgattattcttatagagtctattacaaagctgttttcttcttgatttgcttgtagttttggctttggtcaattaggaacaatggatcgaatcttatagggacgtttaaaagttactctatggcctaagcaagatcgtatttgatttaagtgaagtcaggaggtttgtctgaattttggtatctctggagtttctaaatggatggaattggtagtgcccactgatatcacttgatcattgcttgcaatcttatagttcattgcttgctcgtaatctgattaggctcatgttagtgaaaatggcaaacatgctcatgttttagagttgaattatactgttgggagaattgaatttggttgactaggaatattgggttgaagcttagagaattttcaaaaagctgctctaaacaagatttgttttggtgttgcaggaactctcacagctgagattcaagtt

SEQ ID NO: 39277 - DNA, 572 bp, Arabidopsis lyrata
  Intron number 1 from transcript 349470 (locus 349470) deri ved from phytozome v7.0 (chr-ID scaffold_6; pos 297142 to 297713)
ttcttgaagctctcgccattgttacaccctttgaggtaaagcttttggtttgttgccttttcgattacttcacgagacaaaagctctgccgaaataacattaatattttattagattaggaatcgaattaaactattgtgtaatcattagttagttgggtcaacggtttggtgtaattgaaattgttagattattcttgcaccagaagaaaatcatctctgttcaacaataaattagtatattttagtcagagaaattaaaattatttgttcagatctgttttgatgcttttggtcccattgttcatgacaattcttgatttggagaatcgtgttcttaataatcattttgtagaatcattttgagtctttgacttgtttcatgtagttcttgttcttatgtggttagagagataaggtttgattctcttcagtatgttcatgacatggattcaagagttcttgcatatcaaatgagtattttcactcaaataaaacactgttgagttctgtttttttgctttctataaatctctaggtggtgaaaattagacttcagcaacagaaaggatt

SEQ ID NO: 39278 - DNA, 166 bp, Arabidopsis lyrata
  Intron number 3 from transcript 490488 (locus 490488) deri ved from phytozome v7.0 (chr-ID scaffold_6; pos 24665834 t o 24665999 reverse strand)
gaatcctctgttttcgatctcgctggtcacaagtgtgaagctttttgatcttcttattatgcttattcacatacaaaagaaaacaaagaaacaattatgatcattaacctcaatatatcattctcttgactttggtatgataacaggacactctctgtgtacccaa

SEQ ID NO: 39279 - DNA, 764 bp, Arabidopsis lyrata
  Intron number 1 from transcript 924017 (locus 924017) deri ved from phytozome v7.0 (chr-ID scaffold_1; pos 29127077 t o 29127840)
tctgagaaaccagtcacggtagttcattcactctccgggtccggcttttatagatttgtgcaatcaatagattatataagtgtttcttatgctttttgattttgttaatgcttgttgaatcttgttattggttttggttggttactatattgttcactttatttaattaagctgcctaataactacacatacgtgttagtggcattatattacttggaagtcaaggtatggagctcagtcaatagcactctctagaaggttggatttgcattcctcatagcctttggtgcaattgattactctttttttttttttttttttttcttaatcaataactccttggaaatgtttcgttatgaatcgtgaaatatttattactattgagttttgccattgcttatagaattagccttgctctagtttcttggtagacttcctctctttttgccttcaatatgtgttaacgtatcttgcagtgggggaagagatctcagtggcaacaaaagaacttttcgccagccgatctcaatcctgaaaaccccatcctatctcactagttcttttctagttttatctttattcattcatatattctgcatatgctcctgactcctccgaagaagctagtgagagatacgatggggtttacagaattgagaagtgctggcggaaagttcagatgtagctaatgttctaaattgttcacctaatatcctagtgcttgagaaggccactgacctgtttgtgaaaacagaaagtccatc

SEQ ID NO: 39280 - DNA, 880 bp, Arabidopsis lyrata
  Intron number 1 from transcript 907415 (locus 907415) deri ved from phytozome v7.0 (chr-ID scaffold_2; pos 3101606 to 3102485 reverse strand)
gtaagttttttttaaaaaaatgtttctctattaatatataggggattaatcaaatgcacttgggaaactttagatatgaccctctaattccggttaccaatctctacaataattatttgagaagtagaaacgcaccatattgaaagttagggcattggaggcctgtggttaaaagttagaatgatttgtcctaaacacccttaatgaattgttcttctcgaaatttctccttcttcgtaattaggggtatataagtctaatcgtgtgttgatctctattataatgtcctaaacacccttaattcgaaaatttttgttcttagttgttaagggtatataagtctaatcgtgttttgtgatgattagtcttaatcacccttaattttttttattttatagtatgatcgctggggatatggaggtcataatatctcgactttaatgattatggaatcttagcttaaatttatttgttaattttttggataattctataatttagcagttaaaattcgtttttgttagttttctgattttgtttctaattaaaaagtaaaatttcttaagataatgattggtgtttgccctaatcttaaagctatatatattgttgatcggccagaggattaggtattatttttctgtggccattagatagttttcaccgttatggtttttttatatagctactacgattctgatgaatcgagttgtttgtcatgcaaatattgtttttatggacctttaaaggtcgtgtgcatattgtttgtgttgtttgttttatttttttgcattattcgatgatttattgttttgctaatttgttgtttttggtgtgtgtttcagttttgtataacgtgggaggttccatcgacaaagct

SEQ ID NO: 39281 - DNA, 652 bp, Arabidopsis lyrata
  Intron number 1 from transcript 476801 (locus 476801) deri ved from phytozome v7.0 (chr-ID scaffold_2; pos 17169654 t o 17170305 reverse strand)
aacaccatcatcggaacttaccggagttcgctacggtaccctaaaccaacccccctccttatccgttttcgttttgagaaatttcctgggtttttctgtttcggcattgtagaatcgagattagggtttttctattttgggtcttctcttttccgactttgaatctgattctttaactctaggaagatgagaaatcatcgctatatcgccgccacttattctagggttttaatagccaagaagaacgtaatcgatcaatttcaaaaactaatttcatggacctgtttgagcttagattttcaatgatttcgactgattcgtactatgaaacgcattgatttgagaaatctagctcaaatgatttgagtttcagaatcaaaattaataacttcgttcatggatccagcttagtttgtttcttcccttgtactttgaattctatgttcttggaatcttccttcagaggattggacccttttactcttcaagttttaacctttgctctgcttgtataggataatcttataggtctatttgcttttacatcttcaagtgcttgatttgattgttatcttcttctttttctttcttaattgtgatattattattattaacaggtaggtttggattctatctcttggggaaaaaacac

SEQ ID NO: 39282 - DNA, 597 bp, Arabidopsis lyrata
  Intron number 4 from transcript 481579 (locus 481579) deri ved from phytozome v7.0 (chr-ID scaffold_4; pos 10649274 t o 10649870 reverse strand)
gaacctgacaaagctgactggtaagacctttgaatagtgtctgtgattgttgtatatcttctagaggaattctagatttgtgtttttgtctgggttttgaatgtaatgttgatggaacatatagaaatactctttctgatatataataggatacttgttctgtggctgcattcagattttaccctttcatgatctctaggttacctgcaagatattccttgtttatgtcaagttaggttttgttcctgtagtctgttttccttattatacaaaacattagtattcctacgattaattgctggtattgtttataaattatcatgtaatatagcttgtttagttgcagtcaaataggggtcttttgaccatgttgattgttgaccttaggctgttggtgcattcagatttgacccttttctctagttatggtttatgtaactctagttacggtattcctaaagattcattgcctctactattcgtctatctgtagtatgtgtgaatagtctatttgaagttttgttaatctagttaaaccattcaatggtctgtttcttttcaggggtttcaaagctcttaagcagactgtgaagatct

SEQ ID NO: 39283 - DNA, 447 bp, Arabidopsis lyrata
  Intron number 1 from transcript 926029 (locus 926029) deri ved from phytozome v7.0 (chr-ID scaffold_2; pos 12650451 t o 12650897)
tgatcatctcatcatccctttcgtctccattagaggtcaatcttttaaactcaaagattccacttttgttttactctgtttttgcttatatgtgtcaatgataagtgagagtcaaagtgatgatctttgttgtgttgagtaataatagagagattgaatgagaagatagaggaaacgtttgggtgagagtttgtgctttttattgaattcagcagtccatcgatggaaaaagtgacgtttggtgcttctacattttatgcattctcttatggaatattggttctatataagttaacatattcattcgatactgatatgtcaccttgttatgcgcagtttgtctcaatgaagagtcatatcctgttcttagttccatactcttgtgaacaagatctctggatacatgctatccaaaatcgagtcaaagtctaagagacactgaaccag

SEQ ID NO: 39284 - DNA, 298 bp, Arabidopsis lyrata
  Intron number 1 from transcript 936910 (locus 936910) deri ved from phytozome v7.0 (chr-ID scaffold_5; pos 9798475 to 9798772 reverse strand)
ttctcgccgagaacgccgagattctcgctcttcaggtttgtttgctctgatttctgagttgaattttgatctctatgtatggaatgtgtttagggtttggaattgttgttgattatgaagagatctagttaagaatttgttcgattttcggagttttcttttttattgcagagtttgttatccggaaagggtttaatgcaaaattagattttttgagcagattcgaagtagcttaacttgatgcagtttatgcttttatatttgttaagattgtaatttatgttaaagcgtttttagg

SEQ ID NO: 39285 - DNA, 412 bp, Arabidopsis lyrata
  Intron number 3 from transcript 912012 (locus 912012) deri ved from phytozome v7.0 (chr-ID scaffold_1; pos 9412997 to 9413408)
gactctattggagccaagtatgtttacatcttttcttggttaaatctctgatttgtatgcacgcttttcccttttacatattaatgtcattagcttggttagtgtggtttatatagtctttgagccagatgtctcgtggatgttatttgttttggttttggttttggaatttttggacttatctcagcatcctatgagtgggaaatgctcatggttcctttttccctttcgtcttcatattgttttgatacatctatttattttgtgtttgttgtttttagaaaatggctgcatttttttcaacctggttgttgcattttattcgctgttgatataacagggaacttgttttaatagttgttctcttctaaatgcagagagttggctaaagattttgttgtatctggaactg

SEQ ID NO: 39286 - DNA, 651 bp, Arabidopsis lyrata
  Intron number 1 from transcript 930597 (locus 930597) deri ved from phytozome v7.0 (chr-ID scaffold_3; pos 12218808 t o 12219458 reverse strand)
atcaaaaataagatactagcgatgaagcagtctgattaggttatcatgttaactaattatagggtttatttaatgaatgttgatcttcatggaatccacaacaacgttgctccatctgcaaaggtaacaagtcaatttagcctaaaagatcctctttctaaatctttagaagaagtatatataaaacgcgtctttcactgccacggcttattgccaggggtggacgtacgtgtattagtacctaggcacgtgccctatacaaaatttgataattttgaactttgttatatatactttgaagaaaagatggaataattggtgtatcgtgccacatacaatataatattcctctactaattctttagtcaattagctactattttctttctttttactgatttcaggtaataaatgcttttcatatattttaatctatttttttctctaacctttttttaattgtttaaaggaataatgtttatatagagtagtagaatcaatggttgatcaacaattgaacacatcaaatgaatttgcttcatttacatgtcttttaatcaataaatataatattttagattaaaaatttatattttaaatatattatgccccatactatatatgtttctagatccgccactgcttattgct

SEQ ID NO: 39287 - DNA, 602 bp, Arabidopsis lyrata
  Intron number 1 from transcript 339926 (locus 339926) deri ved from phytozome v7.0 (chr-ID scaffold_2; pos 17743536 t o 17744137 reverse strand)
cgactcagaacgagtcaactcagaaacccgtccaggtaatcttccattctcttctacttgatgggtaaataatcaaaaaggcattgcttcgattctcgtgtttgtgttcttgaaagatctaattttcaagggtcctcctatttgtttgggcactgcttttgtaacattggaagctgctgttctgtcaatttgatgttttgtttttttccctctgttcgtaatgatttcaaactttgtccgatttggattccacttaagttcatgcagttcggtcccactgtaccctttaacagtttacactatcgatgatcaatcccagtttcatctgttagcttggtgactcaaaatgggctttgcttaattgccagtttctctttagacttcacattaccgtcgcagagtttaaaccataggactggttcttctaaacattgtgtattaagtaactcaattttgcacttttggctctagtattgagatgttagtaacagtcagaacctcaaattttactcatctccaaattagacttctctttggtatactaatcattttcggactattctttaggtggcgaaacgattagagaagttcaagactacgat

SEQ ID NO: 39288 - DNA, 457 bp, Arabidopsis lyrata
  Intron number 1 from transcript 932958 (locus 932958) deri ved from phytozome v7.0 (chr-ID scaffold_4; pos 9863380 to 9863836)
ttgagcaagaggaagagtatatcattagattaaaggtatcatcaaaatcttctaatcaaaaattttgttaggtttcgaatgatttgtgtgatcaaatttattattgattgtggttacaattcataggctcaatttgtttttgggattctaagattttctataagtagatgctgttggtattacaattttgtcgaattgctccggctcactgaccggatcttggagtcattggattcttcgtaatgaacaacttggagtcattggattccttgtaatgaacaatccggattttcgcagtcctaccatatgtcataagccgccatttaggtctatgttactaatgggctagaattattgtgtggagcattttttttgtttacgtgtatattaaactgtttttcttttggggactggtatcgtaggaattgaaggatcaagtggcaaaggcgacgaattc

SEQ ID NO: 39289 - DNA, 824 bp, Arabidopsis lyrata
  Intron number 3 from transcript 930529 (locus 930529) deri ved from phytozome v7.0 (chr-ID scaffold_3; pos 11728047 t o 11728870 reverse strand)
gacaaaaacacgtctcttgtgaaaaaggtttatatatgaatcatttgttattgactggcttgtagaagatggttataactttatagcattattccttgcttatctctttcttgaatcatgttaatattcataaaattttgaaatttttgtgtgtttatgtgctgtgttttgctttttgtggggagggagtgggagattttagattcattttcttgcaacagaaagttttctttatttaattcaaactggatagaaagtttgtaactatggtcttagtttatctgcaggtggtgatgtgaagcagattacaatgaaaaatcaattgtcagatatgatagaggtctggttgtgctcttttttccccataagtcaggattattgaaacagaaatagagaaatactagtcatgcaatgcaacagttttcacttcagtcttcttacaaatccaatacttgctacctaatagtacaataacaagctgattttttttttctagtggattatactgtacttccactaaacatacttgaagacgtactaggaaatttcttggtaatgataggtggtctattcttttgatcaaattaatttttgtggaaacactctttagtctaggcttttaagtttaactccatgtttgctttatgtttcacttggatcggcctttttttgaagtactcgccttcagtttcttacaatttttattcaccatcagttgctttagttcatttgattaccctccaaaatatatgtttcttgttaatgatgtcctaacttcataactttgcttccttttaggtatttacagctgaatatagcctcat

SEQ ID NO: 39290 - DNA, 838 bp, Arabidopsis lyrata
  Intron number 1 from transcript 921545 (locus 921545) deri ved from phytozome v7.0 (chr-ID scaffold_1; pos 11031529 t o 11032366)
tctggcgacggcggagcgagcgccggaagaacacggccacagttacttggagaaatctgaaaaaaaaaacaaattaacaaacaaacatgagaatgtgaatttgaatttcatattcgaagactagattgagaagaagaaaaccttcatcatgtgaatttgaatttcaaaaaaagagtgtgtggtgaaacaaaaaagagcatatatatatatatatatatatatcttgttcaacctctgtacgctgctcaacttttacataaacgatgagaagtttttggacttaaattcctttacatttccaacaatctcaccaacatcatcaaggttttgcaaaataaatttgacaaaaccaccacattaacaaaacgacacatgatataaacatgttgggattcagattcaatttcaataaatcaaagaaacaatttttcttaaggaaacaatagtatatgagcaaatatttatttaactacactagtgaaatcttttttctttgattagaattgcactagtaaaccatattcacagaatttctaattattttctagatctcaaataaattaaagaaacaattttttttaaagaaacgataatatacgagcaaatatcttattaaactaaactagtgaaatcttttttctttgattagaattacactaccatattcacatatttcctaattattttctagatctcaaacacacaatttatatttcaaaaacttcgaagatcttaatgtctatttagacaacataccatgtttaaaatatcaacataccatgtttaaaatattccgcctccagctgcgccagctgcgccagttccgcctccaagtgcg

SEQ ID NO: 39291 - DNA, 191 bp, Arabidopsis lyrata
  Intron number 2 from transcript 495652 (locus 495652) deri ved from phytozome v7.0 (chr-ID scaffold_8; pos 17123596 t o 17123786 reverse strand)
agtggggtaagtaataaagtcgctttctctgttaattttgtgttttcccggaaaattctgggtttaatcgattcaattgcatttgtttattgaaaaattagggttctttgattcaatcattcaaatttctgtatcttcttgtgtaattgcaaatcttgattcgatcattatttgattggtggcagacactg

SEQ ID NO: 39292 - DNA, 881 bp, Arabidopsis lyrata
  Intron number 1 from transcript 357624 (locus 357624) deri ved from phytozome v7.0 (chr-ID scaffold_8; pos 16043540 t o 16044420 reverse strand)
aagggtgcgaagattagtggctagatgtttaagattctgtaggttttttttggtttagatggtttattattgatcatgttcttcagccgtcaaatcaaaaaaaacgtcgttgtcaagatgtcggtgactatataataaataaaacgagccgattttttttggataaatgtgttttttattttattccggcgaatcctccctttctaaaaattctttttgtttctctccgatttgttcccactaacatccatcttccattgtttgggagatccacaaatcattcttatttttccgatttgttctgttccgatttcatttgttaggttgggtaaacggatcagaatcgtgccggagagaaaagcttgtgtgattgagcggttgggtaaattccgcaagactttgccggcggggattcacttccttgttccgctattccgattggtaaatctgagattagtatacacatggatggtgtttgatttatcaaaattgaggtttatgttgataaatctgttgcagattggggatcctaagtttgcgcgttgagaatccattctatgctgttctttagttggctcagactacaatgcgtagtgagctcgggaaatttactcttgactagacttttgaggaacggaactgagaagattgtggtatgttttttgtctggtccagcttcgtttcaaattgaaaagatggattctttgatgttatcatggttagagatgttattgtgaatttcctttgagtttacttttgttagataggagtattgtagttttatgtgttgtggaatgcattatgcttttgtagttaaatgtgttggatactgcaagcatctttacatgttgaaatggaattattcttgcagggagccatca

SEQ ID NO: 39293 - DNA, 530 bp, Arabidopsis lyrata
  Intron number 2 from transcript 898422 (locus 898422) deri ved from phytozome v7.0 (chr-ID scaffold_5; pos 17201065 t o 17201594)
ctaaaaatctacgtgtgaaggtttgattttttttagttattgtttttgctctcgtttaagaaatgttgatctcgttgagattgatttgtttcttcactgattcctgtgattcatcaatggaagattgcaatttttatagcttattagaaagttcaagcttttgtgatctgtggtcttgctttatatttgattgttcacattttaaaccacgcatgttgtaagatgtgataagcctagtgaagcttttagtggagcttttaaagaaaaatacactcttcatagaatgctagtagcaaaacctcaactttcttcttaataattgacggttttgctttatcaagttacttttgaaactcttttgctactgttaaggagatgattccttttctttcacctttcttcttgttgctcagcagtattatgccaggtgtagtataattggtttcaactttgcgcaagacttacctcttaacgtttggattcacttgaatgcagttagttctattaggagattctggtgttggtaaaag

SEQ ID NO: 39294 - DNA, 863 bp, Arabidopsis lyrata
  Intron number 1 from transcript 919723 (locus 919723) deri ved from phytozome v7.0 (chr-ID scaffold_1; pos 3674396 to 3675258)
gttcttcgcttcgattggtttgcagttcttcttaggtttgtcttcttcagatctatctgatttcatttcactttctgtagaatcatcatcggatttagttggggattttaggttctcaattcgctagatttatgttaaatttagctcaacttggctctttctagatacttaatcattatgcattaggtcttttgcgatcaggatcgaaacatgcatctgataggaagattgtatttctctgttgagtagatcttggccacacatataccaccaaatctgtaactttgtgcttaacatgtgttagtaaagagaaaaataagcaaagagaccgttcaattcatgggtttggtgtggctatagtttcttttactatcttcactggattatagttgtttacctttgtcctttatgcgagaccgcgtcctgatttgaagaggttgtctgcaaaatctattgcttttgtgacatgtatttgtataattcatcagttgtttcagacatttgaagtttttacataagctatttctacaattggccaccatgtgcttttaatagaagtaggctaatgtctctcccgtaaattctttaaatgcatgttgcaattgatcttgttctctgttgtctatgtgtgtagttgttgttgttcccctttagttgaagataagtaacatggtaactatttgaggatagactgtgtagctttagctgctgactagtgagtgtctaaacgacaagatttacagtcacgagtgctcttgggacagcataaacttttaaaaaaatttacatgctaagagggcatttagtaattaagtcttctgatatgatatttgcaggtctatccggtgattccaagaatacaa

SEQ ID NO: 39295 - DNA, 580 bp, Arabidopsis lyrata
  Intron number 1 from transcript 945786 (locus 945786) deri ved from phytozome v7.0 (chr-ID scaffold_7; pos 8155619 to 8156198)
aatgcgacctgaagccgtcgccatggttatcctcgtcaagcttcgattcacccaaaaaaaaatgcgagattgagaaaaactaagaaaacttcgattattatatatctctcgggcgttaatgtaaggcggtgtaattgatttgtagccctaacttcctgaggaatttttttaatttttccctctggattaatttttttttaccaacttgtcctttgaattaaactcgggagagaaaaaattctgtcaactactgtatatattctcgaaaaaaaaaaaagaagactagtttcttctacaagaaaaagaaggaaattagggttttaatcttcttcgttttggaaaaggaaccataaaattctatgaaacagtttctgtcggatcaggaaccatcaaaaaatctataaaacagtttacgtacggatcaaagcaagatctcacaaaattcgagaagttgaatacggacagtactcaatcaatcaaaggaaaatctagagttttgggttgttgtgaattgggattgacgatgttcgagtgttacgctccagaagtgcctaccggaaagtaaaaggaggaagaagac

SEQ ID NO: 39296 - DNA, 489 bp, Arabidopsis lyrata
  Intron number 1 from transcript 937611 (locus 937611) deri ved from phytozome v7.0 (chr-ID scaffold_5; pos 13846636 t o 13847124)
accagaacgaaggttcctctctcactagatcttcattgttctgcatttcttcaatttcttacgttccctgtggagctagggtttttgtcttcagagatcagtttttctttagggatttcaattttgtgataattgatccttctctagggatttatcattgattagctaagtggtctagactctagacgctttgtgctcacatttagtctatctaggtttataaatttctcaaggttaatggcttttaccaattaatgaattgtgaactctttcaatatgctttttttgtgaaatgcttttgcagttcctgatccaggaagcttcaatgatagtgttgctgattaacaggtttgttgttgcaagatttgatctttgtttgattgctcttacgcagcacactactcaatgttgtcttttctttccattaagctatttgttatgcttattaggctgttctagagactgttgctcgagttaagcctaagaaaa

SEQ ID NO: 39297 - DNA, 274 bp, Arabidopsis lyrata
  Intron number 1 from transcript 929419 (locus 929419) deri ved from phytozome v7.0 (chr-ID scaffold_3; pos 6744874 to 6745147)
ctactggtcttcagcattttcagtcatccgccaatgtaatctcagaatctgatccttttcttctcctcctccttatctttccatcgattcaaaaatttaaatttctatgaagtttctaagaagatctgttagttcaggagagaaaattctccgatctgaagttctgggcaaatttgtttttgagtttattatgcattttctcgatgagacttgtgaacccaagtttagtttatgaggtttttttaaacttaatggtgggattatgaacaggatt

SEQ ID NO: 39298 - DNA, 486 bp, Arabidopsis lyrata
  Intron number 1 from transcript 937466 (locus 937466) deri ved from phytozome v7.0 (chr-ID scaffold_5; pos 13115076 t o 13115561 reverse strand)
gccaagagagttcgtgttcttgagctttctcgcaggcaattcatttttcctcttttttttttttggtttttaaaataagaaaattatttggtttgtcacgttaaaatcattctaaattctgcaaaattacgttatgattagtttgatgttagacatcttaagatactaaaatgattgtttcagaatatgctgaggaagattgatgtcatctaatctcatttttacacgatcacgacatacataatttgtagtattatcaatgcattcattttcttggacctttttgttgaacgtgacatgaacagtgatgtttgatcaaatcaaacgttaccctttttgcatagtttatgtggatctctctaagaaaatctgaatcttttttttgttggtggaatattccctagatatggtataaatatgtgagtttatttttttcaaaatttggttacagattgaggcacagaggacctgactggagtggattat

SEQ ID NO: 39299 - DNA, 287 bp, Arabidopsis lyrata
  Intron number 1 from transcript 918924 (locus 918924) deri ved from phytozome v7.0 (chr-ID scaffold_1; pos 721032 to 721318)
aggatttctcctcgtctcttcctacggaaaagagagtacgttcttcgtgttctacttctaattgcttttcttttttgtttctctctcgatttcagatttgagattgactcagatgattaagattggggattttggatttagtttgagtactagtttagatttctctcgatgaaattgaatttagataaccctaatttcagaatctgcatcgcttagtgataatattatgcaatttgaaggggtttttaagctacttgtttcaattgcagttggagaatatacaacag

SEQ ID NO: 39300 - DNA, 606 bp, Arabidopsis lyrata
  Intron number 1 from transcript 496559 (locus 496559) deri ved from phytozome v7.0 (chr-ID scaffold_8; pos 21090055 t o 21090660)
gctcactcaggtacttacaactaaaagctttgttttacttatactttaatgcctattttttcccattgtatattatttaggtttcttggtttttgtttattttactaaactttattgtttcttttagtttcaagttacaaaatatttgatacatatctaggtgaaacaagagaggttttgatcatcaaagcaaagagtcaaagacagagttataaattttcttgttcttgatgcttacaagctttcattttcttaatgttttgggttcaaatgagctctgatggagaagttatggattgatctgacaatgtttcacatcaaaaacaatcaaagctgttcgtttttaagacataattagacacacaaatcggtcttttcttttatttgctttcttatatttagttaacatagtttgatcacaccagttatgtgtttcttgtataataagttaactttttattatgtttgatacaatttagactatagattctacagcagaaaagaagcgagtttgattgatttagaatatatgacagttcttaaaatatcttaaaagctgcagggaatggtggaagttttcgtgatcctctaggaactcgaagagga

SEQ ID NO: 39301 - DNA, 521 bp, Arabidopsis lyrata
  Intron number 2 from transcript 475105 (locus 475105) deri ved from phytozome v7.0 (chr-ID scaffold_2; pos 1755783 to 1756303 reverse strand)
aatacaggtacatattttcttaaaaaaatacagtttcaaatcatatgttatattcatttaattacatatgaaatttattttcttctatgaaaaaaattagtcaccactccaaaaatcccccttaattcacaagatctgtcagggtacatgaataacataacaataaggccagtttattattagtattgccaaaacaattattttttcttaaagaaatctcaaattttgactaaaccaaatttcagttatacactctacctctattatctttaattaaaatattttttattttttattttttctcacatgcatgagttaagaatttttcgacttttttttatacttttattggtaaaaagtaaccattaaaaatattataattacataaaaagtaacctgaaacttgcatagtgaagcacaagcaaagatgtaatatattatactattttttttttttttgagcaaagatgtaatatattatactaaagtagtaaaaaatgttttgatttggcaggacggcc

SEQ ID NO: 39302 - DNA, 593 bp, Arabidopsis lyrata
  Intron number 1 from transcript 483204 (locus 483204) deri ved from phytozome v7.0 (chr-ID scaffold_4; pos 20150757 t o 20151349)
tctctgccaagcatcgctttgattcttcgaaaaaggttattttaaattcaatacgaatacgaatgtgatttccatttctggtggttttctttctctgcatgttgatttttctgcctagcttttgaaaagtttgaagtgttttccattgatttgattcaattgttatgtagtatacaatttttctgaagaaaggattctacttttaaagacttcctctgatatacagcttgtttcctatagttaggtttgctttcatctgattcctctgtttttgaaacagaaacgttgtcttttctggcaaaaatctaaatggttcgactggtttaagtttggttagataataatggtaaatggttaggtaattgagttacttagcattaatcagttagttagtgtgtaattaccgagtaacatttgtaaggttaagagttccaataaataatttttgacattcttctctgttcttggcttaggcctcctaactgcaaaagagctcttcagagagggtgtttccttaacaagtcttatctttgtttgctgttgtcattaaattcacaagcacagagaaatttctctgatttgaatttcagatt

SEQ ID NO: 39303 - DNA, 462 bp, Arabidopsis lyrata
  Intron number 3 from transcript 492821 (locus 492821) deri ved from phytozome v7.0 (chr-ID scaffold_7; pos 9661129 to 9661590 reverse strand)
gtcttgaacctgactctagtccttctagtcctaaagtaagcttatacgagtacttgagtagtaatctgtctcttgttaattgggtttcttgcaagtattggttgggtaaagatgatggcttatgtatttgctaaacccgtttgagtctgaatccaatgaattctagtcttaatcaatgtttcttggctcttgcttatcagttcttccttcaaagatctcatctttctgagagtggtttttcttgtctttgttttggatttagcaatctaattacttggttcctaagaatttagcaatctcatctggaaaacccatggataaataatgttcttattagtttcttgttgtttgttgtgttacctatctgattgtcaaagaacagatgaatttgattactgaatgatatcgttttgttgcgtatttgaagataactgctaggtggaatccatcagaagcttgcag

SEQ ID NO: 39304 - DNA, 323 bp, Arabidopsis lyrata
  Intron number 4 from transcript 481550 (locus 481550) deri ved from phytozome v7.0 (chr-ID scaffold_4; pos 10250503 t o 10250825)
agcatcaagagattattttgagaattgctattaaggtggtctctcagctcctcctttagtgtgaatttggatatctattttatgaccactatatgtttgctttattttttcttcgtgctgttgtttgtgtgatccttttgcatttttttttcccctattttatggatttctctttttagtggctagtgctgcgtattataaaacgcaggagaaaaccattggatagataacaatttaaaaaaaaaatctatttgcacttcatacaataatttgccttacaatatcctcaaattttaactggttggtttccaggtcattggaga

SEQ ID NO: 39305 - DNA, 388 bp, Arabidopsis lyrata
  Intron number 2 from transcript 476602 (locus 476602) deri ved from phytozome v7.0 (chr-ID scaffold_2; pos 16370238 t o 16370625)
ccctggaaactggagatctgttcctgcaaacactggtatgtatcttcacagtgtaaatttgattgaatttgaggaaatatttggttaaaattagtgtttgacccctataaatttttgttctaacttccaaataacccttttaattcatataatttttcaatttattgttcatcataattttttattattattttgattcctataaaactcgtttctagatccgccactgtatcttcattcactctccttctttcttcttcgtcttaactataaaaattttcttattagcttccacatatatatatatatatatataaacatataaatacttttatatatgtatatattttcaggtttgctaaggtgtagcaagagttgcagacttcga

SEQ ID NO: 39306 - DNA, 675 bp, Arabidopsis lyrata
  Intron number 2 from transcript 473787 (locus 473787) deri ved from phytozome v7.0 (chr-ID scaffold_1; pos 22333906 t o 22334580)
gcggtctggcgtgtaagcttcgatattctttgctttttctacactgtaatcgcatcaatctatcttcttcgcggtttgatcttgtcgaatttggttatttcgattcgcataatcgcatcgtcaatctttgtttgcgttggtcttgtgttgattttgccgaatttgattctgatgtggaggtcttacggctagtttagttgtttatctctctgtaaagtaatgttaggaagtggtatagtgatgaatttagtgtgagggtgacctaatgtgaagggtaacgagcataatcgcattgttaatctttgtttgtgttgttcttgactggtcttgtgttgatttctttccgaattcggttatgatgtggaggtcttaagcttaatttagccgtgtatctctgtaaataatgtttagaaatggtatagtatgatgaatttgttgtgtttgacctaatctgaagggaaacgagtattagctcccatatttatgttttaggtttgcgattgtcagttgatgtcttcaagatggttagtttccatctgaggtcaagttcattagtaactttatttatgttgaaatttgtgttgttactcatggaacctatctatattttgattgacctcttggaaaagtaatgggatttgagtcaaaatgtataatgcagggagaaggatatag

SEQ ID NO: 39307 - DNA, 605 bp, Arabidopsis lyrata
  Intron number 2 from transcript 487697 (locus 487697) deri ved from phytozome v7.0 (chr-ID scaffold_6; pos 3563415 to 3564019 reverse strand)
tcgccaaaccttatctgggttttgcttcttatttggtaagattggatttttcgcctcaaccccttttgattttgtccttcttagatcgtgttaattgatcttcatacccaagtgatccttcttctatttaagttcgatgatgattttcacgaattgggtttttggggatccttgttctaggtgcactatgtcgattttgtgggttatttgagtatttttgctattgactactgtgattgattcgattgtgcgtatctcgattcactgttttgtttttttgagaggtgattgtttcgatcgaacaaagtgaaagtgcatttgatttatagttttgatcaattgggttttattcactggtttaattgttcttcatgtttgaatgctaatctccttgctactagatctacatgagttttcagagattaacttgttaaaatcccttcctgattctttcttaatttcaaggctaagttcaggcttttggcttctcttatttgtttccttgtaattttctgatcaagtgcatttttcagtttttgtatggatctaatgtgcaatcactcaaaagtttggtctcatttgtgttgtctctgcagataatttat

SEQ ID NO: 39308 - DNA, 395 bp, Arabidopsis lyrata
  Intron number 2 from transcript 488454 (locus 488454) deri ved from phytozome v7.0 (chr-ID scaffold_6; pos 6543259 to 6543653 reverse strand)
gcaaggttacttacttatccaattcactttctttttctttgtccttgttgtttcttcttttggtgggtttcgtctagtactaactaaagttcaatgctttgctttgatttccgattttgattctaagccatgtcttgaacattttcttaggtcggggtttttgagatctgtagggaccaattaataataagggtttaaagttcgtatttttttcttgttctcaaatccaactacaaatgcaaccaagctgtttgtttgagtttactctcgtattgatcatcagactctggttctggtatccatggtgtatagtttatgattggttttgattcttgtcttgtgtcaccaacatatagaaataataacatctctttaatggtttcccagctgtttac

SEQ ID NO: 39309 - DNA, 664 bp, Arabidopsis lyrata
  Intron number 1 from transcript 333566 (locus 333566) deri ved from phytozome v7.0 (chr-ID scaffold_1; pos 594086 to 594749)
cagccatctgattttaagctcactatagtggtacggtaatgcaacatcgaaattcgctaaattgttcacttttcaatgcaatttcgattttgttcatgaagcgttaaatgaggctatagatttgactttgaaagctgtattcatgaagttatctaccgaacaatttgtgttgtatcttatagtttagtttactataagagagagagttttggtagaatgctctttcttttgtttagtggatttagccttctcgttggtgagaaccttatgtgccaatgttcgtgtaatggaatgggcttggtgctcttggcattcgaccaccacctctaatttgtgttctgactaaaacatctcccataaagttgggatttttcttcttctttgttcatgttcttagagtttggcaaaagtgactgggtcgtggggaatctgtagaagactttgtaaggcgtaaccttggtgatgaggtcttttgagcgcttaattgaaacatttttgtttaggttgtgtgattaataggagtttctttgaacttcaattcgtaccagtcttcttttgtttataacctggtgctcacaaaatctggatgctctgcatttttctgcattcaggtgtttatgctggtgatccttcataactgagtattaaagcagactggaggaga

SEQ ID NO: 39310 - DNA, 800 bp, Arabidopsis lyrata
  Intron number 1 from transcript 340683 (locus 340683) deri ved from phytozome v7.0 (chr-ID scaffold_3; pos 1885441 to 1886240)
tcattgtctctgcctccttctctttcggcgttgccgtaagttttcttaacttatttatctatttttgatgttttgaagtattccaaattactttttttccctctcttttttcttggggaatcatatattatatatatatatatatatataaaaaaaataatatttacttaatggcaagaatttctgaaaagtaaaaatacagtatataagttaaaaatttgacgaaaaaagtaaactggtgttcctttgcgtgtttttaatttgtttactcattagttttaaaggttcattagcatgttaatagacaaaccttacgatttcaaaagaaattggatttaacaacgtgggatccatcaacgaatcaccgtgcatgatcagtctttcgatttagagtcttttaaagtaaattttaaagctatacgtatacttatcaaaaattggttgtgttttgagtttcagtttcgagtctttagggagccaaatcaaatttttacgaactggataggaaaattaattggctagagataccacttctagccacgatttttcttaatattttgtttatttattttttaatgttttgaagtattccagatagccttttccgaaattcatatatagaaggcataaaatttatgtaactatcctcatgttttgaagaatttcaattaacctttttcgaaattcagaactggatttggcgtagaatattccaattgtgttcaacttaattatttagatattcaggcatgtatctcaattattttgatgataatcagttagggcatactgctggtaca

SEQ ID NO: 39311 - DNA, 425 bp, Arabidopsis lyrata
  Intron number 1 from transcript 900998 (locus 900998) deri ved from phytozome v7.0 (chr-ID scaffold_4; pos 15062421 t o 15062845 reverse strand)
tgcttctttcttcaccacgtcctaaatccaaattggtacatctctcatcttcttttgtaaatcactctgtttgagtggttttaaggtttcttgtcctttaagttgcctccaatggtctgagattgatacgtgtgagaaaccaaaccatattactaatagttttaggagaccttaaatgttgctctgtgaatcgctctgtttgatccattttgctgcatttggattgtggaagctgtgttttgagtgtagggtttcttcttgttctttaagttgctacaatggtctgtttcaggatgaccttaaaagttggttcttatagatagtgtagcaatttgatattggtttctgttcatacacttggagtcattgatttcacagattttcgatgtttgtgcaggtcttgagtgataagaatctgctaaaga

SEQ ID NO: 39312 - DNA, 870 bp, Arabidopsis lyrata
  Intron number 2 from transcript 495659 (locus 495659) deri ved from phytozome v7.0 (chr-ID scaffold_8; pos 17149771 t o 17150640 reverse strand)
ttctcactaaccctggagcttcaaaaacctatcaggtactttactaaaccctgattagtaattaattggagtatttagtaatcttctgtttaattaatcaataaatagatgcatgtcgctgtataataaatgttgaacaaaaagaagtaggtacacttatcactactaaaccctgattttagtaagtaatcaattagaaatatattgacaaacaaaaattagtactgtattaattttctattttccatttatagtataattaatcaatacgtagatgcatgtgtctgtatttttttttttgggcaaactgatgcatgtgtctgtataaatttagaaattatcaaacaaaaagaatcaggaatttacactaattaaccctgattagtactctatttaacaataacttattagttttattactttatatagtctcttaaatttccgttgttataatatgagaagttatttaattagagaagaataaaagatgcatgtgattgtactgttggcttgtagccaatagccattgattttgaacaaaaagaaagagtcaaaaggtgttgactatttggtaagtaatgagcaaatatggtcaaacatataggcttaattacctcaattatcgcaacattattagtcagtttttccaattcgaacttatgaaacctaattctaaaaacctaattcatatttgaaagtagcaataattttcccactaacacactagcccttataattgagtagctagctacaaaagtttcaacttcactatctttaagtcaacttcaagatagaccaaaatgatattcagagattaaaaatgggttttggattgtgtttatgttgtaacaggagagtttagaaggaggc

SEQ ID NO: 39313 - DNA, 683 bp, Arabidopsis lyrata
  Intron number 3 from transcript 897943 (locus 897943) deri ved from phytozome v7.0 (chr-ID scaffold_5; pos 15169167 t o 15169849 reverse strand)
tctcctaattggggagacctcatcaactccagttggtaagtgctctgttttttttttccccaatgagattagtttcttctttgattttacatatttttaagtgtgtatgaatctcaaatttgtgagacatcaacttaaatatcgaaaacgaacattgcagcaaaaccttaattttgttctttggatctgaagggatcgagatagttgaatttttggtcaagtttgatctattattttagtcttttgtcttaattacagagattttttcctttttttttttgtaatcttagacatttcatgttgtttttagaagaaagttaatttttttaaattcaaaaatccatatgtttctaagttgggtcatgttatattctttgcttctaacgtcataatctactttgccttatgatgtcttctcatttacttgctctaatgattgcatttcaattcttccttcattaagcatcatttagaaaccaatgaacaagctaaactttgcattgcattatgcttattaaccttataaagtgtctcaagctaatcgtgtaatgtgagagaagaataactacatttacttttgttttgttgaggaaatgctaattactaattagtcgtaacaagttttaaccttttggttgattttcggtatatataggaaggatcccaactacaagagaacaatt

SEQ ID NO: 39314 - DNA, 541 bp, Arabidopsis lyrata
  Intron number 2 from transcript 483142 (locus 483142) deri ved from phytozome v7.0 (chr-ID scaffold_4; pos 19916475 t o 19917015 reverse strand)
ctttctctctgtttctggggttggcttaaaaaactgtaagaagttagtttatgttatcatcaatgttttagaatcgattcttcttgcattctcatcaattttgttgtgtgtttaatggtgatttctggttgcatgaattagataattcttgcatctgtaatctttatatgtttttattaatttcctagctttaccggtttgaaaaatttcagattttagtgtcacaatttttgttttgttttaagggttcttgcatcttttataattcgttgattccttttaccaatgaagcgaaattaatctgaaattcagttatcatattgtttaagattattattattattatttttttttccctattgtttaagattagtgcaagtaatttcttgaaatgtttcttttaattatgaaaagataaataaaaaaaaagaatttaatagatgcagtcacgagaatgcagagtttcaggttgatgattataagaagacatgttagtttaattgttcttttgttctttttgtaagcagacaagatcctgaca

SEQ ID NO: 39315 - DNA, 735 bp, Arabidopsis lyrata
  Intron number 4 from transcript 491267 (locus 491267) deri ved from phytozome v7.0 (chr-ID scaffold_7; pos 2978717 to 2979451)
tctctctctttttgattgggatttttgcaggtacagtttcttcaattctatgtttaccacacgatgatcggtcttgaatcgatttcattttctggatcgtttttatgtggaaatggttttttgttttaatgtgttgattcattgcaatagctgtgaatctcgcccattttagggtctctttcttacgattggaacctctttagtgcacatagctgttgtgatgaatcggagtgtgttaattaattcatggttttaaagatacagagtcttgtaaattatctagactacaattttgagttaggacaaatttgagtctggagatttcctttgtccgctttattagtatctgtagctacattctctcttttctcatcttccgacatgattttgagaaaatgttgtaaggacttagattttctttttttccgtatgtcagtgcgtcccttaatgaagtttgctgagttaagcacaagtgttggtttcttagttcttttaaaaagttgtttaattttgccaggactcaaagattctgttactgagttgcttaactgctaaagtcatgattttgcaaatgtttcagttgttttcttccttgtggagttatcaagatgaagttttactgtgcttggcagtttctcttatatgaatttgatacatgtgaaatatgatggatgttttgaaactgattgtttactagctgaagtttcagatattccaactggcctggagctacat

SEQ ID NO: 39316 - DNA, 885 bp, Arabidopsis lyrata
  Intron number 1 from transcript 891846 (locus 891846) deri ved from phytozome v7.0 (chr-ID scaffold_7; pos 23533843 t o 23534727 reverse strand)
ctgaatatacatgtactttcctttgttagaagttgtgaaaaaacttaaaattctgtactcatttttcttttcttttttttttttttctcttagatatggatgtgaaaactcatttagtatgaaaagttttgttacaagaatatatatggcttttagcaggtttaatatactctgccaagaaagttatgaacgtaactttctcttgtttttgaaattataagtactaaactcatttggaaagatataaaaactatgatgagcgattcacaatcggtatgggttgaaatttatgtgacaaggttaagattacgtaataacattagaggcattaattatctctttaaatttttaacatcactttttatttacatgcatacatgtaagttaatatagtcgtgcctactcacttaaagaaacaatcaaactcaagtaacagtttcatattgacatttggttgagtcaactcagctgcatgtgcaaatgaaatattgtcaaaatgagcacatataaattcatgacaagttgagaatatataatcatcaaacaaatgcattttgtgtaacttgtcaacactttctatttcaaacgtcaacttgcatttgaaattaaaacttcgctaacaatttcttattgtatttagattgaaatattaccactataaacatggtgcgttgagggaacacgatttttaaaaaaattcataagtactatttcagacttttagagtatacattttagaatttcttggatttacaggtgtatatacatttgtatggactatttcagcattatcttcttctaagaatcactttgaatatggctattaaaaaagtttctcatttcttgcaattctatctttcttggctttagcactttcatcagccg

SEQ ID NO: 39317 - DNA, 959 bp, Arabidopsis lyrata
  Intron number 3 from transcript 896254 (locus 896254) deri ved from phytozome v7.0 (chr-ID scaffold_5; pos 1508954 to 1509912 reverse strand)
aggttctgagttcttaccttattttgagcaaaaccgtaagcttactttatcttattttaagtatttgtgtaaaaagctactacaagagtcaagagtttattgtattaagtggattttgaatcaaatgcagcttacatgaaaagtcacatgttggtttcatcggagattgatatatgttgagggttgattcctccattaaacttgcaatatgaatagaagaattagtcgaagaagaagaagcaagttgtcgtgtggaggagtcaacgacacaagaggagaagaagcacaagtcaataagaagaagttgggcttgagtgttttttttaatgggctgcagaatgaattaaggcccaattgaagaagtgttttgtttagtttagttttaactaagtgtaagttagaattgaagtgagttgttggagttgttaagagtctttttttttttttttttttttcccaaaaaaaaaaaaaaaaaaaaaaaaagtgttagaacctaggagtatggtctagtgtgtaagagtcatgacatgattaaggttcatgtgtctagagtagcaagtagagataaaccactatatgtattgtatgtgtgtgtgtcttgtaaggaaagcatcaaaaaagattcttaagaaaaatgtagtctcttgtgcttatctctcaaatgttgtacggtttgtgttaagcaaaaaacaagacacaaacgtgagtgaactaagagatgtaaggcttgagacagagtgataagagagtaagagagcttaccttggtgtgaatgtgagatttacaacaatatatgattaagcaaagaccacccaaaagcaagaagagaaccaagcgtatggatttttgtatttatgaagattttcaatgaatgcttgtgttgatttgtttaatctaaggctagattgtttacatataatgcagatttactttgtgaagttccacttgctgaatttgtt

SEQ ID NO: 39318 - DNA, 781 bp, Arabidopsis lyrata
  Intron number 3 from transcript 477329 (locus 477329) deri ved from phytozome v7.0 (chr-ID scaffold_3; pos 88827 to 8 9607 reverse strand)
gatccctcccacagattccggtcgcccggattcaggtattttatttgatcattataatacatacgctcataactattctttgcgtttgatttagttttcatttcggcgtttattttatttttgctttgtctacaaacaataataattataagggtttaattaacgaatactagtagtagtatatactatatttatagtaatttgatggctgtaatcgattggttgctttaaatgtaaagtcgttagcttcttcagacccaatcaaaatgtaggcacaaaagaggtaggtgttagtactcttcaattacaaaatcgtatacttatatattaagtcataatttcataaaattgttgggacttatatatgaatcatggtgatcataattaaataaatatgggtgattgtgcaaccgggtcttctatatatctgctacagtagcatttacaagcacatggtggacaacggtggcgtacgatataggttagaatgttttcaaggcgcgcgtatatagacagttagcgagagatgtgtcatggaccatacttcaagttcctacttccatttgcttatttttctttatgttgataaatgcatgcgcttacaaaatgtattgctagaaatttacaaccgtatatttaggtgtgcaactataattaagtatactacattcactcataacctacaattttaaaattagtatatatcctcttctttgcgctccgttaccacaaaaaatatataacaatgatttggattatttctttaggtagtaaagaggaa

SEQ ID NO: 39319 - DNA, 486 bp, Arabidopsis lyrata
  Intron number 1 from transcript 470596 (locus 470596) deri ved from phytozome v7.0 (chr-ID scaffold_1; pos 2109228 to 2109713 reverse strand)
tctctctctggatctgtagctgatctgcattgcgggtaagcaatttttccacaactaatattggtaacgatttagctaaatcttgactcgggaattttgtctcgctgcttgattgttgatttcgtgatctcacattttgaattcttcacatattttctacactgtagattgtaatcttatacatcaatctctccaatttgttataatattggtcaatttaacagctattagggctttttcttagtttttgactaaagaacttaaagagttccatgtttttggcttcctttgttgattttggtcttttggttttaagttcttcttgtttaaggtagatctgtattgttagtaatttgtgttctattttcttaatagtattgttctcagatgtttattggggacaaatggatgtttctaaatttgttttttttttgtttgttgatgtttgcagcttgtagctggtatttgttccatagttgtaagata

SEQ ID NO: 39320 - DNA, 429 bp, Arabidopsis lyrata
  Intron number 1 from transcript 341402 (locus 341402) deri ved from phytozome v7.0 (chr-ID scaffold_3; pos 5160559 to 5160987)
tcgtcgaagctgccgagacacttggcttcttccaggtaatagcatttaggttggtgtaggaacgagctatacatgcacgttaatttgacctgaatactatttcctatgttcctaatagtttgatgttttgtatttttttcttgtttcacaaagtttgatgttttgtaacaacatcattattactttcatttgtaaccaatagggagaagtgagaggtgaaattaaaattattaaactaacaaacaaataattaaaaaataaaaagttactttttcttaagttatgtgaaatccaaaacatcattcttctaagaacagagagaatacttataaactcacgttagatatcctaaaaaataaagtttactgcttataaatgagagaagactatatgatttgaggacgaaattcaaatggcaggtggtgaacc

SEQ ID NO: 39321 - DNA, 743 bp, Arabidopsis lyrata
  Intron number 1 from transcript 492151 (locus 492151) deri ved from phytozome v7.0 (chr-ID scaffold_7; pos 6604276 to 6605018)
agccgccgcaaggaaggctcttatcctccgtggcgtaaggctttttcttcttctattttctcctttatctacgattcctcggtcggtcgcttcctcgtaatctcgtgtgtatattccgggaaaatcgcgatgggaaaacaaattaaaatttgagattgagaatcaagcaactaatttcttcgcaagcttatagatccatgagctgattaccaacgagattcatctcgtttctctgagttgttgtatctctgaatccgaacgatttggaatctaaaactcgctggatcgcctttttctcatatgcgtcgtttctccttagcgtaatcacttgtgtgattcatttcgcgattagattcaggtttctgacgattgatttcgtctggatagttctatctcgttcttcatgatgcatttctgattcctaaaatttattctacttcatgtatattttggggctgtttcttagatttgggttttgcctattccatgaatacattggttaatctggaaatgaatctggagtttagattaatgcataaagtttaagatatgactcttttctttttttgagtttcatagtatctggtgctttagtttacttcagatctgagaatgatgaatcttgtttgctcctgtcaaatcttctttatctgttttgcaatttgatgagctaataaatgattatatctcatttccttcccatcgcagatttttttaaggtgtacaaagaattgcctttttga

SEQ ID NO: 39322 - DNA, 357 bp, Arabidopsis lyrata
  Intron number 1 from transcript 894405 (locus 894405) deri ved from phytozome v7.0 (chr-ID scaffold_6; pos 11054757 t o 11055113 reverse strand)
aaggtattttttttgataagtcattttttttaatagttacatgatgttgttaatacaccatgagtttgatatttacttggtgaagaaaaaaaaaaaagaaaagaattcaactgtttcattatccgaattttaataatagtgttcacttggatgaattagaactgtttttttttttttgcattcatcttagtcaacgttatttctgcggttttttattacttttatccctttaaaacatatgtacagttatttttttggtgtagtaaatatttgagtcatatgatccttataaattgaagctatcatatgtttaatagactgatgaaaatatcaaatctgttttgtgaggaagagtgt

SEQ ID NO: 39323 - DNA, 395 bp, Arabidopsis lyrata
  Intron number 1 from transcript 480699 (locus 480699) deri ved from phytozome v7.0 (chr-ID scaffold_3; pos 22397095 t o 22397489)
atctcaacttgtgaggatccagttttccattttttttttcttgtataataataatctcatcagctctttaagattttctccgatcgatttcgatttctctaaggtttgagtcgattaaaatcatatgcttatacggtttctcgccagaaaatgatcgattctctcgtttatttcaatagcctcagatgattgaagatgataattcaacagttaataacgcttctcttttttcagtggtcacctttgttttgatctctgttttgttgtcctttaactcatcttttatgagcttagccatgtttgaagctagatctgcccttaactctgtttttttttgttgtttttggtttgaagatttcttctttctaacttattttaggctgaagaggctggga

SEQ ID NO: 39324 - DNA, 420 bp, Arabidopsis lyrata; identical to SEQ ID NO: 38116
  Intron number 1 from transcript 497460 (locus 497460) deri ved from phytozome v7.0 (chr-ID scaffold_491; pos 3497 to 3916 reverse strand)

SEQ ID NO: 39325 - DNA, 729 bp, Arabidopsis lyrata
  Intron number 1 from transcript 920808 (locus 920808) deri ved from phytozome v7.0 (chr-ID scaffold_1; pos 7894807 to 7895535 reverse strand)
tcgctgctcgattaggatcttctcttgcctttaaggtcagttttttttttctccaatcttaatttagggtttttgaaagaaaaaaaaatcatctttttggaggaaataattgccaaggagcatgtttatgagagagtatgtgcatccatgtgttagtctctgtgtatatttatatgaagtgagtgtggttcatgcatttattgttcattgttttctatgctttgacttgaaagcccctttatatcattggttatggttcagggaagaagaaatagatttatttatatcattagtcctcatctctgtctctgggtcccttcattagctattaacgttgagacatcagtactaatatcctgtctctggctttgaacattcatgattagttattgcagcatttgtccacttttgcacgattctgattccttggtcttaagacttgtcatgttcgtagtgttcttgacttcttagtgaagaggatttgatggtctcagataattagacatatgtgttgttctttacaacaaacagttgtgatggtctcagataattagaatctatgtatcttctgtggtctgaatcatttgattagtttgttatatctattcaagagaaaagggggaaacagtaaatacttgtcgaatcccttagttgaaatccctccgttatgtagagatactgtaacaatttaacggtctcttctcaggttgggttagcatctcagctgtt

SEQ ID NO: 39326 - DNA, 669 bp, Arabidopsis lyrata
  Intron number 2 from transcript 315656 (locus 315656) deri ved from phytozome v7.0 (chr-ID scaffold_2; pos 10897174 t o 10897842 reverse strand)
tacgtatacttatatatacactcatatgttcacataaataatgtatgcatgtgtgtagtcatcagagccacatttcccacttttgcctgcatgcaggtatagaagtaaaactacgaactgatccaaagacttcactttcaaacccaaatcaaagtatgtcaatcttcatgttttaaaacatttctacatagattgcaatcaaattcttttaacttaagaaaaaactacaatatagtatgtctttatcaaaaacatccttttggaaattgtaaattcaaccgcctaacacaaataaaagaaaaagtaggtgtgtatacatttcttgaagcttctaattgtttctctctatttgtacgtgctcagatttgctttacaagatgattcacagccttcccaaatggtttggtaagtttactatgtacgatataaaaaactgataaaagtatcataattttataaaataactagaattttcatataaaaattgtttttcggacaagatggataaccttatccctaaatgacgacaaaaaaaaaaacagagagaaagaaacaaaaacgagaaccaacgtataaagatcttatacaatatgtttgtttgatataggaatcgaatggatatatgaacaaaaggagaatcattgttatgctcaaagctttctacaagcc

SEQ ID NO: 39327 - DNA, 429 bp, Arabidopsis lyrata
  Intron number 5 from transcript 928702 (locus 928702) deri ved from phytozome v7.0 (chr-ID scaffold_3; pos 4033965 to 4034393)
actactccagtaattactaccaaggtaagtatctcatcaatggatcgtggagggtttctttttgggagttcttagcttattttgacatagatagcatattttggagtagctttgagtgagttgggtttcttctttttattaccttttttagatgaggcttgttcttgataagattcatcaccctcctatgctctagatgttgaagagatcaatgatagtgtatagtattatactattatttcctcatatgtaagtgctaggaacctgggattcctgcttgttagttttctcttacaaaattggagattagctatgtttcgttttcttaggtagtctttgattcatttttttccttgttctaggtcctagtcaattagtagtatatgatttgcttgcatgcttcaggcaaaagatcaaactcagtggcgg

SEQ ID NO: 39328 - DNA, 741 bp, Arabidopsis lyrata
  Intron number 1 from transcript 336024 (locus 336024) deri ved from phytozome v7.0 (chr-ID scaffold_1; pos 12855456 t o 12856196)
ataaatctctaaccattgtggtatgttttgttacttaaccttccttattgacttcactttacttgattcttgcttctggatgttgttgtactactgactttgaagacattgttgggaaattattgagctcgattaagcttattgcaattcatgggtttttttttaatccgtagcaatgtttagtgctattggttgctacacgacattattagttgtttagtttgtctggttcaatggcgaattgattactttaatacctattttatggtttattatattttctcagatgattgctggatttgatttctctattcaatgttctgtctggtttatgtttgtttgtttgtgtttttcttaataaactccaactccaactcttttgtttcgtctaagtgttctgttttcaagcagagttttgattttgctttgtgatcattgaaattgaaaacatttatcctggatccgattgtcaatgtctttcattgtcgttattctctaaatttgttcctttcaggtgagccagcttctcattcattcattcattcacatcttgtgttttggaccttttgttacttaagtcattcattgtcgagtctttacctttgtttgtttcggcttcacaaaactgattaacttactagtttcatgtggaaaactgttttcttgttgccacctattttacagctttttgtgttaaaactacaagtatttatcttcggtgtctgattgcagagaagggct

SEQ ID NO: 39329 - DNA, 494 bp, Arabidopsis lyrata
  Intron number 1 from transcript 893981 (locus 893981) deri ved from phytozome v7.0 (chr-ID scaffold_6; pos 8689704 to 8690197 reverse strand)
gtaatatcctagacatcatcatcctcttcgttttttcgattgcttattgtattttcttaaatgggtttttgttggattttaatcaagtaaacggattttgatttttgacaactttccgatttggtgttcgttagtagagagatatctttgtatgagatttgcgttttgttttcgatccctagttcgtcttcccataaacacaagagattctcaatccacctatagtcgaaaagttgaaatttttttaggggaactttacacagttttatttgaaaggtaaggttcaagttctatagaagttggaccatttcatatatcttaaaattcatttcttggactatcatttcctattaccatttcacttagcggctctcatcgttttagatagcttctattattagtaatgcggtcatgtaagcttagattgtgtcccttgtatatatttcctgaattaagatttaattgcttgattcattataaggaaactgggggaa

SEQ ID NO: 39330 - DNA, 947 bp, Arabidopsis lyrata
  Intron number 1 from transcript 944493 (locus 944493) deri ved from phytozome v7.0 (chr-ID scaffold_7; pos 2909056 to 2910002 reverse strand)
aaaaaggtaaccctcagcaaaaactactatgacatactcacagaggtagatgaagagaagaagaaactcgaggagaagaagaaagaagagaagaagagactcgaggagaaggagaaagaagagaagagagattgatggaggcagacaaagagaagaagcacgggaggaggaggagaaagagaagagatttaacatttagggatttagggatttcttaagattgatggtttagcttatggtttagtctcttggaaatcgtaatattttggtattttaggggttgttcatggttaaatctctcagatgtaatgttttggtttgtgattgttgacggtttaatcttggttatttaagtgattgttgaaggtttaatcttggttattttaatgattgttgaaaggtttaatcttggtaatgtttctgattgatttggtaagggtaaaccactttgataactggatgaatatctctcgtgattctaaaaatggaggccaccatttgcaactatagagccttccattaaccttgtttgttttaatttcccagaatctgtcgatacttggcttcttgattctgattttggtgtgacacttaatccaattcattaagaaatacctaatttgaccattgaattatggttttatagatgaggaaaaaattgagttcttgcatcatttgtactggctctgtgaatagatgctacgacttgttcataaactgtttccatgaagttttgctttatataagatctatgtggtgttttggtaaattctagatattaagttgcggtgtggttttataggatcattgatgagaatcttcagctgtaatacatgcttcaggaacctataaaagcttggtaaatcactaaggttcctctgtaatacttttcttcttggtacttcctgtgagtaataccaacaaatctaaacctgcaagtgttttat

SEQ ID NO: 39331 - DNA, 510 bp, Arabidopsis lyrata
  Intron number 2 from transcript 925919 (locus 925919) deri ved from phytozome v7.0 (chr-ID scaffold_2; pos 11978621 t o 11979130)
gaggtttaaattttttcttctttttttcttttgtttgtgtgtgtgtgttgtattttttttggtaactttgtcttgttagacgccaccgagtaaataagatctaagttacagaaatgagaaagaaaattaaacctaaccttaattatagattttccggtcaaggaatttttacaaatttataagtttctaatttaaatttttttgaccaatagtagatttagtactttataaatgtataaactttcaatagcaatataatttttttgggatgtagtcttgtcggtccaaattatatatctttaaagtttatgaatgatatgatggggttaactttcagataataaatccatttcttttattatttttttttgtagttgttgtttttgattttgaagcatttcaagaatttatttataataaaaaataatgaagctttacttaaatgtctttctgttatttcattatttgtatatagagcattcttggattctttcatcttctcccttctaa

SEQ ID NO: 39332 - DNA, 580 bp, Arabidopsis lyrata
  Intron number 1 from transcript 887597 (locus 887597) deri ved from phytozome v7.0 (chr-ID scaffold_299; pos 3731 to 4310 reverse strand)
tgggagaagcttcagctcgccggggtcacccaaaggttcatactttcctctcccttcctgcgcctttgttgtcattttggcgataaaaccctagaaaaggctgaaattctagccaaattaatgattctcttagctgagaaacaggtctcgttttgtttttccttatttggcatgacattttactttctcaatctgaattgtttatttcatagattcgaaagatgctgttgaatttatcttatataggtaggcgtttcctaacttggttaactgtttcttttccactcagagacatttcttttacttgaacttcttcataaattggttaccttttggttattgacagttttgagtttgacttatttttcttatgtcttatctggagaaagtttctatatttactaatcctttctggaatcttttagattatttttttgttcataagattgactatcaattagagtaatgtggcatcccattagatggcaaggtagaatctagtctcacgggagtgtatccatcaagaactttattggattttgctgacctgtacggacaatgttggtctttccttttgcag

SEQ ID NO: 39333 - DNA, 710 bp, Arabidopsis lyrata
  Intron number 3 from transcript 932538 (locus 932538) deri ved from phytozome v7.0 (chr-ID scaffold_4; pos 3165168 to 3165877 reverse strand)
tggtgagtttacttaaagtcacatatgaactgctgtttctagattactgtctcttgttagtccagtttggtttaggagaaaacttgtaactctaccataataagttcaatatggtttttgttttgttttacacactatcttaggtaaatctttattaagtactttttcaatttgttttaccttcaattttgatttacattggtgttaattttactgaagtcataccaaactttgtttggattcttctaaatagaaatcaaggaaattaagagatttggggttggtggattaaattcatatattatgagtattaagggatggatggtattttcccatatttgttagtcatgggtatccaaatgacagtcacatctcttgtatttcctttgtttcctatcatatggtttacttttgataggctcgattccattcatatggaatcatgaaactaaagaaaatgtttttttttttttttcttaatgtcttaaagagagtgttctttctgttagtgataattgggaacgttcagtcgtatgttacatattttttatacattaatatatgtgtatgtatattaatgagtgtcttctggaaacaacattttcacaacacaatcatgattgatatattattgtaaaatttgttagtcaagaaactaatataagttttgtacagcttggagacaagaaaagcttcattactctaaaact

SEQ ID NO: 39334 - DNA, 762 bp, Arabidopsis lyrata
  Intron number 3 from transcript 486837 (locus 486837) deri ved from phytozome v7.0 (chr-ID scaffold_5; pos 21136542 t o 21137303)
acttcgacgacgtcgtcaaggtacttgtgcactataaaccttgttcatcatttttatctcttgtactttgaacgtaagtcgcatacagtactttagagtttgttatcaaagtaaagaaaatatatgagtcaagagaaaactttcttttattttttacagacaagaacagatttgactttgactctccactttacaacctgtgtttgtttactttagcctatcactcacttcacccacattaaaaaaaaattaaatatttgtttgtttcccattcattcatgtatattagtagtaatagatgaccaatctttagttggtagaaagtctccttaaatttgaggaaatgctgccagggattagccttctgggtcttgggactataaaagtaaagcgggtcggcgatcattagagcgatacttatgcagtttcaaagtttatttttttattgaatgctctgtctctactgcatttacttgatgaattgggattcataaaagattaaagacatagttggacacaggaataggaatgtgaccgtaacgcctagaactactctatgtttggctcattttaagaaacttgtcgggaaatgctcttagagggcagtcactttacctccttttccaagcaattaataacccttcctttgcttttgtagtcaaatataatgcgatcaacttgttcgaatgttcattaacttagcttatctaatccaatcctaatgcagtattttcgcacccacaacaccatacagcctctctt

SEQ ID NO: 39335 - DNA, 405 bp, Arabidopsis lyrata
  Intron number 2 from transcript 358009 (locus 358009) deri ved from phytozome v7.0 (chr-ID scaffold_8; pos 18394074 t o 18394478)
tccggtggtgagagctgagcggcgtcgtcttgctggtgatttctcttttctttttgtattttgctgaattagtccatagttagggcgagatcacaagtccaaggctagtttaaactttagaaacccttaggaaacatagcaaaagcatactgatgatatatatagtttggcttttgtcttggcttgaggtttattcaaagttttgtgggctagagatgagattggaaggaatcaagcttgattttgtattattagcatttttcatagagtggatgtgtagcttctacggtgaaccaactattaagtttggcactactttttcagctttgagttggtttatttctctgaaatagtttcttcacccacacagagttaaggagtgagcacggggagataacggaaaag

SEQ ID NO: 39336 - DNA, 353 bp, Arabidopsis lyrata
  Intron number 3 from transcript 478773 (locus 478773) deri ved from phytozome v7.0 (chr-ID scaffold_3; pos 5617864 to 5618216)
atcgtgttagagcagtggtgcgctgtgaagcacaggtttgttatcttttgacctcctgtgttttcttaaatcagtattgtatactgttttgatgttatctccattcttgaaaatagtgtattggtgcttgttcggtttcatgattttgcggagtagttttgtttgtttcacctcgttacactgttaatatgggaattcattacttcttcatattggtatcagcataaccatcttagttttcttatatgttggtcatctcagaaatttcaaacatatcattcatcttgtcatcattttccttgtttgaacatatataatgttaactgttaacttttctcataattttattcagt

SEQ ID NO: 39337 - DNA, 338 bp, Arabidopsis lyrata
  Intron number 1 from transcript 473913 (locus 473913) deri ved from phytozome v7.0 (chr-ID scaffold_1; pos 23997407 t o 23997744 reverse strand)
gttaaagaccctctcattccaaaccggagctttaggtcaggtttgttcgattttcgttttgttgctttagatgattagggtttttgaatttgggattaaaaactgagtcttggattagttagccttaatgatgtttgattcctatctgttcataatcctgtattgttcttagactccaatagcacaatgtagaagcatttgaggattgagaagagttcaattctgattgcaattagcattaatgtttatcacagattccgtgtggcgattttcgcggtttctttttgaattagtctttgttaatgtgttgtaattctaatgacaggatatctcttact

SEQ ID NO: 39338 - DNA, 652 bp, Arabidopsis lyrata
  Intron number 1 from transcript 890125 (locus 890125) deri ved from phytozome v7.0 (chr-ID scaffold_7; pos 9654162 to 9654813)
tccaaagccgacaaaatgtatgcttttctttctcttctcatttatgtgaatgtctctgtacgagaggttaatgatcggtggaagttaaaattcaaatcgggttttagggcattttgggtttatcgagatgattgtgctcttatgatatgagggttttcttttgttactgtgattgagaaacttctcgtgatccattcttgagattggatcaaggtttttgttgggggaaaagaagtatctgggatcttgtgtattgttgcataggaacagttcaatatgagagtttgcttaaactataaagaacacttcttttgactctgctttttaactcaaatttttgtcttttgagagtttcgagctgctctgcaaattcttgttaattacttctttttggtatatcctggaattgaaaattgcaattgtattggctttaagagttgataatgagtatgaaatgtaatatatttccagtttgtcaaggattgagaaatcattttggattggttttgatgtggaacatcgtctttactttaataatttgtgttgttctgttttcacatttctacatttcagtgatctgcttctgttatttaccatccttttaagcatctttggttcttcatttttacaggacaaagctcacgcttactag

SEQ ID NO: 39339 - DNA, 768 bp, Arabidopsis lyrata
  Intron number 3 from transcript 479288 (locus 479288) deri ved from phytozome v7.0 (chr-ID scaffold_3; pos 7688848 to 7689615 reverse strand)
cgacacacaaccagaggtatatacatatctatctatacatatattattattttttgtgaaaaatctacatatgcatatgtttgtttataactattaataaatttgatgatatgtattatgtgttctactgtacttgatggcctcatgaaagggagtgtaattaagggttgagggattacataattagcatatgattacaaatagaatctcttaagaataagtgaattcttttttggaagtttgggtaagtttgcaagaaaaacaacaaaggcagagagatgaggcggtggaaaagaccaaaaagttatttatcgggaaactcaaaataagtagtatatttttgtagcatatgcaaaaataagtatattcttagcatataattatggttttaattatttgaatatactccatattttaaaagattaatggattcatccaaaaagctgcagagactttcctttctgtcgggacagctgctacatacgatcgatcctttagctgtgtcatcttttgtttttgctgaatttccataaatttatgtgctttttcactccaacacatgcttgaaaagaccgttttgaccctggtctttaacggtctcattctccttcactcctgtccctatctggaatttgttttaagcataaagtttgtcgctttaccaagattttgacttattttgttaccaatttttacattttccaatgctaataattgactaatttcaaaaaatcttgaatggttttttgcataattagaaaccttccc

SEQ ID NO: 39340 - DNA, 368 bp, Arabidopsis lyrata
  Intron number 1 from transcript 358300 (locus 358300) deri ved from phytozome v7.0 (chr-ID scaffold_8; pos 19808014 t o 19808381 reverse strand)
ccgattgcatcaccgttgctccaaaagagccacaggtaaattcaattggcagggtttttcgtttttttttttttttttttttttttttgcgtttgatttttcctgagagttcttcatttgtgataagatattggttttaatctgtgggattgatgattggtttatgagattcgaatttagaaaaggctgcaatatttgcgattgtgattttcacatagagccgatttgattcaattcgggaaatcaattgaatattttttttggctcaaaggggctgtgaaatgttttataaagattcgaactttgacaaagcttattcgttttcttcttaaatgagcaggttcatattggttcgcatacttttactt

SEQ ID NO: 39341 - DNA, 570 bp, Arabidopsis lyrata
  Intron number 2 from transcript 918650 (locus 918650) deri ved from phytozome v7.0 (chr-ID scaffold_74; pos 8781 to 9 350)
ctgtaagtatttgaatggtgtgaaattggtagaacatttcattaatgaagaaggggatatgtagacaaaaaaaggatataagaggtttggtgtttcccaaaagggacttaagagatgatttaaatgtctcgcaagtccccttttggtaaacagaagtctcatatctcccttcacaaaacagaattttatttttatttaattttaaattgaaattgagggtaattacctctttaccccaagcaaaacaagaaaactacaaaacaaacccgagttttatccacccaaccgaagagctttcggatctaaccatccaaaccgggttaaatacatccccaatcgacccacgaaccctaaatcttcttccttcatttttttgaactcacactctcctttccccatgaactctcttctcctctccccacgaacccacccagaccgttttcttttctcctctcttttatttctccacgattctcgaatccttttctcattcaattgttcttcaacggtttgcaaattctgattctcttcaattgttccgatggagatatgcctcctaagacgaagact

SEQ ID NO: 39342 - DNA, 662 bp, Arabidopsis lyrata
  Intron number 2 from transcript 491087 (locus 491087) deri ved from phytozome v7.0 (chr-ID scaffold_7; pos 2272322 to 2272983 reverse strand)
cttcctcggtttcctactcttctctgtctttcaaggtaacgccagttttgactcatttattattcggaacgtttttattttaatttgtttgtgcgattatatattcacataacagattgatttttttttttcgaattcttgaatcgaattgtagattagaggaaacatcgcataaccatttgacgacaatggcaaaaaatagcaatggaattatataaaatgaatgagctactcatcaattataacagagttggaggcattattaggatgtgatatatcgtttgtattatcacgttaaacttgttcttcttggtactagacttgccacatataacagctcaagatttacatattttcttcaccaatattcacttccacagatcctttatattattcttgtgaatcagtttgatctcccgatttacttgctaagattccctaattgtaaacaaataggcttttaacaataacacattgtagtcttgcatagatttcggtcatcggtatctctttgttgtatctccgtagtaagtaaaaaatttcaaaaatgatataaaacacattgtagtgttcttgagtgtgtgcatttttagaaaccaaacatgtttttgctctttttattgacagaaaccctaagctggaggacatccctaatttagcca

SEQ ID NO: 39343 - DNA, 757 bp, Arabidopsis lyrata
  Intron number 1 from transcript 948532 (locus 948532) deri ved from phytozome v7.0 (chr-ID scaffold_8; pos 2503785 to 2504541)
ggcctagtagtaatttacaacccggggtcgccggagctgaatacatcacaggcggagaagtaaaagacccctaagacggaggttttagcaaagatacagagagattctgagcgatgaaaccttatagtccttgattctctggtaaatttctattctttcgatgagttattaaggaaagaaactattttgatgaatcttacatagctctgcatttttgccttgggttttagggttggttttgtttgattcctctctttgccttaatgtttagggttgcaatgatgttttcaagatttctgaaaaaattagaaaacattgctcaattcaatatctgcattgctttctcctccattgctcatcaaaaccaggtttcaaggtcgaaactttatcatgtttatagtactgtgagatgttttcagagtggtagatttgtctgtgggggtaattcttcttcacggcattggtctcagtcaccgacccgggttttcgggaatcgggtttcgagagctatgaagaatgaagctcaaaaagctctctttgattacttgcattatactagaacccttagttttgttgatgcagatcatataagtaagaattctcctcgttttattttgagtttgttgtccaagattgatgatactcggaaggaggatatatcccgggcattgactaagtttctaaggtacaatcccatcaacgagtttgaaccatttttcgagagtttgggtttgcgtccatctgagattccgcgttt

SEQ ID NO: 39344 - DNA, 338 bp, Arabidopsis lyrata
  Intron number 1 from transcript 923526 (locus 923526) deri ved from phytozome v7.0 (chr-ID scaffold_1; pos 26528280 t o 26528617)
ctctttcctctatatttgcttctcgtcaacaacaggtctgcgatactcttccttagagcattcactagctatatcattcccacatttggttcccttagagaaaaactagggtttgaattcaatatattgttgtttgttctgttggaatgattattgctactgaatttgatggcttcttgtacattgtgttggtacaatgtaatcttgtttttgatagaagaatgatttttcttttgatgtttagtttttgaagcagattgatgcattataagacttgataaattgatttataaaaatatgtaggctaaaactgtcagaggtagcgatcttgacttctt

SEQ ID NO: 39345 - DNA, 725 bp, Arabidopsis lyrata
  Intron number 1 from transcript 484755 (locus 484755) deri ved from phytozome v7.0 (chr-ID scaffold_5; pos 7078385 to 7079109 reverse strand)
ttggagttaagaaaggtcgatttttagcttaccaggtataaatttgctgtgaaattggagaatttgtaggttttgcaattgaatgaaatgttagtgtgtacactgtttattagtttgatgctaagaagacttaaacgttagctttatttctttgataatcaattgattgatttggagatttaaggattggaatttgaacatttttcgagaatttgttaagcccgaagatgttcgatttgaagctattcatatacatgtggtttattttttgaataaaatcaagtggttttgcacaaatgttttgtgaagttggaaattttaagtttgttacacagattatatgttgaaactatccacttcttagtcaaaattttgatgcagagaggacataaaatgagaagatagctatatgtttctgatagttaatgaatagattaatttggatgtaaaggatttgaatttgaacattttgcgagaatttgttaagccagaagacattccacttgaacctaagtgttcaatattttagtctttattctgctgccaagacgaaaatcactgataagttagttttacccattggtactaagctcgcattagtgtcttcttgtgaattgctcaaaatggaacaatccatgtcaggtaccagtaagtgatatactgcgtgtttggtgaccaaattttgagcagaaacgcctggatcaaattacacagcaattggaatc

SEQ ID NO: 39346 - DNA, 784 bp, Arabidopsis lyrata
  Intron number 1 from transcript 495444 (locus 495444) deri ved from phytozome v7.0 (chr-ID scaffold_8; pos 15975610 t o 15976393)
attacaaagtcgctcacgaatcgatttctcagcaggtaagccatcgattctaattttgttttctcttatcggatccatttctttcgattgtctcttgcgaacaagttatttcaccctagattttgttttcgaatagctgaatcgatacatttcgttagcagatgttgttaagactggaattttgttgatctgtagagcatttctagggttctcgttgtcatctctgtgattctgcgattcagattcatatgaaacctgttttaatcatggtggaagaaggtttcacacaatttttgatgttcttattaggaattagggtttctggttgagtttgccatttttagctactggtgagatttagttctggacttgagtttcatagccaccaataatacgtttatgcttcatttacgttattaagaattagtttcttttttgtgaatcttgagatgccaaaattgctaacacgagaaaaccttcaaacatttggtagagttgatgcacaaaggtgtcatcatggtagccatttctctgtagctttgatggtaatggttatacctacatttgcatgattaaaacttgctttagaattagttttcaatagaatcttgagatgccaaagttttaactgccaaacatttgttggttgaattgagtgtcataaaactgttatctttgtgaagaaccatagcagcattttctctgtagctttaatggtataggatacagacatggccattgactatagatatgatctctgattttctacaggcaaagtcttttc

SEQ ID NO: 39347 - DNA, 501 bp, Arabidopsis lyrata
  Intron number 1 from transcript 473693 (locus 473693) deri ved from phytozome v7.0 (chr-ID scaffold_1; pos 17520048 t o 17520548)
aagctaaacgagaagagattttcgctgttgttgtgagtttgttgaatcaaatgaaagaacaaattctcaatttcggttttagctttcggaatttggaactaggtttggttgatttgatgagtttgcttttagagttttgataatgagagactgtgttttgtatcatacgtatactcttaagaattaggtttaggtttagctgcagaataaaacgaagagtaattttcaattttgatttaatctttggcatttgcaactagttttggttgatttggatgagtttgcttttgaattcattttggttgattcagagtctgatcatgagagactgtgttttgtggtatattctcttattagttagtgtttaggcgttacgaatgttgaagagtttggctttcttatgaatgttgcttctttcatttgctatatctgatttagtttagtgttgttctctttggttgaataggttggtggacgccaatacatagtgtttccagggag

SEQ ID NO: 39348 - DNA, 728 bp, Arabidopsis lyrata
  Intron number 1 from transcript 481097 (locus 481097) deri ved from phytozome v7.0 (chr-ID scaffold_4; pos 908835 to 909562)
aaatcaaaccaaccattaaggtacatagcctttttcatattttttcacatatacatattaaaaaaattaaaccaactgttactttagttatataatgttgaagtagtggaaaattctaatgtgttttagaaaatatgcgttgaaaagagtaattcagttttggtagataaaatgtcattacatccattacaaagtatcgttgctaaaaaaaaaaaaaaggcaaatccaccaatatccctcagactcatttttgtgtttattataaatatatcataaagttaaatatggtgaaagtgaaacataaagtcaaatatccatgttgactcatgactcatgagtccactcatggaaaaaaggtttggcttttttggagttaaaatggcagaaacttattgggagttttatgaaggaaaaagtggagacacaacatctagaaaataaaaaataataataaacaaaaaaagattgtgactctattttgctgtcaacaaataaaaagaacaaaaacaattattttagcaattttgacactaaaacaatctaatatccaataaaatcttatgtatatgataaagtcatgttgacccacgagtccatgcatagaatagtaaaccgataagaatctttatctttttggtaataagaacaagaatcatttattatttgtcaccttgcttaaactaataaaaatcacatgcatgtatatattaattttataggaacttgta

SEQ ID NO: 39349 - DNA, 506 bp, Arabidopsis lyrata
  Intron number 1 from transcript 480799 (locus 480799) deri ved from phytozome v7.0 (chr-ID scaffold_3; pos 23274800 t o 23275305)
tctttggacagtttacctccacgtattcgtctctggtaataatctccatcacaaaatctctcttcttattatggttttattttttgtttttgtttttgttgatatctgatgataaagctgctcatcgattgcatcgatttgtatttcttttacacatcaaatatggatttgtacttgtttctgggtttttatttatctggtgtaactgtaagtataatttgtggaatttgcttgttctttttgtagaattcactgaaaaataatgtgatccttaccattgtttgataaaactttgtctgctcttaggtttgattttcttgtttattccaaattttgaggttgtgtgaaattggtgaagagaattttgagattatccacttgtttggtgctcatgagctctagtttagtgttgtgtttgttttggattatggtttatggatcattgttgaaataaaggattttacttctcaggtgatttgatcaaagcctctggagaagatctctgt

SEQ ID NO: 39350 - DNA, 595 bp, Arabidopsis lyrata
  Intron number 1 from transcript 931858 (locus 931858) deri ved from phytozome v7.0 (chr-ID scaffold_3; pos 23546941 t o 23547535)
attgcttcgtccgtgtaagatttttatctaatcgatatattgaattttttccccataaaatttgtgtttaagtttacattttgtaaacgatattggatagaaaaagcagactatgtgttttttcatgaaatacaattattaaacaagtaaatgaaaaatataaatatgaatgtttgtttaaaacaatgaaaaagtgttattggtactttcatttgcaaaaaagttttttagatagatttttattattttggtttattgattcttcttattctacataatttcaatggtttgatgatttttaaattccactcaaaatctctttgtttttcaaaacgtttagttatattgattttgtaattctacgaattttgaatgttgttgaaacaaagatattcaatttataaaaactaaacgttcaaaatactatgaagttgtcatcatgttttaaaaatttataaaacataatgaaatctctcaactaaacaaaaaggatctctgccaaaatgcaaattaaagtaccaataattaattcttaggaagacccattctcttgtatatattgttttgactatttaacgttatatacagggttgtg

SEQ ID NO: 39351 - DNA, 301 bp, Arabidopsis lyrata
  Intron number 3 from transcript 492685 (locus 492685) deri ved from phytozome v7.0 (chr-ID scaffold_7; pos 9027399 to 9027699 reverse strand)
tctgaactcgaactatctccaaactcgtgtctctggtaatttctctgctttttttccctttaagttgatataagtttgactctctgtcagattcaaagctagatctttgaggttgactaggttttacttttacatatatgtttaggaacattgacttggtttttgatagagatcaattctatgtgttggaagagttgagttatttgtgcttgttgccaatttaaatcaaatgcaaattttcagaataatctattttcttacattttctcttttgtcatttggtcagagaataatcaagaag

SEQ ID NO: 39352 - DNA, 1026 bp, Arabidopsis lyrata
  Intron number 1 from transcript 946853 (locus 946853) deri ved from phytozome v7.0 (chr-ID scaffold_7; pos 13533683 t o 13534708 reverse strand)
aaaaggaggaataaggtaatcttttacattaatcgttttcttataattctattagtttgtagattatgttgttatttgtattctggtttctattggtcggttgttttctttaataaaactaatatccaaaaaaaattatgaattctggtttctattggtcgattcctaggttacccgtgaaacagtggcggacccagaaattttttttacctgggtcaaacttataaaagaaatcaatatatgtttaaaattttttgcccttcatataaaatatatactttatcatttttgaattgcgtttaagctattattttatcatttttttttgtttacaaagttatacaagtttttgaattgcgtttaagatattattttatcattttttttttgtttacaaagttatatatttggtttgcaaataaattgaaatggagactagagaaaacaagtgaaaataagtaatttacctactttcaaaacaattattgccaaagtttaaacaatgggctatgacccaatgaaaaataggggaaataatggaagcaatgcggtgttaaacgtgggtttaggtgggtcaagacaccaataattaaccaattaagccaacaaaacaacataattctctgcttaaatgtttaacctatatatttaaggggggtcatctgacccacctttcttccacatgggtccgcctctgccgtgaaagttgtatgaacaagtaagcaaaacaccatctcgactgatatgttttcgttgataattatatatttattttctctctttgatcgatatatgtttcggctgtgtgttctttttagtatgacctaatattttgtgtttccaatctaatgccacatatctagaaagaggagacaagtccatagaaaagggatggagaacgacaacacaaaagaggtagacaattaggttttatattatatacgacaacacaaaggaggtaaacattgtcattttgttttatggtacaaagtcatctcaactcttttctttgctctgtatcttgct

SEQ ID NO: 39353 - DNA, 733 bp, Arabidopsis lyrata
  Intron number 1 from transcript 948270 (locus 948270) deri ved from phytozome v7.0 (chr-ID scaffold_8; pos 760316 to 761048)
atcgagaaatcaaacctaagaacagaagattggtaattcttatcacaaacccttttccacaatatcacattgttcaaactctgtttacattgtctactttttgtgttcattcgaatcttttactccttaattttcgattctaagatttgggttttgattgaattgatatgtttccactcttgtgtgtatttttttccctaattttcgttttcagatgttcaaatttgagtacttattgaaaatgctctgttttggtgtaaagaacaatgctttcgattttcttgaaggaatctaaataatgttctttggaaattataacctttcgtcattattgagtcacgaagaacaatgcttgaagcgtttgagtaatgtagttggtagattagggttttaaattgggggaaaatggaagcagaagaatcttgagattaaaaattaggatctttatcgaactagattcacggcttaatattcgattccgtacttatcgctcttaaaattgcttttgtttttataaaaacttaaaacagaatataatcttcaaaaacgaatttcgggattcattattatctttggttgcaagattataaaataaactaaacaccattagagtcaagtctatgtaaaggaggagacttttgatacgtataagtcaaaaaactgtttttttttttataaagttctttgggataatggctaatgagttatggtgtttgcaggaagaagagaatca

SEQ ID NO: 39354 - DNA, 416 bp, Arabidopsis lyrata
  Intron number 1 from transcript 929406 (locus 929406) deri ved from phytozome v7.0 (chr-ID scaffold_3; pos 6690642 to 6691057 reverse strand)
gagcagcttgttaacttcatcattcgacctccaaggttacgcttctctctcgtgtattaggaatttgtgctttttgatttctccgatttggttgtcaaattctcaatcgtttaagaattgggttttctctgaattatagtgttcatgacttgaattttgttctttatgatgattacttgtattcataattgtcttctgtactttcacttgagtttctgattagaagaattatcaaattcttctttttttggccacccatgtgatctctctgtgtcattacttaagtttactattcagattctactattgaatcttcaaggaagtgtctatgtattactttgacatgactcttttaagagttaggatttgggacgttactaggtttgaagataaacatctataagaagattgtcaat

SEQ ID NO: 39355 - DNA, 416 bp, Arabidopsis lyrata
  Intron number 3 from transcript 473483 (locus 473483) deri ved from phytozome v7.0 (chr-ID scaffold_1; pos 15255596 t o 15256011)
aggacgtcgaaggttatgtactcttaatcatttccttttccttccggtttaatttatttcggttaaccggaatatattcgtttgattttgattcatgatttgattttgagtggtctatgtatgtttctaaaatcgttagtatatatagatatgatttgtcttttaggtttatgaaaatgaggtttgtagaaaatcagaaaattgttgaaattgaggttcttaaagccctaggttaagcttgagatatagctcttaaaatgtcaatttgcttctctatggaagaattcgatagcattgcgccgcggttataatgatgtcgattttgcatatgttttgtacttctttaaagagaaacctttgttgattttggggtttgtatccatgttttggttgtgtaggtgaaggagaaggtggaa

SEQ ID NO: 39356 - DNA, 512 bp, Arabidopsis lyrata
  Intron number 2 from transcript 343130 (locus 343130) deri ved from phytozome v7.0 (chr-ID scaffold_3; pos 19915630 t o 19916141)
ccaaagtttttggcattgatccagtcaccagacaggttaatttcgatgttctgtaagaagaacatctatacaagtttatagctttgagacttcaatatgattgtactatatatatgtgatgtggatgtatgaatttttattaggtggttatgatatggatcatggtatcactagaaccataaggcctttacgtgagcccaaagtctcttattaagttttgagtattatttttggtgttttttcctttttagtttaggtttatgattggttgttctcttatgatcaataagaaactaacctccaacaattaacctaattctctaagagagagttgggttaaagggaagcttttgcttaaatcattcttgaaatttaaggttcatatcaggttagtgggtttagctcatttctgtgcgtttcttttgcagtgcattgtttgaatcatcacaattgtaataatgatactttgcttcttaggttgtggtggttgatcctgaagcatacacttacga

SEQ ID NO: 39357 - DNA, 329 bp, Arabidopsis lyrata
  Intron number 2 from transcript 472817 (locus 472817) deri ved from phytozome v7.0 (chr-ID scaffold_1; pos 11544725 t o 11545053)
gcttaccttggctggtacggatactctttcttcaatcataattacaaatttatgccctatgtgtgtaaaattaaaacatgcaagtaaatggaaattcacgtttggatctttcttataaatacttttttaaatctggaaaaagatttcgttactctaaagtctaaactattgatttaaaactagttgcaatttagattcaaagaacatgtcaaaagaaaaaggaaaaaataaaaacgacatgcaatttttgtttggtttggtttgtaaaataaaaaaatgatgatgtgatatgtggtgaaaacaggggaccagggacctttgtgttggta

SEQ ID NO: 39358 - DNA, 815 bp, Arabidopsis lyrata
  Intron number 1 from transcript 930165 (locus 930165) deri ved from phytozome v7.0 (chr-ID scaffold_3; pos 9730625 to 9731439)
agtgccactcctgcgttgtcaccgccggttctgaggtgacatatttgagtattactaatagtaaagtagtcgatttactattcaaaattagcaaaatacctagtttttactatcatacactattttgataattttcaagtcctcaatcaaatgatttaatgtgatttgtacatcaaatttagtgtacatatgcacatctacatatacatttttacaggggttttttgcattaattcatttggatccgggttttacccgggtttaactctattcggatcttggataagcaattttaagaatgttgtaataaaaacaaacgaatattttgactataactactctaacaattcggtttaatgatattccctaaattatttgccacattaatcggcaacaatccttataatatctaattgttacgaatatttgcacaatctaaactaattactcatttactctatatatatatccgagattattggtatttccttatctataattcatataatctaaaaatatatatatttgatctcaattaatatcttctgactcaactaattattactatcaaattcttaatcaatggcatattccttgcatctataataaatccgggattttattctatatatgctattgttacagagatattatacttcttgtgcaagatttccgtcactaattaacacatatggaaatctacatcttaaaccactataaatagagttatcatctacgtcttctacggttatatcagatcccaaaacaactttaaaatttcattttttcagttatacaatatcagatccgcacgt

SEQ ID NO: 39359 - DNA, 616 bp, Arabidopsis lyrata
  Intron number 1 from transcript 913250 (locus 913250) deri ved from phytozome v7.0 (chr-ID scaffold_1; pos 16015365 t o 16015980)
gaaggtttgttactattctcttatctttatttattatttatgtaagtactttttgcctgttttagtggtacatgagaatagaaattttcatctggcaaaatatcgctgttcttcaaaaaggactttttcagaatctgattctctttgaaagtttaaagttttatagagagttttgttcataatctatggttgggctaatttacaaattcacagtgtcttttactaatctgaagtttggtttccttgttagttttgttttgcttttcttggaatggttgaatttttatggctatatagtttggaatttggcaattgatttactgtttgattcaatgctatttctctgataacgacatgtaaagtagaaactatatttatgtcactagcaaacacattaagaactcaacctgatgaactattcaatgcttgtgttaagagtgccaaatgcaactgcaatctgcaagttcactagaaagtggactttgttttatttctcttaagtctaaatttggtagccttcttaaaccgtttttggaactaaaactgttttggtttgtttgataagtatttcctctttaagaaaggcttaggcttttgctttgtatgttaacaggtg

SEQ ID NO: 39360 - DNA, 524 bp, Arabidopsis lyrata
  Intron number 1 from transcript 945747 (locus 945747) deri ved from phytozome v7.0 (chr-ID scaffold_7; pos 7978334 to 7978857 reverse strand)
gcagcctgttcataaggttcttggcggtggaaagcgtaagtttttctccgatctggtttcattttcatcggttttttgtatgttatttttgtgttgtggcttgatctgtttttgtctatttgttgtttggttgattcttacacttttgatggattaggtttcttgagatggtgacgatctgtggtttgaaactgcatacttgttgatagcgagaatcgtattggcttagggtttcttattttactcgttgatctagatcgacccatcttgtccatttggtatttgggggggggggggtttaatttgggattccatttctaaatgaatgattttgatcataaaaatggggtttttaattgctttgagtatacttgattaatcatctgcttagttgagtgttttttgatgctatgacttgatcttgatttgatagtgttgtttggtgtttgattgatttagaggatagtatatgtaatgtttgcacaacttgattattcttcctatttgcagctgctgatatattc

SEQ ID NO: 39361 - DNA, 552 bp, Arabidopsis lyrata
  Intron number 1 from transcript 488123 (locus 488123) deri ved from phytozome v7.0 (chr-ID scaffold_6; pos 5239256 to 5239807)
gctcaccaagatcttgaatttgccgacctctcaaggtacttctctcctcccaattttcacaatttcctcccaatctcgattagcaccgagtcaactcttaaagtgcgtttctttcttcatctgtttcctccaatttctgttagctcagtgccagaaactgtcattcttgtctcgtgtgtctaaattgcgttttgatttgaagccgatgtaggaatcgttgaaggatatatacccgaatttggaattataatttccgtaattagatcaattttaaaattctccaaattgttgtgttgttcttctttgtttattgaaatttagtattcctcatagctaaaatcaatgttttgtagaccaaatcatttggttggatctagttatcatcttgtctgagaaatccttttacttgttgttgttgtaataaaatttctcgtttacagtttcatgtattcacagaaaacattcatgatttgggtttaattaatcttgtcatgttgttccgtgctattcattcttcaaatatatatttgattgttggtttttagattcttg

SEQ ID NO: 39362 - DNA, 908 bp, Arabidopsis lyrata
  Intron number 1 from transcript 944728 (locus 944728) deri ved from phytozome v7.0 (chr-ID scaffold_7; pos 3887359 to 3888266)
tacaagactacaaggtatgttttgatttatgttcgtttgactgagagaccgagatgtagagaattgggaacaaatgagtgtttttgatgtttgtaggatggaggaagtgagcactgcaaattttttaagtggtatgatgaagaagaggttcaaggatggccgagaaacgcattatgaaatctttctttttaaacaacccactaattgaaatcgaccctacatataaaaccaacaaaaccccaaaagaaatcaacagaaattttcagaaataatttaaaatcccaaaccccaaatgtcgggatctgttatgtttcgaaagccataaataaacctagaaaaatcgagttcttacctcattggaactagattccgtgcgattcactttctaagcttcaaatcgtgacaatgttggacaaggattctggtgattcgaagctcactctacttctctcaagaaccctaaaacgcaaaaggaatcgcaaagggattagagagttttattaagttaatggatttggttaggttaaattcgttttgggcctggtttaggcccagttaatctcagattttttttttttggtcgggttttaaattgcgtccgggtcgggttttaattgaatatgggtcgggtttaaaattggattccgtcgcatctttcaccggaacggtactggaatgtatgtttatggtgttggctccataactcatgttagttcgtaaatgtcgttatgtgattacagtagttggtgtaattttggcaacattttatttgtctgcatgtgtgacgatgtgatgacgtattgttggcgtagctgagaaacatttttccttaatagaacatagcaaaagatgactgaaatgttaatctttatactgtatatttatgatcagagcataaactgtttcgg

SEQ ID NO: 39363 - DNA, 516 bp, Arabidopsis lyrata
  Intron number 2 from transcript 478977 (locus 478977) deri ved from phytozome v7.0 (chr-ID scaffold_3; pos 6457227 to 6457742 reverse strand)
tgaagaaggtaagccgtaagctgatgcctttagctctgaaaaataatgttttttgtttcttttcagcgttttgctttcccagatgccttcattatcttactttttctaatatatttttgttttaccttttcttatattatatattcccataccttgaagctcatcaagatgaccaccagcttaattatgacctgtgacctttatagttgcatcactctttatttgagctactttaacaatttaattacaattatagccttgagccactttgacaatccttttctctgtcttggtactactgctgactaaagcttgagataaagttgacttttcatacccactgtcgcctctaattttgatcacttgattgttagtggtatctctataactcttggcatatggatcttgtgagtatttcatttgatcttgctttggttcttcttcttttggcatccacactatcttcttcattatattgcagagtacggagaaactgcttgacttgtctgataccaa

SEQ ID NO: 39364 - DNA, 818 bp, Arabidopsis lyrata
  Intron number 1 from transcript 487367 (locus 487367) deri ved from phytozome v7.0 (chr-ID scaffold_6; pos 2084604 to 2085421 reverse strand)
gtcgttgtatttgtcttccgcctcctctcccatcggtgcgtttctgtctcctctacctaattgattcatttatccttgggtaactttacatctgtgaatttcttagctctcgtttctctaaactcattatctggtaaattttagaggaatctgtttgtattttttacatcaatgtaggattagcatttttctttcgtaacttgggatgatgtttaatgggtctacgggttggattgatctggtaaaactggttttaaattgggacaaccaattgtgttccttgttcacaagatgtgagaatgatgattatggtcattgtgctgggtttataacataggtcaagaatgaacaagatatgtgagaacccagtatctgtataatgtttgcaaatagaaagtttcgatttcaattttttttctcgggaagcagttttaaagtcccatgcatgttgttttttggtggagaacagagttttatagttcactcctgttgattttgtgatatgtccaaggtttttcttgtcgagtagtaggtgtggctgttccgcattctgaggcttgttcttgagtaaaattgatcttttagtctattgatatatagacgtctgatgcttttagcttgattctagtttggtataacaagattaaaatttttacatagatcacctacgtgagatgtgtctggtttgatttaaattatattatctgcttcttatatattttgtgtaataattatagttatttttttatgtcttcgaagaatgaattatatctctggatgcaggttttaaacagcttggcagaagaagtgaaacttga

SEQ ID NO: 39365 - DNA, 773 bp, Arabidopsis lyrata
  Intron number 1 from transcript 939970 (locus 939970) deri ved from phytozome v7.0 (chr-ID scaffold_6; pos 1983341 to 1984113)
accgcctcctattcaatataaataccttgctcgtattcaatttcagatcataactaacccttgttttttttgttctttttttcaaacttttttttgcttctacctaattttaatttttctttttattgtagggtggatgtatggaggggacgatgtgaactggtgtatggaaaatttggacctaattcaatgaataaacaggtgatcttatagtttatatgtacaaatttgatttttttttttttgtatttatggtttcactattttcaccactaatcaatttttataatcaaaaagtttggtttcaacttttgagaaggtaatcatcgatgatttggtatgtttctttttgttgtaaaaagatgaggtacctcccgattttgttgaggtacatgttcttattattttcaaatatgtcttttttcagaagaaacactcaacttttgataacacagttgccacaaagtcagaaagatgacttatttcagggatgaatcttcagaggaggctaatttttgtcgttaatacaatttaagtattcctctctttagattagggataacaaacttggctgttaaattcaggaattactcttcgttgccaatctctctccccaaactaaaatattacatatatggaagtagtaacttaaagtttttggtatcgaggtcattctaaggcactgagattcggactttggtatgtataggattcgttttccatgcactaagatttaattattgtttaatttattggtttttaggtttctttcc

SEQ ID NO: 39366 - DNA, 646 bp, Arabidopsis lyrata
  Intron number 1 from transcript 488325 (locus 488325) deri ved from phytozome v7.0 (chr-ID scaffold_6; pos 6009380 to 6010025)
cttcttcgggttacttcgctcgacgtcaatttaatgtaagaactctttcgatcgctcttttttttccacgatttaggttctaagttgatcatctggagaaattgagctcaatctgacttgattttgcagttttctccaagttttgtgtggtgattttacttgtgtgtcgtttttttttagatcgttggccgtatgatgtggctaaattttggtattgaagaagccatttttgttttgttgtgatatgatatgatcagtcttgactgtgcatgactgaaacgtgtcactaaaattaggaaagcacaattgtggtttctgattaggccagctaaattttccattctcgaacccagagactacaaggtgtctctttctagaattattaaacggcacgatgttttagctgggctatcaaacgggctttaataaatagtacatgtagtttcaaaacatggaacacaagtcttactgtcttcggatgtggtcggtctcttgatggtttttcagagttttaggtagttcttaggtgcctgaaggtttttcatcttctttgaaactggtatatataaactttatgttaaatggcttactgaatttggcttatgaaacaggcatcttctggtgatagcaaaaagattgtgggagt

SEQ ID NO: 39367 - DNA, 922 bp, Arabidopsis lyrata
  Intron number 1 from transcript 937893 (locus 937893) deri ved from phytozome v7.0 (chr-ID scaffold_5; pos 15165942 t o 15166863 reverse strand)
aggctacaccgtcgccattctcgctcgcgatcttggtttgattccttttctctctctcttttcattttgtttttgcttttctttttatccatatctttatctattcatacacttatatacacccacatatttccatgtataaatatacttttttatatatatgttcccatgtgaattttcttcttcatttttattccaatgaagaaaaggaattttcttcttcatctttggaaaatgagttatttttcaagcctttaacaaacaaaaaaagagttatttttagattgttttctttcgctggatttctgcttttggcaaatatattaatgcgactgactcacaccacacagtctcacacacacacacacacatgcatactaatcatatataatttatagtcaaaggtgcattttaaatgtaaattttgttaaaaaaaggttttcagattttgggtttatacataattagtattcagtacatcactataggtttatacatttttcagtgtaactagttgtctcgatgaattcttcttatgaaccagttcagtaaaacttatccaattcaatcggaattttattttgttttattttacacaaaagtaacggaaacagtgacactttttcattctgttcggtgataaaaacattaaattggtttccatttgactacaataatgtagtgttttttacatccctagcctccaagtacatgaaatagttactccgctacttacttagtcacgcctatcatctaaaaattaatcacaaaacggtgcacttaccgacactacaaaatttaacacactgttttttttttctaagaacacttttggatatatatatacttggtcactctcttgatatatagtcggatcaattgtgcaggtaggttatctcgagtagcagaagagatagcaaga

SEQ ID NO: 39368 - DNA, 551 bp, Arabidopsis lyrata
  Intron number 1 from transcript 484979 (locus 484979) deri ved from phytozome v7.0 (chr-ID scaffold_5; pos 12349535 t o 12350085 reverse strand)
ggaattttctttgaaatcggtttgatttggccgtgagctcaattttctctcgtttctgttttaagttcgctttcttctcgaattttaattgcttgctagtcgattcaagttgcttctctttggataacgcttctcgctcattatatagatctggagatgaatctcatgtacttgatctttggttttcgtgtgttgttgtggtgtgtgatccgatttatatatctaggacttgaaaatccgatgaagaactcgtaactttgttctgcttcttcgctagttaatctgaaatcaggaagaatctcttgtttttcacttcaaattcaaaatcaagtgttaattcttcgctagtcaattgttcgatctatgtagtgcttcttgtctcgtgatgagtcaaaattgttgtttaattgtctcttccatgtgatggtaatattatccaatttctgtgttgattgatcgttggtttagaaatgtgtttttgaagcgatgtgcatcttctcagtgttttgttctctgtattgatatgataacaggctaacgcggcgtcagga

SEQ ID NO: 39369 - DNA, 396 bp, Arabidopsis lyrata
  Intron number 2 from transcript 355323 (locus 355323) deri ved from phytozome v7.0 (chr-ID scaffold_7; pos 13703072 t o 13703467 reverse strand)
cttcgctgttgggatttgctgctctctctccaaaggtatggatacagagaatcagagatatatcatacttggtctacttgttggagtgatgacaaaagacagattgtctctaatacatttatagtcttggatttttcattgtggatatagtgtttgcatctagatctttgtttcagatgcagtcttggtaatgatctgaaaaagaagatcagggcaagagatgtgattcatgcttttttggtcaagaaacttatttaagctaactctgttttctataactagagttacactattttattgcaaaagaacaatgtgaatttgattgatggttagatctaatttccaagtcttgtgaaaacagggaggattgttctggaggctgcaattctcacatct

SEQ ID NO: 39370 - DNA, 392 bp, Arabidopsis lyrata
  Intron number 1 from transcript 950246 (locus 950246) deri ved from phytozome v7.0 (chr-ID scaffold_8; pos 17233420 t o 17233811 reverse strand)
ctctcctccctcctctcgagatctccctcatcgttcgtatctcttcttcttcgaatcgatttgatttgatgagctttgaaattgaattttgaaagagattatgatctgattgcgttggtatggatattgaattacgaattctggaaattttttagttcgtgtactaagcagctgcatatgttattattagcttgttcttaattttctttatgtttgcttgattctcagtgaagtctttttgttgtttctattttaacatagaaaagtcagatcttgaattgtttgttctgtagctgtgttcgagagagatttagtgtctgtatctatatggattgagagaaaaacttacggattcaggtatatttttttgttttggtagatagaggagcatt

SEQ ID NO: 39371 - DNA, 982 bp, Arabidopsis lyrata
  Intron number 1 from transcript 473935 (locus 473935) deri ved from phytozome v7.0 (chr-ID scaffold_1; pos 24315171 t o 24316152 reverse strand)
gaactccctctctcgttctgctggtaatttcttaaaccttttgcatataagtatattgaaataatattaggatatgatcatgcatgatatatataagatgtaatgtgtacatcgatccagatcaatagaaatcgttaaatgtccatatcctagagttattgtctcaattggatttctcaagtgtgtagcttccccaagagatattagatttgtgtctaccattgatttgaatggttaaactttggtattgaaggattttttatattctcttctcaaacaagtagtcttttttaattttgttcttaagcattttagactaaatctacttttttcttattagaaaatcgttttggattttgtaagtttttatatcatgtgaagtttaatttagaatctatcttataaccaaatgatattaaatggagtagatacaaaaactcttcctcttatcaatatgttgttattcctaatttttatcacatcttatgtgatatatagatacatatacttatttatttttttgaaagaatatatagatacatatatgaatgtgattttgcgtaactatgagaatacttttcttatggctgtgacttctccatgtcggcataatctaaattcctctgtagaattggtaaagtaacaaagaacaagttgacatattcatagttcattattatcattaaaagtatactttcgtatgaaacagattggtcggtccaaatttatttatttttcctttggagttcttttcattagccttttgagtgtggaactcaaacacctttcccaaccatccaatacgataaagcctcatttaattgttatatttattggtttgggaaattggactagtgtccatatactattgactagtgtacattctagttaattcatgttgatatattaattgaatttatattgaaattattttgcaattgagacaggactaaataggacggggaaaagttgcagattgcgg

SEQ ID NO: 39372 - DNA, 459 bp, Arabidopsis lyrata
  Intron number 1 from transcript 912447 (locus 912447) deri ved from phytozome v7.0 (chr-ID scaffold_1; pos 11502828 t o 11503286)
gttcgttttattgtttctaagttcatctttctattcaattacttgtcctatttgtcaatcgcttgatttatcttctgctccttgaggtggtaaattggggataaaccatgtttgtttgttgttgtaatggatccccgaagccctaaaagtatttttgattgcgttcagtatgaatctctttggagatttatggttttcgatgctaggatttggttctagggtttgttttagaatgatttcttcggattaatttgatctttcgtgattgtctcactcgattatcttatggttcgttggtaatttgaaaatttctgttgatgtcttgattcgttttgataattgcgatgttttagctagttatcgaaattttctctatggttttgcatttgttaacacttttcaatttgttccctttttattacagtcgactctgtcagctgcgagggcagataactttta

SEQ ID NO: 39373 - DNA, 745 bp, Arabidopsis lyrata
  Intron number 2 from transcript 933310 (locus 933310) deri ved from phytozome v7.0 (chr-ID scaffold_4; pos 12762118 t o 12762862)
ataaaagtccatttcaacggacatttgctaatcaggtatcaactccatgttctctgtaattctactatattcgagctctgttgtatacttgtatgtgattcagtgcagatagtttttactatattgatgtggtgggacaatatggcttgatatagatgtgtgtgtgtgtatatattaggctcagtacaaaatttgtagaaatatggtgattgttggagtatatcttcgtgaagaatttatctctgagtgtcaccaatatttttgatgtggttcttttactttgttttaaaaaattctacatgatttcttattaagaattcatttatttttgaagtataatcgagatttcttttctagtttgtattacattaactcccacgcaggtagaacttgtttacgaggccatgattacccacaatgagaaactggacatgcattgaaattattggttccttagtcatacgttttatattccatatagtcctagcgtttcttgtgcactttggtttgaaatttctaggagtttgatgtagcttagagatttggagtggatatatatgggctggtctgggtatttacttaattgctgcactgaaaatatgttttccaaaatacaactttgacatgtacaaatgcttattaaccacatttattttcgatatcaagcggtatgtggtgaaaactttctcaggcacagagcttttttgcttatgcaaattcttgggggcttttaacaggtaaaacg

SEQ ID NO: 39374 - DNA, 474 bp, Arabidopsis lyrata
  Intron number 1 from transcript 921743 (locus 921743) deri ved from phytozome v7.0 (chr-ID scaffold_1; pos 11863414 t o 11863887 reverse strand)
gactgtgagtcatcatctgattttactgggtttattagggtcttcattatcgattgttatagttggcttcgatgatctgattaattctggatttgagttaaccgaaacccactttcagtctctagtctccaagttagattattaaaaatcgaaactttgcagaaatggtcaaaaaattgcaaatttttggtatgcgtgatgtgatctcgaggcatatattgtctgaaaaatgggttatatgtcattagaaggatagtaactgattagtctcaggattgttttatgtgtggtgttgtctgtggaaatggtttatgtgattagaaggataatagttagttactgattagtctaaaaatttgtatctgtgtggtttgttcttgatgcatatgtgtgtctggagtgatgggttatgttagaaggattagtaaagtaactgattattctcaatattggttcagggctgctgagattcca

SEQ ID NO: 39375 - DNA, 692 bp, Arabidopsis lyrata
  Intron number 1 from transcript 473178 (locus 473178) deri ved from phytozome v7.0 (chr-ID scaffold_1; pos 13121899 t o 13122590 reverse strand)
ctatcaaattaccgcagcaagaaggtttggtttcaagttacttcctttctgttttttttttctttttctttcttttggataaataattgaactttattgtttctcttacctttttggattctgggtttacagatttattcgtaaagtttcctttttttttttgggttttctttatctgttggaaatgggattttatgattggtacccgcaaaaattccggtgacgttggggtttttcatttttttttaattgaattttttgagtccaaaatctgcaggcgttgattgggtgtgattaggtcaattagggtttattaaatcatttttgattgattatggttttaatccccttgaccattgagtttcattgagaaatgacttgtcgaatctttgtattaaactcttgattaggcctcttttcacatgatgatgatgatgatgatgatgatgatgatgatgacaattttgagttaattataaggcagtgtcttgaaagatcctatataaattgttgaagcaatcgtacatattttttttgttgtggcgatgaagagttgtagataaattgtttatcttgcttaagtgtcatgattgttaaagccaagagtgtatgtaattcttgtttttgctcaagtaattgtacatttgtactgatatatgatgatgtttgcttctgtgcctgtcccttagtcg

SEQ ID NO: 39376 - DNA, 322 bp, Arabidopsis lyrata
  Intron number 3 from transcript 479749 (locus 479749) deri ved from phytozome v7.0 (chr-ID scaffold_3; pos 9973748 to 9974069)
aatctcttcgttggcctactgatttgttcttccaggtacacttcttcttcctccatggaatatttcttacatttttgctaattttctgaaatggaaaacatacaaatctgatttcgtcattgattacgtataaccttaaatattttatttcattctttttatagcaactagtcaatatgttatttgatttttgggaattttgtatattatattgatcacttcgttagttgttaggataattgcaattcttgttgcaatggattgttggtttattgttggtttgattgtgacattgtgaattattgttcaaaacagaggagat

SEQ ID NO: 39377 - DNA, 646 bp, Arabidopsis lyrata
  Intron number 1 from transcript 928586 (locus 928586) deri ved from phytozome v7.0 (chr-ID scaffold_3; pos 3658132 to 3658777)
gctcaatccaaatcttatacgcaattcatttactggtatttctctcttttgctagttttcgatctcaattggtgattccatgtttcgatcggaatgttcttgtgatcttttttttttcttgaattttgattcatctgtgttgaattgaggaatctagggttcttatgctgtcttttcgagaactgagcaaccttgtggttggttgtgaaatgtgaacttggctgcgagatcactagtccgtttcgatacaaactgaaagaaatgttttttttttaagaaaagagtagcctttggatctttgttttaaagtttgagattttaagtttttgtggactttgctctgctccttgaatcccaaaagaacaacaaagttaggttgaataccatttgactacctctagttgtattgttatagctgatcgaaacacggtttatttaggggaaattacttagctgtagatttttgtttgaatttggtgttgcgaggtacaagttcctaaaggtgtgtgtgcattagaagattactcccaagtttctgtgttcttgtttaataacattgcttctggaacactaaaccaggcacttctttgttctcttttttttggggtttatgaagaggtagaagatcaggctatcatcgcagcac

SEQ ID NO: 39378 - DNA, 628 bp, Arabidopsis lyrata
  Intron number 3 from transcript 477631 (locus 477631) deri ved from phytozome v7.0 (chr-ID scaffold_3; pos 1242663 to 1243290)
aggctattttttttttctattcaagtctcgaatttgagtgatgggtgcttccaaaagtggtaaatttccgtgatttatgtattttctcttgtgctttgggatgaattctgaacttctcgatcgaattgtgctactcattgtgtcttggagatcgagtttatctgtttgccattctcgatttgtgtgctttctggagatttttgtttggcttcgctttttctctgtttcacacttataagagatctaagtgtaattttaaaggcgtgatcttttcaccggatttggtattgagtcacattcgtggactgatttttactaattgtatgttgcttaacaaatgtcctcattggagatccttgtttaggttcaaacaatgtacttgttggtagatcatctctttagttctgtttgagtgacactaaatgagattctttgctttttggttggtgcaagtattagtctctaaacgatctttctgtgttttgttttttagaaaaggatcgatgctttccattactcgggtttacttgtttattctttcttctctagatttctcaaagaagctatatgaatattattaatccaatataattcctttttatatgatcaggaattttctacttctctt

SEQ ID NO: 39379 - DNA, 997 bp, Arabidopsis lyrata
  Intron number 5 from transcript 479016 (locus 479016) deri ved from phytozome v7.0 (chr-ID scaffold_3; pos 6590672 to 6591668)
atattgacttccctgaaggtccttttggaacaaaggttagttttgtttctataaccagagatagatatgtcgttactccactttgaataccttaaccttatttttactccaaagttttcacattttcaatgtttctaggcatgttatagattttatgttcatcactaaaactcggggtataagtgaaacaaaccaaggagacacttcagttaacgcaagtattatgaatggtttatgatataagtaagcgaatgtagctgtttcaattatctcaattaacctgaagaagtgtgtatcgtgaaacttattgcttcatcaaaattaatacgagtctagctggtttactgacttatatggatcaacttgcattctttgttatggttcataatattgctttagccagtactactattgcatgcagcaatcactttgttgtgtctttttggaatcttgtctgattgtcaggctaaattatcttgatattactctggtcatatttcaagatttttttgtgaataatgcaattaatattagttcctcgaatgaagcactagcttgggtttgaaactttgaattatatatgaggtttggtgatatcaaaaaatatctaagctgtgtttgttaattttcggtggctcactgcctatgatgcttatgtgcacaatactgacgaaaatttgtggatgtcgcatacaacatgagcaagtttctgtagatcttgaagattcagttcttaacattcttaagaaacttttcttcaaattactgaaaatatgtagaagtatatgactggtggctgacgacttttgtatgctatgtgacataagacatttgattattatatcttaattttattgtgtcattttatctcttgattgagcaatattcattttcttttggctaccattagatacttattttgtcaatttcttgatacacaaactttgatatcattttgtattaccttaggaagctcctgctattgtgaagtcttact

SEQ ID NO: 39380 - DNA, 373 bp, Arabidopsis lyrata
  Intron number 2 from transcript 487656 (locus 487656) deri ved from phytozome v7.0 (chr-ID scaffold_6; pos 3225335 to 3225707)
ctctcgccggcattgccatcaaatacggtgttgaggtataattctttctcttcagctaacgattcatccccaaaattgagaatatatgactttgcttaaggttgttgagtaatattgacatacaacggtatttttaattagagataaaggtagaattaatggtactggtaaaaagcattcagattttttttgtttgtgttggaattgacgaatgatgaagaacacatgcggaaaaggttaattgtcagagagagctggattatttgagattgtttaagctttgcttttgatgctggatttttattcctaatcgttgttctgaattttttttcttgttctcttgtgtcctgaaactttgtacttcaggttgcag

SEQ ID NO: 39381 - DNA, 620 bp, Arabidopsis lyrata
  Intron number 2 from transcript 471744 (locus 471744) deri ved from phytozome v7.0 (chr-ID scaffold_1; pos 6510658 to 6511277)
agaaagaaagcctcttttcatttctccggccagaggtattcattcaatagcttccgttttcttttttctcttcttatgggtgtgaattgatttactcgttgggtctctcgatccccgatgatgttctgtcgttttgcggtttttgtggatgtgatcagaaatttctggtcgcgtttgaatattatgttttttctttttctgggcccaaattatcgaattgatctgtttcttggtttgaaatctgcggatgaattcgaatgttttacatgttgatgagaggatttgacaagtcttagagctgttttgcgataggtgaatagtttcattttattggaccaataaattaaaaccaccatcttctgtatcatttctagttttcagtgggattaagttcatgctcgattaccgtaccatatagactgatttgagctcttccttgtcatgtttccttgatcttttgttgaatgtatctattcgaatgtgatggtttgttgaatctttggctttcatatcatctgtgtcatcttgttgtgtgtttagagaactgagtctatgttgattggaggcagagattatgaattaacactcttttctatttgatttcagtgtgtgtgtgtgag

SEQ ID NO: 39382 - DNA, 344 bp, Arabidopsis lyrata
  Intron number 1 from transcript 924853 (locus 924853) deri ved from phytozome v7.0 (chr-ID scaffold_2; pos 2310732 to 2311075)
caataggtaaactatatcaaccatttagtaatttttagccaaacatttatgttaatttttctgtctccatcctctttcactctaatttgacttcaaaataacactttcattcttcgtttcctttcttatttctttttattaacattatacaaaatgagcaaacaaatcaaaccaaagaatcatatttcgatttttatatatttattggtatactcttgtacaacatttttttataaattatgaacatgttctcgttcttttgaaattgaatatccataatgatgtacttttttttttattaattaataggtcgtagaattccggaacccccagagacttgcttc

SEQ ID NO: 39383 - DNA, 834 bp, Arabidopsis lyrata
  Intron number 3 from transcript 484671 (locus 484671) deri ved from phytozome v7.0 (chr-ID scaffold_5; pos 5345201 to 5346034 reverse strand)
tacagaaggtacaaaatttattaaccttgattagagcctcacaatggtgttatttgatggcatgcacagaactgaactatagtgtatagtttacgaatattatctcacattgaatttttatcaaaattaaaaaaaaaaaaaattagaaatagaactcgtatctttgatttttgtaacactttaatttcaagtagattatagatcttcattttttgacttgagagataaatattcaaattttctactcgaatatttaattgaaagttgaaactaatcgtaaaagcaaataataaggtaacacgactaagttaaagttgtacttatttagaacagatggacttctatatgtatgacttttgtcttaactctaactggttatctcttttgtctgtttttttttaaatataaaataatttcttatttattcttttttttggttcaaaaatttgctgtttattctatcttctatttttgaacaaaattttttgtagtatttttatagactaacgattaacgaaggcaaagtaagagttcttcttaccttagttattgtttctgacttttcatagaacatatgtgtcgaaaacacacaaaagccgcgtatagtgaaacatttataatcagcttttggtcctataaatacgcatttaatacttttggaccagttgatacatgtggtagaaataaggtattaaattattaatagacccaaaactgaataatagtgacacaccaaacttcctagtagtacataagctttcataatatatagttttcatataaatgatttgtgttatagggttcggtgcaagagaagtggcgggataaggttca

SEQ ID NO: 39384 - DNA, 373 bp, Arabidopsis lyrata
  Intron number 4 from transcript 492565 (locus 492565) deri ved from phytozome v7.0 (chr-ID scaffold_7; pos 8348348 to 8348720)
gagtctgcgaggttcgtttccaaaattctctctttttttttcgaattctgaaacataatcgatcaacgttaatgattttgtttgtttcttgtggtaattccacataccctgcttctgattctcgcaaatttgtgattttgttgcattctaaatcttttgcatgctaagtgtttgatgttttgtttctgagaaagaaaaaacaaaggaagaagaaaaattgcatgacgaactattttcaaagttgtaattattgaaatcacaagaaaagttgtgatctttgtaaagaaaatagatttttagagaatgtaattggatctacaattactcatatatgatcattgacttgatttgttttctttgattttgcaggaat

SEQ ID NO: 39385 - DNA, 934 bp, Arabidopsis lyrata
  Intron number 2 from transcript 481646 (locus 481646) deri ved from phytozome v7.0 (chr-ID scaffold_4; pos 11583493 t o 11584426)
tcgcggcgattgatatctcgtgtaaggcttctttcttcactcttatgttcaattttattgttggttaatgtagattgtacttgaattgtgtgttagtgaactttgggattgtgaattttgaaagcaatgtgtgtgtcattttactgtggattatgattctagctttgttttatatgtttttgttgtttcttatcgagtgtgattttgtcatgattttggagataggctatggtgggaatacatttgctttgaattgttctgtaatgtgaattgtgtgatcattctgctggttatcatcaagttttgtttgaatggtcctccaatataatttgtttcacttctttgaatatcatcttcttgttcatcatgatcagtgtgaattgtagttgaattgtgtgttgataatctttgcattgtaattctcagaagcaatgtgtgtcatttgatctagattgtattctagcttgggtttgtatgtcttttctgttgttcttattgagttttggcttcgttttgtatgtaatttgatctagattgtgattctagcttgggtttgtatgtcttttctgttgttcatgttgtaattttgccatgctttggcagagtatggtagcagtaaatttacttcgaattgttctagacagtgagctggttttcatcaagtttctgtttgactgggccttccaatataatgtgttgtacgtgaacgtccatgtctcttattctagtaaatatcatttcgatccgctagaacaatacacatgttattgctttcttaagatcatactactcattttcttcagagttcctatgtttctgtctgatatgtatatcagtgccatcttcttgttcaaatgttgcatttttttgttgctcataattcctttttcaatctgcagcttccgaggaatttttggaacttacaaaaagtgca

SEQ ID NO: 39386 - DNA, 756 bp, Arabidopsis lyrata
  Intron number 2 from transcript 893193 (locus 893193) deri ved from phytozome v7.0 (chr-ID scaffold_6; pos 5173028 to 5173783)
cgtatccatatgcgtcatgtcacgctgatccatatttttttccaaaactcgatctaattgctattatgtgcaaaaatcaccgccgttcacgttcatgttcacgttagcactccatacctaattcacatgtaaacctctctgcctatctctgacttcagctctctcatcttcgagtctccccaagaaagttttgacaccacaccaacatttcattcgtcaaaattaaatcgagtttgcacaaggttacaaccgattaataggtggtcttctaccttctatttacgattttatgctatgaatatatgtttttgtcagggttcaagtcaatctccagattagagacttataatcatccgacgaacaatacgatggcgtgataaccgtttctaaattggtgggttctctttcattgatctacatattattttttttgacgacaaacacgacgatcataccaaaaatttcatctattccggtacgtttgatctttattttaattagtttaacaattaattgccgtttacgattaatttcggttatctaaatcttattaatttgagtaaggttagaatagtattcttttatgtttatattaatgctccgattaataattttcggatatttgacattatcatcttaaatatatcaatattataataaatattttccttttccgattttttttttggtataattccttttccgataaattatgaaacagatctgtttacacaaaaggtaaaaaagaaaaaaaaa

SEQ ID NO: 39387 - DNA, 362 bp, Arabidopsis lyrata
  Intron number 1 from transcript 920705 (locus 920705) deri ved from phytozome v7.0 (chr-ID scaffold_1; pos 7488486 to 7488847 reverse strand)
ctcgcgaatccatcgatttctgtatcaacaaacaggtgatcgatcttaattcctctttttgagtttttcaagggttttgtttctgagagagaagaatgttcattttctaaagagcttatcttttagaaaattcgaattctgggtctaattatgaaatgtgtgcatgttgcttccattatgagaattgacttcgtttcattggaaatttcgattgagattgtaaagtcaccaactttcgattgagagcgtttgaattgtagtccaagttagggccagacaaactctgtttctggcatttcgtattgcttctcaaatttgaatatctgtaatgaagttttgtatttatttccccagggagtggt

SEQ ID NO: 39388 - DNA, 279 bp, Arabidopsis lyrata
  Intron number 2 from transcript 891256 (locus 891256) deri ved from phytozome v7.0 (chr-ID scaffold_7; pos 19499742 t o 19500020)
tgtataaacctattgaaggattactggaactcagaggtgtagataacattcactcgttattcttcaatttcttgaacatgaaaagctttttttgcgattattagttaaaaattgactgcaaaattgttttagaatttgtttgattgatatctgttcttgtatatatttgttgtaacaacactgtaacactgatgatggcaaatttcttattagggttctttaattttagggcaattagagtctctgtttttgttgacagattcacctagaatctcttat

SEQ ID NO: 39389 - DNA, 648 bp, Arabidopsis lyrata
  Intron number 2 from transcript 475189 (locus 475189) deri ved from phytozome v7.0 (chr-ID scaffold_2; pos 2537193 to 2537840 reverse strand)
gtcgagagcttgaagatcttccgctagatattctggttcgtttcttcactaactctttcttaaatctctttctggtttctgggttttgttaatttgcaaagtatcaatcagattgagctgaaagttgaatcctttttcttttttaaatctgagattcaaaatccttttggaaagggaaagtgttcaaattttgtttttgttaactcatttttatctgtttctaatttctgggttctgttaattagttgagattttttattattttagggggtattaatcagatttgagctgaaatttcaattttttttttgtttttcctttgagattcgaaaatcgaaatggaaaatcgaaatgttgaaatttcggttaatttcatcacaaattcatttttatcgttttcagatttttgggtcagtgtattagttgagatttcatagttaattaatcagattgagctaaaatgtttgttttttttggcaaagaaaattgagctaaaatgttcttattggaaatgaaaaaatgttcaaattttccatatctggaaaacttttgtcattgtgcataagattgtttgacatttcatagacatttattgatagatcttgtgatttatattattacaggtgaggattatctgtggggtcgacc

SEQ ID NO: 39390 - DNA, 794 bp, Arabidopsis lyrata
  Intron number 1 from transcript 320417 (locus 320417) deri ved from phytozome v7.0 (chr-ID scaffold_4; pos 6189390 to 6190183)
attccgtattttgaattaagggtttataataaagcagagattggagtttggtttgttgtccatcaactatcacaatgggtgctcttagaagaagaaatgttggtttgattgattcaaagggttgttccaaattgtttcctgttttacaatctcctcctcctactccttcaatgtctcactccaatggtccattctcttctcttgtcatttgcgtcactggtttatccaaaggtaaagactttgttcctttttcaatctctattaggcagaaagtttgaatttttatgttcatcaatattcaagtttcatacttggcaactatttttctagaattttagatgttgttgttgtaactttggttttatgtttgtaaatataaagaatttgttcctttttaatctcgattagtcagatgtttggagatttatgttcatcaatctttaaatttcagatgctgttgtgatcttgttgtatttgtaactttggttttggtgttatgatatgttgttacattgctttgtttctttgcagatgcgagaaaacaagtcaaggaagcgacggagagacttggaggcgagtacagtcctcaccttcacctacgatgtactcatttggttgtccagatatcctttttctcatttctgttcatctttattgtaacttgtagtgttttggtttcgactacagaaccattcatgattatgtccttctaatcctgtaatagaaacatatatctgatcacttgtttgcattttatggtgctttttgagatgcttaacgaaaacttacagctc

SEQ ID NO: 39391 - DNA, 619 bp, Arabidopsis lyrata
  Intron number 1 from transcript 496263 (locus 496263) deri ved from phytozome v7.0 (chr-ID scaffold_8; pos 19875758 t o 19876376 reverse strand)
agggcttcatacgcaagaagcattaccgttgagtatgttgaagctccatcactgtttttttttttttaccatcttcttctctgttttcgtagctttcttcttggttttcttataccatttttgctcctttggttccgtaattcacaagcaagggtgtttcagatctttatctggggatattatgaaagtttagttcttcattggaagagctgattttcgggtgtatctgcatttttgtatcacgcgttttgtactgtgctgaaaatgggtttttggagctgtgtagggtttttgatttagggtttctacttttggaaccttttactaacttgcaatttcaatgagaatccttggctttcgcagcttggctgattacttgttttcgttttttttttttttgattattattggagtgttgtcagatgctttttgacatgagttctggcttgatcaagtcgatcctggacttttctttgatttgagctgcaatcgtgtttagcatcaatgtcttgttcaatgatttttctttttgattccccttggaattgattttttgttctgagtgagctttcctctcttgtttgaactactcaggtttgattgtaaagtcaattaaaag

SEQ ID NO: 39392 - DNA, 543 bp, Arabidopsis lyrata
  Intron number 1 from transcript 893620 (locus 893620) deri ved from phytozome v7.0 (chr-ID scaffold_6; pos 7007228 to 7007770)
gtattggagctggtggaagtcacaaaggaaaaaaagttccaaatcctattaagcaagagcattagcaacgttctcagaatccaagtccacaaaaccctatagtagaagaagaatttgatgaacctataagggtataacatttgtaaatttttttttttgtaagatcattatcacttgctttctttctcttttttcctcatggacctccggtttataaaatttctggttttgaatttttagagctttgttgggttttatagtttttaagctagttttagtaagatagtgtttgctttagatgaagaatatcatctagagttgtttttgcatgatttattatttgtcatttcagtttcctttcactaattaatttttactctcaaactagtctcatcagatggccttaaagctttgatgaacctcaaaggggttgtctctatgtggacgttcccttcttttgataaacagctcatagatccaataaatcaacacatcaaacaatttccagatgtgtcttttttttttttttacaggaatttgggg

SEQ ID NO: 39393 - DNA, 387 bp, Arabidopsis lyrata
  Intron number 2 from transcript 481488 (locus 481488) deri ved from phytozome v7.0 (chr-ID scaffold_4; pos 6214880 to 6215266 reverse strand)
gcctcgaggtagcttggagaatcagctctttcgaagtacgtcatctacttaatttttacctaacttgctaaaaaatgtttcgatttttgttatatatgttctattatagaacttctatatatggcctgtttaaacctaaaagaataactccatgaagacttcacgttttttacgtatacaatgacataaagaaaaaatatttcaaaaagaatccatatgcttcacgttaacttcgtcaagtttttagtttatttaattggtcgtacactacattaataactttttaaaaactatatactatatatcttttgcaatttaaacaatattcaataatattaggtactaactttgaaaagtgtttgaattgggacaggaaatagcttagca

SEQ ID NO: 39394 - DNA, 598 bp, Arabidopsis lyrata
  Intron number 1 from transcript 941349 (locus 941349) deri ved from phytozome v7.0 (chr-ID scaffold_6; pos 7579972 to 7580569 reverse strand)
attctacaaaatctccgtcctctccaaattacagggtttcttcctcaaacccagattatcactttcctaaatttgaaggttttttttattcgatttcaaaatctttctttttttttgtataatctttagtctgctttcaccgacacttggttatcttcctcgagttctctcaatggtttttgtttcttttggtttctctatcaatgaaatgcttaagcttttgctgtcttactctatattgtttctgtgattataagagctcaaaacaagctgctacgagtctaaatctagtgtttggtcttaaatgtgtttctcttctaaagtggcgtaagttaaatttccattttttttcaggtgttcccatcgctgcaaagccttggtactcatgaaagtgttctttagttcttagttatattaatcactaagctcgggaattttaactgtataatcaaagattttaattattaagtaagattacaatcattaactcatcttcccacagagtttacaagttacaaaagttcttgatgtagaagtcttctcttccttttgggttttggcagtatttttggccttcaaggcgttgagaacaaaccag

SEQ ID NO: 39395 - DNA, 494 bp, Arabidopsis lyrata
  Intron number 1 from transcript 482434 (locus 482434) deri ved from phytozome v7.0 (chr-ID scaffold_4; pos 16470297 t o 16470790 reverse strand)
cgtcgatactctcttggaagcatctcctcttcaaggtcctttacactataacttccgatctctttcaaatttttaattacagtgtagtctcctagatctataacatcataaattttccgcaaaaacttttgccgaacttgtctttgttttttttgatacaatgttgttgcatgtttatagaagattaattccatagaaattcttgaattaatttacgtgtttaaacaaaaagcatgtatgcatgcatttaaggtctcgcagcatatatatatatatatatatatatatatatatatatatatatatatatatatccatttgatgtctgcaaaatctgagtattaattagttttttgtcacccaaaaataatctgaatttaggttcaagtctcgtttagctaacaatgcatgttagactgatttctgaatgaaagaacttgaattaacgattttaatccatcaaatcaatgtgactaaatgttttccaaagcact

SEQ ID NO: 39396 - DNA, 507 bp, Arabidopsis lyrata
  Intron number 4 from transcript 915140 (locus 915140) deri ved from phytozome v7.0 (chr-ID scaffold_9; pos 1054165 to 1054671)
gaattctgtggaacccataccatattgtgtatgtcccctttcttcatgctttcctcatgcatttctataaatatttaatacaaacatatcaaaattggtatataaatagaactgatacaaaatttaattggaataatgtcttaataatcatatatatgttggtattatagagtaaccaaacaaacaaaaatacgagaaaaataaatataacaaaaagatgaaaaatgatatatattgaatatgttgtgtaaataactttttctatctttactatactatatacataaggcattataaaaaatatgtttgaaaacaaaaaacctttcttcattacttattgagacataatcaattatgattaattaatttttcgtaaaaataaaacatgtaaaatctgaaggtgatatgtcatattatagagaaaatactcatatctaatattataattcattctaataatatgattatataggttttacgtggacaatattccaataagagtgttca

SEQ ID NO: 39397 - DNA, 496 bp, Arabidopsis lyrata
  Intron number 1 from transcript 486064 (locus 486064) deri ved from phytozome v7.0 (chr-ID scaffold_5; pos 17863680 t o 17864175 reverse strand)
gctcaggtaattttctgactttgatctttttctccatatcttgggtttacgtctggttcttggccatggtacgatggaatactgtttttgagagacattgatctggaagcaggaacgtctttttgtgccatttccaaaaagatgctaacaattgttctaagatagaagcggatgtctaaatcggtcgactaatcggttctaagcatccgattactcagtttttatgataagaaatattttggaattcattaacataaaattgcaaaagaggaaaaaatgagattgattggtctaggttctatctgtatatcgaatgtccgattagcattattttgaaatattcattaaaaaggtgttaattaagcttgatcacaaaagataactgttaattagtgattaaattagctgttgatatagtatttgtaaccggactggtccgatggttctaacatttttggattactaataaatgcagaccgttgtcctcaaagttggt

SEQ ID NO: 39398 - DNA, 638 bp, Arabidopsis lyrata
  Intron number 1 from transcript 897442 (locus 897442) deri ved from phytozome v7.0 (chr-ID scaffold_5; pos 12519219 t o 12519856 reverse strand)
cttcttcctttccatcataaccctctcgctagcaagtaagtgcttatgtttttattttctgagaaaaaattagttacaaagtttatgttaaagaaatttctatcgtcttacacacgtaatataagttcctctttctcaacctaatatggttagcttagtatcaggaagagtcttggattataccgtaatcgaacacattggttttgtttggtattttttttttatgtgatggttaagaaaatgtcaacagtaatgtttgtattacaagatttataactgccatgtgttttttacgatctacaccatcatgaaattctgtttaatcattatatgcaatcggttagcgtaaaacattttagtgagccgccgcaagaattcacaatgcctaactaaatgtataaaccgattcaataagaattggtttatagcctcaatcaatataaatattacttgatgttatttgagcatagagcattatttggccactaagttggacaagcagtaataataccaatttacaacaacaaaaacaaaaacaacttttgtaaatcctttttcgttatccctagctatactcattcatgcattcatgataaatatcaggcgtaaacatagactgtggaacatccgcatctgga

SEQ ID NO: 39399 - DNA, 1010 bp, Arabidopsis lyrata
  Intron number 1 from transcript 889762 (locus 889762) deri ved from phytozome v7.0 (chr-ID scaffold_7; pos 7806356 to 7807365 reverse strand)
aagctgaaaatcttaaggtatgtatatattatttatcaattatgttaggtttagtacgtttttaatctaatttcgagttttcgacaaatgcttagacgtaggtcaacttaacataagtcttacgagtcttagacccatcgtgaccgttccaatgattgttaacagttaacacttacttcataatttccttaattgtctctttccattagtaatcttttaccgaatgtaaaaattatcattcattttaattacgttgaattgtggagaattaacatattttataaaggaaagaatatgggaccaaaaaaaaaaaaattgtcgtggaagaagtaattcattatgacaataaaaataaaatgagtagaaaatgacaaaaatagttatttgctaaattaatgggagccattgttgtgttgaaagggtcactccttcagaaccttatcgtatcttgtccacgataatgtcgattttgtcctttatgacctaagactttggaagactgtgacattaccttattcatttatatgattttttcactaaacgataagaataagaatcgtcgtagttacctaaatgatttctcctaaactgataagagcattagttttttttttttttggtaaaaataagagcattaattagttatctaaatgatataaatttttatttgtttgaattttcaaacatccatgattgcacataagtgtacttgaattgaaatttcctaccacaattactattaagcatttctttttggaatagatatgttttttttttctttgttaaaggaatagaaatattgttccttgatattcatcaattatgagttaaatattaaacagtaatattaaagttggaacttctaaaacaaagtggaaagtctgtttgacaacaaaatgatttggaaaaactggttgacatagtagtaaaaatattttgaaacagtgttataaatcaactgtacgtaataaactatacaagacaacaatattcattttgtggtgtaacag

SEQ ID NO: 39400 - DNA, 730 bp, Arabidopsis lyrata
  Intron number 1 from transcript 951940 (locus 951940) deri ved from phytozome v7.0 (chr-ID scaffold_267; pos 9392 to 10121)
gatccgtcgtcgtccccctcgagccatcgaatccggttagcttgactcatcatagccagaattcgattcgcaggtcgacaataaactgacttgtttgtatttatgggtctttagagattctcaaatatcaagcttcttcaaaattggctttagatctaggaactgctaatacaattgcttaacatctttcgtctatgcattgtatctccgtaaatgggtatattaggttttgattctcagtggcctatatgttatgctatgctagtttagttcaatatcaccacttactctctgtgttgtgcctaactactaagagaaatatgatttctgattttgtttgctttaatgttttgctttagtatcatcacagtttgtatcatcacatatcatcattgttgtgtcgcttgtgattcttgttctttctgcactttgtatctatgtttctcgtatgctatatgcttttactcgttaaagacatggtttgtgattaagatctctggtcagttcttaaatggttgtatgtttgtgttatttcagatggataaagataaaaggaataatgaaacgagaatggtgtggctagtggtggtgatggagaaccttttcttgttacaagaaactgtgaacttcctcctagatggggtggtcctaacggtacaatgcttttggtgtggtgagaagcaattcgtctcccatggctccaataactttgtaatttcttgcagaacag
